United States Patent Application Publication US 2021/0199660 A1 - sequence listing, part 70

SEQ ID NO: 1010616 - DNA, 120 bp, Artificial Sequence
  ENSG00000287841_20 (sequence is synthesized)
ttagactttccagttgccagaactcacaaattgcacaagccaattccttaaaatagatctatctatctatctacctacctatcatctatgtatccatctatctatccatccatccatcta

SEQ ID NO: 1010617 - DNA, 120 bp, Artificial Sequence
  ENSG00000287841_21 (sequence is synthesized)
tccatatctctatctatccattaatccatcctattggttttctttttctagagaactttgactaacataattgtagtatagaacttttcaaaatttaccataaaaaaaaacagtagttaa

SEQ ID NO: 1010618 - DNA, 120 bp, Artificial Sequence
  ENSG00000287841_22 (sequence is synthesized)
ccagatcatagttagttataatcaagatacaagaagatggcttctttccttacaaggtgatctcccacttgtgaaaaaatcattttctgaaagaaggtcttaattagagccattattagc

SEQ ID NO: 1010619 - DNA, 120 bp, Artificial Sequence
  ENSG00000287841_23 (sequence is synthesized)
aagggctcattaacatggatattttaaatttccctctgaaaaattatgttgtagcaacagaggagacatcttgtgaggttcactcaatctattatctattttattttcctgaaaattttt

SEQ ID NO: 1010620 - DNA, 120 bp, Artificial Sequence
  ENSG00000287841_24 (sequence is synthesized)
ttcctatcccatatggtcagaccacttctaatcatgtgtgcactatgtaaaactgacctctggtcattgtttattgggccagaaatgggcactggattcaggcaagattcaccaggtctt

SEQ ID NO: 1010621 - DNA, 120 bp, Artificial Sequence
  ENSG00000287841_25 (sequence is synthesized)
ctctctttagatctgcaggttggttccaaaatctagtttcccttggttactcttgtgaataaagaaaatgctgatttcagagtaaaaggagacttgaatcaaggaaccaaacaaacatgt

SEQ ID NO: 1010622 - DNA, 120 bp, Artificial Sequence
  ENSG00000287841_26 (sequence is synthesized)
aataaaaatcaaagacaacaacttctcatgtcccacaaagacagggagaaagcaaggtcctaaaaataaaattaatgataatgaggttcagttcctgaagcagtttaaatatatgtcttt

SEQ ID NO: 1010623 - DNA, 120 bp, Artificial Sequence
  ENSG00000287841_27 (sequence is synthesized)
cttcagattccatgaaatagcccaatagccttacactaaattcccatctcattttcacacatcttctacttctctgtttttttcttcttcaggttaatttgaatggcttaatcacaagag

SEQ ID NO: 1010624 - DNA, 120 bp, Artificial Sequence
  ENSG00000287841_28 (sequence is synthesized)
ctatgattaagatagacaaccctttttcttctgataaaataaactatgagttttctttcatttactgccttatatttgtattcttaaacactctaaagagataaagtaaattaaattttt

SEQ ID NO: 1010625 - DNA, 120 bp, Artificial Sequence
  ENSG00000287841_29 (sequence is synthesized)
taaaattcactattgcttcacgaatcacagcatcatttttcctaacagcactgaatgtattacctaattcacaacaactcaaatgtaaattttgatttttattcattgttttaagtaaga

SEQ ID NO: 1010626 - DNA, 120 bp, Artificial Sequence
  ENSG00000287840_0 (sequence is synthesized)
tgagtgcatgccctcagctcagtgttcctttttcagtaagagtaagttccttgagtaagtagaagcaaccctgggggagatattacctcatccctcagggttgcttgctggaaacacaac

SEQ ID NO: 1010627 - DNA, 120 bp, Artificial Sequence
  ENSG00000287840_1 (sequence is synthesized)
tatgagaaattcagacaaagagcagtcagagccttgcattcttgacatacccatcaggagcagtctgggccactgcaattcagctctcccaacaatattctgaaaggcaggcactgtgtt

SEQ ID NO: 1010628 - DNA, 120 bp, Artificial Sequence
  ENSG00000287840_2 (sequence is synthesized)
gtaggcatttctgtaccctcagcacctgacatgatgcatgatacacctgattccttagtgtttgtgtggccccagaaggcaggaaccacttctgctacaagttggcaaacaagcatgcct

SEQ ID NO: 1010629 - DNA, 120 bp, Artificial Sequence
  ENSG00000287840_3 (sequence is synthesized)
attcataatcagcgctgcatgcagaagctgccccaagatgagtgggatcacaccctggatgcctaggaagctttctggccccatggaaaaccctaaccaggtcctgctgggtctgcatgc

SEQ ID NO: 1010630 - DNA, 120 bp, Artificial Sequence
  ENSG00000287840_4 (sequence is synthesized)
cctgggttatggccacacagacccacattctctgtgactgtctacacaaggaggtgaaatgcatcaagaaggaaaaccacctgaccaacttccataggccaaaagactcaccctccaaca

SEQ ID NO: 1010631 - DNA, 120 bp, Artificial Sequence
  ENSG00000287840_5 (sequence is synthesized)
caactgggagcctcacagtgcagtgccctgaggcctggctgcagctcccaagccttggggcttctgtccaggtgcctgcctccagcccaaaggcagcttcttaaccaaccacaaaccttc

SEQ ID NO: 1010632 - DNA, 120 bp, Artificial Sequence
  ENSG00000287840_6 (sequence is synthesized)
tctgaagctgcagaccaagtgtaaacaacacagcttctttttttgcagaaacaaaaaatgtgtatcttagacagtgatatacaataaacatagttttttttagtttcagataatcaacaa

SEQ ID NO: 1010633 - DNA, 120 bp, Artificial Sequence
  ENSG00000287843_0 (sequence is synthesized)
gagagctcaatggagtcccgtttcaagacctgggtgaaactcacagcaagaagaaagaaaagcactttgaagaaatggagtcaagggggaaaaggaagactccaccccatctagactaga

SEQ ID NO: 1010634 - DNA, 120 bp, Artificial Sequence
  ENSG00000287843_1 (sequence is synthesized)
tgtatgaataacagaagattgggtttgtagtcatcttccttcaacccctccccttgtccccagctccatacagagaaataacctttaaatgaatacaatttggggaaagtataatactgt

SEQ ID NO: 1010635 - DNA, 120 bp, Artificial Sequence
  ENSG00000287843_2 (sequence is synthesized)
ttgatttcatcagacttacctaggcagtgaattgtctttcctcctttttaccatgctcgtaggttaatattgaattagttgcatatgcccatataatttcagtacattgaagtaaatctt

SEQ ID NO: 1010636 - DNA, 120 bp, Artificial Sequence
  ENSG00000287843_3 (sequence is synthesized)
aactaatactttttttggtgcatgtttatatccacaaaaaaagacttgtagataactgtgatatctgtagataacccaaaatgatagggacaggtgtgaaaagctgggagtgatatggag

SEQ ID NO: 1010637 - DNA, 120 bp, Artificial Sequence
  ENSG00000287843_4 (sequence is synthesized)
taataaaaatctagcatgtgtattatgtaaagaaattacatggaaaatagtaaacttgttcattcaaatgaaaaatgctaaattctgtagattcagtatttatggttttttttcagcttg

SEQ ID NO: 1010638 - DNA, 120 bp, Artificial Sequence
  ENSG00000287843_5 (sequence is synthesized)
ggcatagtgacaaaatattattcaaagtattgtcatccctaacatgttgtctttttatgtaggtgagatggacttaaattatttaaaaagtgaaagtatcttaaaatattattttacttc

SEQ ID NO: 1010639 - DNA, 120 bp, Artificial Sequence
  ENSG00000287843_6 (sequence is synthesized)
ctcattaaaacagatgtttttacattttaaaacttttaaatggatagatgtattataagcaacatgtactttttcaacttttaaaaataaaaaatattgattacagcctctttaaaacaa

SEQ ID NO: 1010640 - DNA, 120 bp, Artificial Sequence
  ENSG00000287842_0 (sequence is synthesized)
aaggacatgagacccagaggaataacctggtgatggacagaagatggaaaaatttcttacatgaatgaatatttttcaggaacacataacaaaggaagatatcgtaaagtggtgtcacat

SEQ ID NO: 1010641 - DNA, 120 bp, Artificial Sequence
  ENSG00000287842_1 (sequence is synthesized)
gatggaatgattcccagccattctgcatcatacatgcatgcctgttcctggatgtttctctgctcagtgacttggtgcttccagccttaagccattgcaactccctgagctcaagagagg

SEQ ID NO: 1010642 - DNA, 120 bp, Artificial Sequence
  ENSG00000287842_2 (sequence is synthesized)
attagacagatattacccagagacaaagaccacagacatttcacaggatgtctctaccagaggttttatcagagaatccttatatctacccatgcctaacacatacctctgaagattcca

SEQ ID NO: 1010643 - DNA, 120 bp, Artificial Sequence
  ENSG00000287842_3 (sequence is synthesized)
agagaatcagcatcatgcattagaaagagcagtagggtcttgagtctgcaggctgggacttcagcaactgtacttgccctaattggtgagcagtaacctctgtgagcttcagtttttata

SEQ ID NO: 1010644 - DNA, 120 bp, Artificial Sequence
  ENSG00000287842_4 (sequence is synthesized)
cttatctacatgcatataatgagtattataatattcaggatttgcaatatttgctctacaaaattgttggtcagatgatatgtaataatgtatctcatatatttggggatttttaagcac

SEQ ID NO: 1010645 - DNA, 120 bp, Artificial Sequence
  ENSG00000287842_5 (sequence is synthesized)
taaacacacatcaagccagggttttctatatggccagacttaacatttttgtagctttgctcccatgaatgtgttaacttactgccattggtaatatttgaaaataaggaaaattgtagg

SEQ ID NO: 1010646 - DNA, 120 bp, Artificial Sequence
  ENSG00000287842_6 (sequence is synthesized)
gaactttttaccaacaaactatgcggttacaaataaattacttagggtatattgataactctaaagaaaggaaaaacagaaagcttcattaataaagaaggaaactctatgcacaataag

SEQ ID NO: 1010647 - DNA, 120 bp, Artificial Sequence
  ENSG00000248954_0 (sequence is synthesized)
tgggacctttcagatccacctgacttggccaggccaccccttcttccctttgtggtagtgatggggggtcttcaggatacacagaaccactgccctctgctccttcccactgttctggga

SEQ ID NO: 1010648 - DNA, 120 bp, Artificial Sequence
  ENSG00000248954_1 (sequence is synthesized)
gctctctcctctgcgaggctttcctggaacctgattggcgaagaccgtttctcctgagctcttttctctgagacatcaccatagatggctatgagtcaagtgcccccatcaaccattcct

SEQ ID NO: 1010649 - DNA, 120 bp, Artificial Sequence
  ENSG00000248954_2 (sequence is synthesized)
gctctgcctgggggcttggagtcccttctgatggacgaatgggtattgactcaactggctttgtatgctgggcaccactttgcaaacagcttacaggatggactgcagtcctcacaacga

SEQ ID NO: 1010650 - DNA, 120 bp, Artificial Sequence
  ENSG00000248954_3 (sequence is synthesized)
tcttcaaagcacgctcggagttgtggccctacggggacccggtgaattcagctgcctgtatgaggtgatgttgttttgccttaaatggtcccctagcctctcccaaagacccctccttac

SEQ ID NO: 1010651 - DNA, 120 bp, Artificial Sequence
  ENSG00000248954_4 (sequence is synthesized)
tcttcccaagaatgtcccaattcctttcccacttgtgccactcattttcaagagaggagatggcccagccctcttctcttccccacctccctcccccaaactgtgtgaccctcagcaccc

SEQ ID NO: 1010652 - DNA, 120 bp, Artificial Sequence
  ENSG00000248954_5 (sequence is synthesized)
agggctcagggggctgccagagatggagaggaggcaaacccaagccagctcctggggtcctacagggagggagggcatgtaaatcttgcctcaccctcttccctcccagccctgctgtca

SEQ ID NO: 1010653 - DNA, 120 bp, Artificial Sequence
  ENSG00000248954_6 (sequence is synthesized)
gctggccagccccatccctggagccaaactgcttccatgcaggagggagggaagcctgctcagtgggaaaagatgaagctggtccccccgcgtgtcagtgaacaaattgggccaatttgg

SEQ ID NO: 1010654 - DNA, 120 bp, Artificial Sequence
  ENSG00000248954_7 (sequence is synthesized)
ttcacatctggccagcagagtcctccccccagccccagcccagcctggctcctgctccccattagaagctattttctctgacggctccatttgtctctgtagtgggggatttgacagctc

SEQ ID NO: 1010655 - DNA, 120 bp, Artificial Sequence
  ENSG00000248954_8 (sequence is synthesized)
cctggccagcctgggaggcctggctctgagtgagaggcccaaggccaggctgtgtgcccacacccttgacctgatgccacgggggatgccatgctccaaacagggcccaggcacctgtat

SEQ ID NO: 1010656 - DNA, 120 bp, Artificial Sequence
  ENSG00000248954_9 (sequence is synthesized)
gggccctgtaggtcccatccctcttctgtgtgcacagatccatagttgaatgggggcctggggagcacagttcactaggctccctgacctgggccccccttgggccttggtcatcttgca

SEQ ID NO: 1010657 - DNA, 120 bp, Artificial Sequence
  ENSG00000248954_10 (sequence is synthesized)
caatgattattgtgttttaagatcaacagagacttgtatgtgtgtgcatggtggtagaggaagcaggggtctggtgtttcctaaaagaaaacagctgggcatgtaataggcgggcctgca

SEQ ID NO: 1010658 - DNA, 120 bp, Artificial Sequence
  ENSG00000248954_11 (sequence is synthesized)
ccccacttccttcaccccttcctcacccctcccagagacctgttgctgcagctacccctcaggaatgcctgtagatggctgtcgcacagctggaaggctcgccccgagaagcggcttcaa

SEQ ID NO: 1010659 - DNA, 120 bp, Artificial Sequence
  ENSG00000248954_12 (sequence is synthesized)
gcagcaactggcctccaggagacggaacccgaagaagtcaagatttttaaatgtctgaaaggacttttggaggaaaaggggaccagcatcagatctctgctcctgctgtcctgggagcct

SEQ ID NO: 1010660 - DNA, 120 bp, Artificial Sequence
  ENSG00000248954_13 (sequence is synthesized)
ggagctgctggggctggttccccatctgtcctgccctcactctacctctcctccaaaggccccttccctacctcagcctctcccttccccttctctgcccatgtacccagaggctggagg

SEQ ID NO: 1010661 - DNA, 120 bp, Artificial Sequence
  ENSG00000277324_0 (sequence is synthesized)
tgccaaatgagcgacaaggtcctcaacttctccaaagttaaaaggcccagaagcctctgcagttttcgtcgggctggctgagggattcccgccccacctcgcccctcacagaggaaagga

SEQ ID NO: 1010662 - DNA, 120 bp, Artificial Sequence
  ENSG00000277324_1 (sequence is synthesized)
cggcgcagataaaccctcgacacgtatttgtagtgtggacgcgccccaccctactcctgctgggtgaagccattcctctagaggtacccgccgcgtaacacaaggcagagggaggcagcc

SEQ ID NO: 1010663 - DNA, 120 bp, Artificial Sequence
  ENSG00000277324_2 (sequence is synthesized)
ctctcttagaggagccgagtggggcggggacggtcgcgccccagtggccgccgccccgagcgtccgcctgccccacccttctcatttacacccaaggaggccgctggctcctctggctgc

SEQ ID NO: 1010664 - DNA, 120 bp, Artificial Sequence
  ENSG00000277324_3 (sequence is synthesized)
ggcgcaccctgcgagctggctgccgcccccacgtccgccagttccatggcccaggcctcggcgtcttcctcgtcgtcgtcgccgccgccttcctcctccggctccacccccagcttctcc

SEQ ID NO: 1010665 - DNA, 120 bp, Artificial Sequence
  ENSG00000277324_4 (sequence is synthesized)
atcccgccgctgccaaccgcagcgctacttccggccgcttccgcctggtctccagggaaaccgggggactacagtctccagtcgctctgtgcctctcgcctgcgcagtcgtggccgacca

SEQ ID NO: 1010666 - DNA, 120 bp, Artificial Sequence
  ENSG00000277324_5 (sequence is synthesized)
gcctgttgcccagagtgacacgcatgccaaggaatcgtggaggcccacgtgcgggagttttttcccgccgggtggaggccggaagcggagagattgaaagcacaaatggctatttttttt

SEQ ID NO: 1010667 - DNA, 120 bp, Artificial Sequence
  ENSG00000277324_6 (sequence is synthesized)
agagattgaaagcacaaatggctattttttttttttttgagacggagtttcgttcttgttgctcaggctggagtgggcaacagtgacgcaataccggctcactgcaacctctgcctcccg

SEQ ID NO: 1010668 - DNA, 68 bp, Artificial Sequence
  ENSG00000277324_7 (sequence is synthesized)
cctcagcctcccaagtagctgggattaacaggcatgcgccatcacgcccagctaatttttttgtatcc

SEQ ID NO: 1010669 - DNA, 120 bp, Artificial Sequence
  ENSG00000277324_8 (sequence is synthesized)
gccactgcgcctggcctttttttttttttcttgaaggctttggagttaggcccacatcacaaattttagcgttttgtctttgttccattcggctgttagcaaacttgcaaatccctagac

SEQ ID NO: 1010670 - DNA, 120 bp, Artificial Sequence
  ENSG00000277324_9 (sequence is synthesized)
ccattcggctgttagcaaacttgcaaatccctagacctgagtgattaatgtgatggggtgggaaggagtgtaactgatagtaaagacacaggtggccttgtaaactcatatgattagcaa

SEQ ID NO: 1010671 - DNA, 120 bp, Artificial Sequence
  ENSG00000277324_10 (sequence is synthesized)
ctatgttaaggtttgctgtgttttgtttgttgttgttttatttaaagacactgtgacgaattcaaccacagaatttttaacatcaaaactgaataggatttgatacatgagtgttgtagt

SEQ ID NO: 1010672 - DNA, 120 bp, Artificial Sequence
  ENSG00000277324_11 (sequence is synthesized)
cagacaaaatctccaatccagaccctccatcatgctgtgtgactttgggcaggttacataactgctgtgagcctcagttgctctactcttaaaaaaaaaaaaaagtattgagattgaatg

SEQ ID NO: 1010673 - DNA, 120 bp, Artificial Sequence
  ENSG00000277324_12 (sequence is synthesized)
aatggataaaagctaccatatactgtaatatcctaatgtatataaaacatgtggcacataggaagtgctcagtaaatgtctattctccttgccttctattaggataccatgtgtgcatgt

SEQ ID NO: 1010674 - DNA, 120 bp, Artificial Sequence
  ENSG00000277324_13 (sequence is synthesized)
gtgtgttggtgtgtgtatgtgtatgttttacaatagaggaaatttggaaattcctccatgcctgtatgtatgtatatacactatatctgtataaatacccaaattaacacatatgtttgg

SEQ ID NO: 1010675 - DNA, 120 bp, Artificial Sequence
  ENSG00000234208_0 (sequence is synthesized)
tttgaggactgggaactgggagcttttgttttacaaacttgaataccactttttttttttttccttttccttacccacctttgccaccgccccccatgactttaaaatgctttttttttt

SEQ ID NO: 1010676 - DNA, 79 bp, Artificial Sequence
  ENSG00000234208_1 (sequence is synthesized)
attgcactctagccttggtatgaacagagataaatccagaaatgtatgctgattattaggacagaagcaatacagcagc

SEQ ID NO: 1010677 - DNA, 120 bp, Artificial Sequence
  ENSG00000274987_0 (sequence is synthesized)
tttggaggagattctttctatcccataaagttttaatttctgttgtattcaaaagcttgccatataaagccaaatatcctgtcttcaaagagtttaacagttagtcattgtgaccaccat

SEQ ID NO: 1010678 - DNA, 120 bp, Artificial Sequence
  ENSG00000274987_1 (sequence is synthesized)
ctatttatgattaaagcaaggttatttaaatttaatggctaaaagcgattttaagccataatacttttcaacctaataatctacagtgtgaaaaatggcactctcaaactggtagtagat

SEQ ID NO: 1010679 - DNA, 120 bp, Artificial Sequence
  ENSG00000274987_2 (sequence is synthesized)
aaaaatatgattctctctgtattttaaagcctgttcaactgagtagtaactataaaaagaaaatctgttaacctcacaatacttccaaacctagacagcagagggagtcttagaaacaaa

SEQ ID NO: 1010680 - DNA, 120 bp, Artificial Sequence
  ENSG00000274987_3 (sequence is synthesized)
tacccaacacattaagttgtataaatcaagccactttaggaacaatgaaaactgggtttttactcattgtaatcactttgtaggatattataaactgtgtaaataaatgtattaaaaaaa

SEQ ID NO: 1010681 - DNA, 120 bp, Artificial Sequence
  ENSG00000248489_0 (sequence is synthesized)
gactgcgcggagaccgctggactctggtcgcggccttagtccgctgatcctcgcttgggtgcccgcccttagcggcccggcgttgaattccgggaagtgggagcttcaggctcgctccgt

SEQ ID NO: 1010682 - DNA, 120 bp, Artificial Sequence
  ENSG00000248489_1 (sequence is synthesized)
gcggaaatagaaaaaaaattctaaaattcatgtggaaccacaaaagaccacgaatagccaaatcaatcttggaaaagaacaaagctggaagcatcccacatcctgacttcaaaatatatt

SEQ ID NO: 1010683 - DNA, 120 bp, Artificial Sequence
  ENSG00000248489_2 (sequence is synthesized)
acaaaactacagtaatcaaaacatatatacaaaaacacatatacaaaaatacatatacaaaaatcagctcaaaataaattaaagatttaaatgtaaggcctgaaacagtaaaactcctag

SEQ ID NO: 1010684 - DNA, 120 bp, Artificial Sequence
  ENSG00000248489_3 (sequence is synthesized)
aagaaaacttaggggaaaaccttcatgacattgatcggcaatgattttgtatatacaacaccaaaaagacaggcagcaaaaacaaaaataagtgggactacatcaaggtacataaacctg

SEQ ID NO: 1010685 - DNA, 120 bp, Artificial Sequence
  ENSG00000248489_4 (sequence is synthesized)
cacagcaagggaaacaatcaacaaagtgaaaaagcaacttacacaatagaagaagatatttgcaaaccacattctgataaaggttaatctccaaaatatacagtgatttcctacaactca

SEQ ID NO: 1010686 - DNA, 120 bp, Artificial Sequence
  ENSG00000248489_5 (sequence is synthesized)
atagtaagaaaatggataaccagattttaaaaaatggtctaaggacttgaacagacatttttccaaagaagacatgcaaatggccaacagatatgtgaaaaacaaatgctcaatgtcata

SEQ ID NO: 1010687 - DNA, 120 bp, Artificial Sequence
  ENSG00000248489_6 (sequence is synthesized)
aatcagggacatgcaatttaaaacgacaatgagataccacctcacacctgtcaggatggttactatcaaaggaaacaaaaaacaagggttggcaagaatgtggagaaactggaacccttg

SEQ ID NO: 1010688 - DNA, 120 bp, Artificial Sequence
  ENSG00000248489_7 (sequence is synthesized)
ttagtgggaatgtaaaatggtgcagttgcagtggaaaacaatagagagcttcctcaaaaaatttaaaaaatgggactactgtgtgattctgcaatcccacttctgactgtatatccaaaa

SEQ ID NO: 1010689 - DNA, 120 bp, Artificial Sequence
  ENSG00000248489_8 (sequence is synthesized)
tttaaagtgtggtacatacaaatggtaaaatattattcagccctaaaaaagaagggaattctacaatatgcaaccactggatgaaccttgaggacattacattaagcaaagcaagccagt

SEQ ID NO: 1010690 - DNA, 120 bp, Artificial Sequence
  ENSG00000248489_9 (sequence is synthesized)
cacagaaggacaaatactgcatgatttcacttatttgagcagagaaacttaatactcccaattcaaaacgcagatggcaccacgcgaggtcagagaaagaggcaagaagttttagtcaac

SEQ ID NO: 1010691 - DNA, 120 bp, Artificial Sequence
  ENSG00000248489_10 (sequence is synthesized)
ctgtctttgattattggcttgccatatgcagtctacgtgtacttgatcatcgcttaactttttagcctgtttctcatgtatgaaacgagaataatgatatccagctcatgggttgtttaa

SEQ ID NO: 1010692 - DNA, 120 bp, Artificial Sequence
  ENSG00000248489_11 (sequence is synthesized)
aggaatacatgacatgataaggtgaagaggaacagatgctgccatgaaaggggtttcctagaaagtggtgaagagaccatagcctaatgcaagtagagaattgggaccaggaaaaataaa

SEQ ID NO: 1010693 - DNA, 120 bp, Artificial Sequence
  ENSG00000248489_12 (sequence is synthesized)
gaccaggaaaaataaagccatgaaataatgagtctgctgtattagagtaatgtggaacaagtgacaatttcattttttaagaatgctgtttgtacaaacaaccccatcaaaaagtgggca

SEQ ID NO: 1010694 - DNA, 120 bp, Artificial Sequence
  ENSG00000248489_13 (sequence is synthesized)
cccagattctcaggcgttcagcctccaactgagagttacaccattggctttcctgattttgaggccttcagacttggtttaagccatgctaccagcatcccagagcatccagtttgcaga

SEQ ID NO: 1010695 - DNA, 120 bp, Artificial Sequence
  ENSG00000248482_0 (sequence is synthesized)
tccaaaccacagagccaccatctctgtctttctctatctggctctcacctgtgattgaagagagggaaggatgacagagtgcccactgggaatgcctttccacccagttctcaacaggag

SEQ ID NO: 1010696 - DNA, 120 bp, Artificial Sequence
  ENSG00000248482_1 (sequence is synthesized)
tcacggcccaggtcagctctgggccagcatcccctgagcacctgctgtctgctagcctgtgtgagctgctttacagaaggacacaccaatgggaagcagcagccctgccttcaggaaggc

SEQ ID NO: 1010697 - DNA, 120 bp, Artificial Sequence
  ENSG00000248482_2 (sequence is synthesized)
cggcccagcccgaggctgcacctcacaataagcccccacctgcaaagaatgtctgtaaatcctggggctctgcacagagcagccggattgcagggaacggcagcaaatcccaggataaaa

SEQ ID NO: 1010698 - DNA, 120 bp, Artificial Sequence
  ENSG00000248482_3 (sequence is synthesized)
gcagaagccatcctgttgacaattcattcgtgtttctcccccaaatccatccacaacagaactgttaagctcatgtttcctctcctgttgcaaacaattgtaaaaatgattggtatctgc

SEQ ID NO: 1010699 - DNA, 120 bp, Artificial Sequence
  ENSG00000248484_0 (sequence is synthesized)
tgcaagatgtggggaaaaagcaaattcacggagtcctctctgcaaatgctgcggggctggtgcctccgacaaggcagatggatgacccgcaattacccgcccggatcccccagcctcacc

SEQ ID NO: 1010700 - DNA, 120 bp, Artificial Sequence
  ENSG00000248484_1 (sequence is synthesized)
ccgctccctcccgcctggtctccaagcaatttcagactttttgtacatccagagcagagattgtgtacgatttctctcgccggcagaagcggctttcaggggttgctaactgcaggatgg

SEQ ID NO: 1010701 - DNA, 120 bp, Artificial Sequence
  ENSG00000248484_2 (sequence is synthesized)
cacccatgacactgttggaatcccgggaaccacccaggcccggtccagcagcaccatctctggactttaaactgatgtcagacaattctctttcagctcatgccaattttaattgggttt

SEQ ID NO: 1010702 - DNA, 120 bp, Artificial Sequence
  ENSG00000248484_3 (sequence is synthesized)
ctgttattacttgcaaccaaagattcctgactgattcagaggatttcgttaggagagttagagcttgagcttccgagaaggatctgaatcaatgattagggagggacaagagtgtgtatt

SEQ ID NO: 1010703 - DNA, 89 bp, Artificial Sequence
  ENSG00000231628_0 (sequence is synthesized)
agaaagcaacagactttgccagaggaggagggcaccttccgaagtaccaggcaagtttcctggggtcttccccccaggctcaagccatc

SEQ ID NO: 1010704 - DNA, 120 bp, Artificial Sequence
  ENSG00000231628_1 (sequence is synthesized)
cttccatttcagcctcgcgagtagctgggactacaagcatgcatcaccatgcccagctaattatttgtagagacagtacagtatttcaccacattgcccatgaaggactggtcttgaact

SEQ ID NO: 1010705 - DNA, 120 bp, Artificial Sequence
  ENSG00000231628_2 (sequence is synthesized)
gcctcccaaagtgctgggatcacaggtatgagccaccatactcaacacccccttcccctactcttgacctgccatttcaggagcatatattctttacttaatttagaaaaggaaatccca

SEQ ID NO: 1010706 - DNA, 120 bp, Artificial Sequence
  ENSG00000231628_3 (sequence is synthesized)
cttaatttagaaaaggaaatcccatatatttgatataaagtataataataccttttgattgttacagtaacaaattaccacaaattttagcagcttgaaacatcacagacttcttatctc

SEQ ID NO: 1010707 - DNA, 120 bp, Artificial Sequence
  ENSG00000231628_4 (sequence is synthesized)
tggaaaaaacctacttgcagtctcgggatgttggcagaatttagttttgtgcggctgtgggacttaggtcctgtttccttgatggctattggttgggggttgctctcaggttctagaggt

SEQ ID NO: 1010708 - DNA, 120 bp, Artificial Sequence
  ENSG00000231628_5 (sequence is synthesized)
cccccttcctccattgtcaaaaccagcaatggcaggctgaatcctttacaagcttccaatttctctgacctccctttctgctgcatccctgactccagccagagaatgtgctcagccttt

SEQ ID NO: 1010709 - DNA, 120 bp, Artificial Sequence
  ENSG00000231628_6 (sequence is synthesized)
aagggtttatgtgatttgggacccctcaagagataatccaaagagcagcagatgaatatcctgctccctgacagcaagcagtatctaggtaagtgtttgaataaccagggtaggaatctt

SEQ ID NO: 1010710 - DNA, 120 bp, Artificial Sequence
  ENSG00000231628_7 (sequence is synthesized)
gggaggccatctgtagaattctgccctaccacattttttgtagtttgttgcttttgttcaagaccatattaaatcaagaaagacaagtaggtagtcccatctcctctccagcagattata

SEQ ID NO: 1010711 - DNA, 120 bp, Artificial Sequence
  ENSG00000231628_8 (sequence is synthesized)
tgcaaatgcaagaccctgacagtgacaaagctcaagcactaatcctgctgtgactgtgttcaactttatatcaaaccactaacaacatatatatgtcaataaaaccttacttgacaagcc

SEQ ID NO: 1010712 - DNA, 120 bp, Artificial Sequence
  ENSG00000231626_0 (sequence is synthesized)
tccaggtgtttctgatgcctgttcaagtttgagaatcaatggactaaagtcttgatgaaccacaaacagcattggaagatcaaatcttccatgtcgcactattgcttctgacaatgtatc

SEQ ID NO: 1010713 - DNA, 120 bp, Artificial Sequence
  ENSG00000231626_1 (sequence is synthesized)
cagggtttcctgcagttctgaacattcacagaaactcgattcaccaccagaatcttaggaggcattttggcgtctgatgcaatttagaacttaaatggagacacaatctgatgcctgacc

SEQ ID NO: 1010714 - DNA, 120 bp, Artificial Sequence
  ENSG00000231626_2 (sequence is synthesized)
tgaattgtttaactataaaatatgttcctattaggaaagtcacatacaacaaaaggaaacatactgtgagagaagactggggaaaaattaaatgacttcccaaagcctaaacctctgaaa

SEQ ID NO: 1010715 - DNA, 120 bp, Artificial Sequence
  ENSG00000231620_0 (sequence is synthesized)
aactagtccgagaaagttagaggatggaaaagagtagaatggtgcaagaaattataggaactaagattagaaaaagagtcaaggaattcttaatggagcttttatatactatgctacaaa

SEQ ID NO: 1010716 - DNA, 120 bp, Artificial Sequence
  ENSG00000231620_1 (sequence is synthesized)
aattgagtttattctggaaataatgacgatgcatcaaaaggttgaaagtggttggaggataaattggatggaacataaaaatattttttaattggaaaatatgaaaatgaggagaatcat

SEQ ID NO: 1010717 - DNA, 120 bp, Artificial Sequence
  ENSG00000231620_2 (sequence is synthesized)
tgcatgttgctgacattatgctctgcagattctcattacaccaagttcttctgtgttcatctgcttcctcaaggccattatccattacatctgtctcagctcagctgatgctctggcagt

SEQ ID NO: 1010718 - DNA, 120 bp, Artificial Sequence
  ENSG00000231620_3 (sequence is synthesized)
ggttctctgcgttgagcattgctgccacacacctttggtctttaaacctgaactggaatgaagcttaaactgaaatgtagagggcaaatggtgtgcaaaacaaactttaagtagtagtga

SEQ ID NO: 1010719 - DNA, 120 bp, Artificial Sequence
  ENSG00000231620_4 (sequence is synthesized)
ttaatctttccaatgaatttttctgtttttagcccattaattttcaataaacattaatgaagtacttatcatgtattagccactatgttacctccaaaaataaagatgatagataaacga

SEQ ID NO: 1010720 - DNA, 120 bp, Artificial Sequence
  ENSG00000231621_0 (sequence is synthesized)
gaagggagagaaattgtacctggcctcctgaaagacgcagcctctgaaatgaatattgaagactggggaggatttaaacaggtagagacggatggaatggacacagggctcgggagcagc

SEQ ID NO: 1010721 - DNA, 120 bp, Artificial Sequence
  ENSG00000231621_1 (sequence is synthesized)
ccgagcctggttagctctgagaccggaagttctgaagtcagctggcatcctacatctgtgcaacctacttctctccccatcccaccacagaaaccagagcctcgaggcttttggcttggg

SEQ ID NO: 1010722 - DNA, 120 bp, Artificial Sequence
  ENSG00000231621_2 (sequence is synthesized)
tgctgccttcacagtttaggttttggtaagaagaaagcttatcttcatgtcatgagaaagaaaaaaaaatgtatctttacgtaacgagctgaaagaacaaaacaagtatacctaagccaa

SEQ ID NO: 1010723 - DNA, 120 bp, Artificial Sequence
  ENSG00000232183_0 (sequence is synthesized)
ttctctgttactaaaccccagaatatctttttctacaaaattgacacagagctgagattttactcaatcattatcccatacgtttctcttactctaattgctaactttacacagcattaa

SEQ ID NO: 1010724 - DNA, 120 bp, Artificial Sequence
  ENSG00000237667_0 (sequence is synthesized)
gctcctgctcctgccgtctagacaaagggcgcacccattgccgtctcagacaccagaggctcccacttgaccaggggaagctgttcatgttctatcctgcgtgttctcgagaaagttttg

SEQ ID NO: 1010725 - DNA, 120 bp, Artificial Sequence
  ENSG00000237667_1 (sequence is synthesized)
atgacagaaaacatcacacagaaaggggaaggcatcgcaagtttccagctccatggatttttgcaaactgagcacatttgtgggccaggagtggggcccacagcgagaatatccttcctg

SEQ ID NO: 1010726 - DNA, 120 bp, Artificial Sequence
  ENSG00000237667_2 (sequence is synthesized)
gctgtgcactgttgagttgatcacgatgagaacagtgagtgtctctcacctgtggctgcacttgctggaagcaccgcctgctctggcctctttgctccagaacattccctgctgaacagt

SEQ ID NO: 1010727 - DNA, 120 bp, Artificial Sequence
  ENSG00000237667_3 (sequence is synthesized)
gacaccagggaaggccaaggatgggcacacaaggctcagtccttcacctgatggcggcttggccatgttcatctttcccttttctcaaagacctgtgtggggccagagaaagctggggtt

SEQ ID NO: 1010728 - DNA, 79 bp, Artificial Sequence
  ENSG00000237667_4 (sequence is synthesized)
cctcgcaggcagcgcgtttacgtcagagctcccgagtccacgcacctcgcaggcagtacgtttacctcagagctcctcc

SEQ ID NO: 1010729 - DNA, 120 bp, Artificial Sequence
  ENSG00000237667_5 (sequence is synthesized)
gttgctggcagggtcggtgtctggtgaaggctgctgtctgtatccaaggtggccttggggcgggtgcctggtcctcactgggtggtaggcggaaggcctgtggcagccttagccgccttc

SEQ ID NO: 1010730 - DNA, 120 bp, Artificial Sequence
  ENSG00000237667_6 (sequence is synthesized)
agtgtggcagaaagcagagccttccactgggaaaaggggaaaaagggaattcttccgaagagaaggatgaagccagcagcaggggtcccggcaggcctgacccccatggagctgatgagg

SEQ ID NO: 1010731 - DNA, 120 bp, Artificial Sequence
  ENSG00000237667_7 (sequence is synthesized)
ccgagtgtcaggaagcactcccattgtcctcgaaaacagacacaggtcaacctgcgttacggggtctgcgaggtcatcagataaccccacagtgtcgaatactgtaactacatgcctgcc

SEQ ID NO: 1010732 - DNA, 120 bp, Artificial Sequence
  ENSG00000237667_8 (sequence is synthesized)
taagatgacctggtatactgtaggtgcacacaagattctccatagtgaaagtacatatacaattgttgctaatttttgatcctagaaaatccactggattgatactttagaagaggataa

SEQ ID NO: 1010733 - DNA, 120 bp, Artificial Sequence
  ENSG00000237667_9 (sequence is synthesized)
cgcccactcgcccctctaagttcccacctcccaaggccgtgtctctggggatgaagtttccaacacacaaacattgggggcaccttcaagccacggtgtcctgtaaaccagcgttccagc

SEQ ID NO: 1010734 - DNA, 120 bp, Artificial Sequence
  ENSG00000237667_10 (sequence is synthesized)
cggaaaattcaaatatttagaaaatactagtttcaatctactgtaaaaatatcataaatttgtactgaactatttttccttattacaaaaatattcgagcaataaaaatgtcggatatta

SEQ ID NO: 1010735 - DNA, 120 bp, Artificial Sequence
  ENSG00000237667_11 (sequence is synthesized)
gctggggaccccatttactctgcaaagaggaggaatgaagctggaagacgagtcgtgcaagcagctgcctttccttttgttcctaagcagagaacgacagatagaaggtgatgcatctcc

SEQ ID NO: 1010736 - DNA, 120 bp, Artificial Sequence
  ENSG00000237667_12 (sequence is synthesized)
acaagcagctgctctatgtccactttgtcttatggaaagtgcagagttgctgggcaggaggtggttgcgcagttgactgttctgcctgtcctttcctcttgccgcatgtggatgaccaca

SEQ ID NO: 1010737 - DNA, 120 bp, Artificial Sequence
  ENSG00000237667_13 (sequence is synthesized)
cccttcctctttcccctccagctcccatttccccttcaactatagaagctcttagcatcatctttggagaaaggcacacaccatggactgtttttgtgattccgtgttgttatttttctc

SEQ ID NO: 1010738 - DNA, 120 bp, Artificial Sequence
  ENSG00000237667_14 (sequence is synthesized)
ctgagcatgcggttaacattggcaaaacaaacttctaaactgattgagacccatctcagatactttttggtttacaacaggaattggggtgaaaccccaccacatttacactatgcagag

SEQ ID NO: 1010739 - DNA, 120 bp, Artificial Sequence
  ENSG00000237667_15 (sequence is synthesized)
ctggaaaagggaggaaagattgaatcttgcccagaggcttaggtcctgaaggttcaattctggatgatcctttcaggtagatttcaaggggaaagcaaaagcatcaaaatgaatccttat

SEQ ID NO: 1010740 - DNA, 120 bp, Artificial Sequence
  ENSG00000237667_16 (sequence is synthesized)
gaagaagcatttctaagcctgaatcttggagacaaaaatatgatgttttcctcaacaacacagagtcagcaggaagaaagataaacattgctgtcctgagctggcacgtgacttatgagg

SEQ ID NO: 1010741 - DNA, 120 bp, Artificial Sequence
  ENSG00000237667_17 (sequence is synthesized)
gttagccatggtgaatctgtatgagtctgcagcaacctcagttcttgtctcctcggaagaaagactttcattgaggggcataggcagaaggagagactaaggcaagttttagtggaggag

SEQ ID NO: 1010742 - DNA, 120 bp, Artificial Sequence
  ENSG00000237667_18 (sequence is synthesized)
agaaagcgtattaaaaagcctagagtgggaacaaaagaaaggaaagtccacttggaagaaggcaagttggtggcttgagcaagtcaagtgtgtggtttgacctttgacttggagttgtat

SEQ ID NO: 1010743 - DNA, 120 bp, Artificial Sequence
  ENSG00000237667_19 (sequence is synthesized)
ccattggcatgctttcagttgcatccctttcccctgattattcccatgcggtgggctgtccgcatgcacagtggcctgccagcccttgggaggggccatgtgcacagtaggtttactgaa

SEQ ID NO: 1010744 - DNA, 120 bp, Artificial Sequence
  ENSG00000237667_20 (sequence is synthesized)
gttgtacgtctgcttgcttgaggcgttcttcccatagtagctgaatattcctggaaggtcatataccagttaaactccaccattttgccttttagtgtgcgtgcttgagcctgctcaccc

SEQ ID NO: 1010745 - DNA, 120 bp, Artificial Sequence
  ENSG00000237667_21 (sequence is synthesized)
tgaccaattattttggagagactgttaaccacctcctggccatcacctgatagttacctgacattcctggccaggggggctctcacgtctgcctgacttcctgctgtagcatttccccct

SEQ ID NO: 1010746 - DNA, 120 bp, Artificial Sequence
  ENSG00000237667_22 (sequence is synthesized)
caagagtccaagaccccaattttgggggaaaatggattaaggtcagtcttctgtaactgcttcctgttgacacacgggcagtggtggtggttctgtgggtcttggcctcttgctgctgtc

SEQ ID NO: 1010747 - DNA, 120 bp, Artificial Sequence
  ENSG00000237667_23 (sequence is synthesized)
agggaaggcagatgactctttaggttggtgaaagcagtgtctagccaggtccaagggagatggggcaagatttcaactctgttgctttacactgatgggcagtctaagggtcctctgtag

SEQ ID NO: 1010748 - DNA, 120 bp, Artificial Sequence
  ENSG00000237667_24 (sequence is synthesized)
aaggatggctcttgaatcttgagaggatggtattccgctgagggtcatctggaacttgatggcctgaaggcaggaggagacatatcaggttattagatttagaagacatggaccatgaag

SEQ ID NO: 1010749 - DNA, 120 bp, Artificial Sequence
  ENSG00000237667_25 (sequence is synthesized)
gagcaaaagtaggagactaacaagtggtcttcaaagggaaaaacccaggagagccatttctaggttccttccccaggttccttttggagaacaagccagccctgagaggcttgttcccac

SEQ ID NO: 1010750 - DNA, 120 bp, Artificial Sequence
  ENSG00000237667_26 (sequence is synthesized)
aaacaagaggctgcatttacaagttgtctgatgttgtcttgtacttttcctgattgatttacccaaaagcaatattttttatttgaggctaaggaaactcctctctgagctgctgtgaac

SEQ ID NO: 1010751 - DNA, 120 bp, Artificial Sequence
  ENSG00000237667_27 (sequence is synthesized)
attagttaacattggtcctacctgttgtgtgttagtgttagtccttaatgatttgaaggactatggctgctaaagagtggatctgctcttgtcagcccttaatgatttgaaggactacgg

SEQ ID NO: 1010752 - DNA, 120 bp, Artificial Sequence
  ENSG00000237667_28 (sequence is synthesized)
ctgctaaagagtggatctgctcttgttagcccttaattccagtatatgcccaaaattagaatattgatccagatttttgcattacccatccctcttgtttcttctgagctgcagccagac

SEQ ID NO: 1010753 - DNA, 120 bp, Artificial Sequence
  ENSG00000237667_29 (sequence is synthesized)
atcatggttggttgataggagtgagcaggatcagtctgaattgcatggaaaaaaaaacctcatgaacaactgatgagactggaatctaataacaggtgtactacagttcttgaaacataa

SEQ ID NO: 1010754 - DNA, 120 bp, Artificial Sequence
  ENSG00000237667_30 (sequence is synthesized)
tttttatctctatagtcctaatttttattaaaatcaaatcatgataggactgattcatttgcaaaataagctttagtcatattatacttggcctgattatttgcataaaacatagcaaga

SEQ ID NO: 1010755 - DNA, 120 bp, Artificial Sequence
  ENSG00000237667_31 (sequence is synthesized)
ataatcataacctctttttaaaattggctttgatagaactttgttccgtaaggaatctcagataagactttttaaagccttgagccctgccatggacttgtgccatcaaatacctgtatt

SEQ ID NO: 1010756 - DNA, 120 bp, Artificial Sequence
  ENSG00000237667_32 (sequence is synthesized)
agctgcataaattcttcttctcttcaggtcccaagataacttgggttcctgggcctcttagaaagtaacgttctttacttactacaggtcaggaaccctgcacagggactgggtagacaa

SEQ ID NO: 1010757 - DNA, 120 bp, Artificial Sequence
  ENSG00000237667_33 (sequence is synthesized)
cacagggactgggtagacaaagtattaggccagttttcccaacaggcctttatcggctctataagtgaactttgattccttaaaagagtctgtttgtggccgggcgcggtggctcacacc

SEQ ID NO: 1010758 - DNA, 120 bp, Artificial Sequence
  ENSG00000237667_34 (sequence is synthesized)
gacgtttaaatcttggctcctgctcctgccgtctagacaaagggcgcacccattgccgtctcagacaccagaggctcccacttgaccaggaaattgacctaacacactccttaatgagag

SEQ ID NO: 1010759 - DNA, 120 bp, Artificial Sequence
  ENSG00000237667_35 (sequence is synthesized)
accagagcgcaggatgttcttgaacgacatggaatcaacccaaataaaatgcctcctgctgtgaaaaatcatagaacgaccacttcagatttccaggctccgggatagcaaagcgtctgt

SEQ ID NO: 1010760 - DNA, 120 bp, Artificial Sequence
  ENSG00000237667_36 (sequence is synthesized)
gaattctacaagacagccagttcccactgggagctgatccattttgtctaaagcaccaactgttttgagcaataagccaaaaacaaggttttacagatggttcgtctcccacaaaggcaa

SEQ ID NO: 1010761 - DNA, 120 bp, Artificial Sequence
  ENSG00000237667_37 (sequence is synthesized)
aataacctatggggcatcatttgacaactccacacgtgggcactgggacaggaacaggtggccaggcctttccttccctgtggtttgtttcctccctttctggccgcagacctcactcag

SEQ ID NO: 1010762 - DNA, 120 bp, Artificial Sequence
  ENSG00000237667_38 (sequence is synthesized)
ttcagtacgtgccaaaggcctggcctcagcatctgccatacgcctcggagcccagccccactcagcttccaagtcaccgggcctgcctggagcaccgagtctctgcaccggctcttccct

SEQ ID NO: 1010763 - DNA, 120 bp, Artificial Sequence
  ENSG00000237667_39 (sequence is synthesized)
cgagacagcatcttctccatggctctggagggccacacgcccaccttacacttcctcacctgctcatttgcaactggaagcttgacgagtgtgatcagccagagagttgattcaccagaa

SEQ ID NO: 1010764 - DNA, 120 bp, Artificial Sequence
  ENSG00000237667_40 (sequence is synthesized)
tgtctgcattctcttacgggctttgcaaatgccaaatcgtcgagtgtttctgcttttaaagtttaaatcctctcgctggtaagcgaataattattcttaaaagtagactctactggaaag

SEQ ID NO: 1010765 - DNA, 120 bp, Artificial Sequence
  ENSG00000237667_41 (sequence is synthesized)
cattaaaaatacatttatgtttcttgaaatgtgttaagtggcctttgtcaaggtgtttataatagaagagtatataaaaatgaatttctctagagatgcagcatactctaaagatccatc

SEQ ID NO: 1010766 - DNA, 120 bp, Artificial Sequence
  ENSG00000237667_42 (sequence is synthesized)
attagataattaaaaatatgtaagtcatgctaacatttccatatataaatggagaacattaactctcctactgtttagttataaaataccaaattttgtaattatcctatcttgaattac

SEQ ID NO: 1010767 - DNA, 120 bp, Artificial Sequence
  ENSG00000237667_43 (sequence is synthesized)
actatactgcaaaaatgccagttactcacttttaaatttgacaatgtatgtgatgaattataaatttaatagcctacatcttttctcttgtatcaaattctcagaacttaatcttaaact

SEQ ID NO: 1010768 - DNA, 120 bp, Artificial Sequence
  ENSG00000237667_44 (sequence is synthesized)
tttgttactggagttaaaaggttgctgctaagatggaaaaataccgatttagaaaaaaataatgtatataatggaaacatctgttaatttaaacatatacattatgcaaatgagcatact

SEQ ID NO: 1010769 - DNA, 120 bp, Artificial Sequence
  ENSG00000237667_45 (sequence is synthesized)
attttgtactttgaggtcagagaggataaaatatacaatgtgtgctctaaatagatttggaacactttataatatcaaagaatttaaaaacggtaagattgtctagctcttccattcatg

SEQ ID NO: 1010770 - DNA, 120 bp, Artificial Sequence
  ENSG00000237667_46 (sequence is synthesized)
ggacaaaaaattaaaaataagaaaaattaagcaatcagttaaagacaacaacagctgggatcctccctgtgactcccaggcgagggccatttctacagcttctccagtgtgtggagtggg

SEQ ID NO: 1010771 - DNA, 120 bp, Artificial Sequence
  ENSG00000237667_47 (sequence is synthesized)
tcagtccttaaactggaagccttgactagcagtgaaacagcccgacaaatgttacctattttctacactttttttcaaatatggtgaaagttgtcagaatgaaagtggagtcgcttttgt

SEQ ID NO: 1010772 - DNA, 120 bp, Artificial Sequence
  ENSG00000237667_48 (sequence is synthesized)
taaaacctggatgagctgagctggggaaggccttggaaggagggctctgctgcacgaatgcctgacagcaagaactatcaccaaagactctgcaaacaccacatccatgcacaaaagccc

SEQ ID NO: 1010773 - DNA, 120 bp, Artificial Sequence
  ENSG00000237667_49 (sequence is synthesized)
caaggacctcgcaagggctctgctgcacgaatgccttgacaacaagagctaaagaccctacagacacgacatccacgtacaaaagccccggagacctcagtcagaaagcacctctgtgag

SEQ ID NO: 1010774 - DNA, 120 bp, Artificial Sequence
  ENSG00000237667_50 (sequence is synthesized)
gacatctgcccagcacctgcctgtcccaccccacactggcaccacccttgctatgggcccttgtaggcaaggataattgtctccaaacaacttacgttttctttaaaaattcttgtcttc

SEQ ID NO: 1010775 - DNA, 120 bp, Artificial Sequence
  ENSG00000237667_51 (sequence is synthesized)
cttgacctccctgaatgtattcactgactcccattgcaatgctcaattcccaaatattcttttcttcagagggtctttctgtctcttatttaggttggcaataataaagtcaaattacaa

SEQ ID NO: 1010776 - DNA, 120 bp, Artificial Sequence
  ENSG00000237667_52 (sequence is synthesized)
tggttccgcctgtgtgctggttccgcctgtgtgccggttccacctgtgtgctggtgttggctctcgacactgtgtcttcttggagcagcgcctggttccgcctgtgtgctggttccacct

SEQ ID NO: 1010777 - DNA, 120 bp, Artificial Sequence
  ENSG00000237667_53 (sequence is synthesized)
gtgtgctggttcctcctgtgtgctggttccgcctgtgtgctggtgtcctcctgttttcagggatgaatggtctctcgacactgtgtcttcttggagcagcgcctggttccgcctgtgtgc

SEQ ID NO: 1010778 - DNA, 77 bp, Artificial Sequence
  ENSG00000237667_54 (sequence is synthesized)
cgacctcgcaggcagcgcgtttacgtgagagctcccgagtccacacacctcgcaggcagcgcgtttacatcagagct

SEQ ID NO: 1010779 - DNA, 120 bp, Artificial Sequence
  ENSG00000237667_55 (sequence is synthesized)
cttttaaagtttaaatcctctcgctggttcaaaatgggtcataaagtagctgagatgacttgaaacatcaacgatgcatttggcctcggagctgctaacgaacgtagagtgcagtggtgg

SEQ ID NO: 1010780 - DNA, 120 bp, Artificial Sequence
  ENSG00000237667_56 (sequence is synthesized)
ttcaagaggttttgcaaaatgatgagggccttgaagatgaagagcgtagtgacaggccatcggaagttgacaatgaccaattgagagcaattatcaagctgatcctcttacaaccacaca

SEQ ID NO: 1010781 - DNA, 120 bp, Artificial Sequence
  ENSG00000237667_57 (sequence is synthesized)
agaagctgccaaagaactcagcgtcggccattctatggtcgtttggcatttgaagcaaactggaaaggtggaaagcttaataagtgggtgcctcgcgagctgagtgaaattttttttaaa

SEQ ID NO: 1010782 - DNA, 120 bp, Artificial Sequence
  ENSG00000237667_58 (sequence is synthesized)
aattgtcattttgaagtgtcttctcattctacacaacaacgaaccgtttctcaatcagactgtgacgtgcgacaaaaagtggattttatacaacaacccgtgatgaccagctcagtggtt

SEQ ID NO: 1010783 - DNA, 120 bp, Artificial Sequence
  ENSG00000237667_59 (sequence is synthesized)
ccaaagccaaacttgcaccaaaaaaggtcctggtcactggtggtctgtgcccgtctgatccactaccgttctgaatccaagtgcagccattacacctgagaagcatgctcaaaaaaccaa

SEQ ID NO: 1010784 - DNA, 120 bp, Artificial Sequence
  ENSG00000237667_60 (sequence is synthesized)
cacctgagaagcatgctcaaaaaaccaatgagatgcacgagaaactgcaatgcctgcagctggcattggtcaataaaaaggacccaactcttctccaccacaatgcctgaccacacgtct

SEQ ID NO: 1010785 - DNA, 120 bp, Artificial Sequence
  ENSG00000237667_61 (sequence is synthesized)
cacaaccaacacttcaaaagttgaatgaattgggctacaaattttgcctcatctgccatattcacctgacctcttgccagccgactaccacttcttcgagcatcttgacaactttttgca

SEQ ID NO: 1010786 - DNA, 120 bp, Artificial Sequence
  ENSG00000237664_0 (sequence is synthesized)
agattattttggattttctacaaacacaatgcacttcctgccgtgcttgtgttgggaaatctgccagaacccacaggagggaaagtctaatgaaagcacgcgcctgctggaaaacgaacc

SEQ ID NO: 1010787 - DNA, 120 bp, Artificial Sequence
  ENSG00000237664_1 (sequence is synthesized)
gctgcgactcccgtccgaagacatgcgggccagtatgagcggagaggttcccagcaccgtcacaagaccctgtgctattattttagactcacctgtggctgttgacaacaccacacacat

SEQ ID NO: 1010788 - DNA, 120 bp, Artificial Sequence
  ENSG00000237664_2 (sequence is synthesized)
gaaatgatgctcaccagaatcaaaatactcagctaaacaaagaattgtgttggtcatgaaattattaccaggagggataaaactccagggtgagccattaaagaatctgaattcaattca

SEQ ID NO: 1010789 - DNA, 120 bp, Artificial Sequence
  ENSG00000257962_0 (sequence is synthesized)
atcagcagcaaagctgtagtttcactaatcctttgctcaccctgcaaggatgagcgtggagaagaagagtggagaagtaacccacaatgtaacttaatttcccagcgagaacctgaaccc

SEQ ID NO: 1010790 - DNA, 120 bp, Artificial Sequence
  ENSG00000257962_1 (sequence is synthesized)
ggaatatttacagtaacaactattaggaaacatgcagtattttgtttgccacgaagccaacttaatcttcagtgtcacaatgcaagttaagatttcctaaatatatttttaaagattttc

SEQ ID NO: 1010791 - DNA, 120 bp, Artificial Sequence
  ENSG00000248228_0 (sequence is synthesized)
ggaatagcccactctacacctaggctatatggaatagcctattgctcctaggcttcaaacccatacagcatggcactatatggaatactgtaggcaattttaacacaatgaatcctgacc

SEQ ID NO: 1010792 - DNA, 120 bp, Artificial Sequence
  ENSG00000248228_1 (sequence is synthesized)
cttgggaatgggatctggagccagtgggaagcattctccgaatatgataatgtggttatcttctgacgagtgctggcattatcacttgttgctaaaaaaacaccaggcttgttctgaggt

SEQ ID NO: 1010793 - DNA, 120 bp, Artificial Sequence
  ENSG00000248228_2 (sequence is synthesized)
accttggaatggaaaatacatgactaagccctgagacaactctgcactgtatcctgctattcttccaactgcaggacctcatggagcgagagatccaaacctttctgaagtactttacct

SEQ ID NO: 1010794 - DNA, 120 bp, Artificial Sequence
  ENSG00000248228_3 (sequence is synthesized)
tctacctttttcatgctactcaggattgaatcaattggaagccaacaaagccattctgtgttactgtgcctcctgactgtcagcacgctgcactgtgcatttagataattctgccagaag

SEQ ID NO: 1010795 - DNA, 120 bp, Artificial Sequence
  ENSG00000248228_4 (sequence is synthesized)
gcatttttataaaaacagctttcaaaatctattcttgaaaagacatttgtatactcattatgccattctatcatttatccatagggagttctgtaaataaaacactgaggtctaatacta

SEQ ID NO: 1010796 - DNA, 120 bp, Artificial Sequence
  ENSG00000259849_0 (sequence is synthesized)
gcctctgactccatgcctcccacacacgcggtctgtgcagctaacaccaggcgcctacccggaggactcagctgttctgtttacatcgtggcggcacctctcaccctgacccacgcaaag

SEQ ID NO: 1010797 - DNA, 120 bp, Artificial Sequence
  ENSG00000259849_1 (sequence is synthesized)
gttctggagatttctggagaatatatttattaaagccacctcttcactgaaagttaccaaaagggtcagtttaggaagtaaatgaagggtcagtgaacagagtcaaacgcagaagtgggc

SEQ ID NO: 1010798 - DNA, 120 bp, Artificial Sequence
  ENSG00000259849_2 (sequence is synthesized)
ttgttatgggtagggctttcagcatatgataaaaggatatttgttttttaaagtgttggaaaaactggttttctacttggaaaaagtaaaggttgtaagctttgtgtgtaaaaaagaaaa

SEQ ID NO: 1010799 - DNA, 120 bp, Artificial Sequence
  ENSG00000259849_3 (sequence is synthesized)
ccatgaaggattggaagggaatgcaggtgtcgtgtttataaccttgtggttcgagtccctcttaacaaggactccaaagctggaaagcaggagggaacaaaggtgaaaattaaggcgggg

SEQ ID NO: 1010800 - DNA, 120 bp, Artificial Sequence
  ENSG00000259849_4 (sequence is synthesized)
atgctcgggccctgcagtgcgctctaggctgtgcttgagccgggactgtgcccgcagcctgctaagggctgctttctcgggccagggaaagcggggcagcgggggacctgcggctgtgcc

SEQ ID NO: 1010801 - DNA, 120 bp, Artificial Sequence
  ENSG00000259849_5 (sequence is synthesized)
tggactgaagccgtcccgcatgtccccaccctccagcatgtgttcacctgtccccctcctcgcagcagcctcaggacaaaacagaatgactcaaggacagcacttcctgcagaaagtcta

SEQ ID NO: 1010802 - DNA, 120 bp, Artificial Sequence
  ENSG00000259849_6 (sequence is synthesized)
gaagtgcccagaatgggaggcacggaagcccctcccagggaggactctccctcattgacggaccattcttggtgcagattcctgactgcacgcaccgaaccgtagacaagcgggcatcca

SEQ ID NO: 1010803 - DNA, 120 bp, Artificial Sequence
  ENSG00000259849_7 (sequence is synthesized)
tccatgttgccccagagtgcccaggaggcaggcagcgcggggcgcccagacagacgggttcagcctgcaggactgcgaggcgacctgtgaaaccgacccaggcatcccaacaagaacaaa

SEQ ID NO: 1010804 - DNA, 120 bp, Artificial Sequence
  ENSG00000259849_8 (sequence is synthesized)
agcgtggtcctgtggccgtgtccacagcaagttccactttcaccttgctcatttctgcattgttggaagtgtttacaaccagcatgtgctttcataatacaacctcaggtaagaaaggaa

SEQ ID NO: 1010805 - DNA, 120 bp, Artificial Sequence
  ENSG00000259849_9 (sequence is synthesized)
aaaaattatagttgtatcatacctcaaatacgtttttaagttctacaatttaagctactctagaatagttagaatagttagaaaatggaaattttgcttaatggtgtttctaatatgaag

SEQ ID NO: 1010806 - DNA, 120 bp, Artificial Sequence
  ENSG00000259849_10 (sequence is synthesized)
ggtacaagaattgtggtaggctctaactgttggcattaatggcatttttcttcatagaaacatgcaaaaaacaaccagtgttagatttctagaatgatcagacctatgcatatgtactta

SEQ ID NO: 1010807 - DNA, 120 bp, Artificial Sequence
  ENSG00000259849_11 (sequence is synthesized)
ttgaaacaattatttctgaggacaatacaggtaatctgcagtagctgaaagcaaattttggagtaaggtaaatttaagtttaaatcctcatgttgtcacttaaaaattatttgactgttg

SEQ ID NO: 1010808 - DNA, 120 bp, Artificial Sequence
  ENSG00000259849_12 (sequence is synthesized)
acaggttattaaatctctgtgtattttgtcacatgtgaagtaaggataatggaatcattttgtataagtaaaagaaaatgtcgtgtagttattcgttgctcaaaaacataccatgaatca

SEQ ID NO: 1010809 - DNA, 120 bp, Artificial Sequence
  ENSG00000259849_13 (sequence is synthesized)
ttggaaggcagggactgtgacctactttccttttcatcctttcatcttagaataatgtctgctaaggtacttaatgtatgctctctgaaaaatgagtgaattaatgaatcttaatgtgtc

SEQ ID NO: 1010810 - DNA, 120 bp, Artificial Sequence
  ENSG00000259849_14 (sequence is synthesized)
tttttcatgccctcataaatatgcatgtttaaatgcaatgaatcttactacataagcattgtttggtagctaggcactcaatacacattatttctactttctcaaggcatgtagaactga

SEQ ID NO: 1010811 - DNA, 120 bp, Artificial Sequence
  ENSG00000259849_15 (sequence is synthesized)
atcgtaatcaatgatcaaaccataagtattctgtatctttagtaaaggctgtgaataaagagtagcattacttgttcattcatttgaacctttattgcatgaacactttgcatcagataa

SEQ ID NO: 1010812 - DNA, 120 bp, Artificial Sequence
  ENSG00000259849_16 (sequence is synthesized)
tataccagcaaatgtactagtgttgttgttgttttggacatttggaaatttctgtttgtcttcatgcagataaagtatcttggtagtaattatttttttcacatgaacatttgaaaacct

SEQ ID NO: 1010813 - DNA, 120 bp, Artificial Sequence
  ENSG00000259849_17 (sequence is synthesized)
gtagaaaaggccgataccttttgctcagagatacctaaaatatattacagggtaataaaataaatcaactagatcaataagtttggtattgttaattttaaagtaactttattttataat

SEQ ID NO: 1010814 - DNA, 120 bp, Artificial Sequence
  ENSG00000259849_18 (sequence is synthesized)
tgacatgtgtagtttgacaaattaaatgcaataccaagcttaaaataaaaatacagtgatactgtcccatcattccccagtcttacttttctatcctgggggcaaacacttttgaatctt

SEQ ID NO: 1010815 - DNA, 120 bp, Artificial Sequence
  ENSG00000259849_19 (sequence is synthesized)
tcagttgcttaatttggcatttatatatctccatagttttatataatatgtaaatatagctattttgatttataaatgttaattattatcaaacttcaagttttagcagaagtgtggtga

SEQ ID NO: 1010816 - DNA, 120 bp, Artificial Sequence
  ENSG00000259849_20 (sequence is synthesized)
tgaatcagttttaaatccatctctcctaaaaactgtagataaatatacacacatacttgtgtgcatgcacacataacacatgaagagtgcttacagttactacactgattgacttcatct

SEQ ID NO: 1010817 - DNA, 120 bp, Artificial Sequence
  ENSG00000259849_21 (sequence is synthesized)
tctggtaagttatagatgaactctttcatgatgccagttctatgtttttcctctttccaatgcctgctattgttatgaaaattttggttaaatcgatattgaataaacatcatgcattca

SEQ ID NO: 1010818 - DNA, 120 bp, Artificial Sequence
  ENSG00000259846_0 (sequence is synthesized)
acacagatgaagatgacatctatggaatcttttccttgcaattgatgcattctttagtccagtaatatcatctcactttgtatccaagagatcctctctgttcatgtagaattcagccaa

SEQ ID NO: 1010819 - DNA, 120 bp, Artificial Sequence
  ENSG00000259846_1 (sequence is synthesized)
acactacaatggatgtggaataaatgagcaacaaatattgaattaataaataaacatcgcactttctgatgaggctggaggctctcacttgatagcagaggataaagagaagaagaaaag

SEQ ID NO: 1010820 - DNA, 120 bp, Artificial Sequence
  ENSG00000259846_2 (sequence is synthesized)
gactgatataggcacaaatctcaagtccacaactatgtgaacgttgacttgtgagaagatccaaatttgctttgcctttgccttccaccatgactgtaagttgcctgagtcctccctggc

SEQ ID NO: 1010821 - DNA, 88 bp, Artificial Sequence
  ENSG00000259846_3 (sequence is synthesized)
tggccatatggacctaaatatgatcctggttcattgcaacctctaccttccagattcaagaaattctcctgcctcagtctcccaagta

SEQ ID NO: 1010822 - DNA, 120 bp, Artificial Sequence
  ENSG00000259847_0 (sequence is synthesized)
ctggggacaaggccagggctaagagggacgagagagccaggaaagtccaggccaagggtgcctcttgaaccttgtggctgaggggagcaggctgttgggatgatcagcagacatggaaag

SEQ ID NO: 1010823 - DNA, 120 bp, Artificial Sequence
  ENSG00000259847_1 (sequence is synthesized)
tccttccagctctacccctgtgtatttcccagcgaatgctctcggattttaggacttacctcctaaaattttcacttggtctaaagcaaaaggccccaggctttctgtcaggagctgcaa

SEQ ID NO: 1010824 - DNA, 120 bp, Artificial Sequence
  ENSG00000259847_2 (sequence is synthesized)
cttttcatctgatgaggagatgaagagatggcacatcagagaaaagtgacaaaggtggcaaaggtgtggagtggtgcgactggcatttccattccagagtgcatcacttcaaaccttaca

SEQ ID NO: 1010825 - DNA, 120 bp, Artificial Sequence
  ENSG00000259847_3 (sequence is synthesized)
ttcctgaggctgttcgtcgaaggcttctcacatctaaactgcagttcatttattgcagagccctgttcacatgggttctcagagacattttcattctcgcttctcaccacgctggagatg

SEQ ID NO: 1010826 - DNA, 120 bp, Artificial Sequence
  ENSG00000259847_4 (sequence is synthesized)
agaactagatgtggttttctagatacagtctacatttccctttgaatctggaagtccggcttcaaggtgaataattcaacagactgtggtacatctataccattaattactatgcagcag

SEQ ID NO: 1010827 - DNA, 120 bp, Artificial Sequence
  ENSG00000259847_5 (sequence is synthesized)
caggggaattatgctgaatgaaaaaaagccagtctcaaaatattacatgctgtatgattccatttatataacatttttgaaatagaaaatcattatggagatggagattagtcattgcca

SEQ ID NO: 1010828 - DNA, 120 bp, Artificial Sequence
  ENSG00000259847_6 (sequence is synthesized)
gacctttgggttggtgtaggggattggtgggataatataaaggatgaaaagaataagacaaataagtagtctgtggcaatgaaaacattctgtgtcttgaattgaatgtggtggtggtgg

SEQ ID NO: 1010829 - DNA, 77 bp, Artificial Sequence
  ENSG00000259847_7 (sequence is synthesized)
gaaaacattctgtgtcttgaattgaatgtggtggtggtggtgtttacccaaatccacgcatgtgataaaactgtata

SEQ ID NO: 1010830 - DNA, 120 bp, Artificial Sequence
  ENSG00000259847_8 (sequence is synthesized)
ttatatcaatgtcaattttctgatgtttttgttgtaccatagttatgtgagatgtcatcattggggaaaagttggtgaaggccatataggacctcttggtacatattttggcaacttcct

SEQ ID NO: 1010831 - DNA, 120 bp, Artificial Sequence
  ENSG00000259847_9 (sequence is synthesized)
gtgagtctatcattatttcaaaataaaaagaaaaaaataataaaaattcccttgagcatagtactcctacaaatgatcaccattattttattccatgaaataaagcctacagttacctcc

SEQ ID NO: 1010832 - DNA, 120 bp, Artificial Sequence
  ENSG00000259847_10 (sequence is synthesized)
ccggcttcaaggtgatccacaaacatccgagaaggaaagaaacttagaggtaaatgattcaatgattcttaaaacctgactgtggcactcttctccaaatacctctgttctcctccatat

SEQ ID NO: 1010833 - DNA, 120 bp, Artificial Sequence
  ENSG00000259847_11 (sequence is synthesized)
ttctcagcccctttgaagaggcaggcccatgggatgaattctgaccaatggatttggctaagatttaagagccagtgcaccatccttcagctaactcttctctccacctgctgcaaggac

SEQ ID NO: 1010834 - DNA, 120 bp, Artificial Sequence
  ENSG00000259847_12 (sequence is synthesized)
ataaacatttcaatggcacaaagatagagcaccttgaattgttactgcaaagaagacatcttttctggagagtcacccaagcagtggatttgtgaataaataaatcttgtgttaaggttc

SEQ ID NO: 1010835 - DNA, 120 bp, Artificial Sequence
  ENSG00000248227_0 (sequence is synthesized)
aattcattgtcccaaattctgagaactcctgaggaaagatccaaaagtaatatggctcaagatttttgaactgcccaggctctactcaggctcttggacatcttgcccatctcaaaggtc

SEQ ID NO: 1010836 - DNA, 120 bp, Artificial Sequence
  ENSG00000248227_1 (sequence is synthesized)
tctcctgcctactgccggccctacccacaagatgtgaacttcagagccttcttgcaactgcttcttggctattttcaccctctaaccctctggaagaagaatgaggactattatgaaggc

SEQ ID NO: 1010837 - DNA, 120 bp, Artificial Sequence
  ENSG00000248227_2 (sequence is synthesized)
gattagcctccagagtaggaagattgggttgttggaagccagcacaagtcttcccctgaaagagttaattcgcctccaatgggggtagggactgacctgggaggggcctcagcctacata

SEQ ID NO: 1010838 - DNA, 120 bp, Artificial Sequence
  ENSG00000248227_3 (sequence is synthesized)
ggacaggcctaaaggccccattggggctgaaggtgacactgggtcagatccctaggattctgcaacttgaggtgggagtgtctataagctggaaacaaaagtttcaaaaaaaaaaaaaaa

SEQ ID NO: 1010839 - DNA, 120 bp, Artificial Sequence
  ENSG00000248221_0 (sequence is synthesized)
agctctgacttagtaattgctattgatgcatttttcaattaagagtgaaaggagttagactcggaatttagtcagtgggctccaaattaaacttggtccagtggaactacctgaaagaaa

SEQ ID NO: 1010840 - DNA, 120 bp, Artificial Sequence
  ENSG00000248221_1 (sequence is synthesized)
aatacaggagtcagcaagaaaaagccaagtggagaacctgactttagagttatggcccaatacgagtggggcatgggccagaatataccctctctgctggctggtcgatctgaaaagagg

SEQ ID NO: 1010841 - DNA, 120 bp, Artificial Sequence
  ENSG00000248221_2 (sequence is synthesized)
taagaagagtgagtaaaggttgggagataggccaggaagactggtccagctgaagtccctccacatgatgcatggcagtggggaataaggaatcccttcacagtggggcaggaggaggta

SEQ ID NO: 1010842 - DNA, 120 bp, Artificial Sequence
  ENSG00000248221_3 (sequence is synthesized)
atgtctaattcgtacgatcgttatggaggggtggaaaccacagagcacacgtcaagcagtttatgcactacctggcacacacgtggcgggtgctctaccatcagtctgatggaagactgt

SEQ ID NO: 1010843 - DNA, 120 bp, Artificial Sequence
  ENSG00000248222_0 (sequence is synthesized)
atgcttttcatcacccgctctcacatcccatctggggcctctgcttccatcctaccatttcgcaagcctggccaactcaagctccgtgtgctgcacctagagcagcccatctctgtgtca

SEQ ID NO: 1010844 - DNA, 120 bp, Artificial Sequence
  ENSG00000248222_1 (sequence is synthesized)
ggagcattcaaggaggaatggcttcatgatggcaatgagcggcatcgcctgaaagacagccttcgagagtctcccagagccgctgaggagcaaggcactacctgctctcactcttctgtt

SEQ ID NO: 1010845 - DNA, 120 bp, Artificial Sequence
  ENSG00000248222_2 (sequence is synthesized)
atcttcaacccatcttctttgccctaaactcctaggctcccccacctacattccaccatattgaagggcttacctgtctggtgccagcaaagacagaggtgagctggtattatgaagtca

SEQ ID NO: 1010846 - DNA, 120 bp, Artificial Sequence
  ENSG00000248222_3 (sequence is synthesized)
gatgcatctttcgaaaggaatgaaagactgaggctgggaaaagggaaagaaatttttttcttcccagtggaaacattcgcatgctacaattggagaatgtgattctgccagctggtcata

SEQ ID NO: 1010847 - DNA, 120 bp, Artificial Sequence
  ENSG00000248222_4 (sequence is synthesized)
ttggggctgtgtcctgacctatggacctcatgtatgcaattctctttctcaaaacatagcttcgaggtaggcataattactcccttttggtgaataaccagtagatggaccagaaaggtg

SEQ ID NO: 1010848 - DNA, 120 bp, Artificial Sequence
  ENSG00000248222_5 (sequence is synthesized)
aagaacatgccagtcacccagctgctaagcctctgagccaggaacttaatcccaagagcagattattgagcgtgaacacagtaccggaactcagcaatgtggagactgcaagatggccag

SEQ ID NO: 1010849 - DNA, 120 bp, Artificial Sequence
  ENSG00000248222_6 (sequence is synthesized)
tcttatttatttgttatgtgcatgacctggtaggcagcagggctggaatttgcctgagatcctgaagtttgaatcttcatccaatatactaccctgcccacaacatgagccgtgggaaga

SEQ ID NO: 1010850 - DNA, 120 bp, Artificial Sequence
  ENSG00000248222_7 (sequence is synthesized)
cagacattctctaacttcaggaggcaaacttttccacgggggagagagctatcagtcaaaaacttctcactgggcagggggtgcaggtacatttttcctgccggaagttgctgaaacgtc

SEQ ID NO: 1010851 - DNA, 120 bp, Artificial Sequence
  ENSG00000248222_8 (sequence is synthesized)
tgggagacttttaaggttgactcggccatgaacctactccagatcctgctgcttccttggtttccagagcaacagcacaggatcgggagaacatacgtggtatcagatttggacagggag

SEQ ID NO: 1010852 - DNA, 120 bp, Artificial Sequence
  ENSG00000248222_9 (sequence is synthesized)
gcgagcagcagtgtttgtcggtgggaacggagtgtgacacacacagcctgggctctgtgccttgcccaagctgtcacacgcaccacatcctccagaagcggggtggtaacagcctggaat

SEQ ID NO: 1010853 - DNA, 120 bp, Artificial Sequence
  ENSG00000248222_10 (sequence is synthesized)
ccaccaaccccttgcctgtctttaaggaagaatagcagtgatgcaagaaagagacaaaataaggaaaaaggcagaaagaggagacattggttcagcttgaagaaattcctaccctgatgt

SEQ ID NO: 1010854 - DNA, 120 bp, Artificial Sequence
  ENSG00000248222_11 (sequence is synthesized)
acacagtatccccacagggccacaggattagagaacaactgccgctcccaaagtctccagacacctccaacccttatgacttggacaacaatttgcaaaattaaattacttctcatgggg

SEQ ID NO: 1010855 - DNA, 120 bp, Artificial Sequence
  ENSG00000248222_12 (sequence is synthesized)
ctagtaaatggatgacaagccattaacatggaaagaagaagaggcatccaaagtgttgggtccgcatcgcccttgccttggaggaagctccaaatagagggaaggatggtttccagcagt

SEQ ID NO: 1010856 - DNA, 120 bp, Artificial Sequence
  ENSG00000248222_13 (sequence is synthesized)
ccctgaagtgcctttcctccttcgtgggatccagttacacccagcagacttcagtttgaataaacagaactagatgaatacacctagggaatctgtgaggccagcctcagcttttaacat

SEQ ID NO: 1010857 - DNA, 120 bp, Artificial Sequence
  ENSG00000248222_14 (sequence is synthesized)
acgcaggggaaatcaaaacaagtccacctgcttaaggagactgccgcactgtgacctcgtcctccggacatctgtggcaagtgttaccgcagccactgatgtggcgcactgggccattta

SEQ ID NO: 1010858 - DNA, 120 bp, Artificial Sequence
  ENSG00000248222_15 (sequence is synthesized)
cagctgcctcatgatattctttttcacgactgtgtttacactattgtttaacaactttgtataacaatctcttttcactccaaataaaccttagtgcctggaaggccaagagtatcttca

SEQ ID NO: 1010859 - DNA, 120 bp, Artificial Sequence
  ENSG00000248222_16 (sequence is synthesized)
tttcatagacagacaggagcattcaaggaggaatggcttcatgatggcaatgagcggcatcgcctgaaagacagccttcgagagtctcccagagccgctgaggagcaaggcaatgaaact

SEQ ID NO: 1010860 - DNA, 120 bp, Artificial Sequence
  ENSG00000248222_17 (sequence is synthesized)
ctgcgtgagaacaagtggtggcattgtccagtgtgtgccctgacatcctcccgaggggagcaaaagccaagccaagaaacaagagagtgagcgctctaagctcaaacatgttaagtacac

SEQ ID NO: 1010861 - DNA, 120 bp, Artificial Sequence
  ENSG00000248222_18 (sequence is synthesized)
tcatagacagacaggtgagaggaggatgctggacatggtcccagagacatggggactcaagaaacatgaagatctgttcacagctaagggcacatttccatgccgagaaatcaggcgtga

SEQ ID NO: 1010862 - DNA, 120 bp, Artificial Sequence
  ENSG00000248222_19 (sequence is synthesized)
gcgcaagagtcctatcgtctaccagaaaaagaaatctttgggagcattcaaggaggaatggcttcatgatggcaatgagcggcatcgcctgaaagacagccttcgagagtctcccagagc

SEQ ID NO: 1010863 - DNA, 120 bp, Artificial Sequence
  ENSG00000248222_20 (sequence is synthesized)
caatttgtaagttcaggaatgtctgctccatctttgcagagacaagcaaatatcagggaccacccaagtccattcattgtgaactaagtgaatcatgacacaaccacacaatggaacacc

SEQ ID NO: 1010864 - DNA, 120 bp, Artificial Sequence
  ENSG00000248222_21 (sequence is synthesized)
gtgcaggattatgatatacagactgctgaagatctagagttattgatatggaaagatgcccatgatgtattgttagcaaaaaaaatcagcctacaaaacaacatgcatagcataatccta

SEQ ID NO: 1010865 - DNA, 120 bp, Artificial Sequence
  ENSG00000248222_22 (sequence is synthesized)
gcaagagtcctatcgtctaccagaaaaagaaatctttgggagaactgcaatccaagcaaatgtggtgggtgtgaagctttcaagaagttgggtcaagaacaaggactgaaagaggagcat

SEQ ID NO: 1010866 - DNA, 120 bp, Artificial Sequence
  ENSG00000248223_0 (sequence is synthesized)
tcaaagagatattccgccaagctagattcgggtgctcccatcttgcacaagttggtcatgtggtcacccaattctttgatggctttgacctgctcattcagcccgctctcccagtcatca

SEQ ID NO: 1010867 - DNA, 120 bp, Artificial Sequence
  ENSG00000248223_1 (sequence is synthesized)
gctctcccagtcatcacagtccggtttcttgatatcctgaaggaagattcggccacctccttggttctgcagcttcatcagtttctcagcatgttccctctcctcatgagattggtgaag

SEQ ID NO: 1010868 - DNA, 120 bp, Artificial Sequence
  ENSG00000248223_2 (sequence is synthesized)
ttcttcaaagccacatcatcgcggtcaaagtagtaagacatggacaggtaaacgcaggaggcgtagagctccaggttgatctggcggttgatggcggcctttagtcctggtggtagtcct

SEQ ID NO: 1010869 - DNA, 120 bp, Artificial Sequence
  ENSG00000248223_3 (sequence is synthesized)
tcatggcggcgactaaggagaggcggctgcgttcgcggtggtgactgcgcagtgctggagcggcggcgggggccttggggcagtccgagggcgcggtgaggaggtgacggagggctggct

SEQ ID NO: 1010870 - DNA, 120 bp, Artificial Sequence
  ENSG00000248223_4 (sequence is synthesized)
atgggcagccggccggtgtgggggacgagcgccaggttctgtccaagcactgttgaagcaggaaaccccgacgactctcgtggaagaacgtccatctctctacttttaagctaagttgaa

SEQ ID NO: 1010871 - DNA, 120 bp, Artificial Sequence
  ENSG00000248223_5 (sequence is synthesized)
gcagtctgttatcctcactgatactcacttccatcaccactattttccccactgtgaaatgactaaaataccatccaccactcctgctctgagaattaaaagataacctacacagagcct

SEQ ID NO: 1010872 - DNA, 120 bp, Artificial Sequence
  ENSG00000248223_6 (sequence is synthesized)
ggcacataggaagcattcagtgaactttttttccttttccttctcttgtccttaaaaatatacaacatgaaattaaataggatgtagtcacactattgaaataaattttcttgtagcaaa

SEQ ID NO: 1010873 - DNA, 120 bp, Artificial Sequence
  ENSG00000240033_0 (sequence is synthesized)
ctgtctccaagtcttcagaggaagtattctgtggccaccccagaaggactgcctcatccagtgaagacaacagaaatgcctccctgagagctctgcttggtctgtgtactgctcaatttc

SEQ ID NO: 1010874 - DNA, 120 bp, Artificial Sequence
  ENSG00000240033_1 (sequence is synthesized)
cccacccaacctggagtgggactacatcaaacttaaaagcttctgcacagcaaataagacaatcaacagagtgaaaagacaacctatacaatgggaaaagatattttgccaactatgtat

SEQ ID NO: 1010875 - DNA, 120 bp, Artificial Sequence
  ENSG00000240033_2 (sequence is synthesized)
ctgacaagaagataatttccaaaatatataagaaactcttacaacttaacagcaaaagaaagaaagaaagaaaagaaagaaggaaagagaaaatgaagaaagaagaaaagaaagagagaa

SEQ ID NO: 1010876 - DNA, 120 bp, Artificial Sequence
  ENSG00000240033_3 (sequence is synthesized)
ataagtgcatgaagaggtgtttcacactactaatcattagggaaacacaaaccaaaaccacaatgaggtatcatcttatacttgttttaagatggctattaataaaaacatgcgaaataa

SEQ ID NO: 1010877 - DNA, 120 bp, Artificial Sequence
  ENSG00000240033_4 (sequence is synthesized)
gtatcggtgaggatgtggagaaattggaactcttgtacattatgggaacataaaatggtgcgatagctacggaacacagaaaaaaaggttcctcaaaagattaactgctatatgatctag

SEQ ID NO: 1010878 - DNA, 120 bp, Artificial Sequence
  ENSG00000240033_5 (sequence is synthesized)
caattccacttctggtcatatatccaaaagaattgaattcagaatttcaaagagagctccatacacattgcattattatttacaatagctaagatatagaaaaaatttaagtgtccattg

SEQ ID NO: 1010879 - DNA, 120 bp, Artificial Sequence
  ENSG00000240032_0 (sequence is synthesized)
tctctattatgggtcaggcactgttccaggcaccaaggatatgttgatgaagaagacattatagtcactgtgagatggacttaaaaagataaggaagttggttctactcctgttctcttc

SEQ ID NO: 1010880 - DNA, 120 bp, Artificial Sequence
  ENSG00000240032_1 (sequence is synthesized)
tttggcgacacttaatacccaaagaaaatttctactatccatcaactaggataaggagacattttagtaatgatttgtgaattatgttactgtacatcaggaatggttttcaaaatatgt

SEQ ID NO: 1010881 - DNA, 120 bp, Artificial Sequence
  ENSG00000240032_2 (sequence is synthesized)
ttcaaagacatctcccagacaggcaataacaaatgcttgagaggatgtggagaaaagggacccctccacattgggaccactgctgttgagaatgtaattaattacaaccactatggagta

SEQ ID NO: 1010882 - DNA, 120 bp, Artificial Sequence
  ENSG00000240032_3 (sequence is synthesized)
cagtttggaggttcctcaaaaaaactaaaaatggagctgccatatgatacagcaattccagtgcttgatatatacccagaagaaaaagaaatcagtgtgccgaagcaatatctgcactcc

SEQ ID NO: 1010883 - DNA, 120 bp, Artificial Sequence
  ENSG00000240032_4 (sequence is synthesized)
tgtgtttgttgcagcactgttcacaataggtaagatttggagacagcctaaatgtccatccacagatgtatggatatatttttgttttattcttaatatattaaaatagatcaggaaaca

SEQ ID NO: 1010884 - DNA, 120 bp, Artificial Sequence
  ENSG00000246422_0 (sequence is synthesized)
agtacatgattccccagcttcaataatggactaatgacccccggaatcccaccgctatagcctgcacttccccaggaattcctgtttaaggcgtctctcaatgaagaccacaaacaggaa

SEQ ID NO: 1010885 - DNA, 120 bp, Artificial Sequence
  ENSG00000246422_1 (sequence is synthesized)
atggaggagtggggagttgcctgacatcctggaaactacgttcttaaagaactgcaggcaatgggcgagagttctaatacatggaacagttacaggacactaagttctagagcaattcat

SEQ ID NO: 1010886 - DNA, 120 bp, Artificial Sequence
  ENSG00000246422_2 (sequence is synthesized)
ctccagaacaaaaactgaaatggaagcaagaaaaaaataagtttctcacaactccttccgtgttgtacaagccccagtccagcacaatactctgccctaatcactctgccctccatccat

SEQ ID NO: 1010887 - DNA, 120 bp, Artificial Sequence
  ENSG00000246422_3 (sequence is synthesized)
cctctccagcagagtcaatctctaagtggttccgagctagttcactgaccacagaggacttcttcaaaatgtccttctaagatggctactgagaagtttggaagatggcaagaaaagtgc

SEQ ID NO: 1010888 - DNA, 120 bp, Artificial Sequence
  ENSG00000246422_4 (sequence is synthesized)
ctctgaaacagtgactccaaaattgactgccaagtcaacagaaaatgttgaattgtttcctaatcaatctcatatgacctccataagaacagggataatacttatataatacctattcag

SEQ ID NO: 1010889 - DNA, 120 bp, Artificial Sequence
  ENSG00000246422_5 (sequence is synthesized)
atacagataccaaaatattattaagagaacaggtgaagagtggcttaattcacaccattaacatgtaaacatgttacatgttacaaacatgctcctcatgtaatccttatactaaagttt

SEQ ID NO: 1010890 - DNA, 120 bp, Artificial Sequence
  ENSG00000246422_6 (sequence is synthesized)
gagatttactggtatcaacagacatttaaggctaggaactgactgtaccaagatgttagaagtttaagtaatactgaccccccaactagatggtctaagtctcagacaatgacatttaaa

SEQ ID NO: 1010891 - DNA, 120 bp, Artificial Sequence
  ENSG00000246422_7 (sequence is synthesized)
aggacatttggttagaaataaaatctggaatccacagataatggcagatggtaccttggacttaaaagataccatttcagtctatatgtttctagaaaagagtaatacaggcacacacta

SEQ ID NO: 1010892 - DNA, 120 bp, Artificial Sequence
  ENSG00000246422_8 (sequence is synthesized)
aagctgggatggctagaaagaggctctaaaaatgagactagctggggataattaggagttaacatatgacacaaagggttgactttgaccgtgaaaatctttctgcaccagcatattcta

SEQ ID NO: 1010893 - DNA, 120 bp, Artificial Sequence
  ENSG00000246422_9 (sequence is synthesized)
tccaagttagaccaggggaattccctgaagaaatggattcagtatgttatctcaagctagttatccatatataatgtgggtaggttctattatgcgcttaaagtagtttttcagcagaaa

SEQ ID NO: 1010894 - DNA, 120 bp, Artificial Sequence
  ENSG00000246422_10 (sequence is synthesized)
ttgagccctctcaaaggaaggctatgctttcatgaaggtatcagactaaagaacaaaaacctttccagcctctggaccccaaaaagaacacgaatattgctactattgaaaatactagct

SEQ ID NO: 1010895 - DNA, 120 bp, Artificial Sequence
  ENSG00000246422_11 (sequence is synthesized)
gcaacaggacaagatccttttgtaaaagggcaagctgtagctttctgcataatttaactgctgatcagtcctccaaataaatttcctgacaggtagagggcagtatactaatcagcttgt

SEQ ID NO: 1010896 - DNA, 120 bp, Artificial Sequence
  ENSG00000246422_12 (sequence is synthesized)
atttggaaaggacagaggttgcctctctctaacgtgatgacatcactaccaaacgcaacaatgacacatctaaaataaaagggatccatgtgccatctggtggctgaaagcagtaaagca

SEQ ID NO: 1010897 - DNA, 120 bp, Artificial Sequence
  ENSG00000246422_13 (sequence is synthesized)
cactgctagaaataaaatatcaaattcccacggttgagaagaaaattaaaacttaattcctttacctgatgatgcagtcccttaaatctccaatagtaagtcttctgtggaaactacatc

SEQ ID NO: 1010898 - DNA, 120 bp, Artificial Sequence
  ENSG00000246422_14 (sequence is synthesized)
agcagccttcgcgcaatagttttaaagttttgccccagtttagctctatactcctaaacactggctgtaagcaagcagcagctcctgatgcctgacctttggtgcatagagtaagagaat

SEQ ID NO: 1010899 - DNA, 120 bp, Artificial Sequence
  ENSG00000246422_15 (sequence is synthesized)
gaaactcagaccaaaacaaacaaaataacaaaaggacctggaaggctgtcagaaacaaaagaagagtttgacatgacagataacaccaaagacagcttattgcaaggaaaaaaagtaaca

SEQ ID NO: 1010900 - DNA, 120 bp, Artificial Sequence
  ENSG00000246422_16 (sequence is synthesized)
gaaccagaagtttaaaactgaaagataccttttaggttcatgtatctcactttacagatagagtcaaggtaagaaagataacccctggtgcaatcttattagtggtcagactaaaacaac

SEQ ID NO: 1010901 - DNA, 120 bp, Artificial Sequence
  ENSG00000246422_17 (sequence is synthesized)
atatcacttttcccctactagacattaccataaatatttttttatttttcgtggaagtataaattgctacaatcttatacctagcaacttgggcccacagattttatttttaagaattta

SEQ ID NO: 1010902 - DNA, 120 bp, Artificial Sequence
  ENSG00000246422_18 (sequence is synthesized)
ctgtgcagaaatacaagtttgcaaagacaattaaaaatggatgtttccttcagcattgcttgtaataaaaaaatggaaaacttatttgtattatatgacagaatacaactatcagaaata

SEQ ID NO: 1010903 - DNA, 120 bp, Artificial Sequence
  ENSG00000246422_19 (sequence is synthesized)
atgacacaaatctatatgtaaggacatcgagatgctaaaacacgttaagcaaaatacaaaacagtatatactgtataagatcacaccaattatattaaaaaagaagtgtgtataccttca

SEQ ID NO: 1010904 - DNA, 120 bp, Artificial Sequence
  ENSG00000214293_0 (sequence is synthesized)
ttcggaggtcagagctcggcggggtgcggctagtggcggagcgcgctgcgaggggagggctttccactgtcgctggcgtgaactcgcgtgcccggtgggtatcagggaagaacccccgcc

SEQ ID NO: 1010905 - DNA, 120 bp, Artificial Sequence
  ENSG00000214293_1 (sequence is synthesized)
ccggacccccagatctgccatggccgaggtagcgatcgtctctgcggccacgaagactgttttaacttgtaccactttcccttccatttttcctggggtgcctctcaccctgcatctgcg

SEQ ID NO: 1010906 - DNA, 120 bp, Artificial Sequence
  ENSG00000214293_2 (sequence is synthesized)
cgttcagcaagctggatttcgggaatgctcagttcagaagagaaaaaattgccgggaatcaagtccttctttttgttagtcggtagtcgattgatgggaagtgttcaaaatcattcgatg

SEQ ID NO: 1010907 - DNA, 120 bp, Artificial Sequence
  ENSG00000214293_3 (sequence is synthesized)
tggtgacaaggcttcaccaggtactgccttctaacgagctggccatttccacatgtcagataggaccaacttgccttttaactacccgtgtgatacttaaacactgttgccggtatcaca

SEQ ID NO: 1010908 - DNA, 120 bp, Artificial Sequence
  ENSG00000214293_4 (sequence is synthesized)
gcttttcttcaaaacaggaagcaacgagaatgagggcattccagtagcaggagacagcatgcatagagatgctgatgaagaaagagcctagcgcacgtgggaaactgcaaaagttcagac

SEQ ID NO: 1010909 - DNA, 120 bp, Artificial Sequence
  ENSG00000214293_5 (sequence is synthesized)
tggttggaatgctggaaatgttgtgaatgacaggagatgaggctggcgagaaaacagaggtcagattgtggaaggctgtcaagccaaagactttgattttattcttgagattgatgagat

SEQ ID NO: 1010910 - DNA, 120 bp, Artificial Sequence
  ENSG00000214293_6 (sequence is synthesized)
gtgtgtaatccaggagtgtgcaaaacaatctgtaagggttcagaaaacatactgcttctatatatagttacctttgtcttaacttgaaaatttcaaattgtgtaggagttacaatgtgtg

SEQ ID NO: 1010911 - DNA, 120 bp, Artificial Sequence
  ENSG00000214293_7 (sequence is synthesized)
taattgttattatagtactggatccaaataatttataaataaataaatatagacataatatggtgtattacaggttaaattgtgtacctcaaaaattcatgtttaagttctaaccctcat

SEQ ID NO: 1010912 - DNA, 120 bp, Artificial Sequence
  ENSG00000214293_8 (sequence is synthesized)
aagttctaaccctcattatctcaaactgtgaccttatttggaaatactatcattgcagatgcaatagttaatgaggtcaagttaagaagcaataggaggccaggcatggtggctcacacc

SEQ ID NO: 1010913 - DNA, 78 bp, Artificial Sequence
  ENSG00000214293_9 (sequence is synthesized)
ggtggatcacctgaagtcaggagatcaagagcacaaattaggctgggcttgatgtctcacacctgtaatcccagcact

SEQ ID NO: 1010914 - DNA, 60 bp, Artificial Sequence
  ENSG00000214293_10 (sequence is synthesized)
catctctactaaaaatacaaaaattattttgtattttggtggcggacacctgtatttgca

SEQ ID NO: 1010915 - DNA, 120 bp, Artificial Sequence
  ENSG00000214293_11 (sequence is synthesized)
taggagacagggctagactctgtctcaaacaaacaagcaaacaaacaaaagaaagaagaaaagaaggagcgaaaaggtgggcccccaatccctaatccagtatgactaatgtccttccaa

SEQ ID NO: 1010916 - DNA, 120 bp, Artificial Sequence
  ENSG00000214293_12 (sequence is synthesized)
cttttgaaggtaaaggcggacattggggtaatgcttttacaagccaaggaactccgaaggtagccagcaaactgtcagaagctaggcgagggtcctgggacagattctcctcacagccct

SEQ ID NO: 1010917 - DNA, 120 bp, Artificial Sequence
  ENSG00000214293_13 (sequence is synthesized)
cagaaggaatcagtcccgctgacaccttgatcttggacttgtagcctcaggaactgtgaggcaaatgtctgttgtttaaactatccagtttgtgatactttgttacagcagccctagcaa

SEQ ID NO: 1010918 - DNA, 120 bp, Artificial Sequence
  ENSG00000214293_14 (sequence is synthesized)
attgagctacttggtcaaaaacttcaggcaacactgatgagatgatgtaaaggctttaaagagttggtttatgtttaagagtccaaattatcaacgtcctatctttactcagtctctgta

SEQ ID NO: 1010919 - DNA, 120 bp, Artificial Sequence
  ENSG00000214293_15 (sequence is synthesized)
ttcaagaattgaccttaggccaggtgcagtagttcacgcctgtaatcccaatactttgggatgccaaggtaggaggattgcttgaggtcaggagtttgagatcagcccttgtatattagt

SEQ ID NO: 1010920 - DNA, 85 bp, Artificial Sequence
  ENSG00000214293_16 (sequence is synthesized)
ggttccatgtggctggagaggcctcaatcatggcggaaggtgaaaggcatgtcttaggtggcggcagacaaaagagaaatgagag

SEQ ID NO: 1010921 - DNA, 120 bp, Artificial Sequence
  ENSG00000214293_17 (sequence is synthesized)
catgtggctggagaggcctcaatcatggcggaaggtgaaaggcatgtcttaggtggcggcagacaaaagagaaatgagagccaagtgagaagggaaaccccttataaaatcatcagatct

SEQ ID NO: 1010922 - DNA, 120 bp, Artificial Sequence
  ENSG00000214293_18 (sequence is synthesized)
gcgtccccatgattcagttcccaccgggtccctcccaccacatgtgggagttctgggagctacaattgaagatgagatttgagtggggacaaagccaaaccatatcaccttttctctact

SEQ ID NO: 1010923 - DNA, 120 bp, Artificial Sequence
  ENSG00000214293_19 (sequence is synthesized)
aaaaattaaaattaattaaaaaattaagctggcatggtactatatgtctgtagtcctagctacttgggatgccgaggtgggaggattgcttgagcccacgaggttgaggctgcagtgagt

SEQ ID NO: 1010924 - DNA, 120 bp, Artificial Sequence
  ENSG00000214293_20 (sequence is synthesized)
cactccagcctggacaacagagcaaggccctgatgcaaaaaacaaaaaataataatttaacttaaagtgatgtcttgattgcagtgtttattctactttttaaagccattgtggtgggaa

SEQ ID NO: 1010925 - DNA, 120 bp, Artificial Sequence
  ENSG00000214293_21 (sequence is synthesized)
gccattgtggtgggaaaacaatttgtttacatttgtagtacagtttatgttaaaggttgaagaaattgggaaatattttatctttaactcaagacaggatggtgatatgcaacagttata

SEQ ID NO: 1010926 - DNA, 120 bp, Artificial Sequence
  ENSG00000214293_22 (sequence is synthesized)
ggcaaaaaatatttacatttaagaaaaaaagtatcatttaatcccattaggcagaagtggagtcaaaagcaaaaatatggctggttatggatgtatgtttcccttcctgttcatatgttg

SEQ ID NO: 1010927 - DNA, 120 bp, Artificial Sequence
  ENSG00000214293_23 (sequence is synthesized)
aaacctaattcccaatgtgatgggttttggagatggggtctttgggaggtaataggtcatgagagtggaaccctcgtggatgggattagtgccatataagaagagtccatagagctagct

SEQ ID NO: 1010928 - DNA, 120 bp, Artificial Sequence
  ENSG00000214293_24 (sequence is synthesized)
cactccctttctgccatgtgaggatacaagaagtcggcctggaaaagagccctcaccagaaccctacaatggcactctgatcttggacattcggcctccggagctgtgagaaataaattg

SEQ ID NO: 1010929 - DNA, 120 bp, Artificial Sequence
  ENSG00000214293_25 (sequence is synthesized)
aattgttagaattttaaatgtcatattcattttactcaactaatctctttagctttcctatttatattcctacttatgattacgtgtaattctcattggaaggattaaaatattttgaaa

SEQ ID NO: 1010930 - DNA, 120 bp, Artificial Sequence
  ENSG00000214293_26 (sequence is synthesized)
gtaagacagtaaaattgtgaaatactttggtattggttacaaaacagtacttaggtaccttcttcctgatttttctgtatttttaaaaaataaggccaggcacagtggcaaatgcttata

SEQ ID NO: 1010931 - DNA, 120 bp, Artificial Sequence
  ENSG00000214293_27 (sequence is synthesized)
ttcccaactgcccagtaagctgaagcaagagaattgcttgagcccaacctgggcaacatagtgaaaccccagtcaccaattaaaaacaaacaaacaaaaagagtatattttttgaagata

SEQ ID NO: 1010932 - DNA, 83 bp, Artificial Sequence
  ENSG00000214293_28 (sequence is synthesized)
cggtatcacagcttttcttcaaaagcaccatcactgctcactgtagcctcgacctgctgggctcaagtgatcctcccatctca

SEQ ID NO: 1010933 - DNA, 120 bp, Artificial Sequence
  ENSG00000214293_29 (sequence is synthesized)
cacacaggcaccaccatgatccggtatcaccagtctgtgggtacaaaaggagagtaacatgaacgattcaaattccactggctcttgttcccatggattcacagaagttcagccccattt

SEQ ID NO: 1010934 - DNA, 120 bp, Artificial Sequence
  ENSG00000214293_30 (sequence is synthesized)
caaaacttcacatttgcttctgggaagcccattctggaaagtttctctgtggccctctccagaaggcagcgcgacttccacccagcaacacaagtctctgcagcacctgccccagcagcg

SEQ ID NO: 1010935 - DNA, 120 bp, Artificial Sequence
  ENSG00000214293_31 (sequence is synthesized)
ccagctgagccccggaagctgggaaggcttaagctgactcttctgctgcacatagcaaaaaatggtcatttctgtagttgcagctccagatctacaataatcaatctatatccatatttt

SEQ ID NO: 1010936 - DNA, 120 bp, Artificial Sequence
  ENSG00000214293_32 (sequence is synthesized)
atggggtttttttgagacaaagtcttgctctgttactcaggctggagtgcagtggcattatcatcattcacttgtagccttgacctccctggctcaggtgatcctgtcacctcagccttc

SEQ ID NO: 1010937 - DNA, 120 bp, Artificial Sequence
  ENSG00000214293_33 (sequence is synthesized)
gtagctgagaccacaggcatgcaccactaagcctggctaatttttcaatttttatttttcgtagagacagggtctccctgggttgcccaaactggtcttgaattcctgggctcaagcaat

SEQ ID NO: 1010938 - DNA, 120 bp, Artificial Sequence
  ENSG00000214293_34 (sequence is synthesized)
cctcctgtcccggcaccccgaagtgttgggactacaggcatgagccactgtgcacagccctttttgtttttgtttttgtttttttttaaaggtaatttcccagtggaatcctcgagattt

SEQ ID NO: 1010939 - DNA, 120 bp, Artificial Sequence
  ENSG00000214293_35 (sequence is synthesized)
cttcacgtttttggaaaaatgagttacattttagattgttttcctttttggaatttaatggtatacattatattacatagctatgttgagctctatttctattacactaaaaagtaggct

SEQ ID NO: 1010940 - DNA, 120 bp, Artificial Sequence
  ENSG00000214293_36 (sequence is synthesized)
aattgtcttaactttcatcagtaatgacattaaatgtgtgaagattatacttggaataaagcacttggattcattcatttcttcagtaaatatttattgagcactagtatgttccaacga

SEQ ID NO: 1010941 - DNA, 120 bp, Artificial Sequence
  ENSG00000214293_37 (sequence is synthesized)
gtgtctgtctacattctggggacaagtgataactaaatccctgtcctcgtggagagttaacaatcaacaaactaacaaacatttaatttatgtcatcaactcatttccacaaatataaca

SEQ ID NO: 1010942 - DNA, 120 bp, Artificial Sequence
  ENSG00000214293_38 (sequence is synthesized)
acatcttgacttcaagtttcctgagtttctggtctaaagaattgctaccttcaagagctcaaatcatttgttggggagagaggcctgtgatatattttctcctttacaatgaaagtagct

SEQ ID NO: 1010943 - DNA, 120 bp, Artificial Sequence
  ENSG00000214293_39 (sequence is synthesized)
gtaaaaagaggaagagaaattctgagggtaaagataaaaaatgttgaaatcttctttctggatttcagattgagtctcttgccctaattgatgcaatttacactccatgcatctccttcc

SEQ ID NO: 1010944 - DNA, 120 bp, Artificial Sequence
  ENSG00000214293_40 (sequence is synthesized)
ctggaccttctccagttcttggggactacagatgaacttacttttaatgcattttatggcatttggaggccctccagtggacaaatactatacctgaaaaaaatccttttgctgtgctaa

SEQ ID NO: 1010945 - DNA, 120 bp, Artificial Sequence
  ENSG00000214293_41 (sequence is synthesized)
agtgttcaggtgtgaagtgtactcatgtttgcaaatcactttgaaatatataaacaaaaatgaattaatggatgaatagagtgatgcatagatcattagacatgtgataaaaataactgt

SEQ ID NO: 1010946 - DNA, 120 bp, Artificial Sequence
  ENSG00000214293_42 (sequence is synthesized)
taattgtagaatctagatgatgagtatattatatgatatggcccactgtataattctttcaacttttctgtttgaatgtttgataataaaatattgaataaaaatctttttgctaaagat

SEQ ID NO: 1010947 - DNA, 120 bp, Artificial Sequence
  ENSG00000214293_43 (sequence is synthesized)
aaaataatgttaagctaaataaagtcaaagaaaatttaagtaatagttaatagttattgttatagaagacatcaatttactaccccgttctcaaaaaggaaaatctgcaagtagactgta

SEQ ID NO: 1010948 - DNA, 120 bp, Artificial Sequence
  ENSG00000214293_44 (sequence is synthesized)
tcagtgaacttgttgtctagggaatgttaagtagaaccacctgaaattgcattgtttttgtaagccagctatcggttccacctgacattatatgtggaaacagaaatttgcaataataaa

SEQ ID NO: 1010949 - DNA, 120 bp, Artificial Sequence
  ENSG00000214293_45 (sequence is synthesized)
gatatgaccacggtgctacggggcactgacaaaatgcttcatgctgcccagggcagtcagtgaaggctccccaggggagatgacgtttgagccgagtttcagaagatgattggagtttac

SEQ ID NO: 1010950 - DNA, 120 bp, Artificial Sequence
  ENSG00000275216_0 (sequence is synthesized)
acttttcagatgtctctctctctctctctctctaagagctgctctcctctctcctttcttctatctattaaattttccactccctaacccacccacatgtgattgtgtcctgaattcttg

SEQ ID NO: 1010951 - DNA, 120 bp, Artificial Sequence
  ENSG00000275216_1 (sequence is synthesized)
gtgtgtgacgatgaaccccagggtgtataccccagacagcacagccacttcaccagcagggacagcagctgtcacatgaactggagatgaactggagccttgcaggagccttggttgtct

SEQ ID NO: 1010952 - DNA, 120 bp, Artificial Sequence
  ENSG00000275216_2 (sequence is synthesized)
aaggggagtaacctggggaaagatcccaagtgcaggatttatcatcacaaacacaatggaaagggaagccagctcccacacacccaaggcagcacgaagcctgttcttcagaaggaaccc

SEQ ID NO: 1010953 - DNA, 120 bp, Artificial Sequence
  ENSG00000275216_3 (sequence is synthesized)
tgccctctctcggctccagtctctccatgggaagctctgggctccccagcagtgtccactggctggccctgtaactgcagcccagtcttgtcttctctaaagaacagcatcactgtgtca

SEQ ID NO: 1010954 - DNA, 120 bp, Artificial Sequence
  ENSG00000275216_4 (sequence is synthesized)
ttgactatgtcctaccacaacaaacctacaacatatgtacttggctttccagatttctcataacatagctctgccctgcctattcgtaagcatttcccaatatttccccaaacccactgg

SEQ ID NO: 1010955 - DNA, 120 bp, Artificial Sequence
  ENSG00000275216_5 (sequence is synthesized)
ggccacttgggcttggcagtgcatcgtcttccccatgatcacgccctgatgcacctgcctgaatgtcgcccagcgagtggcttgcatttcccaagggatcagacccgtcctgtctcccta

SEQ ID NO: 1010956 - DNA, 120 bp, Artificial Sequence
  ENSG00000275216_6 (sequence is synthesized)
ctgaaatccttccccaaagaccttcactgacattgccatgacccagggaactccctcagcatggaatttcttggccatttgtatttttgactccagggcttcatgttaagtcactgtgtt

SEQ ID NO: 1010957 - DNA, 120 bp, Artificial Sequence
  ENSG00000275216_7 (sequence is synthesized)
tgctcatcaccttttttaaagaagaccctgcccatcaccctttcaacctccaccttgcttaatttgtcttcatagcatttatcattaacttaaattaacttacatagttatttagtaatt

SEQ ID NO: 1010958 - DNA, 120 bp, Artificial Sequence
  ENSG00000275216_8 (sequence is synthesized)
ttctcatgatcctagtgatagatatatcccatgacggcctgtactttgtttatattgtaaacaaaatgtgtccccattgtctatatctgcatggaaaacaagaacacaattaaccacaaa

SEQ ID NO: 1010959 - DNA, 84 bp, Artificial Sequence
  ENSG00000275216_9 (sequence is synthesized)
gctttattagtcaaattagccaagcagtttttcagtttatatcccttatagtcctctgtcttcaagaaaagtagaacggactaa

SEQ ID NO: 1010960 - DNA, 81 bp, Artificial Sequence
  ENSG00000275216_10 (sequence is synthesized)
cgctggaaggactatgctgaacctccttaggcattctctaattagatgtcctagatcctcccaattcttagtccttttata

SEQ ID NO: 1010961 - DNA, 66 bp, Artificial Sequence
  ENSG00000275216_11 (sequence is synthesized)
ttctgtatgacaaatgtttcttctaacaaccccctcaatgtcaccccttaccacaagacctccctt

SEQ ID NO: 1010962 - DNA, 120 bp, Artificial Sequence
  ENSG00000275216_12 (sequence is synthesized)
cacaaagcctgtttggtgtctcttcacacggacgcgcatgaaaaaaaccctttcattttactgtgggacggcaaccctttctgggacccctctctgcagcagagaactgttctctttctt

SEQ ID NO: 1010963 - DNA, 120 bp, Artificial Sequence
  ENSG00000275216_13 (sequence is synthesized)
tcacctgttaaacttctgcttctgctctgacctcgtccttggtgtgtctgcatcgtcgatttcctcagctgtgagaccaacgacttgggcacccacccaggcaacaaggccttttcagta

SEQ ID NO: 1010964 - DNA, 120 bp, Artificial Sequence
  ENSG00000275216_14 (sequence is synthesized)
agggaagtggtaaaatgttttcaatccctgttgccaaaaatcggcctaaggcttcccaaaaaaagtaacccaaagcagacatggcaaatatttgctacatttgataataagccaataaat

SEQ ID NO: 1010965 - DNA, 120 bp, Artificial Sequence
  ENSG00000275216_15 (sequence is synthesized)
tatctgctaataagtgactgaaatatttagcacacatctgccttattctgatgactgatcacatttctagctcccctgtggactaaaacaatatgctttccttctctacacaagcaatgc

SEQ ID NO: 1010966 - DNA, 120 bp, Artificial Sequence
  ENSG00000275216_16 (sequence is synthesized)
tttctgcagagacacaaactttacatctgaatacaaatgcagcacgttttaattctgcctctcattctccagcaaaatcatggggaagaaggaaaacatccttagtcaaaaggggtacag

SEQ ID NO: 1010967 - DNA, 120 bp, Artificial Sequence
  ENSG00000275216_17 (sequence is synthesized)
tagaacctcaccatgctgcagtcacacaggcaatagagaaagatggcggtggttccctggggcagttcccctctcaagcaaggagacaggggcagcactcctaccatctccccagggata

SEQ ID NO: 1010968 - DNA, 120 bp, Artificial Sequence
  ENSG00000275216_18 (sequence is synthesized)
gacaggggcagcactcctaccatctccccagggatataggagttaagaaggaattgcttaggcagatagcaagggcatgggagtcctgggtaaggcttttctttttaatgaaaagcagcc

SEQ ID NO: 1010969 - DNA, 120 bp, Artificial Sequence
  ENSG00000275216_19 (sequence is synthesized)
gggagcttgcataggtgaatgccagcaggaactaaggactagacattttcaaactggtggctccatcttcccttccctgccagccaagtgtattgtaaggagcagagaagatggctctga

SEQ ID NO: 1010970 - DNA, 120 bp, Artificial Sequence
  ENSG00000275216_20 (sequence is synthesized)
tcaactggaaagcctatttgcataattagattagggtggggcaaccagccttcccccgcacactatgtagacgtcatacctgatggaaccagtctgtgagccctatgtaaatcagacacc

SEQ ID NO: 1010971 - DNA, 120 bp, Artificial Sequence
  ENSG00000275216_21 (sequence is synthesized)
tgaactggagatgaactggaggtgagtctgatgtctcggaattttgaggaaagtgggtagaaagttgccaagcaagctgaagagacaagcaaaagggatcatattccagaagaattctta

SEQ ID NO: 1010972 - DNA, 120 bp, Artificial Sequence
  ENSG00000275216_22 (sequence is synthesized)
gcaagaccacagtcagaacttcaatcaaggtgattgattggtctgaaagggggaatagaatgtaaataaaatacaaccatgagaaaccacatgtatgttgttgaaccttatctagacact

SEQ ID NO: 1010973 - DNA, 120 bp, Artificial Sequence
  ENSG00000275216_23 (sequence is synthesized)
aactgtgaaaaagccagcttggattattgatgaacgacattcagaaaaccacaattttgccatgcttatttagagaacagagacagtggtattatcagcctatagctcaattgtaaaatt

SEQ ID NO: 1010974 - DNA, 120 bp, Artificial Sequence
  ENSG00000275216_24 (sequence is synthesized)
gggatgactagatgtcccgagactattctgttcctcggccctctcgacactcacctaagaagcttccaaatttaccacttctcagtcattgtaaggatgctgcatgtcataaggatgatt

SEQ ID NO: 1010975 - DNA, 120 bp, Artificial Sequence
  ENSG00000275216_25 (sequence is synthesized)
atggaagattatgggcatgttctacatagagaacaagaaaagtcacaatattttcttttataaatttatattttggaatttatattagttcccctaactctaaataaccatgggaatatt

SEQ ID NO: 1010976 - DNA, 120 bp, Artificial Sequence
  ENSG00000275216_26 (sequence is synthesized)
gacaaatttgattttccagaactttaaagctgaggctagacactaaccacagtgactttatctatgtagtagcacactctaccagctgggatgtctggataacaagttccccagattgca

SEQ ID NO: 1010977 - DNA, 120 bp, Artificial Sequence
  ENSG00000275216_27 (sequence is synthesized)
gcctccctccagcaccaagtaggattacgagtctgtttggtttcattttagctatgtagatttgtcaaattttgtcacctctggacttcagttttctcatatgtaaaatgatgcattggc

SEQ ID NO: 1010978 - DNA, 120 bp, Artificial Sequence
  ENSG00000275216_28 (sequence is synthesized)
ctgaatgttttcggagaaccttcaatctctgtgagtctcttcactgaaaaaattgttgactttcttttttttattgttctgtttttcttttctatgtcaaaaaagcactatggtaaaagt

SEQ ID NO: 1010979 - DNA, 120 bp, Artificial Sequence
  ENSG00000275216_29 (sequence is synthesized)
ctttcagtaaaacttgaaccttggggcttgttcctgagtttgacatgttaaacaaatgaaagaactgttttcaactgattagtcatatccttcaattcctacgggaatatgggttcgttg

SEQ ID NO: 1010980 - DNA, 120 bp, Artificial Sequence
  ENSG00000275216_30 (sequence is synthesized)
tgcatgagaaagtcagccaactttggcatgaagatgtctttcaggtaggtaggccacctgtgatgaagtgaatcattgaagaaagtctattttcttgtggcataaatacaagcctgaaga

SEQ ID NO: 1010981 - DNA, 120 bp, Artificial Sequence
  ENSG00000275216_31 (sequence is synthesized)
ttacacataagctgtcatacacgtacctcctaaatgcaattcctcagaagtgacatgctatcatcattcacattaatgtctatttgtgcaactacattgtttaaaataatcaaccaattc

SEQ ID NO: 1010982 - DNA, 120 bp, Artificial Sequence
  ENSG00000275216_32 (sequence is synthesized)
atcacaatagatatttgggaggagtgagggagctttctctgtactaatgaaagaaatgacatttctgtttaccatttgtcagttttaagtagttaataaatatctgaaatgattttcata

SEQ ID NO: 1010983 - DNA, 120 bp, Artificial Sequence
  ENSG00000275212_0 (sequence is synthesized)
aatgaaagaaaagaaattgcccaaaatccaagttgacaagataatgccatttacaaatggtgcacaaaacccgcagagatcatcaacttagggcaccaagatttacactttaatcatcag

SEQ ID NO: 1010984 - DNA, 120 bp, Artificial Sequence
  ENSG00000275212_1 (sequence is synthesized)
caatttatcttactgataactcaatcaacttggatatttctcaccattgacttaagaaagcagagcagacactgtgctggggactttgagcaatgcagaggaatggagaatgccccccaa

SEQ ID NO: 1010985 - DNA, 120 bp, Artificial Sequence
  ENSG00000275212_2 (sequence is synthesized)
gaacttagaagagatggacatttgcattattctctgtaatgactgcacagtgtggtgttaaccttagaagactagaacctaatgagttatggcaaacagatgttatgcacgtccctgaat

SEQ ID NO: 1010986 - DNA, 120 bp, Artificial Sequence
  ENSG00000275212_3 (sequence is synthesized)
ttggaaaactaaggtcctctttggattccagcacgaggcatcaaaccataccatggcatggctaggacccaacccggtaccaaaatgaagaaaatgaccctacaggacccacaatcccgg

SEQ ID NO: 1010987 - DNA, 120 bp, Artificial Sequence
  ENSG00000275212_4 (sequence is synthesized)
atgtggcttccttggatgacacaggccctggacattacctgggggatgctgaagaagacaactcaggaggccaagcaaatcctgctccaggcacagacaccattcactccaggaagctgc

SEQ ID NO: 1010988 - DNA, 120 bp, Artificial Sequence
  ENSG00000275212_5 (sequence is synthesized)
cattcattcgacataagtaggtgcttcatctgataagcgctgcttgtgtaatttatcaatgacagagaaggcagatagcagcatgcatacttggggctgcatttgaaggagagcaacatc

SEQ ID NO: 1010989 - DNA, 120 bp, Artificial Sequence
  ENSG00000275212_6 (sequence is synthesized)
cctttgttttcacagaggagaacaagcatgagttgagattgtggtgcttcttgaagtctcatccagatcagaaacctgctgctctgtccacattccatccaccaaagcaacccatatggc

SEQ ID NO: 1010990 - DNA, 120 bp, Artificial Sequence
  ENSG00000275212_7 (sequence is synthesized)
catgtccagcatcagatggggaaaggcagttctcctctagcacgaggagctgcaaagccacatggcaaaggatgagtgtgtaaaaaataaatgcaggagggcaggaggcattgggaacaa

SEQ ID NO: 1010991 - DNA, 120 bp, Artificial Sequence
  ENSG00000275212_8 (sequence is synthesized)
ccagaaatgggcgtggccaacggagagacctctcccacaaggagatgaggacacagacatgtacagaggaaagaccatgtgaaaacgcagggagaagacaccatctgcaagccaggatga

SEQ ID NO: 1010992 - DNA, 120 bp, Artificial Sequence
  ENSG00000275212_9 (sequence is synthesized)
ggggtctcagaagaaatcaaccctgccaacacctgagctcacacttccagcctccagaactggagaacacccaaggaatgggacggtgctgtcaagaggacatggagaagaaaactcttg

SEQ ID NO: 1010993 - DNA, 120 bp, Artificial Sequence
  ENSG00000275212_10 (sequence is synthesized)
ctagctgtcttttcttaagctctgggaaagtggtatttagctctcaatttccagggctctcattctatattttgccccagggttgtcactaaatccagtttggtcagcattaggtaagta

SEQ ID NO: 1010994 - DNA, 120 bp, Artificial Sequence
  ENSG00000275212_11 (sequence is synthesized)
gctctttgggtgactgagtggggtggagtgatgtccaataaacatcaaggcataatgggcagagccacaggaaccaggacatggcatggagcgagccgtggctggtccagagcaggtgca

SEQ ID NO: 1010995 - DNA, 120 bp, Artificial Sequence
  ENSG00000275212_12 (sequence is synthesized)
gccaccgagttgattgattcggaagttcagtgatattaaggctctttccttttctctggtctaccatcctgggcatttccttcaacctcaagtaggtagcaggactgttgtagtggtatc

SEQ ID NO: 1010996 - DNA, 120 bp, Artificial Sequence
  ENSG00000275212_13 (sequence is synthesized)
aggtattacatctagacatggaacaagagaagttatttctttcctataactttctatggaactaatttttttttcactaagtacttcccagaagaaaaacttccttctttttggaaaata

SEQ ID NO: 1010997 - DNA, 120 bp, Artificial Sequence
  ENSG00000275212_14 (sequence is synthesized)
ctaagtcatctatccatgtatgaaccaatcaatgccaaggagatggattaccatcacacccatccatgaagataaccccaaggctcatggttctgtgcaaaaggagtagatatctgaaca

SEQ ID NO: 1010998 - DNA, 120 bp, Artificial Sequence
  ENSG00000275212_15 (sequence is synthesized)
agattttgactctattgggagcaaaagaggatgatggttgctgggaaggttaccaacaaagatcactacactggcccaacttactgttgacacagtaaagtgtcccgcacttgtatgcta

SEQ ID NO: 1010999 - DNA, 120 bp, Artificial Sequence
  ENSG00000275212_16 (sequence is synthesized)
agccaggcagtcacctagctgctgttatgctgcatacctgtctctgagtactcgcttcatccatcggccagggtctgtgggacagaccaggcaggtggtgccccatgtgaggaacgctgc

SEQ ID NO: 1011000 - DNA, 120 bp, Artificial Sequence
  ENSG00000275212_17 (sequence is synthesized)
atgggcgtggccaacggagagacctctcccacaggagaagacaccatctgcaagccaggatgaggggtctcagaagaaatcaaccctgccaacacctgagctcacacttccagcctccag

SEQ ID NO: 1011001 - DNA, 120 bp, Artificial Sequence
  ENSG00000275212_18 (sequence is synthesized)
ggctgccctctctcccagcttctgtgaaaagatttggcttctgacacactcattgctttggagaggatggttaagtcagaaaaaagacttttgagactcaaaattctggaccccgattct

SEQ ID NO: 1011002 - DNA, 120 bp, Artificial Sequence
  ENSG00000275212_19 (sequence is synthesized)
ttacaggcgtgagccaccgcgaccggccggaatttttttcttattagtgggagaagaggaggagagtgagcttttattttcttcaccttaactggaagcctggttgagatgagaagcttc

SEQ ID NO: 1011003 - DNA, 120 bp, Artificial Sequence
  ENSG00000275212_20 (sequence is synthesized)
tggaagcctggttgagatgagaagcttcttaccttaacaatacccagttgacaggagaaaagaaggcagctcaacctggctaagcaacgcgctcaaagtccctgtggtgatgatgggctg

SEQ ID NO: 1011004 - DNA, 120 bp, Artificial Sequence
  ENSG00000275212_21 (sequence is synthesized)
ggattccatgccacctctatccagtgtgaaaacccagtcctttaaaatgcattgtgcttttttactgcttaatgtttacggaagtgtgttttgcctacatctagaatcaaattaaaatca

SEQ ID NO: 1011005 - DNA, 120 bp, Artificial Sequence
  ENSG00000275212_22 (sequence is synthesized)
aattagaagggatgcttacaattttgggaggattaatgttttgaagataacatatctgtcttacctctaagttttatggggaaaggcaacattcatctcataagtttgcagggtttttat

SEQ ID NO: 1011006 - DNA, 120 bp, Artificial Sequence
  ENSG00000275212_23 (sequence is synthesized)
tcagaaaaacatctttgtatatcttgattgaaaaagacatgaacttttgggcacagtctaggttgagtaagtcactgtgatgagctgaactgcactcccctccaccaatttatgtattga

SEQ ID NO: 1011007 - DNA, 120 bp, Artificial Sequence
  ENSG00000275212_24 (sequence is synthesized)
agccctaattccccagtactttagagtgtgaatatatttggagacaaggtctttaaagagataattaaggtaaaatgaggttgttagggtggaccctcatccaatacgactggtatcctt

SEQ ID NO: 1011008 - DNA, 120 bp, Artificial Sequence
  ENSG00000275212_25 (sequence is synthesized)
tgagctcacacttccagcctccagaactgtgagacaataaatttctgttgttttactcagtctgtggtcatttttaaatggcagccctagcaaactaatacagacatctttttaaataag

SEQ ID NO: 1011009 - DNA, 120 bp, Artificial Sequence
  ENSG00000275212_26 (sequence is synthesized)
gctaccatgtgcagacattgaagaaaggagagctgaaagacatagggagcatctggcttatacctatgaacttataattccatacaatttttattttacttttaaaccaacacccctccc

SEQ ID NO: 1011010 - DNA, 120 bp, Artificial Sequence
  ENSG00000275212_27 (sequence is synthesized)
ctttctaagaaccactcttggttatcaatgtgctggttgttaatatgaaccttcttccaataactgcatgtaattaaaaataatgatccatttcttcatggatgctctgtgttaaaatgt

SEQ ID NO: 1011011 - DNA, 120 bp, Artificial Sequence
  ENSG00000275212_28 (sequence is synthesized)
taacaaatttcccgtcaaaatttctccccctcctacttttgcctgaaagagagaaatttcacatattttggaacctacgaaggctttccttttttggtatctggagtttagtcttccatt

SEQ ID NO: 1011012 - DNA, 120 bp, Artificial Sequence
  ENSG00000275212_29 (sequence is synthesized)
ggcaaaatcatcttagttattctaggactatcgcatcttcaattttagccatggagctcagcttagacggtgcttcccagattgtggtggtcctatcactagtgtcgtgtaaagtcattt

SEQ ID NO: 1011013 - DNA, 120 bp, Artificial Sequence
  ENSG00000275212_30 (sequence is synthesized)
tatatgggaaaataaaaactaaaattttggtgatgactcacttattttaaatgttttaaaattattttcaatacatcaaaattattatttcatgaattgcagtttagctaagtttaagaa

SEQ ID NO: 1011014 - DNA, 120 bp, Artificial Sequence
  ENSG00000275212_31 (sequence is synthesized)
tcaatgaattgaataaaaaattaaataaaaacagtacaggtgtaaagagcaaatacaattttaaaataagagactgacttctccctgttgaaaataagaaaaataaagaaagagatacct

SEQ ID NO: 1011015 - DNA, 120 bp, Artificial Sequence
  ENSG00000275212_32 (sequence is synthesized)
tttagagatttcctaattgtaattgtttttctctgtctctttgaaatgtatgtaaatctctttaaaagctaaagaagtcttttccagctttatgaccaggaatgtcttttcttatgaacc

SEQ ID NO: 1011016 - DNA, 120 bp, Artificial Sequence
  ENSG00000275212_33 (sequence is synthesized)
tcattagttatgaaagaaacaatgtctgcagtccaatacactgactaaatctagacccaagttttcttcctgtaaaaatggatatcatatctaaaggtcaagatcaattgtgaggaaatg

SEQ ID NO: 1011017 - DNA, 120 bp, Artificial Sequence
  ENSG00000275212_34 (sequence is synthesized)
tgtgaaggcacttagacaaactgcattaagaatgcacctgcctgagggtggggaccatatctgttttgttcacctcaacaatcccggtatctgcaagagtgctgacacataggagcttct

SEQ ID NO: 1011018 - DNA, 120 bp, Artificial Sequence
  ENSG00000275212_35 (sequence is synthesized)
caaaaacaattcgtaaatgagtgagtgagcaagtgaatgaataattatttttatgagggtggggaatttttgtagtcatgatggttccaacaaaaataaaaatgagaaaattatatcaaa

SEQ ID NO: 1011019 - DNA, 120 bp, Artificial Sequence
  ENSG00000238171_0 (sequence is synthesized)
acaaagaagccattttgcttttagttaaacaccaaatgccttaaatgaagtcttcaagtttaatgttaaaagataccaaatcatagaatttcattaggaagactacaagttaaatgtatc

SEQ ID NO: 1011020 - DNA, 120 bp, Artificial Sequence
  ENSG00000238171_1 (sequence is synthesized)
tctggagggatagacaagaagctgaaaagattacctcaacagaggagaattagttctacaggcctgggttgaggactattctcaagaagacagtcggaatagctcaggctctctgtgctc

SEQ ID NO: 1011021 - DNA, 120 bp, Artificial Sequence
  ENSG00000238171_2 (sequence is synthesized)
ctggctgaacccctaaggtggcacattctctctagttgtaaacattctagtgtatattcttcccgacattcttctctgcacacgaagatataaatctaagaaaaacagcagcttaggggt

SEQ ID NO: 1011022 - DNA, 120 bp, Artificial Sequence
  ENSG00000238171_3 (sequence is synthesized)
tggtgtatttgatatacatcagcctatttccttgttttctattgaacttcaaccactggatggaacttctttacaccactgtttaattgcttcattattccagtgagcaggcaaggctga

SEQ ID NO: 1011023 - DNA, 120 bp, Artificial Sequence
  ENSG00000238171_4 (sequence is synthesized)
agaggaggaattctggaagctggaataaagaatttatatttgtactgctgtgtgcttagcctctggttctggaagacctttccaccacacctcttctgaaaaaaaaaaaaaaaaagaaag

SEQ ID NO: 1011024 - DNA, 120 bp, Artificial Sequence
  ENSG00000238171_5 (sequence is synthesized)
aaagaaagaaagaaaagtgaaaacatcttactgttggcctggaggaaacatggaactaaaagaaatcctcgagaactaggaaatgtatgatttttctcgcgaagaatgtgtatgacgttg

SEQ ID NO: 1011025 - DNA, 120 bp, Artificial Sequence
  ENSG00000286813_0 (sequence is synthesized)
gctcttggcactatggcggggagagggcccggtagtgaaagttgtggggctaaagagcgagaggacggcaggggttgacagatttatctctgggaggggagtttgtttgcatgggtggct

SEQ ID NO: 1011026 - DNA, 120 bp, Artificial Sequence
  ENSG00000286813_1 (sequence is synthesized)
cttttggtgctcgaaaaccctccgtggggatgacggtgctgtggtgagagcacggtgagaacagaaagttgtggtagaggagatgggtgaacacctgagtgcccaggttccctcagtgag

SEQ ID NO: 1011027 - DNA, 120 bp, Artificial Sequence
  ENSG00000286813_2 (sequence is synthesized)
gcctaaagttaatgagctacgagtaagactccggttatattagtaaaatggccagagaaagatgcaggtgctttagacgagggaacaccaaaaaaggtgtggagatgccaaagggcagaa

SEQ ID NO: 1011028 - DNA, 120 bp, Artificial Sequence
  ENSG00000286813_3 (sequence is synthesized)
ctcagaggttgactggacttcactaagcatatggagggctaaggctgtgtctcagtagctccagggcctaggcttttcctgtctcagagttggtcaacattaaatgctttttcttgagtg

SEQ ID NO: 1011029 - DNA, 120 bp, Artificial Sequence
  ENSG00000286813_4 (sequence is synthesized)
aacgaaaggaagacttggctatcatatccaggcttcccaagaacgtaggaaacagaagagagaaatgagaggaataagtgagggtccgtgtttgttggttagcagacctctgtttcatta

SEQ ID NO: 1011030 - DNA, 120 bp, Artificial Sequence
  ENSG00000286813_5 (sequence is synthesized)
ctttcaccaactgcactgctatgtatttttagtctatgtaatgtcagttttcttatcaataaaatggcagtcatatcctgttgtgaaggcatgttctaaagagtttttggggactcattt

SEQ ID NO: 1011031 - DNA, 120 bp, Artificial Sequence
  ENSG00000286813_6 (sequence is synthesized)
ttgttagacaccagaggaagaaaaatttaatgtcccctgaataagtacgtatttgtaattctgttgtaagtcaaactgatgatctgtcttcccagcatcatgcttcagagacaccagata

SEQ ID NO: 1011032 - DNA, 120 bp, Artificial Sequence
  ENSG00000286813_7 (sequence is synthesized)
tttggaaacttgatgttccttggaattagttataccatcaggctttcttaattacccttcactattctattatccgttatttactcaaattcaaggtgcctatgggttaaagcagtaaag

SEQ ID NO: 1011033 - DNA, 120 bp, Artificial Sequence
  ENSG00000286813_8 (sequence is synthesized)
catatatgctcatttcacccctctcttcatctatgtaggtgtgtatgagggaatctatacagatgttaattcgttcgttcaaacagaattattttagctattatgaggaagcattgctgg

SEQ ID NO: 1011034 - DNA, 120 bp, Artificial Sequence
  ENSG00000286813_9 (sequence is synthesized)
tccttactatctagttgtttaaaatttagctaattcattcacatatgttgaacacctatgtagtgcacacttggctatatactgggttgtggagatgaaaaagatatgattgttgctcta

SEQ ID NO: 1011035 - DNA, 120 bp, Artificial Sequence
  ENSG00000286813_10 (sequence is synthesized)
aaggagcagagagcctagaagaggaaacagacatgaataaagaattgcattgaagccagatatatgataaaggtaaacaccaatgttgtggaaacatagccttggggaggggaaattgga

SEQ ID NO: 1011036 - DNA, 120 bp, Artificial Sequence
  ENSG00000286813_11 (sequence is synthesized)
aagctttctattggaaaatgtttgagatgaatttcggagaacaagatgaattctttcaggtgaagggaaagatgggataggggagtgtgagtagggatatttaggcaagagatgacagga

SEQ ID NO: 1011037 - DNA, 120 bp, Artificial Sequence
  ENSG00000286813_12 (sequence is synthesized)
tacagtttagcatgggctttggaactgcacagatctgggctgaatctggcgccattgttttttaactgtatatccttggacaggtctcataatctctcagaacctttggttccttgtcta

SEQ ID NO: 1011038 - DNA, 120 bp, Artificial Sequence
  ENSG00000286813_13 (sequence is synthesized)
taaaatggataatatcactcttgtaggtcgattgtgagagttaaagaagtgtgtaaagggatgtattcagagctttacctattgtttgttatgtcctttaggaagagtataatggcagca

SEQ ID NO: 1011039 - DNA, 120 bp, Artificial Sequence
  ENSG00000286813_14 (sequence is synthesized)
tttggataatgggttgaggaaggaagaaagaaaaaaaatatggagaccagtaaggggctgttgtgccaattcaagtgaaagatgaaaaatatgcaaaccagagcatgggcagtgaagatg

SEQ ID NO: 1011040 - DNA, 120 bp, Artificial Sequence
  ENSG00000286813_15 (sequence is synthesized)
aggggaaaggaggcaaatgggagactgttaagtgagaaacagcaggacttggcaactgattggaagaggttagagaatactggaaggggaggagagtcaccagtgattccaaaatttaga

SEQ ID NO: 1011041 - DNA, 120 bp, Artificial Sequence
  ENSG00000286813_16 (sequence is synthesized)
gcttggtataatggtgtttagccttaggcataaagaaggtaggaattggaacaaattttggaggggcatggggaaaataaagatgaattcagtttctaatcttctacgttgtctttctcc

SEQ ID NO: 1011042 - DNA, 120 bp, Artificial Sequence
  ENSG00000286813_17 (sequence is synthesized)
gtagaagattagaattcataaactatagatggaaatagtttacatagatacagagtcactgacagcaatagaatgacgactgagagctggcattaaaggaggagagagaaaaattaaaaa

SEQ ID NO: 1011043 - DNA, 120 bp, Artificial Sequence
  ENSG00000225880_0 (sequence is synthesized)
gacccggaaacggattatccggagccaaggtccgctcgggtgagtgccctccgctttttgtggccaaacccagccacgcagtcccctccctgcggcgtcctccacacccggggtctgctg

SEQ ID NO: 1011044 - DNA, 120 bp, Artificial Sequence
  ENSG00000225880_1 (sequence is synthesized)
gtctccgcggatgtcacaggctcggcaaccgccctcctgtcggcggggagtcccgcgacgcccggaaatgctccgaagcctgtcgctcagctgccagatctgcgtctgtgtccggttccg

SEQ ID NO: 1011045 - DNA, 120 bp, Artificial Sequence
  ENSG00000225880_2 (sequence is synthesized)
tcactgaggtcgcccctgtccggcccttccaccctagttctcttcaccgtccgcccatcctatcgcgcgcggcctcaggtccccattcggcatgtggcttgtcttccatcgtccccaccc

SEQ ID NO: 1011046 - DNA, 120 bp, Artificial Sequence
  ENSG00000225880_3 (sequence is synthesized)
tcgcccctcttggcccctcagggcagccctgggattcggcagacgccagtcctccctgagatgcttccccgtccttccctccgccaggccctacgtctccgcaaaccccacgcttcgggg

SEQ ID NO: 1011047 - DNA, 120 bp, Artificial Sequence
  ENSG00000225880_4 (sequence is synthesized)
tggccgcctcagacaggaccctgagtccgagactggggtaggggacctgcccgatcctgtaacaaccctcgtgcttctgcacaatcgcctcccactagcggtgactgttgggtgtctacc

SEQ ID NO: 1011048 - DNA, 120 bp, Artificial Sequence
  ENSG00000225880_5 (sequence is synthesized)
gccaacgagcgagaaaaggggagggaagtttagatgggaagtggatgggtctgaggaatttgaacaaacaccgacagtgaaggagagtgacctgagcaagcagtagtggggtaaatggaa

SEQ ID NO: 1011049 - DNA, 120 bp, Artificial Sequence
  ENSG00000225880_6 (sequence is synthesized)
atagacaaaatgggaatcagcagagatatggaggacagaatacaatgaggaggccttgaccgtcagtagcagagagggcagcagaagcctaattcccaaattccttagtggttttctgat

SEQ ID NO: 1011050 - DNA, 120 bp, Artificial Sequence
  ENSG00000225880_7 (sequence is synthesized)
ttccaaattagtttcccttttaaatttattgtgtcaggttcagcttatgaggcctcaatacttttcagtcttaattgtatattgaaaatactttttgtttactaaatgctttttacatta

SEQ ID NO: 1011051 - DNA, 120 bp, Artificial Sequence
  ENSG00000225880_8 (sequence is synthesized)
attcagtgtgcactccgtaaggatattgatgatttgagttagtttagtattcaacagcttcctctattcctttgtatgatctctgtatttaatggctgtggcataaagtttccaactaag

SEQ ID NO: 1011052 - DNA, 120 bp, Artificial Sequence
  ENSG00000225880_9 (sequence is synthesized)
tataagtatcaagttttctttgtgatgttttctgcaaatattgaaggatgacctggattgtcctagaactttgttccaacagattacatgtgttcataacgaataaattgctcaaagata

SEQ ID NO: 1011053 - DNA, 120 bp, Artificial Sequence
  ENSG00000271803_0 (sequence is synthesized)
ccgcgggcctccgcgcttccgcggccacggcggagggggaggcgcccgagggctccggtcccgcgacggcctgtcgggagcagaacctaggggctgcgggcctacccagagggacaggat

SEQ ID NO: 1011054 - DNA, 120 bp, Artificial Sequence
  ENSG00000271803_1 (sequence is synthesized)
cgtctgtatcctcatctacaaaaatggtactggcagacaccctatgcaattgttgggactcattcaatgtcaagtgcttacaacgggggctggcgcagaggaagcccacagatctcctct

SEQ ID NO: 1011055 - DNA, 120 bp, Artificial Sequence
  ENSG00000271803_2 (sequence is synthesized)
ttcagaccctgagagcaccatgaaaggaggtaacacccgtgtccccagaactgttaaatacctgacacagaaccagcccactgtatttgttacatgtttactaatgtccagaaacgtctg

SEQ ID NO: 1011056 - DNA, 120 bp, Artificial Sequence
  ENSG00000273098_0 (sequence is synthesized)
attctattttctccagggaggcaatgcttttcctaaaaagttgagaatttagacctggacttggctgagctgttttactgatttttgcaagagcaagagtaaggtgacccatgcagggaa

SEQ ID NO: 1011057 - DNA, 120 bp, Artificial Sequence
  ENSG00000273098_1 (sequence is synthesized)
aatcatcctagactaaacttctaaaaccatacgtgttgcctatcggttataacccaggtggggcatcttttctgctgcgacatgtgtacccgtcagccaacgtgtgatgagctctcacgt

SEQ ID NO: 1011058 - DNA, 120 bp, Artificial Sequence
  ENSG00000273098_2 (sequence is synthesized)
tcagaccttggtctgtcagctgtcaccactcccttatctcatgctggaaaggcacaccaaaatacaggtggtatttgtacttccattatacaagtgaggaatcaaagggagaaacagaaa

SEQ ID NO: 1011059 - DNA, 120 bp, Artificial Sequence
  ENSG00000273098_3 (sequence is synthesized)
cctctaagttcactttgtgaaatgggattctcacctttgcaacatggctctggagacttgctcttcacaatgacagttgcaagagaaaaaaattacccaatgacactcggtaaagcatga

SEQ ID NO: 1011060 - DNA, 120 bp, Artificial Sequence
  ENSG00000273098_4 (sequence is synthesized)
cttgagctggaagcccgccttttaggttttgaagagagaagaggtggaggaggatgtgtgctccatgaagacgtgttcacagactctaacttgctatggagtggccagagggctcgacga

SEQ ID NO: 1011061 - DNA, 120 bp, Artificial Sequence
  ENSG00000273098_5 (sequence is synthesized)
agatgccaactgccttcagatgtctccagctcctatcacggctgtgtgaagctataggctgtggtaaagaccaaccaggggagaacaagcaaaggccatttattcagaggctgctgtatc

SEQ ID NO: 1011062 - DNA, 120 bp, Artificial Sequence
  ENSG00000273098_6 (sequence is synthesized)
aggggagtcagccacccacacatgtcttatggaaagctgcttctgccccaaccctgttttagctagtcttcagtttaatctgatatccggtaccacctcctaccccatttctacccatct

SEQ ID NO: 1011063 - DNA, 120 bp, Artificial Sequence
  ENSG00000273098_7 (sequence is synthesized)
taggttcattggctgggacgcctgtgacaaaagacagattaacaagagaaaggtacacaaatttatttaatatgtgttatgtgacacaggagccttcaaaaggaaatgaagttctgaaga

SEQ ID NO: 1011064 - DNA, 120 bp, Artificial Sequence
  ENSG00000273098_8 (sequence is synthesized)
aacagctaaacctgaatggtttttgtcgtagatttgagaagaatgaagcattgtgggaaaatatgacaaagtaaagaaaaagaatgagagaaatgtaataaatcggggaatcttagaaaa

SEQ ID NO: 1011065 - DNA, 120 bp, Artificial Sequence
  ENSG00000236045_0 (sequence is synthesized)
ttgtattgcaacttgctttcttttcagttaaagacacagtgtatcttggatagttgagtgatttgccatgcatgcaagaagagtcttttatttgtaacaaagtcttgcagaaatagacac

SEQ ID NO: 1011066 - DNA, 120 bp, Artificial Sequence
  ENSG00000236045_1 (sequence is synthesized)
aaacgacggagcttgcagagaaaaatgtaaaaaatcctttccttcccttatcagaggaaccctgagaaaccagtatttgaggctgacgatgacagcagcccccaccgattacgagctaac

SEQ ID NO: 1011067 - DNA, 120 bp, Artificial Sequence
  ENSG00000236045_2 (sequence is synthesized)
tgtgaccagcactgccatgcatgtatcccatcactcagtcctcatatgccgctaggagactggatggccatttcacgagcaagtaaatggaggcgcagccacgtcacgtaactgcccaca

SEQ ID NO: 1011068 - DNA, 120 bp, Artificial Sequence
  ENSG00000236045_3 (sequence is synthesized)
taggtgcacagctgaaattcaagccttggcagtggtacccagagtcccagcttggaacatcactgtgatacaaatggggctttctgtggttatggctcagggtaggaatcagatgcggtt

SEQ ID NO: 1011069 - DNA, 120 bp, Artificial Sequence
  ENSG00000236045_4 (sequence is synthesized)
tagcttagggaaagacaactcttagctctgtcactgcctgagccgatgacagcacccattctctagggactgggcatgtgcctggtacattgctgcattgtcagaggaagtgtgtatgtg

SEQ ID NO: 1011070 - DNA, 120 bp, Artificial Sequence
  ENSG00000236045_5 (sequence is synthesized)
tgcagggggtgggggtgaaggggcagggggtcatagggaagacacaggtgttagggtcacaaagacctcagtttgagtcttaaccctaatgtaccagctgtgtgactctgggcaactttt

SEQ ID NO: 1011071 - DNA, 120 bp, Artificial Sequence
  ENSG00000236046_0 (sequence is synthesized)
taaatccctcctctccacgctcaagcatctctgggtctcctttccaggccggacagtagcgcacgcagggactgtgccaccagacagaggggcggctcagctcccagatgcagtagccac

SEQ ID NO: 1011072 - DNA, 120 bp, Artificial Sequence
  ENSG00000236046_1 (sequence is synthesized)
gatcacttgggcaagttacaaagccactctgagactgcgtccttcccacaaaaatgaaggtcccacaaaactcatcacaaggatgcatcctgagagcagctgctttggaggaaggttctc

SEQ ID NO: 1011073 - DNA, 120 bp, Artificial Sequence
  ENSG00000236046_2 (sequence is synthesized)
tgacctgctcgttcttccatgggattcatcttccccacaccatggtgctggaatgttctgcttgacttacggcgaaagagttgtcttatttgttgttgttgttgttgtcatctggttttt

SEQ ID NO: 1011074 - DNA, 120 bp, Artificial Sequence
  ENSG00000236046_3 (sequence is synthesized)
gtgtgtgtgtcattttcgccatctgtcctgattgccctacaggccacaagccacagacctgcttcatccttgttcttctctcctagctctttttgttgccttaggagtttctgtaacccc

SEQ ID NO: 1011075 - DNA, 120 bp, Artificial Sequence
  ENSG00000236049_0 (sequence is synthesized)
atgaggcctccccagccacgtggaactcatacacttaataattcattacctattaagcttcttctcagctgaggtcatgcaaaaatgactcacttgcatatgatactttccttgaggaat

SEQ ID NO: 1011076 - DNA, 120 bp, Artificial Sequence
  ENSG00000236049_1 (sequence is synthesized)
ctcacttgcatatgatactttccttgaggaattaaaccataaactccctccttgcattgtgtattgagggagaagattcctagaagcaacattcatcgtctctcttttcaatgatggaca

SEQ ID NO: 1011077 - DNA, 120 bp, Artificial Sequence
  ENSG00000236049_2 (sequence is synthesized)
actctctgctgtgccaaatatactaactttaaccacccactgccaaactcacacctccttgttcaacaagccagttacgggcagtgaatgaatctacgatgctgaacagccccgtgggca

SEQ ID NO: 1011078 - DNA, 120 bp, Artificial Sequence
  ENSG00000236049_3 (sequence is synthesized)
tcttctcactgggcactggctagaatgcagttggattagactttcacaattgctttgttttcaagccaggaaggagaaattgaaggcaattcaccacctttctatatccaagatgaaaac

SEQ ID NO: 1011079 - DNA, 120 bp, Artificial Sequence
  ENSG00000236049_4 (sequence is synthesized)
acagcactctcctaaacttcagaagtataactcagtgggttagtacttcagatctagcctgaggcaaaattatgatttttccaaaagattttctttttttagcattcttttccttacacg

SEQ ID NO: 1011080 - DNA, 120 bp, Artificial Sequence
  ENSG00000236049_5 (sequence is synthesized)
caggcctttgatcaagctacagttttgaactgattacagcttttgaagcctcagaagatttaaagacccacattgttaacaatggtgttttaggtgtgtggcgtattagaggagtcggct

SEQ ID NO: 1011081 - DNA, 120 bp, Artificial Sequence
  ENSG00000236049_6 (sequence is synthesized)
aattctaagtcctcaagtgctcagaaaacaacattaaaaagtctgacatttgaaaagtatggaattaaacatcatggaactggctttaagaaggtatccattcgtggcatgaaaatgtga

SEQ ID NO: 1011082 - DNA, 120 bp, Artificial Sequence
  ENSG00000236049_7 (sequence is synthesized)
agaactttctttctttgcaatgtgagttcaaggaaacgcccaagagtggatgttccatcgtaaatgctctgcccccagcttttcaaaggacacagaaattgcacccagcaaagatgtcct

SEQ ID NO: 1011083 - DNA, 120 bp, Artificial Sequence
  ENSG00000236049_8 (sequence is synthesized)
gtcaaaatgatttaaaagaagaaaaagaaagttgctagaggggaactggtactccagatcaaaaaacaattttaagtggtctattttggtggtctgtgttgagacatataacagcccagg

SEQ ID NO: 1011084 - DNA, 120 bp, Artificial Sequence
  ENSG00000236049_9 (sequence is synthesized)
ctgctgtttttccaagaggttaaatttcaaaaagaggaaacaacagcaaacaggctgccaatttactcaacaatgtcacaactggctggagctctgttcaaagcaaaaccgctgatttac

SEQ ID NO: 1011085 - DNA, 120 bp, Artificial Sequence
  ENSG00000236049_10 (sequence is synthesized)
ggatttactcttaaatattaacacttcttaggaaactttagaccttacatgtcacatttatgactcctaggcagacacaaccctctccaaacacatggtcctcatgacaactctttgcca

SEQ ID NO: 1011086 - DNA, 120 bp, Artificial Sequence
  ENSG00000236049_11 (sequence is synthesized)
tgtatttcagccccactaagggaagccactgtcaactcaacctgtgatgccaagaagcagcccaggtaccaagggacatagactggagtcaacattagatgcgtttctgtatggtgtagc

SEQ ID NO: 1011087 - DNA, 120 bp, Artificial Sequence
  ENSG00000236049_12 (sequence is synthesized)
ttggaggaggatgtttacagcacaattccgcaataatatgctgtagcagacagaagtttcccttctatcagacaaagaactagtcagggaaggcaagctggctagaccacggttcagttt

SEQ ID NO: 1011088 - DNA, 120 bp, Artificial Sequence
  ENSG00000236049_13 (sequence is synthesized)
ttctcatctcctttctgcaagtggaaaatctgctggctggcagtggaaataatagggaaaccacctcagaatgttggagaagaggatgggggaggagttgcagctcaggaatccttcaaa

SEQ ID NO: 1011089 - DNA, 120 bp, Artificial Sequence
  ENSG00000236049_14 (sequence is synthesized)
gaagacatgtggggagaggaagacagcacacagaagcagggagaagttaagagtatgaaccttaccaacaggtaaaaatgtgtcatattaattttttcaacatcaacaaacacgtcaaaa

SEQ ID NO: 1011090 - DNA, 120 bp, Artificial Sequence
  ENSG00000236049_15 (sequence is synthesized)
gatggagcactgaaagctgcattttaaacaaatgccccaggtaatgtatactgaaaatgcaatcctgatgtcctaggtggcaggattattgttgttggagaatgctcctgtaaatttctt

SEQ ID NO: 1011091 - DNA, 120 bp, Artificial Sequence
  ENSG00000236049_16 (sequence is synthesized)
ttccagtcttctctcctcactttccatgcctaaggagtctaagtcccactgcccctgctaattgtccctggttaattagaatggagaatgacccctgaaccaacatgggcccatgagccg

SEQ ID NO: 1011092 - DNA, 120 bp, Artificial Sequence
  ENSG00000236049_17 (sequence is synthesized)
cactggtgaattgtcattcagacccaaaggctagtcagtctccctgggcattgagaagcaacagaaagcaagtatgttctttgattacagactaattttctagccccagagttggaacta

SEQ ID NO: 1011093 - DNA, 120 bp, Artificial Sequence
  ENSG00000236049_18 (sequence is synthesized)
aaatatgcagataggatagtggcaagagacagacaaatgcctaggcagataaggggtgtccctggagaacctctgacctgcccaggtcattgtgcaccagggttttgcctaaacatgccc

SEQ ID NO: 1011094 - DNA, 120 bp, Artificial Sequence
  ENSG00000236049_19 (sequence is synthesized)
atggtgaaaaatttcatcccttaacacatgcagtgtacagtggctcagactaagggcctgcaggcacattggaaagacagggtagagccaccaaaaattcgctccttatgcaggggaaga

SEQ ID NO: 1011095 - DNA, 120 bp, Artificial Sequence
  ENSG00000236049_20 (sequence is synthesized)
gcctggcctccagcttgtgtgtggtggcctggtattcaatttgtgagatggaaacctgtgtccaggacccctctctttgctgacagctttcctttcgcttaataaattccatcctcctca

SEQ ID NO: 1011096 - DNA, 120 bp, Artificial Sequence
  ENSG00000232746_0 (sequence is synthesized)
gtgagttcccaggttcatcgtgccctgtttccgttcgcaaaattaaggaaagatgttcagacaccgtcgcctggccgttcatacacaaaacaactcgcgctgtgtgtgctgccccacttc

SEQ ID NO: 1011097 - DNA, 120 bp, Artificial Sequence
  ENSG00000232746_1 (sequence is synthesized)
ctgccacttcactaatggccgcccattacccatttgttgactgtcagctccaaacctccccgtccttccctcgctgtgtgaggacaaggctgaactccgtgtcatttgccagctggccag

SEQ ID NO: 1011098 - DNA, 120 bp, Artificial Sequence
  ENSG00000232746_2 (sequence is synthesized)
ctatgccaagcagtctgaaatccttctgagcaaccactacaccacctccgaggtcagggtctttggtgtcccagaggttctggagaacttggaggcattgtgaagaccctgtttccctag

SEQ ID NO: 1011099 - DNA, 120 bp, Artificial Sequence
  ENSG00000232746_3 (sequence is synthesized)
tcactagacagataaactcaagttgcaaaacacgttttcctagaaaaccccaggcctccattctgcttgctgcagccgctggaaccacagatgctccctggcagggccaccataccctcc

SEQ ID NO: 1011100 - DNA, 120 bp, Artificial Sequence
  ENSG00000232746_4 (sequence is synthesized)
agcaccagctcctcacctcatgcctctcaggcagatttggatcatctgcctggccaggtaggcctgcaagcctatggcccctgggaaagatataataaatgccgttggcttttgatttgc

SEQ ID NO: 1011101 - DNA, 120 bp, Artificial Sequence
  ENSG00000232747_0 (sequence is synthesized)
gtgacatccagtcacccagtctccatccacactgtctgcatctgtaaggagacagcgtcaccatcacttgccgggcgagtcagagcattggtagtaatttagactggtatcagcagaaac

SEQ ID NO: 1011102 - DNA, 120 bp, Artificial Sequence
  ENSG00000232747_1 (sequence is synthesized)
tgcatccagtttgcaatctggggctccttcgcggttcggtggcagtggatctgggacagattttactctcaccatcagaatcctgcagcctaaagatgttgcaacttattactgtcaaca

SEQ ID NO: 1011103 - DNA, 120 bp, Artificial Sequence
  ENSG00000235537_0 (sequence is synthesized)
cagagtgagtataagaagcagctggaatagtaactaggaaccaatcatcttaggctttataaggcagagaaaggaattttaattttaggtgtgttgggaagccattagtgggtcttatgt

SEQ ID NO: 1011104 - DNA, 120 bp, Artificial Sequence
  ENSG00000235537_1 (sequence is synthesized)
aggaaatgaatatggtctgatttacatatgtaaaggataattctgagtatgttatggaacactttgtaaataggtaaaaagagaaataggaaaatcagctattgcattagactcagttag

SEQ ID NO: 1011105 - DNA, 120 bp, Artificial Sequence
  ENSG00000235537_2 (sequence is synthesized)
aagtggcagtggttttgctaggggttatataaaaggaagaaaacttaataatgttaggcctgactataggtagaatctatagtttttactcatgaattggatgtaagaattgaggagaaa

SEQ ID NO: 1011106 - DNA, 120 bp, Artificial Sequence
  ENSG00000235537_3 (sequence is synthesized)
cgaagaaccaagtaaaaattttgagctttggcttgggaaactaggtatatggtaacgccaaaaagagagatgtagagaattgatgtaggagcaaagctgggctgggaaattgagaaaatt

SEQ ID NO: 1011107 - DNA, 120 bp, Artificial Sequence
  ENSG00000235537_4 (sequence is synthesized)
atacctgccttgttaaagttgaaacacccacatgacactcacctggaaggatattcacacttggattgttggggaataataagaactagagatacagtttgagggtcactggcatagaga

SEQ ID NO: 1011108 - DNA, 120 bp, Artificial Sequence
  ENSG00000235537_5 (sequence is synthesized)
tagtaattaaaaccaggatgtcagttatatcacctagggataatgcaaagagagagaaaagcaggagataagacagatcgagcagtgggagaagccggcattgaagaatgaagaggaaaa

SEQ ID NO: 1011109 - DNA, 120 bp, Artificial Sequence
  ENSG00000235537_6 (sequence is synthesized)
ccagctccgagaagacaggagtttgtttgctaatgttattgagggataaagtaaaatacgaagagagaagtaacttggactggcggcaaagcgatcaccagtgctccttctaactgtggt

SEQ ID NO: 1011110 - DNA, 120 bp, Artificial Sequence
  ENSG00000235537_7 (sequence is synthesized)
gtcgataaagtaatgtggactggatgaaggagcctcgttggaataaactcatataggaatgatgataccgtgtttacctactaatgggaatgaccctattgaagagggaacatcacgtat

SEQ ID NO: 1011111 - DNA, 120 bp, Artificial Sequence
  ENSG00000235537_8 (sequence is synthesized)
gttggggagcggaaaagtcaaagtcctcgaaaagatggaattctgctcctggaaccagccaccatgctatgcagagctgaatccatgtagaaagctagcaagaggattcaaggagccctg

SEQ ID NO: 1011112 - DNA, 120 bp, Artificial Sequence
  ENSG00000235537_9 (sequence is synthesized)
gctgacagctgagctgagctctgtcctgtagccagcactgacagccagctatgtaattgagccatcatagacattaccgtctcattgtgccttcggaagatgacagccccagtcaatacc

SEQ ID NO: 1011113 - DNA, 120 bp, Artificial Sequence
  ENSG00000235537_10 (sequence is synthesized)
acacagagcggaagaactacccagctgagaccagtcctacaccgaattgtgaaagatgataaatggtcattgttctcagctattacattttcagagtcatttgttatacagggataaata

SEQ ID NO: 1011114 - DNA, 120 bp, Artificial Sequence
  ENSG00000235537_11 (sequence is synthesized)
accaaatcaccctccatttctattcagcttttagcttcaatctagaccctcagtatcctcagtttttggaagtatactcgcaagcatttggcacataataaaggctcagtgaatattaaa

SEQ ID NO: 1011115 - DNA, 120 bp, Artificial Sequence
  ENSG00000235537_12 (sequence is synthesized)
ttctgtgagaagtgtaaatcaaagtcatgtttctgtttccagcagtagaggaaagagagataaacctgatggacacaagcaggtaaaatctgcccaaaatgactctggggcttgttgaaa

SEQ ID NO: 1011116 - DNA, 120 bp, Artificial Sequence
  ENSG00000235537_13 (sequence is synthesized)
aattaacgcctatgagatctgtctcattcgagggcaaggcatggcggatcacctttccacatcagtgcctgggtctgatctgcaccatctttatacgctcagcagattaactggagccat

SEQ ID NO: 1011117 - DNA, 120 bp, Artificial Sequence
  ENSG00000235537_14 (sequence is synthesized)
ctgaaggaaccctataaccaggaggccgctgtcctcagggttgagcaccatctatggtcatatcagggaaactgtatatttcccagccaggaataaacattcttgctttcaagtctccca

SEQ ID NO: 1011118 - DNA, 120 bp, Artificial Sequence
  ENSG00000235530_0 (sequence is synthesized)
ggggcccgtagtccttctgcgagggcgcgaggactccaggagccgtcctggttcgagcatttctgaagaaactgagttcccggcgttcgcagcctgggagtcacaggcgcccacccaccg

SEQ ID NO: 1011119 - DNA, 120 bp, Artificial Sequence
  ENSG00000235530_1 (sequence is synthesized)
gtgttggaagggcatgagaaacaaggggagaacaagggcacccaaagcctgacccccacaaggctagaggagcaacaggaaaattcgtttccagagactgattcctcagctgctgagcag

SEQ ID NO: 1011120 - DNA, 120 bp, Artificial Sequence
  ENSG00000235530_2 (sequence is synthesized)
gagcctggagccacacttgctgcctggtactactgacacacaactggaaccaccgctgtggcctggggtgccaccagaagccagagattagaattgctttccccatctcatatcttccaa

SEQ ID NO: 1011121 - DNA, 120 bp, Artificial Sequence
  ENSG00000235530_3 (sequence is synthesized)
actcccaccagtgcctcccactggctgagtcagatgacaagggagtctgggaaatgtagttgtttggcttccagccctgaccatggagagtatagaaaggcaggtgtaggggagaaaata

SEQ ID NO: 1011122 - DNA, 120 bp, Artificial Sequence
  ENSG00000235530_4 (sequence is synthesized)
atagcatgtagtagcattcagggaaaggcaaatcttccaaaacaatatcttaggtataatagttctacataaaggtttgaatttaccattaaaagcatcaaaatgagcattttaaaagta

SEQ ID NO: 1011123 - DNA, 120 bp, Artificial Sequence
  ENSG00000235530_5 (sequence is synthesized)
gaattttaagtctgaatgggcagtatattcacatggtataaaattcaaattacaaaacaatatacagtgaaaaataagggggtttttttgctcatcttcttgtgacctggctctttccat

SEQ ID NO: 1011124 - DNA, 120 bp, Artificial Sequence
  ENSG00000235530_6 (sequence is synthesized)
ctctgtccacaaccctctgcaggcaataactggtacctttgttatggatcctctgcagatataaagtagacatatattaacaaatgttttctttggcccagaggatgcatattatgcaca

SEQ ID NO: 1011125 - DNA, 120 bp, Artificial Sequence
  ENSG00000235530_7 (sequence is synthesized)
ttcctccatttcttgtttgtttttgttttttccacttaattgtatcttggagatcactctgtatcagtatatatctgatttgttttagcagtacatgataatccattgtttggatatgcc

SEQ ID NO: 1011126 - DNA, 120 bp, Artificial Sequence
  ENSG00000235530_8 (sequence is synthesized)
ataattgtatcagccagtctctggacagtcttttactatttcaaggagtgctgcagtaaacatgtttgcgccacttcctggtacccattgcaaataaaactgggataatttcctgacgag

SEQ ID NO: 1011127 - DNA, 120 bp, Artificial Sequence
  ENSG00000235530_9 (sequence is synthesized)
ccccactccctccagcagtacatgacactgcctatttccccacagctgtgccagcatggtctgttagcaagtgttttctttttgcaaatttaaaagtggtatctcgctaaatgcaatatg

SEQ ID NO: 1011128 - DNA, 76 bp, Artificial Sequence
  ENSG00000235530_10 (sequence is synthesized)
tttgcaaatttaaaagtggtatctcgctaaatgcaatatggtagcagaggacatttgtggaaaaacaggtgaaatc

SEQ ID NO: 1011129 - DNA, 76 bp, Artificial Sequence
  ENSG00000235530_11 (sequence is synthesized)
gttagctgggcatggtggtgcaagcctgtaatctcagctactcgggaagctgagtcaggagaatcgcttgaacctg

SEQ ID NO: 1011130 - DNA, 120 bp, Artificial Sequence
  ENSG00000235530_12 (sequence is synthesized)
atatgcaatttcacttacaggatcttgttcttcagtgacatgtcataagagttaataattccacaagccaccctgcactgctgtgatcctaacaatattgaaagagtcttgctctgtcgc

SEQ ID NO: 1011131 - DNA, 120 bp, Artificial Sequence
  ENSG00000235530_13 (sequence is synthesized)
ggagtgaggaagccctaatatataatcttcagtcaactgttaatctggaagcctcaccacattgctttttggattagcagaatgccatcctggggaatcccagcagaaaggaagaaagga

SEQ ID NO: 1011132 - DNA, 120 bp, Artificial Sequence
  ENSG00000235530_14 (sequence is synthesized)
gcactgtcagtcttactggtcacccctggccaaggcccagtcatgacccttccttccatctccatttgatcccatcataaacctcaagaaaagtaaaaagcatcatcatcttaggaaaaa

SEQ ID NO: 1011133 - DNA, 120 bp, Artificial Sequence
  ENSG00000235531_0 (sequence is synthesized)
actcaccgagcccgtggacatcccgttgtcccccttgcccacacgcgtcctctttcctcccccctggccagtctcgctgtctccgccttccgctccctggcggaggcggaggccagagag

SEQ ID NO: 1011134 - DNA, 120 bp, Artificial Sequence
  ENSG00000235531_1 (sequence is synthesized)
cgctccaaggaagactaaaaacccaggccgggaagcgcggggtgagaaagcgaggtgggtggcgagagcgtgagcgcccctctgctgaccccggggagcgtggactacgagttggcgccc

SEQ ID NO: 1011135 - DNA, 120 bp, Artificial Sequence
  ENSG00000235531_2 (sequence is synthesized)
aagtccagaatccgcgcgcaccgcggaaaatatttgcaatacctgccacgtccaaggttcagctgaggccaatgtaaagccagtattataggacacttctcagactgagagcccaatgtc

SEQ ID NO: 1011136 - DNA, 120 bp, Artificial Sequence
  ENSG00000235531_3 (sequence is synthesized)
aaggcagacttcaaatcatcccaacaccagagaacactaaatgacagtggacaggaagacagtgtaccttttgctcctgatgatcacggtgcttcctgaaggccctggattgtcgtattc

SEQ ID NO: 1011137 - DNA, 120 bp, Artificial Sequence
  ENSG00000235531_4 (sequence is synthesized)
acctgctcatctccagcacttaactcaagacccccgtggatccaggaactggcataggtgcactcagcaacgctttggacactgccatgtgagggtttaatgcctggatctgtgccatga

SEQ ID NO: 1011138 - DNA, 120 bp, Artificial Sequence
  ENSG00000235531_5 (sequence is synthesized)
agcaaacaggaggagaatgaaagctggagcacttagcaggctaggattccagtatggtcttgaacaggagtgatgatgggaagctcactcttgaattatttcctaagcaaagccaagaag

SEQ ID NO: 1011139 - DNA, 120 bp, Artificial Sequence
  ENSG00000235531_6 (sequence is synthesized)
cttcctgggctaagcctgctctgcatcaagtagtgcccaatgtggagctgaggagagaagacgatggtgtgacagatggtgagagaattggcagttggcagtcggcaaggcaaaggcaaa

SEQ ID NO: 1011140 - DNA, 120 bp, Artificial Sequence
  ENSG00000235531_7 (sequence is synthesized)
tccttcctcttattgtgaagtgcaaggtgcaaaaaggaggcctgctgcttgttcaggactatgtcagcattgtggctcagaagaagcgcaacggctttggcgtggccttcccttgcagca

SEQ ID NO: 1011141 - DNA, 120 bp, Artificial Sequence
  ENSG00000235531_8 (sequence is synthesized)
aagtgaagtgcagtgttcttttgaagaaaaacagacacagaaaacgtggtgacagtgtctaatctgtcttatttcactgcttaactgcttaaaagacattagcgacactatttaatacca

SEQ ID NO: 1011142 - DNA, 120 bp, Artificial Sequence
  ENSG00000235531_9 (sequence is synthesized)
aaatacatagcacttaaaactggtgttcagaatcaagcttcaaaataatgagtttatagttctagcatggtgtgtgtgcatgtgtgggaagtggatctgtgtgtgtgtgtgtgtgtgtgt

SEQ ID NO: 1011143 - DNA, 120 bp, Artificial Sequence
  ENSG00000235531_10 (sequence is synthesized)
gagagagagagagagagagaatgaattccaaggcatttgttttgtgttgcttttgcaatgggatgattccacaaggacaaaggacaagctttcagggtaaagatgttgggttgaacacag

SEQ ID NO: 1011144 - DNA, 120 bp, Artificial Sequence
  ENSG00000235531_11 (sequence is synthesized)
caagctttcagggtaaagatgttgggttgaacacagaagaaaatcctcctgagattgatcatttgtagaacagtggcttacagatttggggcttcacaagcttgtaaatgttttttaaaa

SEQ ID NO: 1011145 - DNA, 120 bp, Artificial Sequence
  ENSG00000235531_12 (sequence is synthesized)
tcagagactgttataagtttgcccatttttagtttctccacttaaagactttttttttttgaaaaaggcaacaacagtcttctatccccatcattttatgaacaaacgtacatttcaaaa

SEQ ID NO: 1011146 - DNA, 120 bp, Artificial Sequence
  ENSG00000235531_13 (sequence is synthesized)
gttactctccccaaaggaaggaaagacataatagcacaataaagggcagcatttcaaatcaatacacttcaaaataacacttatcttaatgaaaactcacccctgccttcatttctctgg

SEQ ID NO: 1011147 - DNA, 120 bp, Artificial Sequence
  ENSG00000235531_14 (sequence is synthesized)
acctaccagggagtaaacgctttaccatcaaatttcattggcctgtggacctcgctgctctgtgagactggaggtttccccaacattcacccaccccttggtattctcccaattctgttg

SEQ ID NO: 1011148 - DNA, 120 bp, Artificial Sequence
  ENSG00000235531_15 (sequence is synthesized)
ccttttgattcatacttcacctcaagaatccacttgctaaacacccaacaaaaggctgggaatagagcaaggaaggtaaaaggtgtctaggagagttttctggcaatgttggaagtttct

SEQ ID NO: 1011149 - DNA, 120 bp, Artificial Sequence
  ENSG00000235531_16 (sequence is synthesized)
gctatattgagattttgggtaagcatgaggaccgcagtacataccccgtcttcatccaggcgatctgtgcacttcaaattagtatcaagaatgaccttcatggtctgagtgtacccgccc

SEQ ID NO: 1011150 - DNA, 120 bp, Artificial Sequence
  ENSG00000235531_17 (sequence is synthesized)
atggacgcatgatgcaaagctgtccagccattgtggtcactggtaaagagttaagaaaagatgtgtgcatacacttaacagatgaaatgcgggatgggatgccacttggcttattctagg

SEQ ID NO: 1011151 - DNA, 120 bp, Artificial Sequence
  ENSG00000235531_18 (sequence is synthesized)
taaatctgatgacaacaaaaagcattattgagatctggcaactaaatatttataaaacatttataataaatgagctaattccaagctcaatgatcttaaatgacctatttctaatgtgat

SEQ ID NO: 1011152 - DNA, 120 bp, Artificial Sequence
  ENSG00000235531_19 (sequence is synthesized)
tagcatgtctgtgtcatacctaatttttttaaagctataatgaactgatacacatcaatttaaatcttgttttattctttcaatgaacactgtatcaaaatttttttatgaagtaatgtt

SEQ ID NO: 1011153 - DNA, 120 bp, Artificial Sequence
  ENSG00000235531_20 (sequence is synthesized)
agtctttgtggtcaatagttattggtaatactactagtaatatgatacatggctataagatgcttagcttagtgtcagttattattctaagagtttaaatctaaaaagcttccctcttgt

SEQ ID NO: 1011154 - DNA, 120 bp, Artificial Sequence
  ENSG00000235531_21 (sequence is synthesized)
gctctgaaaaatgcttactcaattgctttgaaaaatgtttatccttttccacagaaattcaagatgtaaatacaacaaagccttgtcatattagctatcttttttcaaattagacagaaa

SEQ ID NO: 1011155 - DNA, 120 bp, Artificial Sequence
  ENSG00000235531_22 (sequence is synthesized)
aaaattcttgacactatttaatttcagtgctagtgagcagatgttttagggtgcaagagccatgttgctatttcagttatgatgtaattaagcaacaactgtctggcctgggtctacttc

SEQ ID NO: 1011156 - DNA, 120 bp, Artificial Sequence
  ENSG00000235531_23 (sequence is synthesized)
ggtcccctttgcaggtcagttgcttggtgtttctttgtaaaccagaaaaaactgagcaaaacattcattcatgtagctgtagcaccaatttgctggcatcaatattatggtaaggaaatg

SEQ ID NO: 1011157 - DNA, 120 bp, Artificial Sequence
  ENSG00000235531_24 (sequence is synthesized)
tgtttttgaacattagcctaataagctctttgctactgctatggtaagatatcaaatgaaaaacctctgtaaaacatttccaggttttttctttcttatcacaatatcatttaattatgc

SEQ ID NO: 1011158 - DNA, 120 bp, Artificial Sequence
  ENSG00000235531_25 (sequence is synthesized)
cacatattttattatacttacatattttaactttgtttcttgtacttgagttcatttaagtataataaaattcagaaatttttaccatctcctgttgtcacttaaagggaactttttatg

SEQ ID NO: 1011159 - DNA, 120 bp, Artificial Sequence
  ENSG00000235531_26 (sequence is synthesized)
cctaccattcatcagattgaatgaaaagtagagtatttgaacttgtatgttttgtgtgtgtgtgtacgtgcatacacacatacacaaccacagttttgtatctatataggaatatggcag

SEQ ID NO: 1011160 - DNA, 120 bp, Artificial Sequence
  ENSG00000235531_27 (sequence is synthesized)
catgatgaggtaaaatatgagaaactatgtttcaaagaaaggttctgagaaagactgcacaaagccaattattctgtgaacagaatattcttgaacaaggttcttcaacgctataaactt

SEQ ID NO: 1011161 - DNA, 120 bp, Artificial Sequence
  ENSG00000235531_28 (sequence is synthesized)
caaagtctttgtcagttggaaataatactgacttccctttcagtatttttagaagttacatatgttttgatgaaaaaataaattggataaaagtacttagtgagatataaagttagacct

SEQ ID NO: 1011162 - DNA, 120 bp, Artificial Sequence
  ENSG00000235531_29 (sequence is synthesized)
cataattaaaaatataatgaaaagatagcctgaaaatggctaattaaagaaattatataaacactccaatcatatatcctcacctgagaaacaatgcaccttttttcagaagaagctgaa

SEQ ID NO: 1011163 - DNA, 120 bp, Artificial Sequence
  ENSG00000235531_30 (sequence is synthesized)
ctactttatcatgtccattctttgctgccagatggagaggagtcattccatgaaggtcaccttcattcagaagcctcgtatcacttatgtcttgtaggagcctctgacaggtattgatac

SEQ ID NO: 1011164 - DNA, 120 bp, Artificial Sequence
  ENSG00000235531_31 (sequence is synthesized)
gcccataacttggaaaaaattaggtttcatattttcaaggcaaatattaaacagaaagaagacatgttcatacattgctagactgacccttacctggctgcaaaatgcagaggtgatttc

SEQ ID NO: 1011165 - DNA, 120 bp, Artificial Sequence
  ENSG00000235531_32 (sequence is synthesized)
ttatctttgcttttggaatgaatggacacattaaagccaagtaggttatttacagaaccagggcccccctgtctacatgcataatgtagaggagtacacccatcgttgtcttcatccatt

SEQ ID NO: 1011166 - DNA, 120 bp, Artificial Sequence
  ENSG00000235531_33 (sequence is synthesized)
accagctctttgatctgttgcatctataggaaaaaattaatatcatacaaataactctgctattatgctaatatgatggttttcaaactattctgtaggaaaatattttccaacaagggt

SEQ ID NO: 1011167 - DNA, 120 bp, Artificial Sequence
  ENSG00000235531_34 (sequence is synthesized)
caatatgtattccttggggccaaaattgtaaataacctaaaggatttgagagtaatataaatatgaatgaagttgaatgctctgtcttcatttagtgtacattaccatattagtgtacat

SEQ ID NO: 1011168 - DNA, 120 bp, Artificial Sequence
  ENSG00000235531_35 (sequence is synthesized)
tactgtattaaaggatctgagagatcatgccaataggaaaatgtacttaacatttttaactcagcatttttcaaatatatttgatcatggcccttccctctgcccctcctcttatttcct

SEQ ID NO: 1011169 - DNA, 120 bp, Artificial Sequence
  ENSG00000235531_36 (sequence is synthesized)
cccacccccaaataacacccaacagcttcatgttaatatgttctgttaggtaaaatggatgggatgtaaacattaggtttattttatgttttatatgtatagtaaataaaaaatgaatga

SEQ ID NO: 1011170 - DNA, 120 bp, Artificial Sequence
  ENSG00000235531_37 (sequence is synthesized)
ttggaaaccactgggccacaggaaaggcaggctctctcagtcctgctcctgccatggaagaagcctgctcccaccatgccttctgccacgagtaaaagttccctgaggcctccccagaag

SEQ ID NO: 1011171 - DNA, 120 bp, Artificial Sequence
  ENSG00000235531_38 (sequence is synthesized)
ctctctagtaggactctggatagatgccattaccctgagacctcaacatttatgaagagttgcagacctggaagccagtctgctggggttcaaatccagactctgtggcttcctgggtaa

SEQ ID NO: 1011172 - DNA, 120 bp, Artificial Sequence
  ENSG00000235531_39 (sequence is synthesized)
acctcctctaactctttcccttctggatatttccttcaataaatctgttgcacatctaacctcattttggcatctgcttctcaaaggttttttaatacaaataattctgagagtgggcca

SEQ ID NO: 1011173 - DNA, 85 bp, Artificial Sequence
  ENSG00000235531_40 (sequence is synthesized)
gcttccccttcatcagccatgcagaactacttcaaatcatcccaacaccagagaacactaaatgacagtggacaggaagacagtg

SEQ ID NO: 1011174 - DNA, 120 bp, Artificial Sequence
  ENSG00000235531_41 (sequence is synthesized)
tcatggctaatgaaagcctggaagaacattagaaccaccatgaggagacttcaaatcatcccaacaccagagaacactaaatgacagtggacaggaagacagtgtaccttttgctcctga

SEQ ID NO: 1011175 - DNA, 120 bp, Artificial Sequence
  ENSG00000235531_42 (sequence is synthesized)
agtctctccgtgaaatgacttgaacttataaagcgcattctgctatgtggttgcctcaccaactcccttcctgcctggactattacagtaacctgtggattggtctccttgccttgagac

SEQ ID NO: 1011176 - DNA, 120 bp, Artificial Sequence
  ENSG00000235531_43 (sequence is synthesized)
gatgacatttctggcacctaaacccatcagcatcaagttgttcttttgaaaacataaatatgaccatgttacatgtttttaaacctttcaatggaatactttcacctacaggataatgtt

SEQ ID NO: 1011177 - DNA, 120 bp, Artificial Sequence
  ENSG00000235531_44 (sequence is synthesized)
tagattttttaacatggcatgcatgacgcttcactctctggcttccacacattctccagaattacttcctgtcactctcctatgtctattcttgtctccaacaattcccaacctcttgtg

SEQ ID NO: 1011178 - DNA, 120 bp, Artificial Sequence
  ENSG00000235531_45 (sequence is synthesized)
ctgtggtccatggctctccatgcctcatgcctgtgctgtcctggagcacttccttcaactgatacacaaaaaaagtcttgcttattcttccctgatctacctgggtttcaccttcacctg

SEQ ID NO: 1011179 - DNA, 120 bp, Artificial Sequence
  ENSG00000235531_46 (sequence is synthesized)
tatgcagagttaatgccttcccgctgtctgttcccatatcaggctgtgtactattgaaatattcatcactcccttcaggctgtggcttaatgtgcccatctccttatcagccttggcaat

SEQ ID NO: 1011180 - DNA, 120 bp, Artificial Sequence
  ENSG00000235531_47 (sequence is synthesized)
ttaaggacagaggttttgttttgttttttgttttttaatctctctcatttttgtgtgttctcaggagcaggagagaagggatgttaatatgttgaattaatgttaatcattaaaaccatc

SEQ ID NO: 1011181 - DNA, 120 bp, Artificial Sequence
  ENSG00000235531_48 (sequence is synthesized)
acaaccccaaatttctttaatccctacttaatccaaattgattgaatttgtacaattttcatgaatgttgaataatcttgaggtgaaataatcttatttcacaaaataaaaatttgttga

SEQ ID NO: 1011182 - DNA, 120 bp, Artificial Sequence
  ENSG00000235531_49 (sequence is synthesized)
aatatcattcaacaaagatattattctaaatattcaaaaccgaaagaaagcataggtcatagagctatttggtggtcagttcagaggaaactttgacaggatgatgccaacaatgggaaa

SEQ ID NO: 1011183 - DNA, 120 bp, Artificial Sequence
  ENSG00000235531_50 (sequence is synthesized)
aaaaaagccccaataaccatcctgtcttataacctacaaataatgttacatacaattttaaattcaaatatatttgttagcatgtttgaaatctatttttgtttgtttgttttcctgggc

SEQ ID NO: 1011184 - DNA, 120 bp, Artificial Sequence
  ENSG00000235531_51 (sequence is synthesized)
tcctcagatagtgaattggacttaggaacagattttgaagaataaactagaatcagtcaagtggatggagggtaaatgtcctctagggggataactcaccagaaaaagaggctgaagagt

SEQ ID NO: 1011185 - DNA, 120 bp, Artificial Sequence
  ENSG00000235531_52 (sequence is synthesized)
aggcagcaagggaagagctggtggctcctcatctgtagcacagggtgttgtgaaagtaggagagagaaggctggcacggggtgggggcgggtgcagagcaggtcatgtagggtcatacaa

SEQ ID NO: 1011186 - DNA, 120 bp, Artificial Sequence
  ENSG00000235531_53 (sequence is synthesized)
acctcactaaattccaaagaccacaggaagtctcagaagcatttttccaggggagggatgctatcagatttgcaaaaaagtagacttgaaaatcattctcaaggtagcacaggtgctgga

SEQ ID NO: 1011187 - DNA, 120 bp, Artificial Sequence
  ENSG00000235531_54 (sequence is synthesized)
agaataatgaaaattactgaccttcaaaaagtccttattctgtgcctggtattattccgggcatattacatatgttactgcttttcattttcacagcaaactaagaggtgaatactagca

SEQ ID NO: 1011188 - DNA, 120 bp, Artificial Sequence
  ENSG00000235531_55 (sequence is synthesized)
tgtcttcttttactaagctacatgcacactaagtagcaacactgagatccaaatcaaggtaatcaggcaggagagtccgtgcaattacccttgctatagtgcctccccaaaggcaggagg

SEQ ID NO: 1011189 - DNA, 120 bp, Artificial Sequence
  ENSG00000235531_56 (sequence is synthesized)
aattggagtccggaggtggatagcttagttaaaaaacaaaagcaacagtagaaggaagaaataataacctagggtagtgatgaagcaaaaagagagatacaaatgtaagagatatttaga

SEQ ID NO: 1011190 - DNA, 120 bp, Artificial Sequence
  ENSG00000235531_57 (sequence is synthesized)
aagtaaaattaattaggtttgataaccccttaaaaatcaggtagagggtgatgttcaatgtctgcctcagacaggtggaggtgctatttgcaagaataaagaacagaagcagcatcaggt

SEQ ID NO: 1011191 - DNA, 120 bp, Artificial Sequence
  ENSG00000235531_58 (sequence is synthesized)
ggagagggagcttttggcaatgtttgggattcaatatgtgaagctagtattataaaacagtgtagcaaagtgatatattaggagttataaatgcacagaggaggaagtgactcattctga

SEQ ID NO: 1011192 - DNA, 120 bp, Artificial Sequence
  ENSG00000235531_59 (sequence is synthesized)
ttaaagaagactcagataagttatctgaactttgaaagatgtgtagattttccccagttgcaaaatgaaagaaagggtattacaggcatatggaataaaatgtgcaagttaaggcatcgt

SEQ ID NO: 1011193 - DNA, 120 bp, Artificial Sequence
  ENSG00000235531_60 (sequence is synthesized)
aaatcccaaggtaccgtgagaatccgggccggctgcagagtgcatggcagagaatgggagctgatgctgaaggaaagcaggagtgaaactggggaaagtttccacatgcttaggagctgt

SEQ ID NO: 1011194 - DNA, 120 bp, Artificial Sequence
  ENSG00000235531_61 (sequence is synthesized)
tcctctctgcccaggagcaaaatatactctcacaagtcccagggtcggtcagtgcttgtgtgtagttgtacctttggaaggttatgcccaaggtgacatgtgaaagctgctggccaggtt

SEQ ID NO: 1011195 - DNA, 120 bp, Artificial Sequence
  ENSG00000235531_62 (sequence is synthesized)
tagggaatcacaaagaaattgaaggctgaagttcacaggctggccagccccagaggaaattctattttcacatgaggattctgctttgctctctagcctcagaatgtggcatggtggcag

SEQ ID NO: 1011196 - DNA, 120 bp, Artificial Sequence
  ENSG00000235531_63 (sequence is synthesized)
ctgtcatagtatagcatcttgcatagtgttgtgctccttgactaggaagatataccccttgagagactggtggacagtggtgggcattatttccaatcccctctccaggtccctatgtct

SEQ ID NO: 1011197 - DNA, 120 bp, Artificial Sequence
  ENSG00000235531_64 (sequence is synthesized)
ctcatatagaagtctgctactgatgacaaatctggtttattgagcaacttattatgccttacaagccaccttgtatattaagtgccctgctttcctccctttcctggcttgttctccagt

SEQ ID NO: 1011198 - DNA, 120 bp, Artificial Sequence
  ENSG00000235531_65 (sequence is synthesized)
cactcaagtctcaggaatgttttcttttcatttcttttattttttaacttcatctcaattttgggttttttttcaacttttattatagcttcagggggtacatgtgcatgtttaaaggaa

SEQ ID NO: 1011199 - DNA, 120 bp, Artificial Sequence
  ENSG00000235531_66 (sequence is synthesized)
tattgtgtgatgctgaggtttggagtacaaatgaatccatctcccaggtagtgagcatagtacccagtaggtagtttttcagcccttgcccacttcttccctccctactcttgtattccc

SEQ ID NO: 1011200 - DNA, 120 bp, Artificial Sequence
  ENSG00000235531_67 (sequence is synthesized)
cagcatctattctcatccttatgtccacgtgtactttatgcttagttcctaatcataactgaggacacgtggtatttggttttctattcttgtatcggttcacttaggatcatggcctct

SEQ ID NO: 1011201 - DNA, 120 bp, Artificial Sequence
  ENSG00000235531_68 (sequence is synthesized)
atctggaaccattttgctacaaaggatatgattttgttgtttttcgtggctgcagagtattccatgctggatacgtatcacatctttatccaatccagagttgatgggctcctgcattga

SEQ ID NO: 1011202 - DNA, 120 bp, Artificial Sequence
  ENSG00000235531_69 (sequence is synthesized)
ttccttgcctttgctaatgtgaatgctgctgcaatgaacataggggcgcatgtgcgtttttggtaggacaacttattttcctttgcatttatgtccagtaatggaaacttttctttatgc

SEQ ID NO: 1011203 - DNA, 120 bp, Artificial Sequence
  ENSG00000235531_70 (sequence is synthesized)
tttcaaattttatgccctgccatcattccagcatctatcacacttggtttaattatttgtttaagtctatgtatcctcccccggactgtgattttcttgcctccaccccaccctcactcc

SEQ ID NO: 1011204 - DNA, 120 bp, Artificial Sequence
  ENSG00000235531_71 (sequence is synthesized)
cttatttctgtaatagttgtgcctagaacagtgccaggcacatagtcactcattacagtttcttgttgaaagtaattgaatagtatggaagaaaaagggaagctttttacttatttacca

SEQ ID NO: 1011205 - DNA, 120 bp, Artificial Sequence
  ENSG00000235531_72 (sequence is synthesized)
tggaaactgctctcaatgtgattagtaagcaaacttttcttcttccttcgttttcccccatagtcagaaactctcactgcaggcttcggaaatgcaatccttatggagcttgatgcttgg

SEQ ID NO: 1011206 - DNA, 120 bp, Artificial Sequence
  ENSG00000235531_73 (sequence is synthesized)
ctatcctcacagtagatcaagactgcactcctattcccatatttcaagagataatttttcttgattatgcatgaaatgcacttatctgtggaggaatcgatcagttctgactatttacac

SEQ ID NO: 1011207 - DNA, 120 bp, Artificial Sequence
  ENSG00000235531_74 (sequence is synthesized)
agttcacatctgcaggaggaaactctttcataaataagatgcagcgaagtccagaatctgtgaaatcattttggcccaaatgagtcttttgtgtcctttgttcatggagattgggtgaag

SEQ ID NO: 1011208 - DNA, 120 bp, Artificial Sequence
  ENSG00000235531_75 (sequence is synthesized)
caaggtgcacctgtttcaatagtaaagcagccccactgaggaaaggactttttgagttgtgtcattagaagtcatcattgcatatgtgagagaagagaggaaggaaagggcaggatgcag

SEQ ID NO: 1011209 - DNA, 120 bp, Artificial Sequence
  ENSG00000235531_76 (sequence is synthesized)
tcacataacaggtaagaaggtaaaacaatgttctcttaaaatagtggagtgcatctatcccactttaatttggcctcaaatagcagttgtatgcattttgcttctaattccagtgttctc

SEQ ID NO: 1011210 - DNA, 120 bp, Artificial Sequence
  ENSG00000235531_77 (sequence is synthesized)
agtgaaaaaaaggaaactgaccatggatttattccagggcatttatgcctgacctgctacctgttatggacagaacatcttgtaggttctttatcctcctgtatggacataggggaagac

SEQ ID NO: 1011211 - DNA, 120 bp, Artificial Sequence
  ENSG00000235531_78 (sequence is synthesized)
aatattgactagttaatcttggcaggtaattattagaagatgcctgttttgtttgttttgaatatctaaattatcctagaaggagaaaaagtaggatccccaaaggggttggcatctgag

SEQ ID NO: 1011212 - DNA, 120 bp, Artificial Sequence
  ENSG00000235531_79 (sequence is synthesized)
ttgaattttgaagcatgagaagaagctagcaggcaaagattgtgggggatgagtattcaaaacctagggcacccacgtgcacacgcagggaaaaagaaaccaaggtgttgtactcagaaa

SEQ ID NO: 1011213 - DNA, 120 bp, Artificial Sequence
  ENSG00000235531_80 (sequence is synthesized)
atgcagaaatactgagagtagctcaatcagactagagtgtaggttaagggagtgagaaagtaacctaggcaggtatgcagaagcccgatgaaaaaaagaccttataaaacaccccaagga

SEQ ID NO: 1011214 - DNA, 120 bp, Artificial Sequence
  ENSG00000235531_81 (sequence is synthesized)
ctgtgccaattatttagaagtgaatgaggagtcagttgaagattttaagaaggaaagtcacatggttagggttttatgatagaaacacaactttggcaatggaacccaaaacacctaatt

SEQ ID NO: 1011215 - DNA, 120 bp, Artificial Sequence
  ENSG00000235531_82 (sequence is synthesized)
gaggcaaatctgtaggtgggggagaaggccagcaatgtcaggcccagtccagtatgtacacctgagaaaaacttccacatgtgcatgtaagacacaaagatttgtttcagccttttttgc

SEQ ID NO: 1011216 - DNA, 120 bp, Artificial Sequence
  ENSG00000235531_83 (sequence is synthesized)
tatagaagtactagaaacagtctaaacagtcactattaaaggattgcatatataaaatgcagcagtgccacagaatgaatgtattaccacaattaaatggcatgaatttgatctttatat

SEQ ID NO: 1011217 - DNA, 120 bp, Artificial Sequence
  ENSG00000235531_84 (sequence is synthesized)
gttataaattggcactgggattttgtgagctacccacgtgattctaatgtgcaacagtttgagaatttctggtctagagaaaatacaggcctttgcagtatcttggaggggagcttgttg

SEQ ID NO: 1011218 - DNA, 120 bp, Artificial Sequence
  ENSG00000235531_85 (sequence is synthesized)
aacgggctgaccctgcccggcgcccaggagcgccctgggtatctcctggctgctctcccgaatccttgcgcgccgcgcccctaccaggttcactgggtgcacgtagccgttctcatagcg

SEQ ID NO: 1011219 - DNA, 120 bp, Artificial Sequence
  ENSG00000235531_86 (sequence is synthesized)
ctaatttggagcatctttctaagactttgcatgtaaatgtgactggatggccatctgtcaggaaaagactagaagaattgaattggaaaagcgaaaaaaataaaagtggatgaagacgtc

SEQ ID NO: 1011220 - DNA, 120 bp, Artificial Sequence
  ENSG00000235531_87 (sequence is synthesized)
aggatttttcccaagccgggagagctggcagatcagagagggactttccagataaatcccatctggggaaacgttactatcttccacaagcaatttttctaaaaatgcaaatgctctttt

SEQ ID NO: 1011221 - DNA, 120 bp, Artificial Sequence
  ENSG00000235531_88 (sequence is synthesized)
atagagctcggccttccctcctttaagaaagggcttgccgattcaaacctgcccgactcagctggattaagttgggcaagggagatttgccgtcagtctgcaacctggtggcagatggag

SEQ ID NO: 1011222 - DNA, 120 bp, Artificial Sequence
  ENSG00000235531_89 (sequence is synthesized)
atggaaccaagatttaccctggaagtaggatattagtcaatggctgtcactggggtacaatgttcagaacgatgcaaacagacacggagggttgattcttcttcagggaaatggctggcc

SEQ ID NO: 1011223 - DNA, 120 bp, Artificial Sequence
  ENSG00000235532_0 (sequence is synthesized)
gaagttaagtgatgtccctgtttgcagtgtcaatgagattgagggcttgggcttgaacccaaccttctccctccaaatagcctgctctttctgttatgtcatgtttcatatacaagtttg

SEQ ID NO: 1011224 - DNA, 120 bp, Artificial Sequence
  ENSG00000235532_1 (sequence is synthesized)
ggagcctccagccctgactatcccaacatatacaacataatgtatatgttgtctttggaaatatcttctgtgaaggccaagcatttaatattacaggaaaccttgaagtggatatggaag

SEQ ID NO: 1011225 - DNA, 120 bp, Artificial Sequence
  ENSG00000235532_2 (sequence is synthesized)
cttggcagccagcttggatcttcctaagagcctctttccttcataccatcttcagattgttattccgtgacatcttatctacttaagcagctaacccatgaggcatccaaaacagagaga

SEQ ID NO: 1011226 - DNA, 120 bp, Artificial Sequence
  ENSG00000235532_3 (sequence is synthesized)
aaaaacagagtgaacattttgccttatggaattgtcaaaagttgcggtcgaaacacaggcaagatttggaagaatctgtaatgagccagggccagttttcctagttatagagcctaggct

SEQ ID NO: 1011227 - DNA, 120 bp, Artificial Sequence
  ENSG00000235532_4 (sequence is synthesized)
ggaggaggtacatgggctggggaaggagagggaattagagattggctgttcctggaaactctctgcctgtactccatggcctgagtcccaggacctggaagcggctgaaaatctgagata

SEQ ID NO: 1011228 - DNA, 120 bp, Artificial Sequence
  ENSG00000235532_5 (sequence is synthesized)
tagaagagactggtgctgcctttctggggagggcttgggaaaacagcaagttccctgaatttttccatggcacaggagcagatgaaatgtcatgattggtgtccaggctagtggactgag

SEQ ID NO: 1011229 - DNA, 120 bp, Artificial Sequence
  ENSG00000235532_6 (sequence is synthesized)
ttaactcccgagagtccctgtactctccagcatggcacgaggagaagcaaaccattttcctatgcagccataggaaaacggtacaaacacgacactgaaattcagctgaccgcaagagct

SEQ ID NO: 1011230 - DNA, 120 bp, Artificial Sequence
  ENSG00000235532_7 (sequence is synthesized)
tgatggtcagtgtgagccagatggagcaggaacatgtatggatggaaaacccagatccaaagttcatccccctctcccgtggatgctccagcacattgcaaggtttcccagaaacttaga

SEQ ID NO: 1011231 - DNA, 120 bp, Artificial Sequence
  ENSG00000235532_8 (sequence is synthesized)
ggcaaccttggcacaaggacatgatttgttggaaattaagttttgtcacctgggggactgcgagcttgatacggaaattaattcagttatataattataaaaatgatgcactttctacac

SEQ ID NO: 1011232 - DNA, 120 bp, Artificial Sequence
  ENSG00000235532_9 (sequence is synthesized)
atctgattttgtgaacccaaattagtttccacaacgcaactgtgttaacatttgccaacctctggggcaacattggttgtctttgttgcttttttctagaagttttcagctcaaactcat

SEQ ID NO: 1011233 - DNA, 120 bp, Artificial Sequence
  ENSG00000235532_10 (sequence is synthesized)
ctttcccttttttattttcatttctaaattctggtgagtggtgttttgataagtagatatcagctatttcctgtcttacttgaaaagtcttctctgtattaaataacaaaggtcacttag

SEQ ID NO: 1011234 - DNA, 120 bp, Artificial Sequence
  ENSG00000235532_11 (sequence is synthesized)
ataaatatcttctcattaccagagggtagggaactgcttctcctatacataacttctattatctttcaatccagaaaaaaaaacgtggcaggaggacaagtttttgaatgttatgaatcg

SEQ ID NO: 1011235 - DNA, 120 bp, Artificial Sequence
  ENSG00000235532_12 (sequence is synthesized)
tgaatgttatgaatcgtgatttctgtgtctaaaatctgctcttttgttaacactaagggcaacttccttcaaagtggttcatcttggtctattactgtgtttgtgtgtgtgtgtgtgtgt

SEQ ID NO: 1011236 - DNA, 120 bp, Artificial Sequence
  ENSG00000235532_13 (sequence is synthesized)
accagatcttactcccaggcctcctgtcaccagctgtgtgactttgctgaagtcatttctttcccctaagtctcagttccaatacctataaagtgagtgttctgcctgtgtgtgttttag

SEQ ID NO: 1011237 - DNA, 120 bp, Artificial Sequence
  ENSG00000235532_14 (sequence is synthesized)
gtctttattaatgttgaaatgtcctgactttatgggttctcattcactgtgatgtggtaaccaaaacaagcagagattaataaccaggactcaataatgtaaaacactaaaaattatatt

SEQ ID NO: 1011238 - DNA, 120 bp, Artificial Sequence
  ENSG00000235532_15 (sequence is synthesized)
tttgcaaatttttgtaaacgcgggatcatatctctctcagtgacagtattggtgtgatccattattgtacatttagtggataaacagaatgtaactaagaagtgttatctttgttatcag

SEQ ID NO: 1011239 - DNA, 120 bp, Artificial Sequence
  ENSG00000235532_16 (sequence is synthesized)
gggaacgtggagttggatgtgtatgatggggatgggcagttaattcataggttaaacactcaacgagggaatatctctttatcgctatctccaaagactccccactcttcctcaattttc

SEQ ID NO: 1011240 - DNA, 120 bp, Artificial Sequence
  ENSG00000235532_17 (sequence is synthesized)
ttagtaactcactgctcagacttagtttccccagaagcagactatgagaccaggatttgatgcaagcagtttttttggagttgatctcagaaaggctaagagagtagagaagtaatacag

SEQ ID NO: 1011241 - DNA, 120 bp, Artificial Sequence
  ENSG00000235532_18 (sequence is synthesized)
agaagtgaagaaagctaatagaaggtcccggtgctctctcctgaaagagagcgctggaagactgagtagaacatgccccagagttgtccccctctgctggggcaagagaactagggtact

SEQ ID NO: 1011242 - DNA, 120 bp, Artificial Sequence
  ENSG00000235532_19 (sequence is synthesized)
gatcagctaatttccgtgcttcactggttaagggcattaacctccccaaacttctggcctgtgccccagatagaccaggcatgcttctgtggccagagaaagcccgaggatggagagtca

SEQ ID NO: 1011243 - DNA, 120 bp, Artificial Sequence
  ENSG00000235532_20 (sequence is synthesized)
cagatgcttgtggtaggtagcaggtggtgtgtatggaaatgggaatgggatgccaaggggatttgggcagggcaccaagcatctgccgcattaccctaatccaggcaataacactcacag

SEQ ID NO: 1011244 - DNA, 120 bp, Artificial Sequence
  ENSG00000235532_21 (sequence is synthesized)
tatcccagggattccccttctagcctcgaattcctcttattctcatttattttgtatttactttctagaccatagtttctcagatagtaaaggttctactgactttcctcatctctctgc

SEQ ID NO: 1011245 - DNA, 120 bp, Artificial Sequence
  ENSG00000235532_22 (sequence is synthesized)
aacctctttcctgcctagcttctcttccatggtcaagccaatacacacagaattttgccttccattcttcactcaggtgtttcttccacttggaatctgttcctcagtcattttcactaa

SEQ ID NO: 1011246 - DNA, 120 bp, Artificial Sequence
  ENSG00000235532_23 (sequence is synthesized)
tccatgtccctcccagtacacagaatttttcacagaaaacatagttaatcctttaaaaatatatttagattgacttgcatgcccctcttaaggttttttctttccaaatgccttttttaa

SEQ ID NO: 1011247 - DNA, 120 bp, Artificial Sequence
  ENSG00000235532_24 (sequence is synthesized)
aaccccaatttaagaatttctttagccaatactacaacaatgcagtccttgttctccacttctttccttttatctactcaatgttattaatctttttagtgtaaacatcagtaactcaat

SEQ ID NO: 1011248 - DNA, 120 bp, Artificial Sequence
  ENSG00000235532_25 (sequence is synthesized)
cgagccttttctgatccccatgattaggatgagtttttgtgttgcctactccaaaaggtctgtcctttttaatgctcaccacacttgaggtttctgttcacacttcaaaggctgtggggc

SEQ ID NO: 1011249 - DNA, 120 bp, Artificial Sequence
  ENSG00000235532_26 (sequence is synthesized)
ccgataccatgattttgctgcactcctagacctggcctactggtacatagtaggcattgataaaaatttgctggagcattgcataaataaactatgccatttggggctgattaacatttt

SEQ ID NO: 1011250 - DNA, 120 bp, Artificial Sequence
  ENSG00000235533_0 (sequence is synthesized)
ggaaggaaggaaggaaggaaggaaggaattagacagagattcacttttccactgttcctccaatgtctctgcccaccctttcttcttatattaattcataaagtatcatctctcctcact

SEQ ID NO: 1011251 - DNA, 120 bp, Artificial Sequence
  ENSG00000235533_1 (sequence is synthesized)
ctgcttgattcaagcatcatcccagatctctgcatagctgtatcttcctatccctcaagttgaagcattatcgaaaggtccatattgcttgatctgagcatactgcaaagtgtcctaaaa

SEQ ID NO: 1011252 - DNA, 120 bp, Artificial Sequence
  ENSG00000235533_2 (sequence is synthesized)
gccatatgggagatagacttcttcgcagctgcaaaggaaacatttgcagaacagaaaacaccagaaatcacaatacattcttagtcatagtaaaatggaacgcacgcgaaatattgaaaa

SEQ ID NO: 1011253 - DNA, 120 bp, Artificial Sequence
  ENSG00000235538_0 (sequence is synthesized)
acttctggatgcctaggcctcttccgtttgcctctgggactggcgatactcgaggtaatggctactggggccaagtcgtgggcgacctgcagtgcatgggtagagtaaggtgcctccgcc

SEQ ID NO: 1011254 - DNA, 120 bp, Artificial Sequence
  ENSG00000235538_1 (sequence is synthesized)
cagtctaagcagccctccccagagctggtgggttcccaggagtgatgcctgtttgtcagtgaggccccgcggggatgaggacggagcattacgcagcgcactgcgcccccttgaactctg

SEQ ID NO: 1011255 - DNA, 120 bp, Artificial Sequence
  ENSG00000235538_2 (sequence is synthesized)
cagatgccaggatgtcttgaggccttccagaccttgctccacctccaccaccaggtctccagtcctgagccacatgctgccatttttgtctcagaagcacccctcttccaggtggaagat

SEQ ID NO: 1011256 - DNA, 120 bp, Artificial Sequence
  ENSG00000235538_3 (sequence is synthesized)
tgaaggtctgaagagtgggaagtcccaggaacaggcaattccaggaagatatgaggaaaatcaagaaagagaaggaaactgaagctagtgggaagtgcttcaagttggagatgatgctga

SEQ ID NO: 1011257 - DNA, 120 bp, Artificial Sequence
  ENSG00000235538_4 (sequence is synthesized)
gatggccaaaaagtgagaggtggaaaacatttggagtgagttaaggagagaacgcgaggcaaggaagtgaagctgagtgagttggggagtggggtgcaggggcctttggccaccccaggc

SEQ ID NO: 1011258 - DNA, 120 bp, Artificial Sequence
  ENSG00000235538_5 (sequence is synthesized)
tctttctatgtgaacattctgagactgattctgatttttttcccctcccaaattgctctcttttcctttcttcacctacttactccctggtcatccttcctttgggtcagtgaagttgct

SEQ ID NO: 1011259 - DNA, 120 bp, Artificial Sequence
  ENSG00000235538_6 (sequence is synthesized)
gtttccaatagttgactagttttcttccccagcacttacgagtacacagccagtcactctggttgctcactgtcttccttcttccttgactgtcagctcacaggaatgcagggcccttac

SEQ ID NO: 1011260 - DNA, 120 bp, Artificial Sequence
  ENSG00000235538_7 (sequence is synthesized)
ttgttttactcaccactgcatcccaaggatatagcagagtgcctggcacacggtaggtgctgaataaatattcgttaaatgattgattggaggaaaaaaccaccatcctccatggtaaac

SEQ ID NO: 1011261 - DNA, 120 bp, Artificial Sequence
  ENSG00000235538_8 (sequence is synthesized)
ctttactttacttttgcatacttctaaaagtataatctagaggttcagtgactcccgcaaataaacagaaaagggcacagagggtggcgatagggccactgataacaggagctggaagta

SEQ ID NO: 1011262 - DNA, 120 bp, Artificial Sequence
  ENSG00000235538_9 (sequence is synthesized)
gaagacatcttttttccgaagttgaagacttgtacttccataaccttggcagattaggaaatgtcaattaccctccaatccaacctcctatatagagccacacactggtttcctagcctt

SEQ ID NO: 1011263 - DNA, 120 bp, Artificial Sequence
  ENSG00000235538_10 (sequence is synthesized)
ttatgtattgaaaagatgttatcctataaattttcttcttttccaatgtgttctataaatatccactaaaatactttaattgcaagaaagttagatatttgaggttatatccatgtttca

SEQ ID NO: 1011264 - DNA, 120 bp, Artificial Sequence
  ENSG00000235538_11 (sequence is synthesized)
tttctgtggaaaacaacacagaaaatgttacccaagtataactgggcaccatggctccaatattttctcattatcagctcaaataaacacaacttagaataaaaaagtcatgtaaagcaa

SEQ ID NO: 1011265 - DNA, 120 bp, Artificial Sequence
  ENSG00000235538_12 (sequence is synthesized)
cctgtcctgggaacggtgcctgcccgtgatggtatcctcaggcccccctctctgcgccagcaagatgtcccaggggacgtctgtgcattcagccaggtgaccactagaataaaatgttct

SEQ ID NO: 1011266 - DNA, 120 bp, Artificial Sequence
  ENSG00000235538_13 (sequence is synthesized)
ctaggaccacctaagagggcaaaactgataaatgaagaaggaaaccaaggctcctgccactgagtgtgtgtctccaaaaagcacaaagatcttccagctgtttactaacgtggtgcctct

SEQ ID NO: 1011267 - DNA, 120 bp, Artificial Sequence
  ENSG00000235538_14 (sequence is synthesized)
ctctcctaaattgacttctgacttttagaaaaggtggagtccccttttctgctgctgccctggaaggtgctgaagcggagctcagacttaggctgcaggaatgagcgaggggcccctaag

SEQ ID NO: 1011268 - DNA, 120 bp, Artificial Sequence
  ENSG00000235538_15 (sequence is synthesized)
agccagctctggcatttgttggggaatgggtcactggtctctagcagcaggaatggcagtgattcctcagctcctcttgagtgctgaccaggtgcttggtgctcttccaggcccttcatg

SEQ ID NO: 1011269 - DNA, 120 bp, Artificial Sequence
  ENSG00000235538_16 (sequence is synthesized)
ttccaggcccttcatgtgaactggcgcctctcatcctcacgtagcaccgtgccagtggtcattttgttatccttgtttataaaggtgaatgaggccaggcgcagtggctcacgcttgtaa

SEQ ID NO: 1011270 - DNA, 120 bp, Artificial Sequence
  ENSG00000235538_17 (sequence is synthesized)
aattgatcaacaatggctgctgcatcgcgtaaagagagacgaccaggtgtcagctggctgtcaactgatctaggatggtcttggagggacaacgagggcaaccccatgtctcttctttag

SEQ ID NO: 1011271 - DNA, 120 bp, Artificial Sequence
  ENSG00000235538_18 (sequence is synthesized)
ttcaagcaagtctctgcttgaatgtcacatttactaacatcctgttggccaaggtgcatcccatggctgagcccagtgtccaagtgaaagggcaccaggaagttccctgcagcgctgtgg

SEQ ID NO: 1011272 - DNA, 120 bp, Artificial Sequence
  ENSG00000235538_19 (sequence is synthesized)
gtactggaagaatgggcgccatcttcatgacagcagcatgctaagttacagaaagtgagcggcgttctagacaaagcaagctcatctgtgaatggatcatggcggaaacctgaccacagt

SEQ ID NO: 1011273 - DNA, 120 bp, Artificial Sequence
  ENSG00000235538_20 (sequence is synthesized)
atgttgggatttatgtgtttgacattttctataatagaaaggcagatcaaaaataaggctccagtgcctccactcaggaaagctcaagtaggttttcttgagaatttttagtggataccc

SEQ ID NO: 1011274 - DNA, 120 bp, Artificial Sequence
  ENSG00000235538_21 (sequence is synthesized)
tgttttgcaatgttcttttctttttctaatgaggctgaaccagattgtaatgccatgaggcttctacatggagagctggacgttggtgaggattgggtggagaaggccgggtggaggctg

SEQ ID NO: 1011275 - DNA, 120 bp, Artificial Sequence
  ENSG00000235538_22 (sequence is synthesized)
ggcctgggagaagagcagcagattcccaaacgtactggtattggtgcatactctgagaaagacatctcagagcacttctgccgtcagttacgaagtttcaatataagaattctttctaca

SEQ ID NO: 1011276 - DNA, 120 bp, Artificial Sequence
  ENSG00000235538_23 (sequence is synthesized)
aaagcatctggagtacagagtaccagagtatataaagatatgacatgagagaaccctgaagatttatagaagggtccccttaattattcaacaaaatatatacagatcaacacagatgta

SEQ ID NO: 1011277 - DNA, 120 bp, Artificial Sequence
  ENSG00000235538_24 (sequence is synthesized)
tgaggaaactacttggagctaggaaaagagccatttgaaaagattagaggaaatggtactgaatgctcatacaggactggggactttgactgtttcaataaaccatgctagagaactcaa

SEQ ID NO: 1011278 - DNA, 120 bp, Artificial Sequence
  ENSG00000235538_25 (sequence is synthesized)
tttgaacccaagtggtgtttactgaaaggttcagacccacctgggggacctgagcatgcttccctgtggctctctgggcctaaggacacgcagagcaccctgaaaacaagcctaacaaag

SEQ ID NO: 1011279 - DNA, 120 bp, Artificial Sequence
  ENSG00000235538_26 (sequence is synthesized)
ataccaaggcagtacagaatcttctacagtggcacttcgatgctcaatcatcgtttttcctttttcttaattttcaagtctcatgagtctccaaatcatagcatctgcaaccatttttct

SEQ ID NO: 1011280 - DNA, 120 bp, Artificial Sequence
  ENSG00000235538_27 (sequence is synthesized)
gtgcaaagggctccgtgaagtgcctaagcatggtcttctttaagcctcgacatgaccctgtgatacaggcagtaggtgctgttacatccgtcgtaaagatgagaagctgagaatcagaga

SEQ ID NO: 1011281 - DNA, 120 bp, Artificial Sequence
  ENSG00000235538_28 (sequence is synthesized)
gattagtgctctttcctgaggtcacagagagcaagtggaggggaacaggactcttcctgctgcatcttttggcccttcgcatcctgcgctgtccaggtgagagtcagcactccacaggtg

SEQ ID NO: 1011282 - DNA, 120 bp, Artificial Sequence
  ENSG00000235538_29 (sequence is synthesized)
agggacattggaatggaggtggcaagagtaccctgcagaggtcggaaaagctgaaaaccatctcactcagaagttccaggacttgatggagtcagtgagccagaacaaatgctcaatcat

SEQ ID NO: 1011283 - DNA, 120 bp, Artificial Sequence
  ENSG00000235538_30 (sequence is synthesized)
ctctcggaggaaagatgagctggaatgccagtgagatctgagagatggtcttcgggggaagctgcctacgtctttgtatggaacctccagctttgaaacagcctcagggaagaatcttat

SEQ ID NO: 1011284 - DNA, 120 bp, Artificial Sequence
  ENSG00000235538_31 (sequence is synthesized)
aaaagctgcaagctaagcacaagcttagaaagacatgtgggcactggtagttgagtgaggagaaattctccactttgcttatctggaacttgttttgaatgagcaaatggaaatttgggg

SEQ ID NO: 1011285 - DNA, 81 bp, Artificial Sequence
  ENSG00000235538_32 (sequence is synthesized)
aggcttcgttaatatttctcataagtcaaattctctgccatggttattgggtttaagtgaaattctaaatttctttacttt

SEQ ID NO: 1011286 - DNA, 90 bp, Artificial Sequence
  ENSG00000235538_33 (sequence is synthesized)
acctcagctcactgcaacttctgcctttgctgagtagctgggactgcaggcctgcaccactgtacccagctaatttttgtgtttttagta

SEQ ID NO: 1011287 - DNA, 69 bp, Artificial Sequence
  ENSG00000235538_34 (sequence is synthesized)
cccaccttattctaaatttctaatgcccactgcctttcaatgacccggattaaatgggactctcaaaag

SEQ ID NO: 1011288 - DNA, 120 bp, Artificial Sequence
  ENSG00000235538_35 (sequence is synthesized)
ctgcctttcaatgacccggattaaatgggactctcaaaagaaatggctttttgttgagtattgccatcagagaacccgggtttctgcagtttccttttatcctgtgagaaagatgctagt

SEQ ID NO: 1011289 - DNA, 120 bp, Artificial Sequence
  ENSG00000235538_36 (sequence is synthesized)
gattctttacttttgaacaagcatgattgaatagcctgttttagttactgtaacaatgctgtgtagcaattgtattatttggaaataatatgccatatacaataatataatatcaaagga

SEQ ID NO: 1011290 - DNA, 120 bp, Artificial Sequence
  ENSG00000235538_37 (sequence is synthesized)
cagtaaggctcctgtcttggttttagataaagagaaagcagatgctgttttattctcttggtggatggtttaaattgccatcagcggatcagtggttaattgatcgtcgatcagtggatc

SEQ ID NO: 1011291 - DNA, 120 bp, Artificial Sequence
  ENSG00000235538_38 (sequence is synthesized)
actctgaccaatgagaggcaagcggaagtgacggttattcctcctgcgcgggagctttggggacgcacttctggatgcctaggcctcttccgtttgcctctgggactggcgatactcgag

SEQ ID NO: 1011292 - DNA, 120 bp, Artificial Sequence
  ENSG00000235538_39 (sequence is synthesized)
aaatatttcacttcatctgtcaaggaaatatcaggagggtggttgggagtacattcttgatgcacagcaggaatcttttacacttctttctccccatttctgcccctctcggtatcctcc

SEQ ID NO: 1011293 - DNA, 120 bp, Artificial Sequence
  ENSG00000235538_40 (sequence is synthesized)
acagggagagcagctgctccctgaaactctcactctctctgcatttttcctttccagtgcctcaaaactgcacaccacctggtacttggcagtgcagcactttgctcagggggatgggtc

SEQ ID NO: 1011294 - DNA, 120 bp, Artificial Sequence
  ENSG00000235538_41 (sequence is synthesized)
tccatctctctgccgtcctgtttttcttttttcccgtcaattattctttgccttttccatagatcaagaagaaggtgatgtgtactcatgtacattaaaaactcctgtctccattgccta

SEQ ID NO: 1011295 - DNA, 120 bp, Artificial Sequence
  ENSG00000235538_42 (sequence is synthesized)
taagggaggataatctagagatgatttaaagtgtacaggaggattgtgtagttatatgtaaataccactccattttataccagggacttgagcatctgcaaattttggtatctactggaa

SEQ ID NO: 1011296 - DNA, 120 bp, Artificial Sequence
  ENSG00000235538_43 (sequence is synthesized)
gtcctggaaccaatcacttcctaataccaagtgacaactgtatatttttttctattgatttgtaggagttctttatatattgtggatatgaagtcttttttcaaatatatgtatttttga

SEQ ID NO: 1011297 - DNA, 120 bp, Artificial Sequence
  ENSG00000235538_44 (sequence is synthesized)
atctcttctcgcactgtctgcctggccttttcactatctgaatggtgacttctgaccttcttaactttaacgtagaacaatttatcagttttctttattgttagaacctaactacttacc

SEQ ID NO: 1011298 - DNA, 120 bp, Artificial Sequence
  ENSG00000235538_45 (sequence is synthesized)
gtttaagaaatcttttcctactccaaggtcacaaaaatttcctttatattttcctctaaaagctttattgtttgcttttcccagttggatctgaaatctatcagaaattgatttttctgt

SEQ ID NO: 1011299 - DNA, 120 bp, Artificial Sequence
  ENSG00000235538_46 (sequence is synthesized)
atggtgttcaaatacattttgtttcccactgggacagcctatcaacccagcctttagaggccaatcctttccttgccacaccacaaaggtggctttcctttaaaataagacacctgcatg

SEQ ID NO: 1011300 - DNA, 120 bp, Artificial Sequence
  ENSG00000235538_47 (sequence is synthesized)
tggggtctgtttctagaccctgttttgttccagtggtcactttgtctatcctgatgtttccaaattaaaaatggctttctctttcttatccttccattcattgcagatgtattaggtggt

SEQ ID NO: 1011301 - DNA, 120 bp, Artificial Sequence
  ENSG00000235538_48 (sequence is synthesized)
ggagagagagggattttctttggaattgagaagaaatggaattgaatttcagcttagtgggtggtgctttgtatattccaagaaaatgcagatattttgggtttgagggatgttgctaat

SEQ ID NO: 1011302 - DNA, 120 bp, Artificial Sequence
  ENSG00000235538_49 (sequence is synthesized)
tttaactcctaagtatctggtgacaaggtcagaactgactaaaaggaagagggtagagggctgtatctgtttgcctgcatatttatgcacagatgcatgtgtgtaagtctatttcgggaa

SEQ ID NO: 1011303 - DNA, 120 bp, Artificial Sequence
  ENSG00000235538_50 (sequence is synthesized)
gatgacttgtatcagcatgggagggatttatgactagacctccaatgacatcagtttcttttattgcctcaggcaattagatgttgttgttattcatctaactaatggagagcaatgacc

SEQ ID NO: 1011304 - DNA, 120 bp, Artificial Sequence
  ENSG00000235538_51 (sequence is synthesized)
aaaaggacatatgttaaagttaaattttagcaaatgtgtaccaatgttgattacagcaggagggtcaaaaaaacagagaacagcccaggcctatgcttgttacaaggaaaacaaaagtct

SEQ ID NO: 1011305 - DNA, 120 bp, Artificial Sequence
  ENSG00000235538_52 (sequence is synthesized)
tacagactgctaaaaatgtcctccaaaatgttcatcttaactgaataacacaagtaagagtgttgcttgtcatctactttgaatcaatcaatgcagacctcacccaggacaaagtttaga

SEQ ID NO: 1011306 - DNA, 86 bp, Artificial Sequence
  ENSG00000235538_53 (sequence is synthesized)
gaatcaatcaatgcagacctcacccaggacaaagtttagaactttctccacaaggttaaaaacagtactcatcactttgagagccc

SEQ ID NO: 1011307 - DNA, 79 bp, Artificial Sequence
  ENSG00000235538_54 (sequence is synthesized)
gaaaacaaaaacaagaaaaacatagtactcatgcaaggtagataaaaatctgttgcatacactctacatggcttcacaa

SEQ ID NO: 1011308 - DNA, 120 bp, Artificial Sequence
  ENSG00000235538_55 (sequence is synthesized)
agataaaaatctgttgcatacactctacatggcttcacaatggcattttagcactttgagatacgctagtttaaaagcttaaaaccatagaaatcttattctacagcctgttggtctgtt

SEQ ID NO: 1011309 - DNA, 120 bp, Artificial Sequence
  ENSG00000235538_56 (sequence is synthesized)
gtttagatttaatttatatttaattagatatagggtctacgatggtttggtaaaaacaatgatcatttggtaaaatagaaaggttaagctattagactatgactatgacgttaatagaaa

SEQ ID NO: 1011310 - DNA, 120 bp, Artificial Sequence
  ENSG00000235538_57 (sequence is synthesized)
tgtgtgccatgtctgtgggttctgtctgtctctcagtctctctatgtctctttctgtctttctctgtcttcatagctgggtgtattgcattttttcctccaacagagttagaaaaacgga

SEQ ID NO: 1011311 - DNA, 120 bp, Artificial Sequence
  ENSG00000235538_58 (sequence is synthesized)
agaagattgaatgaaggagaatcttagtgttcctggttcagactcagacacagatgcaagggcagctgaatgaggattacaggaatctggggaaggggaaggcttgaaatcctatttttg

SEQ ID NO: 1011312 - DNA, 120 bp, Artificial Sequence
  ENSG00000235538_59 (sequence is synthesized)
aatgcggcagagtgcagaatggagagcttgttttccttaagaaagtcctgctgcgggatgacagcagtggcagaggagggcttgccacaatcagcagcttcataggaactggaaggcgct

SEQ ID NO: 1011313 - DNA, 120 bp, Artificial Sequence
  ENSG00000235538_60 (sequence is synthesized)
gtccttgactgtttctgaatctttgcaaatccgaagcaacgcctgtcttcaaaagaggaggccgaccctttcagcgaagcagggactgaactagcgcaggtcaaaaccggtgtgtctgct

SEQ ID NO: 1011314 - DNA, 120 bp, Artificial Sequence
  ENSG00000235538_61 (sequence is synthesized)
ttggttgtgatacaacttaacacgttctttaacttcaaccttggacctcattttattattaaaaacactaaaagaaaactttcttttgtgatatcaggaaattcactttttgtgcttcag

SEQ ID NO: 1011315 - DNA, 120 bp, Artificial Sequence
  ENSG00000235538_62 (sequence is synthesized)
ccctgagaaaatcaaaccggaatttgattaagcctctagatccaacttccatgcataggaaaatctgagggcagaattatctaagtcgcagttaccattagagcacaaaagacaaaatcc

SEQ ID NO: 1011316 - DNA, 120 bp, Artificial Sequence
  ENSG00000235538_63 (sequence is synthesized)
agcatgtgaaaggtctccagaagaaaggcgttgaatagagggcaagagtgtgtgcatgaaggggagtctatcatcacagacactcaggagacagacatattgaccaaacacaatgtgtgg

SEQ ID NO: 1011317 - DNA, 120 bp, Artificial Sequence
  ENSG00000235538_64 (sequence is synthesized)
gtcacattgcatcctgattcaaatgaactactaaaaactctgtagcacctgggaggcaattagaaatttgaacactgagtatgtattactatttgataaataatgagtaagacaaatttc

SEQ ID NO: 1011318 - DNA, 120 bp, Artificial Sequence
  ENSG00000235538_65 (sequence is synthesized)
aatataacactaataaggaattattaagtatgtgataatggcattgcagctatatcagaaaagataaagtgtctttgaaattcagacttgcactggttgtctataataaaaaccataaaa

SEQ ID NO: 1011319 - DNA, 120 bp, Artificial Sequence
  ENSG00000235538_66 (sequence is synthesized)
ccctgattaaataccattcctgatgaatgagccggcacagtccacgctgggacgtcgtgtagtgcaggtggaagtcagaagggcatgtttaaggacattatgcaggtcacacaatgacga

SEQ ID NO: 1011320 - DNA, 120 bp, Artificial Sequence
  ENSG00000235538_67 (sequence is synthesized)
agcccagggaagagcacaaatgtcaggaagccgtttgccttcccactaggaaactgcactccactcttcttccaggaagcggcattgtttcgagtggcaaaaggctagaagcaacttcta

SEQ ID NO: 1011321 - DNA, 120 bp, Artificial Sequence
  ENSG00000235538_68 (sequence is synthesized)
tatcctagagaggggcagtctgaagcaaccgtgagccacctttccaatggactagtgaacagttgcaaaaatagaagcaaaaagaaggatgttctgtgtgacttctgcagtgcaatttct

SEQ ID NO: 1011322 - DNA, 120 bp, Artificial Sequence
  ENSG00000235538_69 (sequence is synthesized)
gatctggtgacaagactgctgtaaacagctggcccacagtgcatccatgcaatggaggctgatctctagttcttctggttggtgggcagctctcccatggggactgcacccgttttctct

SEQ ID NO: 1011323 - DNA, 120 bp, Artificial Sequence
  ENSG00000235538_70 (sequence is synthesized)
tctgatcccattgtcctctaaggcctcgttgtctgcatcgagctgatggaatggaacagaggcatggtagaggcagagttgtttctgaaagtctttgacgtgaaagcgcgcatgccttct

SEQ ID NO: 1011324 - DNA, 120 bp, Artificial Sequence
  ENSG00000235538_71 (sequence is synthesized)
actcccattctacatgaaagaactgctcatatgtacatattcagattcaaggaaggctgggaaatgcgattctggctgagcagctgcttttgaactgtgactgtttcctaggaaaggaga

SEQ ID NO: 1011325 - DNA, 120 bp, Artificial Sequence
  ENSG00000235538_72 (sequence is synthesized)
gaatacgtttgctgaacacctagctgcctctgctaccatctcatttacttatcattacatgaaaaagcaagatgcataatattgttactgtgccggctatttgtctaaagaggcgtggcg

SEQ ID NO: 1011326 - DNA, 120 bp, Artificial Sequence
  ENSG00000235538_73 (sequence is synthesized)
tatatatctgtacctatatatgcagctcccatgctgacctatgggagaggacttttgggaattagtaaatgggagatgaaacagaagagaaacttcactacactgtatactctcgtaggt

SEQ ID NO: 1011327 - DNA, 120 bp, Artificial Sequence
  ENSG00000235538_74 (sequence is synthesized)
gtttgagatgctaccaatggaaattaaattacctactcggagagcaaaataaatttaagatgttaaaaaaaaagagagaatgccaccaatctggacagaaggtaaagaacatgactccca

SEQ ID NO: 1011328 - DNA, 120 bp, Artificial Sequence
  ENSG00000235538_75 (sequence is synthesized)
ggccatcccatcccacaagcagcgtgggagtggatgaagccatctgggagcccccgtcaggagctgcagtcttgaagactgtgagcaaagcgtaggcgaaaatgtaccagaactgatgtc

SEQ ID NO: 1011329 - DNA, 120 bp, Artificial Sequence
  ENSG00000235538_76 (sequence is synthesized)
attaaaagaaagctgcttttctttgctcagagaaaagaggcagaagtttatagaaagaagatctcacttcgtgtgatctgtgaaatatacataagcaaagcaggtatattttcatagctt

SEQ ID NO: 1011330 - DNA, 120 bp, Artificial Sequence
  ENSG00000235538_77 (sequence is synthesized)
ttatgtaaatgtatgtttcttattgaccccagtggaaagaaggtctcttcaccacagaaaatgaaacatcaatgtcactttgcatggtaaatgtctcccacagcgtccgcctctgggttt

SEQ ID NO: 1011331 - DNA, 120 bp, Artificial Sequence
  ENSG00000235538_78 (sequence is synthesized)
aggaaaagtagggtatcaatagacagctaaagaaggagttgctggccggctactgcctacaagaagaagtgtgtcaaggatatttcatccccattttcaagaatttttgcctataggact

SEQ ID NO: 1011332 - DNA, 120 bp, Artificial Sequence
  ENSG00000235538_79 (sequence is synthesized)
cccaggagcacaggagcccactacaaggaaggttatacaaagaagtctctctgtgataagagcaacagctgcaaagatggcggctcactacctccatagtgtggtcggttcatgcaaccc

SEQ ID NO: 1011333 - DNA, 120 bp, Artificial Sequence
  ENSG00000235538_80 (sequence is synthesized)
cagacgctaaccgagagtgcctgcctttcccatgggaaggatgtgaagacggtcccaggaggcacgccctctacatttccgggagtcaggctttcagaggggactggaagaacgtttttc

SEQ ID NO: 1011334 - DNA, 120 bp, Artificial Sequence
  ENSG00000235538_81 (sequence is synthesized)
acagtttggcaaaagattgtcttaagcactgttgattgattgtctctgcccccatcaatgttgtgattatccaagagatataataaagggctctctttatcacagttacttataatgtgc

SEQ ID NO: 1011335 - DNA, 120 bp, Artificial Sequence
  ENSG00000235538_82 (sequence is synthesized)
ccttttcctaactgcccagcattctctactagatgtgccagaattcctccagtgggcccaccgggaacatgcatgtgatgtcagttctgtggaaagtgcctgactttgcatttctggtgt

SEQ ID NO: 1011336 - DNA, 120 bp, Artificial Sequence
  ENSG00000235538_83 (sequence is synthesized)
gccagcatccgctaagatcttgtaggaataatcacaatttgcatcctcaagaggtaccataactcaagggggagacaaatattgaaattaataggatcagttgtgatacgtgctatgata

SEQ ID NO: 1011337 - DNA, 120 bp, Artificial Sequence
  ENSG00000235538_84 (sequence is synthesized)
aaagcagagacttctcccagattctctgtttcaggcatccataaaattacaaatgtaatacagcacaaactggccatcatttaccttgtcaagaaagttattaaataaaatctgtcacaa

SEQ ID NO: 1011338 - DNA, 88 bp, Artificial Sequence
  ENSG00000232748_0 (sequence is synthesized)
gcctcccaaagtgctgggatcacaggagtgagccacggtgcccagccttaatttttgtattttcagtgagtgcaatggtgcaatcttg

SEQ ID NO: 1011339 - DNA, 87 bp, Artificial Sequence
  ENSG00000232748_1 (sequence is synthesized)
cctgacgtcagtaattaaagctgtaagccagcgggcctggtggacatcttttaataatcagtctttccattcaggtatatggtatat

SEQ ID NO: 1011340 - DNA, 120 bp, Artificial Sequence
  ENSG00000232748_2 (sequence is synthesized)
cttttaataatcagtctttccattcaggtatatggtatatgtctccatttacttaggtcttatttcatatccttcaggttggagctatcatttcttttcatacaggttttgcacatttct

SEQ ID NO: 1011341 - DNA, 120 bp, Artificial Sequence
  ENSG00000232748_3 (sequence is synthesized)
tgtgaggtttattccttcatggtccatggattttgttgtgaattgggaatcctttttccaccaagtatattttctaatttgttactttagtatacaggaaagataactaatttttatctg

SEQ ID NO: 1011342 - DNA, 120 bp, Artificial Sequence
  ENSG00000232748_4 (sequence is synthesized)
cagtttattatctatgaaaggataaaagtagaactactcagtaaaaggtttccataatcaaataagtatgggctaaacaaagctaaacagatgtgttcactgctggacttatcaatgctt

SEQ ID NO: 1011343 - DNA, 120 bp, Artificial Sequence
  ENSG00000232748_5 (sequence is synthesized)
ctgggattacaggtgtgagccaccaccaccaggcaattgaagacgtatattctatgaagaaatgggtagattttaatgaacaataccccttttgtgggcagattcctaagtcccaggccc

SEQ ID NO: 1011344 - DNA, 120 bp, Artificial Sequence
  ENSG00000232748_6 (sequence is synthesized)
cttttgtgggcagattcctaagtcccaggccctcacaacaaaggggcagtgggcctggagatgccagcttcagctgccagagggactgctcctccagggccaccccagcccacttttgat

SEQ ID NO: 1011345 - DNA, 120 bp, Artificial Sequence
  ENSG00000232748_7 (sequence is synthesized)
caccaagttttgatcaccaagaatcccaagaagggcacagggaatttcctttcttacctgcccatgaaaccttttgtcactagacatcctgaaacatactttgggaaactgcatccaaag

SEQ ID NO: 1011346 - DNA, 120 bp, Artificial Sequence
  ENSG00000232748_8 (sequence is synthesized)
acccttctagtttcaaatctgtggatccaggggtctccactgaaccttacctgatgcccaaactcccacccattcactcccaaccagaacacagaagatgacctggtgccaaaatgaaag

SEQ ID NO: 1011347 - DNA, 120 bp, Artificial Sequence
  ENSG00000232748_9 (sequence is synthesized)
ctttaatgagtgttactcctagacagtcacgtctcagcttctgccagcctccactgtcccagctctcttagctggccgacaggggagctagttgctgaggggtagggatctggagtctaa

SEQ ID NO: 1011348 - DNA, 120 bp, Artificial Sequence
  ENSG00000232748_10 (sequence is synthesized)
agagcagagccaggcaaaaggaggtacaggaagcccccgatgggggctgggctcccggagtgtggtgctggggggtcatgggcttcaggccggcccctcttcaggcattcctagcaaagc

SEQ ID NO: 1011349 - DNA, 120 bp, Artificial Sequence
  ENSG00000232748_11 (sequence is synthesized)
tgggggtccccatgggcacagggtgggtgcgttcatgcttgcgcaagtcgctggcactcaagaaggccttgggacaatgggggcaggtgtaggggcgcactgagctgtgagtgcggctgt

SEQ ID NO: 1011350 - DNA, 120 bp, Artificial Sequence
  ENSG00000232748_12 (sequence is synthesized)
gtttgcgcagcccagcccggtcagagaagctcttgccgcactgggtgcaggggaagggccggagctccgggtgtgagcgctcgtgccgacgcagcagcgtcattgtggagaaggtctcct

SEQ ID NO: 1011351 - DNA, 120 bp, Artificial Sequence
  ENSG00000232748_13 (sequence is synthesized)
tgcactctcggcacacaaactgggggggcttctcgtcagcctcctcaccccccgcctcgcctgccccttccaagggaccaggagcctcccggacaccagcatcttggcattccacatgct

SEQ ID NO: 1011352 - DNA, 120 bp, Artificial Sequence
  ENSG00000232748_14 (sequence is synthesized)
ccaccgtcatgcccaccacctgccactgtgtggccatcacaccacctgactccgggggcagccctagcagccctgctggagggtcccccagccccgcccctgctgccggggcggctgaac

SEQ ID NO: 1011353 - DNA, 120 bp, Artificial Sequence
  ENSG00000232748_15 (sequence is synthesized)
tctcacctgccacgcccacaggcagcgccaaccccaccaccagctcctgtgcagggggcacacccgcggcctcactgcttcgatgggtccgctcgtgcttcctcaggctcgacgacacca

SEQ ID NO: 1011354 - DNA, 120 bp, Artificial Sequence
  ENSG00000232748_16 (sequence is synthesized)
caaaggatttcccacatgcgttacagtggaaggggcgctcccccgagtgcacccggctatgcttcgtgaggctggcacgctcggcgaaggctcgcccgcactcctcacagcggaagggcc

SEQ ID NO: 1011355 - DNA, 120 bp, Artificial Sequence
  ENSG00000232748_17 (sequence is synthesized)
gctggccagagtgcaccagcgcgtgccgcttgaggtcccaggacgccacgaacgtcttgtcacattgcaggcacttgaacggccggtcgcctgtgtgcacacgccggtgcatggccaggt

SEQ ID NO: 1011356 - DNA, 120 bp, Artificial Sequence
  ENSG00000232748_18 (sequence is synthesized)
ccgccggctgccggaagtccttgccgcacttctcgcagtggtatggcttcaccccttcatgggcgcgctggtggcgacggaagctcgaggggtcggagaacatgcggccgcagcgcgggc

SEQ ID NO: 1011357 - DNA, 120 bp, Artificial Sequence
  ENSG00000232748_19 (sequence is synthesized)
acaggaagggcttctcccccgagtgcgtgcgctcgtggctctggtaggaactgagctgcgtgaagcccttgccgcaggccgggcagcggtagggcttctgtgccgcgtggatgcgctggt

SEQ ID NO: 1011358 - DNA, 120 bp, Artificial Sequence
  ENSG00000232748_20 (sequence is synthesized)
ggcacgtgagcgaggatgagcgggagaagctcttcccgcactcggagcagaggaaggggcgctcgccggtgtgggacctgcgggggtgtggaggacttggcatgaaggcgacagacccat

SEQ ID NO: 1011359 - DNA, 120 bp, Artificial Sequence
  ENSG00000232748_21 (sequence is synthesized)
aacgtgaccccactgcctgtctgggctgtactttaggggctccccaaacgttcgtgggggcctaggcttaatcccctaagagccacatggctgcaccccagaggaagaagccttcaggct

SEQ ID NO: 1011360 - DNA, 120 bp, Artificial Sequence
  ENSG00000232748_22 (sequence is synthesized)
agccacatggctgcaccccagaggaagaagccttcaggctggctgggtgtctctattccaaagacctgtctctgcacattaaagaccaagatatgggccgggcgcggtggctcacgcctg

SEQ ID NO: 1011361 - DNA, 120 bp, Artificial Sequence
  ENSG00000232749_0 (sequence is synthesized)
ttgaagaaagggtctacaatagaagagagatcaaaacaaatgaatagaacaaaggaacttagaagaaatgtcagaaaaacatcaagaaaagggcagtaagaatgttatttaaaaatatgg

SEQ ID NO: 1011362 - DNA, 120 bp, Artificial Sequence
  ENSG00000232749_1 (sequence is synthesized)
aggtaaatttcagaagaaaatgccgaaaatgtttgcctttggaaaacgagaatcaagggtgagaatggaaacatctgcgtgagaagggcccctctcataaaatgaaaacaaaggacagaa

SEQ ID NO: 1011363 - DNA, 120 bp, Artificial Sequence
  ENSG00000232749_2 (sequence is synthesized)
aatccaagaaaagctccactgtacacatgttctaacatatgagtgatccaaaagagagagcttcacatacaatatcctatgcctactttctcagctcagagagagaggctcagtcattca

SEQ ID NO: 1011364 - DNA, 120 bp, Artificial Sequence
  ENSG00000232749_3 (sequence is synthesized)
taaactggagcaacattcatgtactgcggaccactttgaaagacttatctgtctcctgtttacagatgtgtacagcaagctgcaaagcactgcctgtccttttactcacaatcaattgca

SEQ ID NO: 1011365 - DNA, 120 bp, Artificial Sequence
  ENSG00000232749_4 (sequence is synthesized)
gagaacatgaagtacagaagacaacagctttttttttcttttggaaaatcccttaagtcctttccgtgctgtgctatcattgttcaggtgctaaagtgaaataaatgtgtcgtctaatca

SEQ ID NO: 1011366 - DNA, 120 bp, Artificial Sequence
  ENSG00000225885_0 (sequence is synthesized)
ctgaccatcatgaccttatggttttgggtgtgcacctggcttgcagcagaactggctgggatggcttcataacttcccttctaacaatataacaatatgcttctgtaaattttcacactg

SEQ ID NO: 1011367 - DNA, 120 bp, Artificial Sequence
  ENSG00000225885_1 (sequence is synthesized)
gattgacaagtgccaagactgaggctcagagaaatgaaataacatgccaaaggtcacagtgtctagtggagctggggccaaattcagattaataacacacaggaaaaaccctcaacttct

SEQ ID NO: 1011368 - DNA, 120 bp, Artificial Sequence
  ENSG00000225885_2 (sequence is synthesized)
ttcattcgcctgttgagataaagggaaagagagtccccatccaggcctgcaggagagggagaactggtggatgcaaatgaaaaagcagaggcattcctcagggtcttgctctgccaccca

SEQ ID NO: 1011369 - DNA, 120 bp, Artificial Sequence
  ENSG00000225885_3 (sequence is synthesized)
catgaccttatggtgtaagtaaaaatgattacttcccttttttcttttcttcagaggggaaatctgggtttggagcagctataccatatatctaaggtcaaacacctaagaggaactttt

SEQ ID NO: 1011370 - DNA, 120 bp, Artificial Sequence
  ENSG00000225885_4 (sequence is synthesized)
gtgaagactccttctttatgtgtattaggattatccaaccaatgtatttggcccattgttttgctgaagccaccttgagttgatttctgttccttgcaaccacaagaatcctaacttacg

SEQ ID NO: 1011371 - DNA, 120 bp, Artificial Sequence
  ENSG00000225885_5 (sequence is synthesized)
agtagcaaaactatgattagagttataaacaatccttacatgcgtttaacactgtgcacatttacaaactgcttagtattattaatgtctgctacaagcaagcactacagtaatgctgtt

SEQ ID NO: 1011372 - DNA, 120 bp, Artificial Sequence
  ENSG00000225885_6 (sequence is synthesized)
aactaataattgggtagcagctggaggttaaaaagcaagccaggaagagggagtggatttactgaaatgaaaactaatgtgaaaagtcatcaaatcacttcagataattccatttacaag

SEQ ID NO: 1011373 - DNA, 120 bp, Artificial Sequence
  ENSG00000225885_7 (sequence is synthesized)
agtccatcatggtcaaatggttgtagatcagtaagacagtaagaggaaattctttctattaggaaagaataaaaccgtgaaacagatggattgctgttttaaagattaaaattacaagag

SEQ ID NO: 1011374 - DNA, 120 bp, Artificial Sequence
  ENSG00000225885_8 (sequence is synthesized)
cacacacaactggctatgcttaggtggttcagaaaaaaaaaagaagcctaccgtctccatagttcctaagaaatatgtaccattcttacagatgccaataaagcattatgcaactgtcag

SEQ ID NO: 1011375 - DNA, 120 bp, Artificial Sequence
  ENSG00000225885_9 (sequence is synthesized)
tttagtaatggaagtgtcaccaaagattcatatttaacagagaccaaatgtaacagacaatggggaaaagtggttggtggggatctgaattaactaaccgtgtttgagaaaataattgag

SEQ ID NO: 1011376 - DNA, 120 bp, Artificial Sequence
  ENSG00000225885_10 (sequence is synthesized)
gcaataaaacgatcaataggaaatcaggccactctccagtacctcacggtttctcaaaggaatatttttaaagaagagcattttattgacttgtctcgtttttaatgcactaagaaatgc

SEQ ID NO: 1011377 - DNA, 120 bp, Artificial Sequence
  ENSG00000225885_11 (sequence is synthesized)
agctaaggtgcctggtcactgtagaaaggggtacatgcaaagacctatgctaaccgtagagccagcaaatgactgataaaaaggaacttggccatatacctctctctactcaatatagcc

SEQ ID NO: 1011378 - DNA, 120 bp, Artificial Sequence
  ENSG00000225885_12 (sequence is synthesized)
ctgcaggtatatcaaaaaacaacagaaacattgttccagatcataaaaataattatgttgctttagaaaatttggaaaacctgagagaatacaaggaaaataaaaatcacgttaaaccac

SEQ ID NO: 1011379 - DNA, 120 bp, Artificial Sequence
  ENSG00000225885_13 (sequence is synthesized)
catccagatagaccactgttaaaatattgctgtatgttttcagttttttgtgtgaaaataatatacatttatattttattgtatatacactactaaatacaatattttgatctttttgta

SEQ ID NO: 1011380 - DNA, 120 bp, Artificial Sequence
  ENSG00000225885_14 (sequence is synthesized)
aagcagaggcattcctcagagattatagtgctggagttggaagaagatgggagaaacatatgaggagagaaggaagtcgagctcataccatgatgaagaagataactcctgaagattggg

SEQ ID NO: 1011381 - DNA, 120 bp, Artificial Sequence
  ENSG00000225885_15 (sequence is synthesized)
ggtgcaaatcaccaccatgacacactacccaatgagcaaacaaaagcaaactggttaaggatcctgacaaagacttcgcagccagaagaggcgatgccgtgggtcaaatctaggaccacc

SEQ ID NO: 1011382 - DNA, 120 bp, Artificial Sequence
  ENSG00000225885_16 (sequence is synthesized)
agatttcaaaccttatacttctaatcactatatgacactgaacatgattttaagaaactttcttacaaaaatgtatgaattggacaagagagtaacaaaaacagagtaattcactgatct

SEQ ID NO: 1011383 - DNA, 120 bp, Artificial Sequence
  ENSG00000225885_17 (sequence is synthesized)
ctcattttgtagatgtaagttttgtataatgagtttccatacatcaggagacacttggaaacataaataagtcaaagttacagacaataaagttacagagaattgtattattgtcctctg

SEQ ID NO: 1011384 - DNA, 120 bp, Artificial Sequence
  ENSG00000225885_18 (sequence is synthesized)
tgagtgattctgcctgcctgatatatccctgtcccctttaatcttcatacacaaagaatctgaaatagtccctcttactctttccatctagacaaaaatggaacatcaagactgactgga

SEQ ID NO: 1011385 - DNA, 120 bp, Artificial Sequence
  ENSG00000225885_19 (sequence is synthesized)
gctcttgcaattgccagaggtgacatatatacatacagcatcattgttttctggaaaatgggctacaggagaatcttaaagaagcagtgaattggccgggcactgtggctcacgcctgta

SEQ ID NO: 1011386 - DNA, 120 bp, Artificial Sequence
  ENSG00000225885_20 (sequence is synthesized)
tggacaagaatcagaatatcctgttttgaacatctgcacagattgacaaacaaaaatggaacatcaagactgactggaaatggtgatgtgaaattcattaaatgctcttgcaattgccag

SEQ ID NO: 1011387 - DNA, 68 bp, Artificial Sequence
  ENSG00000269480_0 (sequence is synthesized)
cgtctcgaactcccgaccgcaggtcatctgcccgtctcggtctcccaaagtgctggattacaggcgtg

SEQ ID NO: 1011388 - DNA, 120 bp, Artificial Sequence
  ENSG00000269480_1 (sequence is synthesized)
ttacaggtgtgaaccgctgcactcggctctggacttttcttacacatttatttacacagggatggatggagctgtcgtggggtcctgggtggggctgccctgagcatgcctccggggcag

SEQ ID NO: 1011389 - DNA, 120 bp, Artificial Sequence
  ENSG00000269480_2 (sequence is synthesized)
ggtgggcactcacgtggtgatcttgaggacgtccttcatgctggtcagcgggtccgagttgtcagggcagcgcaggaggcagggtgcgaagataatggccagcgccccaggtgacatgcg

SEQ ID NO: 1011390 - DNA, 120 bp, Artificial Sequence
  ENSG00000253546_0 (sequence is synthesized)
tgtctcctggttccaccagaaataaagtagagccccacacagctgaggtgtggggtcaaaaattaaaactaagagacataagactcattctcaggctccaagtctggccagtgagcttct

SEQ ID NO: 1011391 - DNA, 120 bp, Artificial Sequence
  ENSG00000261552_0 (sequence is synthesized)
tttaagttctgttttattgagaaccacaaaaggtaagaactaagagagtcctcccaggtcatcaggtcccatcccttggtctaaggatggtgaaaccattgtcacagccagcagctgccg

SEQ ID NO: 1011392 - DNA, 120 bp, Artificial Sequence
  ENSG00000261552_1 (sequence is synthesized)
cctggctgagcccccatggaggatggagacccacagatacacacaaacacacagagacatctccaaatctctgactcagactcgcacacaggcacacacagacgcacgctcaacacagac

SEQ ID NO: 1011393 - DNA, 120 bp, Artificial Sequence
  ENSG00000261552_2 (sequence is synthesized)
acacgcaggcctttattctattacacagagtagggctggggagcagggatgtagtgcggctcggagcagtgggagtttggtggcgtgtgtggaggggacatgacacactaggcccagcag

SEQ ID NO: 1011394 - DNA, 120 bp, Artificial Sequence
  ENSG00000270894_0 (sequence is synthesized)
cttttcttaaatctgtttgcatcaatgaatatacctcctacagattaaaacaaatctccttggtattgtaaagtttatgttttatttaggaaatctcttagaagaaacaattattaaaga

SEQ ID NO: 1011395 - DNA, 120 bp, Artificial Sequence
  ENSG00000270894_1 (sequence is synthesized)
ggaggattgcttgaggccaggagttagaaaccagcttgggtaatatagcgagaccttgtctctaaaaaaaaaatttttttaattatccagacatagtggtgtgtacctgtagtcctagct

SEQ ID NO: 1011396 - DNA, 120 bp, Artificial Sequence
  ENSG00000224329_0 (sequence is synthesized)
gtttagggcctccttcaggagacagatgactctgaccggggatcagggtcagggctggcatctctgctctggctaaaattcaaattttacatgtatctctatgaggtgggcattttgctg

SEQ ID NO: 1011397 - DNA, 120 bp, Artificial Sequence
  ENSG00000224329_1 (sequence is synthesized)
tcaaaggttttatggatggttctagatgtggaaacagattattaaaaggaaaagcaaagccttgcttggcagagcttacacttctcaagcattgacctgagccttaaattttgcaactgt

SEQ ID NO: 1011398 - DNA, 120 bp, Artificial Sequence
  ENSG00000224329_2 (sequence is synthesized)
aattttagaggatgcaggacacacatcctgttttggaggctgttttggaggagcaggaagacaaaaaaagagatgctgtggactcagttctcaaaggcaagtggtggcagaacaccagga

SEQ ID NO: 1011399 - DNA, 120 bp, Artificial Sequence
  ENSG00000224329_3 (sequence is synthesized)
gaaaacagaagacagttccaaaagggagacttaatttttatttccatgaaagctgagcatcagaagagacctattttttgggtcagagacgtttaactgggagctctgtcagacctggga

SEQ ID NO: 1011400 - DNA, 120 bp, Artificial Sequence
  ENSG00000224329_4 (sequence is synthesized)
ctagaatcgagagcccagcagaaacactgctctggtattcaggaagaatagcttggcttggaatgggaagaagagtgggactcaagaatacagactttgcaggagtccagcagaaatcag

SEQ ID NO: 1011401 - DNA, 120 bp, Artificial Sequence
  ENSG00000224329_5 (sequence is synthesized)
ttggtaaaaacagacctgactcgtgaggctggacagagtcctccacgccttgggatctgagtcactggaaccaaactagactctattttacttcctataaccacctgcctggacagattg

SEQ ID NO: 1011402 - DNA, 120 bp, Artificial Sequence
  ENSG00000224329_6 (sequence is synthesized)
cacccttgtcagttaccatcaggggagagttgttttcttcaccacggtcacaaagactggccttcatgtgtgtgctatcatggtgatgacttcccagggaggaaagtacagggaggatga

SEQ ID NO: 1011403 - DNA, 120 bp, Artificial Sequence
  ENSG00000224328_0 (sequence is synthesized)
cactatatcggtctgtcatcatcccttggcctctcacctgatgcagccagtccagggacagaatggggattccccgccccagggcacacaggaacttgactgtccggcggatgcgatcag

SEQ ID NO: 1011404 - DNA, 120 bp, Artificial Sequence
  ENSG00000224328_1 (sequence is synthesized)
tgaccagacacctgatgcttctttatatgtataatggctgaccctggcgggacttccttctccacttgtgtgttgatgtccactgtggtggaggcttggcttctctccaggtggatccca

SEQ ID NO: 1011405 - DNA, 120 bp, Artificial Sequence
  ENSG00000224328_2 (sequence is synthesized)
gatgtgccaaagtcagcgctgctgagacttcttcctcgtcatctgtatcgctgttgataaccatggaagcttggcttttctccagagggacagcctgtggggccttgccttcttccacat

SEQ ID NO: 1011406 - DNA, 120 bp, Artificial Sequence
  ENSG00000224328_3 (sequence is synthesized)
ggctctcctgcagatgggccaggcctggtgctccaggaccccttgtacctactccatggaagatcttcctcttcttcataggaatgacaactggggttgctgggatcctctcttcttccg

SEQ ID NO: 1011407 - DNA, 120 bp, Artificial Sequence
  ENSG00000224328_4 (sequence is synthesized)
catcagtgtcgctgtcgatgaagccaaaaggctgagccctttccaaatggacctcagctggccttccaggaggcctgctgtcatcatccacatctgtgtcactgtcctctccaggaggtt

SEQ ID NO: 1011408 - DNA, 120 bp, Artificial Sequence
  ENSG00000224328_5 (sequence is synthesized)
ggctcctctccagaatcaccccagctggaaccaccccattccctgcacccctcttgacttttgtatcattgtccctctccttcactaaaggctgatccttttcaagctggatttcagtta

SEQ ID NO: 1011409 - DNA, 120 bp, Artificial Sequence
  ENSG00000286816_0 (sequence is synthesized)
ggaggccggttggttcatctgagcaacaggagggtgtgtgcccgccggcacgtggtctccaaaaacgcagtgtcctggccacagtgaatctgagaagcaaccatcatttatgaaaaggca

SEQ ID NO: 1011410 - DNA, 120 bp, Artificial Sequence
  ENSG00000286816_1 (sequence is synthesized)
tggctctctggatgcacttatcagacatccacatgcgtaagtccagaaaccgtcagtgtgagcacaaaggaagacgaaggaccacgacgccagcatcaacacgccacggcgagctgacag

SEQ ID NO: 1011411 - DNA, 120 bp, Artificial Sequence
  ENSG00000286816_2 (sequence is synthesized)
aaaggacgagggacagaggaacaaggaactcccccgtgaccccgagacctgggggcctcaggcctgctggtccttccgcatcagcacacagctccccactgcgtggtcctgttcttgaac

SEQ ID NO: 1011412 - DNA, 120 bp, Artificial Sequence
  ENSG00000286816_3 (sequence is synthesized)
aaagccacatctgagtgaaacgcgcagaggagctgttggctacaatgaagtttcctcagacatatacatgtgtgactgtcactgtaacccatcactcgcagggctccatgtggcccagtc

SEQ ID NO: 1011413 - DNA, 120 bp, Artificial Sequence
  ENSG00000286816_4 (sequence is synthesized)
actgcttgatgtaggactgaaggaaatggcagctggaatccagaagccacaatgattcacagagagctttgcctagaaggctacccataaatccagtgtaggcttctcttccccatctca

SEQ ID NO: 1011414 - DNA, 120 bp, Artificial Sequence
  ENSG00000286816_5 (sequence is synthesized)
aagtttcccaggcacagaagttgctgaaatctctccacctctcccctcattgatatcccccaccaaccagggggaaccccaaacctttctgcagccaaaaatgactcggccaggcacggt

SEQ ID NO: 1011415 - DNA, 120 bp, Artificial Sequence
  ENSG00000223561_0 (sequence is synthesized)
gatcctgtcatggctggtgtggttgtgtccacacgtgacctgaacatccttcccactcagtaccaaatacagtcaattctgtggcttgatggtgcgtggacataacattcagatatcgcc

SEQ ID NO: 1011416 - DNA, 120 bp, Artificial Sequence
  ENSG00000223561_1 (sequence is synthesized)
catgatgaggaaacagaagctgggatatgtgagtaaacatttccaaggtcctgcagctaatcaatggtgagcttgcgaagaaacccatagctttcaaactttgaaactgatgctccttag

SEQ ID NO: 1011417 - DNA, 120 bp, Artificial Sequence
  ENSG00000223561_2 (sequence is synthesized)
attaaccaggctacctcacttactaactaagtgaaatcatcatggagggctccttgtccacctctttgcaatgaccctaaggatctgagacatacctacctctcgacaaagacaataaca

SEQ ID NO: 1011418 - DNA, 120 bp, Artificial Sequence
  ENSG00000223561_3 (sequence is synthesized)
tcatatctaggaggggcagtagattgattcttgaattaggctgcttgagctagtactctcgctctgctgttcacatgctatgtggcttgggggcaaattactgaaactctttgtacttca

SEQ ID NO: 1011419 - DNA, 120 bp, Artificial Sequence
  ENSG00000223561_4 (sequence is synthesized)
gttccctaatctgtgaaaagaaaaaaaaagtgtggataatacatatacccaactcataggttttgtgagaattaaatgaaatggcaagtggtttgcctaaggcctggaaaaaataattat

SEQ ID NO: 1011420 - DNA, 120 bp, Artificial Sequence
  ENSG00000223561_5 (sequence is synthesized)
tcaatatatctatacattttctcattttatttggagcttgcattatgtttagttattaatttctttagcagaaagccacctagaaaaaagcatgcaggtttcttacgagaggaaaaaata

SEQ ID NO: 1011421 - DNA, 120 bp, Artificial Sequence
  ENSG00000223561_6 (sequence is synthesized)
aacgcttgtgagcacaattagatatacgaaggaagacgtgggtaacccggtctgggagagcattggtaaggtggctgatcatgctttcttgtttttgttttttctcaaacaaattagaga

SEQ ID NO: 1011422 - DNA, 120 bp, Artificial Sequence
  ENSG00000223561_7 (sequence is synthesized)
gctattcaggagaaaggaactagactaacgcaatgtctttttgctatagctaattcaatcactgtcattaccaccagcatattttcagaaaagagaatatttaaaagactcaattctgtt

SEQ ID NO: 1011423 - DNA, 120 bp, Artificial Sequence
  ENSG00000223561_8 (sequence is synthesized)
aaaagttgggtaccatatagtctcaaaagtgagctatgaaatcctgtcccaagccagaaaaaacaagttcaccatcttgcgagagtattctaaaaaaaaactttttaaaacctgtttctt

SEQ ID NO: 1011424 - DNA, 120 bp, Artificial Sequence
  ENSG00000223561_9 (sequence is synthesized)
actaattatttgatttacgtcgaacattttgaattttccattatgtgaagggtctaaagtcttttgccaagggcaatgaaaatggtgggaagggaaaaaaaaaacacaaaacaccctttg

SEQ ID NO: 1011425 - DNA, 120 bp, Artificial Sequence
  ENSG00000223561_10 (sequence is synthesized)
tataaatttcaccaatttctgcacaattagaatacatattagttttccttgcatcaatagaaaacatgctgatggagggaatccattctggatatgtcaaaataggacctttcccaaata

SEQ ID NO: 1011426 - DNA, 120 bp, Artificial Sequence
  ENSG00000223561_11 (sequence is synthesized)
actcagaccatttaaaattgctccttaaaatagaagcttatttttgcccttaagattttgctgttcaggggtggagctcttgaccatgctccctctgcaacgctgcatttcagggacatt

SEQ ID NO: 1011427 - DNA, 120 bp, Artificial Sequence
  ENSG00000223561_12 (sequence is synthesized)
ttatttatcattttaccttcagtggtgatagcatcccttgctatttgggaggtggggtgggattaatgaaaataaaggttagctcttcctgatctctgtgggggccatgttgtctcagtt

SEQ ID NO: 1011428 - DNA, 120 bp, Artificial Sequence
  ENSG00000223561_13 (sequence is synthesized)
ttgatcatttcccccaaattaagatttctgcataacccccccgtgtctgtgtttggctggcagttttatggctgaccaaattgtgcactggccgctgttctggttggctgaatgtttata

SEQ ID NO: 1011429 - DNA, 120 bp, Artificial Sequence
  ENSG00000223561_14 (sequence is synthesized)
caggctgttaatcagactggggagggggctgtggatatggggactgtctgtgagccggagcggtcctgtttgctgtcgtgtgcaagggcctgcactttgttactacaaattacataatga

SEQ ID NO: 1011430 - DNA, 120 bp, Artificial Sequence
  ENSG00000223561_15 (sequence is synthesized)
ccctggagctggatgttccagaaaggacactcagttcttcagggctgtctctgtgatccaggctttgatctgggaaaggttgcgcctcattgcagagttgaagctatctgcctgctttgt

SEQ ID NO: 1011431 - DNA, 120 bp, Artificial Sequence
  ENSG00000223561_16 (sequence is synthesized)
ttacacgaacgcccttccaggactctgtctgcttttggggtggaagtgccctgccaaaaactccagctctccatgctggctgtgtggccagcatacctcctgccttttcaacgattcctc

SEQ ID NO: 1011432 - DNA, 120 bp, Artificial Sequence
  ENSG00000223561_17 (sequence is synthesized)
tgccctggatagagagcggtgtctcataacagtttggaaactacaaaagtttccctggcaggatgaatgattgactcggcaacatgttcttgccttttggagttgccctccaatttttcc

SEQ ID NO: 1011433 - DNA, 120 bp, Artificial Sequence
  ENSG00000223561_18 (sequence is synthesized)
taatcaatggttgacaacttctttcctctgcctatgttgccatccatgtcatggtttgtgtcaagactctaggagaagtctaccatcagcaccacagctactgtgcacaaatccagaatg

SEQ ID NO: 1011434 - DNA, 120 bp, Artificial Sequence
  ENSG00000223561_19 (sequence is synthesized)
ccagactgaagtcagaaggaaaggtaaaagtccaattctcagatggcaattcagacttagaaaacagaatgagaaaaagcagtggtgtccatctctcctcaacgatgaattcatgtctta

SEQ ID NO: 1011435 - DNA, 120 bp, Artificial Sequence
  ENSG00000223561_20 (sequence is synthesized)
aaatgtatctgcatctatttctttctgtctaccatccatccatccatctttccttctttcttctttctctttctctttctctccctccttccttctcttccttcgttttcataagtaaaa

SEQ ID NO: 1011436 - DNA, 120 bp, Artificial Sequence
  ENSG00000223561_21 (sequence is synthesized)
ctagtactaatgcagaagtctgaaattagactttaaaaacgagtactactctttttttccccctttttgagagagctggtgattttcttccttgcttggcattaactgtcttactgtctt

SEQ ID NO: 1011437 - DNA, 120 bp, Artificial Sequence
  ENSG00000223561_22 (sequence is synthesized)
atgatacttatctttaatgtggcatatcagagaacctctttgaaaatgttacggcttaatgcggctcagggaaataaaagcccactttaaaaaagccaaaataaagctttctgatacgga

SEQ ID NO: 1011438 - DNA, 120 bp, Artificial Sequence
  ENSG00000223561_23 (sequence is synthesized)
cttcacaattaatttttgagaaggtccactttcatatgcaagcaaatctgtttagaaatgttttaaattttaaagcatgcatacacatataaaactaatttatgtgtttttaaatgctgt

SEQ ID NO: 1011439 - DNA, 120 bp, Artificial Sequence
  ENSG00000223561_24 (sequence is synthesized)
ttaaaattttaaagcatatatagagagcaagagagcaagagagggtgctcaatatgcatcataatagcatgagaactgaaaaataaaagtttacttgcaaacttaaccggctttgcaatg

SEQ ID NO: 1011440 - DNA, 120 bp, Artificial Sequence
  ENSG00000223561_25 (sequence is synthesized)
caacagactaaacaagtcacattttatacaatgtatatgtttataatatgagtgcagcatgccaatgtgctatttagatcattgtcctggttgaatgaacaagctcacaggttcaccatt

SEQ ID NO: 1011441 - DNA, 120 bp, Artificial Sequence
  ENSG00000223561_26 (sequence is synthesized)
tctcaatctgacagaataagaaatgcatttacatggcctaagctcttaaattgtccctttcaattaatgccccatcatggagcaatctggaaaccattactcagtaactcttcattataa

SEQ ID NO: 1011442 - DNA, 120 bp, Artificial Sequence
  ENSG00000223561_27 (sequence is synthesized)
ttgcttgcagctgagtatccagcccttggtaatataagaataaaagaaaactcagttagtaacaagtgcaattgattccattcagaattcccttggtgctttgccatgtttggcctgcat

SEQ ID NO: 1011443 - DNA, 120 bp, Artificial Sequence
  ENSG00000223561_28 (sequence is synthesized)
aagaggaaacacgagggttttttttttcttttggggccaggaaatgaattggcagacataagctggtttgtgtggtgtgcgccttcatttttcagctggtccttgttaaaaatgagacgg

SEQ ID NO: 1011444 - DNA, 120 bp, Artificial Sequence
  ENSG00000223561_29 (sequence is synthesized)
tggactcctgctttcttccccactggctacatttttttggagggcttttctggtaatagataaaaccacaaaacttcaatttgctgcaaactgacagcatccagaaactgtcaccttctg

SEQ ID NO: 1011445 - DNA, 120 bp, Artificial Sequence
  ENSG00000223561_30 (sequence is synthesized)
tagccgtggccgatcctgggacttactactgctaaggagtgggctttagaattttattcacttctaccttggtcctgactttatgagagcagagtccctggtgcattctgtacaggtgga

SEQ ID NO: 1011446 - DNA, 120 bp, Artificial Sequence
  ENSG00000223561_31 (sequence is synthesized)
gagtgtttatgtgtttggaggctatcagtcaccaactcaagaaatgtaaagatctaaattatgatagatgaaaatgtgaaaatgtgatgtggtaaactaaccacccccacaaccatgttc

SEQ ID NO: 1011447 - DNA, 120 bp, Artificial Sequence
  ENSG00000223561_32 (sequence is synthesized)
ccccttcctgcccatgcaaatcaaggacctggcttttaaaaatggtgaagggaaatgttcttatcacccattcctgtcagagatgatgcagctcattgctgatgctgagatccaacgtcc

SEQ ID NO: 1011448 - DNA, 120 bp, Artificial Sequence
  ENSG00000223561_33 (sequence is synthesized)
agtgcctgagtacccctggattctgagcactaggggctggactgtggagaccatcagttcataacatcctgtccctgctccctgctgtagatgactgagaccaggtaacaaagacactta

SEQ ID NO: 1011449 - DNA, 120 bp, Artificial Sequence
  ENSG00000223561_34 (sequence is synthesized)
aattaaaaatgtgtaaattataaaatacatttttaattatagaatgaattgatgttcagcaaagaaaagttgaatgtaataaaactctcatttatttccattatttgctttcatcatcaa

SEQ ID NO: 1011450 - DNA, 120 bp, Artificial Sequence
  ENSG00000223561_35 (sequence is synthesized)
atcatcaaaggaaaaaaagcatctctctgaagttaaatggcatttcattttgattaattgtagaaagaagattggaaaaatctcccatgaccaaggaaaattgtgaaaaatatttctgat

SEQ ID NO: 1011451 - DNA, 120 bp, Artificial Sequence
  ENSG00000223561_36 (sequence is synthesized)
attttgtctatgcattttatttttgagggtgttttttatattagtgtgactattttgtatttcctaccctgttgtaaactttttaaaaattgctcttacagttattactaagtatatgat

SEQ ID NO: 1011452 - DNA, 120 bp, Artificial Sequence
  ENSG00000223561_37 (sequence is synthesized)
ttaaaatccctaattagggttcttaaacaagggagaagcactctcatacccctagaacaagatgaacaaaagaaggaggaaaaatcttgacctccgtaagatccaggatggcacgtgcaa

SEQ ID NO: 1011453 - DNA, 120 bp, Artificial Sequence
  ENSG00000223561_38 (sequence is synthesized)
ggcactgacacagcatctgccggcatcactgactctcctggaccccagaagcccagttccccaggctctgaaaccctgcagcaatgaaaaggaagcacaggcaaaccataaggaagataa

SEQ ID NO: 1011454 - DNA, 120 bp, Artificial Sequence
  ENSG00000223561_39 (sequence is synthesized)
tgcatccttagaggcaggtttcatgaggacacagagaatccggttttgtgtgtgcctgatttcgtttttctgtcaaagagatacaaaacaatcaactgagttatcttgaacttacaaaga

SEQ ID NO: 1011455 - DNA, 120 bp, Artificial Sequence
  ENSG00000223561_40 (sequence is synthesized)
ttaaaaataatcaattcctgttactattttcaatttttcccccattttacttctttaggtatgaagaaatgtagcctattaaaacctggattaataaaaacctttcattaacttttagaa

SEQ ID NO: 1011456 - DNA, 120 bp, Artificial Sequence
  ENSG00000223561_41 (sequence is synthesized)
aaatgatctcagcttcagtatctcgagtaagaaacctttcttccctgtgttgtcttatctttccattgatcttctgttgtgggagcagctgcaggctccccaccctgtgagagctttcgt

SEQ ID NO: 1011457 - DNA, 120 bp, Artificial Sequence
  ENSG00000223561_42 (sequence is synthesized)
agtccataaaagcacggttaggagcaaacagcttttcaatttccctgtgtcctttcctatggctgtggttggagagacgtagagagaggctgctgcgaagtcacaatccagccacacggc

SEQ ID NO: 1011458 - DNA, 120 bp, Artificial Sequence
  ENSG00000223561_43 (sequence is synthesized)
ctgggtcccagctgtgggaagagctcctgtggctgtgaattctgacttctgggtcttggcacaaggtgtggccagcaagctaagctgtcctgagggtgtgcagggccaggggctgaagac

SEQ ID NO: 1011459 - DNA, 120 bp, Artificial Sequence
  ENSG00000223561_44 (sequence is synthesized)
agtgttggagcatccacagactggtttgtctcaagaagcatgttactaaatatgaaatagcaaaatctgcaagtgggtttacttttcccccatagattagaatggattcaatattatctc

SEQ ID NO: 1011460 - DNA, 120 bp, Artificial Sequence
  ENSG00000223561_45 (sequence is synthesized)
tttattagcgtcacttttaatcacttgtataacaagtaggacagaaaggtggcttgaaagtcaatcatgtgagaattccagataaattgactttgctcacaacaatctgttattcatgtg

SEQ ID NO: 1011461 - DNA, 120 bp, Artificial Sequence
  ENSG00000223561_46 (sequence is synthesized)
tcagatagttccaggaggggaaacccaggattgaactttttcagccttctatggtaaaatttcctgctctgtcggtgcgccaaagcttttttcagtttcctaaactcccatattcaagaa

SEQ ID NO: 1011462 - DNA, 120 bp, Artificial Sequence
  ENSG00000223561_47 (sequence is synthesized)
gataagctattttctcttctttctcatccttccttgacaaagcaaagcatattttcattgtctactctgtgtcatccatgcttggttcctgtcctcaaagagcttatagttcaaataaag

SEQ ID NO: 1011463 - DNA, 120 bp, Artificial Sequence
  ENSG00000223561_48 (sequence is synthesized)
gagagggagcattttacaagggaattaaaggtaaaagattctgaaagccagtttaaaaagtcgtgagggaggggtctgggagaagctgagcaggggtgaaagggtacgaaacattatgga

SEQ ID NO: 1011464 - DNA, 120 bp, Artificial Sequence
  ENSG00000223561_49 (sequence is synthesized)
aggagaacaggggagcaccctgactactgggtggaaacaccaatcagtgggtagaaaccacacagtggtaacactgatcagtgggtagaaaacaatgacagcaggtatatgaggcatgga

SEQ ID NO: 1011465 - DNA, 120 bp, Artificial Sequence
  ENSG00000223561_50 (sequence is synthesized)
acacttggcttattgtaaagttttcaaaatatgcagtcctttctatccaccaggggttgggagttgtctttgtatatcaaccgtggaagggctgttttggttcatcattctgtggtctac

SEQ ID NO: 1011466 - DNA, 120 bp, Artificial Sequence
  ENSG00000223561_51 (sequence is synthesized)
ctgggtagacctgatgcagccgtgtttctgaggaaaggaagaacagcttttgttttgtgatatgtaatggtagatgtagtgccatggaatgatgcagatttcattcagatattcttggat

SEQ ID NO: 1011467 - DNA, 120 bp, Artificial Sequence
  ENSG00000223561_52 (sequence is synthesized)
cttggccccaggactcactcattcttccctatatgagcattggtagttacaggttttatccttcctttaattgtaagtcttttgaagccaaaaactgtatccaatttgtcactgtctcct

SEQ ID NO: 1011468 - DNA, 120 bp, Artificial Sequence
  ENSG00000223561_53 (sequence is synthesized)
aacagtacttagcagtgtctgatgcatcatagggagtttgtaaatgtttggataaataaagggaaaacaaaaacaaccacaaaaaaacctttattttgctttaataaaaatattttaact

SEQ ID NO: 1011469 - DNA, 120 bp, Artificial Sequence
  ENSG00000223561_54 (sequence is synthesized)
catttggttaagctcagcacgaggaacttccgttttcttatcttgaacatcatgtactgttccagcccacagccagccacccaggaaggaagcattttgttccttttagacagggggtct

SEQ ID NO: 1011470 - DNA, 120 bp, Artificial Sequence
  ENSG00000223561_55 (sequence is synthesized)
gagatccttcctgaagaagaaacaggaggaaaatagtccccagccttgctaaagacattagaaagcagagccatactgtggaacagtcactggagttaaaattaaaagactggaattcca

SEQ ID NO: 1011471 - DNA, 120 bp, Artificial Sequence
  ENSG00000223563_0 (sequence is synthesized)
gactataatcctgcttgaagtttgcttagattcctgggaagtctccctattccaaccctttttgagaaatgcccacagctcataacctacctgaggttatttgggtctcaggaaacacac

SEQ ID NO: 1011472 - DNA, 120 bp, Artificial Sequence
  ENSG00000223563_1 (sequence is synthesized)
gcatgtgccaatgttccaagaatgaagctctggttcccagcttctgctgctccaacttctatagcagcaaggagaaaagagtaacagacatactgatcacatctaattagaagattttcc

SEQ ID NO: 1011473 - DNA, 120 bp, Artificial Sequence
  ENSG00000223563_2 (sequence is synthesized)
ttagcaacctgtgttgtgagtgttcttgagctgtatctacataagtcatggcctttctcatcatctggcactgtggactcagggatacagcagacacagctatcttttctggactcaagg

SEQ ID NO: 1011474 - DNA, 120 bp, Artificial Sequence
  ENSG00000224699_0 (sequence is synthesized)
aaaaaaatcatagaccagagaaatgaaaatttagaggagctgataaaataccctatccttaattagactgtcagcatacacatcaaatcagccttaatgccaagatttattggccttgga

SEQ ID NO: 1011475 - DNA, 120 bp, Artificial Sequence
  ENSG00000224699_1 (sequence is synthesized)
attgggtaaatgaaataagtgcttacaaatgaatggaaaagaaattacctgtattaaaacgtatttgtgatgcaggcctgtgcactgagggttttagtcaaactcaggcttgcagcttct

SEQ ID NO: 1011476 - DNA, 120 bp, Artificial Sequence
  ENSG00000224699_2 (sequence is synthesized)
tgttgtcctggaaaaatccttcttggacagtaaaatatttttgtctttatttcaccatctccagattagatgggtgttactgattcttacctcagagaagagaatgtcatggagacaaaa

SEQ ID NO: 1011477 - DNA, 120 bp, Artificial Sequence
  ENSG00000224699_3 (sequence is synthesized)
tgacctgcttagagttctgcaccccccagcatggagagcagagcgcaaagatttcttccggactcccacattccccttggaatccaagaactggtctactgtcacaacactttagtaccc

SEQ ID NO: 1011478 - DNA, 120 bp, Artificial Sequence
  ENSG00000224699_4 (sequence is synthesized)
tcttctcccaaggaggcagcagaaactggggtaatcacaacggtcaacagcagcaaaggcagcactttctgatttacttgactgctatggatgccacctctctccacgcctcagtttaat

SEQ ID NO: 1011479 - DNA, 120 bp, Artificial Sequence
  ENSG00000224699_5 (sequence is synthesized)
gcctgacgaaggcttgggctccccgcgcggtgaccgtcgaggtgacctgcacctggctccatggcggaaccggccggcacggattattcccctctcgggagaggtctgcagccgggcctc

SEQ ID NO: 1011480 - DNA, 120 bp, Artificial Sequence
  ENSG00000224699_6 (sequence is synthesized)
agtgcttcagttcgtggcctggcattttgtgtcagtgttttttaacctttggaccctagttcaaccgactccgagacctaggggacagatcttaagttttacaataacccaggggtcaga

SEQ ID NO: 1011481 - DNA, 120 bp, Artificial Sequence
  ENSG00000224699_7 (sequence is synthesized)
cagggtctgatctagcctgtggggcaagtacggggaagacacgggacctcttggagggggtcagtaggcttgtagggggaaagacgcacacagagactaaaggacgagatggagcaaggt

SEQ ID NO: 1011482 - DNA, 120 bp, Artificial Sequence
  ENSG00000224699_8 (sequence is synthesized)
tcaaccccctagctgagtgttggcagtgtcgggattttaacgaagacattggtgcttattatggtgaggggactcaggacagtttaggggaagagagtggcatttgagtcctaactcgta

SEQ ID NO: 1011483 - DNA, 120 bp, Artificial Sequence
  ENSG00000224699_9 (sequence is synthesized)
aggaagactgggtaggactacttgaaaataacttttaaaaattaattataaagctggtaaaaataggaaaacatctatggccccactgtccaaagacgacttttaacttcttggagaata

SEQ ID NO: 1011484 - DNA, 120 bp, Artificial Sequence
  ENSG00000224699_10 (sequence is synthesized)
tcctttcagatagttgtctttgtaaatgtatacttttaatgttttttcgtttgcctttttaaaataaattttttgggggacagggtcttgctctgttacccaggctgtagtgcagtagaa

SEQ ID NO: 1011485 - DNA, 120 bp, Artificial Sequence
  ENSG00000224699_11 (sequence is synthesized)
cgattatagctcattgcaacccggacgtcctgggttcaagctatcctcacctctcagcctctcgactggctaggaccacagcctcgagccatcatgtctggctaatttttacgttttttt

SEQ ID NO: 1011486 - DNA, 120 bp, Artificial Sequence
  ENSG00000224699_12 (sequence is synthesized)
tgttgtccaggctggtcttaaactccttgcttcaacagatcctcccactccagcctcccaaaatgtgattacaggctgagtcaccacgcctagcatggttttttttgttttgtttgtttt

SEQ ID NO: 1011487 - DNA, 120 bp, Artificial Sequence
  ENSG00000224699_13 (sequence is synthesized)
gtaagcaaaattgacatacatactggaggtacaattctgtagctggccttctttacagagtttagaataaatgtctttccatgtcaagttttcacttacatcctttgtagtagttgcaaa

SEQ ID NO: 1011488 - DNA, 120 bp, Artificial Sequence
  ENSG00000224699_14 (sequence is synthesized)
atattccattttatagctgtatcttaattgtggattaaggttggagtgcagtggcactatcatggcttagtccagcctcagccttctaggttcaagcgatcttcccacctcagcctccca

SEQ ID NO: 1011489 - DNA, 120 bp, Artificial Sequence
  ENSG00000224699_15 (sequence is synthesized)
agaagctgggactacagggacccgccaccccacctagctaattaaaaaaaaaattgtagagatggagtctcagtgtgtagcccagtctcaagtgaccctccctcgttggcttcccaaagc

SEQ ID NO: 1011490 - DNA, 120 bp, Artificial Sequence
  ENSG00000224699_16 (sequence is synthesized)
gctgagattgcaggaagagtgtcttcatctctgcatccctagtgcaacagagcatgacaaaaattcaacaaatatttattgaagagtcttgatgtcttttgggaaaggaactctatggtt

SEQ ID NO: 1011491 - DNA, 120 bp, Artificial Sequence
  ENSG00000224699_17 (sequence is synthesized)
acctttactctaagttaaaaacaacaacaacaacaacaaaaacacaaaaccctgaggctcagaagataaatatttgctgaagatcactgtgcttattagatgggtgttactgattcttac

SEQ ID NO: 1011492 - DNA, 120 bp, Artificial Sequence
  ENSG00000224699_18 (sequence is synthesized)
tcctgcttcggcctcccaaacttctgggattacagatatgagccaccacggctggctgacaggcaccaaattctaggagaggacttgaatagagctggagtgcaatggcacaatctcggc

SEQ ID NO: 1011493 - DNA, 120 bp, Artificial Sequence
  ENSG00000224699_19 (sequence is synthesized)
gtgtctaagcactccgagagttctgtcatgtactcgtaatacacctgagaggagggtattattcccatgtttcagaagataaaactgaggctcagagaggtgagataacttgtaccagtt

SEQ ID NO: 1011494 - DNA, 120 bp, Artificial Sequence
  ENSG00000224699_20 (sequence is synthesized)
catatcatcagtgagtggctggactaggatggaaactgagggcttcaccacccaggcaagagggcaggggccagcctgtggaaagatatggaagaatgcaagctcggcccacggaagagc

SEQ ID NO: 1011495 - DNA, 120 bp, Artificial Sequence
  ENSG00000224699_21 (sequence is synthesized)
aaagaagcaactcgtagaaagggctctgcaggggcctggacgtcagcagatgatggcagaggaagctgaacggagagctgggccaggtctcatcagcagaggagctgcctttgggagacg

SEQ ID NO: 1011496 - DNA, 120 bp, Artificial Sequence
  ENSG00000224699_22 (sequence is synthesized)
ccttccttgttaggcaattctgtggttggttctggacattgttcttggacactcagctgcatcctgcttctcaagacacccaacaactcaacgagctacttaacagtcttcattaaattc

SEQ ID NO: 1011497 - DNA, 120 bp, Artificial Sequence
  ENSG00000224699_23 (sequence is synthesized)
catttacaaagcagatccattgtcaacctaaataacaaacaaagagagtctctataaaagaaaagaatatttatttgggaatagagcattgcataggaatatgcctgccttagtaatgca

SEQ ID NO: 1011498 - DNA, 120 bp, Artificial Sequence
  ENSG00000224699_24 (sequence is synthesized)
tgtattcagggaggtagaggaagacaaaggtttttaacagaaaaaatgtggagaattacataattgttttgaaataattatccttggctataaagatcaataacaagggtgatgcgagtc

SEQ ID NO: 1011499 - DNA, 120 bp, Artificial Sequence
  ENSG00000224699_25 (sequence is synthesized)
cctgcacctggctccatggcggaaccggccggcacggattattcccctctcgggagaggtctgcagccgggcctcagtgcttcagttcgtggcctggcattttgtctgtatcttaattgt

SEQ ID NO: 1011500 - DNA, 120 bp, Artificial Sequence
  ENSG00000224699_26 (sequence is synthesized)
ggtgcattgtggaagtcaacaagtaagttttgttaaatttgagtaagaagacctgtttgtttcctcaagttgcttataatctaggtgaggacacatctgagagaataactaatagttcag

SEQ ID NO: 1011501 - DNA, 120 bp, Artificial Sequence
  ENSG00000224699_27 (sequence is synthesized)
ctgttctgaaatttattcctgcctctaaaaatccttgccggcaagccactggggaggctaggttttgagcacttagctgtctggtcttccttacttagtgctctgcaataaacaccttcc

SEQ ID NO: 1011502 - DNA, 120 bp, Artificial Sequence
  ENSG00000224699_28 (sequence is synthesized)
tcgagttcctggtggtggctggtgttccttggcgtgcagcagcacaattccaatcgttgcctctgctccccatggccttctcctcttctctctcttataggaatatttgccattggactt

SEQ ID NO: 1011503 - DNA, 120 bp, Artificial Sequence
  ENSG00000224699_29 (sequence is synthesized)
actggatgatcccatgtcaggatccttaaactaattacatctgcaaagagctttttcccaaatatggtcatattcacaggttggagtgcgagagagacatatctttttggaaccaccatt

SEQ ID NO: 1011504 - DNA, 120 bp, Artificial Sequence
  ENSG00000224699_30 (sequence is synthesized)
gctcctttggcaggcactgctgtgccactgtggaggcgcccctgcttttcccatgctttgcagtgtctttaaaggcctttggagccatgcccaggctcagccccatcctggtgtccccct

SEQ ID NO: 1011505 - DNA, 120 bp, Artificial Sequence
  ENSG00000224699_31 (sequence is synthesized)
gtgtccgttttgccactgcccggctacttcacttggccatgggccttaccagcttgcagacaaacccgtccatctacgcctcccagcgcagcttggcccacttgcaagcacttacagagg

SEQ ID NO: 1011506 - DNA, 120 bp, Artificial Sequence
  ENSG00000224699_32 (sequence is synthesized)
gtttcagaaggaacatgtctgccatctgtgtttggagactgtgtcccagacttttgagctcacattagtcatggccacagacgggactggagtcctgcccactggagtcccaaaggtctc

SEQ ID NO: 1011507 - DNA, 120 bp, Artificial Sequence
  ENSG00000224699_33 (sequence is synthesized)
tggtgtttgttttccactctgcatgcctgggttgggggatggcagggggatacaggttgttggagtacctcccagccgggccgtttccttggttccctggggctgccttgcttcctctct

SEQ ID NO: 1011508 - DNA, 120 bp, Artificial Sequence
  ENSG00000224699_34 (sequence is synthesized)
tctatctcagctgctgctgaaatcaaagatgagctcaggcactggtcttccaagatgtcaaagcacaagtcctttcagaaagtgaactcacgtggaccccaactatgtgaaattgctgca

SEQ ID NO: 1011509 - DNA, 120 bp, Artificial Sequence
  ENSG00000224699_35 (sequence is synthesized)
tttggagctgctctgtcccagtggtgtgggcagctttctgctggactcttctagccacagggaggatacccttcctcccaggatagcccccaaggcactgtgtctgaaagccccttattt

SEQ ID NO: 1011510 - DNA, 120 bp, Artificial Sequence
  ENSG00000224699_36 (sequence is synthesized)
tgaagagaagaaaaataaagtcctaaaatgttgaggtgacatcttagcttgggttccccacaaaacagagccagaggcaaaggcttgggtgccagtagtttatctgaaggtgattccaga

SEQ ID NO: 1011511 - DNA, 120 bp, Artificial Sequence
  ENSG00000224699_37 (sequence is synthesized)
tgccaggagggtccagcagagaatacccaagcccacatgtcctgatgggaagtgggggataagtagagagggaaacacagaccctgtaggccatctcactgctgctggcccaggggaccc

SEQ ID NO: 1011512 - DNA, 120 bp, Artificial Sequence
  ENSG00000224699_38 (sequence is synthesized)
gcttagagttctgcaccccccagcatggagagcagagcgcaaagatttcttccggactcccacattccccttggaatccaagaactggtctactgtcacaacactttagtaccctcttga

SEQ ID NO: 1011513 - DNA, 120 bp, Artificial Sequence
  ENSG00000224699_39 (sequence is synthesized)
cccttggcagaaggggatcctctcaagggagcttctctacaagaccctctccttctggtccaggacctgaaagcctctgaagttcactccttcggccccactcccttcctgctgcctttg

SEQ ID NO: 1011514 - DNA, 120 bp, Artificial Sequence
  ENSG00000224699_40 (sequence is synthesized)
cagcatctccaggcatggcctcactcatccacctctcccttgctgaaggtctcctcatgtaacacacgattcctttagatggtccttcatcaccagcaagatgaaacctaaattcattgg

SEQ ID NO: 1011515 - DNA, 120 bp, Artificial Sequence
  ENSG00000224699_41 (sequence is synthesized)
catggtagacaaaactctagccttgcctcccagaggccagtctctgtctccgccactccccaggtggactgcattgtgtttctgctgccataaacataatttattctgactggaacatct

SEQ ID NO: 1011516 - DNA, 120 bp, Artificial Sequence
  ENSG00000224699_42 (sequence is synthesized)
tctgtgcatgtctgcagagtgcacttcactccccctgcagttcaagcatccttcctccacaaagccttttcttttgatcactgcaggacctgtaaaagctatcctgggatagcctgtatt

SEQ ID NO: 1011517 - DNA, 120 bp, Artificial Sequence
  ENSG00000224699_43 (sequence is synthesized)
tactggactgaaatgatctgtttgcctatcaatttccccaaatgatatatggcaaggagtagttgaatctaagagcagatctcaaagcctatgtcctttccattgccttgtaccctgctc

SEQ ID NO: 1011518 - DNA, 120 bp, Artificial Sequence
  ENSG00000224699_44 (sequence is synthesized)
gggcctcagtgcttcagttcgtggcctggcattttgtctataaggaaggcctttgaagggaaatcaagtaggaagaggatgatagctggctcacatgtccttgccacatgggaggaagag

SEQ ID NO: 1011519 - DNA, 120 bp, Artificial Sequence
  ENSG00000224699_45 (sequence is synthesized)
acatttgcaccaaattgccaaaagaaggagaaatgctccgtttgctttttaaatgttaatgatgatgttaataaagcctttcctgacacatttgaggagctcctccgtctccaggggctt

SEQ ID NO: 1011520 - DNA, 120 bp, Artificial Sequence
  ENSG00000224699_46 (sequence is synthesized)
cttaccagagttatgcagtgatgggtttagttctgaatggatgaagagttcctgagagctagcgtttgtaattagaaccgttacttggtatctgtgccttatttgacctttggttccaca

SEQ ID NO: 1011521 - DNA, 120 bp, Artificial Sequence
  ENSG00000224699_47 (sequence is synthesized)
tgccttggatgtgcatgcaccgtgacggtttcataggtacgaacgcacactcaggcccagtcacttcggttggtagtacagattgtgaggaaaaagatggaggcatccttaaggaggaaa

SEQ ID NO: 1011522 - DNA, 120 bp, Artificial Sequence
  ENSG00000224699_48 (sequence is synthesized)
aatgtttgcctttagttcctgcattatcctgtacagaggggctcctgagttttggaagcctgttcccagtacaggagaacaactcccctgtttgcagcaggagacttcagtgcacggtga

SEQ ID NO: 1011523 - DNA, 120 bp, Artificial Sequence
  ENSG00000224699_49 (sequence is synthesized)
actagttgcagacgaagaccaccttgaaatgcaggcttgttgggcttgttttgaattttaacctcggatggaagagccctagtgctgtctgtctccatgcgggatgatgattgctaggca

SEQ ID NO: 1011524 - DNA, 120 bp, Artificial Sequence
  ENSG00000224699_50 (sequence is synthesized)
acaggtgattatcaacaaaggatgccacggttatactctgcaaggtggtgttccagtggcaaacagctgtataaactcttgtaaacaggaactactgacaaaaacctatagtcgactttg

SEQ ID NO: 1011525 - DNA, 120 bp, Artificial Sequence
  ENSG00000224699_51 (sequence is synthesized)
ggatctgactttattattcagcaactcaaagatgagttctaattggcagacttctggcactggcacttgtcctcctgtttctatagaaactgggttggaagtcagagctgcacaaaggga

SEQ ID NO: 1011526 - DNA, 120 bp, Artificial Sequence
  ENSG00000224699_52 (sequence is synthesized)
aaggctcccaaggaggcagcagaaactggggtaatcacaacggtcaacagcagcaaaggcagcactttctgatttacttgactgctatggatgccacctctctccacgcctcagtttaat

SEQ ID NO: 1011527 - DNA, 120 bp, Artificial Sequence
  ENSG00000224699_53 (sequence is synthesized)
aatggggacaggcctgtcacaaggatcactagagtcttgctggcaaaagcatcttactgcattcatgctgcagcacaggacccagatgcagaacaggttggggacacagccctgccttct

SEQ ID NO: 1011528 - DNA, 120 bp, Artificial Sequence
  ENSG00000224699_54 (sequence is synthesized)
aatagtggacaccatctgagagctgagccatagattcaaagcctaactcctaatagcgattggtagtaatatcatcagcagttcatatacatggagtgacaacagcgtgccaggcaattc

SEQ ID NO: 1011529 - DNA, 120 bp, Artificial Sequence
  ENSG00000224699_55 (sequence is synthesized)
gattctacttgaagcctgcagccctgactcctgggctgggaggtgggcgaggacttgtattttgtagctctgctagagagggaacagctgtccactggtggcaggactgacgcctcccag

SEQ ID NO: 1011530 - DNA, 120 bp, Artificial Sequence
  ENSG00000224699_56 (sequence is synthesized)
agggagctccactgcctataaggaaaagtccacatctgggcacttgggtctccatgagcttctgcctgcttatggctccagtcttacctctcactgcttcctgcattaaacgtttgccct

SEQ ID NO: 1011531 - DNA, 120 bp, Artificial Sequence
  ENSG00000224699_57 (sequence is synthesized)
aaacattgaactgggttcattgttgcatgttccccttcacccccaaatcagactttgctcatccccaggatacctttcaacttcccccacctccccacctgcctaacaccaccactcact

SEQ ID NO: 1011532 - DNA, 120 bp, Artificial Sequence
  ENSG00000224699_58 (sequence is synthesized)
aacaaggagctgtgctccgaagcttgtggacagctgtgtcatggaggagctgccgtgctctgtccagagggctgtctcttgagcacagagactgagccttccccacctctctagcctcta

SEQ ID NO: 1011533 - DNA, 120 bp, Artificial Sequence
  ENSG00000224699_59 (sequence is synthesized)
gtcccaagcacagcctgccccctggtagcccctaggaaatttccaccaaatgcatgcaaggtcttgcagctgccccacagcttgacatcccacttcctcctgagcctcctcctccactgt

SEQ ID NO: 1011534 - DNA, 120 bp, Artificial Sequence
  ENSG00000224699_60 (sequence is synthesized)
cttctatcctctgctcaaagcccttaaccgatgccccggtttttcaagggcagcttcttcagtgttgtttgttcattcactcaactaacaagggctgaccatgcatcggccttgagggac

SEQ ID NO: 1011535 - DNA, 120 bp, Artificial Sequence
  ENSG00000224699_61 (sequence is synthesized)
gaacaaaggtgctcacactctgatgggaggcacacggaagcagtggcaataaaatctgtaaagtcttctgtgagaagttaaagagaaaatgctagaggatcccagaggaggaagctactg

SEQ ID NO: 1011536 - DNA, 120 bp, Artificial Sequence
  ENSG00000224699_62 (sequence is synthesized)
ctgactgtgtggtggctcctccccagcctcgtaccctgactctcactcttcagcctgccccagttcccctctaagctacaccttctccaggaaatcgcagcacacccatggcatccacct

SEQ ID NO: 1011537 - DNA, 120 bp, Artificial Sequence
  ENSG00000224699_63 (sequence is synthesized)
ttccactgaagactcctgagtattcagccccaacctctctctgaggattagagaagttaggtaacctggccaaggccacacagctaggggcagcagggatggcgctctcctaggaccatg

SEQ ID NO: 1011538 - DNA, 120 bp, Artificial Sequence
  ENSG00000224699_64 (sequence is synthesized)
ctgcactcctccaaatctgctccttgctcccctcccatccatctccaccttctttgccctgctgtgtgtcctgggaggctgatctgtgaggatgtcttggtggctgccttcggtggattt

SEQ ID NO: 1011539 - DNA, 120 bp, Artificial Sequence
  ENSG00000224699_65 (sequence is synthesized)
gaggaaaccaaaaatctcctcctcgccccgcaaccaccttttgctgactgctaagcatccctgctctgaaaccataaccaccataaaagcaataggcttgtcttctctgttctaagcatg

SEQ ID NO: 1011540 - DNA, 120 bp, Artificial Sequence
  ENSG00000224699_66 (sequence is synthesized)
ctcagttgtaaatgactccatcacccatgctcttttttagtcccctttataattattttaaaataacatttaattaattttctgttataaaaggaacacatgctcaaacaaaaaacttag

SEQ ID NO: 1011541 - DNA, 120 bp, Artificial Sequence
  ENSG00000224699_67 (sequence is synthesized)
aaaatataaaaatgtatgaagacaaaacaaaataacccccagtattagcaatgccaacttgccaagacaaaaatgttaacatttttatttctttttcttttcagtctttactctctgtgt

SEQ ID NO: 1011542 - DNA, 120 bp, Artificial Sequence
  ENSG00000224699_68 (sequence is synthesized)
gcacacacacacacaggcaaagtgaaatcacattgtatattcttttttgcttctagcattttccacttagctatctaatattactatttcctgatatcaataaatgatcttcaatcccat

SEQ ID NO: 1011543 - DNA, 120 bp, Artificial Sequence
  ENSG00000224699_69 (sequence is synthesized)
agtggccacagtattggccagtgtagcccaaggatatctcaaattatctcaaagctagatcagtgattaaaggattctcaggccaggcatggtagttttcaggcctggtatggtggttta

SEQ ID NO: 1011544 - DNA, 77 bp, Artificial Sequence
  ENSG00000224699_70 (sequence is synthesized)
ggagaccctgtctctaccaaagcacaaaaattagctgggcatggtgatgcgcacctgtggtctcaagtactttgtgt

SEQ ID NO: 1011545 - DNA, 78 bp, Artificial Sequence
  ENSG00000224699_71 (sequence is synthesized)
tggggagaccctgtctctaccaaagcacaaaaattagctgggcatggtgatgcgcacctgtggtctcaagtactttgt

SEQ ID NO: 1011546 - DNA, 120 bp, Artificial Sequence
  ENSG00000224699_72 (sequence is synthesized)
tctgtgcagtgggcaagaaggacccactgggtgactacaatatggcactttggtatgttggttattttaagttagaggcctttgatgctggaagaagctttactctgatatctccttatc

SEQ ID NO: 1011547 - DNA, 120 bp, Artificial Sequence
  ENSG00000224699_73 (sequence is synthesized)
taccacaagactggatctgccaaagagaacacaattgcgttccattcccttcctgaaatctcattatctatggcagaaaagaagactggggaatgtaatacacagtattacacagtaatg

SEQ ID NO: 1011548 - DNA, 120 bp, Artificial Sequence
  ENSG00000224699_74 (sequence is synthesized)
taacatactacacagtatttacacaaaacatgtaacacagaatgtactacacagtattttcacaaaacaatatctgtctctccaactcattcaaattctaaagagtcatttacacgtcaa

SEQ ID NO: 1011549 - DNA, 120 bp, Artificial Sequence
  ENSG00000224699_75 (sequence is synthesized)
gttccgctcaagttcctccgccgcgacctcaggacaggccgaagaggcgcgcactactcacgtgtcttccaagtgctgctccaaggtcgcctccatcccacccaccgaccactccggctc

SEQ ID NO: 1011550 - DNA, 120 bp, Artificial Sequence
  ENSG00000224699_76 (sequence is synthesized)
agaacccagcggcacggcacgtccttctccaccacaggcctcagtcacttgacgcgagcggggcgtggaccgtaacggcgcctccaaagggacaaaattgatcacggtgcaacgtccgcg

SEQ ID NO: 1011551 - DNA, 90 bp, Artificial Sequence
  ENSG00000224699_77 (sequence is synthesized)
gcaatttgctctccttggcctcacgaaatgctgggattacaggcataagctacagcacccagcccttacgtttacttttcattgacagga

SEQ ID NO: 1011552 - DNA, 120 bp, Artificial Sequence
  ENSG00000224699_78 (sequence is synthesized)
ctgtgcagctgcaaggtcactaggcagataaactcaagccataaaacatgtttttccttgaaaaattagatgggtgttactgattcttacctcagagaagagaatgtcatggagacaaaa

SEQ ID NO: 1011553 - DNA, 120 bp, Artificial Sequence
  ENSG00000224699_79 (sequence is synthesized)
gacaacgggctccacctcagcaggagcagctgggagcctgggctcttctttctgaaactgccttcagagttggatggaagaagggcaattgccaaaaacctggctgaatctgtgctcagg

SEQ ID NO: 1011554 - DNA, 120 bp, Artificial Sequence
  ENSG00000224699_80 (sequence is synthesized)
agaagaaagagtggggggaaagaagcaaggaaagaaggaatgctgagaaataatgtgttctccagattgcaggctggattcttccatagcccccagagaagaggtctaaggccctctgag

SEQ ID NO: 1011555 - DNA, 120 bp, Artificial Sequence
  ENSG00000224699_81 (sequence is synthesized)
gactcagctggtcctgtggttcttacccagtctgacacagcaccagaggaccgttttccacacttctatctatgatttcatccccaaccaatcagcaccacccattccctagccccctgc

SEQ ID NO: 1011556 - DNA, 120 bp, Artificial Sequence
  ENSG00000224699_82 (sequence is synthesized)
ccaccaaattgatatccataaaaaccctaacctctgagttctcagagaaactgattggagtaataaactcctgtcttctgtgtggctagccttatgttaattaaactctttcttagggca

SEQ ID NO: 1011557 - DNA, 120 bp, Artificial Sequence
  ENSG00000224699_83 (sequence is synthesized)
tcaggaggagaaggtgaactggctgtgtgtagtatggtaaataaaggggccgggctacctttcagaggtttggcacactgaatgacttatgccctgaccagagacctgggctaggaactt

SEQ ID NO: 1011558 - DNA, 120 bp, Artificial Sequence
  ENSG00000224699_84 (sequence is synthesized)
tggtccgatttgcaaacacaacagctccacaggaagaagctttgtcacaatagttattattatagcaaccatccagaggatgctgcatcctaaatatccctcagcagtagtccaggacct

SEQ ID NO: 1011559 - DNA, 120 bp, Artificial Sequence
  ENSG00000224699_85 (sequence is synthesized)
ttgccagctttatacctgcacaaaaacgaagagatgacatgatggatccaatccaaccaatttgctctgaggtgccttcaaactcttcttgaaagaccacaaagaaaattgcaaaagtct

SEQ ID NO: 1011560 - DNA, 120 bp, Artificial Sequence
  ENSG00000224699_86 (sequence is synthesized)
tggtagaaagggtagctttcctatgggtacggagggctctgctaccccagggctatccacactggcctgtgaatcactctcaaatgcttagggtcacgggctttcagtggaatgagccct

SEQ ID NO: 1011561 - DNA, 120 bp, Artificial Sequence
  ENSG00000224699_87 (sequence is synthesized)
catgtgccaccagggggcaccaaggccacagaaaaccctattcagaaggttctggggtgagggaaaggaatccacgggtttgtggagctggcggagcatgggtgaggacagcattatgct

SEQ ID NO: 1011562 - DNA, 120 bp, Artificial Sequence
  ENSG00000224699_88 (sequence is synthesized)
aggttggtggccttgaagtcagatgtaaattgggatcctggcttggccactgactatccatgggaactttgaatctcagggggctcatttgtgatgtgggggtaccattatctgcctcat

SEQ ID NO: 1011563 - DNA, 120 bp, Artificial Sequence
  ENSG00000224699_89 (sequence is synthesized)
ggaattgaaagaaatttaaaaatgcataagcaaaaactcagtttatgttttaaaaaaaccaattccccctgagaaagagaaagaggtggagtcctttaaaaattatctgcttgtttttct

SEQ ID NO: 1011564 - DNA, 120 bp, Artificial Sequence
  ENSG00000224699_90 (sequence is synthesized)
ttgaaaagtaagaaataatgtaatgcatgtgtcaaatgaataactatttctcgcttctgtaatatgcttcccttcgcacagatctccccctgccccatgaaatgctttaaaggtaactta

SEQ ID NO: 1011565 - DNA, 120 bp, Artificial Sequence; identical to SEQ ID NO: 906615
  ENSG00000224698_0 (sequence is synthesized)

SEQ ID NO: 1011566 - DNA, 120 bp, Artificial Sequence; identical to SEQ ID NO: 906616
  ENSG00000224698_1 (sequence is synthesized)

SEQ ID NO: 1011567 - DNA, 120 bp, Artificial Sequence; identical to SEQ ID NO: 906617
  ENSG00000224698_2 (sequence is synthesized)

SEQ ID NO: 1011568 - DNA, 120 bp, Artificial Sequence; identical to SEQ ID NO: 906618
  ENSG00000224698_3 (sequence is synthesized)

SEQ ID NO: 1011569 - DNA, 120 bp, Artificial Sequence; identical to SEQ ID NO: 906619
  ENSG00000224698_4 (sequence is synthesized)

SEQ ID NO: 1011570 - DNA, 120 bp, Artificial Sequence; identical to SEQ ID NO: 906620
  ENSG00000224698_5 (sequence is synthesized)

SEQ ID NO: 1011571 - DNA, 120 bp, Artificial Sequence; identical to SEQ ID NO: 906621
  ENSG00000224698_6 (sequence is synthesized)

SEQ ID NO: 1011572 - DNA, 120 bp, Artificial Sequence; identical to SEQ ID NO: 906622
  ENSG00000224698_7 (sequence is synthesized)

SEQ ID NO: 1011573 - DNA, 120 bp, Artificial Sequence; identical to SEQ ID NO: 906623
  ENSG00000224698_8 (sequence is synthesized)

SEQ ID NO: 1011574 - DNA, 120 bp, Artificial Sequence; identical to SEQ ID NO: 906624
  ENSG00000224698_9 (sequence is synthesized)

SEQ ID NO: 1011575 - DNA, 120 bp, Artificial Sequence; identical to SEQ ID NO: 906625
  ENSG00000224698_10 (sequence is synthesized)

SEQ ID NO: 1011576 - DNA, 120 bp, Artificial Sequence; identical to SEQ ID NO: 906626
  ENSG00000224698_11 (sequence is synthesized)

SEQ ID NO: 1011577 - DNA, 120 bp, Artificial Sequence; identical to SEQ ID NO: 906627
  ENSG00000224698_12 (sequence is synthesized)

SEQ ID NO: 1011578 - DNA, 120 bp, Artificial Sequence; identical to SEQ ID NO: 906628
  ENSG00000224698_13 (sequence is synthesized)

SEQ ID NO: 1011579 - DNA, 120 bp, Artificial Sequence; identical to SEQ ID NO: 906629
  ENSG00000224698_14 (sequence is synthesized)

SEQ ID NO: 1011580 - DNA, 120 bp, Artificial Sequence; identical to SEQ ID NO: 906630
  ENSG00000224698_15 (sequence is synthesized)

SEQ ID NO: 1011581 - DNA, 120 bp, Artificial Sequence; identical to SEQ ID NO: 906631
  ENSG00000224698_16 (sequence is synthesized)

SEQ ID NO: 1011582 - DNA, 120 bp, Artificial Sequence; identical to SEQ ID NO: 906632
  ENSG00000224698_17 (sequence is synthesized)

SEQ ID NO: 1011583 - DNA, 120 bp, Artificial Sequence; identical to SEQ ID NO: 906633
  ENSG00000224698_18 (sequence is synthesized)

SEQ ID NO: 1011584 - DNA, 70 bp, Artificial Sequence
  ENSG00000224691_0 (sequence is synthesized)
tctttccttttgtccagtctctcagagaggctgcctggatcacagtgctaccaccccaatctgggtctct

SEQ ID NO: 1011585 - DNA, 120 bp, Artificial Sequence
  ENSG00000266283_0 (sequence is synthesized)
gcggcaagagcagtgaagcacccgtcgtcacgctggttccctagtgcagacttggaatatgctggagaatattcagaggagcatgggtgcttgctctgacatgagtctcagaggtgcaga

SEQ ID NO: 1011586 - DNA, 120 bp, Artificial Sequence
  ENSG00000266283_1 (sequence is synthesized)
cacgcacctgcaacgtcctaactttccttagaagcaatttggaactatcaaccacaatatatttatccaaagtccctataaactaagactttctggcatcctttatcttgaagttgaacc

SEQ ID NO: 1011587 - DNA, 120 bp, Artificial Sequence
  ENSG00000266283_2 (sequence is synthesized)
aactgaaaacaccctttgactcctcttctgcctgtcctactgatgtctatcaccttctcctgcctgatcccagccccaccagaaggtcataagcgaagtggccttctcagaatgcagctg

SEQ ID NO: 1011588 - DNA, 120 bp, Artificial Sequence
  ENSG00000266283_3 (sequence is synthesized)
ctcaagcctcttgggaaaaacatctctttcaaaataaaggcacgagaatcacgttctgtcagcgcagtcgccactgtctggaccgctgcacaaaagcagacacgagtggagtgaggcccg

SEQ ID NO: 1011589 - DNA, 120 bp, Artificial Sequence
  ENSG00000266283_4 (sequence is synthesized)
cggcggagccctccctgcctcctggcggcgtgggctcaggccagggccagggcgcaccaggaatccggtcgcacggaggacgtgacttcggccggcgaggcgagactgacgcctatgtag

SEQ ID NO: 1011590 - DNA, 120 bp, Artificial Sequence
  ENSG00000266283_5 (sequence is synthesized)
agcccatcttgacccgaatacttgagctcgctgttctcgggattggtgctctctcccgcaccagtcatcaccggggcacccgcctggcagaagagggggacacagaggagagacgagaag

SEQ ID NO: 1011591 - DNA, 120 bp, Artificial Sequence
  ENSG00000266288_0 (sequence is synthesized)
gtttagaaatattgtttccatattacaagtttaaggaaaagtttatctgccaaaataataacatggatttctagagcaccccataccataaggaggagccagaatattttccagctgaat

SEQ ID NO: 1011592 - DNA, 120 bp, Artificial Sequence
  ENSG00000266288_1 (sequence is synthesized)
aatcaaattggccaatctgattctaattctaagctttgctgaggatgccaagcagaagccacgtgagcacactgctgaacacccaggatctttccatgtatggcagccttcatgtgagtt

SEQ ID NO: 1011593 - DNA, 120 bp, Artificial Sequence
  ENSG00000266288_2 (sequence is synthesized)
ctcttctcaccatacaatgttgtggatacagaagggaaggaattggatttggatgagtactgagcaccgatcacaggacagagcctcaaagttgctttttggaataaatttcttatagta

SEQ ID NO: 1011594 - DNA, 120 bp, Artificial Sequence
  ENSG00000266289_0 (sequence is synthesized)
attttaatatattatgaactcatgtatttaaacatatttgatgttttaaaccattgcagttctctttattgatgcttaaattgtgtcatctttaacagtgagaaccaattcaaatgttgg

SEQ ID NO: 1011595 - DNA, 120 bp, Artificial Sequence
  ENSG00000266289_1 (sequence is synthesized)
ctcttggatccttttgagttgtttttcatagctgccttgttttccagtatgacaaaatgttccatgctcatattgtacatttcctgccccataggtgaaatctcccatttcttcaaggat

SEQ ID NO: 1011596 - DNA, 120 bp, Artificial Sequence
  ENSG00000266289_2 (sequence is synthesized)
ttttagttccttttagtaggaaatgggagtgtagagatcacattctgggcattactggattggtcattgtttctgggccttttcggtaaacaaagctagattttgttgctgttttgtagc

SEQ ID NO: 1011597 - DNA, 120 bp, Artificial Sequence
  ENSG00000266289_3 (sequence is synthesized)
aatttacttaacttcactaatcttacatgtatactgccttcttggatttttttctgatcacctcagccagaagtgatcactcttcctttgaaccacatcacccacttcaacacttttata

SEQ ID NO: 1011598 - DNA, 120 bp, Artificial Sequence
  ENSG00000266289_4 (sequence is synthesized)
gtaatcaacacattaacttttgatttattgttatttctatatatgtctgatattctctaccaaatggtaaggaatttgaggatagaatccatcctttgttaccctttgttaaataaagat

SEQ ID NO: 1011599 - DNA, 120 bp, Artificial Sequence
  ENSG00000266289_5 (sequence is synthesized)
aaaattcctaaagtgctgatatatttcctgacatataaataccactttctctttgtattcctttaaaaatggaaccatattatacatgtactaaaaattaataaatgagtgttaaatgaa

SEQ ID NO: 1011600 - DNA, 120 bp, Artificial Sequence
  ENSG00000261399_0 (sequence is synthesized)
ccgcccagctcccctgcaggcaggcggatggacaaacggcactgctgggaccctgcttggccatgggggaaggacacacacagcctgggtgagtccccgaatcactgtaccgagtggaag

SEQ ID NO: 1011601 - DNA, 120 bp, Artificial Sequence
  ENSG00000261399_1 (sequence is synthesized)
aaggcgaaaaagtcgatcctgtgccctgagcacaggcagtcctgaggtgcgagcggtttcccaccaggctcttcttggcctttcgagaacttcagcccctctctgctgtttcctgttgct

SEQ ID NO: 1011602 - DNA, 120 bp, Artificial Sequence
  ENSG00000261399_2 (sequence is synthesized)
ggcatccactttcccatctcacaatattttctcctgtctggtctcctgtatctgaaacccactgctacgggatctcccctctttctggaaaatgttcattaaacaggaaacaaacccacc

SEQ ID NO: 1011603 - DNA, 120 bp, Artificial Sequence
  ENSG00000261398_0 (sequence is synthesized)
gaccgtgcaggaagaccagaaggaaagtaatctgccgcatccagaatgaacagaacaaaacccccgcactccaggaagaagtcaggagcccagtgggggctgcaggtccagcccacaaca

SEQ ID NO: 1011604 - DNA, 120 bp, Artificial Sequence
  ENSG00000261398_1 (sequence is synthesized)
acctagacatgtggggtgctccatggctcacgcttatgtcctgcaggctgaagcccgcgccagggtccgcagtctttgttccggacgcagaaccagtgcttcagctggttaccgaggcgt

SEQ ID NO: 1011605 - DNA, 120 bp, Artificial Sequence
  ENSG00000261398_2 (sequence is synthesized)
ccccgaaggggaaagggtggacacggtgagaatctacagcacagcagatcacttcgtcctggcagcgaccagccctgcccgagcggcaccagcagcctccatgttagaggcagtaccatc

SEQ ID NO: 1011606 - DNA, 120 bp, Artificial Sequence
  ENSG00000261398_3 (sequence is synthesized)
agacttcccccctacagcatctctcctgctttttttttccctcacggctctaatctcctgcttttgttcatcctccttgtcacagtggggcacctggcactatagagactcagaaaatcc

SEQ ID NO: 1011607 - DNA, 120 bp, Artificial Sequence
  ENSG00000261398_4 (sequence is synthesized)
gcagatgtggggggtcctgcagcatccaggcagacatgccggcagtcagagaggaaagtcctctgaagcctctagaaggaatggaacaggacccagcactgcaggaagaagtggggcacc

SEQ ID NO: 1011608 - DNA, 120 bp, Artificial Sequence
  ENSG00000261398_5 (sequence is synthesized)
cagtggcggatgcaggccccacacaccgccgcggtaaacgtataaggctttccctggcccttgcctgtttcctagaagctgaagccgcgcggaggcccaggttcgcccttccacacacgg

SEQ ID NO: 1011609 - DNA, 120 bp, Artificial Sequence
  ENSG00000261398_6 (sequence is synthesized)
aataagctgttggactggctgcctcacctaggacccgagttgcgccagagaaaatcgcggatgctgctttcccgcgggctgcagtgtctgtcactttagcgaccgcaataacacttctcc

SEQ ID NO: 1011610 - DNA, 120 bp, Artificial Sequence
  ENSG00000261398_7 (sequence is synthesized)
ccaagcgccacaaacagacaaacatctgagggatgtccattggtcactttgatttttcaaaggtgacaattgtccctccttgaaatcttaagagagcatgaacaggctattctaatggat

SEQ ID NO: 1011611 - DNA, 120 bp, Artificial Sequence
  ENSG00000261398_8 (sequence is synthesized)
gtgcaatttacactaaaactgattgaaaggtgaattctgattccaaggtactttgtattctcaaattgtgtctgcttcccctgaccccctcaaaatgggagtgatgactacttgtcttct

SEQ ID NO: 1011612 - DNA, 120 bp, Artificial Sequence
  ENSG00000261398_9 (sequence is synthesized)
tagcactgtggggacacaaagccttagatggaagtgtgtcaaaaacaacattccataaaaggccatcacttccaattttcaagaaaggttggaaaccaaccatgatgtatgaagcactgt

SEQ ID NO: 1011613 - DNA, 120 bp, Artificial Sequence
  ENSG00000261398_10 (sequence is synthesized)
cagccaaattgagcaattagtaatacaaaatgaatggtataaactattctacatgtgtgtggccatgatggcaatttacacatcgaaaaaacatggccaaattcaggaagaggaatctgt

SEQ ID NO: 1011614 - DNA, 120 bp, Artificial Sequence
  ENSG00000261398_11 (sequence is synthesized)
aaactcacggctgttgggaagcttaatgtctgtgtaccggaacctatcaaagttacttctccatgccagtctgtccaaacaaaccttgagttgtttatttctatggaattcctgtagaat

SEQ ID NO: 1011615 - DNA, 120 bp, Artificial Sequence
  ENSG00000261398_12 (sequence is synthesized)
cctaatgagcatgaccttctggacccatcttcacagctctggtgccagtggatttgcacttgctcgtgtttctccctattttgttaagggtggaaatatttagtgacatggtgggttgga

SEQ ID NO: 1011616 - DNA, 120 bp, Artificial Sequence
  ENSG00000261398_13 (sequence is synthesized)
aaggtactgaaataatggctggggcctcctgggtgggtgagtcagggctccggcagcctaagactttttacaataagtaagttataggtaaagttagaaaaaataaaaagaaaatggaaa

SEQ ID NO: 1011617 - DNA, 120 bp, Artificial Sequence
  ENSG00000261394_0 (sequence is synthesized)
gtgcatcaacagcctgccatctaccaccccctcatgaacctccagggcaagctcagtcatctcagaggaagcaaggtgccccaggtaacacagacggctcacagcgaggacccacatgag

SEQ ID NO: 1011618 - DNA, 120 bp, Artificial Sequence
  ENSG00000261394_1 (sequence is synthesized)
gtgttattgagcaagacaggaaggcagctttctggataatcgaacgtgctagtgaacagagtgttgccagagatactccaggtgtacactcagatgtatacgtcatatgctccctgagtg

SEQ ID NO: 1011619 - DNA, 120 bp, Artificial Sequence
  ENSG00000261394_2 (sequence is synthesized)
agctccaggtccacaggggaaaatggaagtcaacgccaagtggtactgcagagtggcaaacaacacagcacaaagtgctccagaaacactcatcaggggtcagccatatgctggaaggca

SEQ ID NO: 1011620 - DNA, 120 bp, Artificial Sequence
  ENSG00000261394_3 (sequence is synthesized)
ggcaatggcccactccacagggaccctcacaaaacacacaaggcttggatgatgaaggggagatggaaaggctttgtagtttttcagggcaattgtaatgaatggcaattatcatggtaa

SEQ ID NO: 1011621 - DNA, 120 bp, Artificial Sequence
  ENSG00000261397_0 (sequence is synthesized)
agacacaatggggtatttccggagctgcttatacttcagcatgacacagcctgacaggacaagccggaccaacatgcagggaaaggtgaccacaaagccaggtgtgtgaagggaatgagg

SEQ ID NO: 1011622 - DNA, 120 bp, Artificial Sequence
  ENSG00000261397_1 (sequence is synthesized)
aaggggattgggcaggtgctcactgaagaaagacatctccacaggggccagcccaccaacgaacaccttcttcctgattccagctgagccttggaagccagaaaagtgtagggggcagag

SEQ ID NO: 1011623 - DNA, 120 bp, Artificial Sequence
  ENSG00000261397_2 (sequence is synthesized)
attaagagaagaaaagggagaaagccctaagacctgtgaaaatgaagatgtgctgtctgactccctcagcctgcccacagaagcaattcaaaggcctcaaataattgtctcaaaagaagc

SEQ ID NO: 1011624 - DNA, 120 bp, Artificial Sequence
  ENSG00000261397_3 (sequence is synthesized)
aatttggagaaagtacattacaggaggaaagaaaattgcctaatcctcattctgctgagtcctcaatttgcaaaagctcggaatcaaaataatgaggaaataaacatgagggccgttcca

SEQ ID NO: 1011625 - DNA, 120 bp, Artificial Sequence
  ENSG00000261396_0 (sequence is synthesized)
ggcaccatcccggagacgccgctggacacagtatgcctcatacagctcatcgatctgggaagccgcctggggagagctctctgcttccttgtgcaaggttccctctgcaggggaactccc

SEQ ID NO: 1011626 - DNA, 120 bp, Artificial Sequence
  ENSG00000261396_1 (sequence is synthesized)
atcaagccccggcagaagtgttccctcctccaggaagccctaacctcttcccaagaagcaccatgcagcagtaccactgctcagtaccactgcagcagaatctcctgctgtccatgtctg

SEQ ID NO: 1011627 - DNA, 120 bp, Artificial Sequence
  ENSG00000261396_2 (sequence is synthesized)
ccaggtccagccgctcgggctgcggcaccttggcggctgggtgagccacggaaaacatcctggacactcgggagagcgcggggggcttccgtgggggccccggcgggctgaagaccggga

SEQ ID NO: 1011628 - DNA, 120 bp, Artificial Sequence
  ENSG00000261396_3 (sequence is synthesized)
aactcctgaaggagaggctgtcctcagaaagaggagagcaggagtcccccagactctcactacgcacccccagacccagccccatctgacgccctttgaccccaccaaccctgcgcggcc

SEQ ID NO: 1011629 - DNA, 120 bp, Artificial Sequence
  ENSG00000261390_0 (sequence is synthesized)
aggctcgtcccacctgtgtggagctcccatcgccctccagcgttgcgcagcctgaagggacaggacggacaagcgggtgcctccttctaattcatcttcaccattgtggttgtcaatatg

SEQ ID NO: 1011630 - DNA, 120 bp, Artificial Sequence
  ENSG00000261390_1 (sequence is synthesized)
gcatgcagaattatccctctttccaggttttccccaaggaccctggacaatgctggtttttcctatgtgcaccaccaaagggcctatccagcttctggagtctacctggattcctgggct

SEQ ID NO: 1011631 - DNA, 120 bp, Artificial Sequence
  ENSG00000261390_2 (sequence is synthesized)
cttcaattctaggaagctgttcaatgtttgactatatttctccatactcatttgaaaacagttcatcaggttagttcagttgaattattgctccttgggagttttccaaaccctggattt

SEQ ID NO: 1011632 - DNA, 120 bp, Artificial Sequence
  ENSG00000261390_3 (sequence is synthesized)
ccttcggagagagctagattctattccattcttggaattcagctccttgcccttctctgtgaccccggatcgcgaatgcagtaaaaataaaaatatcctgctgcctcctgcactaagaaa

SEQ ID NO: 1011633 - DNA, 120 bp, Artificial Sequence
  ENSG00000261390_4 (sequence is synthesized)
tatatttctccatactcatttgaaaacagttcatcagattggaacgacctggagcagccagcagagtgacaaatgaggaagaggacagaatctagctgaagaagctctggaagataccat

SEQ ID NO: 1011634 - DNA, 120 bp, Artificial Sequence
  ENSG00000261390_5 (sequence is synthesized)
ttgaagtcttgagtgcttgaactcacaaagaaagcacatgagtacacactagcacttgagctcttcattttaaacagaataaagaatgtactgctattattgtcattttacagataggga

SEQ ID NO: 1011635 - DNA, 120 bp, Artificial Sequence
  ENSG00000261390_6 (sequence is synthesized)
aattcagactcaccagggctactcagatacaaagaaaatgagccagaatttcaagcaagcctgagcttagaatctacactatttttttttttttttttgagacatggtcttactttgtca

SEQ ID NO: 1011636 - DNA, 120 bp, Artificial Sequence
  ENSG00000261390_7 (sequence is synthesized)
gacatggtcttactttgtcacccaggctggagttcagtggtattaggttggcacaaaagtaattgtggtctctgccacttaaaactagagcccgaaactgcaattacttttgcaccaacc

SEQ ID NO: 1011637 - DNA, 120 bp, Artificial Sequence
  ENSG00000261390_8 (sequence is synthesized)
ccacctcagcctcccaagtggctgggaatgtgggcatgcaccaccctgcccggctagcttttctttcttttttttttgtggagacaggattttgccatgttgtcccggctggtctttaac

SEQ ID NO: 1011638 - DNA, 120 bp, Artificial Sequence
  ENSG00000261390_9 (sequence is synthesized)
caggcatgagccactgtgcccggcccagaacctatgctcctaactgccacaccaattgacctctattcagccatttttatttctatagcacttggtataatttcactttgcacacagtat

SEQ ID NO: 1011639 - DNA, 120 bp, Artificial Sequence
  ENSG00000261390_10 (sequence is synthesized)
ctatagataatcattccagggcatgtaatcgtcataagattatttatgttattgcatgtgtattactgcatgtaatcttcatgtgttattgcctctaacaagttatgtatttccatgtag

SEQ ID NO: 1011640 - DNA, 120 bp, Artificial Sequence
  ENSG00000261390_11 (sequence is synthesized)
tcttcataactgtgtatagaagaccattttagagatggaaaactgagactcagaagtggtaattgtcctactggtcagagatttagccagggtttggattgtggaatgcagaggaccact

SEQ ID NO: 1011641 - DNA, 120 bp, Artificial Sequence
  ENSG00000261390_12 (sequence is synthesized)
tacttttcactagaccataaatgctcctcaccactgaggcatgtcaaatgccagatatctccaggaaccttaggctacgtctccattgtttttgctttttccccccttagacacagcttg

SEQ ID NO: 1011642 - DNA, 120 bp, Artificial Sequence
  ENSG00000261390_13 (sequence is synthesized)
gcaaagaacaaatgatcccaaacaccaaacagcacacttggaaacatttaacccgcatactttcagactttctggcatggaccaacctcttgtcttacctttgttcctggccagaaagaa

SEQ ID NO: 1011643 - DNA, 120 bp, Artificial Sequence
  ENSG00000261390_14 (sequence is synthesized)
atggcatgaaaagatggacagtttttataacctctttgagctctaaaccatgtttcctgtgcacttaggagatcttaatagaaaccaagtacttcttttaggcatctatactcttaatgc

SEQ ID NO: 1011644 - DNA, 120 bp, Artificial Sequence
  ENSG00000261390_15 (sequence is synthesized)
cgtaagtcaagtcaagtacccaggtggttaagataactgtaccaacagaaacatttttaaaaaatatcctaacacaacatgaagtgaccatcgcgaattcaaagaagcaggcatatttct

SEQ ID NO: 1011645 - DNA, 120 bp, Artificial Sequence
  ENSG00000261390_16 (sequence is synthesized)
taaaggttgaaaagaggtgagtctttcacaagattctagctcaaggccatatttgcacaagtatagtcattcctctagcaaggttttgtttatctggccattaaaaaaaattaaaacaac

SEQ ID NO: 1011646 - DNA, 120 bp, Artificial Sequence
  ENSG00000261390_17 (sequence is synthesized)
tgagcccccagcccttgaacacacgcacacacgcacacacgctgagctaccgccaatgcttgagcccccagcccttacacacacccatacacgtgcacaaacacacacacacgctgaacc

SEQ ID NO: 1011647 - DNA, 120 bp, Artificial Sequence
  ENSG00000261390_18 (sequence is synthesized)
aacttcaacacttgagcccccagcccctagagagagacacacacacacacgctgatgcgggagcatttagcacagtttccttgctgaaaaagcaggacctcggtttagaaaatggaaatt

SEQ ID NO: 1011648 - DNA, 120 bp, Artificial Sequence
  ENSG00000261390_19 (sequence is synthesized)
ctatgtgcaccaccaaagggcctatccagttgtcatccaagcaattgtcccctgctccttcatacccatgctatccctggctccctccctccttcattgcagagctgcaatggggcagac

SEQ ID NO: 1011649 - DNA, 120 bp, Artificial Sequence
  ENSG00000261390_20 (sequence is synthesized)
agatcctatggagtctccacagacattccttgaagaaatcagatggagctgagcctgacactctaaccggttctctgggtgtactgcaaaggtctaataaaaggcacctttgcccggttg

SEQ ID NO: 1011650 - DNA, 120 bp, Artificial Sequence
  ENSG00000261390_21 (sequence is synthesized)
tcttcttcttttttttttttttttttaaggcggggcggggctgggggcgcggcgtcgcggagctcgggccggtggaaggtttacctgctaggctcgtcccacctgtgtggagctcccatc

SEQ ID NO: 1011651 - DNA, 120 bp, Artificial Sequence
  ENSG00000261390_22 (sequence is synthesized)
caaaccagcaatggtgagttgagtctttttcacatcacatctctctgtgatcatcttctgccctctcctccatttttaaaaacctttgtcgttagattggacctgcctgaataatccagg

SEQ ID NO: 1011652 - DNA, 120 bp, Artificial Sequence
  ENSG00000261390_23 (sequence is synthesized)
ataatcttcctattttaaattgagtagatgaacaaccttaatttcatctgccatcttaattctttgccaaggaaagtaacatagtcacaggttctgaagattagggcatggaaatcttgg

SEQ ID NO: 1011653 - DNA, 120 bp, Artificial Sequence
  ENSG00000261390_24 (sequence is synthesized)
tcttttccatctgtttttctacaaagaaaaacaactgaaattggcttcatacaacaattacatgactaaacttccagttataaatttatagtagaaagagaaaggtgttttctgataatg

SEQ ID NO: 1011654 - DNA, 120 bp, Artificial Sequence
  ENSG00000261390_25 (sequence is synthesized)
cattttggttaagagccaaagagtcttcactaaacatttgctgaaaatactgttataaacaatgactattaaagttaaatagtcatcaagttaagtaaaattcaatttaacttaaatatt

SEQ ID NO: 1011655 - DNA, 120 bp, Artificial Sequence
  ENSG00000261390_26 (sequence is synthesized)
tattaggagtgaaagccaacataaatgttgaaaactcaaatccttatttctcaactgcctcctcatttttccacaatgtatttctggctgttcggaggtaatttcctaggttttattaac

SEQ ID NO: 1011656 - DNA, 120 bp, Artificial Sequence
  ENSG00000261390_27 (sequence is synthesized)
ctgtaacagaagcagtttacagctgaatccatgccagagaaaaactcatttgcaacccgatgtcgcagcatccagggccaaagggattgaaagaaaaaaaaaaagcatgaactcagaaaa

SEQ ID NO: 1011657 - DNA, 120 bp, Artificial Sequence
  ENSG00000261390_28 (sequence is synthesized)
atccattagcaacatgtcagcttttctttgctaaaaatttccagataaatacagtatacatttaaaaaaattattaagtgactaatttatgcctagcatggtttcagctactgagaatac

SEQ ID NO: 1011658 - DNA, 120 bp, Artificial Sequence
  ENSG00000261390_29 (sequence is synthesized)
agtcatgctgtgaacaaggaagaccaggtttctccctttgtggggtttatattcttgtagaaggtgttagacaacagaaatgtaaatgctgaaaataataaaacaatttaattgtgagtt

SEQ ID NO: 1011659 - DNA, 80 bp, Artificial Sequence
  ENSG00000261393_0 (sequence is synthesized)
gccgtgggaaggaagggccccgggccgccccggagccactgggaaagagcggaagcccggcagagccgccgagggcccgc

SEQ ID NO: 1011660 - DNA, 120 bp, Artificial Sequence
  ENSG00000261393_1 (sequence is synthesized)
caacagccttgaaggattgaatcctgccagcaactgtgtgagcttcaaagtggatccttcctcagtggaacattcagatgagacctcagccctggctgacatcctgatcacagccctgtg

SEQ ID NO: 1011661 - DNA, 120 bp, Artificial Sequence
  ENSG00000261393_2 (sequence is synthesized)
agagtcccagaagcagaggccccagttaagctgtgcccagacttctcccccaacagcccaacagctcttgagtgagtgagacagagctgacttgagtcctggggtcacagatgcttacag

SEQ ID NO: 1011662 - DNA, 120 bp, Artificial Sequence
  ENSG00000261392_0 (sequence is synthesized)
ggaggccttgtactgaaagcgtggagccacaagatagaagctgcctggatccctgagtcaccacatgtcatcacgtggaaggcagaagccctggagagtgatggagtctccctctgtgcg

SEQ ID NO: 1011663 - DNA, 90 bp, Artificial Sequence
  ENSG00000261392_1 (sequence is synthesized)
ggcagaagccctggagagtgatggagtctccctctgtgcgccctatggcccaggctgcagtgtagtgacacagtctcagctctctgtaac

SEQ ID NO: 1011664 - DNA, 75 bp, Artificial Sequence
  ENSG00000261392_2 (sequence is synthesized)
ccaagtgtgcgccatcacgcctggctaatttttgtccttttttttttttctgagacagaatctcactctgtcgcc

SEQ ID NO: 1011665 - DNA, 66 bp, Artificial Sequence
  ENSG00000261392_3 (sequence is synthesized)
ctaggattacatgtgcatgcgtccagggtagtctcgaagtcctgacctcaagtgatctgcctgcct

SEQ ID NO: 1011666 - DNA, 74 bp, Artificial Sequence
  ENSG00000261392_4 (sequence is synthesized)
attacaggcatgagccaccatgcctagccaatttttgtacttttttgactcaagagatctacccagcttgcctt

SEQ ID NO: 1011667 - DNA, 120 bp, Artificial Sequence
  ENSG00000234378_0 (sequence is synthesized)
caggtgagcgccggctgggcttgatgggaggctgaatcccgttcgtggaccgccgttgcctcttcgcgggatcgttggccacaatagcaggaaacctatggcctgcatcaatgaaatagc

SEQ ID NO: 1011668 - DNA, 120 bp, Artificial Sequence
  ENSG00000234378_1 (sequence is synthesized)
caagatcaaccagaaaaagaatattggtctcccatctgcaagactggggaaaaaattagaagactgaggggatgaggaaggaaagaaaacagcctaatggagaagatcctcaaacctcag

SEQ ID NO: 1011669 - DNA, 120 bp, Artificial Sequence
  ENSG00000234378_2 (sequence is synthesized)
acctggaagtgagcctggggcttccctagtctacccctgcattgcacagatggggagactgaggccctaagaggcggaagaactgactcaagctcactctgtgagttgagggtggaactg

SEQ ID NO: 1011670 - DNA, 120 bp, Artificial Sequence
  ENSG00000234378_3 (sequence is synthesized)
cagacccacacctcctggcaaagtgctcaatgccctctgcccgcgcagccctcctgctctcctaacaagctagagacactaaaagctgcctctccaggagaatcgcttgaatccgggagg

SEQ ID NO: 1011671 - DNA, 67 bp, Artificial Sequence
  ENSG00000234378_4 (sequence is synthesized)
gatcgtgccactgcacttcagcctggcgacagagcaagactccgtttcaaaatacatacatagctgc

SEQ ID NO: 1011672 - DNA, 120 bp, Artificial Sequence
  ENSG00000234378_5 (sequence is synthesized)
ctgcctctctaacccccagacattttgaattcatgtttttgccacaaagtgttcttggaatcaaagaatcaattcattaatctgggtaattagtttaggaaccagagggcttggagactg

SEQ ID NO: 1011673 - DNA, 120 bp, Artificial Sequence
  ENSG00000189295_0 (sequence is synthesized)
cctggaaactgagctccgttatgaaagagaggctctcaaagaaaagacgttgggtatagaacacatgcaaggagtcctaagccgaacacagtgtccattgaaggacattgaacacatgta

SEQ ID NO: 1011674 - DNA, 120 bp, Artificial Sequence
  ENSG00000189295_1 (sequence is synthesized)
ccaaaatgaccaacctattttggaaaaatatgtgagaaagcagcagtctatagaggatggactatttcaactacaaagccaaaatctgttgtatcaacagcaatgtaatgatgctcacaa

SEQ ID NO: 1011675 - DNA, 120 bp, Artificial Sequence
  ENSG00000189295_2 (sequence is synthesized)
gaaagctgacaatcaggaaaaaacaataattaatatccaagtcaaatgtgaagatactgtagaaaaacttcaagctgagtgtagaaagctagaagagaacaataaggggttgatgaagga

SEQ ID NO: 1011676 - DNA, 120 bp, Artificial Sequence
  ENSG00000189295_3 (sequence is synthesized)
atgcactcttttaaaagaaagacaatgccaatatgaaaaagagaaagaaaaaggagaagtagtcgtgagatagcttcaacgagaagtgggtgatgccctgaacaaacatttgctgtcaga

SEQ ID NO: 1011677 - DNA, 120 bp, Artificial Sequence
  ENSG00000189295_4 (sequence is synthesized)
tgcaggatcaacgcacagagactctaagatgtgctgaggagatgccagaccacatgcaaaaatgcagcaggtgtacaaggaaacataactgtagaagtagctgaagagttactgcgcatt

SEQ ID NO: 1011678 - DNA, 120 bp, Artificial Sequence
  ENSG00000189295_5 (sequence is synthesized)
tctgtgtcatctacatgccatgaaagtcttaaaatcaattgtcaatttctacaaaatacccgcttggatttgaactgtgattgcattatgtcatgagaaagaatgaacatcttaacaatg

SEQ ID NO: 1011679 - DNA, 79 bp, Artificial Sequence
  ENSG00000189295_6 (sequence is synthesized)
ttgcattatgtcatgagaaagaatgaacatcttaacaatgatgagtctctcaactcatgaataagctcgaagttgtttg

SEQ ID NO: 1011680 - DNA, 120 bp, Artificial Sequence
  ENSG00000189295_7 (sequence is synthesized)
ctatttgtaacaagagcctaaaaactgggtttccttcattgaacttcatgcctctctggttattgaagatggcaagcgaggggcactctggatacaggtataaaatgaagagaatgtctc

SEQ ID NO: 1011681 - DNA, 120 bp, Artificial Sequence
  ENSG00000189295_8 (sequence is synthesized)
ctggacctaattgccacaatgagatactacagtttattcgcaccagggtggaaaaaaagggaatagtgttcaaatcactgatggaactggatgacgcttctatttccagaatattccctg

SEQ ID NO: 1011682 - DNA, 120 bp, Artificial Sequence
  ENSG00000224038_0 (sequence is synthesized)
gacaatatcttgaacattaatgcctttaagagaaatgcccttaaaaatacctttagcaagcatttccttagcaaacacgctcctagcaacagagagtaagttttgtaagggcatgtgaat

SEQ ID NO: 1011683 - DNA, 120 bp, Artificial Sequence; identical to SEQ ID NO: 804450
  ENSG00000224038_1 (sequence is synthesized)

SEQ ID NO: 1011684 - DNA, 120 bp, Artificial Sequence; identical to SEQ ID NO: 804451
  ENSG00000224038_2 (sequence is synthesized)

SEQ ID NO: 1011685 - DNA, 81 bp, Artificial Sequence
  ENSG00000224034_0 (sequence is synthesized)
gttgcaacagcctaaagaagtttaatttcaagaaaacaggctgaaagaatgagagttgtgaaaaactgttcttatgaaagc

SEQ ID NO: 1011686 - DNA, 120 bp, Artificial Sequence
  ENSG00000224034_1 (sequence is synthesized)
aggatgttggaaaactgataactgtgtctgccgccagaaggggtgctgagggcagtcaggcctcatgcacagtgttccttgtgattatctataggaacatctgaagcctgttgtacaaag

SEQ ID NO: 1011687 - DNA, 120 bp, Artificial Sequence
  ENSG00000224034_2 (sequence is synthesized)
gtagaaactcagggctgcctttgctctctagaagcaaggagcccctgaccccctctttcaaaataggtcttttcgtctttgtctttacttctgcattcgacccccttcattgaccctgta

SEQ ID NO: 1011688 - DNA, 120 bp, Artificial Sequence
  ENSG00000224034_3 (sequence is synthesized)
gaaactgtcagtgacattctcttttcccttgtattttctaaattttctataatttgcatgttattttaataattagtgagggcatcaaagaagtggatttacaatggtgcaaacattggc

SEQ ID NO: 1011689 - DNA, 120 bp, Artificial Sequence
  ENSG00000224034_4 (sequence is synthesized)
agtttcagttaggaactcatattcctgttgggtcagagattgagccctggaggaaacctctggtctgagggctacagggaagctcctgtttcatgcctattcctgaaattaggcctgtcc

SEQ ID NO: 1011690 - DNA, 120 bp, Artificial Sequence
  ENSG00000224032_0 (sequence is synthesized)
gtggtttttgctctgggtcctctgggatggcgcctggctgtggccgcgtggtctctcacgcaggggcgccgggcgggggaacgcggccaccctgagtctggtgagtcgactgcggcggcc

SEQ ID NO: 1011691 - DNA, 120 bp, Artificial Sequence
  ENSG00000224032_1 (sequence is synthesized)
tgtgtccgaagtgtccggggccgtgaacaagggcagcggcctggcctcaggcctgcgttcccacgtttggaaacggggagcttcgtcgatttgtgtttacatcatcgactatgccaggga

SEQ ID NO: 1011692 - DNA, 120 bp, Artificial Sequence
  ENSG00000224032_2 (sequence is synthesized)
gcagcgtgcctggttacagctgtttccacgtgcggtgctcgtcgggagtgatcacctaccctacaggatgtccttggtgaggattttgaaaatttgatcttcacaagagttgcctggatc

SEQ ID NO: 1011693 - DNA, 120 bp, Artificial Sequence
  ENSG00000224032_3 (sequence is synthesized)
atttgaaatttctgggagtctgaggagtactgacataattacctgctggagtctgtaaatacacatttaagacagtgaggatgtgaataaatatattaatgcactttggcatttgtgttt

SEQ ID NO: 1011694 - DNA, 120 bp, Artificial Sequence
  ENSG00000224032_4 (sequence is synthesized)
cgggtcccaaaatacgtggtctaaagtcctttgggctcctgccgctgccagcactgatcatatgctcttgaccctggtcgggtggggggatgtctggatacctcctctgtggaaagaact

SEQ ID NO: 1011695 - DNA, 120 bp, Artificial Sequence
  ENSG00000224032_5 (sequence is synthesized)
ggccacacatccgcagaggtgactcgggctgagaacccaggctcctcctccctttggtgacacgcccctcggtccctcactggcacttctccctccggccacacggcggcgtctcgccat

SEQ ID NO: 1011696 - DNA, 120 bp, Artificial Sequence
  ENSG00000224032_6 (sequence is synthesized)
agcgcagcggccgatggtacagcccgctcccccctcgcgctctcggacagtgggtccttccacttgtagaaaagcattgtgggacggaagcctgtcctttcttccttttggtgcgagctt

SEQ ID NO: 1011697 - DNA, 120 bp, Artificial Sequence
  ENSG00000224032_7 (sequence is synthesized)
gtggaagatggatgcctgaagtgtagactgctgctagctgaataccatctgggagcataaaggtgacctgaaggtagggtgatatgtcttaaagcactttgtaatgggaatttttatcac

SEQ ID NO: 1011698 - DNA, 120 bp, Artificial Sequence
  ENSG00000224032_8 (sequence is synthesized)
cttttaaattggggttccttctctagtgagttttaatgtcagtggtacattcgtagtgttgctctgtctgtagctattaaggtgagttaataaatgggatagcctccacagcttattttt

SEQ ID NO: 1011699 - DNA, 120 bp, Artificial Sequence
  ENSG00000224032_9 (sequence is synthesized)
gggaaggttttgctgatacttcctgagaagcccagggaaataaatacgcatagtactggcattctgcatctctttaagatttgtttttatgtgtagtaattgagttttttaaaagcttgt

SEQ ID NO: 1011700 - DNA, 120 bp, Artificial Sequence
  ENSG00000224032_10 (sequence is synthesized)
gaaatcgcaggcatattaccaagttcttgattaaaatgtaatacaaaaatatttgctgtcgaattgagtactttattttttctcttaggatgtccttggtgaggattttgaaaatttgat

SEQ ID NO: 1011701 - DNA, 120 bp, Artificial Sequence
  ENSG00000224032_11 (sequence is synthesized)
aaaaagttataagggaggaggggttcttttttgatcagtattcactgctgtcaccataattaatagccttaaaatagcttgtgtttggcccaaagagaaatgtactttcttccagtgact

SEQ ID NO: 1011702 - DNA, 120 bp, Artificial Sequence
  ENSG00000224032_12 (sequence is synthesized)
caaaaatcgtggctagaactagactgatttctagtgacaggtgtgctttactgcactcaatgcgtatttttcctccaactaaattgtacatttaatgttgccatatcttctgcctttgct

SEQ ID NO: 1011703 - DNA, 120 bp, Artificial Sequence
  ENSG00000224032_13 (sequence is synthesized)
ttgcaggaaacgacaaataatgtatagaggtattcaaaaaatttattgaaagcactgtactaggagctgagaacacgatgatgagcacaacacagttcttccctttggaaacatagataa

SEQ ID NO: 1011704 - DNA, 120 bp, Artificial Sequence
  ENSG00000224032_14 (sequence is synthesized)
gtggagggaatgtcatcacaaatgtaaaacttcactatgagatgagttccgtgataggattttcttagggaaacctgagaaagagttgagactaaaggtatgtgtcatatttttcacaag

SEQ ID NO: 1011705 - DNA, 120 bp, Artificial Sequence
  ENSG00000224032_15 (sequence is synthesized)
gccctgttttagaactgagtccttactgaggcttgtaagatggctattatgggaggtgagagtgttacaaaatgaggctgaagaggtaggtaaagaagccagaccacttcaggctccctc

SEQ ID NO: 1011706 - DNA, 120 bp, Artificial Sequence
  ENSG00000224032_16 (sequence is synthesized)
tggctttattaaagcaagataaatccatggtggaaaatcagatttgcaagaaaaggtagttgaactaggttgcttattgttgtctagacaagagaccagcttggactagtaaaattagtg

SEQ ID NO: 1011707 - DNA, 120 bp, Artificial Sequence
  ENSG00000224032_17 (sequence is synthesized)
aaataagatcgtttatagttggatgacagagccaactagacgtggtaatagtggaggtgtccataactgctaggtgtccagcttgcacactgatgagcataatgaccctagattcagctg

SEQ ID NO: 1011708 - DNA, 120 bp, Artificial Sequence
  ENSG00000224032_18 (sequence is synthesized)
gggagcagcatttaaacagctgaatttttaaattacctttgagaaacccaaatggtctttttgcagtagcacattactcagtagtctaaactacagaaataaaccttaaggccatgggta

SEQ ID NO: 1011709 - DNA, 120 bp, Artificial Sequence
  ENSG00000224032_19 (sequence is synthesized)
taaatgagatctgctggtggtagaggaagagggcctagggtctgaagtttgagaaactccactaattaatggcaaggtaaagcatgataagccagaaaggatggtcagtggtaggagcaa

SEQ ID NO: 1011710 - DNA, 120 bp, Artificial Sequence
  ENSG00000224032_20 (sequence is synthesized)
aataggattatattaaagaagcaaaagaatgtcctaaaaattctccctgggattaagtaacacagtgattgatattagtggagtagagggaaagatccatgttagagatagcttaagata

SEQ ID NO: 1011711 - DNA, 120 bp, Artificial Sequence
  ENSG00000224032_21 (sequence is synthesized)
gggattagatgaattgagggcaatgactaaagatactgcttgcaagaaaactggctgagaatgagaggaaaatcttagttgcttggcgggagggggtttgtggttgtgaaagatagtttt

SEQ ID NO: 1011712 - DNA, 120 bp, Artificial Sequence
  ENSG00000224032_22 (sequence is synthesized)
gtttaatcttagtcttaaatttaaaaccaagtagcaaggatctagctgagagaataattgaatacattaatataggaggacagacaaagatcctgaaaaggctgggagaagagcatccaa

SEQ ID NO: 1011713 - DNA, 120 bp, Artificial Sequence
  ENSG00000224032_23 (sequence is synthesized)
agcacaggtggagagacaaaaaggttagggctgctggcagctgtggagagaactgtacgtggtaagggggagatataagatgtcctgcataagtattttccctgtagattgcaaagtcat

SEQ ID NO: 1011714 - DNA, 120 bp, Artificial Sequence
  ENSG00000224032_24 (sequence is synthesized)
ctatggagaggaaaggtacaaaatagtcactggggagagcaggtgaattagatggccaagcagggtggatggatcatttgaggtttggggtgacagatcaactgagatccacttacactt

SEQ ID NO: 1011715 - DNA, 120 bp, Artificial Sequence
  ENSG00000224032_25 (sequence is synthesized)
ctgaaaacgcaagaacactttagaaattaacaacacttaaagctttttacatcatttgtaaataactggtggaacttaacaccacaaaataaagtattataaagaactttatatgaataa

SEQ ID NO: 1011716 - DNA, 120 bp, Artificial Sequence
  ENSG00000224032_26 (sequence is synthesized)
gtcctcccacttgtactattgcacagcaggctagctgcagttcagaattccagaatgttcatcagatgcatctggtcttggttgtggtggacacagacacaagatagaaatgaatgattg

SEQ ID NO: 1011717 - DNA, 120 bp, Artificial Sequence
  ENSG00000224032_27 (sequence is synthesized)
ctatcctgttccagaaatgaaaatgtggtatcaagtgaatttttacaaaatacttattcttccagttaaaacaaaaaggtccttcagcacaactgtgctgtagttaaaccatggcctata

SEQ ID NO: 1011718 - DNA, 70 bp, Artificial Sequence
  ENSG00000224032_28 (sequence is synthesized)
aggtcaggagttcgagaccagccgggtgttgtggtgcacgcctgtaatcccagctgctcgggagcctgag

SEQ ID NO: 1011719 - DNA, 120 bp, Artificial Sequence
  ENSG00000224032_29 (sequence is synthesized)
tgttgtggtgcacgcctgtaatcccagctgctcgggagcctgagacaggagaatcgcttaacccagtaagtggaggctgcggtgagctgacacggtgccgctgcactccagcctgggcga

SEQ ID NO: 1011720 - DNA, 120 bp, Artificial Sequence
  ENSG00000224032_30 (sequence is synthesized)
gccgcgtggtctctcacgcaggggcgccgggcgggggaacgcggccaccctgagtctggtggaagatggatgcctgaagtgtagactgctgctagctgaataccatctgggagcataaag

SEQ ID NO: 1011721 - DNA, 120 bp, Artificial Sequence
  ENSG00000224031_0 (sequence is synthesized)
gttgcagtcaactagacccctcccttatttcatacttcaagctgttaatccacttctgtaaatctttttagttttaactcaagtatagaagcttctaattttttctgggttaaattttgt

SEQ ID NO: 1011722 - DNA, 120 bp, Artificial Sequence
  ENSG00000224031_1 (sequence is synthesized)
tcattagattcactccctcaatctttgaatccagattctatcattctgtatattagctgcaaatcattaatttaaagcatgccactagtactaaatagggtgataaagtcagcaaactcg

SEQ ID NO: 1011723 - DNA, 120 bp, Artificial Sequence
  ENSG00000224031_2 (sequence is synthesized)
ggaaagatctataggtatctcagcagagagttctgactccaactagttcccttcctctcatctctcatgtggcttctcagattgcttgctttctagtgctgctaatagaagacactatag

SEQ ID NO: 1011724 - DNA, 120 bp, Artificial Sequence
  ENSG00000262155_0 (sequence is synthesized)
cggccttgggcggtgactgggaagaacgttgaacaccgtgtttgggctgaagaaaagagcaagggaagaggtaaaaattatacagtgaaacacattcatcttgagtacaaatcagtgggt

SEQ ID NO: 1011725 - DNA, 120 bp, Artificial Sequence
  ENSG00000262155_1 (sequence is synthesized)
tatgacaaatgtctgcatctgtgcctaagcagtaccctgaggaggacactgaacgtttccatcatccaaaaagttccccatgctgtttgccattcgccctcaccctccggccccagcaag

SEQ ID NO: 1011726 - DNA, 120 bp, Artificial Sequence
  ENSG00000262155_2 (sequence is synthesized)
ccctgttgagtctcatcggagttccttcctccaccaagggatagaaactcacctgattgctgcatgcagacactgacactcccgacccctcattcgtcacaattgatgccttactcctgc

SEQ ID NO: 1011727 - DNA, 120 bp, Artificial Sequence
  ENSG00000262155_3 (sequence is synthesized)
ttcctgctcataattaaattccttccccccgctatataatgcctccggctttagtcagctggagagagggatttgagactgatctcctgttctcttgggctgatgtcaaccataatataa

SEQ ID NO: 1011728 - DNA, 120 bp, Artificial Sequence
  ENSG00000262155_4 (sequence is synthesized)
taaagttttcttccccggcattacttttcttaatgattggctttctgtgcagaacctatactgaacctatactgaacccctggcatttcggtaacagattttggtccactaatcaggaat

SEQ ID NO: 1011729 - DNA, 120 bp, Artificial Sequence
  ENSG00000262155_5 (sequence is synthesized)
gggttgcctctggctggtggccacagatggggagagtctcagaggccctcctaagcagctgcctgacctttttttggccaaaggtggatttctgtctgtctctctttgtccccactgctg

SEQ ID NO: 1011730 - DNA, 120 bp, Artificial Sequence
  ENSG00000262155_6 (sequence is synthesized)
ctgactctaactgtgttcctgatttgtctaggaagagcagcctttgaaatgtgacatatgcatctgaccggtgtcttttgtgggtaccagatggcaggatctgcttctctcaatttgggt

SEQ ID NO: 1011731 - DNA, 120 bp, Artificial Sequence
  ENSG00000262155_7 (sequence is synthesized)
atcctctcttgccgcgcgccgagcggttttcaactctcactgctagaattcctccaaccacccaggatagcaggaccgagatacatggccacccatgacccggagcgtccacttccaggg

SEQ ID NO: 1011732 - DNA, 120 bp, Artificial Sequence
  ENSG00000262155_8 (sequence is synthesized)
acaggcagtggtgattggcttcggttgtcatctgtgccatctgtccatggttcgagaagctgctgttcacgttttggggaggatcatggtttgagggctcccgtggtagaatttggggag

SEQ ID NO: 1011733 - DNA, 120 bp, Artificial Sequence
  ENSG00000262155_9 (sequence is synthesized)
ctctcataggcagaaggctgagaaaagttggtgctgtgggaagtcaactggcagccgatggagtcgggacccgggaggaatggaaagggaacccagataggaagctactgcagtaggctc

SEQ ID NO: 1011734 - DNA, 120 bp, Artificial Sequence
  ENSG00000262155_10 (sequence is synthesized)
actggatgcataaggaaatccaaactaataaggaaaaagtgaaatattcattccttagttattgttatctataatagctaaaattaaagtaagagtgctggattaagccttgaggctgga

SEQ ID NO: 1011735 - DNA, 120 bp, Artificial Sequence
  ENSG00000262155_11 (sequence is synthesized)
ccaagctcagatgtgggtctgagtttagatcactagcctcaaagccacccacaaaagaggtagtttctggtgcctcttagacctgtggtttccaagaaggtagtcaaggtagggaagggc

SEQ ID NO: 1011736 - DNA, 120 bp, Artificial Sequence
  ENSG00000262155_12 (sequence is synthesized)
aaaacgaagtaactactgaagccaaatggtgtgatgtgaaggaagtgttcccttttgtagactggtatcatcagcttccttgaggcacctttcctaataatggattgtgagaataactaa

SEQ ID NO: 1011737 - DNA, 120 bp, Artificial Sequence
  ENSG00000262155_13 (sequence is synthesized)
aggcttgggggctgaggcccagcggcccgagaccaactgggctgaccgaggccgcctccccgccagccctggggtccactgcccggggagcagctcccttcccaggtcagactcgggctt

SEQ ID NO: 1011738 - DNA, 120 bp, Artificial Sequence
  ENSG00000262155_14 (sequence is synthesized)
gattcctgctaaatcttgaacactgacgccagtcaaagcctcatcttcagacctgggagaaggtgacaatcgaaatgaaatgctttcatgagacgcagggccagtaattacaagtattca

SEQ ID NO: 1011739 - DNA, 120 bp, Artificial Sequence
  ENSG00000262155_15 (sequence is synthesized)
atccccctaggcccagggactatcgcggaagaggtgggcgtgtgagattgtaagggccaactttgagggataaaattagagtttttttgtaaacattaatatcaaaggcacactgaggcc

SEQ ID NO: 1011740 - DNA, 120 bp, Artificial Sequence
  ENSG00000262155_16 (sequence is synthesized)
aggcaagcgtctggcccctgtgtcggaataacaattttcctggaccactgatctactctttaatagaagattgtaaaaggttatacaaggcgtatggaaatcttacttcgtggtcaaact

SEQ ID NO: 1011741 - DNA, 120 bp, Artificial Sequence
  ENSG00000262155_17 (sequence is synthesized)
aactgattaaaattagatttgtttataaggttttattagctttaacattaataatacccctaaaacattaataagagatcaaagatttttgtttaccttttaagtaaactacaggaaaaa

SEQ ID NO: 1011742 - DNA, 120 bp, Artificial Sequence
  ENSG00000262155_18 (sequence is synthesized)
accgtgtttgggctgaagaaaagagcaagggaagagtcccagctgctctggagtttgaggcaggaggatggcttgaacccaagaggtggaggctgaagtgagccaagatcgcgccactgc

SEQ ID NO: 1011743 - DNA, 120 bp, Artificial Sequence
  ENSG00000262155_19 (sequence is synthesized)
gcaaaaccctgtctctaaaaagaactttttaaaaaagcacctgtagatttaagcacataataactacacttttgtctgttttattatgatatcaaagttaaatttatgatgaatgactaa

SEQ ID NO: 1011744 - DNA, 120 bp, Artificial Sequence
  ENSG00000262155_20 (sequence is synthesized)
ctggacaaaactgagagcaaccaccacagaggtgaatatactgaatgtataacactctctaataattttaagaactccgctctaatgagcagatatcacagaaagagacttttcagatga

SEQ ID NO: 1011745 - DNA, 120 bp, Artificial Sequence
  ENSG00000262155_21 (sequence is synthesized)
aataccgatgaccaggaaatctgtgagaccattttaaaaaattcgaagtcattgaagaaatgcaaagcttccaggctccacttttcactgatgaaattggcagagtttgggacaatgaga

SEQ ID NO: 1011746 - DNA, 120 bp, Artificial Sequence
  ENSG00000262155_22 (sequence is synthesized)
tcaagaagcacctcaaaggtcttcaccttggtcccttgtccacctctgcccgcggtctctcctcctttcagcctcctctttcccacacagtccctcccgccctggcttggtcccctttct

SEQ ID NO: 1011747 - DNA, 120 bp, Artificial Sequence
  ENSG00000262155_23 (sequence is synthesized)
tctgactgggtcaggcatgtgggtgactctttgacttccaaggctctgtctacttggcttttttctttcacctgttctgcagaataacagcctgattcgttcctctttttgggtccttca

SEQ ID NO: 1011748 - DNA, 120 bp, Artificial Sequence
  ENSG00000262155_24 (sequence is synthesized)
cttccatacctgggattcggggcgtggcccagaaagaccctgcagtcttgcagtgtggggctgccagcatttcatggcctccaagctcagctgggctgaatgaacgctgccatccagcgc

SEQ ID NO: 1011749 - DNA, 120 bp, Artificial Sequence
  ENSG00000262155_25 (sequence is synthesized)
ttggctcattttctgtcccattttcctgagtgcttttgccagacttacacttttctgaaagctactccaccctaccccagacacaccctctctcctcggatgacctgcctcctaatttcc

SEQ ID NO: 1011750 - DNA, 120 bp, Artificial Sequence
  ENSG00000262155_26 (sequence is synthesized)
ttcctgagaaaactggacatggccacctttccccagtgtctgaggcccaggttgacccgtggtcatggtcgctgtcaccacccacctgcctgtatgacagagtgagaccctgtctcaaaa

SEQ ID NO: 1011751 - DNA, 75 bp, Artificial Sequence
  ENSG00000262155_27 (sequence is synthesized)
tttgagcccaggagttcaaggtcaacctgggcaagagagggagaccctgtctctacagttaatttttaaaaatta

SEQ ID NO: 1011752 - DNA, 120 bp, Artificial Sequence
  ENSG00000262155_28 (sequence is synthesized)
agagggagaccctgtctctacagttaatttttaaaaattaaggcagggcatgatggctcgtgcacgtaatcccagcactttgggaggctgagtcaggacgattgcatgagcccaggaatt

SEQ ID NO: 1011753 - DNA, 88 bp, Artificial Sequence
  ENSG00000262155_29 (sequence is synthesized)
gacgattgcatgtagagagacctccatctctacaaagaatttttaaaaattaaggcaaggtatggtggctgatgcctgtaatcccagc

SEQ ID NO: 1011754 - DNA, 67 bp, Artificial Sequence
  ENSG00000262155_30 (sequence is synthesized)
atagattcatgggcaacagcgtaagaccctatctgaaaatacataaataaaagaaaaagttagctag

SEQ ID NO: 1011755 - DNA, 120 bp, Artificial Sequence
  ENSG00000262155_31 (sequence is synthesized)
ccatgggatgatgcagcaagaaggccctcaccagatgtgggccccttgaccttggacttcccagcgttgagaactattagctgtcttcttacatttctggggatgaatctacaatctacc

SEQ ID NO: 1011756 - DNA, 75 bp, Artificial Sequence
  ENSG00000262155_32 (sequence is synthesized)
ctgtcttcttacatttctggggatgaatctacaatctacctaattggattttaaaaataaaggaaaggccaaggc

SEQ ID NO: 1011757 - DNA, 120 bp, Artificial Sequence
  ENSG00000262155_33 (sequence is synthesized)
gaggtgacagtgagccgagattacaccactgcattacagcctgggtaacagggtgagactctgtctcaaaaataaagtaaaataaaataataaaggaccctctgaaacttaaaaaaaaaa

SEQ ID NO: 1011758 - DNA, 120 bp, Artificial Sequence
  ENSG00000262155_34 (sequence is synthesized)
ggactatcgcggaagagcggcttacagtcaactacagtccaaaatttgctccttggaagactcctgaatgcaggtttctgatgatgtcagaaagactgtgctgttggattagacagaaaa

SEQ ID NO: 1011759 - DNA, 120 bp, Artificial Sequence
  ENSG00000262155_35 (sequence is synthesized)
cttctaggactctaattaaaaggctgatgtggtcataaagattgctaacccagtatgaagcaaaacaagagttaattgcatggactgagctaatagaggactgaactgattcttttgtgg

SEQ ID NO: 1011760 - DNA, 120 bp, Artificial Sequence
  ENSG00000262155_36 (sequence is synthesized)
cttttttggtttgaaacattgctgattctttttgttgttcagtgtcaaattttttttctcttgagctatttgtagcccttaacaattgagtatactcttgtaaataaaatttaaagcaga

SEQ ID NO: 1011761 - DNA, 120 bp, Artificial Sequence
  ENSG00000262155_37 (sequence is synthesized)
aacgttgaacaccgtgtttgggctgaagaaaagagcaagggaagaggtgaggaacttcagaaagccattgcaagaaccagtggaatttaaagatggatcaaattcctggggagttggatc

SEQ ID NO: 1011762 - DNA, 120 bp, Artificial Sequence
  ENSG00000262155_38 (sequence is synthesized)
gagcggtgggagcagcgctcgtccgccgttggggcccccagcccgcgcgcgtgaagcagctagccgaccaagccccggaaggcgagtgccggagggggcgggacagctcctccggggcca

SEQ ID NO: 1011763 - DNA, 120 bp, Artificial Sequence
  ENSG00000262155_39 (sequence is synthesized)
ctccttcatatcaatgagtaaaggtctttggtgttttggttttttgtttttttggaaatctttgaattatcgttttggctaaatgaataactattttataatgaaccgtgatcctatttt

SEQ ID NO: 1011764 - DNA, 120 bp, Artificial Sequence
  ENSG00000262155_40 (sequence is synthesized)
accgtgatcctattttgtggcatcaaatgttttaaacttttgatattcgactgatgaacttcccaacatcaagatttcaacttctggccggctacagtggctcatgtctataatcccagc

SEQ ID NO: 1011765 - DNA, 90 bp, Artificial Sequence
  ENSG00000262155_41 (sequence is synthesized)
atcccagcactttgggaggctgagaccaggcaggcagatcatttgagttcaggaatttgagattagcctggctaaaatggtgaaactcca

SEQ ID NO: 1011766 - DNA, 120 bp, Artificial Sequence
  ENSG00000262152_0 (sequence is synthesized)
gttggggggaggcgcagagagcctctcaggtttgctggtgtctggcttagtccaagggggggttcaagggtcttgtacccccacctcagctgggaccccaaacctcctcagctcacctct

SEQ ID NO: 1011767 - DNA, 120 bp, Artificial Sequence
  ENSG00000262152_1 (sequence is synthesized)
ctctctcccacgagcccttccactaagaatggctatggagcagggttcaggaccttcgcaggtgctgcagcccagccaggatatggaaacgggctgggagcagcggccttcccagtggcc

SEQ ID NO: 1011768 - DNA, 120 bp, Artificial Sequence
  ENSG00000262152_2 (sequence is synthesized)
ggagcccagtcaggattggggagcagaagtggtttgggcgctggcactcttccaggggcaggaaccccaccaggtgagggtggctgggcaggggccgcagggaggggcgggcaggagggt

SEQ ID NO: 1011769 - DNA, 120 bp, Artificial Sequence
  ENSG00000262152_3 (sequence is synthesized)
ttagggtcccaaccctcattcttaggggaggagctcttagggtcaatgtcagcctctttctagctctccccaggcctggggaagagggaacctcagaagcggatgaagggaggaccccgc

SEQ ID NO: 1011770 - DNA, 120 bp, Artificial Sequence
  ENSG00000262152_4 (sequence is synthesized)
ccgtgtgccacctccatgccacactcaccatgtcctgtccctctctgtccccctctcggtctgtgttaccctccccaggcactcgtccctctgtggcctgccaatgccattcctgtgggt

SEQ ID NO: 1011771 - DNA, 120 bp, Artificial Sequence
  ENSG00000262152_5 (sequence is synthesized)
ggggactcctgtggaggcctctgagctgcttcctgggcatgcgcccttagtgaactgtcagggtgtggagcacagtggccctgggtggtgtttggaccacggacccgcactccacatggc

SEQ ID NO: 1011772 - DNA, 120 bp, Artificial Sequence
  ENSG00000262152_6 (sequence is synthesized)
ctaggtccagcctctgcctccctcaccccacaggcccaaaaccaggtcagggagggtagggtgttgcggagggcctgggcttgggtctgggggctccagggagctgcagcctcctttacc

SEQ ID NO: 1011773 - DNA, 120 bp, Artificial Sequence
  ENSG00000262152_7 (sequence is synthesized)
tggtctctctctctattcctggcatggggcggggggtgaaacctctgaagacaggtgtgcctgccctttcctgtgtccctgtcctccactccccacatacacacatccggccctgcctct

SEQ ID NO: 1011774 - DNA, 120 bp, Artificial Sequence
  ENSG00000262152_8 (sequence is synthesized)
gcttcctccttctactcggtctcccaagatctggtgatgggaatgggatgggagctggggccttcctaggagctggagcccagccaggtgagggcagctggaccacactgggattctaga

SEQ ID NO: 1011775 - DNA, 120 bp, Artificial Sequence
  ENSG00000262152_9 (sequence is synthesized)
agacacagggaagaaccaggggatatcagaggtccagaaggcagaaagtttatttctgggggaggacaggggatgggtggggtccgtgagcccctgctctcctctcccctatcttgactg

SEQ ID NO: 1011776 - DNA, 120 bp, Artificial Sequence
  ENSG00000262152_10 (sequence is synthesized)
tttcccctgcatctatggccttgtcccaccctcaagccctccccagatccacccctcacacactgcttctcctcccaggatacaacaatggaaacggaccgggaacccagccaggtcggg

SEQ ID NO: 1011777 - DNA, 120 bp, Artificial Sequence
  ENSG00000262152_11 (sequence is synthesized)
gccgaaggggctggggtggctgggggagaggtcaggggcccagggccacactctgggtcccaacagatgggctcttgggggttcattcattcacccaatctcccctgagcacccgtccca

SEQ ID NO: 1011778 - DNA, 120 bp, Artificial Sequence
  ENSG00000262152_12 (sequence is synthesized)
agccaggcctcggctggccatggaggacacccaagctggtcaagggtggccacggtctggactcccgggccaagaaccaaatccaactttgactgcagtcaggcctgggagggagttcac

SEQ ID NO: 1011779 - DNA, 120 bp, Artificial Sequence
  ENSG00000262152_13 (sequence is synthesized)
acaagacagaaaggcagagggcaggggtcacgcgagacagaaagggagagggcagggctccaggccccagctcatccccactgcaccaccttccacactcctgtgtctgccctcaaacag

SEQ ID NO: 1011780 - DNA, 120 bp, Artificial Sequence
  ENSG00000262152_14 (sequence is synthesized)
accaggtaaagagggtggggacggaagcggggagcctggggctgagattctgggcacaggcccagaggaaaggatccctcaccctctcatcttccccccaggctttggagggggtggaaa

SEQ ID NO: 1011781 - DNA, 120 bp, Artificial Sequence
  ENSG00000262152_15 (sequence is synthesized)
accccagaagccaggtgagccactccctgtccctgtctccctgcccatttcctatgcatctgccgctgcttccctagagtccctgatctccccattctctttggctctgtcccctgggat

SEQ ID NO: 1011782 - DNA, 120 bp, Artificial Sequence
  ENSG00000262152_16 (sequence is synthesized)
ttgggaataggaatgggtggggagtcggggccttcctgggagctggaacccaggcaggtaaggccctggagttctgggagcatggaggtcttaggggttgggggttactgatgtaggggc

SEQ ID NO: 1011783 - DNA, 120 bp, Artificial Sequence
  ENSG00000262152_17 (sequence is synthesized)
ctggccctggtcctgagcagagaggaagggatgggtggactcacaggaagtccttccccttctcttcccaggcctgggagggggactaaaggctcagagagcaggcgagccccaatctct

SEQ ID NO: 1011784 - DNA, 120 bp, Artificial Sequence
  ENSG00000262152_18 (sequence is synthesized)
agcctcccaacttggtctcacacaacaaacctcattcgacaaaccaatccaggcctggagcagtggctaacacctgtaatcccaacagttcgggaggcagagttaggtggatcaattgag

SEQ ID NO: 1011785 - DNA, 120 bp, Artificial Sequence
  ENSG00000262152_19 (sequence is synthesized)
ggagttcaagaccagcctgggcaacattcccaagctggtcttgaaatcttgggctcaagcaatccatctacaaaaaaaaaaaacctagccagttgtggtggcacgtgcctgtagtcccag

SEQ ID NO: 1011786 - DNA, 78 bp, Artificial Sequence
  ENSG00000262152_20 (sequence is synthesized)
ggtgaggatcacttgagcccaggaagtcgaggtagtagtgagtggagatcttgccactgtactccagcctgggtgaca

SEQ ID NO: 1011787 - DNA, 88 bp, Artificial Sequence
  ENSG00000262152_21 (sequence is synthesized)
caaccaaagtaatccgtggaccatgcctgttctgagccaaccaggtgctggggacaggccctccccaaccagggccacgctggggcat

SEQ ID NO: 1011788 - DNA, 120 bp, Artificial Sequence
  ENSG00000262152_22 (sequence is synthesized)
tggggacaggccctccccaaccagggccacgctggggcatacagtatgggctgaggctgccccagagctgggctctgggagttcttaggaggcagtggaggccagggaggagagagtggc

SEQ ID NO: 1011789 - DNA, 120 bp, Artificial Sequence
  ENSG00000262152_23 (sequence is synthesized)
gccagggaggagagagtggcccaaccctctgagaaactgaaccaaaaggagagttttgaacaaagaaggtacaggctccagcaagatctcagacctggccaggcgcagtggctcacgcct

SEQ ID NO: 1011790 - DNA, 120 bp, Artificial Sequence
  ENSG00000262152_24 (sequence is synthesized)
gatgcatctgagcttcaggagagaaagatggggggcagaggtggtgagaagaagaggaggagatttccatgaagggagaggagcccagtactgagaatggatgggagaggagaggaagag

SEQ ID NO: 1011791 - DNA, 120 bp, Artificial Sequence
  ENSG00000262152_25 (sequence is synthesized)
ggtggagtgggctctgccccacagtcccccagagccctggctcagacaccttcctccaggcccaggggccctctagcctccactgccctagccccagactgctcacctcctctgccctct

SEQ ID NO: 1011792 - DNA, 120 bp, Artificial Sequence
  ENSG00000262152_26 (sequence is synthesized)
accctcctgtgacagcagggaaactgagacctggaaagggaggtggcatccagatttgggcccctttgtccccttgtaagttcccctgcttccccctgaaccccacaggcttagggagcc

SEQ ID NO: 1011793 - DNA, 120 bp, Artificial Sequence
  ENSG00000262152_27 (sequence is synthesized)
caaatggctacagatctggtaaagctggtggcggggtgcttggggagggtggcacaccggctcccagctgctccagcaccccgggctcaacatctcacttctcccacagtctatggcccc

SEQ ID NO: 1011794 - DNA, 120 bp, Artificial Sequence
  ENSG00000262152_28 (sequence is synthesized)
cacagtggcctgggagcaggattcgtggtcaggcatgggctgggaacccagccaggtgagagccgtggggtcccctccttccctccctcccaggcctcagacggaagaggcaggattgga

SEQ ID NO: 1011795 - DNA, 120 bp, Artificial Sequence
  ENSG00000262152_29 (sequence is synthesized)
ctcatctgatccccctctctttcccagacactgaagggggcatgaaaccccaaaacctaggtgaggctcgcccagcccctgcctgcctccctcctcctgactccctcctgccttctcgcc

SEQ ID NO: 1011796 - DNA, 120 bp, Artificial Sequence
  ENSG00000262152_30 (sequence is synthesized)
ctgaggggcaggaggtggagtgtcatggaagagtctttacttcagggacctggggggtcctaaggtctatggcccccacagtggcctgggagcaggctatgatgggggcgtgaagccaca

SEQ ID NO: 1011797 - DNA, 120 bp, Artificial Sequence
  ENSG00000262152_31 (sequence is synthesized)
cagccaggatatggaaacgggctgggagcagcggccttcccagtggccggagcccagtcaggtcctgccgctcaaaatggctttggaccaggctttggagggggtggaaaaccccagaag

SEQ ID NO: 1011798 - DNA, 120 bp, Artificial Sequence
  ENSG00000262152_32 (sequence is synthesized)
cctcccactctgcctagagtcatgggcgcctgggccttccccgcagcccttttccttctctgcctgacttccgagagcctgcaaggtgggctgccccttctgcctcctggcctggggaaa

SEQ ID NO: 1011799 - DNA, 120 bp, Artificial Sequence
  ENSG00000262152_33 (sequence is synthesized)
gtctatggcccccacagtggcctgggagcaggctatgatgggggcgtgaagccacagaagccaggattcgtggtcaggcatgggctgggaacccagccagacactgaagggggcatgaaa

SEQ ID NO: 1011800 - DNA, 120 bp, Artificial Sequence
  ENSG00000262152_34 (sequence is synthesized)
agaattgggctgggagcccagccaggctttagaggggacatgaaggcacaggagccaggattagggaatgggaatgggctgagtgctcagccagtcttgacagcccagaaccgatttgga

SEQ ID NO: 1011801 - DNA, 120 bp, Artificial Sequence
  ENSG00000262152_35 (sequence is synthesized)
tttggagcaggccttggagggaatgtgaagcctctgaagccaggatatgggaaaaggctgagagcaggggccttccctggggctggaacccagccagaatatggccatggaaatggaccg

SEQ ID NO: 1011802 - DNA, 120 bp, Artificial Sequence
  ENSG00000262152_36 (sequence is synthesized)
ggagtccagccaggcctaggagcggggatgaagcctcagatgccaggcctgggagctccaaacggctatggaccaggaaggggcagggctggggttccaggaggtccagagcggaggcct

SEQ ID NO: 1011803 - DNA, 120 bp, Artificial Sequence
  ENSG00000262152_37 (sequence is synthesized)
tgggtccctcacttgctccctttctcttcaccaggctatttgggggttatgaaggcccagaagccaggccccttagcccagaatggctacagagcaggtgctggagagggcatgaaacct

SEQ ID NO: 1011804 - DNA, 120 bp, Artificial Sequence
  ENSG00000262152_38 (sequence is synthesized)
ccttgaagcctcagaagtcaggacacggccatgaaaatgggccctggccaggtccctgcaatgcgagggtcgctccgatgctcctccccaggcttcccactccaggggtcccttcggaca

SEQ ID NO: 1011805 - DNA, 120 bp, Artificial Sequence
  ENSG00000262152_39 (sequence is synthesized)
aagagggtggctggggcctgaaatcccagcccccttccgcagtgcagaatggcaagttaccagcaccaatgccagccatccagtggggactgaaacctcagaaagcagggcaccagcctc

SEQ ID NO: 1011806 - DNA, 120 bp, Artificial Sequence
  ENSG00000262152_40 (sequence is synthesized)
caaatggctatggaccgggagcagaaccaggttttaatggtggcctcgagccacagaaaattggtttaggttatgggaatggtgtcctgggagccagggtcttccccgaggcccacccac

SEQ ID NO: 1011807 - DNA, 120 bp, Artificial Sequence
  ENSG00000262152_41 (sequence is synthesized)
agccagggttccatggggccaatggttttaggaatagggatggggtggaagctctggtgtaccccaaagcagcagctctagcccctgaaggaaatgggcaggccggggtgctgtggaact

SEQ ID NO: 1011808 - DNA, 120 bp, Artificial Sequence
  ENSG00000262152_42 (sequence is synthesized)
ctcgctggcccaccctccaggcctggggggccggcttgaagcctggatatcaggctggagatgaatatgctgaggccaggagccagccagggggccccgacgtgaagagaggcagcaatg

SEQ ID NO: 1011809 - DNA, 120 bp, Artificial Sequence
  ENSG00000262152_43 (sequence is synthesized)
gccagctggggaatggctacggaggccgctgccctctggggaaatgctgagcactgcaatgcccctcgcctgcccagcaaggaagacagacccttgggcttggcctctggtgctgcctgg

SEQ ID NO: 1011810 - DNA, 120 bp, Artificial Sequence
  ENSG00000262152_44 (sequence is synthesized)
ccgggggtctcctccatgctagaaccacaaacgtgcttccctgcttgcctccgcgtgccatgcaaggggcttgctgaccagggtgggagtggcatgggcctgcagccaccacccagcacc

SEQ ID NO: 1011811 - DNA, 120 bp, Artificial Sequence
  ENSG00000262152_45 (sequence is synthesized)
tcattcattcatttggcaaacatcaatgaggccatgtgccagggaccatgttcccaacaggagaaatcatgagaagaaaacagactcgatcaacgcctgccctcagggagggcatcactt

SEQ ID NO: 1011812 - DNA, 120 bp, Artificial Sequence
  ENSG00000262152_46 (sequence is synthesized)
ggtgaccgcctagcgggggaaccacatccaagttaggggccttgtgcatggaaaagaacacttcattctttgtgttttcatttataatcgatttattaaagttgttagataaaaatctca

SEQ ID NO: 1011813 - DNA, 120 bp, Artificial Sequence
  ENSG00000262151_0 (sequence is synthesized)
ggcgcggtctgtgtctttttggtaaatgggcagtatttttagaaggtcctctttgaaactgtgcttccccctgggccaccaccttccacatccaactcgagaaaatattcctgatctttt

SEQ ID NO: 1011814 - DNA, 120 bp, Artificial Sequence
  ENSG00000262151_1 (sequence is synthesized)
tgccatcaaaagtcctttttggggtttattttcatccccacttcacactgcatgcaggatttgaaaggctaagtgtagacactaaacaggtgtctgaaataacaattcacctctctctcc

SEQ ID NO: 1011815 - DNA, 120 bp, Artificial Sequence
  ENSG00000262151_2 (sequence is synthesized)
ccatctcagctggtgggagatgaatggagctcagatggtgagctttggggtgaaatttcccaactttcaggttatccctacctaccaacgcactacaatctggactcaggattaccatct

SEQ ID NO: 1011816 - DNA, 120 bp, Artificial Sequence
  ENSG00000262151_3 (sequence is synthesized)
ctcagctggggccatttgcattattcatttaaatgagacaaaggatttccatttccagtgtggctgaccagctcccatatgatcaacgctaccacaggtaacaactataaactctgggga

SEQ ID NO: 1011817 - DNA, 120 bp, Artificial Sequence
  ENSG00000262151_4 (sequence is synthesized)
cccagccaggcagcagctcccggagtctggcagcccctcctcgtgccctcagcttccccaaggatgccttcggatgcccagctcagaagcacacagcctcatcactagcctcatcactaa

SEQ ID NO: 1011818 - DNA, 120 bp, Artificial Sequence
  ENSG00000263821_0 (sequence is synthesized)
tgttcaaataccacctccgctcacaggtgctgcctgtctgaatttaggctccaggcttctcatcttttcaacggaagggataataacgttcacctgcacagtgctcttttgaacaagaaa

SEQ ID NO: 1011819 - DNA, 120 bp, Artificial Sequence
  ENSG00000263821_1 (sequence is synthesized)
caagattacgtatgcaaatatcttaagtgccattacttttaaacaaatggagtttgttaattttattatttctacttttattattccccaagtcattatttgaacacctagaatggtgct

SEQ ID NO: 1011820 - DNA, 120 bp, Artificial Sequence
  ENSG00000263821_2 (sequence is synthesized)
tggcaaatagtagtcacacaatacatatttgtagaacagatctttgaacaaatacatagtaaaatgaatgaattaatgaataccaaattactgtgaaaaacgttcagaccgaagaaaaat

SEQ ID NO: 1011821 - DNA, 120 bp, Artificial Sequence
  ENSG00000263821_3 (sequence is synthesized)
ttgctgaaaaggaaccagcttccctttcgtgtctctcccagctcaggcaagcagcccacaagggggcgctccctgagccttctagaggcagagcggcctgttgggaaaggtctgagggtg

SEQ ID NO: 1011822 - DNA, 120 bp, Artificial Sequence
  ENSG00000263821_4 (sequence is synthesized)
gctgaggaagcaaaggcttgtgtgggaaggaagatcacagctggtccgcagcctcaaagagcaggaagcaggacagaaggagcccctcggtgtaccctgcagcccccagccagggagaag

SEQ ID NO: 1011823 - DNA, 120 bp, Artificial Sequence
  ENSG00000263821_5 (sequence is synthesized)
cagcaggagacagagctacttcctctaaccagtggtggttcctaactccaagacatcctggacattggttctgagcagcaatcattgcaatttgctcttttctgcagccgtgaaactacc

SEQ ID NO: 1011824 - DNA, 120 bp, Artificial Sequence
  ENSG00000263821_6 (sequence is synthesized)
aggataaagtaatcagagtgatcccatgatgtgctggggcaaactaaacatttctcgtcaaaataatggtcagtttcctactgaatgctacatgataagtgcagtatgtttgattatgac

SEQ ID NO: 1011825 - DNA, 120 bp, Artificial Sequence
  ENSG00000263821_7 (sequence is synthesized)
atcagtgagtttgctacttagaggatatttatgggtgatacattgaaatttacctttgaccatctgttttggcagaaggtgtctctccaatatccaaaacttggataatccacattaaaa

SEQ ID NO: 1011826 - DNA, 80 bp, Artificial Sequence
  ENSG00000263821_8 (sequence is synthesized)
gtctctccaatatccaaaacttggataatccacattaaaactaattttattgtggctaatttttgttaaatgttattaaa

SEQ ID NO: 1011827 - DNA, 120 bp, Artificial Sequence
  ENSG00000263823_0 (sequence is synthesized)
ggagcccactggaaaagggaggataccacataccctcggaagtgaggcgggagaagggcttaagcagctccgcgaagctgaggtgattgagacgagtgagccgctcggcttcgtcgctgc

SEQ ID NO: 1011828 - DNA, 120 bp, Artificial Sequence
  ENSG00000263823_1 (sequence is synthesized)
acagcgcagcgacacaggggacgaaggagtccgggattagctcctgcactgattgtacacactgggccatcgccgcagcacaggcagcggcggcgcccgccctccggcccaccctgcgag

SEQ ID NO: 1011829 - DNA, 120 bp, Artificial Sequence
  ENSG00000263823_2 (sequence is synthesized)
gttatcctgcggctgcagcagctaccgccgccgcccgccggcctggcccggccgggcggggccccgaacgcactggagcctagaaacaagaaggaacagacgccgccgcttcggtttctg

SEQ ID NO: 1011830 - DNA, 120 bp, Artificial Sequence
  ENSG00000263823_3 (sequence is synthesized)
gggcacaatccactgaccccccccttcccgtcaccgccgcttctcagcgctcgtccccgcgtgctcgcattccaccccgataggtggagacgccgacagtcaccacttagtccttcggac

SEQ ID NO: 1011831 - DNA, 120 bp, Artificial Sequence
  ENSG00000263823_4 (sequence is synthesized)
ggcaaaaccttggtcactgcccggccggaaccgccatgttgaggccgaaccctgaccaaccggcagtactactcccagctgcccccgcgcgcgtccctcacgtgactgtgttaaaggaga

SEQ ID NO: 1011832 - DNA, 120 bp, Artificial Sequence
  ENSG00000263823_5 (sequence is synthesized)
cggtaggggcaagggaagagagctgaggagagggaagtgaaaaacgacggaggccggttgggaggctggagccggaagtgttgtgacggaagctccctgggcggggcggggctacaagtg

SEQ ID NO: 1011833 - DNA, 120 bp, Artificial Sequence
  ENSG00000263823_6 (sequence is synthesized)
gggcgggggcggggggaggtgcacaactgtaggccgggttctcaagctcgcccttagcagagcagagctgagagccacctactagcggcaggtggagcctcgagacgggtgctgtcgtgg

SEQ ID NO: 1011834 - DNA, 120 bp, Artificial Sequence
  ENSG00000263823_7 (sequence is synthesized)
tgatggaggcgcacgctcgcttcccacgcagtttggcctttttgacgtccctggctgttgtgggcaaccgatttggttggtcgcgctgcttcctacgctcgccggcggagcagctagtgg

SEQ ID NO: 1011835 - DNA, 120 bp, Artificial Sequence
  ENSG00000263823_8 (sequence is synthesized)
cacctgctcggagagagggagtggatctctcggaagtgcttggggtttcgctgaagcggacctgaacagaccatgtgtcctttaaatacagccatgcttttagaaacggactgtcacttt

SEQ ID NO: 1011836 - DNA, 120 bp, Artificial Sequence
  ENSG00000263823_9 (sequence is synthesized)
atgtggactcaaccattgaacagaatgtgtgcttttgtgagtgctgcaattccttcaagtgtaattgcgctactgcatttttgttggtcgcagggaaggggtgtgcctgcaaatgtccgc

SEQ ID NO: 1011837 - DNA, 120 bp, Artificial Sequence
  ENSG00000263823_10 (sequence is synthesized)
gtggttcgtcctcagcctcttcctttttacactgtgctaggatgtttacttgcttgtggtggaggtaggggaagccagtatttgtgtactgtgtactgtcctgaaccggctttcattcct

SEQ ID NO: 1011838 - DNA, 120 bp, Artificial Sequence
  ENSG00000263823_11 (sequence is synthesized)
aacttttcaaagattgctttaaaggggggggggcgcgggtcaaatattgttttaaagggggggacggggtgaggtcaatggtgtgtgccttgtaagtagaaatgaatgaaaggaatttta

SEQ ID NO: 1011839 - DNA, 120 bp, Artificial Sequence
  ENSG00000263823_12 (sequence is synthesized)
ctaatgtgtcactcaattgtttgagctccttctgttttgcatgccaaaaatataaggcaaggaaaaatgtatcattctatcatgattttatggtgctctaattaaaggtgtcttccccaa

SEQ ID NO: 1011840 - DNA, 120 bp, Artificial Sequence
  ENSG00000263826_0 (sequence is synthesized)
gagcgccgaactccgcccccaacaatgcgcaagccgggtgattgacgcgggcggagcggcctggcgagggcgatgccaacggttcaccggcaccggtcctgtcccgtcgcctccgcgccg

SEQ ID NO: 1011841 - DNA, 120 bp, Artificial Sequence
  ENSG00000263826_1 (sequence is synthesized)
tggccgagtggagaccgctgcctccaacccttccccaagtaaagcctaggaccctcccccaactcgtgtggatgaccgaaaataaagcttcgggtcctggttacagtgtaccgaactcgg

SEQ ID NO: 1011842 - DNA, 120 bp, Artificial Sequence
  ENSG00000263826_2 (sequence is synthesized)
actgcgccacggctttttactccatgtttcccgtgctctacactgggaaggaaagcagccgaagtttcgtaatgtcttagagaggaaaaacgccctttagccactgctttcgcaccaccg

SEQ ID NO: 1011843 - DNA, 120 bp, Artificial Sequence
  ENSG00000263826_3 (sequence is synthesized)
tcctatctccccacaatccgggccctacccatcatggaagcttctggaagggcacaggagtgctgtaccctaagaaaacgtccattaatttagagtttttgcctccgtgccatccactat

SEQ ID NO: 1011844 - DNA, 120 bp, Artificial Sequence
  ENSG00000263826_4 (sequence is synthesized)
catctcccctggcgccctatgaccttcactacagaccgcgaccgccaacagactgcatacctgttataatccgcggagccaccagacatgatccgaaaaaccactcagcgcccgactgaa

SEQ ID NO: 1011845 - DNA, 120 bp, Artificial Sequence
  ENSG00000263826_5 (sequence is synthesized)
aagacagcggcgcccaaccacccgttttttataggctcgtggccggaacccgtttcttgcggaggaattttctcgccgtgcttcggtcagctacaaaattgtgatcctggggtcgttacc

SEQ ID NO: 1011846 - DNA, 120 bp, Artificial Sequence
  ENSG00000263826_6 (sequence is synthesized)
tcggataaaatcctaagcaagttggtagaaaaacccaaatgtggtaatttctcgatattacagggtcgctggaaatcctagggcccggggttgggttgggactctttacctcgcggcgga

SEQ ID NO: 1011847 - DNA, 120 bp, Artificial Sequence
  ENSG00000263826_7 (sequence is synthesized)
agaatatagctgcggagttagttaaacctcgctttccccgcccgccctgctcctacggggtttccgcgtccctgacgcagaggcgggccgggggagccgcgccggagccggaggcggaaa

SEQ ID NO: 1011848 - DNA, 120 bp, Artificial Sequence
  ENSG00000263826_8 (sequence is synthesized)
ccggagatgctgttcgtcgggcggccggggcttcccgcgggtgacaggtcccggctcgcggctcgctgccggcactcaggtgcgggaggggaactcggttattccgcttgctcccaccgc

SEQ ID NO: 1011849 - DNA, 120 bp, Artificial Sequence
  ENSG00000263826_9 (sequence is synthesized)
tgtttaattccacaatgaagacctgcctggcatttagcccgaccgttaacatccattcagatcttggaaacgtaaaattcctgctagggaaaatgtcggccacccagcgagtcccgggaa

SEQ ID NO: 1011850 - DNA, 120 bp, Artificial Sequence
  ENSG00000263826_10 (sequence is synthesized)
gtccggtttaccggtacattttgcagcgcgagaaggaaaaatggagtgtcatttgcagatgtctctggagtggccaattctattctcatatcatttccggtctctcgctttctttttaag

SEQ ID NO: 1011851 - DNA, 120 bp, Artificial Sequence
  ENSG00000263826_11 (sequence is synthesized)
agtgttactgattttaacctaacaggtgtgaggaatgcctgaaaaaaatcataaacttttgcaaatggatagaaactaagcagtaattttccttggaacgcacgaatttaaatggacgct

SEQ ID NO: 1011852 - DNA, 120 bp, Artificial Sequence
  ENSG00000263826_12 (sequence is synthesized)
ttggcagatacagctctgtgccgctttgggactacatcggttttgattccgtctatattggtcattttttaaaggctgtagactttgccgatatatagtgaaatgttgatttattgaaat

SEQ ID NO: 1011853 - DNA, 120 bp, Artificial Sequence
  ENSG00000263826_13 (sequence is synthesized)
tcagagcaataatatccttgctgcgtaaactgcacgggtctttaagctccagacgttttcaattagccccatctcaggtctctcgacaaaaacaaaaaacaatatatgtagtcatttaac

SEQ ID NO: 1011854 - DNA, 120 bp, Artificial Sequence
  ENSG00000263826_14 (sequence is synthesized)
tttaaaatacaaccctacccatggtgcaaaatatcatcgagactatcagggtaacattttctcatatttcagaaggccaacttaaagaatcattactgggaaagctgactcaattttcta

SEQ ID NO: 1011855 - DNA, 120 bp, Artificial Sequence
  ENSG00000263826_15 (sequence is synthesized)
tattatagaagatattcggttctaaatactacttttttaatacaaaaattatttatttatttgaaaattcttatcgtgccaggaactaggacaaagattaagaataccaagatggcaaag

SEQ ID NO: 1011856 - DNA, 120 bp, Artificial Sequence
  ENSG00000263826_16 (sequence is synthesized)
tgggccaggccctcagtccagtggtactgctcctcattcatccctctgtaatgttcgaaatccagatttgaggtgatgccagatattttctgagaatgatggtcgtcagacatccttgtt

SEQ ID NO: 1011857 - DNA, 120 bp, Artificial Sequence
  ENSG00000263826_17 (sequence is synthesized)
gtctcatccaaaatctactaaaaatatcctgagatctaagaaattgaaaaaatactaaatcgaaaaagtgaccaaccgtttggtttcacttgagccttagggtgaaaacaattgatcata

SEQ ID NO: 1011858 - DNA, 120 bp, Artificial Sequence
  ENSG00000263826_18 (sequence is synthesized)
gggtgataccaatcaacaattaacacttaatcgttggttgttttctttaggattagcactacactagatggtgtaggattttcaagtctcttaagaggaaataaaggctaaactctatgg

SEQ ID NO: 1011859 - DNA, 120 bp, Artificial Sequence
  ENSG00000263826_19 (sequence is synthesized)
tataggtttacaagtgctaagtaagtttcaaggtaagaaaacttcaaatacagtcaaaatccacacccacactgcctgtaaccttacagtgtattcctaataaatgcagtgattaccaca

SEQ ID NO: 1011860 - DNA, 120 bp, Artificial Sequence
  ENSG00000256006_0 (sequence is synthesized)
ttttgctggctttttaaaaaagattcttctgagaaagattaatacaagtcttccattactgacttaagtgaaataaattaatgtacccacagcttaccttttttgaaagaaatggttgag

SEQ ID NO: 1011861 - DNA, 78 bp, Artificial Sequence
  ENSG00000256006_1 (sequence is synthesized)
aatggttgagctttaggattaatgtccattaggcctgttcaacacatagatacttgataatttgactacaaaaaagtc

SEQ ID NO: 1011862 - DNA, 120 bp, Artificial Sequence
  ENSG00000225632_0 (sequence is synthesized)
ggggctgtttctcctgtctctgagacccagcacaacgtgaggcatacagcaggtgtattagcaggatctagaatacggcaaacaggccttaaacagggtgatgaggcccattccagccag

SEQ ID NO: 1011863 - DNA, 120 bp, Artificial Sequence
  ENSG00000225632_1 (sequence is synthesized)
gtgcctcctctaaacctacagtcaacttgaaaagcccgaagtgctttcccagagcactgcctgaagtttgccgttcacagccagggagacttgtgaagaggactgatcccacagctccat

SEQ ID NO: 1011864 - DNA, 120 bp, Artificial Sequence
  ENSG00000225632_2 (sequence is synthesized)
ctctaaagagcagggtttcttgatgatcccaggatgggtacacagccatggggctcagggactacccctgcctctgccctatccatgctccaacgggacagacacatgccactgcaacca

SEQ ID NO: 1011865 - DNA, 120 bp, Artificial Sequence
  ENSG00000225632_3 (sequence is synthesized)
gagatcctcagcaatcccactccgtaaggacacctgaaaacctcaccaccagtcccaccctaggagatggatattccccctctaacctccagggtggagaagcagggttcaaacaggggg

SEQ ID NO: 1011866 - DNA, 120 bp, Artificial Sequence
  ENSG00000225632_4 (sequence is synthesized)
ttggaagccaggctaaggaatggaactttctgctctgggcaatggcggagcggggggacatctactgccccacctcaccctgtgccgggcatagggacctttcatgctcactcaacaaat

SEQ ID NO: 1011867 - DNA, 120 bp, Artificial Sequence
  ENSG00000225632_5 (sequence is synthesized)
cccaataccaccagagtaccccaaattccaggagcaagtggacttgacgagtccccacattcccagaggcctctcatcccaccctgagagagaagcatctcagagtaggcaacagtgttg

SEQ ID NO: 1011868 - DNA, 120 bp, Artificial Sequence
  ENSG00000225632_6 (sequence is synthesized)
atgcttttccttcaagaagcaatggtccaggggcattccctgcaagatactatcttctggcctcatttcaagaaccccagctatcctcactcacaaactagcctgagacccccgctccaa

SEQ ID NO: 1011869 - DNA, 120 bp, Artificial Sequence
  ENSG00000225632_7 (sequence is synthesized)
ccctctctttaaaattagttctaggcacaggaagctcctggaaaactgaataaaaacaaatgctcagagggaaatgtgggactcctgccaggtcggccaacccctcctgactgatttaca

SEQ ID NO: 1011870 - DNA, 120 bp, Artificial Sequence
  ENSG00000225632_8 (sequence is synthesized)
aggctgcaaaatggtactttgttctgcaaatcccctcccctccttgccccgccctaatactcaggccttggcgtgcagcagcttgggggccacatgcagaaccgcatgtgcagacgactt

SEQ ID NO: 1011871 - DNA, 120 bp, Artificial Sequence
  ENSG00000253893_0 (sequence is synthesized)
cagaatcaacggtttctgggtctgagaagttgcatacacactctcagtccctgtatcctgagatggagtcacctgaggatccacagcaagtcctaaccagggatgggtctgggtgattaa

SEQ ID NO: 1011872 - DNA, 120 bp, Artificial Sequence
  ENSG00000253893_1 (sequence is synthesized)
tttgcttttgctgttttgatcagctctgtgcctgcatgagacaaggaaaatcaatgggaacagctggggaaactgagttacagagcttttctgcactgagtcatcaggagcaaatgctag

SEQ ID NO: 1011873 - DNA, 120 bp, Artificial Sequence
  ENSG00000253893_2 (sequence is synthesized)
gcttttctgcactgagtcatcaggagcaaatgctagatcagatagagtctctctctctgccacccaggccagagtgcagttgacgcagggcaggggagccccgaagtggagcatagtgtg

SEQ ID NO: 1011874 - DNA, 120 bp, Artificial Sequence
  ENSG00000253893_3 (sequence is synthesized)
tccccaggaccagcattccacgaaggcagcccttttctagatggagaaaacagaacctgaagacacccgtttccctaaactgctctcgctcatgtttctacaaggcctggagctgatagg

SEQ ID NO: 1011875 - DNA, 120 bp, Artificial Sequence
  ENSG00000253893_4 (sequence is synthesized)
aaaaacctcccttctttcccaaatggtccccagctgccccgttcactgaaggccctgcagtcaggaacggtcaggacttcacacccagttgttgtgggtgtttggccgacacgacacttc

SEQ ID NO: 1011876 - DNA, 120 bp, Artificial Sequence
  ENSG00000253893_5 (sequence is synthesized)
ctcttgtgtgattcatggacccgcagcattgcgtcacctgggagcttttggtattgaagactctcagggctcacccggaaggacctgctgggccagaatctacattttaacaagatgccc

SEQ ID NO: 1011877 - DNA, 120 bp, Artificial Sequence
  ENSG00000253892_0 (sequence is synthesized)
agatccatacaaacctaccgagatctcaggttcagtgcttgtactgagcaagggcgtcaggaaacagctggcctgtctcctttctctcacctcagccgtcctgtcactgttcccggacag

SEQ ID NO: 1011878 - DNA, 120 bp, Artificial Sequence
  ENSG00000253892_1 (sequence is synthesized)
cctatccgttccaggttctctgccccacactgattaagttccaaggtgaactgcaaagatttctgtttttctttaacaagatgaaggatcttgattaattatgtaatactgtatttcctg

SEQ ID NO: 1011879 - DNA, 120 bp, Artificial Sequence
  ENSG00000253892_2 (sequence is synthesized)
gattttcctctgttctggctgaaggcatggcattcttctagacttgcatattcatcacgttcacccaagacttcctttgctggtgccgatcgcagtgtacatggaaggctcctgtctttg

SEQ ID NO: 1011880 - DNA, 120 bp, Artificial Sequence
  ENSG00000253892_3 (sequence is synthesized)
gtgagagtttactccaggctgtctcagctgcctcctgcagactttgtgactgttccgagggctttagctctggatttctgtgactctttcagacagattccttttatctccattttgctc

SEQ ID NO: 1011881 - DNA, 120 bp, Artificial Sequence
  ENSG00000229127_0 (sequence is synthesized)
attggccattgtctcctaggtttcttatagtctagaataaatcatttttcattacattgacttttgacaggctggaccagatgtcctacccttttggaattgtctagttatttatttgta

SEQ ID NO: 1011882 - DNA, 120 bp, Artificial Sequence
  ENSG00000229127_1 (sequence is synthesized)
gtatgacatttctttattttattcctgtatgtacatcaaacttgaagttagatctaaagtgtcagtcaatttaagtgaaacattttatatcttaggtaatgtatacttcatgttgcatct

SEQ ID NO: 1011883 - DNA, 120 bp, Artificial Sequence
  ENSG00000229127_2 (sequence is synthesized)
tattagatgtttttaaagctttatatatatatataagttgaatcttgttgactttctcaaaatcctgaggaatctgcagtgcatcaacatctccacagtaggtaccataaatggttaaca

SEQ ID NO: 1011884 - DNA, 120 bp, Artificial Sequence
  ENSG00000229127_3 (sequence is synthesized)
gtttctgtaaggcaactttgcactagcctattttgagcatagaacacaactttgaagattaaatcccatccagggactgattggtagaagacaactagtcagggaacataggagggaaat

SEQ ID NO: 1011885 - DNA, 120 bp, Artificial Sequence
  ENSG00000229127_4 (sequence is synthesized)
acttaattgccataaagtgggtagataccagtccacaaataattctaaattaactacgaatatgctgtttcatgtttgtagactcatagatgttttgtgttattagtggctgttctggat

SEQ ID NO: 1011886 - DNA, 120 bp, Artificial Sequence
  ENSG00000229127_5 (sequence is synthesized)
tataaactcccatgagaggttattttaaaatcagaatttttaatttttaatatttatcactactgcttatatcctcactttaacctacctaatgctgtttcactcaaatgtcttttcttt

SEQ ID NO: 1011887 - DNA, 120 bp, Artificial Sequence
  ENSG00000229127_6 (sequence is synthesized)
cttccctgtaacagttgtgcagaagattctgaccttatttgaggcttacatataggtttggagatgtggaaaggagtggaaaaagaaatatgtaagctgaagtgccaaactcacactgaa

SEQ ID NO: 1011888 - DNA, 120 bp, Artificial Sequence
  ENSG00000229127_7 (sequence is synthesized)
ataaagggcatggcctaccagctgacaaggagtgtctggtttcaagatggcaaatgaccctaaacatgatagacaaatacgttttacataggtacatgcacagataggcacatataaatc

SEQ ID NO: 1011889 - DNA, 120 bp, Artificial Sequence
  ENSG00000229127_8 (sequence is synthesized)
cacatttgcaagcaaaaagtggaacctgtaaagcagaatttctgaggaatctctaaaagactaatactatatggaatttgaagaggaaacccagagcagaagcacatagtgaagtactgc

SEQ ID NO: 1011890 - DNA, 120 bp, Artificial Sequence
  ENSG00000229127_9 (sequence is synthesized)
acaagaaaggaaaactgggagcaggacaactatctggatattgactgcacatgccaatatctcagtcagactaacagaatcagagctttaggcagagaaatgaatggttggagagagaag

SEQ ID NO: 1011891 - DNA, 120 bp, Artificial Sequence
  ENSG00000229127_10 (sequence is synthesized)
gcaatgcccaggtgccctgctttgaaatgtcccgcccatccccaaattagtctgaaaatttcaaatgttgtataaattcccttcccatcaaaagtgtcccataaacagcagtggtagaag

SEQ ID NO: 1011892 - DNA, 120 bp, Artificial Sequence
  ENSG00000229127_11 (sequence is synthesized)
agttttaactgagtatcacagcttcaatgatgagtatagaaaactccaaaaatctgaataccaacacaatcaaaaaagaggtacaaaccacaagtggaagaaccatctcaagaaataatg

SEQ ID NO: 1011893 - DNA, 120 bp, Artificial Sequence
  ENSG00000229127_12 (sequence is synthesized)
aagcattcatggaatacagattagcaactctttaaaacagtattgccaagagaaacagatggcattgcagttgtcagatctcattaaggtcttatatctgaaacagttccactgtcttcc

SEQ ID NO: 1011894 - DNA, 120 bp, Artificial Sequence
  ENSG00000229127_13 (sequence is synthesized)
ttccataactttcataactttgaacattttggctcataggcgaaagggaattgccttatttcgaatgagactttggactgtggacttctgagttgatgctgaaatgagttaagactttgg

SEQ ID NO: 1011895 - DNA, 60 bp, Artificial Sequence
  ENSG00000229127_14 (sequence is synthesized)
tgaattcccacatgttgtgggagggatcggtgggaggtaattgactcacggggccaagtc

SEQ ID NO: 1011896 - DNA, 120 bp, Artificial Sequence
  ENSG00000229127_15 (sequence is synthesized)
gctcctccttgccttccaccatgattgcaaggtatccccagccatgtagaactgtaagtccattaaatcctttttcctgtataaattacccagtttcaggtatgtctttatcagcagcat

SEQ ID NO: 1011897 - DNA, 88 bp, Artificial Sequence
  ENSG00000229127_16 (sequence is synthesized)
tttcctgtataaattaccctatggactaatacagaaattaaaatgatgcctgacacataattgcttaataaatattagctattattat

SEQ ID NO: 1011898 - DNA, 120 bp, Artificial Sequence
  ENSG00000229127_17 (sequence is synthesized)
atgcgtttacttactgcccttattttagtacaagtgttttaaaatgagaatatttcctgcataatataaaatctaatacccagtccatatttaaatatctccatttgttaaaaaaaagtc

SEQ ID NO: 1011899 - DNA, 120 bp, Artificial Sequence
  ENSG00000229124_0 (sequence is synthesized)
ctgcggagggtggcgatggcctgggcggcggcggtggcgcggactggctcccggagaagaggcgaacgagggcgcgaagccttcgatgtgaggcccaggcattgagtaccatgtgtgcga

SEQ ID NO: 1011900 - DNA, 120 bp, Artificial Sequence
  ENSG00000229124_1 (sequence is synthesized)
ttcacaagccttggcatctgaacaattttttggaaggatccatcaggacaacacgtcgggggtgtactagtgaagtgattttccaaatgtgctactcagacctgtagcatcagcatcacc

SEQ ID NO: 1011901 - DNA, 120 bp, Artificial Sequence
  ENSG00000229124_2 (sequence is synthesized)
ggataatttgttagaaattccaactgttaggccccactttagaccaactgaatgtgaaactctgggagtacgtggggcccagcaatttgtgtttttacaagacttaccaggtgattctga

SEQ ID NO: 1011902 - DNA, 120 bp, Artificial Sequence
  ENSG00000229124_3 (sequence is synthesized)
gaaccactgtgctagtgaattgttcctgtctgtggccacgtagaataagaaaaccatagggttggaaaatggggaaactggtgagtgttcgcttatgaggaaatgaagaatagatagaaa

SEQ ID NO: 1011903 - DNA, 120 bp, Artificial Sequence
  ENSG00000229124_4 (sequence is synthesized)
agaagcagtttgtaaaagccaggaatttgatttgaaggactaattgcttgcagaatctttgctttctcagagaggggcaatccagatcactaggttaccgtgaaatatgttggtatggct

SEQ ID NO: 1011904 - DNA, 120 bp, Artificial Sequence
  ENSG00000229124_5 (sequence is synthesized)
ctaaaattctagaataatctctctagtgagaaaaggcatacctttccatattaggacaaaacttcaaatcaggtttgtaaaatcctataagattattgtatcccattgccatggccaact

SEQ ID NO: 1011905 - DNA, 120 bp, Artificial Sequence
  ENSG00000229124_6 (sequence is synthesized)
tgtttgtctctggagatcccagtttctacatctgaaaaccatatgcattcctgctcaccaggaattatctcgctgaatgaagcaagagattcaggatgtgtaagagaatttatgaagcat

SEQ ID NO: 1011906 - DNA, 120 bp, Artificial Sequence
  ENSG00000229124_7 (sequence is synthesized)
ttggattaccaagaaatgtgaagtataaagatcaagaatgattattacaaacactgatggtaaagaggtgtttcgaagtcgatgcaaaaaatgagttgcttatttcagtctctctttgat

SEQ ID NO: 1011907 - DNA, 120 bp, Artificial Sequence
  ENSG00000229124_8 (sequence is synthesized)
atatctgcctttttagtgctgactctatcatgtattcactatttgattttcagtgaatcacattttttaaagcttttaatctgtttcctcaaaaaatatattttttaaaaatatttactc

SEQ ID NO: 1011908 - DNA, 120 bp, Artificial Sequence
  ENSG00000229124_9 (sequence is synthesized)
ttctcccggaggcgcatgatgtcctcggccaggttgtcgcgctccacctcgacgcgggctttgtcgttggttagctggtccacctgccggcgcagctcccgcatctcctcctcgtagagg

SEQ ID NO: 1011909 - DNA, 120 bp, Artificial Sequence
  ENSG00000229124_10 (sequence is synthesized)
tcccccaggcgcgacttgccttggcccttgagctgctcgagctcggccagcaggatcttattctgctgctccaggaagcgcaccttgtcgatgtagttggcgaagcggtcattcagctcc

SEQ ID NO: 1011910 - DNA, 120 bp, Artificial Sequence
  ENSG00000229124_11 (sequence is synthesized)
tgcagctccaccttctcgttggtgcgggtgttcttgaactcggtgttgatggcgtcggccagcgagaagtccaccgagtcctgcaggagccgcaccccgggcacgctgctccgcaggcgc

SEQ ID NO: 1011911 - DNA, 120 bp, Artificial Sequence
  ENSG00000229124_12 (sequence is synthesized)
ctgcccaggctgtaggtgcgggtggacgtagtcacgtagctccggctggagctcggccggctcgcggtgcccgggccgccgaacatcctgcggtaggaggacgaggacacggacctggtg

SEQ ID NO: 1011912 - DNA, 120 bp, Artificial Sequence
  ENSG00000229124_13 (sequence is synthesized)
gacatggctgcggagggtggcgatggcctgggcggcggcggtggcgcggactggctcccggagaagaggcgaacgagggcgcgacagcaaagctccctttggatgacatagatttattac

SEQ ID NO: 1011913 - DNA, 120 bp, Artificial Sequence
  ENSG00000229124_14 (sequence is synthesized)
ctcctggaatgggcactggtcctcttcatcatctcagggatagattttaaaatagagcatgcttaatatacttcagatgtctgcaaggggaacagcagcaaataccacagtcccatgaca

SEQ ID NO: 1011914 - DNA, 89 bp, Artificial Sequence
  ENSG00000229122_0 (sequence is synthesized)
cttaaagtttttcttctgtttcttttcctttccttctttttttgagacagagtttcactctttcacccaggccggagtgacaccccctg

SEQ ID NO: 1011915 - DNA, 120 bp, Artificial Sequence
  ENSG00000229122_1 (sequence is synthesized)
ctcttaactcatagttcctgggaattccttcatcagcatcctaagttctcctttcctgactacaaagggaaatagtaaagagctttttctaggttgtcactggaatattctaggcccctc

SEQ ID NO: 1011916 - DNA, 120 bp, Artificial Sequence
  ENSG00000286248_0 (sequence is synthesized)
gtgtcacctggggagggctggggaggcctcacaatcatgacaaaggcaaggaggagcaaagccacatcttacatggtggcaggcaaaacaagaatgagagccaagcaagaggagaaaccc

SEQ ID NO: 1011917 - DNA, 120 bp, Artificial Sequence
  ENSG00000286248_1 (sequence is synthesized)
gaggagaaaccccttataaaaccctcagatctcgtgagacatattcactaccacgagaacaatatgggggaaaccgcccccatgattcaattctctcccaccaggtccctcccacaacac

SEQ ID NO: 1011918 - DNA, 120 bp, Artificial Sequence
  ENSG00000286248_2 (sequence is synthesized)
gtggggacacagccaaaccatatcaggccacttggccaataagtgaccaagccaggatttgaaccaggtggtttgtttccagtgcccatcataccactggactgagataggtgtgtaagg

SEQ ID NO: 1011919 - DNA, 120 bp, Artificial Sequence
  ENSG00000286248_3 (sequence is synthesized)
accactggactgagataggtgtgtaagggacaaaaaccaagatgagttccttgcctctgagggtcttattgtttttggggggaaataaaacataaatactcataacttaccagactggaa

SEQ ID NO: 1011920 - DNA, 120 bp, Artificial Sequence
  ENSG00000286248_4 (sequence is synthesized)
gggcttgcataagagccctgttagttttatttgacccttatccaagcttaagtgcagtgattgtttggttaaaatggtaagtcagtgtcagccacttcctccgattcctgaagccttagg

SEQ ID NO: 1011921 - DNA, 120 bp, Artificial Sequence
  ENSG00000286248_5 (sequence is synthesized)
atcatgtgaccatgataattcattaaaattagctaaggatgttggaaatgcaaaatcctctccatagatcatcatttattttggaaatatgattcatagccctcaggaatggaaaacagg

SEQ ID NO: 1011922 - DNA, 120 bp, Artificial Sequence
  ENSG00000286248_6 (sequence is synthesized)
aagctgaaaagtcacagtaaaagtgaaagaagataggaatttctaatctattcaaaaaagagaagttgaatcaggggatcctcagggattcctgaatgatgactgcatgggattagaaca

SEQ ID NO: 1011923 - DNA, 120 bp, Artificial Sequence
  ENSG00000286248_7 (sequence is synthesized)
tgggttgagaaacatacaagcagcagagggtgaaaccccactcggtgcattccagtgggtaatttgaataaatgggggtggtggtcatggttccttattgcctctagtaggcagggcttt

SEQ ID NO: 1011924 - DNA, 120 bp, Artificial Sequence
  ENSG00000286248_8 (sequence is synthesized)
gtgtagaccatgacttttggtagaagccaaacgaagattaattttttagggctgctggttggcctggaattagggtgttttttttttttgagacagcgtttcgctcttgttgcccagact

SEQ ID NO: 1011925 - DNA, 120 bp, Artificial Sequence
  ENSG00000286248_9 (sequence is synthesized)
taaaaataaaaataaaaaaattaaaattaaatgtgatcttaccaggttcctgcttagaacccttatgtggcttaggtcttaggatacagacaaactctaccatggcccacaggctccagg

SEQ ID NO: 1011926 - DNA, 120 bp, Artificial Sequence
  ENSG00000286248_10 (sequence is synthesized)
acaggctccaggcagcctagcccctgcctgcttgtccaaccgtaactcatgccttacttctctgtactttttatggcacagtcatacagttctcctttaagttctataaacctgctctgc

SEQ ID NO: 1011927 - DNA, 120 bp, Artificial Sequence
  ENSG00000286248_11 (sequence is synthesized)
ttttcctgccccaggacctttgcacatactgttctctgcctagaatgctctttcctcccgcattcactagttaagtaatactcatccttcagattttagctaaaacattccttcctcagg

SEQ ID NO: 1011928 - DNA, 120 bp, Artificial Sequence
  ENSG00000286248_12 (sequence is synthesized)
taggctgatctccccaaataggccaaatttccctactataagctctcatgccatcatttgccttttcaccattatactcagcacaagttgcaagatgccatttgcttgaattatttgatt

SEQ ID NO: 1011929 - DNA, 120 bp, Artificial Sequence
  ENSG00000286248_13 (sequence is synthesized)
aatttccatctcctcatatctctatgagactggctaccttatttatccttggtctctagagagtgcctcattgaatagttgttgagtgaatgcgtcaatgaatgagttaactgtgatttg

SEQ ID NO: 1011930 - DNA, 120 bp, Artificial Sequence
  ENSG00000286248_14 (sequence is synthesized)
ctaaaatcaggaagggtttaaaaagttactcccctttagaaagagaaatgcatgtctattaccaatgctatgtgaaatcagccaagagaaagcagatcccttctcttctgacacagaaag

SEQ ID NO: 1011931 - DNA, 120 bp, Artificial Sequence
  ENSG00000286248_15 (sequence is synthesized)
gaagccatgaatactggcaattaccgtagcagaagtctgtctttaagtataagaaaacagatcctacaaaacgtgactctcatcacctttggcggtgacattattttctacagtaaacta

SEQ ID NO: 1011932 - DNA, 120 bp, Artificial Sequence
  ENSG00000286248_16 (sequence is synthesized)
aaaataatacaaatatgacgcctgttattgtaggacgtgtctgacatattacacacagttgaagtgacacatcactctctcgcccagagcatcagtggggaaggtgatggaaaacagtag

SEQ ID NO: 1011933 - DNA, 120 bp, Artificial Sequence
  ENSG00000286248_17 (sequence is synthesized)
atggatccagtgattatttgtaatttcacattctgactccatctgcggcctcattaaggtgatagaaacatactaggaataaggcaccaaaaacaaaggtacaaaggcccagaagccatc

SEQ ID NO: 1011934 - DNA, 120 bp, Artificial Sequence
  ENSG00000286248_18 (sequence is synthesized)
agaatggaaacttgtaacagtgacatagaattcgtgaagtaaagaaatgtaagctccaaagaaatcatatgtagtaatccactttttaaaatatctttgaaaaggtagtaaaaatcaaag

SEQ ID NO: 1011935 - DNA, 120 bp, Artificial Sequence
  ENSG00000286248_19 (sequence is synthesized)
ttcaatctggcataattaacttggttcctgagtttaaagccaaataaaaccctgtatcaaaaaatggttttattcatgctgtcttacatgaatatagtagaaagctgctggtttttaaaa

SEQ ID NO: 1011936 - DNA, 120 bp, Artificial Sequence
  ENSG00000286248_20 (sequence is synthesized)
ggtatcaaaatggtaactcttagaacatatataaaaaaattcacagatccttcatcagtcacaatatttaatagtggtctctaaactattcgataaaatagctattgtttagaaacagat

SEQ ID NO: 1011937 - DNA, 120 bp, Artificial Sequence
  ENSG00000286248_21 (sequence is synthesized)
aaatagccaactctagtgaccaaaccaggaaaaggaaatcctgaagcaggatcctaaaacctgtcactgtgcattttcatattctcagcagttgatgtatggaaatggtaaaagtgtggt

SEQ ID NO: 1011938 - DNA, 120 bp, Artificial Sequence
  ENSG00000286248_22 (sequence is synthesized)
gtgggttgcttttgaagcagctagcacccagactgcgtcagttctgattggctgcaaagtacagagtgttaatggcataaagccagctttttagtcactttcagtcatagaattgttttg

SEQ ID NO: 1011939 - DNA, 120 bp, Artificial Sequence
  ENSG00000286248_23 (sequence is synthesized)
ggcgtgagccaccacgcccggccttcagtcaaagaattgtgatgaggatcggaatgcattgggtagctcagcagttagatttgatagattccaaggctggtctggtgagttacctgattt

SEQ ID NO: 1011940 - DNA, 120 bp, Artificial Sequence
  ENSG00000286248_24 (sequence is synthesized)
ttgatagattccaaggctggtctggtgagttacctgatttggtctatagcccttctagaactgtccagtggaaacctaagttcctgaggctcccagggttggtccgggctccctgagaac

SEQ ID NO: 1011941 - DNA, 120 bp, Artificial Sequence
  ENSG00000286248_25 (sequence is synthesized)
attagaaccagggaaggtatgggctgagtctgtgtgcccattcatcaggcttgccctctgttccagttacctgttgctgtggaacaaataagccccaaacttagggacttaagatagcaa

SEQ ID NO: 1011942 - DNA, 120 bp, Artificial Sequence
  ENSG00000286248_26 (sequence is synthesized)
ggacttaagatagcaatgtggttttctggatttatggggcagttctcacttgggatgtatcatgcggtatcagtcatatgttagtggagtccagaatcacctgaagtcaggagtttgaga

SEQ ID NO: 1011943 - DNA, 120 bp, Artificial Sequence
  ENSG00000286249_0 (sequence is synthesized)
agcgcggccagagtgggcgccaaggcgaaggaggcgcccagagcgagtgagggctgtgagggctgccaggatgctgtcatctctcaataacacgataaacacagtgttggagcgtaggcc

SEQ ID NO: 1011944 - DNA, 120 bp, Artificial Sequence
  ENSG00000286249_1 (sequence is synthesized)
ctctcaataacacgataaacacagtgttggagcgtaggcctggataactccaagactccctcccacttggtgtgttatagacttataagtctgaaaaggagagtcaagtctgacaattaa

SEQ ID NO: 1011945 - DNA, 120 bp, Artificial Sequence
  ENSG00000286249_2 (sequence is synthesized)
gaacaagtgtttgaggagaaactggcaatcaattaaagaggctgaaaacaactgtgcaaccttcaaacaagctctcagattgtatctctcaggagaggcaccttcacaccaacacatgtg

SEQ ID NO: 1011946 - DNA, 120 bp, Artificial Sequence
  ENSG00000286249_3 (sequence is synthesized)
tccatgattttccagtgggctcaatcattaccaactaaatgccaacccccagaaaggacacctcacttttacacacttctgttggccaaggcaagtcaaatagcaatacctaacattaag

SEQ ID NO: 1011947 - DNA, 78 bp, Artificial Sequence
  ENSG00000286249_4 (sequence is synthesized)
gtcagcaaaattcttcaaaagtaaaaagtatttgcacaggcacacacagcagtaatgtctacaacccagaccaggtac

SEQ ID NO: 1011948 - DNA, 120 bp, Artificial Sequence
  ENSG00000286249_5 (sequence is synthesized)
aggtcagcaaaattcttcaaaagtaaaaagtatttgcacaggcacacacagcagtaatgtctacaacccagaccaggtaccaaaaagcacttcattggccgggcgcggtggctcacacct

SEQ ID NO: 1011949 - DNA, 120 bp, Artificial Sequence
  ENSG00000286240_0 (sequence is synthesized)
tgcccgctcagcacatgtgaaatctctttctcattcataccctacatgctcttatcagagaggaggcaacttagacaagtaaaggttctgcaagcacagatgcagcttcccacctgaagc

SEQ ID NO: 1011950 - DNA, 120 bp, Artificial Sequence
  ENSG00000286240_1 (sequence is synthesized)
cactgccgacttcaagggcctggctcagcggctgaggttctcaggaggatgtggccagcacaatggttccattattgagcgtttgaagcactctttatttttaactacccctctgggctt

SEQ ID NO: 1011951 - DNA, 120 bp, Artificial Sequence
  ENSG00000286240_2 (sequence is synthesized)
ttgctaggctgtaacccctgccaggaaggctcagcccctgtccctggctacctcgccttgttcttcaaagtccagagtaaacgccaccttctccacaacatgcttcctgacacgccctga

SEQ ID NO: 1011952 - DNA, 120 bp, Artificial Sequence
  ENSG00000286240_3 (sequence is synthesized)
tggaggcacgtgctaagtccgttctgagtgtgtctgtccccaccctgagggcagtgaccaaggcctggcccatgcccagcacggagcaggcactgcccagttggccaggcagcacacact

SEQ ID NO: 1011953 - DNA, 120 bp, Artificial Sequence
  ENSG00000286240_4 (sequence is synthesized)
gacttgggacctacagacaagagttcaagttccagctcttcccttcagtgactatgtgaacctgccttctctgggcctcagtttactcatcagtaaaacgagggtaacaaccctggcaag

SEQ ID NO: 1011954 - DNA, 120 bp, Artificial Sequence
  ENSG00000286240_5 (sequence is synthesized)
tggtctggcctggtagataagtgactctttgtgcaaattattttgcttaaaacattctttgttggtaaagcagcaactcattgcttaattcctgcaaatcatcgttaatggacagcaagc

SEQ ID NO: 1011955 - DNA, 120 bp, Artificial Sequence
  ENSG00000286240_6 (sequence is synthesized)
atttattgactaccaactgtatatatggccccaggccagtcttagaacaccaacaggaaccacttcccaacccaaaagcacccagcagatgatagatgctattgacgtcaacattgctga

SEQ ID NO: 1011956 - DNA, 120 bp, Artificial Sequence
  ENSG00000286240_7 (sequence is synthesized)
gatgaacccggaaccccagtctagccatgagaaaagcctcagacagattctaatagtggggcattctacagaacaccagactaggccaggcactgtggctcacatctataatcccagcac

SEQ ID NO: 1011957 - DNA, 120 bp, Artificial Sequence
  ENSG00000286240_8 (sequence is synthesized)
tgaggccaggagttcaagaccaacctgggtgacatggtgtgaccctatctctaccaaaaaacaaattttttaataaaattagctgggcatgggggcacatgcctgtagtcccagctactc

SEQ ID NO: 1011958 - DNA, 78 bp, Artificial Sequence
  ENSG00000286240_9 (sequence is synthesized)
tgatgattgtgtcacggtactcaagcctgggtgacagacttagacactatccaaaaaataaaaaataaaaggccaggc

SEQ ID NO: 1011959 - DNA, 71 bp, Artificial Sequence
  ENSG00000286240_10 (sequence is synthesized)
agctatgattgtgtcacggtactcaagcctgggtgacagacttagacactatccaaaaaataaaaaataaa

SEQ ID NO: 1011960 - DNA, 76 bp, Artificial Sequence
  ENSG00000286241_0 (sequence is synthesized)
tcagcgaaaagaaaatatcttagaattgcgttttaacaacaacataatgaggtatatagttaaaattaacaagact

SEQ ID NO: 1011961 - DNA, 120 bp, Artificial Sequence
  ENSG00000286241_1 (sequence is synthesized)
caacaacataatgaggtatatagttaaaattaacaagacttggtctatattatctctcttctcctacatgcatctttaagtaagggttaccctcatgccttggtaccagctgattgatga

SEQ ID NO: 1011962 - DNA, 120 bp, Artificial Sequence
  ENSG00000286241_2 (sequence is synthesized)
agttgtacaactcacactctaattccatacccagtaatcccaggactttctgcatgctcccattccagtccacttctacctattttttgccccttggattatattctcattgccagccct

SEQ ID NO: 1011963 - DNA, 120 bp, Artificial Sequence
  ENSG00000286241_3 (sequence is synthesized)
gatccaggctgtggttctgttgttcatacttggtttctacatctatgactcttcatgctttttaagaccaatgatttggaccctccatttcctttctggttttggctccttcttgcagaa

SEQ ID NO: 1011964 - DNA, 120 bp, Artificial Sequence
  ENSG00000286241_4 (sequence is synthesized)
ttcctagcctggttttaacatgtcaggctctagtccccaagctttgtgatatctggccagtgccctgggtgaccccattcaggttatattgcaggttatattttatatatttaaaatggt

SEQ ID NO: 1011965 - DNA, 120 bp, Artificial Sequence
  ENSG00000286241_5 (sequence is synthesized)
gaatgaaataagattcacagtagccatggtatgtgcatttttatcttcaaatgagaaacgacttttctgatgtatgtgtttaaaacctatgtttatttttctggtaaaatgctctattta

SEQ ID NO: 1011966 - DNA, 120 bp, Artificial Sequence
  ENSG00000286241_6 (sequence is synthesized)
tttatcagcaaaatgctaataagagttatttgagatataaatatagttttggggtgttttttacattttgaccaattcaaaagaatttactgaagtccataactatatttggttaaatca

SEQ ID NO: 1011967 - DNA, 120 bp, Artificial Sequence
  ENSG00000286241_7 (sequence is synthesized)
taaatggtaatgcatatgaaagcattttaaacagtttcattgttctgcacatgtttgtggttatgttattaggcatagctggtagtctcaagaataggcaatgcctttgcttaacattaa

SEQ ID NO: 1011968 - DNA, 120 bp, Artificial Sequence
  ENSG00000286241_8 (sequence is synthesized)
atctatagttgagtcaggtttatgtagaaagtggcttttcactatataaaattttatgtattaatatctcaattaggaaataattttatgaacacctatacaaagaatagtatcaaaatg

SEQ ID NO: 1011969 - DNA, 120 bp, Artificial Sequence
  ENSG00000286241_9 (sequence is synthesized)
tcaaaatgagtgataaaaatgaatattactttcaaatatgcttaccttactttttagttttattttattttatttttgagagggagtctctgtcttgttgcccaggctggagtacaatgg

SEQ ID NO: 1011970 - DNA, 120 bp, Artificial Sequence
  ENSG00000286241_10 (sequence is synthesized)
tttattaatatgctgaaaagacttggttttgataaaatgctgaagatttggttgaggattttcatacttttagaatctccctccccacacctcatacaaatacagtttcctttcaaataa

SEQ ID NO: 1011971 - DNA, 120 bp, Artificial Sequence
  ENSG00000286241_11 (sequence is synthesized)
cattctctcctggtagaatacaagattagatagctatccaaagtagccacatgacaattatcttgaagaatagcatgtacttcacctagcaggagaaacttggatttttctaccttttaa

SEQ ID NO: 1011972 - DNA, 120 bp, Artificial Sequence
  ENSG00000286241_12 (sequence is synthesized)
aagataggaaatttgtatgttatttctggtattccaagggaagaaatttgagtgatcttcaagggaagggtcagctgaactcatgaaacattttgaaaattatattttatttgaaaatta

SEQ ID NO: 1011973 - DNA, 120 bp, Artificial Sequence
  ENSG00000286241_13 (sequence is synthesized)
taactgacttacttatgatataagaatcatgtcaccacctacagcatttataatctatatacgaatatattcaatacatttaattttagttctaaatattgtactcaaatgaaaatagtg

SEQ ID NO: 1011974 - DNA, 120 bp, Artificial Sequence
  ENSG00000286241_14 (sequence is synthesized)
attcttttcatagctatttttttttctaaacgtaaatgaaaaacatgcaaaatcaaagtcacatcaaaaaaactgaccaaggggaatggagggaagttcatgtatactcagaactcatgg

SEQ ID NO: 1011975 - DNA, 120 bp, Artificial Sequence
  ENSG00000286241_15 (sequence is synthesized)
aactctatctttggctgaagactttgtaaataaatcttgtacaacatagtggactggggttagaggctatttagtgtaaataaaacaaggcttacatttggcatagtatattacataaga

SEQ ID NO: 1011976 - DNA, 120 bp, Artificial Sequence
  ENSG00000286241_16 (sequence is synthesized)
ctttctcccaagaattttaaatattggaattcataatagaaagccaaatatgtctttggaagtctaatgggttgttaaaaatgctcttcaattatatgacattttaaaacatgtatgttg

SEQ ID NO: 1011977 - DNA, 120 bp, Artificial Sequence
  ENSG00000286241_17 (sequence is synthesized)
ggactatgagctatggagtatttgaaacatccttatgatacttgttctggggctatgcctgcaatttccaaatttgggagatcattgaactttataaagagaaaaaaataactgcctact

SEQ ID NO: 1011978 - DNA, 120 bp, Artificial Sequence
  ENSG00000286241_18 (sequence is synthesized)
atgtataaggtttttcatttatatctctgtttcttataacaaccaacaaggtaggcattctacccacaaattatggataaagacagataagctttaagggtacttctcaaacttcatttt

SEQ ID NO: 1011979 - DNA, 120 bp, Artificial Sequence
  ENSG00000286241_19 (sequence is synthesized)
ttcatttctttgtgtgtcttcaagaagcaagtaaacttatgcttcattcattgagagagatatgtttatccactacagatagaggaaatggtgcaattcacacacctgcagaaactccag

SEQ ID NO: 1011980 - DNA, 120 bp, Artificial Sequence
  ENSG00000286241_20 (sequence is synthesized)
gtgtggttgagcatgtgatggatgattgaaccaaaggtttcctttcaagggtagaagtttaaaatatggagaagatcagtgaaagagcagagcatagacgtatgcacttggaagaaggta

SEQ ID NO: 1011981 - DNA, 120 bp, Artificial Sequence
  ENSG00000286241_21 (sequence is synthesized)
ctgtatatatacatatatatgtatgtttcatatcttcatttggaatctcaaggtgggtgctgaggaacatgattttctttctgtattgtgtgttctttattctttattcttctccctttt

SEQ ID NO: 1011982 - DNA, 120 bp, Artificial Sequence
  ENSG00000286241_22 (sequence is synthesized)
ccaataattgctgcacatgcaggaactagctcatttactggctttgaatatatacagatccaggagatatgaaataattttaggagccacagaaaatactgtaaacttttcactcctcag

SEQ ID NO: 1011983 - DNA, 120 bp, Artificial Sequence
  ENSG00000286241_23 (sequence is synthesized)
tgtcttaacactcagattcttgtggaggaaaaccctagagactccttcaattcaattcagttcaattcaattaaaaaagtattacctttctcagaagaccatctgttatgcctctttctg

SEQ ID NO: 1011984 - DNA, 120 bp, Artificial Sequence
  ENSG00000286241_24 (sequence is synthesized)
attgttcttctctcttttcttcagggtcaacttgaaaaacctggcccctgagtttcacctttcaaaatccttttctcattaaaaagtaaaagtgagacaaagatgagatgaggggtgctt

SEQ ID NO: 1011985 - DNA, 120 bp, Artificial Sequence
  ENSG00000286241_25 (sequence is synthesized)
atatgaaatctcttatgtgaatttgttttaaggtaacttatttgaagctctgactctcttcttttgatccctcagcccgaacaatccaccagcaactcatgagctagcagcagaaaagat

SEQ ID NO: 1011986 - DNA, 120 bp, Artificial Sequence
  ENSG00000286241_26 (sequence is synthesized)
gacagagctggggctggcagagcgaggaatgaaagagagagaacagatcagtgttcagtttgaaagagccataattcagcagtctttctacattacctctcagaagaaggagcctgcatg

SEQ ID NO: 1011987 - DNA, 120 bp, Artificial Sequence
  ENSG00000286241_27 (sequence is synthesized)
tctaaagagagaagtgaagtttaagtactggaaaaaaggaaagtcttcagccttgggaatgtaataacctggggtcagctgagaaccctgaggaggactgacccaatcagctgctgggag

SEQ ID NO: 1011988 - DNA, 120 bp, Artificial Sequence
  ENSG00000286241_28 (sequence is synthesized)
aagcaacataactgttctgctggagggagaaacaaattctaatcagatgtgaaccaactatccagggagcttctgttgtcatgagaaaaggaagtgctcttcctttcaactggaaaacta

SEQ ID NO: 1011989 - DNA, 120 bp, Artificial Sequence
  ENSG00000286241_29 (sequence is synthesized)
gaatgtaccactttttttttttttttgttaatgctccctcttttctttttttattagctttgtaataaaaatttaatttaaaagttgatatgcaaacaagtgtgtaacaatctgaatatt

SEQ ID NO: 1011990 - DNA, 120 bp, Artificial Sequence
  ENSG00000286242_0 (sequence is synthesized)
cctcctgagtagctggaattacaggagaattgcttgaacccaggagacggtggttgcagtaagccgcagttgcgccactgcactctagcctgggcagctgaccaagactccgcctcaaaa

SEQ ID NO: 1011991 - DNA, 120 bp, Artificial Sequence
  ENSG00000286242_1 (sequence is synthesized)
agactccgcctcaaaaaaaaaaaaaaaaattccctcctttcaaagagcttataaattggaaatactaaaaatatttattcacaaatatttatgaatattatgaatattcatgaagctaca

SEQ ID NO: 1011992 - DNA, 120 bp, Artificial Sequence
  ENSG00000286242_2 (sequence is synthesized)
tcaacataaccaaaaggtagcatttatgaaaacaaggttttaagtgtcaaccctattaaagcgtaacgccataaataacttattctaggtttcatccccccaaggcttgtcaaaattcaa

SEQ ID NO: 1011993 - DNA, 120 bp, Artificial Sequence
  ENSG00000286242_3 (sequence is synthesized)
aagcctatatagtggcaaggccaagttcatggattctacctttaagacagtaaaattatcaccacgatgttccacaaatcatttgttatcccaatctctaccatctattttgcacgtcat

SEQ ID NO: 1011994 - DNA, 120 bp, Artificial Sequence
  ENSG00000286242_4 (sequence is synthesized)
cacacaaaggtcatacagaggacagaacgcagtagtatagatacatttcctctcagcactttccggaaaactaaaagcttatgccattactaaaggttaatttcttgtattctatttgag

SEQ ID NO: 1011995 - DNA, 120 bp, Artificial Sequence
  ENSG00000286244_0 (sequence is synthesized)
tgtgtgctagccaggagatcagtatggtgggtcttgtggggtgtgagaactggcaaggggaaccccatctcagatgacagcacacagaaactggcttggagacctccttcaggcacatac

SEQ ID NO: 1011996 - DNA, 120 bp, Artificial Sequence
  ENSG00000286244_1 (sequence is synthesized)
ctgctgcacaaagatcaccagacagtaggagtggagacaggaaaagacatttgcatctcagggttggagacagaagagggggttgtttgttgatatttcctgctctagctctcctgttct

SEQ ID NO: 1011997 - DNA, 120 bp, Artificial Sequence
  ENSG00000286244_2 (sequence is synthesized)
ccagggatccatggaatcaaaggtgttaatggggttgtcatgatgggcatccatggacaagaatcagaatcagaatcaagattttaaaggtatctccaagaaaagtgaaggtagctacat

SEQ ID NO: 1011998 - DNA, 120 bp, Artificial Sequence
  ENSG00000286244_3 (sequence is synthesized)
taattacttcagctgacttttggacaacatgggtttcaatggtgtgggtccatttatacacggatttacttctgccactgccgcccctgagacagcaagaccaacccctcctcttcctca

SEQ ID NO: 1011999 - DNA, 120 bp, Artificial Sequence
  ENSG00000286244_4 (sequence is synthesized)
gcctactcaacatgaagatgacgaggatgaagaccttcataatgatccacttccacttaacaaatagtatctatattttctattctttatgattttcttaataacattctctattctcaa

SEQ ID NO: 1012000 - DNA, 120 bp, Artificial Sequence
  ENSG00000286245_0 (sequence is synthesized)
gcgggtcaagagataatgattcaaaaagacacaggaaaaaattattttgaacatgaatacagtcatagaaccatgaagggaatatcgcggagtctaacatgcatgtaactggggttcaga

SEQ ID NO: 1012001 - DNA, 120 bp, Artificial Sequence
  ENSG00000286245_1 (sequence is synthesized)
atgagtggacagagagaggatgaaaaaacaaaaactacttgaagaaataatgactaaaaatatgccaaatttactgtcagccagaaatgtacagattcaggatgtccagaaaacccctaa

SEQ ID NO: 1012002 - DNA, 120 bp, Artificial Sequence
  ENSG00000286245_2 (sequence is synthesized)
acccctaaacacataaataaaatttaaaaatatcaaaatcaaattgctaaaaaccaaaaataaaaaaaatctcaaaaatacctaaagaaaaataacacattatacacaagagaagaacta

SEQ ID NO: 1012003 - DNA, 120 bp, Artificial Sequence
  ENSG00000286245_3 (sequence is synthesized)
ccactgatttctcattataaataatggagtcagaagacaatggaacaaaatatttaaagtgaggggtggagggtgtggaaggcagacttgtcaagccagaattcaatatccagcaaaaat

SEQ ID NO: 1012004 - DNA, 120 bp, Artificial Sequence
  ENSG00000286245_4 (sequence is synthesized)
attctttaagaatacaggtgaaataaagacactgtcaaataaataaaatgagaactccattccagcagacatccaccagaggaatatcagcagagggaaacaatatcaggcagaaactca

SEQ ID NO: 1012005 - DNA, 120 bp, Artificial Sequence
  ENSG00000286245_5 (sequence is synthesized)
tatcttcaagaaggaatggtaaggaacaaaagtagtaaatatctaagtaaatatttaaaaaaaacccccaaatcctgtttttaatcttaattcctttaaaatataaataaaatgggccag

SEQ ID NO: 1012006 - DNA, 120 bp, Artificial Sequence
  ENSG00000286245_6 (sequence is synthesized)
gcatattgcaaactctagttaaaggcatactgtaactagttaaaaaactctagttaaaggcatattttagttaacagaatactgcaaactaaaaaaaaaaaaaatgctaaaaagccaaga

SEQ ID NO: 1012007 - DNA, 120 bp, Artificial Sequence
  ENSG00000286245_7 (sequence is synthesized)
gataaaatagtattctaaaaatattcaattacagtaaaattgaagaaagatctaaaggaagacttgagaagccgaggtacacttgaaggccttaagagataacagaaagaaaccaacaga

SEQ ID NO: 1012008 - DNA, 120 bp, Artificial Sequence
  ENSG00000286245_8 (sequence is synthesized)
gaaagattagaaaaagagagaagaaactactcatctaccaaggtctctaaaaagcacaatttgataagctcagttgaaaactataaaataattattcttagaaggattctttattgcaat

SEQ ID NO: 1012009 - DNA, 120 bp, Artificial Sequence
  ENSG00000286245_9 (sequence is synthesized)
tatagcaaaatgggagaatagaggtaatgttctttatttattaatgggatattgaaggaatttccatttgatagaatgctttttccatgtaaggtaagacaaactggtcttaccggtgaa

SEQ ID NO: 1012010 - DNA, 120 bp, Artificial Sequence
  ENSG00000286245_10 (sequence is synthesized)
ggaaaagacaggtggatcagaaatcaaaggagagtggaaaagtctgaaagcactgtcatcagtaagaggaaccacagttgattataacttctaacaaggattacagggagcaccgagggc

SEQ ID NO: 1012011 - DNA, 120 bp, Artificial Sequence
  ENSG00000286245_11 (sequence is synthesized)
cgagctaaaactggtaaccatcaatttgtatttcccaaccttggcctgtattctgagggacgtagaacaattcattttccactcttatttacttttttaaaatttcagcaaccatatata

SEQ ID NO: 1012012 - DNA, 120 bp, Artificial Sequence
  ENSG00000286245_12 (sequence is synthesized)
tttctaagagctcttattttccacatgatcctttttcatagcttgttttatttaggttgttagtaacatcctctcatatttcttcaagtacattagacatctgaatttattcttttctgt

SEQ ID NO: 1012013 - DNA, 120 bp, Artificial Sequence
  ENSG00000286245_13 (sequence is synthesized)
tcctggaacacctacttcctctgggctgggcttttacatttgcaccgggctttctctttcctgttgattctacacacgcattccaataatcctttcagaaaaggggtagcacagctaaag

SEQ ID NO: 1012014 - DNA, 120 bp, Artificial Sequence
  ENSG00000286245_14 (sequence is synthesized)
ggcgtcctcatgttttctacacaggactcttgcctgccagatctcttcttaaagggactggagagttgtaagtcatgctcaatcacttaaaaaaaaaatctttaacagagaagattcgat

SEQ ID NO: 1012015 - DNA, 120 bp, Artificial Sequence
  ENSG00000286245_15 (sequence is synthesized)
cacctaaaattgatatggcatatttcatttctagaagacatatttactatttttctgttgatatttcattcatttttctattttaatctatgtgagtcattaccatacaaatttgtaaat

SEQ ID NO: 1012016 - DNA, 120 bp, Artificial Sequence
  ENSG00000286245_16 (sequence is synthesized)
aaagggagcatcctgttctcagggcagcacagtcctctgagaactgctggaatggttttgtgcactccattcagcagcagcacagggggaatcagacactcaacgggaaacaaaatgaag

SEQ ID NO: 1012017 - DNA, 120 bp, Artificial Sequence
  ENSG00000286245_17 (sequence is synthesized)
aaatggctcggcagagaccaccttccatatttcttcccatttcctttgaaaaatagaacttcggagctgtagatgtgtaggtggttctcacttaaagaatgcatttctcagcattctttg

SEQ ID NO: 1012018 - DNA, 120 bp, Artificial Sequence
  ENSG00000286245_18 (sequence is synthesized)
cagctggttaggaccaggtaactgattctggccagcagagcatgcgaaaggacatgtgcccctttgagtccaagtactcaccaggcctttccttccgaacctcccctgtgggacagtgtg

SEQ ID NO: 1012019 - DNA, 120 bp, Artificial Sequence
  ENSG00000286245_19 (sequence is synthesized)
gaggtggggcagtcactggaacccacgtatcagagatgacaaagttgccctatcaccctttgaccacccacctgggctactgtgagggtgaaaatctgttttgatttaaggtgcgtcagt

SEQ ID NO: 1012020 - DNA, 120 bp, Artificial Sequence
  ENSG00000286245_20 (sequence is synthesized)
cacatttcagtacaggaaacagaagccaccctagacagtgtagcagaaagtgatttcatacacagaacaagatgcttcccaaatcagtgaaaggatgaagttcaggactgaagctccaaa

SEQ ID NO: 1012021 - DNA, 120 bp, Artificial Sequence
  ENSG00000286245_21 (sequence is synthesized)
gctactctcagaatgttaccaaaatatccatccaaggaaagcactatggcaaggatcacatctgagacacgtggtttggagaccaccatgcacatagtgcactcccacccaagccctaaa

SEQ ID NO: 1012022 - DNA, 120 bp, Artificial Sequence
  ENSG00000286245_22 (sequence is synthesized)
gctggagagcgggagcaggaactcagacccatgaggacacctgtcagcagagaacacacaggcaaaaagatacctcctcctcactcctgccttacaagctctgtgaaagtacattcaatg

SEQ ID NO: 1012023 - DNA, 120 bp, Artificial Sequence
  ENSG00000286245_23 (sequence is synthesized)
tgaaagcaaattcacacacctttcaagaaactgtgaaaaatacgtgcaggctagtttccaaatttctaaagaacagaggctgcaggaagggtggactgaaggttgaacatactagtttac

SEQ ID NO: 1012024 - DNA, 120 bp, Artificial Sequence
  ENSG00000286245_24 (sequence is synthesized)
cacagtgcaactgttatagtagcttagactatgtactattaatagcaaaaatttatttaaattaagctagtttacatgaaaagaaatattctctagtaacttgagaattatgaaacttct

SEQ ID NO: 1012025 - DNA, 120 bp, Artificial Sequence
  ENSG00000286245_25 (sequence is synthesized)
actagaatgtttaataagcagtcaagtgattccagggataaggcaagtctgagaatcactcatcatttaaatatgacactgtcacagtaattttcaaaacatgaaactttcatacctcaa

SEQ ID NO: 1012026 - DNA, 120 bp, Artificial Sequence
  ENSG00000286245_26 (sequence is synthesized)
actactttttgatacatgaaaataaaaaacaggctggcaagctcatttctacacacacatcagcatttagagtaatgcatttcatctagtatagtagacatcaaatgactgaataaatgg

SEQ ID NO: 1012027 - DNA, 120 bp, Artificial Sequence
  ENSG00000286245_27 (sequence is synthesized)
cacaataatgagaatgtcattcgaagcttttcacgataatttaaaaatcattctgaagttttcaataacggaggaaagcctctgctgtgaggtcaaggccaacacttgttcgcattactt

SEQ ID NO: 1012028 - DNA, 120 bp, Artificial Sequence
  ENSG00000286245_28 (sequence is synthesized)
aaaggtcattaaaatacatccttaatcataacatgtggttcattacaaataaaattgcctttcgttcaataaaactaattaaatgtaaatggtattgtttactgctatacggatcttttg

SEQ ID NO: 1012029 - DNA, 120 bp, Artificial Sequence
  ENSG00000286245_29 (sequence is synthesized)
aaataaatcagcatgtcatgatttattgaaagttactgtggccttgtggttgttaataaatttgtttgatcacaaaagccagaaacatatttcccaaatgtctacaacgcctgaaaactg

SEQ ID NO: 1012030 - DNA, 120 bp, Artificial Sequence
  ENSG00000286245_30 (sequence is synthesized)
tgcctccagacagctatgaagccacaagaaactgcacctgccattacaggctctgcagcacagttattattacatgactctgaaattttaattctctgagaatataacagaatggacaaa

SEQ ID NO: 1012031 - DNA, 120 bp, Artificial Sequence
  ENSG00000286245_31 (sequence is synthesized)
ggttattcttggctgtgtcctcagctcttccagatgagttcttaggtctctaagtttactcagcctggctgtcaccatggacacagtctgatgtgacacaactgtgatacaacaaacagc

SEQ ID NO: 1012032 - DNA, 120 bp, Artificial Sequence
  ENSG00000286246_0 (sequence is synthesized)
aatgggggaatacaaattggggctggaggtggcatctctccagatacgaggagtccaatgcaaaagcttctctttaagaatgaataataaaagggtcagaggggctgcgtgccttcaact

SEQ ID NO: 1012033 - DNA, 120 bp, Artificial Sequence
  ENSG00000286246_1 (sequence is synthesized)
ttcttcagagacccggcagaacaaaactgggacccccaaatgggacaattgtgaagacttttatgaagagccaattcaaagacatgtgagtggaacaaagaagaaccagtgagggccaat

SEQ ID NO: 1012034 - DNA, 120 bp, Artificial Sequence
  ENSG00000286246_2 (sequence is synthesized)
gagtcatccccaggttaggagctgtgtgggacccagaggagcttggggagataatggtcatcagagctcagctggaccagcaggacaagaccactgcagacagcacagtggcatccagtg

SEQ ID NO: 1012035 - DNA, 120 bp, Artificial Sequence
  ENSG00000286246_3 (sequence is synthesized)
aagactgcagccactgtcagcccacgccaatgaggaaggagatgggcagacacccagtgctcaccttcctctgccttctgatctcctgccagtgcctcccatgggctgaaagccccagaa

SEQ ID NO: 1012036 - DNA, 120 bp, Artificial Sequence
  ENSG00000286246_4 (sequence is synthesized)
aaggcagtccatgctgtgctccatgcaggccagcctctcaggcacagggcagagtgaaccagacagcaaggcagtccatgctgtgctccatgcaggtcagcctctcaggcacagggcaga

SEQ ID NO: 1012037 - DNA, 120 bp, Artificial Sequence
  ENSG00000286246_5 (sequence is synthesized)
gtggagaaggcatctggaggcacaaatggggagtcccctccagatgcctctgggaagctgcagtgattccctctggcgacgtgtgagcgtttccattgctccacacctcacaacactcaa

SEQ ID NO: 1012038 - DNA, 120 bp, Artificial Sequence
  ENSG00000286246_6 (sequence is synthesized)
cattattgctggcttgacagatgccttcacatttttcaacctgattggcatggctactgcctcactgtgcaggtaattttccatgtgtccctgatcattcctaaaattcctcatccgttc

SEQ ID NO: 1012039 - DNA, 120 bp, Artificial Sequence
  ENSG00000286246_7 (sequence is synthesized)
agtctcattggctctcccagggccctctctgagcttgcctattcataccttttacccattttccttttggtattgatactttttcattcatttttaagaggtctctacattttctcgata

SEQ ID NO: 1012040 - DNA, 120 bp, Artificial Sequence
  ENSG00000286246_8 (sequence is synthesized)
ctacttagccattcttttcaatatcatcaagttacggcacaggtacccaacatttttgtaagtttcaagaaaaagacacaaaacctaattttctcaaataaagtgacattattcttttaa

SEQ ID NO: 1012041 - DNA, 70 bp, Artificial Sequence
  ENSG00000286247_0 (sequence is synthesized)
gggtagctgggacttgatctaaacttgaagacctcggaaacaaggaagaattgaagaattgaaaagctca

SEQ ID NO: 1012042 - DNA, 120 bp, Artificial Sequence
  ENSG00000286247_1 (sequence is synthesized)
acctcggaaacaaggaagaattgaagaattgaaaagctcatatttcagctgaagaataactaaatgaaacatcaccccaaatgatttctgattataagacaatattcgaaataaggaaaa

SEQ ID NO: 1012043 - DNA, 75 bp, Artificial Sequence
  ENSG00000286247_2 (sequence is synthesized)
atgatttctgattataagacaatattcgaaataaggaaaacaatacaacctatgtaaggaactagctgcatggag

SEQ ID NO: 1012044 - DNA, 120 bp, Artificial Sequence
  ENSG00000286247_3 (sequence is synthesized)
tatcctcccaccttggcctctcaaagtatggggattacaaatgtaagccaccacccctgacctgtctttttaatgcctagaaaccactgtgacaaatgggactgtcttttgttggccctc

SEQ ID NO: 1012045 - DNA, 120 bp, Artificial Sequence
  ENSG00000286247_4 (sequence is synthesized)
agactgctggaatctggagtgccgaggaaaggaagctatgaaagcttctcaacaacggagaggaggaaggcaatgagcagaggaaaatggagtcacagcaccctgacacctaagatctgc

SEQ ID NO: 1012046 - DNA, 120 bp, Artificial Sequence
  ENSG00000286247_5 (sequence is synthesized)
aaatggagtcacagcaccctgacacctaagatctgcctagcctcaaatatatgttctccttttgaggcagaaaaataggatctggagacaggaaacataaggccaattcacacttcagct

SEQ ID NO: 1012047 - DNA, 120 bp, Artificial Sequence
  ENSG00000237361_0 (sequence is synthesized)
aaggacagaagagagagtagatccagccttggccctgctaggctgggcagcctggcaggtagagtcagcagggatagagcttgctttcctgttcacgatcttcagccaagttcagggagg

SEQ ID NO: 1012048 - DNA, 120 bp, Artificial Sequence
  ENSG00000237361_1 (sequence is synthesized)
tctgaatactgaggccttcatagccactgcaccccaggtagctcaggagaacctccgagcgcaggagtgcaaaggctggcattcttcaggctctgaggctgtcccttccggtggaggtga

SEQ ID NO: 1012049 - DNA, 120 bp, Artificial Sequence
  ENSG00000237361_2 (sequence is synthesized)
actgcttcttattgatgtggacaagactgtggataaagtttgctgacccctagagaggaagtcatggcccatggctggcagatggaagcctcaggacctgaagatttctcaaagaaaggg

SEQ ID NO: 1012050 - DNA, 120 bp, Artificial Sequence
  ENSG00000237361_3 (sequence is synthesized)
acctgctgctgacagcaattaatatatgttcacagcttgcagctgaagcctgatgatggctgtaggagaaaggacatcacccagatgacattttgcctccaaagctctggggaccaattg

SEQ ID NO: 1012051 - DNA, 120 bp, Artificial Sequence
  ENSG00000237361_4 (sequence is synthesized)
attatgttagaatgttcttgtgtctggataggatgagaactgtcttataacaaagtgcagcccccatgtctgagggcatgtttcctgtgtttaggcacttccgaagcagggagcaccttc

SEQ ID NO: 1012052 - DNA, 120 bp, Artificial Sequence
  ENSG00000237361_5 (sequence is synthesized)
aaggggcactggccttcccagaaacagtgtttgacctgtgatgatgtcctgggggaggggacctaggaaaagaccttagcctttccataaggcacgattattctcctctatagagcctca

SEQ ID NO: 1012053 - DNA, 120 bp, Artificial Sequence
  ENSG00000237361_6 (sequence is synthesized)
aaagtcaagtcaagtagcaagcacactgtgctccagtctgtggccacagacacacacaaggactggagcaaaaccaaacatagtgtatcatcaccgctgaacccccaggagcccccagat

SEQ ID NO: 1012054 - DNA, 120 bp, Artificial Sequence
  ENSG00000237361_7 (sequence is synthesized)
gcttttgaacgtgaaaggagaaagaagctgtcagagatcaggttgaatgtggtgggttaggtgtgcggcattgcctctgggtccctgctttggtttaattaaactaagtctggtggtgaa

SEQ ID NO: 1012055 - DNA, 120 bp, Artificial Sequence
  ENSG00000237361_8 (sequence is synthesized)
ggatcctggcttgggggccttccggcagggctggctgctgggctggcaggctctggcgctccccttccccagaactgactttgttcctggcagccatggtggctgcactaaccacattct

SEQ ID NO: 1012056 - DNA, 120 bp, Artificial Sequence
  ENSG00000237361_9 (sequence is synthesized)
gcctccacctttgcactaagaaaagcaaataagcagaccacagaactgtttgcatttgccccagatgctccctggctgcgggaagagacacagcaaacagcagtgctgcggaggtatgtc

SEQ ID NO: 1012057 - DNA, 120 bp, Artificial Sequence
  ENSG00000237361_10 (sequence is synthesized)
taattgcagatactttttgttcatcatcgtattgaacgtcgttgcgtgttccagcagccatcaacttcctcaggaggaaaattcaattgtgcactgagcgacagcgtgaagagaccgggc

SEQ ID NO: 1012058 - DNA, 120 bp, Artificial Sequence
  ENSG00000237361_11 (sequence is synthesized)
caagcaggcagggtgctgcaggtcaacaaggtgctgctgtgctcctgaagccttcaggagcctcagcctgagagctcaggaaagggtggggctccaacccacctggctttccgccttact

SEQ ID NO: 1012059 - DNA, 120 bp, Artificial Sequence
  ENSG00000237361_12 (sequence is synthesized)
gagctccaaacacaggcttgttccacatcacggagagcccttatcctgcatgtgcgtctcgctccctgacaagcctatttgtgccttgtcaccagaaatgtaccttttttcttctctcat

SEQ ID NO: 1012060 - DNA, 120 bp, Artificial Sequence
  ENSG00000237361_13 (sequence is synthesized)
ctgtccctgacacccccagcttatctagcctgaagagaggctatcaaaatggtaatagccagatggaaaacaaggaaaaataagccctttcccataaggaagcaatacggattttggaac

SEQ ID NO: 1012061 - DNA, 120 bp, Artificial Sequence
  ENSG00000237361_14 (sequence is synthesized)
cggagaaatttctactattctcccaacatcattccctccgccttgggtgtgcttccgagagggttggaggtgtcacctgccgtaccctaggactggctgagggaaaacacacctgaagat

SEQ ID NO: 1012062 - DNA, 120 bp, Artificial Sequence
  ENSG00000237361_15 (sequence is synthesized)
cagcagaacccagacaactgagccaacacgtggagggaagccctcactagcctgcattcgacttgtgtgagagagaagtgaacgtttacgtgcaaagccactgagcttttgttgttgttc

SEQ ID NO: 1012063 - DNA, 120 bp, Artificial Sequence
  ENSG00000237361_16 (sequence is synthesized)
ctgcagcacagggcattctaacctgcctaatactgaaacgagtactgttaggcttgatctgtgaagaggagaacataaaaggcctgcatattctcttttaggtcctaaaaatgcagtgct

SEQ ID NO: 1012064 - DNA, 120 bp, Artificial Sequence
  ENSG00000237361_17 (sequence is synthesized)
ctcttcttggccttgctgtgaccaggctgtttaaaatctgtcaccccgccagtcgccactgtattatcttgctttatttttcttcatagtatttattgataatttatgtgcttattatgt

SEQ ID NO: 1012065 - DNA, 120 bp, Artificial Sequence
  ENSG00000237361_18 (sequence is synthesized)
ctccctgactggaatgtaagtttcatgaaggccaggacttgtgccttaaaacagggcctggcacagagtaggcacttaatgtgtatttttgaaagtgaattgtgggctgaaaattctgat

SEQ ID NO: 1012066 - DNA, 120 bp, Artificial Sequence
  ENSG00000237361_19 (sequence is synthesized)
ttttcaaaaaagttaataaaggtgaaggccttccttgcctttattaaatgcttaaaatggatcagtggtggggtagagatggaaggagtcacacacatactgtaccttcaacgggtttca

SEQ ID NO: 1012067 - DNA, 120 bp, Artificial Sequence
  ENSG00000237361_20 (sequence is synthesized)
atctaactgggagacaaaatatagaaacatgaaacaagcagagagcaaatctctaggtacctaagagttaattaagtactaagggtgtacttaaatttgtgagggaggaaggggaagagg

SEQ ID NO: 1012068 - DNA, 120 bp, Artificial Sequence
  ENSG00000237361_21 (sequence is synthesized)
actgtccagaggtatggctaactaccaaaaactctctggagcagacagctttggcagcagactgagagcagggttctccaatttgagcttgcagaagaatcacctggaaggcttctaaaa

SEQ ID NO: 1012069 - DNA, 120 bp, Artificial Sequence
  ENSG00000237361_22 (sequence is synthesized)
agaagaatcacctggaaggcttctaaaacctatactattggccccacccccagagtttctgattcactagatctggattatacctggggatctttttttttttagacagagtcttgctct

SEQ ID NO: 1012070 - DNA, 120 bp, Artificial Sequence
  ENSG00000237361_23 (sequence is synthesized)
atcatagctcactgcaacctcgaactccccggttcaagggatcctcccacctcagcctccccagtaactgggatttcaggcatgtgccaccaagcccggctaattttttttttttttttt

SEQ ID NO: 1012071 - DNA, 120 bp, Artificial Sequence
  ENSG00000280953_0 (sequence is synthesized)
gagattcatcttagatgctgcgtacgtacaccagtcagttcttcctttttatttctggctagtcattcgttgtcaaggtagcatggtaaccaacgcctgtagcctggatgcccagaggcc

SEQ ID NO: 1012072 - DNA, 120 bp, Artificial Sequence
  ENSG00000280953_1 (sequence is synthesized)
ctcgatctgtcctgaggattttggaacacagaccagctgggcatttttgtgcatgcaagacctgccttggcaatgatcttaagatgtcactgtagcgtttacatcttttatttcaagatt

SEQ ID NO: 1012073 - DNA, 120 bp, Artificial Sequence
  ENSG00000280953_2 (sequence is synthesized)
taaataactaggaagtagctaatgtaattcactgctgagaagaaaggcgagctcctagattcctttccaaagcgatctcctcctaatgaacttctctggactagggaagagagaagcccc

SEQ ID NO: 1012074 - DNA, 120 bp, Artificial Sequence
  ENSG00000280953_3 (sequence is synthesized)
tcccattcgcttctactggggcttgttaggccatcgccttgggggccggctgatcagcggcagccagcagccggcggcttcggcaggcaggaacaaggacagcctgtggctactgcagcc

SEQ ID NO: 1012075 - DNA, 120 bp, Artificial Sequence
  ENSG00000280953_4 (sequence is synthesized)
ccactgcccggccatgcttcatgatgggggagagtgccttgggaggaatatacaggcaaatcatgttagcatcacagagcccacttaattccgtatgggttggtatttggggaagaaatc

SEQ ID NO: 1012076 - DNA, 120 bp, Artificial Sequence
  ENSG00000280953_5 (sequence is synthesized)
gaggacgaattggtgttggacccaaagctgggcagggaccagtgtgcatggcaaggttttaatgccagtaagtttttcagggtgattttttttctgtccctgagtcagtggaatagaatg

SEQ ID NO: 1012077 - DNA, 120 bp, Artificial Sequence
  ENSG00000280953_6 (sequence is synthesized)
gaaatgccatgtctagctactttagggagcacagtgtgaagaagacagcctcctctaagctagcactgtttgtgtaatatgtggtccttagacattaaaatgaagccctttgtcaccaac

SEQ ID NO: 1012078 - DNA, 120 bp, Artificial Sequence
  ENSG00000280953_7 (sequence is synthesized)
tgtagagccccccaaaacaccctcatttggtgtttttgttccattttaaaccatgaatggcatccgctccctccagtactgatgtgaggtttttctgtgttggatcaaaaccaaatgctg

SEQ ID NO: 1012079 - DNA, 120 bp, Artificial Sequence
  ENSG00000280953_8 (sequence is synthesized)
ttttatgtcaacgtaaggaaggaaactagcaaatgcatgaggtcaatctccatggcacacttccaccccaggggctgtacgagaggaaaaaaatgtgcttcatgtcccaaccaaaagcat

SEQ ID NO: 1012080 - DNA, 120 bp, Artificial Sequence
  ENSG00000280953_9 (sequence is synthesized)
tctctgtctgaggactgttgcccaagtgtgaagtaggagactcgtgcaattcaaaggcacctatgtgatgcccatgtggagcccttttcttagccaggcacgacaggtatggagccggct

SEQ ID NO: 1012081 - DNA, 120 bp, Artificial Sequence
  ENSG00000280953_10 (sequence is synthesized)
ctgggaagtgggatctagaatgacaacccttggcacagggctaaggagctttaggagtgatgaaatctcattgtaccactgcaaacagaagctgcatccctgcctgggaaggattaggtc

SEQ ID NO: 1012082 - DNA, 120 bp, Artificial Sequence
  ENSG00000280953_11 (sequence is synthesized)
gcctcctaggcaggagcaaacatttggtggaaaggactaggaggttggctgcttgctcttctctttcagcagtgacatctccaccctgcctgtcccacctctccagaaaggtaggtctgg

SEQ ID NO: 1012083 - DNA, 120 bp, Artificial Sequence
  ENSG00000280953_12 (sequence is synthesized)
ccttgggtaccaggggctcctggttctacaatgagaagctgcaggttacagctgtaagttttgtcctcatgttaacccccttatgctgtctcctccaataatgcatgtggtttggtctct

SEQ ID NO: 1012084 - DNA, 120 bp, Artificial Sequence
  ENSG00000280953_13 (sequence is synthesized)
acaggactcccagaggcctatggactggagctattaacatcctgcagatgggagccactctctcactgtgatcaccaaggtacccagggcctccggaggccacaaagaatggataattgc

SEQ ID NO: 1012085 - DNA, 120 bp, Artificial Sequence
  ENSG00000280953_14 (sequence is synthesized)
aacccacaggtctccttcagattttccccaagcccttctggtcagcaaatgctctatggtggggagtggtgtgaggccttggtccatttcattgctgacattagccctgcaccagcggga

SEQ ID NO: 1012086 - DNA, 120 bp, Artificial Sequence
  ENSG00000280953_15 (sequence is synthesized)
gaacgtttcttcctttaatcaccccaagattagcctgcagttgcctctttctgttggatatttgaataacaagcttgatgaggccacttaactccctccaattacagctaaagatttcct

SEQ ID NO: 1012087 - DNA, 120 bp, Artificial Sequence
  ENSG00000280953_16 (sequence is synthesized)
agatgaaagaccttgatccactgcctttcatgattcagcactggattttctgttccatgcagccttctattggaataattttgtgaaatgaaggcaacaaagtattgttttcttaatcaa

SEQ ID NO: 1012088 - DNA, 120 bp, Artificial Sequence
  ENSG00000280953_17 (sequence is synthesized)
agagaacttcataaaaattgtgctccttgactgctaatttgtcctgcattgttaccgatgcttttcttatgatttttgttttgcactgaacagccccctggctgagagaaaaccccgaag

SEQ ID NO: 1012089 - DNA, 120 bp, Artificial Sequence
  ENSG00000280953_18 (sequence is synthesized)
cagttaagataccaggaaaggaagacttgaaaattgtgagtctttctcagtagaggaggcagtgtgctgttatatgctgatgcagctccttgtcttggactcataactgacagaacagca

SEQ ID NO: 1012090 - DNA, 120 bp, Artificial Sequence
  ENSG00000280953_19 (sequence is synthesized)
tgtggacctcaccgctccttggacttcgagtggcgctactctaacgctgagtcctgacctggatccctgtttgcttgcctagacctaaggcggtggtgcagaccttcccccaccccacat

SEQ ID NO: 1012091 - DNA, 120 bp, Artificial Sequence
  ENSG00000280953_20 (sequence is synthesized)
accatcgccttctggaatgtggctttgtggaactgaggctgagacaatcacagtgccccattcttctggtcatgtgacaggtctggacctggtcatgtggcaaagtcgaatctaagtcac

SEQ ID NO: 1012092 - DNA, 120 bp, Artificial Sequence
  ENSG00000280953_21 (sequence is synthesized)
atcaaagcagggagagttaaagcaaatcttttctctcttgttgtggagctggaatatgagcccagaagcttccagaacacatggtcctgccctcataaagaagctcaagtgagggaacaa

SEQ ID NO: 1012093 - DNA, 120 bp, Artificial Sequence
  ENSG00000280953_22 (sequence is synthesized)
aatcgacttaggtagcagcgagcatggatggggcctggctacatcaagttctcagatcctgttgtccccacccaccccctgtaacttgccaattttatccatcaagcatcctctcctctc

SEQ ID NO: 1012094 - DNA, 120 bp, Artificial Sequence
  ENSG00000280953_23 (sequence is synthesized)
tcccaacttgtctgagttctgtttctgtcattgtcaccaagagagctttgatgagtaagaaatcccaacattccacgggagtcttggtggtttaaatttttaagtgagtcctcacttgtt

SEQ ID NO: 1012095 - DNA, 120 bp, Artificial Sequence
  ENSG00000280953_24 (sequence is synthesized)
aaagtcttattcctgttagagggcacttccatagtccagaaggtggggaattcctataggtgacctgtggtctctctaagcaatttgaccaggactatttaataaaatattttaaaaatg

SEQ ID NO: 1012096 - DNA, 120 bp, Artificial Sequence
  ENSG00000280953_25 (sequence is synthesized)
atgctccttgtcactacagctttatgttttggagaatgacaagtaaattgaacgaagcagtgtgtaacatctttaagaccggcttcactcagcacagtgtctctgagattcatcttagat

SEQ ID NO: 1012097 - DNA, 120 bp, Artificial Sequence
  ENSG00000215881_0 (sequence is synthesized)
gcgtgtggaggacgatggcagcgaggggccatctctaagtttctcaggctgagaaaaaaacatcagtgtgggggaagatttgggacccctgtctgcatctacctggactctcattaaaca

SEQ ID NO: 1012098 - DNA, 120 bp, Artificial Sequence
  ENSG00000215881_1 (sequence is synthesized)
gcaatcagaaagcctggccagctgctcacctccagggcagcttcttgggaagacagtgaacaattctgggggttaagaactgtttttaaaagaaaacactagggaggctggggcaggagg

SEQ ID NO: 1012099 - DNA, 86 bp, Artificial Sequence
  ENSG00000215881_2 (sequence is synthesized)
tgtttttaaaagaaaacactagggaggctggggcaggaggatcgtttgaggcccaggagttggacgctgcagctagctatgattgt

SEQ ID NO: 1012100 - DNA, 120 bp, Artificial Sequence
  ENSG00000186960_0 (sequence is synthesized)
gatttctttgaattcatagaaacgaagtattggagtgggagttctgcttggacccatgtccaaattacatataatggatatgactagaagtttgttaggtgtactagacacgaaggtgga

SEQ ID NO: 1012101 - DNA, 120 bp, Artificial Sequence
  ENSG00000186960_1 (sequence is synthesized)
tatatggagagagaactttgtaaaggcttcctgaagcccaatatgaacatctcatttcccttgatctatcttatcatccctcaacttatcttctcaaaaaacacatgacagtctggcatg

SEQ ID NO: 1012102 - DNA, 120 bp, Artificial Sequence
  ENSG00000186960_2 (sequence is synthesized)
gcatataatacatttttgcatcgaacgggttgtaatgttgtgttatttgttgtctccaactttgaccgttaaaattagtttatgtcagaaatacacttcaaaacttttgaggattatttt

SEQ ID NO: 1012103 - DNA, 120 bp, Artificial Sequence
  ENSG00000186960_3 (sequence is synthesized)
ctttcatattataattgtttttaataagatgaaggttgtcctttgtgaaattttggaactgaaactgatcacaacttaaaacttgaaatcccaaattaaagtttatttccaggtttaaag

SEQ ID NO: 1012104 - DNA, 120 bp, Artificial Sequence
  ENSG00000186960_4 (sequence is synthesized)
tattttacttgaatttgtctgttgtaaagttaacaaaaaatattaatatgtaaaacactgagaaaatgatgtaattgaactagaggagttaaagtattatttcaaatatgtttcttcagc

SEQ ID NO: 1012105 - DNA, 120 bp, Artificial Sequence
  ENSG00000186960_5 (sequence is synthesized)
ctgttacaaaattgggaaccaagtgaacatgaagtctagaactaacaaggtttaatacaaatatccttatggtcatggaagccttcatgtagtttatgtgacttgcataaaatcaaaggc

SEQ ID NO: 1012106 - DNA, 120 bp, Artificial Sequence
  ENSG00000186960_6 (sequence is synthesized)
agagaggcaaaaatttagtctcatagtgtattgattttaatatatatttaagttggtgcatatttcacccaaatacgtggataaattcaatatatttagaagtctatagaagtgtagttt

SEQ ID NO: 1012107 - DNA, 120 bp, Artificial Sequence
  ENSG00000186960_7 (sequence is synthesized)
tttaaaaagtgtattttctacaacattgttgaggaatttgcatgcactgggaaaattttggttttgagaaattaattttatgaacagctaaagtggttggttgtgtttgagactaaaagc

SEQ ID NO: 1012108 - DNA, 120 bp, Artificial Sequence
  ENSG00000186960_8 (sequence is synthesized)
ctgttggagaattagactaacaaagggtgaaggtgaagatcattagaggttttagaactggctgagatgggttgctggggttgtgtaactgtgcctagagggcggggttcctgtacattc

SEQ ID NO: 1012109 - DNA, 120 bp, Artificial Sequence
  ENSG00000186960_9 (sequence is synthesized)
ctacttcaccagataacctgcccccaacaccacttcagcttctgccagacagatggaactctccagcatgaaaatctgcgcagccattccaacaagcagggctctgcctgaggttgtccg

SEQ ID NO: 1012110 - DNA, 120 bp, Artificial Sequence
  ENSG00000186960_10 (sequence is synthesized)
tgatcatcagcttcccatccaataatatctactcatcagtgtgctgttgtcaatcagagattttcaagtatgagttctccaactcaaagaaaagtagctggatccaggaagaaaggcatt

SEQ ID NO: 1012111 - DNA, 120 bp, Artificial Sequence
  ENSG00000186960_11 (sequence is synthesized)
tggggaagaacaacgttctttacagtgctcatgatgtgtctccagagaaagttacttcagcactaaaaaaaacaaacaaacaaacaacaacaataaacaactttcctctacagtatcttc

SEQ ID NO: 1012112 - DNA, 120 bp, Artificial Sequence
  ENSG00000186960_12 (sequence is synthesized)
cagggtctaaactattagacaggttcctaagtttatccagatctctcctatgtctgaattcttggtcatcttccttgcctctggctccacaggtaaagaagaaataataataaaggaaca

SEQ ID NO: 1012113 - DNA, 72 bp, Artificial Sequence
  ENSG00000186960_13 (sequence is synthesized)
atgtttctgtcgggctgactcattccacttttgaagcacccagtggattaattagtcttattattgcattta

SEQ ID NO: 1012114 - DNA, 120 bp, Artificial Sequence
  ENSG00000186960_14 (sequence is synthesized)
gaagcacccagtggattaattagtcttattattgcatttactgtcacctacacatttgtttgtgggaaggcactcctcttggcatttgcttagttggaaaaaggaacactaagactatag

SEQ ID NO: 1012115 - DNA, 120 bp, Artificial Sequence
  ENSG00000186960_15 (sequence is synthesized)
ccactggataatgttcttgaagttcacggcactgtggcagcataaagcttgaacagacctagtttttttattgatggagtgcaactgatgtagcaccacttttctctgacactgtatatt

SEQ ID NO: 1012116 - DNA, 120 bp, Artificial Sequence
  ENSG00000186960_16 (sequence is synthesized)
agcttttagttatgaactacttccttccagtgcagcagttgttgcctaccattggtaccagtttggcaccattataaagaaacattgtacctcttataggaagaatttggagagttttgg

SEQ ID NO: 1012117 - DNA, 120 bp, Artificial Sequence
  ENSG00000186960_17 (sequence is synthesized)
tatggtaatcaagatgtgtattgtaataattaactgaattctgtgaacacactgtttctaccttaagtgaaagaaaaagagaacagctgcaattatttatcttcactcatttctcataga

SEQ ID NO: 1012118 - DNA, 120 bp, Artificial Sequence
  ENSG00000186960_18 (sequence is synthesized)
tagccaggatttttcagtgtacattctcttgtcctgaaattattttcagttcttgttgattcttatagattataatgagaaaggcacgagcaagaaatttgaaataaagaacacaaaatg

SEQ ID NO: 1012119 - DNA, 120 bp, Artificial Sequence
  ENSG00000186960_19 (sequence is synthesized)
cattccaacaagcagggctctgcctgaggttgtccgaaggatgccgaggaaaaggatatcaggactggaatggctcttacagcaagatccatgaagtttcactcttgttgcccaggctgg

SEQ ID NO: 1012120 - DNA, 73 bp, Artificial Sequence
  ENSG00000186960_20 (sequence is synthesized)
ctggcaaaaaaatgtataattttcttattcaaaatcgcctacagcattttaaatgaggaaacctaaactatta

SEQ ID NO: 1012121 - DNA, 120 bp, Artificial Sequence
  ENSG00000186960_21 (sequence is synthesized)
atcgcctacagcattttaaatgaggaaacctaaactattaagaaaaaaattgttcacattttcaatgcataggcaaaggcatgtcgaaatattcattatgtgtgtacagaattccctgag

SEQ ID NO: 1012122 - DNA, 120 bp, Artificial Sequence
  ENSG00000186960_22 (sequence is synthesized)
ttagtagggctctacagagccagttagtaagtgaatgcattatgctatcaatattaggacttttttcctaaaggatgatgaaactatcatgtatgatactcaagtgatggatacacaaca

SEQ ID NO: 1012123 - DNA, 120 bp, Artificial Sequence
  ENSG00000186960_23 (sequence is synthesized)
gcatgcatttgtcaagacccatacaatttatagcacaaaaactgactttaatatacgcaaatttaaaaaattatttgaaaggttgggagttctcagaatgaaatgcatactgtgacaaaa

SEQ ID NO: 1012124 - DNA, 120 bp, Artificial Sequence
  ENSG00000186960_24 (sequence is synthesized)
gaatctaactgcataacatgtacaaaacaatctcactaaaaaaataaggagaaaaggttctggcttaagaaagtttgaaaatgagtggagtctgtaagactaacagcaaataaacttcat

SEQ ID NO: 1012125 - DNA, 120 bp, Artificial Sequence
  ENSG00000186960_25 (sequence is synthesized)
gtaagtattgaactttagttgatatttgttttctgtggtagaatgggttaacgattctaaaaccactacacgtatatattagaattaaacatttaagtcaatggatgtttgaatgatgga

SEQ ID NO: 1012126 - DNA, 120 bp, Artificial Sequence
  ENSG00000186960_26 (sequence is synthesized)
agtcattgtctcactgttgaagctagaggatacagataaatgagagaagactagaatgatccattgggtgatatgaactcattttttagcttaatatagattcagatggatacacctaga

SEQ ID NO: 1012127 - DNA, 120 bp, Artificial Sequence
  ENSG00000186960_27 (sequence is synthesized)
aatatttacagatatatgtatatacaaagttcaatatactcacgtatatttccttattctattagctgagagagtctagaaacaaggatactcaggagcaacaaacatacctcagattca

SEQ ID NO: 1012128 - DNA, 120 bp, Artificial Sequence
  ENSG00000186960_28 (sequence is synthesized)
aataccggtttctagaattatccaattagaggaagtagggcctcttaaagaaacgcctgattctaggactgaagcagaaaacatacaagatgaactgagagaaccttgtagtgtcagaaa

SEQ ID NO: 1012129 - DNA, 120 bp, Artificial Sequence
  ENSG00000186960_29 (sequence is synthesized)
gtaagaaagtgctcaagacacacacacacacacacacacacggtctatcagtcagtgacgggttactcaagaggaaacataagagttcccaatgggcaaagctggaatgatttcagcaac

SEQ ID NO: 1012130 - DNA, 120 bp, Artificial Sequence
  ENSG00000186960_30 (sequence is synthesized)
caacaaaattaataaaatagtattggattatagccaaaagtataagataaatatccaggagtccatattgatataaataaataagtaaacaaacaaagaataaacaaatattctgtgcta

SEQ ID NO: 1012131 - DNA, 120 bp, Artificial Sequence
  ENSG00000186960_31 (sequence is synthesized)
tttatgtagatactctaccttcaaggagatggaacataactcttcctcagtccttaagtgtgaactgtgcatagcgacttccttccaaggggtacagtacataaatgggggtaaaagagt

SEQ ID NO: 1012132 - DNA, 120 bp, Artificial Sequence
  ENSG00000186960_32 (sequence is synthesized)
aactttatagccaagaaacctgacaaacagccaagtgatcaagattaacattaacagggacaactcatgttgataatacctactcttgatatgatgtaatgaaaaagacagttctatgtt

SEQ ID NO: 1012133 - DNA, 120 bp, Artificial Sequence
  ENSG00000186960_33 (sequence is synthesized)
cttcctctccaaaacacatgattccagtacaattgtaagaaaaacataaagcaaatccccaaagggcgacattgacaaaatacctgaccagtactgctccaaactgtcagggtcattgaa

SEQ ID NO: 1012134 - DNA, 120 bp, Artificial Sequence
  ENSG00000186960_34 (sequence is synthesized)
aacaaggagtctgagtaattgttgcagccaagaggcacctgagaacatgtgacaaattaatgcagcatcttcgatggactctcagtcccaaaaagatcatttgatgaaaactaaggaaat

SEQ ID NO: 1012135 - DNA, 120 bp, Artificial Sequence
  ENSG00000186960_35 (sequence is synthesized)
aatatggactttaggtaataataatatatcaccatttatttattaattgtgataaatgtatcgtactaataagatgcttatagtaggagaaacagtatgaagtatatgggggttctctgt

SEQ ID NO: 1012136 - DNA, 120 bp, Artificial Sequence
  ENSG00000186960_36 (sequence is synthesized)
attacctttacaactctttagtaaatttaaaattgttctaaaataaaagtttatttaaacaaactcttattaagcactctacttgctacaattcctgcattctacaatgccagactgagt

SEQ ID NO: 1012137 - DNA, 120 bp, Artificial Sequence
  ENSG00000186960_37 (sequence is synthesized)
tttccaatttttattttcagcaaacctctattactacaggtctagctcagtcagaatcaactctcaccagcttaaggataatgtgagagcaacttaagctgacagaatcaattgcttcag

SEQ ID NO: 1012138 - DNA, 120 bp, Artificial Sequence
  ENSG00000186960_38 (sequence is synthesized)
gttgtctttgcaaaaatccctggtgttatgtatctgtcctgtctctcctatttgtctaccccagctgctatataatttcttattgcttatttacttgtcatagaatatttgccaagatct

SEQ ID NO: 1012139 - DNA, 120 bp, Artificial Sequence
  ENSG00000186960_39 (sequence is synthesized)
acatctacagctcaaatagtgactatttgcagacttcaaatgcatcatatggtttatttaagtaggagtgtatgtgtgtgtgtttgtgtgtgtatgcacagaggcacacacgtgaacatt

SEQ ID NO: 1012140 - DNA, 120 bp, Artificial Sequence
  ENSG00000186960_40 (sequence is synthesized)
tgccaatgctttatttttatttttgtttttaatttttatagattcaggaagggcttatgcagatttcttataaggatatattatataatggtgaggtttgggtttctggtatactcatct

SEQ ID NO: 1012141 - DNA, 120 bp, Artificial Sequence
  ENSG00000186960_41 (sequence is synthesized)
cccaaataatgaacattgtatccaacaggtaatttttcaaccctccccttctttccgccctccctccttttggagtcagcagtgtctattatttccctctgtatgtccgtgtgtacccat

SEQ ID NO: 1012142 - DNA, 120 bp, Artificial Sequence
  ENSG00000186960_42 (sequence is synthesized)
tgtttagttcccacttataagtaagaacgtgaggtatttgattatctgtttccaagatatttccaatgctttatttatttaaagtaggtctctctccaaccttgctccatgacaaactcc

SEQ ID NO: 1012143 - DNA, 120 bp, Artificial Sequence
  ENSG00000186960_43 (sequence is synthesized)
caccacaaatatgaaatatttttttctaatttttatcatctcaactttgccaaatagatttgtatcactctatgttttcatataaaactttatgccatagtttattaaattcttgatatg

SEQ ID NO: 1012144 - DNA, 120 bp, Artificial Sequence
  ENSG00000186960_44 (sequence is synthesized)
aaagagaagaaatttagtgcaagtaatttatgccccaaatattgtttcacttcacattatattttttagttttattatgttattattattatcacagtattatttacaacgttgactggt

SEQ ID NO: 1012145 - DNA, 120 bp, Artificial Sequence
  ENSG00000186960_45 (sequence is synthesized)
atttgtcacatatttgtaaatgacatgataccaatatattttcaatttttaaattttgaaataacttcaaatttacagcaatgttgcaagaatattacagaaaactcctagatattcttt

SEQ ID NO: 1012146 - DNA, 120 bp, Artificial Sequence
  ENSG00000186960_46 (sequence is synthesized)
tccaagctttactgatttaagaaattttaataattgcatcaaaaacaatacatcggttaggacttaatttaatcaatgaggtgaaagatctgaacactgaaaactataagatattgaaga

SEQ ID NO: 1012147 - DNA, 120 bp, Artificial Sequence
  ENSG00000186960_47 (sequence is synthesized)
agacacaaataaaatggaaagctatcctatgtttatggcctggaagaactactattgttaaacgtccttactacccaaagtgatctacagattcaatgcaatccttatcaaaattttaat

SEQ ID NO: 1012148 - DNA, 120 bp, Artificial Sequence
  ENSG00000186960_48 (sequence is synthesized)
gccacttttcatagatatagagaaaacaattctaaaattcaaataaaaccacaaaaggccccaaatagccaaagcaatcttgagaaagaataaaaaagctggagatgttatacttcctga

SEQ ID NO: 1012149 - DNA, 120 bp, Artificial Sequence
  ENSG00000186960_49 (sequence is synthesized)
attcaaactatattacaaaactatactaatcaaaacagtatggcacttccctcaaacagatacacagaccagtgaaattgaattgagagctcagaaatcaactcatacatgtatgatcaa

SEQ ID NO: 1012150 - DNA, 120 bp, Artificial Sequence
  ENSG00000186960_50 (sequence is synthesized)
ctaattcttgccactgtttaaagaatacacaatggagaaagaatagtctcttcaagaaattgttttgggaaaactggatatccacaaaaatgaaactggactcttttcttacactatcca

SEQ ID NO: 1012151 - DNA, 120 bp, Artificial Sequence
  ENSG00000186960_51 (sequence is synthesized)
caaaaaggagctcaaaatggattacagatttgcatataagacctgaaactataaacttctagaagaaaacatagggacaaagtttcttgacattggtcttggcaatgatttttttggata

SEQ ID NO: 1012152 - DNA, 120 bp, Artificial Sequence
  ENSG00000186960_52 (sequence is synthesized)
gaataacaaaagcacacgcgagaaaggcaaaaatagacaggtgagattacaccaaattaaaaagctttcgaacagcaaatgaaacaaccaatgggatgaaaaggacacctacagaatgga

SEQ ID NO: 1012153 - DNA, 120 bp, Artificial Sequence
  ENSG00000186960_53 (sequence is synthesized)
agataatacttgcaaaccatatatataataaagagttaacattaaaaaaatacaaggagcttatacaattcaatagcacaaaaaccactcatttacaaaatgggtgaagagcatgaatat

SEQ ID NO: 1012154 - DNA, 120 bp, Artificial Sequence
  ENSG00000186960_54 (sequence is synthesized)
acatattctcaaagaaaacatacaaatgaccaacaggtatatgaaaagtttctcaacatcaatgagcattaaggaaatgcatatcacctcacacttgttaggatggctattataaacaag

SEQ ID NO: 1012155 - DNA, 120 bp, Artificial Sequence
  ENSG00000186960_55 (sequence is synthesized)
acaagagataaaaagtgttggtgatggtgtagagatggtatgtttcccttgtacactttggtgaaagtgtatattggcacagtcattgtggaaaacactatggtgatacctctaaaattt

SEQ ID NO: 1012156 - DNA, 120 bp, Artificial Sequence
  ENSG00000186960_56 (sequence is synthesized)
aaaatagaactatcatatggtccagcaatctcactactgagtgtatgtccagagaaaatgaaatcagtatctcaaaaagctacctgcactcccatgttcgttgcagcattatttacaatt

SEQ ID NO: 1012157 - DNA, 120 bp, Artificial Sequence
  ENSG00000186960_57 (sequence is synthesized)
gccaacatatgaaagctacctaaatgtctattgatggataaatggaaaaataaattatggtacatattgtatatacaattgaacattattcatccataaaaaaggaaatcttgccttttg

SEQ ID NO: 1012158 - DNA, 120 bp, Artificial Sequence
  ENSG00000186960_58 (sequence is synthesized)
tgacatcatagatgaacctggaggacattatgctgtgtgaaataaaccagtcatagaaagacaaattgtattatctcatttatatattaaattaaaaaaactcaaactcacagaagcagg

SEQ ID NO: 1012159 - DNA, 120 bp, Artificial Sequence
  ENSG00000186960_59 (sequence is synthesized)
aagtagaatggtggttgccagaatttgtttgggtcagaggtggaaaaagcgatgatgttggtcaaagggtacaaactctcagtaataaaagggatctaatgtattgtgcaatgactacaa

SEQ ID NO: 1012160 - DNA, 120 bp, Artificial Sequence
  ENSG00000186960_60 (sequence is synthesized)
ttcataatattgcattgtttacataaaatttgctgagagtatatcttgagtgttcatacacaaggtaactgtgagatgatgaatgtattaattagcttgattgtggtaatcatttcataa

SEQ ID NO: 1012161 - DNA, 70 bp, Artificial Sequence
  ENSG00000186960_61 (sequence is synthesized)
ataggtctggatctcctgacctcgtgatcagcgcgcatcagcttcccaaagtgctgggattacacgtgtg

SEQ ID NO: 1012162 - DNA, 120 bp, Artificial Sequence
  ENSG00000186960_62 (sequence is synthesized)
gtgctgggattacacgtgtgagccactgagcctggcccatttttttttctttgtttacttgataatattgcaaatgtaattaatgctcctaattcttctagggcaaatctactcatttaa

SEQ ID NO: 1012163 - DNA, 120 bp, Artificial Sequence
  ENSG00000186960_63 (sequence is synthesized)
agtgagatggagtatttctgaaataattggggacataggatgatttagaatccagtttaatacttgagacagtgtatatttctgaataaatttttccaataaaaacaatctgactttact

SEQ ID NO: 1012164 - DNA, 120 bp, Artificial Sequence
  ENSG00000186960_64 (sequence is synthesized)
tgatcgccgccagccgcccaggcttcggggaaggagggaggggagaataatgcgcccctctttcaataaacgccactgccaaccactccaacagacacactttcggtcccccgccagagc

SEQ ID NO: 1012165 - DNA, 120 bp, Artificial Sequence
  ENSG00000186960_65 (sequence is synthesized)
tccggtgcccccgagtgaccgctttctgcgatcgcgtccgccgggaccccgtccctctttccccttcagtcttcagggagggggaggcgctccgcattagcggggcagttcagcaacccc

SEQ ID NO: 1012166 - DNA, 120 bp, Artificial Sequence
  ENSG00000186960_66 (sequence is synthesized)
gaccccacccgcgtggctccaggcccaggggtccgttcacttccccgtccggtttgggggacgccaattcgcctaagaaaaccctggcagaagagcgcggacccttcactacaaacctca

SEQ ID NO: 1012167 - DNA, 120 bp, Artificial Sequence
  ENSG00000186960_67 (sequence is synthesized)
cgtcagggttacagccacatttaggaacctcttcggaaaagctgagaaatcactgttttgcaaaaagccttctgtactgtgatggggctttgtggtgagaggaacctctgagaagcctcg

SEQ ID NO: 1012168 - DNA, 120 bp, Artificial Sequence
  ENSG00000186960_68 (sequence is synthesized)
tgcggcttgagtttagagtcacgccctgcccagcgacattctcccgcgcacgggagaacctgcacttccggtctccaaccctcgcgggccgtgactcttcccctcccccgcgccgggccc

SEQ ID NO: 1012169 - DNA, 120 bp, Artificial Sequence
  ENSG00000186960_69 (sequence is synthesized)
tgcatttccggcccccttgctctcctgcacttccgcccagtcacatggatgatggatagcgttgggagctgttttctctatcttccaggtggctgctgggatcctaaacttgtttcttta

SEQ ID NO: 1012170 - DNA, 120 bp, Artificial Sequence
  ENSG00000186960_70 (sequence is synthesized)
atttctctttaaaaattgaatgtcctttagtttttttcacttccttaaatttgagggtcgagaaagctagaggtggagacaaaaggctcattgaagacaaatcttttttggcttttcaga

SEQ ID NO: 1012171 - DNA, 120 bp, Artificial Sequence
  ENSG00000186960_71 (sequence is synthesized)
tcacttacccctttctgaattccctgtacaaattcataccagtaactgagatttaggcctccagggcctaggccagtgtctgcacttagtaggcacgcaatacatgttgaaagaattact

SEQ ID NO: 1012172 - DNA, 120 bp, Artificial Sequence
  ENSG00000186960_72 (sequence is synthesized)
atcttcaaatcaggtgacttctgtttttggctgaatttagttgaaaagttgataaatacatggtttttacaggcacttaagtgttatttatttagggactccccaaaacaggtgtggggg

SEQ ID NO: 1012173 - DNA, 120 bp, Artificial Sequence
  ENSG00000186960_73 (sequence is synthesized)
aaaatcaccacaaattgttggaaaaatatatatatagggtttttttgttgttttttgtttgtttgtttgttttttctgatacatggtcttgccctgttgcccaggctggaattcagtggc

SEQ ID NO: 1012174 - DNA, 120 bp, Artificial Sequence
  ENSG00000186960_74 (sequence is synthesized)
ggttctcaccatgttgcccaggctggtctggaattcctgacctcgggtgatacgcccactggacctcccaacgttttgggattacaggcctgagccaccgcacctgtgctgaaaatattt

SEQ ID NO: 1012175 - DNA, 120 bp, Artificial Sequence
  ENSG00000186960_75 (sequence is synthesized)
ggtccacttctgactcccccctcacccgccctcccctgcaagtaagactcaatttctatgattcaacaccgccttcaccagctcctctatcaaaccttgagaggtttttcattagtcaat

SEQ ID NO: 1012176 - DNA, 120 bp, Artificial Sequence
  ENSG00000186960_76 (sequence is synthesized)
tggaatggctcttacagcaagatccaacgatagggccttgggagatggaaaaggaattaatcttctcaccctggcgagttttcctgaaactacttatccttagcgtcagcgctgtaagag

SEQ ID NO: 1012177 - DNA, 120 bp, Artificial Sequence
  ENSG00000186960_77 (sequence is synthesized)
gtggagccgctcagtcccgcgggtggctgcagacagaagcccttgaagttaacgtagcgacgacgtggtccttgtaggaccaagcattcttggcattctgtcgagattgagattccagag

SEQ ID NO: 1012178 - DNA, 120 bp, Artificial Sequence
  ENSG00000186960_78 (sequence is synthesized)
gacttatagctaaggcgtactcacccacccctcccttcgtctttttacgcacgcagcaactcgtcctcacgtgcataggggtagtggacagtgttgacttgaattgctgtccctcgttcc

SEQ ID NO: 1012179 - DNA, 120 bp, Artificial Sequence
  ENSG00000186960_79 (sequence is synthesized)
aagcctttcctgtgaatgaacccgaaaacactcgacaggtcgtgaataatcgttttaatgagtgtgcaaagcgtgcgacggggtgcaccgagctgtcgggttaaacaaacaacttgtacc

SEQ ID NO: 1012180 - DNA, 120 bp, Artificial Sequence
  ENSG00000186960_80 (sequence is synthesized)
ctgaccaaatccgattgttaaagtgcaaagtgatgtcagtaccatttccattgcctttcggaaatccacagatctgacacgcgggagtccaattttccccattaaagaaaaataacaata

SEQ ID NO: 1012181 - DNA, 82 bp, Artificial Sequence
  ENSG00000186960_81 (sequence is synthesized)
tgctctcctgcacttccgcccagtcacatggatgatggatagcgttgggagctgttttctctatcttccaggctggaaatcc

SEQ ID NO: 1012182 - DNA, 120 bp, Artificial Sequence
  ENSG00000260420_0 (sequence is synthesized)
agtgtcgggcgcgggtgctcccaaagcgcagcgggcccacctcccccggcagaggatcgtgcggcggtcaaagtcgcacacggggcttctgagacgtgcggcccgggcctaagagctgca

SEQ ID NO: 1012183 - DNA, 120 bp, Artificial Sequence
  ENSG00000260420_1 (sequence is synthesized)
tgaaagggaagtgtcagctgttcttctgtctttaaaaggcagcaaagaaaaaagcgcagggttgggtttcgtaacgtcagaggaggccaaggacacagcatggaatctgacgggaaacgc

SEQ ID NO: 1012184 - DNA, 120 bp, Artificial Sequence
  ENSG00000260420_2 (sequence is synthesized)
atgtgggcgaggaggtgatgggcttcaaggcgcggctctctggtcgcaagccgcctgttctcagaatacagctggctgtgttgtaatcgcacgctgatctcacaataaataacgtgtgca

SEQ ID NO: 1012185 - DNA, 120 bp, Artificial Sequence
  ENSG00000260420_3 (sequence is synthesized)
tgtcatttcagtgtcggagcagggagggacctgcttgttttagagaagggggttcacctgggacacccctgagctttgtcccaagcctcaacaagccactcacttcccacttgggagtag

SEQ ID NO: 1012186 - DNA, 120 bp, Artificial Sequence
  ENSG00000260420_4 (sequence is synthesized)
tttctctgcacgcaccaggcagtgggaccagggaagaaatcgcgtccgctaagtggtgtcgtctgcctgcaagacctgcacagctcccaggcctatggctttgggcaccaggacggtgcc

SEQ ID NO: 1012187 - DNA, 120 bp, Artificial Sequence
  ENSG00000254303_0 (sequence is synthesized)
gtttacctggctaaggcatgacaccgcttccctttcagattccggtgcagtcctctgaccatattgggaaggatatgtaaaatgatacgagtttcagggaataagaatgggggtgagagg

SEQ ID NO: 1012188 - DNA, 86 bp, Artificial Sequence
  ENSG00000254303_1 (sequence is synthesized)
aatgatacgagtttcagggaataagaatgggggtgagaggaatcactgaggatgcccaaggacaaagcagccggaacaagacagag

SEQ ID NO: 1012189 - DNA, 120 bp, Artificial Sequence
  ENSG00000254303_2 (sequence is synthesized)
cagtgggtgcaatccacgaagtgtgagccaaagcagggcggggcatcacctcacccaggaagtgcaagaggtcggggaattccctttcctagctgagggaagccatgacagatggtacct

SEQ ID NO: 1012190 - DNA, 120 bp, Artificial Sequence
  ENSG00000254303_3 (sequence is synthesized)
gcagtctgagactgaactgcaaggtggcaatgaggctgggggaggggggtccaccattgctgacgtttgagtaggtaaacaaaacactccagcctgggcgacggactgagactctgtctc

SEQ ID NO: 1012191 - DNA, 120 bp, Artificial Sequence
  ENSG00000254300_0 (sequence is synthesized)
attttttaaaatgtaaatggagtaaatgataaaatgtagactgaatttatcataaagacattttcttttggtatactgcaaggaactatgaacttttagtaactactataagcaactgac

SEQ ID NO: 1012192 - DNA, 120 bp, Artificial Sequence
  ENSG00000254300_1 (sequence is synthesized)
aggaaaaaatggcaacagaagaaggaaagaggagagaatggggagcagacactaaggtgtagtgaaaggaggaaaatgaaggctaagtctaatgatgtgaatcctctttgcaattccatc

SEQ ID NO: 1012193 - DNA, 120 bp, Artificial Sequence
  ENSG00000254300_2 (sequence is synthesized)
aaaggagggatcttcctactgaccagaagacctgaacagcctgagaatgattcctttcaactccgagagaagaagctgcagatgaagagcaatcctgggatacatgtgcagaatgtgcag

SEQ ID NO: 1012194 - DNA, 120 bp, Artificial Sequence
  ENSG00000254300_3 (sequence is synthesized)
acccatcaactcgtcatctacattaggatactgtttactgaaaacccaccaatctgatcttttatgagaagctagtccctgaaaaggcccttggatcaaaggtcaaaaacttgaagcaca

SEQ ID NO: 1012195 - DNA, 120 bp, Artificial Sequence
  ENSG00000254300_4 (sequence is synthesized)
gaaaaggcccttggatcaaaggtcaaaaacttgaagcacagagtgggatgtcagatgccaagatttaaatctagtcatttgattccagagcccacattcttaaataatatgctacactga

SEQ ID NO: 1012196 - DNA, 120 bp, Artificial Sequence
  ENSG00000254300_5 (sequence is synthesized)
tacactgacctttattgtctttaaacattatctttatttaatgtgtttcatagaaattacttctcaggtattcctaaatttatttttaaaaataatgtcatgctatcactataatatagt

SEQ ID NO: 1012197 - DNA, 120 bp, Artificial Sequence
  ENSG00000254300_6 (sequence is synthesized)
gaaaaatctaacatctggttcttaaaagtaagttgaaatataagatcagatttgaatgcacatggaaaaatagaactggcaaataatgccatatttgaagatcttttagtattctctggt

SEQ ID NO: 1012198 - DNA, 120 bp, Artificial Sequence
  ENSG00000254300_7 (sequence is synthesized)
atttttcctttcatttcaaaattgttatattctttttaatgacttcaaatgaattaggaaatgtcaggcttctaaaaatcaaacagaacgtccaaccagtagatttcattcagggcagtg

SEQ ID NO: 1012199 - DNA, 120 bp, Artificial Sequence
  ENSG00000254300_8 (sequence is synthesized)
ggagcctgttcggttgtttcctctttccccctcacttttaaaaatcctcaatcactgccatttctcttctcagctttcacaacactttacaggcagctgaatgaaagggcagaagcttcc

SEQ ID NO: 1012200 - DNA, 120 bp, Artificial Sequence
  ENSG00000254300_9 (sequence is synthesized)
tctgaaactcctgttatttcagctctaaaatcagctgaaaaggatgccctccccagagacagaaatgcattccctccatcatgaacctgcaatgccctcaggttgtggcaagggagaagt

SEQ ID NO: 1012201 - DNA, 120 bp, Artificial Sequence
  ENSG00000254300_10 (sequence is synthesized)
ttagcacttgaacctagataacgctatttttttaatcaaagtgcaccattcttgtttcatatggcctgtggcacaatttatttaaaacaatatggtgcatcaaagaaggtaaacaataat

SEQ ID NO: 1012202 - DNA, 120 bp, Artificial Sequence
  ENSG00000254300_11 (sequence is synthesized)
aacaataataataatataggaatagcaatgtgcacataaataatataggaaaacacatggcctcagtaccttcatgaaatgggacttcaatatacatatttcttatacagctttatgcat

SEQ ID NO: 1012203 - DNA, 120 bp, Artificial Sequence
  ENSG00000254300_12 (sequence is synthesized)
gcatgacttcattgcacttcactgctctgttgtgtcactctaccaataaacctatacatcatactgagtgaagtatgttcacagtccctttacttgacaaaaaaaaaaaaaaaaaaaaaa

SEQ ID NO: 1012204 - DNA, 120 bp, Artificial Sequence
  ENSG00000260423_0 (sequence is synthesized)
cacgtctgatgatcatatagaagccagactaagattcagccacaaatgttatgcctaaacatttcttattatttctttttaatgtttctcatgtatacaatcaaactcgcaccctagtat

SEQ ID NO: 1012205 - DNA, 120 bp, Artificial Sequence
  ENSG00000260423_1 (sequence is synthesized)
tattggcaggctaatatatgcccatgagacatgtagcttaaatctctatgggataggataagtattctccctttgtttgtgatttgaaagctttccatggatgctaaagcgatttgttaa

SEQ ID NO: 1012206 - DNA, 120 bp, Artificial Sequence
  ENSG00000260423_2 (sequence is synthesized)
aataccttcacctgtaagtgtttttcctctcttaaaagcctaattcatctctgagtttgtttactaaaataatctaatttgctcattttctctagccattccaagctaaatcccaggaag

SEQ ID NO: 1012207 - DNA, 120 bp, Artificial Sequence
  ENSG00000260423_3 (sequence is synthesized)
tactaaagaagcaatgcacagacacagtatcatacaatttgagacacagtattataaaattgatgtgaacttctaggcacagtgtgctcacagtctgtctggaaataactttgtagcaag

SEQ ID NO: 1012208 - DNA, 120 bp, Artificial Sequence
  ENSG00000260423_4 (sequence is synthesized)
catagttccagtctagctgcctggcagcctggcaggatattattattactgatactaatttactttttaatgtaagtctacccagaatatattaaagaagtttcaagaaatcaggatcat

SEQ ID NO: 1012209 - DNA, 120 bp, Artificial Sequence
  ENSG00000260423_5 (sequence is synthesized)
ggattataacctgacgtagtgctaaggaaccatcagttccatgtaagcatttggttagcaagtctttttcaaaggccatgcttgagaaacagttttgctctcccaaacaatgtgttgtag

SEQ ID NO: 1012210 - DNA, 120 bp, Artificial Sequence
  ENSG00000260423_6 (sequence is synthesized)
aatgagatattaatgccattgcaagttctggctttgtgtagagttttctagtgaagcctgtttaggatcctggatttgtccaagctgttctgattatcccatcatttttaacatggataa

SEQ ID NO: 1012211 - DNA, 120 bp, Artificial Sequence
  ENSG00000260423_7 (sequence is synthesized)
tctacaatctttcatctattacataaattgaattctggcacaagttcaactgctcttcattgaaactgagaaaaattttaggatcactttgctggaatccaaagaagatgttaaatacta

SEQ ID NO: 1012212 - DNA, 120 bp, Artificial Sequence
  ENSG00000260423_8 (sequence is synthesized)
ccaaaaaaaaaaaaaggctgaaaactggtttccaagaatctctggggcatccttaagaactccccttgcatgttcattagacggccctttacccaatgtatctctaatagtctgctgaaa

SEQ ID NO: 1012213 - DNA, 120 bp, Artificial Sequence
  ENSG00000260423_9 (sequence is synthesized)
atactcaaaggagtcctcattagagggaagcagaaagaccaaagtcagagacggagatgtggccgtagaagcagaggtccatgtgctgcggggccatgagccaaggaacccacgccgcct

SEQ ID NO: 1012214 - DNA, 120 bp, Artificial Sequence
  ENSG00000260423_10 (sequence is synthesized)
ctgggaactgggaaaggcaagggagcaacgtctccctggagctccagagtgagccagccctgatgacaccgtgacttcagccctcggagactgactgtggacatcggacctctgtcacta

SEQ ID NO: 1012215 - DNA, 120 bp, Artificial Sequence
  ENSG00000260423_11 (sequence is synthesized)
ttttctgcaaactaggaatagaagcaagcttcttaacctgatgtatcgcaccttcaaaaagcctacagcaaacatcttacttagtgatgaaaaactgattgccttccccataagattgag

SEQ ID NO: 1012216 - DNA, 120 bp, Artificial Sequence
  ENSG00000260423_12 (sequence is synthesized)
aaccaggcaaggatgtttactctcatcactcctatccaacatggtactggaagtcctagccaatacaataagggaagaaaatgacacaaaataaaggtagtaagattagaaagaaagaaa

SEQ ID NO: 1012217 - DNA, 120 bp, Artificial Sequence
  ENSG00000260423_13 (sequence is synthesized)
gacaacacacggatccaggcctgcttcgaagtcagtgggatgcggcccttgaaagtcgatgtattgggttcctagggctctcgtgaaaacatgccacacctggctggttttaaacaacag

SEQ ID NO: 1012218 - DNA, 120 bp, Artificial Sequence
  ENSG00000260423_14 (sequence is synthesized)
gagtttattctgtcagttgagaaggctacaagtgcaaaatcaaggtattgacgggatgagttccaactagaggctgtgaggcagatcaactccatggctctctcctggcttctgctggtt

SEQ ID NO: 1012219 - DNA, 120 bp, Artificial Sequence
  ENSG00000260423_15 (sequence is synthesized)
tctggcaaccgttcacttcccatgcctggtagacacatcactctaacctctgcctccctttttcatgggcacattcgcgcctgtgtgtgtgtgtgtgtggatgtgtgtgttaaggacagc

SEQ ID NO: 1012220 - DNA, 120 bp, Artificial Sequence
  ENSG00000260423_16 (sequence is synthesized)
catgttctgggactgtcttctgagagatgtctcccccaggatccttccaggtggaaggatgccctttgacctgcaaagccaggcagaaaaccaggatcagggcaggacaagaggatgcta

SEQ ID NO: 1012221 - DNA, 120 bp, Artificial Sequence
  ENSG00000260423_17 (sequence is synthesized)
gcctgtgatggctcccactcaggtgggatgtgagaagtgcctgtggcctgggacacaccaacttgctcccgttacctcatctgagatggactgcacagtgtatgtccagggcccaacccg

SEQ ID NO: 1012222 - DNA, 120 bp, Artificial Sequence
  ENSG00000260423_18 (sequence is synthesized)
gtacactgtgcctttgcaatgctgtctctgtgctttggaaattcactcagcccactgcgtggggtggtctgaggcgggccacaaccatttctcaaccatccctgagtacctgaccagtat

SEQ ID NO: 1012223 - DNA, 120 bp, Artificial Sequence
  ENSG00000260423_19 (sequence is synthesized)
ccctcgggggtgacgacgaccgcctacatctggagcatgaggagcgtgtttacctggtgagtaaggatgcaagcataggacgtcctggccgatcctctgcacaagcaatgcctttgctcc

SEQ ID NO: 1012224 - DNA, 120 bp, Artificial Sequence
  ENSG00000260423_20 (sequence is synthesized)
aacgggatgggcaacgttggattaggcctgaggcagatttgatctcggaagatacattcgagtctatgtgttttgtgcatttatttttgtttccttgaattaacatggagtccatttcaa

SEQ ID NO: 1012225 - DNA, 120 bp, Artificial Sequence
  ENSG00000260423_21 (sequence is synthesized)
ttgtcattttgccttttctagaatttcaggtaaaagaatcctacagtaggtatcttttgtgtctggctgctttcacttagtgtaaagctcttgagaggtatccgtgttagatgtgtatcg

SEQ ID NO: 1012226 - DNA, 120 bp, Artificial Sequence
  ENSG00000260423_22 (sequence is synthesized)
gtaagttgccctgttttattactgaatatattccgctctatggatgtaccacagtttgtttatccatttatcagctgaaggccacttgggctgctctcggtttgtggggagcagagggaa

SEQ ID NO: 1012227 - DNA, 120 bp, Artificial Sequence
  ENSG00000260423_23 (sequence is synthesized)
gctgctggaacattcttgtacagattgttgtgtggaaatctgcttttatttgtcctggataaacacttaaggggaaggatcgctgggtcttatgtttgactttataaggaactgctgaac

SEQ ID NO: 1012228 - DNA, 120 bp, Artificial Sequence
  ENSG00000260423_24 (sequence is synthesized)
tgttttccacagcagctgtgccatcttgtatgtccgtcagcaccgtgtgagagttcccctgctctgcaggcttgccaacgcagatgtgtcttttgatttcacctgttctagtgtggatac

SEQ ID NO: 1012229 - DNA, 120 bp, Artificial Sequence
  ENSG00000260423_25 (sequence is synthesized)
tgtgtcttttgatttcacctgttctagtgtggataccgttgtggtttcaagttgcatttccctaatgaataatgatgttctgaatcttttcaggcacttttttttttttttttttttttt

SEQ ID NO: 1012230 - DNA, 120 bp, Artificial Sequence
  ENSG00000260423_26 (sequence is synthesized)
ggtcaagccttttacccatttaaaaaatcaaactgttttcttattgatttataagatagaagctaggcatagttgcatctgcctgtagtcttaactacttggaagcccaaagcaggatga

SEQ ID NO: 1012231 - DNA, 120 bp, Artificial Sequence
  ENSG00000260423_27 (sequence is synthesized)
tcacttgagcccacgtgtctgaggtcagcctgggcgacatggtgagaccctgtcactaaaaataaacagaaagtaaagatacatatatatctcactgtgctaggctgaatgatggcctcc

SEQ ID NO: 1012232 - DNA, 120 bp, Artificial Sequence
  ENSG00000260423_28 (sequence is synthesized)
caaagatgttcgcaacctaatctgtaaaaactgtgagtttcttaccttacctggcaaaagggactttgcagatgtgattcaactaaggatgttgagatggggagattctcctgggttacc

SEQ ID NO: 1012233 - DNA, 120 bp, Artificial Sequence
  ENSG00000260423_29 (sequence is synthesized)
attttaactctgtgttccataatgtctaaatactcaaatttagagttgacagccatacagcaaattattcaagttgctgtcaaaaaaaaaaaatccctgcgttttctaggattaaaactg

SEQ ID NO: 1012234 - DNA, 120 bp, Artificial Sequence
  ENSG00000260423_30 (sequence is synthesized)
tgaatagagtactggaagaaaaaaaagtcatagactcagatgcaaaatgacaacatttaatgggatgataaggaaataagacttgacaagaaaccatagcccactgcagactgttcacga

SEQ ID NO: 1012235 - DNA, 120 bp, Artificial Sequence
  ENSG00000260423_31 (sequence is synthesized)
gaccagctaaagtgcccaaggaaatggaacagcagggagaggggacatcacacacaccaccaaaacctcttcttcatcatggcctatgaacagccaaagggtaaaatgatcagaaaactg

SEQ ID NO: 1012236 - DNA, 120 bp, Artificial Sequence
  ENSG00000260423_32 (sequence is synthesized)
gacagtttttgacagtctactattttcagagaagagaatgtcccagctagaaatgcaagtggacgagtgccaacccgatgaggccaatgatttgcgagtggagacctctgaggaacttgc

SEQ ID NO: 1012237 - DNA, 120 bp, Artificial Sequence
  ENSG00000260423_33 (sequence is synthesized)
tcttcatgggacccatcctgaccctccaagaaagcagaaaaggaggttcctgatgcaaaacctaaagagctttcatctgaggaagcctctgccttttgggtcaacactgaggggagtaaa

SEQ ID NO: 1012238 - DNA, 120 bp, Artificial Sequence
  ENSG00000260423_34 (sequence is synthesized)
gatttaacaaactggtttctaccactttcggcctgaagtgacagtgttttttaacgttggttgcaggcaggggactgttgccccctgccaagcacttcagcttccttgcccggcctctcc

SEQ ID NO: 1012239 - DNA, 120 bp, Artificial Sequence
  ENSG00000260423_35 (sequence is synthesized)
agttgagaaggctacaagtgcaaaatcaagatcctatcatacatatctataagaaattgaagcatccaattatccttggaaggaaaaaagaaaaactttaaagaaaaaaaaatatggcta

SEQ ID NO: 1012240 - DNA, 120 bp, Artificial Sequence
  ENSG00000260423_36 (sequence is synthesized)
aacttacattttccaagtagaaaagaacatggtcattcttgacttcagtcttcatcacttggcccttgttttcaagctttgaagaaattgttagggaaggatagagaatagattttagaa

SEQ ID NO: 1012241 - DNA, 120 bp, Artificial Sequence
  ENSG00000260423_37 (sequence is synthesized)
caaatgacagcgccactgcagaactcaatgtccactcttttctacgtcacgttctgttttatggaacattccttggtgccgtgatgttttcataaacacaggtagcaactaaagaaaaat

SEQ ID NO: 1012242 - DNA, 120 bp, Artificial Sequence
  ENSG00000260423_38 (sequence is synthesized)
atatgatgaaccatgggaaatactgactgctaattggtacaaattaagtaaaccagctctccagtgttagcgcaaaaatacaaaggtgaatgttgaagaagaactctatagttttgtttt

SEQ ID NO: 1012243 - DNA, 120 bp, Artificial Sequence
  ENSG00000260423_39 (sequence is synthesized)
gctaaactatggctgaacaagtatttattttatctttatactctatgtagctgtctttgtgctgaaagattaggcttctattatttacctcttcaatggatgacatggttggagtaaatc

SEQ ID NO: 1012244 - DNA, 120 bp, Artificial Sequence
  ENSG00000260423_40 (sequence is synthesized)
ctgatagcatttttacatctataaccaccatactggatttattgcgaattccagtgtatctgaaaattttaagaaaacactcgtttagatatcaattttaaaaagtgacttatctcataa

SEQ ID NO: 1012245 - DNA, 120 bp, Artificial Sequence
  ENSG00000260423_41 (sequence is synthesized)
agttggcccttagatcatgagaccagcctaagtgcccaaggaaatggaacagcagggagggggagggacatcacacccactatcaaaacttcttgttagtctctggcttccacatccttc

SEQ ID NO: 1012246 - DNA, 120 bp, Artificial Sequence
  ENSG00000260423_42 (sequence is synthesized)
cccaaaacttcagcccaattcacagccgcatttttccatctctttgccattcctccatgggagagctttctgttggtacaggaatagctgagaagtgggaaagatcaagggtagtaagag

SEQ ID NO: 1012247 - DNA, 120 bp, Artificial Sequence
  ENSG00000260423_43 (sequence is synthesized)
ctgcccccgataatctacagaaagctttgctggaatgaggttgtgcatctctgaacctgagctagatttgttgggtcagggaccatacttatttactggcccaagaattagaagaggagg

SEQ ID NO: 1012248 - DNA, 120 bp, Artificial Sequence
  ENSG00000260423_44 (sequence is synthesized)
tgtctaagaaatgcttgttgaatgaataaataaacagccgagtgagtgtttatatgagcctgaaaactgcctgcaccagcacaaaagtaaagccccaacaccctcaggtcacacctactg

SEQ ID NO: 1012249 - DNA, 120 bp, Artificial Sequence
  ENSG00000260423_45 (sequence is synthesized)
gaaaaatatatgtcagccccagaaaaatgtgggcaacatgaggcaactccggagcaacacaggaaactgccctcctcttctggcccctcttccactgtgatgctcaaagtctgtgatgac

SEQ ID NO: 1012250 - DNA, 120 bp, Artificial Sequence
  ENSG00000260423_46 (sequence is synthesized)
caagtctggtcatctaatcagcaggatataagagggtcattcttcactgcggccattccagtttcctggaaacttggctttctcctgaccgtttccccaggagcacggtggtgacaagct

SEQ ID NO: 1012251 - DNA, 120 bp, Artificial Sequence
  ENSG00000260423_47 (sequence is synthesized)
tgagctctgacatcagaaagtccccagtttgaaacctctagcttcttactcgctagctatgagactttgggcaaattaatctctaaacctcaatttctcaatctgtaaaatgttcaaggt

SEQ ID NO: 1012252 - DNA, 120 bp, Artificial Sequence
  ENSG00000260423_48 (sequence is synthesized)
caagcaactcacttttccacattgtaattgatgaaactaaaattcagactcagatctgcctcactccacagtctgtgctttttccttcccactcatctttttctctttctattaaaaatt

SEQ ID NO: 1012253 - DNA, 120 bp, Artificial Sequence
  ENSG00000260423_49 (sequence is synthesized)
tatatataaatagatatttagatataaaaacatgcatatataggcacatagacatgtacatacacacacatatgtacaaatatatatgcctaaatttttactgacctgtcaacttacaaa

SEQ ID NO: 1012254 - DNA, 120 bp, Artificial Sequence
  ENSG00000260423_50 (sequence is synthesized)
acaaaaatgagagatttataaaaggtacatatatagctgtgaattctttaaagctatttttaaagaaattaatataatcttaatgattatcagattactcatgcagtacacagctacaca

SEQ ID NO: 1012255 - DNA, 120 bp, Artificial Sequence
  ENSG00000260423_51 (sequence is synthesized)
agtctaatgaagtaccagacacttttctttcttcaactattgtcctatcttattcaggttttcattttcttactagatgtgttttcaatggtttatgacgtaataaaatttctttacctc

SEQ ID NO: 1012256 - DNA, 120 bp, Artificial Sequence
  ENSG00000260423_52 (sequence is synthesized)
gtgcatctctgaacctgagctagatttgttgggtcagggaccatacttatttactggcccaagaattagaagaggaggtgtctaagaaatgcttgttgaatgaataaataaacagccgaa

SEQ ID NO: 1012257 - DNA, 120 bp, Artificial Sequence
  ENSG00000254306_0 (sequence is synthesized)
agagaacaagaaagccttatgtggactggaacaaaacgttcacctaagccagtaagagcctctctttgggaaatctgaaccagggaccagaaagaaattgttggctggtgttaggtgcct

SEQ ID NO: 1012258 - DNA, 120 bp, Artificial Sequence
  ENSG00000254306_1 (sequence is synthesized)
gtgctgaaaggccaggcaccatccacttggctctggacgacgccctgcctggctgagctgccctgggagctgtcaacacgggtgtgcgtgctggtattccagaggctgcatgctcacctg

SEQ ID NO: 1012259 - DNA, 120 bp, Artificial Sequence
  ENSG00000254306_2 (sequence is synthesized)
aagtgctcacaaacattagctcatgtaattctcatcagaactctgtgagggtctctctctctgttgcctgggctggagtccagtggcatgattccagctcactgcagcctcaaactcctg

SEQ ID NO: 1012260 - DNA, 81 bp, Artificial Sequence
  ENSG00000254306_3 (sequence is synthesized)
ggctcaagcgatcctcctgctggtgcccagctaagttttttttttttagtttatatggggtctcactatgttgcccaacct

SEQ ID NO: 1012261 - DNA, 120 bp, Artificial Sequence
  ENSG00000254307_0 (sequence is synthesized)
catatatcttattcaaggtaaattttatgttagattctttgtctggcatttgggaggctaaattaacttaggaggctagagatcccatctctactttttttttctttttgagatggagtc

SEQ ID NO: 1012262 - DNA, 77 bp, Artificial Sequence
  ENSG00000254307_1 (sequence is synthesized)
ataataataataataaattcaaggcacttgtatcagtgggtttgcagtatcaagggcaaagaacattttttatttct

SEQ ID NO: 1012263 - DNA, 120 bp, Artificial Sequence
  ENSG00000254307_2 (sequence is synthesized)
gggtttgcagtatcaagggcaaagaacattttttatttctttgagaaattccttccacccaaaacccataaattcttctcctctcatagtagatctttattgtcaaacctaacaactgta

SEQ ID NO: 1012264 - DNA, 120 bp, Artificial Sequence
  ENSG00000254307_3 (sequence is synthesized)
tgctttccacttaaagttgtctagtactattaactgcagttaaaacagaagcaaataaacttatctgtcatattcaatattgtcatttccataatgaagctttcttttccttttcaactg

SEQ ID NO: 1012265 - DNA, 120 bp, Artificial Sequence
  ENSG00000254307_4 (sequence is synthesized)
atgctggatgaaaaattcattatttaaaacatcccattaacaatttttccagatcaattttatttaaaaaataagttgacagaaagaagcaaaagcaacttactaatatgtcaaacaaaa

SEQ ID NO: 1012266 - DNA, 120 bp, Artificial Sequence
  ENSG00000254307_5 (sequence is synthesized)
cacaagtaccaaacctaattcagcacaggtaacataatataaatcaacaaaaattcgattaaatatttcacactagataaaaagtagggtgttctatttcccctacaaaatatggaagct

SEQ ID NO: 1012267 - DNA, 120 bp, Artificial Sequence
  ENSG00000254307_6 (sequence is synthesized)
acacagaaagtaaatgaagaaaaaagttagcactgaagtacaatgcatactccttaggttcttaaactctaccagtctaacagaaagcaccaagatacagatgccaaagtcagaaaaaat

SEQ ID NO: 1012268 - DNA, 89 bp, Artificial Sequence
  ENSG00000251152_0 (sequence is synthesized)
agttccttctttgcctttaagtactaagtggatctgtgattttaggcaagtgattgtccctttctgggcctgtggaattatcatgacca

SEQ ID NO: 1012269 - DNA, 120 bp, Artificial Sequence
  ENSG00000251152_1 (sequence is synthesized)
aaagtcttttattattaacaacaattgcacactttttgttgggaaaaaaggtatacaaattataaaacagttaacaatgtttccttaaggagagaagtgttaatgctcttctctaattat

SEQ ID NO: 1012270 - DNA, 120 bp, Artificial Sequence
  ENSG00000251152_2 (sequence is synthesized)
gcttttaatggtattttgttctatttttttattttcaatagcttctttatttcccttgggatattgaagctttacttaatcttattctttctaagtagggtagagaattcctgtttcaag

SEQ ID NO: 1012271 - DNA, 120 bp, Artificial Sequence
  ENSG00000251152_3 (sequence is synthesized)
tctccacaaaacaaaatcccttttcttgacatagtagaaaggacaggtgcttggatgtttggttggcaggggaaaggaaagagtccaggtgctactgatagaaatattcaaccaaatcct

SEQ ID NO: 1012272 - DNA, 120 bp, Artificial Sequence
  ENSG00000251152_4 (sequence is synthesized)
ccagttttcgactccaccactcactgtggtgccttcctcaagaccttggagctccaagtctctgaagaatatttcaggcaatgagaggagtccctgactaagtttaagctgaatgaatga

SEQ ID NO: 1012273 - DNA, 120 bp, Artificial Sequence
  ENSG00000251152_5 (sequence is synthesized)
aacttccactgcaagcaaagaggatagaagagtaatcctcatgaagcggctgttgtacactcaggaggatatgttttaaataatgttcccacaaaaagcacctgcaaacatcagaatcta

SEQ ID NO: 1012274 - DNA, 120 bp, Artificial Sequence
  ENSG00000251152_6 (sequence is synthesized)
aaggaaaaaaatcacaacaaatgagattcagcctgattagggaaaatgattttctctatcacttttacactgcaaggccaggctttgtctgaatcttattaatacgagagcgatgccaag

SEQ ID NO: 1012275 - DNA, 120 bp, Artificial Sequence
  ENSG00000251152_7 (sequence is synthesized)
ataactaaggctgataaagaataaatacaatttgaccggattcagctacaaatatcagatgttttgaaagattatcataagtggctcaaattcacttaattcttttataaaacaagtttt

SEQ ID NO: 1012276 - DNA, 120 bp, Artificial Sequence
  ENSG00000251152_8 (sequence is synthesized)
tgttggactataaaatattttccaatttccctggatgacaaatggcaaaagaggttaattaaaagtcaactgaagactacttaggcacttaaacatgtaatttcttgagcttcaaactta

SEQ ID NO: 1012277 - DNA, 120 bp, Artificial Sequence
  ENSG00000251152_9 (sequence is synthesized)
ttgagcttcaaacttaaatagctcaaactagttaaaaaatagcttattattgtaattcatgtatttcctctttaaatatacttttcttagtttgatttaaaatcttactaaaagtttgaa

SEQ ID NO: 1012278 - DNA, 120 bp, Artificial Sequence
  ENSG00000251152_10 (sequence is synthesized)
aataatcattccgtatttgaaggaatgaatgagaatatacatgcaagcacagagaagggtacaagggtctcttgcgatcctcagaacactaattgcaggcttctctgtccctctttactt

SEQ ID NO: 1012279 - DNA, 120 bp, Artificial Sequence
  ENSG00000251152_11 (sequence is synthesized)
atattttctttctcacctctgtgtcctcaccctggcaccttttctctctctatgttggattatccagctgttacacatctgtcagaatcctattacttcctcatgacccaggttaaattg

SEQ ID NO: 1012280 - DNA, 120 bp, Artificial Sequence
  ENSG00000251152_12 (sequence is synthesized)
ttcttcctctgaggtgctctttcagactctcatattctctctcttgatttcctgttacattctttgggcaattccctcttcatttcaggaagtttataatttttactattttgttaattt

SEQ ID NO: 1012281 - DNA, 120 bp, Artificial Sequence
  ENSG00000251152_13 (sequence is synthesized)
tattttcatatttatattctgctatgcaccgaatgcttgtgttttcccaagatttatatattgaagcctaaatgtcaatgtgatgatatttagaggtggagtctttgaagagtaattaga

SEQ ID NO: 1012282 - DNA, 120 bp, Artificial Sequence
  ENSG00000251152_14 (sequence is synthesized)
tcatgagactagagcccagatgtatgggattaatgcccttttaagtggctaaaaatgaccagaagtctttctctttgacgtgtcctcatgacaatgagaacatgaccatctgtaaaccaa

SEQ ID NO: 1012283 - DNA, 120 bp, Artificial Sequence
  ENSG00000251152_15 (sequence is synthesized)
gaggaaagcattcactttgatctcagaaccccagcctcctgaattgtgctaaataaatgtctattgtttaaggcactttatctatggcattctgttagagcagcatgaactgactcaaac

SEQ ID NO: 1012284 - DNA, 120 bp, Artificial Sequence
  ENSG00000251152_16 (sequence is synthesized)
gccttgtacagcatcccttgcttgggcttggtagtggaaggaagtatcaagtttcccatattgtgtctatttcagaatctatgttcagttctgtctccactggcaagtaacttttcccat

SEQ ID NO: 1012285 - DNA, 120 bp, Artificial Sequence
  ENSG00000251152_17 (sequence is synthesized)
aaagagaaggaagaataagcacatactccagcctagaaacaaggtcaattttcaaactcaaggccaactatggaattgaatgaggcagagttgtatggccatgaagacagataaataatt

SEQ ID NO: 1012286 - DNA, 120 bp, Artificial Sequence
  ENSG00000251152_18 (sequence is synthesized)
ttagctggggtttaaaagtgattagcagacattttcagagtatactgtcaaaaaataaacacttctttattaatatttgaagttaactttgaacacttattaaagacaaattgaggatgt

SEQ ID NO: 1012287 - DNA, 120 bp, Artificial Sequence
  ENSG00000251152_19 (sequence is synthesized)
tctgcaattagtaataggactctgagaaactctactcattatggataagctgttcatgcaacacaacaaatgagccttgttttgccttcaagaatgcctatcagaacttttaagacttgg

SEQ ID NO: 1012288 - DNA, 120 bp, Artificial Sequence
  ENSG00000251152_20 (sequence is synthesized)
aggcctcatgttctctcaaggctccaagcccttttacacatttctcatctgcctggagccaccctctctttaccaaggtaactcctttgccaggagttttcttaaaaacaaaaatatcac

SEQ ID NO: 1012289 - DNA, 120 bp, Artificial Sequence
  ENSG00000251152_21 (sequence is synthesized)
tggtacacaaacaggcacatagaacagtagaacggaataaagagcccagacacaaggctgcacacctacgaccacctggtctttgacaaagctgacaaaacaaacaatgagggaacagac

SEQ ID NO: 1012290 - DNA, 82 bp, Artificial Sequence
  ENSG00000251152_22 (sequence is synthesized)
ctttgacaaagctgacaaaacaaacaatgagggaacagactccctattcgataaatgttgctgagataactggctagccata

SEQ ID NO: 1012291 - DNA, 120 bp, Artificial Sequence
  ENSG00000251152_23 (sequence is synthesized)
gtattaaaaagttaaacataaaacccaaaactataaaaatcctggaagacaacccaagcaataccatcctggacataggagtgggcaaagacttcatgacaaagacaccaaaagcaattg

SEQ ID NO: 1012292 - DNA, 76 bp, Artificial Sequence
  ENSG00000251152_24 (sequence is synthesized)
agaatgtaattaaacttaagtatttcttcaaagcaaaagaaactatccacagagcaaacagacaacctacagaatg

SEQ ID NO: 1012293 - DNA, 120 bp, Artificial Sequence
  ENSG00000251152_25 (sequence is synthesized)
gtctgataaaggtctaatatccagcatccataagaaacttaaacaaatttacaagagaaaaactaacaaccccaaattaaaagtggacaagtgacatgaacagacacttttcaaaagaag

SEQ ID NO: 1012294 - DNA, 75 bp, Artificial Sequence
  ENSG00000251152_26 (sequence is synthesized)
gtactcagagatctaaaagcagaactactgtttgatccagtaatcttattactgggtctatatccagaggaatac

SEQ ID NO: 1012295 - DNA, 90 bp, Artificial Sequence
  ENSG00000251152_27 (sequence is synthesized)
ggtgattactcagagatctaaaagcagaactactgtttgatccagtaatcttattactgggtctatatccagaggaataccaaatatttt

SEQ ID NO: 1012296 - DNA, 68 bp, Artificial Sequence
  ENSG00000251152_28 (sequence is synthesized)
atcatcttttgtggaaacatgaatggagctggagactattatcctctgcaaatgaacacaggaacaga

SEQ ID NO: 1012297 - DNA, 88 bp, Artificial Sequence
  ENSG00000251152_29 (sequence is synthesized)
caaagctaaatggtgggaactcatgaatacaaagaatggaacaagagacactagggtctacttgagagtggatggtgggaaaaaggaa

SEQ ID NO: 1012298 - DNA, 89 bp, Artificial Sequence
  ENSG00000251152_30 (sequence is synthesized)
aatggtgggaactcatgaatacaaagaatggaacaagagacactagggtctacttgagagtggatggtgggaaaaaggaaaggagatac

SEQ ID NO: 1012299 - DNA, 120 bp, Artificial Sequence
  ENSG00000251152_31 (sequence is synthesized)
cttggtgattaaataatctgtataacaaacccctatgacatgagtttacctgtataacaaaccttcatctatataaaataaaacaagtgaaggttttattttatttattttattttttat

SEQ ID NO: 1012300 - DNA, 120 bp, Artificial Sequence
  ENSG00000259307_0 (sequence is synthesized)
atttatgatttcatttactttaccaccagaataggcaaatctatagaaatagaaatgaaaagtacatttgtggtattcagggattctgcacctttgcattccttccccccccaaaaaaaa

SEQ ID NO: 1012301 - DNA, 120 bp, Artificial Sequence
  ENSG00000259307_1 (sequence is synthesized)
cattaaatgtctttcagaatcacactggaaggccaacatcagtcttagtttggagcagagggtctgagcaggagagtctaactggatctccccaaacccctccctgtctctggagcttca

SEQ ID NO: 1012302 - DNA, 120 bp, Artificial Sequence
  ENSG00000259307_2 (sequence is synthesized)
cagcaggagagagggagggtggatgtgtgctgaaaacattcacgctcagctcccattcccaacactagactgggaatgcatgccgtttctgctgcctgccctgaacacagtccatcaacc

SEQ ID NO: 1012303 - DNA, 120 bp, Artificial Sequence
  ENSG00000259307_3 (sequence is synthesized)
acagccccagcgcccccaccacccagggtaggggatacagacaaacctgcttggagctcagggtctcactcccttgccctggctccacccctgtgcctagtgtcagtaaccagcagctcc

SEQ ID NO: 1012304 - DNA, 120 bp, Artificial Sequence
  ENSG00000259306_0 (sequence is synthesized)
atggaaacttgaactacgtgctggcaagaatgtggctgacaacacggtgacctggatctgcctccaggggtgctggcagagcagggctctcacgcagggttaggagatgcacagaattca

SEQ ID NO: 1012305 - DNA, 120 bp, Artificial Sequence
  ENSG00000259306_1 (sequence is synthesized)
aggcttccgagtgacagttagcagaacctgaatgggctgctcatcaaggaaaaagccctgatggagtccaggaactcaagtcccagttctggttccttcgccattcagctgtgccatcat

SEQ ID NO: 1012306 - DNA, 120 bp, Artificial Sequence
  ENSG00000259306_2 (sequence is synthesized)
gggcacatcacttagcctcactggagttcagtttcctcagtagtaaaatgtggtaagcacatctcaattcagaccagccacactccagtgctcgacagccacctgtggctcacggcctgt

SEQ ID NO: 1012307 - DNA, 120 bp, Artificial Sequence
  ENSG00000259306_3 (sequence is synthesized)
ctcactcatctacaggctccatgaagtcagatatcaaacatttccattgctacattctccaggcctaatctgcatcctcccagagtggctcttcagtgaacatctactgaattgaacaga

SEQ ID NO: 1012308 - DNA, 120 bp, Artificial Sequence
  ENSG00000259306_4 (sequence is synthesized)
catgcacagagcagatggacagcactagggacttgtcctctggccccagaggcccatgaaagagtatccaggcaggctggactatgctgggaagggggaaggcctgggccctcatcgaaa

SEQ ID NO: 1012309 - DNA, 120 bp, Artificial Sequence
  ENSG00000259306_5 (sequence is synthesized)
gggaaggaccccaaaaggaagagaaacccatcaacatcctgttaactaaacggagagaaatgctgtttaggggaaaaaaaaaaaaacataataaataaaattcctgagagaagctgctaa

SEQ ID NO: 1012310 - DNA, 120 bp, Artificial Sequence
  ENSG00000259309_0 (sequence is synthesized)
ggtaaccccaaaggcagctcttgaggaaggcatggaaactgccttacctcccctttgcagccacaaaagagcagttctcttttgaatggccccacactcctgcttctccccttgcctgct

SEQ ID NO: 1012311 - DNA, 120 bp, Artificial Sequence
  ENSG00000259309_1 (sequence is synthesized)
gccttcaaccaggcagctggaatgcagtcctagaccacagagggtcgggctggggccctgcgtgttgcagaaaaggagagaagccaaaaaatgggatggaatgtgctcaaggtctcctga

SEQ ID NO: 1012312 - DNA, 120 bp, Artificial Sequence
  ENSG00000259309_2 (sequence is synthesized)
aggtttggggcaagaaggcccatgtcaaaaacccagtctcagcttctcagcttccccttgtcatttctcagagtctgcagaagggttttgtttaggggtccagccccccgggcaggccac

SEQ ID NO: 1012313 - DNA, 120 bp, Artificial Sequence
  ENSG00000259309_3 (sequence is synthesized)
cgaccagcccattacaggctctcccaggcactggagttctgttccctaaataatgttatcatttagacggcagcccaaattgcagaggggtgcaaagccactgcacttcctcctaggcca

SEQ ID NO: 1012314 - DNA, 120 bp, Artificial Sequence
  ENSG00000259309_4 (sequence is synthesized)
gtccaggaagtcatgagcctaaagggccacatccttggtgggagaagctgcagcccagatggactaagatatcagagaaagggactcgcagagacggagcatctaccggagaaggtggcc

SEQ ID NO: 1012315 - DNA, 120 bp, Artificial Sequence
  ENSG00000259309_5 (sequence is synthesized)
catgtctagggctgagactggattgttggtccacgtcaggcgtcaggaaagctgacgagcacattcctgaaccactacagcctcaggttcatgcaaacagagctaacagtggcttggcct

SEQ ID NO: 1012316 - DNA, 120 bp, Artificial Sequence
  ENSG00000259309_6 (sequence is synthesized)
ccctgcctgaccctctacctccgctcttggatgaaggcatgtgtgtttgtatttcccaaggctcagccctgcacagtggggagcccagctggatccttgatgccacaaagacaaccaatt

SEQ ID NO: 1012317 - DNA, 120 bp, Artificial Sequence
  ENSG00000259309_7 (sequence is synthesized)
ggttcacacagccggcgtggaatgctctcagctgccatttcctcctctcagctttggcacaacgaggctaaaaatgactatttcacagggcttttgtgaagattaaataacatatatctc

SEQ ID NO: 1012318 - DNA, 120 bp, Artificial Sequence
  ENSG00000259309_8 (sequence is synthesized)
cattcggtggtatatagcttctgctcctgtcctaggtgacctccagccctcctagccctcgagctggttggttcctggacatggtcccagagaagaagccatgtccctggacacgcacgt

SEQ ID NO: 1012319 - DNA, 67 bp, Artificial Sequence
  ENSG00000235497_0 (sequence is synthesized)
cataccttccagttcaagagatttctcctgcctcagcctccgatgtagctgagactacagggctacc

SEQ ID NO: 1012320 - DNA, 120 bp, Artificial Sequence
  ENSG00000235497_1 (sequence is synthesized)
ctgcctcagcctccgatgtagctgagactacagggctacctggtttctgcctgagcagcaagtgatgaaggagagtgagcgtatgagagagtaagagagtgagcccaatcgtggactgac

SEQ ID NO: 1012321 - DNA, 120 bp, Artificial Sequence
  ENSG00000235497_2 (sequence is synthesized)
gtttctgtggcgccagctcttcctgactgcctgacaaccacgatgtaccaggcaagcttgactacatttcccagcgtcctttggagtgagactacatctcccagcatcctggcagttaga

SEQ ID NO: 1012322 - DNA, 120 bp, Artificial Sequence
  ENSG00000235497_3 (sequence is synthesized)
caattttctagtctcctttgcagggatcttggaagccccatgttgaaggtggcagagcaacaaaaattgaggaaaccctgaatccctgaattactatttggagatgaccacccactaatt

SEQ ID NO: 1012323 - DNA, 120 bp, Artificial Sequence
  ENSG00000235497_4 (sequence is synthesized)
tgggctttaggagaatgagaagttctatcatgtttgagactccgtacatctttggatttgttttaacagctagttttaccctggctaacatggcaattgacagcctctgagaggagattt

SEQ ID NO: 1012324 - DNA, 120 bp, Artificial Sequence
  ENSG00000235495_0 (sequence is synthesized)
aaagctgcatgtgcatgtaggggagagaaggaggtttcaccagactgacaaatggagtcatggttctgggaaggagcagggtgttgggtgcacatttgtcacctgggaatactaccagca

SEQ ID NO: 1012325 - DNA, 120 bp, Artificial Sequence
  ENSG00000251488_0 (sequence is synthesized)
agagagaagccaaagcacctaggcacattaagcacccacagaggctctccacaccacaccaccactgctgggagaaggggagggatggtgtcagcaattccggacttcagaaaaaatatc

SEQ ID NO: 1012326 - DNA, 120 bp, Artificial Sequence
  ENSG00000251488_1 (sequence is synthesized)
tcttcagtgggtctttcagtgatatgaagtttaaaccagatactatcacatcacttcctaaagaagatagaacaaaagaccacttgagcacttctcctaccattttctacacttctaaat

SEQ ID NO: 1012327 - DNA, 120 bp, Artificial Sequence
  ENSG00000251488_2 (sequence is synthesized)
ttatttatatacgtctataattttttttaatatattttttccttaatgctgcaaaccttctttgatcatttgggcatattcttttttaaaaatttgagctaaatagcttacagagattat

SEQ ID NO: 1012328 - DNA, 120 bp, Artificial Sequence
  ENSG00000251488_3 (sequence is synthesized)
tacacagaagaaaagcatctttaatcttcttagaggttagtattaagacctgataaaagtgaatcttttaacttttttgatattggaaatactgtttctcacattttccattactatcta

SEQ ID NO: 1012329 - DNA, 120 bp, Artificial Sequence
  ENSG00000266709_0 (sequence is synthesized)
ctgagatcagacacacttgggccgggttgggaggaactggcaggaaaaggactgaacccttaatgtcaggcggttttgaagcacctggggcaagctatggaaatccccacaggaaggctc

SEQ ID NO: 1012330 - DNA, 120 bp, Artificial Sequence
  ENSG00000266709_1 (sequence is synthesized)
acgcagtctcttaggcggctgccctccacctgccacgttctttttgattgactaaaaaacgctgaatgaagaacgaagtcgcgtggaaaccctcgccgcgcgcctgcagcggacagcgca

SEQ ID NO: 1012331 - DNA, 120 bp, Artificial Sequence
  ENSG00000266709_2 (sequence is synthesized)
tgccgacttgcgcccgggggctgcgctgcgagcggccacgcatggcggctggacccgggcggccgcaagggcttggctgggccgcgggaggcgggaggttcttcgtcctcccgagccatc

SEQ ID NO: 1012332 - DNA, 120 bp, Artificial Sequence
  ENSG00000266709_3 (sequence is synthesized)
gtcctcccgagccatctccctgaactgacaagcaggactcccgggtccagggggcacagggcccggggcggtgacccggcggatcgggctgccggaggagcccactgtaaatgccgcaac

SEQ ID NO: 1012333 - DNA, 120 bp, Artificial Sequence
  ENSG00000266709_4 (sequence is synthesized)
tggccccaaacactgcgttcctggactgcaccagcagctcctggcgcggccgcagagttggtggatattttccaagggggaaaaaaatcttttaaatgccatctgtttactttaaaaatg

SEQ ID NO: 1012334 - DNA, 120 bp, Artificial Sequence
  ENSG00000266709_5 (sequence is synthesized)
ttgattacttaagaaaaacgaatggatgtctgggcaaaggtatggacgtcacaattattttgaaggcgtcctttttaactttaaacagaccacgccaggaggagactgctgacccagagc

SEQ ID NO: 1012335 - DNA, 120 bp, Artificial Sequence
  ENSG00000266709_6 (sequence is synthesized)
ctccattgtacctccgctctgtccctgcagtcaggcaaccaattggagaagagtataaatagtaattaaccagggagagttgtaattcagaaacctagttaaaacaagtcctcaaaaact

SEQ ID NO: 1012336 - DNA, 120 bp, Artificial Sequence
  ENSG00000266709_7 (sequence is synthesized)
agagaatatgagagtggggagacattttgaaggcattaagaacaaaaaacgatggggacgaatggttgagtctgaggatcagcatcgtaatctgttagagaacgaggtcgtggctgtgtc

SEQ ID NO: 1012337 - DNA, 120 bp, Artificial Sequence
  ENSG00000266709_8 (sequence is synthesized)
tgtgagtcgttaatgggtttaatcggttgatacacagcctgctagtggcctaaccagtaacccagggcctggcagatttgcatgacatctcggagtttgattgctcttccttccacttgg

SEQ ID NO: 1012338 - DNA, 120 bp, Artificial Sequence
  ENSG00000266709_9 (sequence is synthesized)
caaaaggagacaccatcagccggatcaggaggggtcatggtgagatggaacccaccgaggtggtgtacagagctggcgctgccaatggccagagtggcagcctttctacctccttaaccc

SEQ ID NO: 1012339 - DNA, 120 bp, Artificial Sequence
  ENSG00000266709_10 (sequence is synthesized)
tgcaaaaatcaaacgtgctagtacgcactgtccatccacactggaactccagttggttttagtctgcgatgatgactcttctgggttgacttttccagttcattatgcagccctcttgaa

SEQ ID NO: 1012340 - DNA, 120 bp, Artificial Sequence
  ENSG00000266709_11 (sequence is synthesized)
gcaggcctcccaaacttagcagacaccaatgagaacctcacaaagaggctcatcaagcaggctggtgaaactgggtgttacttcctgttccatgggtaccccatagtgtttgggaaacac

SEQ ID NO: 1012341 - DNA, 120 bp, Artificial Sequence
  ENSG00000266709_12 (sequence is synthesized)
cgggctgtggttcaggagaatttcacatatgctaagatggagaaagaacctgccctttacatttaggcttgggatgttaatttaaagtttgaatgaccaaaaattaaatctgtaactttt

SEQ ID NO: 1012342 - DNA, 120 bp, Artificial Sequence
  ENSG00000266708_0 (sequence is synthesized)
atgtcatcgacaagtttcaaaaatatctcgtccacattgaagttatccttggcacttgcttcacagaaccgcatcccagtgatctgctgtgcaaactgagaagaaacacacacctatttc

SEQ ID NO: 1012343 - DNA, 120 bp, Artificial Sequence
  ENSG00000266708_1 (sequence is synthesized)
ctctgtgtggggcctcacagaccagcgtgcgagcatgagaatgaatttaaaggagcacgaagtcaaaaaagtgcaaacaaattaggaggatgtgactgagttatcactgtattgataatt

SEQ ID NO: 1012344 - DNA, 120 bp, Artificial Sequence
  ENSG00000266708_2 (sequence is synthesized)
tctttgtaatttttaaaataagtaatttattaaaagaaacagtacctcaagcgctaagcacagtgtgtggcaaccgtgcctcccacgccctctcaccttttccccctgctgcctggtgat

SEQ ID NO: 1012345 - DNA, 120 bp, Artificial Sequence
  ENSG00000266708_3 (sequence is synthesized)
agcatactgtggaattttaaaagaagccacatttcaaagatgggcatcgccatatactgacagcagaaatataaaccgatacagtatttttcgctaatttacatttgtccattcacttcc

SEQ ID NO: 1012346 - DNA, 120 bp, Artificial Sequence
  ENSG00000266708_4 (sequence is synthesized)
actgtctttgaggttctaccagttcccaggcaggactgggcagcagtgcaaggcagggctcactgtgtcttagaaagaactagggcacaggcattaagaaccacaatgctcttggctgtt

SEQ ID NO: 1012347 - DNA, 120 bp, Artificial Sequence
  ENSG00000266708_5 (sequence is synthesized)
gacccaacaattcccaagacctcttcctaaggaaatgattcaacatacaggcaaagctctacactcaaaatggttatcaactgaaaaacctacaagtcaaacaaaatggctcaagaatca

SEQ ID NO: 1012348 - DNA, 120 bp, Artificial Sequence
  ENSG00000227678_0 (sequence is synthesized)
ctaaacaaggctgatataattaaattgctacttcttaagattttcctctctcctttaaaaatgaaagacctgtaaatatagactgcctaaatgcttcatcagtaagaactggagtcatct

SEQ ID NO: 1012349 - DNA, 120 bp, Artificial Sequence
  ENSG00000227678_1 (sequence is synthesized)
tacacaacttcttcaagtaacaattatgtggaaaaagtgtgctaatttcagtaaaaagacatcctgctgttgtaaactagaaggaaagacgttccagtgttaatctccaagtgtagcacc

SEQ ID NO: 1012350 - DNA, 120 bp, Artificial Sequence
  ENSG00000227678_2 (sequence is synthesized)
gttaagcggcaggtatgagaaatgttctcctgttttctggaaacattggtctgttctcatttgcttgtgctatgacagtcctctgataaagcaaggtcaggaagaaaggcagatctatta

SEQ ID NO: 1012351 - DNA, 120 bp, Artificial Sequence
  ENSG00000227678_3 (sequence is synthesized)
aagtcttctaagtcattaatgaaaatgtcaactgacattcccaaggagcccactacaaaggctgactggtttattacaaccttggccctactgaaggcctggcgcagacagcaagtctcc

SEQ ID NO: 1012352 - DNA, 120 bp, Artificial Sequence
  ENSG00000227678_4 (sequence is synthesized)
ttctgaaactatgtaagagtataacacaacagaaaaaaaaagactaaacgctacctacgctcaatgttccacacctcttaagccagtaatcctgtatctggtgtcgggcagcaaagaaaa

SEQ ID NO: 1012353 - DNA, 120 bp, Artificial Sequence
  ENSG00000227678_5 (sequence is synthesized)
taaaatatacctcgtctgtgctccatttggaaactttactggcagggattcctgcgacagttggaagaagtttgctttgctgctcccagcgcaagggcagacatggaattggggacttaa

SEQ ID NO: 1012354 - DNA, 120 bp, Artificial Sequence
  ENSG00000227678_6 (sequence is synthesized)
agagggaaggcaacgtaaagacccaaagagagaccaccatctacaagtcacatctacaagtcaaggagagaggcccaggacagattctttcctcacagccctcgggaggaagcaaccctg

SEQ ID NO: 1012355 - DNA, 120 bp, Artificial Sequence
  ENSG00000227678_7 (sequence is synthesized)
ccaaccccctgacttctagccttcttcagattctcagcttctagaactgtgagacgatgcatttctgccatttaagccacccgtttgtggttggcattgttatggtggccctagcaaact

SEQ ID NO: 1012356 - DNA, 120 bp, Artificial Sequence
  ENSG00000227678_8 (sequence is synthesized)
gcaatgtattacaaggcttacttttttttcggttagcttctgcaatgcatatacaatgccattattccagacattaggtgtcttgctaatggcctaaaacaaaggagagggatttggaat

SEQ ID NO: 1012357 - DNA, 120 bp, Artificial Sequence
  ENSG00000227678_9 (sequence is synthesized)
tcaggagctctggccttccatttcactgccctttccactattcactatttgttcttttccaatgccttaactcgaaaccacagtgacatgctctgtctgagtgagtctttctcagagtgt

SEQ ID NO: 1012358 - DNA, 120 bp, Artificial Sequence
  ENSG00000227678_10 (sequence is synthesized)
aaaggcatgaatgtattcactcaacaaaaatatactgaatgtctattatattccaaacactcttcttgggcttagacatatagcagggaataaaacaaataaaaccaagcaagcaaaaaa

SEQ ID NO: 1012359 - DNA, 120 bp, Artificial Sequence
  ENSG00000227678_11 (sequence is synthesized)
acatgaagatgacagccacatgtttactcctcccagatgtttttggggatgatcccagcctttttgtcatcatgaatgaacaggtgcaagtgtccacacctgtgttggaagttaaaaacc

SEQ ID NO: 1012360 - DNA, 120 bp, Artificial Sequence
  ENSG00000227678_12 (sequence is synthesized)
ctttcaacatggaggtctgcgaattttctttatatttagaaagggagaggctcacaaaggtggacgactgtgttacagccttggctgcgctagtagctgcctttcatgtatttaggattg

SEQ ID NO: 1012361 - DNA, 120 bp, Artificial Sequence
  ENSG00000227678_13 (sequence is synthesized)
agtgtccaagaagactgtcccaaactttcaacttcctagaaacgctgattttcgatatgcacagtccttattttccttctttgaaagaaaaggaaaacgaagtaggatttcagcacccac

SEQ ID NO: 1012362 - DNA, 120 bp, Artificial Sequence
  ENSG00000227678_14 (sequence is synthesized)
tcacttaatagcatgccaaatattgtactggaatttacctctgggaaaactgaagcttcataagaaattgttttgatttagggttgtggtagaggggatctgccttgccccaggagatct

SEQ ID NO: 1012363 - DNA, 120 bp, Artificial Sequence
  ENSG00000227678_15 (sequence is synthesized)
aggtcctgatgtctgtgacctgtgttcatctgctactgcttctcgccttggaaacacagtgactcatcctgcatgcccaactggctactgcccagagtccagttctatctgttctgctct

SEQ ID NO: 1012364 - DNA, 120 bp, Artificial Sequence
  ENSG00000227678_16 (sequence is synthesized)
taacaatggctgcataagtactttttgggtctaacaagactcagtgcactctccctctttccaactatttcacaaggtatacatccctatggctgaagttgaatgacagcctctctcagg

SEQ ID NO: 1012365 - DNA, 120 bp, Artificial Sequence
  ENSG00000227678_17 (sequence is synthesized)
gttcagagaattccaacttcttacaagaacagatatttataagaaaacaaggcacattttggaatcctattcagaaaatatactgacttctttttcagtggtggacaatccaatcaatat

SEQ ID NO: 1012366 - DNA, 120 bp, Artificial Sequence
  ENSG00000227678_18 (sequence is synthesized)
acacttagatattaagttctttgtgaaattctgtaataaaattctacttcattaaagagctgtcgatttattttgagtttttagaaattccgcagttaagttatattttcagaggtgcct

SEQ ID NO: 1012367 - DNA, 120 bp, Artificial Sequence
  ENSG00000227678_19 (sequence is synthesized)
cagtttttttgaaatacactgtactcaaatccttcaggttagagaatggccttggactgaattcagcatgcccacttaatgcacaggagctgcacatttatggcctgtgggctgtctctt

SEQ ID NO: 1012368 - DNA, 120 bp, Artificial Sequence
  ENSG00000227678_20 (sequence is synthesized)
tggtctgaacatcacttgggaacattttgaacttgcattgaacatttcaagaagggacacatactcttctctccctcaggggatctgccttgccccaggagatctggttgtctttaatcg

SEQ ID NO: 1012369 - DNA, 120 bp, Artificial Sequence
  ENSG00000227678_21 (sequence is synthesized)
ctcagtgcactctccctctttccaactatttcacaaggactgttcattaaaacgctaaagccagtgagataaaagaagtcaaagaacagttgcccatttctacaatcactattaattaac

SEQ ID NO: 1012370 - DNA, 120 bp, Artificial Sequence
  ENSG00000227678_22 (sequence is synthesized)
acactacccatctctggaaataactgcaaaatatttattctatcactgaaatgacaacagcctgctagatatctttctctctctaaggactgttcattaaaacgctaaagccagtgagat

SEQ ID NO: 1012371 - DNA, 120 bp, Artificial Sequence
  ENSG00000227678_23 (sequence is synthesized)
aaaagaagtcaaagaacagttgcccatttctacaatcactattaattaactacttacatcaaaacacaggcagagtaagtaacaatttggcacaagtcattttgcctaacctagttccta

SEQ ID NO: 1012372 - DNA, 120 bp, Artificial Sequence
  ENSG00000227678_24 (sequence is synthesized)
tcctccagtaatcatttcttccctttcattagaatgtacctttagttccttacaaactttcctttatttccccaaattactccttcttccttttagtcctttattcccaaataaacttac

SEQ ID NO: 1012373 - DNA, 120 bp, Artificial Sequence
  ENSG00000180066_0 (sequence is synthesized)
ccaggatctgccaggactgggaagggaggcaggaggcttctctgggtataaagcagctgaaatgtggagtttcctcccaggagctgagagcgtgtccatgggcccagtgcctggcgtgtc

SEQ ID NO: 1012374 - DNA, 120 bp, Artificial Sequence
  ENSG00000180066_1 (sequence is synthesized)
ctccctgggagcttgctggacgcatgaccaggattctgggagggcagaggacagaccacaggcacccaggataactcagtacacatgggttctcagcttcctgttcacagagaaacctca

SEQ ID NO: 1012375 - DNA, 120 bp, Artificial Sequence
  ENSG00000180066_2 (sequence is synthesized)
gacaagaagcacgtcgcccatttctcatcaaggccaaccccagaccacgagagcgctttctctgcgtcagccccagcaccccagcgcccctgcctccgggcgcccgcggcctccgcactc

SEQ ID NO: 1012376 - DNA, 120 bp, Artificial Sequence
  ENSG00000180066_3 (sequence is synthesized)
cagtggcccagacctggctgaggcagctcccgtggtagatcaagcctcacaggcggctggaagagccagttctgggctgggcctgtgggaacaggcgtctgttagtcagggtttcaggaa

SEQ ID NO: 1012377 - DNA, 120 bp, Artificial Sequence
  ENSG00000180066_4 (sequence is synthesized)
tgcggccttcgaagcctgaagcggggaatggcggctctgggccctcaaggggcaggcggtgagcctgggaggccaggccgggctgacccaaggggagaggaccctctccgcccactgccg

SEQ ID NO: 1012378 - DNA, 120 bp, Artificial Sequence
  ENSG00000180066_5 (sequence is synthesized)
ctggccctgggcaggtctagagcctgggggtctccagaggcacaatcccttatctccgggagaaggcagagggcagaggcaggaaacaaatctcctgtcaaaattcctaattaaaatact

SEQ ID NO: 1012379 - DNA, 120 bp, Artificial Sequence
  ENSG00000180066_6 (sequence is synthesized)
aagtaagtgatggctccaggctgaaacaccggacactgagagaataagggaaaatcagccccgacagccagggctaacaagacggttaattacagcccgagaagaacgttaacagtatta

SEQ ID NO: 1012380 - DNA, 120 bp, Artificial Sequence
  ENSG00000180066_7 (sequence is synthesized)
aggagggtccctttcccagatgaggctgccctaaccactgggacctcggcccctcccaggcctgagggagcccagctctgcctggccccacccatctcacaccagccctgcctgacccgc

SEQ ID NO: 1012381 - DNA, 120 bp, Artificial Sequence
  ENSG00000180066_8 (sequence is synthesized)
ccacctcaccccaaccctggctggccccgcccacccttgcctcagccctgcccggcccctcccacccttgcccagcccctgcttggcccctcccactcgtcccaacccttcgtgtcaccg

SEQ ID NO: 1012382 - DNA, 120 bp, Artificial Sequence
  ENSG00000180066_9 (sequence is synthesized)
tcgtcccaacccttcgtgtcaccgccaacccttgccccagtccggcccggcccctcccacccttgccccagccctgcctggcccctcccacccttgccccagtccggcccggcccctccc

SEQ ID NO: 1012383 - DNA, 80 bp, Artificial Sequence
  ENSG00000180066_10 (sequence is synthesized)
ccctcccacccttgccccagtcctgcccggcccctcccacccttgccccagccctgcccggcccctcccacccttgcccc

SEQ ID NO: 1012384 - DNA, 80 bp, Artificial Sequence
  ENSG00000180066_11 (sequence is synthesized)
cggcccctcccacccttgccccagtcctgcccggcccctcccacccttgccccagtcctgcccggcccctcccacccttg

SEQ ID NO: 1012385 - DNA, 120 bp, Artificial Sequence
  ENSG00000180066_12 (sequence is synthesized)
ggcctggcccctcccacccttgccccagtccggcctggcccctcccacccttgcccagcccctgcttggcccctcccactcgtcccaacccttcgtgtcaccgccaacccttgccccagt

SEQ ID NO: 1012386 - DNA, 120 bp, Artificial Sequence
  ENSG00000180066_13 (sequence is synthesized)
gtcaccgccaacccttgccccagtcctgcccggcccctcccacccttgccccagtcctgcccggcccctcccacccttgccccagtccggcctggcccctcccacccttgccccagtccg

SEQ ID NO: 1012387 - DNA, 120 bp, Artificial Sequence
  ENSG00000180066_14 (sequence is synthesized)
cagcccctgcctggtcctgcccacctcaccccagcacttcctatgggactcacgcctttgtctcgggcttttggttttcaaaataaattataagttttaataaaataaagtactagaaaa

SEQ ID NO: 1012388 - DNA, 120 bp, Artificial Sequence
  ENSG00000180066_15 (sequence is synthesized)
gggctccccggcttcctgcctctctgaattcctcctccagaccctcaaggctccctgctcattccctctggggtcctgaggtctccaagggccactctggcttcccccctgcagacccac

SEQ ID NO: 1012389 - DNA, 120 bp, Artificial Sequence
  ENSG00000227673_0 (sequence is synthesized)
tatttggtaaatatgtgaaaaaatgaagtaaaccagcagaatggtctttttcatgtacaattttattttttattctattttagatgctaaagctgtaaattggcaacttgtttttctttt

SEQ ID NO: 1012390 - DNA, 120 bp, Artificial Sequence
  ENSG00000227674_0 (sequence is synthesized)
gcactccacagagctggtgggagctgggaataggtgaaaaccctgcctccttgtgagttggcaggacgggagcctcctgttccctggctgctgttgtggccaccgagccgcagccctgga

SEQ ID NO: 1012391 - DNA, 120 bp, Artificial Sequence
  ENSG00000227674_1 (sequence is synthesized)
gccaggcatccctgtgcttggggatcagagcgagcaggagcagatcctctcccttctgggtgcagctgcagctgcccagccatggctgtggtcccggaagtctctgtgctcttgggagct

SEQ ID NO: 1012392 - DNA, 120 bp, Artificial Sequence
  ENSG00000227674_2 (sequence is synthesized)
gggagggccctctgcctcctgccccttacgcactccagagtctcctctctgttgagagctaagcagacatcaggactaccagctgcagagaggagctacccactgtgggcttcgtctctg

SEQ ID NO: 1012393 - DNA, 120 bp, Artificial Sequence
  ENSG00000227674_3 (sequence is synthesized)
ctgagagctgaacactcactgggacgccctgcctatggaaaccagctgttcactctgggtctcctctgagctgttctgtcgctcagtaaaggtcttcttctgcttactcgccctccattt

SEQ ID NO: 1012394 - DNA, 120 bp, Artificial Sequence
  ENSG00000227674_4 (sequence is synthesized)
gtctgccttacctcattcatcctggacacaggacaagaacttgggacttgccggtatggtggagctaaaatagctgtaacacaaacaggattgaaacatgccccttgctcgccacattgt

SEQ ID NO: 1012395 - DNA, 120 bp, Artificial Sequence
  ENSG00000227674_5 (sequence is synthesized)
atcggagagccaagactgtgacaccctttctggggctctgtggttcctggcgtctccaagcttctgggcacctcggctttccccggtgccagtcgtggaagctgcttgtgtgttagcagt

SEQ ID NO: 1012396 - DNA, 120 bp, Artificial Sequence
  ENSG00000227674_6 (sequence is synthesized)
cactgatgctcaaacatgagaagactgggacatccatcagataagaaacgctgcccaaagtgttagactaataagtgacagggttggacaatgaacccaaccactcaaccttccggaaaa

SEQ ID NO: 1012397 - DNA, 90 bp, Artificial Sequence
  ENSG00000227674_7 (sequence is synthesized)
gggttggacaatgaacccaaccactcaaccttccggaaaagtgagttttaaacaatagattatgctaatcttatcagaaaaaaacgacat

SEQ ID NO: 1012398 - DNA, 120 bp, Artificial Sequence
  ENSG00000227674_8 (sequence is synthesized)
agtgttggtgcctgcttttccaccctccacttccaacaggaagcaagcacaggacccaagcattgcagacagttgtatcacgccaatgtgcattcggagccactgacagagtcttgcttt

SEQ ID NO: 1012399 - DNA, 120 bp, Artificial Sequence
  ENSG00000227674_9 (sequence is synthesized)
aatctaatgaagatcaagaacaataatcttaggttatgcagacctccttgatggcatccagaagtctgatcagaggagggatggacacagctttgactaggagatctcacctcccgcata

SEQ ID NO: 1012400 - DNA, 120 bp, Artificial Sequence
  ENSG00000227674_10 (sequence is synthesized)
ccgaccttactcataaaagcttctggttatgttcaaaggcaagtcggatttgagaatttgcctctcgcactctctcattttggccaaatcaaataatgcctttctctcttcctaagcgct

SEQ ID NO: 1012401 - DNA, 120 bp, Artificial Sequence
  ENSG00000227674_11 (sequence is synthesized)
gatgtatcagtgtttggcttattgtgcattgggtactcaaacttaaatttgggggttttgtaacaatttcactcttctgcaatcaattgaaataaattttctcctttgatttctgtttgt

SEQ ID NO: 1012402 - DNA, 120 bp, Artificial Sequence
  ENSG00000227674_12 (sequence is synthesized)
tctttcactcacctgcaatgattctaccagaaatgttttaatcagtaaagatatagcttgaatttttatacttaacccaaatttacatgtcaaaataaaaaatgaaaacaataaaaaaaa

SEQ ID NO: 1012403 - DNA, 120 bp, Artificial Sequence
  ENSG00000227674_13 (sequence is synthesized)
tcctttgtagggacatggatgaagctaggtgaagcaattcctttcctgaggaaaatagaactcactctgctctggcttgtatgaggaggaataggatataagcagttgaggaagaacggt

SEQ ID NO: 1012404 - DNA, 120 bp, Artificial Sequence
  ENSG00000227674_14 (sequence is synthesized)
aggatataagcagttgaggaagaacggtccatgagttgccatccttccctcttcctgcctgccagaagaggtagagcccactgaagaaggagcagaataaggaatggaaaccttagttac

SEQ ID NO: 1012405 - DNA, 120 bp, Artificial Sequence
  ENSG00000227674_15 (sequence is synthesized)
aagtccaagaaattctacccactctactatttttttatgtgtaacttgatttatagtttttactttgaaagaatgtaactattgtacatgtttcataaagtatcaatagctgaatagacc

SEQ ID NO: 1012406 - DNA, 120 bp, Artificial Sequence
  ENSG00000223956_0 (sequence is synthesized)
gctcagagtgtagacactgactgatgggaccaggtacaaaatcccctgggacaaaacagaactttcataactggctgtagagttattgtttttgccttttggaagcttccaccttgtgac

SEQ ID NO: 1012407 - DNA, 120 bp, Artificial Sequence
  ENSG00000223956_1 (sequence is synthesized)
gggaagagcactgtcagcccaacacagaaactctgccgcctggagtcacgtggatccagatgcgaagggactccaacgtcatgctaaggagtttgggctaagaatttgtacagccatatt

SEQ ID NO: 1012408 - DNA, 120 bp, Artificial Sequence
  ENSG00000223956_2 (sequence is synthesized)
tccatcctccaaccattgtccagtgattcaggcagaattccctcctgctcaggaggtagccatcctgtgaccctggaagaaaccagcccaaggaaggtgctaacctacagaagaaggaca

SEQ ID NO: 1012409 - DNA, 120 bp, Artificial Sequence
  ENSG00000223956_3 (sequence is synthesized)
tggccagggtaatcacatagacccggagttgaagccctgactgcaccacacccgaagcctccccacctttcaacctctcggtgatggtgaaccaataaactctttttattgttcaagcca

SEQ ID NO: 1012410 - DNA, 120 bp, Artificial Sequence
  ENSG00000223956_4 (sequence is synthesized)
gaggtagtgtttaatgtgtttaatgtatcttctttacacgtgtttaatgtatcttctttaatcctgaaggctaagaatttgtacagccatattacagatttggaaaatgatgtgaagaga

SEQ ID NO: 1012411 - DNA, 120 bp, Artificial Sequence
  ENSG00000223956_5 (sequence is synthesized)
tttgccactgccactcagctgccaaggatcagaggcaggattctagtctgtcccctttgttccatcacccctgcctccccctgggcccagccaccatcacctctcctggggggagctcct

SEQ ID NO: 1012412 - DNA, 120 bp, Artificial Sequence
  ENSG00000223956_6 (sequence is synthesized)
aattgttctcccttcttcctcttgtgcgctcctccaaactatctccagccaaagtgatctttaacaatgtaaatccagttatatcactctttccattgtaacagacattacttctacttc

SEQ ID NO: 1012413 - DNA, 120 bp, Artificial Sequence
  ENSG00000223956_7 (sequence is synthesized)
tcaggaggtgagtcgacccagtagtgccactggctctgcaacaggaattggttagcagggctttgcatctccttggccacagacgttgggcaggtgtggaaaaaggccatcagctagatg

SEQ ID NO: 1012414 - DNA, 120 bp, Artificial Sequence
  ENSG00000223956_8 (sequence is synthesized)
agatgccctaccttagtattaaagtctcactcaactctaagatcaatgagtggggagggtgagggctagattttcattgaccctggtgttgccagcccctgctggacatcaatctggcac

SEQ ID NO: 1012415 - DNA, 120 bp, Artificial Sequence
  ENSG00000223956_9 (sequence is synthesized)
aaagcagacaatgttaatttttttttccttgaaggagtaaacccaggtctctctccagtgtcttatcagcctcccaaaggcggggaatcccactggggtccctgatcaccttccagagcc

SEQ ID NO: 1012416 - DNA, 120 bp, Artificial Sequence
  ENSG00000223956_10 (sequence is synthesized)
gcaatcagctgcattttgctagaatcggccttgctgtccaccttccccatcagcgtcctcatggagaccaccatgagggaggggccagcgggtctgaacttgaggctatgtctagcagtg

SEQ ID NO: 1012417 - DNA, 120 bp, Artificial Sequence
  ENSG00000223956_11 (sequence is synthesized)
tgtctgagctccaggtacccaggagggggccatggccgagtgatgcccagggcacaggatggtgcaagcaagatgtaaacaagatgcaaacaagatggtgcaaggagatgcaaacaagat

SEQ ID NO: 1012418 - DNA, 120 bp, Artificial Sequence
  ENSG00000223956_12 (sequence is synthesized)
gtttgcaaggagatgtttgcaacaagatgtttgcaaagagatgtttgcaacaagatgtttgcaaggagatgcaaacgagatggtgcaaggagagcctccaaaacagcctggaattcacac

SEQ ID NO: 1012419 - DNA, 120 bp, Artificial Sequence
  ENSG00000223956_13 (sequence is synthesized)
aagtaaatgggaggggcctcagagccactgtgatttgggcagcaataagtatgaccagcagggtgaccagtggaccatgagaaacatccacatgtgggtccaaagaacattgcattcctt

SEQ ID NO: 1012420 - DNA, 120 bp, Artificial Sequence
  ENSG00000223956_14 (sequence is synthesized)
tgtttatctaacccacatcctccttcgtgtcttagggcctttgcactgccctttccttggactgattacccagttactctacctcatgaccaacctctgtcttaattctctgcagagtgc

SEQ ID NO: 1012421 - DNA, 120 bp, Artificial Sequence
  ENSG00000223956_15 (sequence is synthesized)
ttatcaatggctgattgcatttgtttgcttttgtttctctgtccatgacagcaaggaccttgattgtcttatttatcactacttctctcatatcaaaaatccctccatagtcctggctca

SEQ ID NO: 1012422 - DNA, 120 bp, Artificial Sequence
  ENSG00000245614_0 (sequence is synthesized)
gcatgcgcactccgggacgcgcgcgaacacgcagcagcgagaatctacaggggcgtggtttgcgcacgcgggaactgggatctcaaccccagggctaggtgcctcctcccgctgctttcc

SEQ ID NO: 1012423 - DNA, 120 bp, Artificial Sequence
  ENSG00000245614_1 (sequence is synthesized)
gccagctgcggggtgtgagattaatccccgccgattagcgccaggtgtactaagcgctggatggttccctgaccagatgaaacatcagccgatgttctaatgccggtcccctgggcgctg

SEQ ID NO: 1012424 - DNA, 120 bp, Artificial Sequence
  ENSG00000245614_2 (sequence is synthesized)
tccccgagagggaaaacctgttttctgaccccggctctagtcggcctctggaggtctgcagctgggttattttacctttgaaacggacgacacctgccccgtgcaccccagcggctcctc

SEQ ID NO: 1012425 - DNA, 120 bp, Artificial Sequence
  ENSG00000245614_3 (sequence is synthesized)
cacacggagagatggtgtcagtcaaaggccgtctagatgacgagtttatgaaattgttcctggcccgtgccgggcacgaccttgcagagagcccagaagatgaaaccccagccctgccag

SEQ ID NO: 1012426 - DNA, 120 bp, Artificial Sequence
  ENSG00000245614_4 (sequence is synthesized)
gagctcacctgctaattaggaggacaacgaatcacctcacctccctagactttgcttctcctttattcagtgagggattggactagctggtccttgaggacttttcagaaagtctggttc

SEQ ID NO: 1012427 - DNA, 120 bp, Artificial Sequence
  ENSG00000245614_5 (sequence is synthesized)
tgggagatgaccaatgggatcatcttatgctatgagctttcctggaatgacaggtaatggagagtgaggagattttacctgatatggtcctgtttgcaccatcagccagcaacctttctg

SEQ ID NO: 1012428 - DNA, 120 bp, Artificial Sequence
  ENSG00000245614_6 (sequence is synthesized)
ggaagcgtgcttattatgtaccaacataaaagcttgaatataaggaatctcacatcttctgccagcatcctgaaactatggcagactcacttgttaactttgcaaataaggtcaaatttc

SEQ ID NO: 1012429 - DNA, 120 bp, Artificial Sequence
  ENSG00000245614_7 (sequence is synthesized)
agaaccttcacagctcctgatagtcaccgtgtaatagaagattaaaagacaagctcagctcttgttccagtcagcctcattcctctgcctacaatacaaaagtcactcaatcatattctt

SEQ ID NO: 1012430 - DNA, 120 bp, Artificial Sequence
  ENSG00000245614_8 (sequence is synthesized)
gtggctgaagtacatttaccctgtgtagctctagagaaatgaacttacaaactgaaaaatttcagctcagtatataaagaaaaacagattttcacaattagatctatcccaaagagaata

SEQ ID NO: 1012431 - DNA, 120 bp, Artificial Sequence
  ENSG00000245614_9 (sequence is synthesized)
aattttgaggtgataagctcactgctggcttagatcatcacttatgggacctctaatggggcagggatcagactagatgtgtacaaagatctcttccaactgaagctgctactgtggagg

SEQ ID NO: 1012432 - DNA, 120 bp, Artificial Sequence
  ENSG00000245614_10 (sequence is synthesized)
acgttgttttcagtggactctctaatcagatttattttcataccaagaaatgaagaaggtgagctgggggatgcagctgggactcagaagactgcacgtgatagactcatgagctgaaga

SEQ ID NO: 1012433 - DNA, 120 bp, Artificial Sequence
  ENSG00000245614_11 (sequence is synthesized)
tctcgtgcttagtctggagaagctcatcaagtctagctcactttggagtaagttggtgctggagaatgaattcatgctaaccaaattcaccaagagcctgatttacaaatgagagagcca

SEQ ID NO: 1012434 - DNA, 120 bp, Artificial Sequence
  ENSG00000245614_12 (sequence is synthesized)
aggccttaagtttagagcaaaagacaaacttccaatgactttagttttcttgtccaatatctagggcaccttcccctctccacctgctgtgtacacaggagaaataatcactccacaccc

SEQ ID NO: 1012435 - DNA, 120 bp, Artificial Sequence
  ENSG00000245614_13 (sequence is synthesized)
gactgaacattttctaaccttatcactgtggcagaaactggctactcttcctcctgggtagacagccaggctgtatttccccgctgcccctgcagtgagaggtagccattggagccggcg

SEQ ID NO: 1012436 - DNA, 120 bp, Artificial Sequence
  ENSG00000245614_14 (sequence is synthesized)
caggccaatggactctgcactggagtgacacatgctgcttccaggcctgtccctcaaacctcccacatgtcctctgtctgctcttctcacttccaaggagtgtgaccatcgtggaagccc

SEQ ID NO: 1012437 - DNA, 120 bp, Artificial Sequence
  ENSG00000245614_15 (sequence is synthesized)
caggttagcaatggcagattgggaggcatcgatgggaggaacctgggtccctgacttaaagcatcatggatttggactttccgttattgagaaataaacttccattgtgtttaagccttt

SEQ ID NO: 1012438 - DNA, 120 bp, Artificial Sequence
  ENSG00000245614_16 (sequence is synthesized)
tttacctgatatggtcctgtttgcaccatcagccagcaacctttctgggaagcgtgcttattatgtaccaacataaaagcttgaatataagaacagaacacaagaacggggctgaagctc

SEQ ID NO: 1012439 - DNA, 120 bp, Artificial Sequence
  ENSG00000245614_17 (sequence is synthesized)
taacagaaaagacataagacccttgagaaagcattacttgaacacaaggtttctgggacattaaacatgggtataagtgctgctatagtacctttctggggaagacttcctcctgtctcg

SEQ ID NO: 1012440 - DNA, 120 bp, Artificial Sequence
  ENSG00000245614_18 (sequence is synthesized)
tcaggtgtcaaaacaagaggagaaggcttcagaagcacacaatgtcagggtcagaattgaagccaggttgcagcccaaaggggacagacagccctgccagttactcgtgcttcagaggtg

SEQ ID NO: 1012441 - DNA, 120 bp, Artificial Sequence
  ENSG00000245614_19 (sequence is synthesized)
gcacggctgctctcggagaagcaactgactatttcagttttccctgactacagctataaggacgctccctacctgccaccctccatatcatcccccgcccgcacctagacacccgaatca

SEQ ID NO: 1012442 - DNA, 120 bp, Artificial Sequence
  ENSG00000245614_20 (sequence is synthesized)
tttatagtttgttataggaactgccatcttttcattaaaacactgatgctgcctcctgtccctggaatgcttgtaaccctgccctgcttccccagggtaacccccacttggcctttaagt

SEQ ID NO: 1012443 - DNA, 120 bp, Artificial Sequence
  ENSG00000245614_21 (sequence is synthesized)
tcatctctgccgtcacaccctccaggaagccttctctgagcaccccaatccctccaccaacggtttggtgtctccagcagaagctgcacagctgccctctgcctgccctctccttcctcc

SEQ ID NO: 1012444 - DNA, 120 bp, Artificial Sequence
  ENSG00000245614_22 (sequence is synthesized)
tgttagaatcccaagactcccatgcagctagaagcactcgtgtgatccagtgccggtcaataagatgtaagaggaagcagctgggcagagattcttaggaatctccttttaaaaaggaag

SEQ ID NO: 1012445 - DNA, 120 bp, Artificial Sequence
  ENSG00000245614_23 (sequence is synthesized)
agattggcctcatttctgccttttaccctttttctatgtgcttgcctacttcctgcctgggactcctatgcagcacctgcgaatggggacacatattacaactcttaggctgaaacccac

SEQ ID NO: 1012446 - DNA, 120 bp, Artificial Sequence
  ENSG00000245614_24 (sequence is synthesized)
gtgctcaggcagagtagaaggaagtcctgggttcctgaaggcatcatggagccaccatgtccgccctgggctaccgacctcctttctcctgttgtgtggagaatatgaaccccggtgctt

SEQ ID NO: 1012447 - DNA, 120 bp, Artificial Sequence
  ENSG00000245614_25 (sequence is synthesized)
gagccctgtggtcgggtttcttttgggcacagctgaaagtaatcttaactagacgagctcctctgtgagtgctcccaggcacctggctgccctccgcggtgcctatcgaaacacgcatcg

SEQ ID NO: 1012448 - DNA, 120 bp, Artificial Sequence
  ENSG00000245614_26 (sequence is synthesized)
cactcgcatcatctggttatgtgtctgtttccctggcttgttgaaggcacggggcaagcactcaataactgtggtgacagggacgttgctgtgtctcctcatcctggacctgaggaaagg

SEQ ID NO: 1012449 - DNA, 120 bp, Artificial Sequence
  ENSG00000245614_27 (sequence is synthesized)
aaaggtttccctggagcacacagaaaatcccagtggcatccccgccccatctcctctatcagtggagcatcagctctgcgatcactgaagtctttcaggctctcacttcctctgattcca

SEQ ID NO: 1012450 - DNA, 120 bp, Artificial Sequence
  ENSG00000245614_28 (sequence is synthesized)
cctcatagccagtaaatgtccacaccaaggaggatatgaaagtacgaaacatagccctggtccttccatcgaggaagtcaaggaatgcatgcaggacgacaactagcacttgcactgcac

SEQ ID NO: 1012451 - DNA, 120 bp, Artificial Sequence
  ENSG00000245614_29 (sequence is synthesized)
ttcttatgccccaggtgaaatgcacataaaattgaccattttaaagtgaacaatcagtggcatttagtacattcacaatgttgtcccaccactccctctctgtagttccaaaacattttc

SEQ ID NO: 1012452 - DNA, 120 bp, Artificial Sequence
  ENSG00000245614_30 (sequence is synthesized)
atcatcccaaaatgaaaacttgtacccatgaagtagccacttcccattctcccctccactcggcccctggaaaacaccaatctgctttctgtttccatagatttacctagtctggatatt

SEQ ID NO: 1012453 - DNA, 120 bp, Artificial Sequence
  ENSG00000250682_0 (sequence is synthesized)
gagctgttcctattcggccatcttgtctcctcccgtgttttccaggtgtattccacattgtctctactagtgaactaggataatccattgtgtatctcaacctccttcactaccctgtga

SEQ ID NO: 1012454 - DNA, 120 bp, Artificial Sequence
  ENSG00000250682_1 (sequence is synthesized)
cctccttcactaccctgtgaaagtcacatgtgagaagaagcatcacagatgattccatggagaacatcctggaagttctccaaatgaactggaaattccctgtctccccttaaccagcac

SEQ ID NO: 1012455 - DNA, 120 bp, Artificial Sequence
  ENSG00000250682_2 (sequence is synthesized)
gaggccaaaggtctgataattgctgggagaaggtccactatccaagaagagaagaggaaaaggaattaaagtctccaagcactggggatgcaagaagagagttgcacaggagagaaagaa

SEQ ID NO: 1012456 - DNA, 120 bp, Artificial Sequence
  ENSG00000250682_3 (sequence is synthesized)
gaagttgtccacggggtgaccctgcaattggagggaaatgcatgtggatatgtgcagggagtctaggaagtgaagccttagtgatcatttacaagaatgagggttaggtaaaataaggga

SEQ ID NO: 1012457 - DNA, 120 bp, Artificial Sequence
  ENSG00000250682_4 (sequence is synthesized)
cggagctgttcctattcggccatcttgtctcctcccgtgaactggaaattccctgtctccccttaaccagcactggaagcagatgggaagagaatagctgtgactgactcacactctaac

SEQ ID NO: 1012458 - DNA, 120 bp, Artificial Sequence
  ENSG00000250682_5 (sequence is synthesized)
gttaagtaaagacctgtttgggtcttcttcagaatcccatacatttgagttcattagtcagaaaaagggaaaataccaccaccccatcctggaatggcagtcatgtacacttttataatg

SEQ ID NO: 1012459 - DNA, 120 bp, Artificial Sequence
  ENSG00000250682_6 (sequence is synthesized)
agagattgggcagcaaagggggccccttgtggacctcacccagccagagaaggaggcagaatgtttcctttactatcttttcctctccccagaggaacactacatattgttccctccatg

SEQ ID NO: 1012460 - DNA, 120 bp, Artificial Sequence
  ENSG00000250682_7 (sequence is synthesized)
ggcttaagagaaggtgccagggttacagatagatatatcgctagctgtagagcacagggtgaattgggatgtccatgtacaaagctagggacaggagaatcagtttaaagactttaaaaa

SEQ ID NO: 1012461 - DNA, 120 bp, Artificial Sequence
  ENSG00000250682_8 (sequence is synthesized)
taattaggaaaaaaaggaaggcctgacccaaagcttaggagtgcaggtagagaagagatggtgccatgatataccatgtctctgggacttttctgtattcctcttcctctgtatactgta

SEQ ID NO: 1012462 - DNA, 120 bp, Artificial Sequence
  ENSG00000250682_9 (sequence is synthesized)
ttgccctcattccctatttattcaaaatctgtgctacctccactgcgaagacttccacgagaaaattcagatatttcttcttttgtggacactttctaccttacaaataagttaatttta

SEQ ID NO: 1012463 - DNA, 120 bp, Artificial Sequence
  ENSG00000250682_10 (sequence is synthesized)
attcaaggaagagtttttccggaaccctgttggcctgctcacaggaatgtaagttccttaaatctagggcacagtgtctttgagaactgcaatcacctacatcaacatgacatagctatt

SEQ ID NO: 1012464 - DNA, 120 bp, Artificial Sequence
  ENSG00000250682_11 (sequence is synthesized)
aggactaagaacagagaccacctgtgtcaacatgagttactatttttttccgtgaaacatttgtccaagaaagataagactgtaaccaataaatagtttgcaagtaattcctgcaaatca

SEQ ID NO: 1012465 - DNA, 120 bp, Artificial Sequence
  ENSG00000250682_12 (sequence is synthesized)
agtaaaaagcctcttcctcaatctctatgacctgccttctttttccagtgctgcctctcacaggttatccatctataattgagttgctagtaataaccttcaattattcagttaatcacg

SEQ ID NO: 1012466 - DNA, 120 bp, Artificial Sequence
  ENSG00000250682_13 (sequence is synthesized)
caggacccaggtggtctggatggcagaaactgttctgaagggctgtttggagataagaatatagtaatatacaagtatgtcccatatgatttgtaagaatattattttttggggaaaagc

SEQ ID NO: 1012467 - DNA, 78 bp, Artificial Sequence
  ENSG00000250682_14 (sequence is synthesized)
tgccagggcaatcagacaagagaaagaaataaagtgcatccaaataggaagagaggaagtccaattatccctgtttgc

SEQ ID NO: 1012468 - DNA, 120 bp, Artificial Sequence
  ENSG00000250682_15 (sequence is synthesized)
aaataaagtgcatccaaataggaagagaggaagtccaattatccctgtttgcaggcaacatcattctatgtctagaaaaccccatagttgtggcccaaaagctccttaagctgataaaca

SEQ ID NO: 1012469 - DNA, 120 bp, Artificial Sequence
  ENSG00000250682_16 (sequence is synthesized)
tttcaggatataaaaccaatgaatgaaaatcactagtattcctgtacatcaacaacagccaagctgagagccaaatcaggaacgcaatttcattcacaattgctacaaaaaagaataaaa

SEQ ID NO: 1012470 - DNA, 120 bp, Artificial Sequence
  ENSG00000250682_17 (sequence is synthesized)
ggggggatatacttttcaaagaaaccagtaaaaagcctcttcctcaatctctatgacctgccttctttttccagtgctgcctctcacagttttccaggtgtattccacattgtctctact

SEQ ID NO: 1012471 - DNA, 120 bp, Artificial Sequence
  ENSG00000250682_18 (sequence is synthesized)
aattctgaataaacagtgaacatccatgtgggagcaatgaggaggaactgtagcatctggaacagtccaaaaaggaagctgggagtcagcccatcacgaggttgcttgatcagaatcaca

SEQ ID NO: 1012472 - DNA, 120 bp, Artificial Sequence
  ENSG00000257653_0 (sequence is synthesized)
ttttacaaagagtttgattttattgatatttaaatatattaaatatttcactgaaatacatggttcaccatcctcccccacccccacagtggttacattataaaaccaaagcccacggcc

SEQ ID NO: 1012473 - DNA, 120 bp, Artificial Sequence
  ENSG00000257653_1 (sequence is synthesized)
tcccacctcctgactcctctaccaactgggtgaggaaagggacaatggtagcccaggggaagggcatggctggcactgtggtacggggatccagggtgtggacaggccctcccacctggc

SEQ ID NO: 1012474 - DNA, 120 bp, Artificial Sequence
  ENSG00000257653_2 (sequence is synthesized)
ttcaacctcctaacccttctgccagccctcaaggcttcacaagggactggggagctagaaacatgctagactcaggctgaaggctggggaaagccaagtttaaggttcctcttccccacc

SEQ ID NO: 1012475 - DNA, 120 bp, Artificial Sequence
  ENSG00000257653_3 (sequence is synthesized)
ccgtagtaccagtatccaggtcctcagagggattccatgctaccccagccccaaagcataccatgtcccaggacactatctggggaagccaggaaattcctcagcctctgtccatcaaac

SEQ ID NO: 1012476 - DNA, 120 bp, Artificial Sequence
  ENSG00000257653_4 (sequence is synthesized)
cccagacagttcaagtgctggcatggagcactggggcttaagcaagcgcttgggtccctgccacagacagggagagtcatgctgcacacatggcccccgaacggcacttagggatttggc

SEQ ID NO: 1012477 - DNA, 120 bp, Artificial Sequence
  ENSG00000250685_0 (sequence is synthesized)
cacaacgctcctcagatagggcactcccccagcaggggtacagcttggctccgggacctcggtcccgccgaggctggcttcagtttctgaatttgcccaccagtggcttcgagggccaag

SEQ ID NO: 1012478 - DNA, 120 bp, Artificial Sequence
  ENSG00000250685_1 (sequence is synthesized)
cccccaggccctgctggtccaggaggagagacagctgcctgcgagcctcctgcagggccctgcgggcgatgaccaggccatggcagtcgtggagctgctggcccgagaactccagccagc

SEQ ID NO: 1012479 - DNA, 120 bp, Artificial Sequence
  ENSG00000250685_2 (sequence is synthesized)
cagcacagcagctgctgccggtgcccagagccaccagcttgtagatctccttcacgtggcccctggcacgcgggatctctgtgcaggagggggcagagacggcccagcctaaggcccagt

SEQ ID NO: 1012480 - DNA, 120 bp, Artificial Sequence
  ENSG00000250685_3 (sequence is synthesized)
atggcgagcgctcgtccaacaggaggtcaaagccggcgctcaccaacgctgcgcagcgctgctcatgggtcaggatgttctctgcgccagggcgagagactgcaggtgacgtcctgatgc

SEQ ID NO: 1012481 - DNA, 120 bp, Artificial Sequence
  ENSG00000250685_4 (sequence is synthesized)
tcagatggtttgtacagcaacccacctcctgctcacacgcacagccacttccgcctccccacgggactgccagcctcagtcctcttgtccccagctgcggctcagctgcctggccctccc

SEQ ID NO: 1012482 - DNA, 120 bp, Artificial Sequence
  ENSG00000250685_5 (sequence is synthesized)
tccattacctgggttctccagctgactccggatgtagcagagggcagagagcgctgcctgctgtttggcctccgtcttgctattcgcagtgcccgcagggcagaccaccccatccagttc

SEQ ID NO: 1012483 - DNA, 120 bp, Artificial Sequence
  ENSG00000250685_6 (sequence is synthesized)
cgcgctcaccgagaaggggaagcagggacctggggaaggagccaggtgaggaagcagccccctggccttcgccctgtgacagcaggctccatcgccaccccatgccgcgcacacccttga

SEQ ID NO: 1012484 - DNA, 120 bp, Artificial Sequence
  ENSG00000250685_7 (sequence is synthesized)
gtgcctctgcaggctgtgacccatcgctgattcaaccaagtcctcacccaactcctccacagcagggatgcgtgactccatttcacagatgagcagaaacggcaggcggtttgcccaact

SEQ ID NO: 1012485 - DNA, 120 bp, Artificial Sequence
  ENSG00000250685_8 (sequence is synthesized)
tgagtcaggacccaaatccaggtcccctctccagagcccacgccaccctgttctcaggaggaaggctctgagcacttccacctgccacagacacattgctttcaattcctctcctccagg

SEQ ID NO: 1012486 - DNA, 120 bp, Artificial Sequence
  ENSG00000250685_9 (sequence is synthesized)
ggctctatatttgaacacttttcctatgaaacagtatcattttgggtgttacttataacacaaaagagagatgaaaaatctggaactgggatcacatggtcaaaggtgcagggttaattt

SEQ ID NO: 1012487 - DNA, 120 bp, Artificial Sequence
  ENSG00000250685_10 (sequence is synthesized)
aggactgcccctctgggggtttcccttttggaagggaacccatttcagcactccccactgcgctgagatctgtctgctctaaacaggcatcaaaaccagcaaccacagacagacgtggaa

SEQ ID NO: 1012488 - DNA, 120 bp, Artificial Sequence
  ENSG00000250685_11 (sequence is synthesized)
gggatgttggccttagaaagccagcatgtggctgccatcctaacagcgactgaatctggggagaaccatcaaagcatgattttctaaaaccacaagtgacaatgttatagggacaggata

SEQ ID NO: 1012489 - DNA, 120 bp, Artificial Sequence
  ENSG00000250685_12 (sequence is synthesized)
tctacatgatctccaaatgcctcccctggatgacttattcagcacaaaggagaaagtgaagacacctggtagatgccaccctagtcaaatccccacagctcgcatcgccaggggacaaag

SEQ ID NO: 1012490 - DNA, 120 bp, Artificial Sequence
  ENSG00000250685_13 (sequence is synthesized)
caagatcgcacacttcctggtgagatgcgtgccaaagactcgacatcacttcaataacacatcacctgaactcagttctgaggaaacagacaaacccaagctgaaggacattcgcaaaac

SEQ ID NO: 1012491 - DNA, 120 bp, Artificial Sequence
  ENSG00000250685_14 (sequence is synthesized)
tactggcccttactcttcaaagacatcaatgttgtgaaagacaaagacaggaactgtttcaggtaagagattaaagaggcatgacagctaactgtaatgtcatactgggatgggaaacaa

SEQ ID NO: 1012492 - DNA, 120 bp, Artificial Sequence
  ENSG00000250685_15 (sequence is synthesized)
tggccatgaggtcattactgggacaactggcaaaatttgaatgtgaatagaaattagaagatggtattatatcaatgttaaatttccaggatttgataattgtattgtagttacataaga

SEQ ID NO: 1012493 - DNA, 76 bp, Artificial Sequence
  ENSG00000250685_16 (sequence is synthesized)
aatttccaggatttgataattgtattgtagttacataagagatgcccttgtttttaagaaatatagatggggctga

SEQ ID NO: 1012494 - DNA, 120 bp, Artificial Sequence
  ENSG00000250685_17 (sequence is synthesized)
cccatctctattaaaacacaaaaaaattagctgggcacgggggcacaagtctgtcattccagctactcgggaggctgaggcgcaagaatcgtttgaattcgaaaggcaaaggttgcagtg

SEQ ID NO: 1012495 - DNA, 72 bp, Artificial Sequence
  ENSG00000250685_18 (sequence is synthesized)
gccacagagcgagactctgtctcaaaggaaaaaaaaaaagagggctgggcaaggtggctctaggtcaggagt

SEQ ID NO: 1012496 - DNA, 120 bp, Artificial Sequence
  ENSG00000250685_19 (sequence is synthesized)
agactgcaggtagaagggggcccacgcctctcccctcgacactacaagcctgggtccgggaatgctcacctacctacgctcaggggggccagtggaggccggctggaggtctggggggac

SEQ ID NO: 1012497 - DNA, 120 bp, Artificial Sequence
  ENSG00000250685_20 (sequence is synthesized)
agttttcatcttccagacacaggacattacacgagctgctcttctagcggtccctacccccggtgtccccagaggacgtgaaagcagggaccggcacatgtaccccgccccagctccctg

SEQ ID NO: 1012498 - DNA, 120 bp, Artificial Sequence
  ENSG00000228400_0 (sequence is synthesized)
gctcgggcgcttttcctccaggaagccaagccgctgcggtgcgctttggctacctgggagggaaaggggaaggaaattctctctaccccccggctttctcttcccttccccccatttggg

SEQ ID NO: 1012499 - DNA, 120 bp, Artificial Sequence
  ENSG00000228400_1 (sequence is synthesized)
aaacgagtagaggtattgaaatttaaaggagattttcaaaggccgctgtcgaaggatgctaataggagttgcaagacagacgcattaggaagagggaatttcccacggaaagctttgtaa

SEQ ID NO: 1012500 - DNA, 120 bp, Artificial Sequence
  ENSG00000228400_2 (sequence is synthesized)
tgagctaacgagacgcgttcccccacctcacctttggaggggaggggaaaacagagcttgaattacgcatttaatttcccctgcgctcgttcccaaatgggaaaagctgatgggtctcga

SEQ ID NO: 1012501 - DNA, 120 bp, Artificial Sequence
  ENSG00000228400_3 (sequence is synthesized)
taggatcgggatttctggtttcaaggtttaacgttgtgcgcgctcccctgcttgcagaccccgcagctactcccaccgcacatcctctcgccggtcttcgcgtctgcgtctccctcccgc

SEQ ID NO: 1012502 - DNA, 120 bp, Artificial Sequence
  ENSG00000228400_4 (sequence is synthesized)
tgttggcgcgttgcttcggtttatccaggtctccaactcgcccaatacctggatcaacacaacgaaagcacagaaagtggacaaacagaaggagaacaactatgaaggctcatgaaaact

SEQ ID NO: 1012503 - DNA, 120 bp, Artificial Sequence
  ENSG00000228400_5 (sequence is synthesized)
catgatttaaagatcacatttctccacctggactgatttaagaattgaggttagttgactactattagcaagacttgcaattatggcatgcaggcacatcctcttctgttcacttgagtt

SEQ ID NO: 1012504 - DNA, 120 bp, Artificial Sequence
  ENSG00000228400_6 (sequence is synthesized)
atttctgtatagcagtagatcatgaggacatggacaaaggcattgcacctactttctccttgagcaatttccattgatgtctgtgatgctgatactgaattacagaatcccgaggattct

SEQ ID NO: 1012505 - DNA, 120 bp, Artificial Sequence
  ENSG00000228400_7 (sequence is synthesized)
gtattgttgtagttctaaaccttttgctgtggaggttagcctgtggataggaagagtcaaacaagaacaacttatacagtttctctggctagaaaatgaacaatacatgcttcctgtcct

SEQ ID NO: 1012506 - DNA, 120 bp, Artificial Sequence
  ENSG00000228400_8 (sequence is synthesized)
tatgatgttcccacatgtggatggtgaagcaggcaccaagatgactaagctagaacaacaagatttggtgaatccagagctgacgaataacagttcatctggcatggaagcaaaggaaga

SEQ ID NO: 1012507 - DNA, 120 bp, Artificial Sequence
  ENSG00000228400_9 (sequence is synthesized)
agttccagggaaggcaaaggcccaaatttgtgaatctgtgtgccatgtgctggggaaaattgaaaccttccaatgaactagaatgaatgttgtgtgtatgggaagcctatggactcaatg

SEQ ID NO: 1012508 - DNA, 120 bp, Artificial Sequence
  ENSG00000228400_10 (sequence is synthesized)
agaagaataattagtgaatgtgtccatgttgtctatattttacatgggtcagaaggaaggattgagtgcagaagacaaaatgttaatcggaagtggggtcattttcatatttaggcttaa

SEQ ID NO: 1012509 - DNA, 120 bp, Artificial Sequence
  ENSG00000228400_11 (sequence is synthesized)
acaagaatatagacattactattaaagcatagaaataaaaaaatgatgatatttttaagtgtcataacttctaactatttgccatcatatttttggtttactccctttcaaatacactta

SEQ ID NO: 1012510 - DNA, 120 bp, Artificial Sequence
  ENSG00000228400_12 (sequence is synthesized)
agcgtaagtgtagcctagaagagagcaagacccaatatttggctagttcagggagtgacttacaagcaaagcagttccacccatgaccaatttcttaaatttctggagcaacccaagtag

SEQ ID NO: 1012511 - DNA, 120 bp, Artificial Sequence
  ENSG00000228400_13 (sequence is synthesized)
atcaagtcacttctttggaaagatgttaaactccaaagatcaatgtatagacctttccacttagcttacaactagataaaacattcttttgacatgaaatggcttaggacaaatgcttta

SEQ ID NO: 1012512 - DNA, 120 bp, Artificial Sequence
  ENSG00000228400_14 (sequence is synthesized)
acaaaagaactgattaaacactgctgttactaaagcctcacaatagttaatgcacttaaagagttctaaatcggctgagcattgacgtcttaaaggattatattgagtgtcaccatatac

SEQ ID NO: 1012513 - DNA, 120 bp, Artificial Sequence
  ENSG00000228400_15 (sequence is synthesized)
acaggaaagtctccttcaaaacctactatggagtataatggactatacatgttattgtaaacaaattggcaagattcgaggttttctctggattctagcatctttaaaaagagaatgtct

SEQ ID NO: 1012514 - DNA, 120 bp, Artificial Sequence
  ENSG00000228400_16 (sequence is synthesized)
gttgttttataaaagcatttatttacatctttatcaggtatcctccagtcccaaatgtgagaggttagggcaatctgtggattggggtggctttctcttctaagtcactcccagactagg

SEQ ID NO: 1012515 - DNA, 120 bp, Artificial Sequence
  ENSG00000228400_17 (sequence is synthesized)
gaagtgactcagaagagtcactgagtggggaaacacagaaccagggatggctctgtagctctgacctaacttaaagctccagattggtctgaccttttctcactttgcgattcagacctg

SEQ ID NO: 1012516 - DNA, 120 bp, Artificial Sequence
  ENSG00000228400_18 (sequence is synthesized)
aaaaaaatgaggccaaagttggctcatcttcctcccttgaaaatgttctaaggagatgaaccacatcctgtcctatctcccccaaaccatacctcagcacaggggcttgtttcattggta

SEQ ID NO: 1012517 - DNA, 120 bp, Artificial Sequence
  ENSG00000228400_19 (sequence is synthesized)
caagaataagttgtctttcttttgctagaaagctcacaactttaaaacctacaaaaaatgaatgaattataatctagaacttcagatatctgtatcataatagttggatatgcttatgga

SEQ ID NO: 1012518 - DNA, 120 bp, Artificial Sequence
  ENSG00000228400_20 (sequence is synthesized)
gtatgatatgatcttttgcagcaaaatctcactttgtactcaacaaatacatacaattattatttgaaagttcaattaattagtttaaaaatctgtagaaatatcagtgtcttctgggga

SEQ ID NO: 1012519 - DNA, 120 bp, Artificial Sequence
  ENSG00000228400_21 (sequence is synthesized)
ggaaattattacgtgcatgtcaagatttgccaaaattttaatactttgttaccctatgtcacttttgtgaagtgattatagggatatttttctaaatatagagtttatcataaggaagtt

SEQ ID NO: 1012520 - DNA, 120 bp, Artificial Sequence
  ENSG00000228400_22 (sequence is synthesized)
ttgttaacaatagaatcttaaaagtgcactaggatattcattgcaattttgtttttaaaagtaaaaaaacattggctggatgtggtggcttatgcttgtaatcccagaactttgggaatc

SEQ ID NO: 1012521 - DNA, 65 bp, Artificial Sequence
  ENSG00000228400_23 (sequence is synthesized)
tgtggtggcttatgcttgtaatcccagaactttgggaatctgaggtaggcaaatcacttgaggct

SEQ ID NO: 1012522 - DNA, 77 bp, Artificial Sequence
  ENSG00000228400_24 (sequence is synthesized)
agctgggtgtggtggtaggcacctgtaatccaggtatgtgggaggctgagacacgagggcagtgagccacggcactc

SEQ ID NO: 1012523 - DNA, 120 bp, Artificial Sequence
  ENSG00000228400_25 (sequence is synthesized)
aggaagaaaggaaggaaggaaggcgagagagagagagagaaagaaagagagagataaagaagaaagaaaagagaaagagtaaaagaaagagaaagaaagagaaagaagaaagaaagagaa

SEQ ID NO: 1012524 - DNA, 120 bp, Artificial Sequence
  ENSG00000283360_0 (sequence is synthesized)
ggagtggggtctggcgtcccggcgaccgtcgccgtcgtcctcgttagtatagtgatccagaagttctacttctaacctaaaatcctacacaatggttgctttgtaaaacacgtttcataa

SEQ ID NO: 1012525 - DNA, 120 bp, Artificial Sequence
  ENSG00000283360_1 (sequence is synthesized)
catcctccaccctacacgtttagaggtcctctagtactgaactagaggctcctgtacttttccctccagaaacaaatcctttgagagctgctttcctgcagaacctcgcagccagcaaga

SEQ ID NO: 1012526 - DNA, 120 bp, Artificial Sequence
  ENSG00000283360_2 (sequence is synthesized)
ctttgcagaatgacaaataagagcaaataaaaagccccatcataggaaggactatggaagaaaggaaaaagctttatagttcactactcttcacagcacttttcttgctgcttttttcag

SEQ ID NO: 1012527 - DNA, 120 bp, Artificial Sequence
  ENSG00000283360_3 (sequence is synthesized)
actagacccgacaatttatgtagctgatgctggtaccagaagaatctgagcaggaaacgaatctggtcaaagcacgtggttggattttcgtgacccagtgcttccaaaaggccaaacctc

SEQ ID NO: 1012528 - DNA, 120 bp, Artificial Sequence
  ENSG00000283360_4 (sequence is synthesized)
acctctgctccacctgcccccactcttggatccagcagcctcacacttcccaggcctctgccctgacatctgcctccctagaaggatgaagagcagtagcgcctggaattccaaccatct

SEQ ID NO: 1012529 - DNA, 120 bp, Artificial Sequence
  ENSG00000283360_5 (sequence is synthesized)
gccacagtcttgcatggcacaggtgactactgctgatgtggtggaaatttctgattttttaatgttgactttgtagccagcaatcttattgaactattttattcattctaatagtttact

SEQ ID NO: 1012530 - DNA, 120 bp, Artificial Sequence
  ENSG00000283360_6 (sequence is synthesized)
aataattctgcttcattttctatgtagctaatcaaaacaaatgtgcctctttgagaaactatatagcaccaaggttaaaaggtgaaatctggaagccataaaaactagtttcaaaactgt

SEQ ID NO: 1012531 - DNA, 120 bp, Artificial Sequence
  ENSG00000227098_0 (sequence is synthesized)
ggacacaacctgtggaaggctaggcagggagtcaggaaaggctggagtcaccatggttaaaggactatagaccagttgttaatatgagaaatatagccaggagatgactctaacacaacg

SEQ ID NO: 1012532 - DNA, 120 bp, Artificial Sequence
  ENSG00000227098_1 (sequence is synthesized)
ctaacaggaaggactgcaacctggaacaaggagagacaaagggaaggaggagtctggagccatattgaagatgaaattgagatatggactaggtggtggatcgtttttataagaggacat

SEQ ID NO: 1012533 - DNA, 120 bp, Artificial Sequence
  ENSG00000227098_2 (sequence is synthesized)
aaaagaggatgctaaagctaattgccacaatcagaactcaaagacctagcaaatgcaaggtggtatttattctaaactcagcaaagtagtagaaaaatagttttgagaacagttttaagg

SEQ ID NO: 1012534 - DNA, 120 bp, Artificial Sequence
  ENSG00000227098_3 (sequence is synthesized)
agactagggtaacagtgagaaaatagttcatggctagtctggacttaggactttagggtcggcctggtgaattgaagggaagcagctgatacactctggttgccttgtaccctggctttt

SEQ ID NO: 1012535 - DNA, 120 bp, Artificial Sequence
  ENSG00000227098_4 (sequence is synthesized)
ggtgctttcccatgtgctgtagtcatcagtaatctggaggaaatgctatagaggcaaagacaccattagatgggtgctcaactagcaaacaggatgtgaccacagagtagttaccccaag

SEQ ID NO: 1012536 - DNA, 120 bp, Artificial Sequence
  ENSG00000227098_5 (sequence is synthesized)
accaggtcagcatgacccaaaaggcagaagaggacaaggtttatgagtgttgggctgagctcacgcctgcttgaacatctcaagaacaatgttaatgatggaagagagagataggagagg

SEQ ID NO: 1012537 - DNA, 120 bp, Artificial Sequence
  ENSG00000227098_6 (sequence is synthesized)
agcagtgacatgaagaaggcatgtgttttgttaaaaagttttaaatactcctataaaagatagtaaggtacaagttgtttgcttgatcagcaatgctaattgcctttgaagtgcatgcct

SEQ ID NO: 1012538 - DNA, 120 bp, Artificial Sequence
  ENSG00000227098_7 (sequence is synthesized)
ggggattccatggagagaggaccctgtttctccaccccaacccaaattcactgagtttatgtcagaatgttcagaagcccctttacaaattcctctgattgccttgttagacactggcca

SEQ ID NO: 1012539 - DNA, 120 bp, Artificial Sequence
  ENSG00000227098_8 (sequence is synthesized)
cctccctgaacctgggccaagatgagggtctacaccttggcttagttctactatgaaagactttcctgcagtaaaagttacctgtctgaaacattcagaagagtgaaaatgccacatctc

SEQ ID NO: 1012540 - DNA, 120 bp, Artificial Sequence
  ENSG00000227098_9 (sequence is synthesized)
caatttccagcaatatatttgtctgccatgatttggcctggaagcttaagcaggaagaccacttggagccagacttcagagtgatctgtctctaaggaataactttcatattgcagcgtt

SEQ ID NO: 1012541 - DNA, 120 bp, Artificial Sequence
  ENSG00000227098_10 (sequence is synthesized)
cggttttgcaattcttcctaagctactctaaattcgcagcataaatctgcagaaagacttcaccctccacatcaaacccttataaggatccatttctgctctcattttagaatatctttt

SEQ ID NO: 1012542 - DNA, 120 bp, Artificial Sequence
  ENSG00000227098_11 (sequence is synthesized)
ctaatagctaaaggcagacagaggcaaaccaagaaatccagactttgcatcaacgggttaaatcatatgtcaaaggtgcaaccataacgtattacaagcttctcatcacataatacatca

SEQ ID NO: 1012543 - DNA, 120 bp, Artificial Sequence
  ENSG00000227098_12 (sequence is synthesized)
ctcaagaaaaaatatttgggcagcttttctaattcatcttcctggtgttaaaggagcacatctccagtgttcgtgtcttctgtttcaattaaagcaatcatgcctactcttttaggaaac

SEQ ID NO: 1012544 - DNA, 120 bp, Artificial Sequence
  ENSG00000227098_13 (sequence is synthesized)
ccacaatggcaggagacaccatgagatgttttctactgtagaaactttctcattagaaatagcccatttatacaggggactggctaatgtttttctatgagtatcattagccagtgtctc

SEQ ID NO: 1012545 - DNA, 120 bp, Artificial Sequence
  ENSG00000227098_14 (sequence is synthesized)
aaatacatatttttttctttctatccggttttgcttctcaccacaatatacacttgtggctattgtttgataaaatggccactataaagatgtaacttgcttaacaaatatcagcaagtg

SEQ ID NO: 1012546 - DNA, 120 bp, Artificial Sequence
  ENSG00000227098_15 (sequence is synthesized)
aagaggatgctaaagctaattgccacaatcagaactcaaagacctagcaaatgcaaggatacaataagaagtcagcagtctgcaacccagaagaggaccctcactggaacccaggaatgt

SEQ ID NO: 1012547 - DNA, 120 bp, Artificial Sequence
  ENSG00000227098_16 (sequence is synthesized)
gggtgtatcttgatcacctttggaatctaccactgcatggagcacagcacttaccacctagtagttctgtttgtttccaagtttggaagaaacataattgaatcattttgaggaattcca

SEQ ID NO: 1012548 - DNA, 120 bp, Artificial Sequence
  ENSG00000227098_17 (sequence is synthesized)
atccctgacaagatgccagtgctattttacagcaagagtagacgaggaaggctatactacgtggtcctgggcaagttatttaaattctctgtgcctcagttttctgaaccgtaagatggg

SEQ ID NO: 1012549 - DNA, 120 bp, Artificial Sequence
  ENSG00000227098_18 (sequence is synthesized)
aagaataatagtaactacctctggaggctgttgtaaaagttaaatgatctgatctatgtaaagcacttagaacagtacctggtatataagtgtgtgataaataaaatccaatatgaagaa

SEQ ID NO: 1012550 - DNA, 120 bp, Artificial Sequence
  ENSG00000227098_19 (sequence is synthesized)
gtggacacaacctgtggaaggctaggcagggagtcaggaaaggctggagtcaccatggtagggctgggaagctctggttcccaaagtgggtttgtacccatcctctcatagtacccttta

SEQ ID NO: 1012551 - DNA, 120 bp, Artificial Sequence
  ENSG00000227098_20 (sequence is synthesized)
ggattttattaggaacatttgtctttataagaaaactgaggcacgataatctgtctggctatggtgatagaagtctgggtactcttcctccatatcaaggtcacttattggtatctcctc

SEQ ID NO: 1012552 - DNA, 120 bp, Artificial Sequence
  ENSG00000227098_21 (sequence is synthesized)
ttaccacctagtaggtaagcaacaaatgcttgcttgtcaattgatttattcagtagactcagtgctatgtgtacattaaacacctggggagctttaaacaataaacgagcaaaccaacaa

SEQ ID NO: 1012553 - DNA, 120 bp, Artificial Sequence
  ENSG00000227098_22 (sequence is synthesized)
ggcattctatcctgtggacacaacctgtggaaggctaggcagggagtcaggaaaggctggagtcaccatggtgataaaatggagaagagaaaaaaggaaagggagtatcttctgattgta

SEQ ID NO: 1012554 - DNA, 120 bp, Artificial Sequence
  ENSG00000227098_23 (sequence is synthesized)
tttattccatgggtttttcaactctaagaaacctgaggctaacagtttacaaagaattgaaaaaaccgtacaatgagtccaaagcttattttaacccttctatagattttcatgccttct

SEQ ID NO: 1012555 - DNA, 120 bp, Artificial Sequence
  ENSG00000227098_24 (sequence is synthesized)
tgaagccaatttggagcttagaaatatttattattggtatttctaatgaagaatgttctttatacacacctgtcaccaacagtaacctcatgatttagaggcattagcttcttttcctac

SEQ ID NO: 1012556 - DNA, 120 bp, Artificial Sequence
  ENSG00000227098_25 (sequence is synthesized)
tggtgaagagtaagtatatagcatctttcaaaagtcacttattggtatctcctccagtcccagaaggaggagttgaggccgacattggacaaacaaagccttaatttaaaagcagggact

SEQ ID NO: 1012557 - DNA, 120 bp, Artificial Sequence
  ENSG00000250358_0 (sequence is synthesized)
agtactgctctgttagcagcaggagcaaatgaaagaattcagtgtcagcattttctgtttctcatctgacaaacaaggtcaggtacttctttgaacaacccagttccaatagctgtgaaa

SEQ ID NO: 1012558 - DNA, 120 bp, Artificial Sequence
  ENSG00000250358_1 (sequence is synthesized)
cataaagagacaagcaggggaagattttccagaaaggctggtggctaggcacaagcaaattacaccattaatgtcatcctggcgaatgaaacaagagaatagtatttatcagagaaagtc

SEQ ID NO: 1012559 - DNA, 120 bp, Artificial Sequence
  ENSG00000250358_2 (sequence is synthesized)
tggtgagttgaagtccaagaccccaggaaacaactagccctgctgggctgcccctccttcggagtgggactatatgatcctcatcaggccaatccacgtcacagaatggtctaggcattg

SEQ ID NO: 1012560 - DNA, 120 bp, Artificial Sequence
  ENSG00000250358_3 (sequence is synthesized)
gatgagtgcctcaatctgagccaatgaaggtcattgctgagacattttactggttgccaggctgcaggcatcccaggcttcctgctgccctcatgtctacaacctgtcgtctggaacatt

SEQ ID NO: 1012561 - DNA, 120 bp, Artificial Sequence
  ENSG00000250358_4 (sequence is synthesized)
ccaggagccacttttatcacttgcagcaatcttcttcaaataccacagactgggcaatttataaatgatggaagtttatttggctcatggttctggagactgggaagtccaagaacatgg

SEQ ID NO: 1012562 - DNA, 120 bp, Artificial Sequence
  ENSG00000250358_5 (sequence is synthesized)
gcatccttatctccgaacacaaaacgtcacagagaagaatctgaacaaacaggccttgctaagtttcccttggttttttaccatcagatcacactgttttgcccaatcatatttctccac

SEQ ID NO: 1012563 - DNA, 120 bp, Artificial Sequence
  ENSG00000250358_6 (sequence is synthesized)
aactgtccactcttcactaaacctaagatgtatatatatatatttcactgtttctttgggttttcatttccttatgaagactcatgtcatgtaaaacctacattaactaaatatgtctaa

SEQ ID NO: 1012564 - DNA, 120 bp, Artificial Sequence
  ENSG00000250358_7 (sequence is synthesized)
ttttctctgttaatctgtcttaggtaaaagggacttcagccatgaacctaggaatggggagataaagatgtttttcctcctacatggtgaagagaagagggtttgctatcactctcctcc

SEQ ID NO: 1012565 - DNA, 120 bp, Artificial Sequence
  ENSG00000250358_8 (sequence is synthesized)
ctaccacgtttctcttttggaggcctgagttcagaacacttatatagtcatcacctttgaaattagtttgaatttaatttcttactgatttaaattttttggaagtttccatttagataa

SEQ ID NO: 1012566 - DNA, 120 bp, Artificial Sequence
  ENSG00000250358_9 (sequence is synthesized)
atctttttcactggtggaatatctagtgaaggttgcagggggatctaactgagaacattttcttaatgattgtaccacttcagaagaaagagaatatacttaaaatactaaaaaattaaa

SEQ ID NO: 1012567 - DNA, 120 bp, Artificial Sequence
  ENSG00000250358_10 (sequence is synthesized)
aacatgcagcccacaacagaactgatggagcctatgtagcgagaagaggtcagaagctgcccaaagcagctctgaggctggggtcactgcacccaccagctgctgcctggaagagaaacg

SEQ ID NO: 1012568 - DNA, 120 bp, Artificial Sequence
  ENSG00000250358_11 (sequence is synthesized)
ggaaagggtggatgcactgttttgcattttttctccagacaaccaaagaaatcgggatgacagacagagttccctgcctggggaaaacagctctttccaacccaacttataggattggga

SEQ ID NO: 1012569 - DNA, 120 bp, Artificial Sequence
  ENSG00000250358_12 (sequence is synthesized)
gtgttggggagggtggaggagtcatcctcgacacacttatgtctgtgcaagatgtggagaaaagtaggaaagaagcagaactccagcacatcttcaaatggatggcccctgaaactgaac

SEQ ID NO: 1012570 - DNA, 120 bp, Artificial Sequence
  ENSG00000250358_13 (sequence is synthesized)
agacagtacacaaaggcacactacaactttctgggcaagagtctgtggctgcaaagatggaaactgatttgtcgaggaccctaggaggtgaactgaaaccagaaagcagaaatgctggga

SEQ ID NO: 1012571 - DNA, 120 bp, Artificial Sequence
  ENSG00000250358_14 (sequence is synthesized)
gatggcctatacacataattgtacggagatgagaaaggccactgggatgtagtacttttttgccttttaggccacattcaggggctgctgcagacagggctgtgcccagtaagcaagaat

SEQ ID NO: 1012572 - DNA, 120 bp, Artificial Sequence
  ENSG00000250358_15 (sequence is synthesized)
gaaaggggcaggggcaacctgaagctgtgtgcttaggctcacaaacctgtctccaaagaaagttttccagatcattcttttatatcctgtatggaatcaaacaaaattacagtacctcct

SEQ ID NO: 1012573 - DNA, 120 bp, Artificial Sequence
  ENSG00000250358_16 (sequence is synthesized)
ttttcatgactgagtctctcggtgagaactcgacatttccttacagtcaactcaaaatttcccactttgtgggaaatgagtaatggggttgaggacatgctgcccccaaatacagcacct

SEQ ID NO: 1012574 - DNA, 120 bp, Artificial Sequence
  ENSG00000250358_17 (sequence is synthesized)
tggcatttgagaaaaagcagaagcagtaaagtctctctgaacttctcccacccttttctcctgcagctgttcataaaacctaggggagattttctgacctcaccctgaagcagttcctaa

SEQ ID NO: 1012575 - DNA, 120 bp, Artificial Sequence
  ENSG00000250358_18 (sequence is synthesized)
gaagcagatgaaagagaaagttctacaagcggttggaagaaatgggtgctctggaggtcagggctgaagtgaggagttttgagagttgaggttcaggctgtgaggattgtatctctcccc

SEQ ID NO: 1012576 - DNA, 120 bp, Artificial Sequence
  ENSG00000250358_19 (sequence is synthesized)
cagcaatcctctgccaagtgagccctttatatgcaaggcagtttatatctcacacacctctctgtgcaccttctgtttttaactccccaggagtaaatttttcagcctctttctttatag

SEQ ID NO: 1012577 - DNA, 120 bp, Artificial Sequence
  ENSG00000250358_20 (sequence is synthesized)
aagagacacagaaaaatttgtggtcaaacttatctttttatcacaagcacactcctatgaaaactaacccattcccatgataacaatattaatccattcataagggcagagccctagtga

SEQ ID NO: 1012578 - DNA, 120 bp, Artificial Sequence
  ENSG00000250358_21 (sequence is synthesized)
cctaataacctcttaaaggccccacctcccaatactgttatattggcagttaaatttcagcatgagttttggaggggacattcaagccatagtcatattttcacccaaagaatttccagt

SEQ ID NO: 1012579 - DNA, 120 bp, Artificial Sequence
  ENSG00000250358_22 (sequence is synthesized)
ctacctagtcatgatccctctgtgtgcaggtgtgggtgtttgggagtttcaaagaaaataggttatgccattcttgccttctaaatgcttgcatggaatgacttgatcacctttctgatc

SEQ ID NO: 1012580 - DNA, 120 bp, Artificial Sequence
  ENSG00000250358_23 (sequence is synthesized)
attttttctctttggaacctaccttgactcttgtctcatggaggaattatttaaagtagatgacaagacaaaattctttctccttttggctctgaattcacctaagcactcttctcccag

SEQ ID NO: 1012581 - DNA, 120 bp, Artificial Sequence
  ENSG00000250358_24 (sequence is synthesized)
aatgcctcctaagtgtactgcatcctgccaggaaattttaccactcagctcccatgtaggaggccagggctcctgaactcaggctccacagttttattctgggcacaagcatagctaatg

SEQ ID NO: 1012582 - DNA, 120 bp, Artificial Sequence
  ENSG00000250358_25 (sequence is synthesized)
aacaagaaacattgcagtggagcactattataatcaccctttcagttcacagaattcatgtcttgagaaagcattttcagtagcagatgaaataagaagattgaaatttgtagggagtct

SEQ ID NO: 1012583 - DNA, 120 bp, Artificial Sequence
  ENSG00000250358_26 (sequence is synthesized)
tactctgtgattaatatgttatagaaacaaatattgatttgttgtttgttcatctgaagtttatctgctaacctcagaagatagtttactgaagtaacctttggtcactgacaatagaga

SEQ ID NO: 1012584 - DNA, 120 bp, Artificial Sequence
  ENSG00000250358_27 (sequence is synthesized)
agataggggcagatctgcagtaaaaccccacctccaagccaaagacattttaaatcctgaaagccaagctacaagtcaaatccaccaactgggttgagaccctgtcttcccatttggtgt

SEQ ID NO: 1012585 - DNA, 120 bp, Artificial Sequence
  ENSG00000250358_28 (sequence is synthesized)
ttgatccccacccttcacctattttacagatacctaccattccctaattggttttttacactgtcatgtccacctttgagtggtgtctttgttttaacctttttttgcatactcacaaac

SEQ ID NO: 1012586 - DNA, 120 bp, Artificial Sequence
  ENSG00000250358_29 (sequence is synthesized)
atactcacaaaccaatcaacatgcatgcccctattctgagcccataaaagccctggactcagccacacgaggggagaaaaacctcctgactccaggtagttgaccaccctcacaacccct

SEQ ID NO: 1012587 - DNA, 120 bp, Artificial Sequence
  ENSG00000250358_30 (sequence is synthesized)
ctccactgagagctcttttctcactcaataaaattattctctgccccctcacacttcaattgtcagcatatcctccttcttcttagacaaaggacaagagctcaggacccaccgaacatg

SEQ ID NO: 1012588 - DNA, 120 bp, Artificial Sequence
  ENSG00000250358_31 (sequence is synthesized)
ggtacaaagaaggctgtaacagtgatggggctgagccagcctcagagccacaggccagaacagggctgagagggctgttaacgtgccaccatcctcctgggcagggttgtcaccagccag

SEQ ID NO: 1012589 - DNA, 120 bp, Artificial Sequence
  ENSG00000250358_32 (sequence is synthesized)
gggtctccagctggcagaatgaccaagaagaatcctgcgtcactagcaaattgccctgtgatatatttcacattactcttccaaaccaaggctttgtcctgtggggcttaacttctaaaa

SEQ ID NO: 1012590 - DNA, 120 bp, Artificial Sequence
  ENSG00000250358_33 (sequence is synthesized)
aaaatctagactcatatcataatgatgtcatccttatataaaattatagaagagcccttgctttctgagctctcagagacagtacttcctaacatacaaattgccttctagcaaggtttg

SEQ ID NO: 1012591 - DNA, 120 bp, Artificial Sequence
  ENSG00000250358_34 (sequence is synthesized)
aagcagacattcttttcccaactacacatgttttgcaatgacatttaaaaaaaatgaatcccacaataataaccagagattgtattgttttatattttctttatagtacagtaatactac

SEQ ID NO: 1012592 - DNA, 120 bp, Artificial Sequence
  ENSG00000250358_35 (sequence is synthesized)
tagagttatctctcttttgaatattatcattaattccatttttttcaagtcatgttgaaataatcaatgcagttaaacaatcccagatagacttcagtatggtttgattttttaatgtga

SEQ ID NO: 1012593 - DNA, 120 bp, Artificial Sequence
  ENSG00000250358_36 (sequence is synthesized)
tttaaattcagttacaaagcgtttcactgaaatgccacttattgatttgtggcttaaaaagttccttcttggtgacagcttagaagccaacttcactgaaaacaacagattgtactggtt

SEQ ID NO: 1012594 - DNA, 120 bp, Artificial Sequence
  ENSG00000250358_37 (sequence is synthesized)
tcctttagatatttacaatacttcatcaaaccagagaatttaattgctgtgaagggcgctctagagattacccaatccagccccatcattttgcaattgaggagaatgaggtttacaaga

SEQ ID NO: 1012595 - DNA, 120 bp, Artificial Sequence
  ENSG00000250358_38 (sequence is synthesized)
gagaaatggtagctgaactacagttacacaagtagttaagaggcagaagtgagaccagcaaccactttcctgactcctgatcaattcacaattttatttataaatactcttatgacactt

SEQ ID NO: 1012596 - DNA, 120 bp, Artificial Sequence
  ENSG00000250358_39 (sequence is synthesized)
tcattgcttccagtgtgagtcaattttttatagtggataatctggagaatataaacttaaaatactcatgttattgttttactctttctccctttgaagtactaataaattcaagacctc

SEQ ID NO: 1012597 - DNA, 120 bp, Artificial Sequence
  ENSG00000250358_40 (sequence is synthesized)
ggcatccctttttcagaatggggaaaaagaatccggggtgaaaggctcttttgtacttctttgcttcttgcactgaagtggcaggtgcagaccttggttcccaggggaatcagaatgtca

SEQ ID NO: 1012598 - DNA, 120 bp, Artificial Sequence
  ENSG00000250358_41 (sequence is synthesized)
caggagccacttttatcacttgcagcaatcttcttcagtgagttccccaggacttgatttcatcttacaatctgattccatgtgtctcccatattttaaggattctttattatttctggc

SEQ ID NO: 1012599 - DNA, 120 bp, Artificial Sequence
  ENSG00000250358_42 (sequence is synthesized)
ttacagagaacaaacattattttttgctttcctggtctgttctagattttcaaaaataactctgtcacttctgttatatggtatcattgcttgtaattatctatttacttatctgtctct

SEQ ID NO: 1012600 - DNA, 120 bp, Artificial Sequence
  ENSG00000250358_43 (sequence is synthesized)
ggactggactctttacagacaggcaataactaattatctgtctgtctggcatttggtagtcactcataaatcgtttattgcattactaactaaataaaaaagttgaccttgcattcacct

SEQ ID NO: 1012601 - DNA, 120 bp, Artificial Sequence
  ENSG00000227094_0 (sequence is synthesized)
cctttctcataggaaggaaccagaaacgtgacatggatcaaaaggacatgtttgagtctgaggacacaccactggcccagaccctggacggctgctccgactctggaaggaaatgcacct

SEQ ID NO: 1012602 - DNA, 120 bp, Artificial Sequence
  ENSG00000227094_1 (sequence is synthesized)
gcactacctcatctcccccagcaatcaggtccatctccaacaattaattatgtgctgatgggagacactgagcaacgatgagctcatgtgtagatctcatctgtcaggggctgccattct

SEQ ID NO: 1012603 - DNA, 120 bp, Artificial Sequence
  ENSG00000227094_2 (sequence is synthesized)
attggagcaattaatacaaacaagatgaacacatttaccctttatgatggcttcatttctcccacccacccccttatcattatgaattatcagtaaaaactgcaacaaatgagacaagag

SEQ ID NO: 1012604 - DNA, 120 bp, Artificial Sequence
  ENSG00000250354_0 (sequence is synthesized)
ggcccggggagaactctcactgaggacaactggacagcgccagcacactgacccagcgactggggacacaaagaaacagattatggttgacactgtggggacctgaaaccaaggagcatg

SEQ ID NO: 1012605 - DNA, 120 bp, Artificial Sequence
  ENSG00000250354_1 (sequence is synthesized)
aaaccactgacaaacggggaactactgtacacttaaaatgcctagaaccatgtgtggaacacaactggcgctcaacaaactttctactcttccccaaggtcacagcccttgagatcagga

SEQ ID NO: 1012606 - DNA, 120 bp, Artificial Sequence
  ENSG00000250354_2 (sequence is synthesized)
gagagctacagttagccacaccaagctctacccagtcccaagactggggctctgacacctgcctttcttgagagcctacctgctgagatttctaaatgcagtctcctcctacacccaaag

SEQ ID NO: 1012607 - DNA, 120 bp, Artificial Sequence
  ENSG00000250354_3 (sequence is synthesized)
actctcatgatgtcctactcagaccaccagcagtttctgcactctgccttctgggctggacttccttgtgacacctgtacccatactccagatattatcccaccttggtctgattcatat

SEQ ID NO: 1012608 - DNA, 120 bp, Artificial Sequence
  ENSG00000250354_4 (sequence is synthesized)
cctaggcctttccagtttgtcccattattaccttaatttccaaagaaatatttcctgtcaccatttcttgtatatagaaggaaaataataataaaataatacaatagagaaaaataataa

SEQ ID NO: 1012609 - DNA, 120 bp, Artificial Sequence
  ENSG00000250357_0 (sequence is synthesized)
cttgaaagcgagtcttctttatacacagatgacaagttcactaactcagtagaaataagacttcagaaagaaatattaaattttaatgtttcctcagagtgatgtaaacctaaagacatt

SEQ ID NO: 1012610 - DNA, 120 bp, Artificial Sequence
  ENSG00000250357_1 (sequence is synthesized)
tttttaggatgaatgaatgagtttatgctcaccgatctctcaatctgtggtgaatattcttttggaaaaaccaacatggtgcaaatcttttggtttataaaactagatgtcttcatctgc

SEQ ID NO: 1012611 - DNA, 120 bp, Artificial Sequence
  ENSG00000250357_2 (sequence is synthesized)
gccaaagagcatctgcagcttagtctgagataagggagttttcagattacggcatctgaccaaagtacatgggatcaaccactgtcctttaagaaaaggttgccactgttttgcttcata

SEQ ID NO: 1012612 - DNA, 120 bp, Artificial Sequence
  ENSG00000250357_3 (sequence is synthesized)
tgtgaagaaggcatgagtcaagctgaagaataaattggcaccccattagattgagaagccacatcttgtagcccagaatatcttttagaaagcaaaactggattaaaaaagagaaagaaa

SEQ ID NO: 1012613 - DNA, 120 bp, Artificial Sequence
  ENSG00000227090_0 (sequence is synthesized)
aaatatgacccaaaatccactcctcacttggacactgctctggttatgatggctgacaagaagatcctggtggttgctggcttgtcttcctctaataaggagcctgaatttagaaggtga

SEQ ID NO: 1012614 - DNA, 120 bp, Artificial Sequence
  ENSG00000227090_1 (sequence is synthesized)
tgatatgagaaaacaccaaatattcagaagccatccaggcctgctttggatgtcttttgggacaagagagcatgtgagggtatatccaggctgcaaatagcactgaagatgtcatctctg

SEQ ID NO: 1012615 - DNA, 120 bp, Artificial Sequence
  ENSG00000227090_2 (sequence is synthesized)
tctgatttttttctaaagtactgggcagctgtgcaaacaatattaaaacagaaaaaatattttgtgccatgcactgccttgattgtacacgcccttaaaataggaaacatagactctttc

SEQ ID NO: 1012616 - DNA, 120 bp, Artificial Sequence
  ENSG00000227090_3 (sequence is synthesized)
taaaaaatacagttatatcaagacctgctttttaaatatccgtaatgtattattaccttttgtgtttctgttcagtaagtattacattcactgagagtgatttgaccaacaataaaaaca

SEQ ID NO: 1012617 - DNA, 120 bp, Artificial Sequence
  ENSG00000227091_0 (sequence is synthesized)
cggccccatgtgaatatgtcccagcttttcctccttagcaccaatggcaaatcttccatgctgtttcaggcaacgtggtcgactctcagtttaggaaacatggtgactggggtcctggaa

SEQ ID NO: 1012618 - DNA, 120 bp, Artificial Sequence
  ENSG00000227091_1 (sequence is synthesized)
ccccagctgtgagtaattcccatgttgaggatccccctccctgcccttgtcctgacgtaggactctggcctggaaactcggtgacctcgtctccaatgcccaggagcagccccctgcctc

SEQ ID NO: 1012619 - DNA, 120 bp, Artificial Sequence
  ENSG00000227091_2 (sequence is synthesized)
ccactcagtgcctgccccagcccttgactcactatgcagctggagaagccgatgccccccaggcggggacatatatagtgccacacaccgatgctgccgcggcggatcctctgacccaca

SEQ ID NO: 1012620 - DNA, 120 bp, Artificial Sequence
  ENSG00000227091_3 (sequence is synthesized)
gcccacagagaagccaatctgggccaggatgtactgcagcttactgttccaggccggccggtcctctgcatccagctcctcctccaccgccttctgcttgccgcctgcctcaccagccac

SEQ ID NO: 1012621 - DNA, 120 bp, Artificial Sequence
  ENSG00000227091_4 (sequence is synthesized)
attcagtacactctgcttatagtccacaggctcctcgagggccagcaggtcggccacggactcagtgacatgctcactgctgtgctcacgctgggtcactttgctgttcttcggcattga

SEQ ID NO: 1012622 - DNA, 120 bp, Artificial Sequence
  ENSG00000227091_5 (sequence is synthesized)
tgccacctgggccgtgtagccctgctccccagcacacagagaagatggaattcagctgctgtcagctccttctcattcagggacctaggaaaccaggtgagcagtaaaggattatctgac

SEQ ID NO: 1012623 - DNA, 120 bp, Artificial Sequence
  ENSG00000227091_6 (sequence is synthesized)
gtgaacaatcagactgtggcaagaacactgccctgggtgtgagtgcttgtgtgtggcatagaaagggattctggaattcatcaccaagtgcccaggcagaactgatcatctaagctagaa

SEQ ID NO: 1012624 - DNA, 120 bp, Artificial Sequence
  ENSG00000227091_7 (sequence is synthesized)
agaacaaggttagaagttcccagctaagtcctccaatgccacacgtcctttgaagtcattttggttgccttggagctcttctcaacatctcacagggcataaagaaaccatatacttgta

SEQ ID NO: 1012625 - DNA, 120 bp, Artificial Sequence
  ENSG00000227091_8 (sequence is synthesized)
tatctttgctttgggctagtcttacatcaactcagttaccatgccatgcaggccacaagctctgattgacagttacttattaaaaagtaaaaaagatctttcaagcaaggagaccatgca

SEQ ID NO: 1012626 - DNA, 120 bp, Artificial Sequence
  ENSG00000227091_9 (sequence is synthesized)
aggtgatttaaaaaaaaaaaaaaggctcttgagccatcaccagggggcccctggacaccagtgccgatggcatctccattcccctagctggactggttgaccaggctcagctaaagattc

SEQ ID NO: 1012627 - DNA, 120 bp, Artificial Sequence
  ENSG00000227091_10 (sequence is synthesized)
tggcaccagaagccaagggctgtttgctcagtgccaatgaatcttgggtcattgctcagcactgacattatctgaggacttctgcagccaagagctggttctccatccttcagcgacagt

SEQ ID NO: 1012628 - DNA, 120 bp, Artificial Sequence
  ENSG00000227091_11 (sequence is synthesized)
tttacagcagataatgtctgcacgacatgggcggaggaggcaaaaccctcccctactcctgccagtcctcatttgtctttcatgctttcccttaaagaaataaagcaccaagaaaacgaa

SEQ ID NO: 1012629 - DNA, 120 bp, Artificial Sequence
  ENSG00000227091_12 (sequence is synthesized)
accagaggtaggggaacctccagatgttgccgaggcccacagagaagccaatctgggccaggatgtactgcagcttactgttccaggccggccggtcctctgcatccagctcctcctcca

SEQ ID NO: 1012630 - DNA, 120 bp, Artificial Sequence
  ENSG00000258168_0 (sequence is synthesized)
gctttacttccctttgagtcgtctgtgagcctaaatttttgtggctgtgggaaggacaagaaccccatctttagctgaaataaggaaaagttccgcaacatttttggcacacaccctggg

SEQ ID NO: 1012631 - DNA, 120 bp, Artificial Sequence
  ENSG00000258168_1 (sequence is synthesized)
ggctccggaagtggaatgctgtcggaactggaccttgatgaaggaaatactttctgactcattggaatttgttatagtcaaatttgcctatgtgataacttaggtcttcacgatggccca

SEQ ID NO: 1012632 - DNA, 120 bp, Artificial Sequence
  ENSG00000258168_2 (sequence is synthesized)
gttagttctttgagtgcaagaaatgcttgctgtttggaaacttgtgaagacctgcatccctttgtatctcaaataaagacagaggtgtttccagacctaagaataacaggaacatggagg

SEQ ID NO: 1012633 - DNA, 120 bp, Artificial Sequence
  ENSG00000258168_3 (sequence is synthesized)
agtggcatctccagtgtagccacccaccaaagcctcatcctgaacactatggcctagtgggtcacttacagggatgtagctggcattgatgtagtcagagcaaggatcatcatctacatt

SEQ ID NO: 1012634 - DNA, 120 bp, Artificial Sequence
  ENSG00000258168_4 (sequence is synthesized)
tttcccaggaatgctgtcggaactggaccttgatgaaggaaatactttctgactcattggaatttgttatagtcaaaatgtgctcttctgaaatctacaggtgtttccagacctaagaat

SEQ ID NO: 1012635 - DNA, 120 bp, Artificial Sequence
  ENSG00000258168_5 (sequence is synthesized)
tggagtgacttttctacagtttatgtgatgtgtgtgatgtgccttagctctgatccccacaacagccacagatgggaagtgatcttatctccattttgcagatgaggctcaggcaggata

SEQ ID NO: 1012636 - DNA, 120 bp, Artificial Sequence
  ENSG00000258168_6 (sequence is synthesized)
actaacttgccccatgttgcataggtggcctataaccagtcagacacaggagacaacatgaagccccatctgtgcttccctttctgacattaccacatttgcctgatggagtggccagct

SEQ ID NO: 1012637 - DNA, 120 bp, Artificial Sequence
  ENSG00000258168_7 (sequence is synthesized)
gtggattatgttggctcggagaatgatacctcaaaggctggtgctgagagttcttagaagctgcttcagaatcaaggatctctccagagatcaaccactggagaaaagatactaggagtc

SEQ ID NO: 1012638 - DNA, 120 bp, Artificial Sequence
  ENSG00000258168_8 (sequence is synthesized)
taggagtcatcaccacatctagacagagtgctgctccaagagattaactgagggatttcatctgcataataagtcaaccttttttccgggcgcaatggctcacgcctgtaatcctagcac

SEQ ID NO: 1012639 - DNA, 120 bp, Artificial Sequence
  ENSG00000258168_9 (sequence is synthesized)
gcccagttgtcttctcctcatagtcctccactaaagcctgaacaacaaggaatgctgtcggaactggaccttgatgaaggaaatactttctgactcattggaatttgttatagtcaaaaa

SEQ ID NO: 1012640 - DNA, 120 bp, Artificial Sequence
  ENSG00000258168_10 (sequence is synthesized)
ccctcaaccctgcatcctaccatcctgggcttgcactgcaagttacatgatccctgagctgaccactttggcttgaatccctggaaggagaaaggagagagagagcaactagttcagaca

SEQ ID NO: 1012641 - DNA, 120 bp, Artificial Sequence
  ENSG00000258168_11 (sequence is synthesized)
tagaaattgctaaccgaagactttgctaagcaaacccaggtctgcttgatgtcagagcccttgctgttaaccccatttactgcttagcctccaaagagaagcaatagcatcacatgggga

SEQ ID NO: 1012642 - DNA, 120 bp, Artificial Sequence
  ENSG00000258168_12 (sequence is synthesized)
aatgtcaacagcataagaggactttcataatcagaatttaaactggctattatccctctggagggaagtgcaggaatatacaagctatttcttattaaaggcattcagagcttgagattg

SEQ ID NO: 1012643 - DNA, 120 bp, Artificial Sequence
  ENSG00000258168_13 (sequence is synthesized)
tccatatcgagctatattatatttctttagcctcatttcatttttggagaaaaatgcagaaatggctagaggaagacagtattacaaattttgacacaaaacttacagggcaatatattg

SEQ ID NO: 1012644 - DNA, 120 bp, Artificial Sequence
  ENSG00000258168_14 (sequence is synthesized)
ttgtatcgatttttccctctattctccggcaagagtgcaatgtcacatgactggtttcggcccacgtcttttaactcctgttaggtcaaatatgagtttgtaagtggagaatatgaaata

SEQ ID NO: 1012645 - DNA, 120 bp, Artificial Sequence
  ENSG00000258168_15 (sequence is synthesized)
gaataaagcaaatcatacagtcctggagataacataataacatgaaaatatatacactagctattgtttatgaatgcctagtactcaacatgcattagccctgatccccacaacagcccc

SEQ ID NO: 1012646 - DNA, 120 bp, Artificial Sequence
  ENSG00000258168_16 (sequence is synthesized)
acaagggaggtggtggtctcactattttacaggtgaggctcagtcaggataactgatgtgccccaggtcacccaagtggcaaacctgagaatcagttccaaaagctacgtgctttttgcg

SEQ ID NO: 1012647 - DNA, 120 bp, Artificial Sequence
  ENSG00000258168_17 (sequence is synthesized)
aaaccacggcatcttccagccaagcaaatggccaggctgaatatctgacagctttaggtctgcatttgagatttgttaattcttccttactatctgatccaggtagcccttggtttgctg

SEQ ID NO: 1012648 - DNA, 120 bp, Artificial Sequence
  ENSG00000258168_18 (sequence is synthesized)
tgttattctggagctcaagctggcctctaagattagatggtatattctattcagggcatagtttaggcataaaagagtgctcagctgagattctaagcagcctcctaacttctgagctca

SEQ ID NO: 1012649 - DNA, 120 bp, Artificial Sequence
  ENSG00000258168_19 (sequence is synthesized)
atcagcctatgatgacacagtaaacattaggaaggaaattctgctaagaactagggatgctgaagcttcattctgcctgagttgtacctcgtattccttggatagaaggtagttggagtc

SEQ ID NO: 1012650 - DNA, 120 bp, Artificial Sequence
  ENSG00000258168_20 (sequence is synthesized)
agcctgtagcttcatgaaatgcccttcaaactgatttatttttattggactgtaattaaaaatgaaacaaacagaaaagagttactgcagaaaagggaaagtgccataactattctgact

SEQ ID NO: 1012651 - DNA, 120 bp, Artificial Sequence
  ENSG00000258168_21 (sequence is synthesized)
catatttcaaaggcagataatatagtaattaatgtgttctctctcttaccaagaagttttccggttactgtgaagagaagccaaaagaggaagactttgttagcaaatttcacataatac

SEQ ID NO: 1012652 - DNA, 120 bp, Artificial Sequence
  ENSG00000258168_22 (sequence is synthesized)
catctttcaacaaattatacgaaggcaaatgtggtgcttaccctttctggcccaggtttaagtggacagataatggtcgatccctacgaatgctcagacgggcagagggtctttctcgac

SEQ ID NO: 1012653 - DNA, 120 bp, Artificial Sequence
  ENSG00000258168_23 (sequence is synthesized)
aacttttattctgattatgatacttggcttgaacaaatttttccatttatggtaaggctgtggatgtttgtgcaaatatggatttttcagtattcatacagatttgcactcagccaacat

SEQ ID NO: 1012654 - DNA, 120 bp, Artificial Sequence
  ENSG00000258168_24 (sequence is synthesized)
ctctgagggagggaaaggaaagagaataaagtagatcattcccacccagaaacggatctctgcaaaaactgaagatttgtctcctggtttttggctacaggttataatcacttcccacat

SEQ ID NO: 1012655 - DNA, 120 bp, Artificial Sequence
  ENSG00000258168_25 (sequence is synthesized)
tctcaataaaactttgctttaaaaaaatccagtaaatttcagatgccagacacgacttcaataaagaggaacatgtgccaaattaagaaaaaaaattcactaagagaagaaggcacgaca

SEQ ID NO: 1012656 - DNA, 120 bp, Artificial Sequence
  ENSG00000258168_26 (sequence is synthesized)
cttggggccacatgctatttggttctttttggtcccttcttaaattaggatggcagatatgaactacaaaatggtgatgtcaaccacacttttcaggatatttcagaaaagcacttgggc

SEQ ID NO: 1012657 - DNA, 120 bp, Artificial Sequence
  ENSG00000258168_27 (sequence is synthesized)
atgcaatttgcaaacatctctgtcttcatgaggatatgaaccacacacacacacaaaatatttttttcctgtgcaaaaggagtcacttcatctttaaataaagctatagatggcccctca

SEQ ID NO: 1012658 - DNA, 120 bp, Artificial Sequence
  ENSG00000258168_28 (sequence is synthesized)
gtcctttggtaagggctgaattcatcaatgggatataaaagagctgagaaaagtgagtcatggctttagagtttgacttgtttttattgagaaaacagtgacaatttaacctggaaaaat

SEQ ID NO: 1012659 - DNA, 120 bp, Artificial Sequence
  ENSG00000258168_29 (sequence is synthesized)
taaattattttcccttcttagttttcagcctaaagggaattttcagttgcatttttaaagttgtgggtccaatcaccaaaaggatctttgtacttacctcactttctgtctgcagatcaa

SEQ ID NO: 1012660 - DNA, 120 bp, Artificial Sequence
  ENSG00000258168_30 (sequence is synthesized)
taaggcaacaacagccactagcatgccaattaaaaacagaccagcactcacaccttcaatagctccaaacaagggctctacaataatccagatagaaacaacaaacgcaggtgggaaaat

SEQ ID NO: 1012661 - DNA, 120 bp, Artificial Sequence
  ENSG00000258168_31 (sequence is synthesized)
tagtgctagggaaccagtaagaaagctattgaagccatatctcccaagtaatgttattacaaatagaattcaagtgatgcccacgatgaggcatttactttccaaaggctctgagtatgc

SEQ ID NO: 1012662 - DNA, 120 bp, Artificial Sequence
  ENSG00000258168_32 (sequence is synthesized)
acctaagaagatgatgaaaggctggctcccaccctgtagcagtgaggccaggtgtcactgcatacttttgaagttaatgttgcatagcttatagaggaattttggactttgcacttgtat

SEQ ID NO: 1012663 - DNA, 120 bp, Artificial Sequence
  ENSG00000258168_33 (sequence is synthesized)
ataaagcttggggcacctgagataaaggccataagtttgccaccaagataaaaatgccatttcatttatataaaacatgttacacagcatctggggctttggaaaatccagtggattgct

SEQ ID NO: 1012664 - DNA, 120 bp, Artificial Sequence
  ENSG00000258168_34 (sequence is synthesized)
tggagctattctaagaagtcttatttttattatctggtatggtaacgctactgggagtttatgaagaggtaagagtggcctcatttttaaaatagctttattgaaatatcattcatatag

SEQ ID NO: 1012665 - DNA, 120 bp, Artificial Sequence
  ENSG00000258168_35 (sequence is synthesized)
catgcaactcacccatctaagttgtacaattcagtggtctttagtatagtcaaagttttgcaaatgtcaccacaatcaattttaaaacattttcatcaccctcaaaagaaaccgcgtacc

SEQ ID NO: 1012666 - DNA, 120 bp, Artificial Sequence
  ENSG00000258168_36 (sequence is synthesized)
tattagcagtcagtcccactcctccctccccgcgatccctggcaaccactaatctactttctgtgtctgtggatttgcctattctggatgtttcatagaaatgaaatcataaatctgtga

SEQ ID NO: 1012667 - DNA, 120 bp, Artificial Sequence
  ENSG00000258168_37 (sequence is synthesized)
cataatgttttcaaggttcatccatgttatagcatataccaagatttcattcctttttatggttgaataatcgtccattgtatggatatatcacattttgtttatccattgatggacatt

SEQ ID NO: 1012668 - DNA, 120 bp, Artificial Sequence
  ENSG00000258168_38 (sequence is synthesized)
acattttgtttatccattgatggacatttaaattgcttctactttttggcgattatgaataatgctgctatgaacattcatgtacaagtttctatgtggacatatgttttcatttctcct

SEQ ID NO: 1012669 - DNA, 120 bp, Artificial Sequence
  ENSG00000258168_39 (sequence is synthesized)
gggtatatactgaggagtgaaattgctgggtcgtatggtaactctaggtttaatatttctataaactgtttttcaaagcagtgacaccattttacattctcataagcagtgtatggaagg

SEQ ID NO: 1012670 - DNA, 120 bp, Artificial Sequence
  ENSG00000258168_40 (sequence is synthesized)
ttctgatttcttcatatcctcactaactcttgttactgtctttttgattatagccatgctactgggtgtgaagtggtatcttcttgtgattttgatttgcatttccctaatgattcatga

SEQ ID NO: 1012671 - DNA, 120 bp, Artificial Sequence
  ENSG00000258168_41 (sequence is synthesized)
tgttgagcatcttttcatgtgcttattagtcaactgtatatcttctttggagacatgtctattcagagcctttgcccatttaaatattgtgtaatttggctgggcacggtggctcatacc

SEQ ID NO: 1012672 - DNA, 87 bp, Artificial Sequence
  ENSG00000258168_42 (sequence is synthesized)
ctgaggcaggagaattgcttgaatttgggaggtggaggttgcattgagccaaggtggcatcaccgcactaaaaaaaaaaaatatata

SEQ ID NO: 1012673 - DNA, 120 bp, Artificial Sequence
  ENSG00000258168_43 (sequence is synthesized)
tattacactatatatatagtgtaatttgtgtttttattattaaattgtgaggtaagagttctttatatgctattcagcccttatcagatatgtgatttggaaaataaatattttcttcct

SEQ ID NO: 1012674 - DNA, 120 bp, Artificial Sequence
  ENSG00000258168_44 (sequence is synthesized)
aagaagcagctcttttcactcctacaatgggaatgataatctccaccttatttagttttaaaagaattaaatgagataatgcagctaaagcagttcagaataaaacctgacatgtagtaa

SEQ ID NO: 1012675 - DNA, 120 bp, Artificial Sequence
  ENSG00000258169_0 (sequence is synthesized)
actgcgcccgagaggcagcgctcagacagcggggaggaggcggccgcggagcccccggagatggagggtgaaggcctgctttcaaagtatcccacgtcgttcagcaaagattcgtcattt

SEQ ID NO: 1012676 - DNA, 120 bp, Artificial Sequence
  ENSG00000258169_1 (sequence is synthesized)
agaattcagacctgccaagaccacggatgctttgtctcagctcggatatcttcatttctccttcttacagtttccttgtttccgaggaaaaacacaagatcttgacaactgcaatcacct

SEQ ID NO: 1012677 - DNA, 120 bp, Artificial Sequence
  ENSG00000258169_2 (sequence is synthesized)
ggtaaccaatcatgaatctggtatggaccactttcaccctgcaccctgtcaggcagtttccatcttctcacaatcttcacaagaatcctacagaaacaagacgtatcccccgatttactg

SEQ ID NO: 1012678 - DNA, 120 bp, Artificial Sequence
  ENSG00000258169_3 (sequence is synthesized)
atgatgatccttcagcccagagatgcactctccatcggctgaacccaactggaagtcggagggtaaagggcccatgactcagtccgttcaggctgacccgcctggggctcagagcataac

SEQ ID NO: 1012679 - DNA, 120 bp, Artificial Sequence
  ENSG00000258169_4 (sequence is synthesized)
agacaagggtggggaagaaaaaagaatggacttggagaagcaaatgggaaatattcaggcacttctgatctcagtttggccagtcggctcccctctctctgactgtaaacacagagatac

SEQ ID NO: 1012680 - DNA, 120 bp, Artificial Sequence
  ENSG00000258169_5 (sequence is synthesized)
agaaactgtcattagaaatgagtagtgttaatgatccatgacagaaagctcgtgaatttctactgctgaggaggcttgagcttttctgttttcattctttctacacatcgggagcggagc

SEQ ID NO: 1012681 - DNA, 120 bp, Artificial Sequence
  ENSG00000258169_6 (sequence is synthesized)
tccccaatgcctttctgatacatcgctacttctgcttcacctaatcaaaggcacttactgctgctcagaacctcaggcctccaactgaacaatgaacaggttttctctccatcaccccct

SEQ ID NO: 1012682 - DNA, 120 bp, Artificial Sequence
  ENSG00000258169_7 (sequence is synthesized)
gttctctagtgtgagtagttagattactgcttttatgtctgtcttcccaactacagtccacaaaacggctcatattgaacagtaatacaaataaagagaaaaaggagagaagacaagaac

SEQ ID NO: 1012683 - DNA, 120 bp, Artificial Sequence
  ENSG00000258169_8 (sequence is synthesized)
aaaaagtaatgagtttagaaacttggaaagtagaaacttctttggtatgttcctgttgaaaaccactggtctcatcttccactttttcacattgctgtttcagagaaaaacttaattata

SEQ ID NO: 1012684 - DNA, 120 bp, Artificial Sequence
  ENSG00000258169_9 (sequence is synthesized)
cttaattatagggttgtaatgtttatagggttggttattctggttagccaaatttactggttatctgtttagagcctttgaattttaattctagctgacacatttgttaaaacattatta

SEQ ID NO: 1012685 - DNA, 120 bp, Artificial Sequence
  ENSG00000258169_10 (sequence is synthesized)
gcttacctttcttccttaatgagtactggatcttcccagagaaaaggttcccagtcatttacctggaattttttatacatatttgcagctgttctttgagctccctaaagagcataatta

SEQ ID NO: 1012686 - DNA, 120 bp, Artificial Sequence
  ENSG00000258169_11 (sequence is synthesized)
gagacataacattcactcagattttctgcccttctttgtaataagtcaatgagccagtcatttattccacaaatatttgttgatacctactgtgtgcctgtcagcagttctccaagcagg

SEQ ID NO: 1012687 - DNA, 120 bp, Artificial Sequence
  ENSG00000258169_12 (sequence is synthesized)
ggctacaaaaataaaaagattgtcttttaatgaggagcaacttcgagtcttagctcttggtactccctctgtctagtaatatccatttttatacttagtattttaataaataactcttcc

SEQ ID NO: 1012688 - DNA, 120 bp, Artificial Sequence
  ENSG00000258169_13 (sequence is synthesized)
tcaaattattttaaaacacacagtaacagaaaaaattatttatttattctactttctcttaattacacctgtggggagcttggcggggcagactctgggtttccagccaaggtctttctg

SEQ ID NO: 1012689 - DNA, 120 bp, Artificial Sequence
  ENSG00000258169_14 (sequence is synthesized)
tccacctgggggcagcagaccctcacacagaaaagtacctcgaaggaagcaattggctttctgagctcctggctttcaaacacaagtcttccaaattatggacccatgaatattctaaag

SEQ ID NO: 1012690 - DNA, 120 bp, Artificial Sequence
  ENSG00000258169_15 (sequence is synthesized)
ttatactcgaaggacgcttccaaaatcaaataaatttgggttgaaccaagttaaatagggttttaaccctgcaggacttctcacgatgtttaatatacttttttttttcttttctttctt

SEQ ID NO: 1012691 - DNA, 64 bp, Artificial Sequence
  ENSG00000258169_16 (sequence is synthesized)
tcacgatgtttaatatacttttttttttcttttctttctttcttcgacagagtctcgctgtatt

SEQ ID NO: 1012692 - DNA, 120 bp, Artificial Sequence
  ENSG00000258169_17 (sequence is synthesized)
acaggtgtgagccactgcgccgggcctaatatagttttgtcgtacaaaacacgatggcatacttgctctgtgcaaagtacatcacccacagtggcctatttaaacttggcaacagtccta

SEQ ID NO: 1012693 - DNA, 120 bp, Artificial Sequence
  ENSG00000258169_18 (sequence is synthesized)
taaacttggcaacagtcctatgagataggcactaattgtgttccccattttacaaatgaggaaacagaggcacggagcttataactggtggctgagtttccggttggggccatctagtta

SEQ ID NO: 1012694 - DNA, 120 bp, Artificial Sequence
  ENSG00000258169_19 (sequence is synthesized)
cagaacttgcatgcttaatcatgacaccgtaatgctttgcaatgggagattccaagagggggaatttgacattcagtgtttcccaaatttatttggctttggaacccttttattccttct

SEQ ID NO: 1012695 - DNA, 120 bp, Artificial Sequence
  ENSG00000258169_20 (sequence is synthesized)
aatcaacatagaggacaagtatgtaatgggatactctgataaatgcttcaataaagcaatggctttatgccgccccgctttaaaagataactaaaaatataagtccacaggcccatcata

SEQ ID NO: 1012696 - DNA, 120 bp, Artificial Sequence
  ENSG00000258169_21 (sequence is synthesized)
taattgaacaggtaacgactgaattttgatttgatggaaagactcttatcatattaatctaagttctcaaagtgaatgccactaaaccaagactattcagtgtatttgaagtatgtacaa

SEQ ID NO: 1012697 - DNA, 120 bp, Artificial Sequence
  ENSG00000258169_22 (sequence is synthesized)
taccagtccgaattgggacttctcaggaagaaaaaagggtatatggcagatgggtaagaatagaaagccacaggtctagcagggaagctaaatatggtgtggaatgtgttggggagatgg

SEQ ID NO: 1012698 - DNA, 120 bp, Artificial Sequence
  ENSG00000258169_23 (sequence is synthesized)
gaaaaatgctcacctcttcatggaagttcgaaaagaaggctgagattctaaataatgctggagtattgcagctggaacaagcatgatagcaatggccaacacaaggcctttctagaataa

SEQ ID NO: 1012699 - DNA, 64 bp, Artificial Sequence
  ENSG00000258169_24 (sequence is synthesized)
gcatgatagcaatggccaacacaaggcctttctagaataaatctaaaacaattaagagataata

SEQ ID NO: 1012700 - DNA, 120 bp, Artificial Sequence
  ENSG00000258169_25 (sequence is synthesized)
ataataataaaaagaaaagaaaaaaaaaagagataatatgccagggggttgatgccaggtaatactgatagttaccttaaacaatgttttctcaacttcagttttttacacaccaacttc

SEQ ID NO: 1012701 - DNA, 120 bp, Artificial Sequence
  ENSG00000258169_26 (sequence is synthesized)
ttctcaacttcagttttttacacaccaacttcatgatttttttctatcaagatacgactactattatttatctagcgttttttaaattgtcttatatctttgcttaaatttattttttta

SEQ ID NO: 1012702 - DNA, 120 bp, Artificial Sequence
  ENSG00000258169_27 (sequence is synthesized)
tgaaggaataattatattgttctaatatataaattttaaagttaatatctttattccatctaaagtggtatgtgtactattctttggaaatgattttctaaaggattaaaaacttgccag

SEQ ID NO: 1012703 - DNA, 120 bp, Artificial Sequence
  ENSG00000258169_28 (sequence is synthesized)
attttctaaaggattaaaaacttgccagtgttggaaaaaaaaggaaacaggaaaattaagactgagttaaagaaggtgaaaacaaaattgaagaataagactaaaggttagacatgaaat

SEQ ID NO: 1012704 - DNA, 120 bp, Artificial Sequence
  ENSG00000258169_29 (sequence is synthesized)
agatctgtctctaattagaggtgcaatgtcaaatttttttgtagatcgttctaaaaatatcacttgttcttttgcttgtattttaattcaatgattaaataaacagatgacctagtttca

SEQ ID NO: 1012705 - DNA, 120 bp, Artificial Sequence
  ENSG00000258162_0 (sequence is synthesized)
agagaattgcgttatacggagttgtactgctaccagccaagaatgccaatgactcccagtaaccattagaagctagaaggggggaagaagaaatctcactagagccttcagagagaatat

SEQ ID NO: 1012706 - DNA, 120 bp, Artificial Sequence
  ENSG00000258162_1 (sequence is synthesized)
ggccctgctgaaacattgatttcagacttaaagcctccaaaacacatcatgaaatttgacctcttcagccgtgcatggttaacactataacccatctccttgagaagaacccctgatgaa

SEQ ID NO: 1012707 - DNA, 120 bp, Artificial Sequence
  ENSG00000258162_2 (sequence is synthesized)
aaagaaatcctctccaaatcaatatcttcattcatcactacactacatgttctattttccttcctccatttctcagaggaaggagttctattacttgccattgatcttaaaattatagtt

SEQ ID NO: 1012708 - DNA, 120 bp, Artificial Sequence
  ENSG00000258162_3 (sequence is synthesized)
atcctccactgtgctgccatccataatttcatgtccttcatttgtggctttgttttcaatggctataagcattttcaattttgtcccattataacaaggctgtcactcaatactgtctgg

SEQ ID NO: 1012709 - DNA, 120 bp, Artificial Sequence
  ENSG00000258162_4 (sequence is synthesized)
aatcattcagcatataccctctccttcccttcgttgctgaatttctcaaaagagtattaccttctttcatttatctgaactcatacatacttttaatcgcagctattctactttcattag

SEQ ID NO: 1012710 - DNA, 120 bp, Artificial Sequence
  ENSG00000258162_5 (sequence is synthesized)
agtttactgcaactatctctgtaaacatttccagtgacctcttaagtataagtgaaatcatttcatatcagacataatcctccatgccttcaagaaacattgaacacctccaatctttat

SEQ ID NO: 1012711 - DNA, 120 bp, Artificial Sequence
  ENSG00000258162_6 (sequence is synthesized)
tctcactacttctatctctaatttggttcagtgactcttgacttgcttgagtctcatatctctccttccttcattccagccttttgcttttagaatagcttccacctttgcctgtatcta

SEQ ID NO: 1012712 - DNA, 120 bp, Artificial Sequence
  ENSG00000258162_7 (sequence is synthesized)
ttcaccttttccagttttccatttaattccatgcatttaacagaatactagttgttaacctaactcaaaggatttgggggatgattacatggaataatgtgtatgatgcaatggctatga

SEQ ID NO: 1012713 - DNA, 120 bp, Artificial Sequence
  ENSG00000258162_8 (sequence is synthesized)
tccatgggcctgtaatgcccccaaaatgtgtgttgctgcctctatctcctttcaacatcctgatgcaatatttttctaaatgtgaatattacttaatacgcccatgcaagttctttaatt

SEQ ID NO: 1012714 - DNA, 120 bp, Artificial Sequence
  ENSG00000258162_9 (sequence is synthesized)
tttccttaggaaaatagacttcagagataaagctgattgtagatgaggtacaataattgttaatttccttggaaaattctaattgaaaattggtaaattcagtggttggaataagtatgc

SEQ ID NO: 1012715 - DNA, 120 bp, Artificial Sequence
  ENSG00000258162_10 (sequence is synthesized)
acagagtaaaggcaataaaaaatatagttcagcctgcaactacacttgccagttctttttatgtataatgtaatcatgtggaaaggcttttaaaataagcacgcctgtgtattcactgca

SEQ ID NO: 1012716 - DNA, 120 bp, Artificial Sequence
  ENSG00000258162_11 (sequence is synthesized)
aattagtctgtcaattgaatttttacaggtgcttctgaataatccatttcgtctggcttaattacataattttaaaagtgtacaggtttctgataaaagagaacacattgttaggatgta

SEQ ID NO: 1012717 - DNA, 120 bp, Artificial Sequence
  ENSG00000258162_12 (sequence is synthesized)
atctatttattaccccttgtacttccctttattgtgcttttttttggctttccaattttaagcaataacaataatactctgcaaaaaaataaagactttattgtattttctgtgtctaaa

SEQ ID NO: 1012718 - DNA, 120 bp, Artificial Sequence
  ENSG00000258162_13 (sequence is synthesized)
agaactaacattctgctttaataatccaaacacactataattccatcaatttgagtctcttaaaatgttacactgaaatgaatctctctgaagatggacttattgatttctatattcttc

SEQ ID NO: 1012719 - DNA, 120 bp, Artificial Sequence
  ENSG00000258162_14 (sequence is synthesized)
ctctagcatcatgaaatttgacctcttcagccgtgcatggttaacactgtaagtatacatgtgtttttttgttttttctccaatcatggcaaatgtgtcgaaattataggctgtgtccta

SEQ ID NO: 1012720 - DNA, 120 bp, Artificial Sequence
  ENSG00000258162_15 (sequence is synthesized)
gatctattattttagttctattatggcaaagaagagagttttagggaaaagcgtttcaaagtgtttgaaaagtgcttgaaaaaaatatagaaagcagaaacaatattcattaatcaatct

SEQ ID NO: 1012721 - DNA, 120 bp, Artificial Sequence
  ENSG00000258162_16 (sequence is synthesized)
tgcatataacaaagcaagctagggcaataaaaaggatttattcatttagttcctttcttagaaataacaaaagcatactaaacccattgttctggccaattccttttaaagtaatccatt

SEQ ID NO: 1012722 - DNA, 120 bp, Artificial Sequence
  ENSG00000258162_17 (sequence is synthesized)
tacttcagttctaatggtaattatcatgttacatttatctgtacccatttccattttatttttatgtgatttttaaatgtgcacatatcaaaataatgtcagtatgagaaggaagcagaa

SEQ ID NO: 1012723 - DNA, 120 bp, Artificial Sequence
  ENSG00000258162_18 (sequence is synthesized)
cttaagtggtctttacacccttactattatgaataaagaaaatgagatttacagagaatagtgataattctatttgtctccaacaaattgccatctagtcagtctcactgtagacaggac

SEQ ID NO: 1012724 - DNA, 120 bp, Artificial Sequence
  ENSG00000258162_19 (sequence is synthesized)
tcaataataagcataatatttactgaaagactctttatgccaaccacagttttacgttgtttgaatgtattaattaatttaaaactcacaacatcattataagttattattatggttcag

SEQ ID NO: 1012725 - DNA, 120 bp, Artificial Sequence
  ENSG00000258162_20 (sequence is synthesized)
ccaattaaggtaaaaagaaaaaggaaattgcctatggttacaaagctagtgaatagcagaatgacttagggagaaagtaagtttcacttggtgggcgttatagctcctctttggagtagg

SEQ ID NO: 1012726 - DNA, 120 bp, Artificial Sequence
  ENSG00000258162_21 (sequence is synthesized)
tttgtctctttccttagccttctatttccagagtagaatatatttactggaaccaagtaaatactctatttagaataaaggtttttttatttaccacttttccttacttgccaacgctaa

SEQ ID NO: 1012727 - DNA, 120 bp, Artificial Sequence
  ENSG00000258162_22 (sequence is synthesized)
tttctaactactcaaagctatccactttccataaaatatttcatacttttattgctccttatttctgtttttgtcagacctgcaagctaaaaattgttttgacatttttgaatagttgaa

SEQ ID NO: 1012728 - DNA, 120 bp, Artificial Sequence
  ENSG00000258162_23 (sequence is synthesized)
aaacattaaaagagaataatattgtgtaaattataagaaattcactttcagtgtccatgaataaattttaattggaaaatggccaaactcatttgtttacacattgtctatgattgtttt

SEQ ID NO: 1012729 - DNA, 120 bp, Artificial Sequence
  ENSG00000258162_24 (sequence is synthesized)
cactccacaatggtagagaagttgtgacagagaccatctggctcataaagccaaaaatatttactagttggacttttaccgaagtttgctgatacctggtctagtggttcttgtctatct

SEQ ID NO: 1012730 - DNA, 120 bp, Artificial Sequence
  ENSG00000258162_25 (sequence is synthesized)
ctttaaggaaaaaaaaactgttcaaatggatacagttaaagtcagaactataactaaaattcctgagttttaggtttatacgttgtttctaatttccttcacataagtacaaagaaaaaa

SEQ ID NO: 1012731 - DNA, 120 bp, Artificial Sequence
  ENSG00000258162_26 (sequence is synthesized)
caaaccagtttgagagagaagaggaaaaataaatgagtcgtgctctgtcttccaggctggaatgcagtggtatgatcacaactcacaacttactgcatcctctacctcctgagctcaagg

SEQ ID NO: 1012732 - DNA, 120 bp, Artificial Sequence
  ENSG00000258162_27 (sequence is synthesized)
ggaatccttccacttcagcctccaaggtggctgggaccatagatacactccactactcaaagtttagcaaccactcaaggaaatttaaaacactaaatttctggacttgccagactaagg

SEQ ID NO: 1012733 - DNA, 120 bp, Artificial Sequence
  ENSG00000258162_28 (sequence is synthesized)
accaaattcatcaaggtaatgtaaccctgaaatattctttttagtaaccagtatgcttgtggacacttaattcttttaacatcaatagcatttattgattgttgccattggacccatcct

SEQ ID NO: 1012734 - DNA, 120 bp, Artificial Sequence
  ENSG00000258162_29 (sequence is synthesized)
aaaaacaaaacaaaacagaacaaaaaaaactaaaaacaaataatgcttcacattaaaaatatgccattttctctcctgttcctaggggacttcccttgctatgagtatcttgctggtcag

SEQ ID NO: 1012735 - DNA, 120 bp, Artificial Sequence
  ENSG00000258162_30 (sequence is synthesized)
acttcccttgctatgagtatcttgctggtcagtagaagcagaaagaatctcagatgactctgctttcttgggaagcactttgtaaaatacaattttcaaaaagaaaaaatatataaaatt

SEQ ID NO: 1012736 - DNA, 120 bp, Artificial Sequence
  ENSG00000258162_31 (sequence is synthesized)
acatgaaattatcatgacatttttcctgaagcagccgcataatattccttgatgctggactttaggcagcaactacttaataacccaaactggcacccaagatgaattttattggccatg

SEQ ID NO: 1012737 - DNA, 120 bp, Artificial Sequence
  ENSG00000258162_32 (sequence is synthesized)
ctgttctggaattgtaaattttttacatctccttcaaaatataaagtatagatcatagtccaagttagaaaaatatcctaccaaaaattgtccaactgcagaaccatgactttgcttatt

SEQ ID NO: 1012738 - DNA, 120 bp, Artificial Sequence
  ENSG00000258162_33 (sequence is synthesized)
tgcagggccatagcattccttactcatttttatttatgtaataaataatgttacctgggaaaatggaaaaacggctatgtgtcaaagtgtgtattcagatgttctttcttctcacatttt

SEQ ID NO: 1012739 - DNA, 120 bp, Artificial Sequence
  ENSG00000258162_34 (sequence is synthesized)
tctttaacaatatatttcaagagaaagactatatttcaagtaagaactccaatctttttttaataggaaaaaatgtttaacaccaaggtaggaaaatattctcaacatttccttcgtgta

SEQ ID NO: 1012740 - DNA, 120 bp, Artificial Sequence
  ENSG00000258162_35 (sequence is synthesized)
gaattgtattctttatttttaaattttaattaactaatttgttttgagatacagtctcaccacttcgtcaagcaggctggagagcagtggtgctctctcggctcactgcaacctccacct

SEQ ID NO: 1012741 - DNA, 80 bp, Artificial Sequence
  ENSG00000258162_36 (sequence is synthesized)
tcttgtgcctcagcctccccagtagctggaattacaggcatctaccgccatgccatgttttttgggctgctctcaaactc

SEQ ID NO: 1012742 - DNA, 83 bp, Artificial Sequence
  ENSG00000258162_37 (sequence is synthesized)
agtgatccgcctgtgcttgagcctggccctcttgtggagtttaaaatttttcttttaaacaatcccaaatttgtaaatacata

SEQ ID NO: 1012743 - DNA, 120 bp, Artificial Sequence
  ENSG00000258162_38 (sequence is synthesized)
aaatttttcttttaaacaatcccaaatttgtaaatacatactagcaccagtatcattttgttataacttaactgctgtgaaatataattattactttttgactgtattctttaaaaatcc

SEQ ID NO: 1012744 - DNA, 120 bp, Artificial Sequence
  ENSG00000258162_39 (sequence is synthesized)
aagatcaagatacactacaatataaggaaagttggatgcaactacatatgtcttgcatgatcagaaaaatatgatatattaaaagaatattctttctgaagattcactctctgaaaaaaa

SEQ ID NO: 1012745 - DNA, 120 bp, Artificial Sequence
  ENSG00000258162_40 (sequence is synthesized)
acagagcgatttaaatacaaaaatttgaatcaatcagcactacatctctgaagtcatgaagaacatcagtgcccaggaagagaactgccatgagggtggggtcacttcagacagtcccca

SEQ ID NO: 1012746 - DNA, 120 bp, Artificial Sequence
  ENSG00000258162_41 (sequence is synthesized)
ctgagtcaatgcccagtggagccatagggttggttctaccctcaagaccttagactggtagagcaaccagagttctattccagcacagaagagctctggtgtgggccgcacccagcaaaa

SEQ ID NO: 1012747 - DNA, 120 bp, Artificial Sequence
  ENSG00000258162_42 (sequence is synthesized)
ccaagcagggatgcctggagccctggagcccatttgcccagtaaagctgagaagatggagcctctaccccactgtgtccacaaggagacctctgccccagtgggcctcaagggcagacaa

SEQ ID NO: 1012748 - DNA, 120 bp, Artificial Sequence
  ENSG00000258162_43 (sequence is synthesized)
ctgagtcaaagaagattcttccacaacatttatgttttggacttgttcaggacctatcatttatttcttctttcctatttctttattttccagtgggaatgtctttccttgcctgtccca

SEQ ID NO: 1012749 - DNA, 120 bp, Artificial Sequence
  ENSG00000258162_44 (sequence is synthesized)
ccattatattttggaagcacataatttgttttatttcactggttcacaactggacaaaaatttgcctcagaatgaattgtatcttgagtctcatccatatctgatttagataatatttag

SEQ ID NO: 1012750 - DNA, 120 bp, Artificial Sequence
  ENSG00000258162_45 (sequence is synthesized)
atgagatgtgaactttagacttctaagttgatattagaacaagttaatacttttggggtaattgaaatgaatgcattttacatttgagaaggacatgcctttttgggggatggggcagaa

SEQ ID NO: 1012751 - DNA, 120 bp, Artificial Sequence
  ENSG00000258162_46 (sequence is synthesized)
tatctgagtaagtcctgccttgaagaatcgtgagtgcaaaccagtttgagagagaagaggaaaaataaatgtttagcaaccactcaaggaaatttaaaacactaaatttctggacttgcc

SEQ ID NO: 1012752 - DNA, 120 bp, Artificial Sequence
  ENSG00000258162_47 (sequence is synthesized)
gagtgcaaaccagtttgagagagaagaggaaaaataaatgccctaatcctggacctcatgtaagaagttcaggaaccacaagactctgcggaagagaggagccatagaggagcactgagc

SEQ ID NO: 1012753 - DNA, 120 bp, Artificial Sequence
  ENSG00000258162_48 (sequence is synthesized)
tgctagacatgtgagtgaagaaaccatccttgcttgacaccagcccatcaaagactttgcatgatgctagtcccatctgctttccaattggaactgcattgagagactttgggtgagaat

SEQ ID NO: 1012754 - DNA, 120 bp, Artificial Sequence
  ENSG00000258162_49 (sequence is synthesized)
tatccaatcaactccctggtcagaaaaaatagtgataaggtggtgttttaagcctccatgttttggagtttttgtcaataacagtaaataactgagatataaagtgtctgttttgatggt

SEQ ID NO: 1012755 - DNA, 120 bp, Artificial Sequence
  ENSG00000258162_50 (sequence is synthesized)
gatgatggagtaggtggtaagagctggataagtgacttggaaccagattaagaatggttttcatggcatttaagattttggttttagttttaagggcaatgctatggcaaaaagaaatta

SEQ ID NO: 1012756 - DNA, 120 bp, Artificial Sequence
  ENSG00000258162_51 (sequence is synthesized)
attgatttaatacaacttttttttgctagaaatggggatttgatccaatttatactaaatatcacaatataaattaaaagaggtgagcactagaatgaggagactcagttgaagggtgct

SEQ ID NO: 1012757 - DNA, 120 bp, Artificial Sequence
  ENSG00000258162_52 (sequence is synthesized)
tcagtaattgaagtaaaaatgataagtctgaactaaaatggcaacagtaggaagaaggggatacaagtgatgtcaagatttacctaggagataaaatttgtaggacttgatcagttgtat

SEQ ID NO: 1012758 - DNA, 120 bp, Artificial Sequence
  ENSG00000258162_53 (sequence is synthesized)
aggagagatataattttaggtacttaattagtaaaaagtgatggcaactcaaattttcctaagccaaagtgggatatgttttcaggataatggtgcttctcttggaactcaaagactggg

SEQ ID NO: 1012759 - DNA, 120 bp, Artificial Sequence
  ENSG00000258162_54 (sequence is synthesized)
atgtgtctgggtctcagggacaactggaactgggaaccgaaatgtcactttccactttttaactctgctcctacctaaatctttattttctttctctgtaccatggcttcttccaatttt

SEQ ID NO: 1012760 - DNA, 120 bp, Artificial Sequence
  ENSG00000258162_55 (sequence is synthesized)
cttattataatggaggaacacatggcctccaaattgaccaagatttacatctaatagttttaagatccaacaaaatctactatctctttctcagatccaggaacaaaatgttcaagaaat

SEQ ID NO: 1012761 - DNA, 120 bp, Artificial Sequence
  ENSG00000258162_56 (sequence is synthesized)
cttctgatcagatatttgaaaagaattgattttaatttgctcatgtcctcaaagcaacaaggggagtttgaggtgtagtgaatagtttcttagaagaacaacgattgtattccaattaag

SEQ ID NO: 1012762 - DNA, 120 bp, Artificial Sequence
  ENSG00000258162_57 (sequence is synthesized)
ggaacataattcttgatcttagatcaggtggacatttatagttctgggatttgaaatataaatgttttctgaactaaaaacgtatacagttatttcagcacaagaactgaaggctgttca

SEQ ID NO: 1012763 - DNA, 120 bp, Artificial Sequence
  ENSG00000258162_58 (sequence is synthesized)
gatagacatttttgggggaataggatctcagagtacagtttgtgatcaaatctcaaaaaagtttattgcatttacaacagcatttttcaaagagaacacctctaaatacgacacacagtt

SEQ ID NO: 1012764 - DNA, 120 bp, Artificial Sequence
  ENSG00000258162_59 (sequence is synthesized)
ttgtggtcacacgaatcctcaaagtgctatattttatgtctgccttcaaggtattcactatatagatgagaagattaaaagctctaagaaatctgtaaacacacacatgcttctaaaact

SEQ ID NO: 1012765 - DNA, 120 bp, Artificial Sequence
  ENSG00000258162_60 (sequence is synthesized)
ttttctaatgtatttgacaacctttttaatagtctttctaatatcccatattatatgttgtaggaaattcatataaagtaatattgatttagatatctaagtccatgatttcaaaatgga

SEQ ID NO: 1012766 - DNA, 120 bp, Artificial Sequence
  ENSG00000258162_61 (sequence is synthesized)
tggaaagtttttgtcccaatttaagacatatggtatgtaatatagcataagatataataatgtgtataaaacgtcttcactgatactcttagtcaaatgacattttattgatataacttt

SEQ ID NO: 1012767 - DNA, 120 bp, Artificial Sequence
  ENSG00000258162_62 (sequence is synthesized)
aattaatgaatgatgttggcacattaatccttttctgtttcccagtagatattatgctttattattctgcaattcttgaaattgataatttataaatcttaacaggcacaattttcaaac

SEQ ID NO: 1012768 - DNA, 120 bp, Artificial Sequence
  ENSG00000258162_63 (sequence is synthesized)
agtgacagactttcatgaggagaaaagaaatatttagtcataggtttgtttaaattaatattttcaccatttgggatgacaaagcacaaaaaattacaatttctttttatagaggataag

SEQ ID NO: 1012769 - DNA, 120 bp, Artificial Sequence
  ENSG00000258162_64 (sequence is synthesized)
aataaaattagagcacaaatctgtaagtcagtaaattaatagagttgagatttttaaaacatctagtattttaatgcaatgaagagaagaaaacatacagaatcccacaactcatgtctg

SEQ ID NO: 1012770 - DNA, 120 bp, Artificial Sequence
  ENSG00000258162_65 (sequence is synthesized)
cagatcaataaaaaggtacagacttgatacatattactgctatgcttcttctgggtacttaaatatggctctaacaaaatataataggccactgtcaaattcagtgttttctgaaccttg

SEQ ID NO: 1012771 - DNA, 120 bp, Artificial Sequence
  ENSG00000258162_66 (sequence is synthesized)
tcgcccatcaggataattcagagtttttaaaaatagagacccttggggtttcatcctctaaattaagtgttagttgggatggaactaagaaatgtttatgtttaaaagcatctctggtga

SEQ ID NO: 1012772 - DNA, 120 bp, Artificial Sequence
  ENSG00000258162_67 (sequence is synthesized)
ttctgacatcactggtctgtaactagccatgatatgtgggaaacactggactgggtgttcctggatcatttggctactatttccaaatactgtaaatactgtgtgttatattatatattc

SEQ ID NO: 1012773 - DNA, 120 bp, Artificial Sequence
  ENSG00000258162_68 (sequence is synthesized)
caacttttcaattatctttacttattcatcaaaatgaaatgttattaattagaccaatactttgaagtgatggtagcctaataatattccttgataaatgcacggtggtcattttaccaa

SEQ ID NO: 1012774 - DNA, 120 bp, Artificial Sequence
  ENSG00000258162_69 (sequence is synthesized)
aattaatcagatgaatacataaaagtttatggctgtcaattgaataatacttcttatcatgaataatgcaaatgggtttattggggtcctaacattttaaactacatacatgtcaaactt

SEQ ID NO: 1012775 - DNA, 120 bp, Artificial Sequence
  ENSG00000258162_70 (sequence is synthesized)
aattaactctgctttcataaccacctacagaatgtcttacccttttttcatgcacattagaagatgcaaaactctgaactgttttccacaaactaacataacatatattgataggactta

SEQ ID NO: 1012776 - DNA, 120 bp, Artificial Sequence
  ENSG00000258162_71 (sequence is synthesized)
ataggctatcttacaagtgaaggctaattgctaaaggtgagattaggtaagttgaaaagtggtgctggacatcaaacaagtgggaaaatttgtgcaagtttttaatcaatattttgatag

SEQ ID NO: 1012777 - DNA, 120 bp, Artificial Sequence
  ENSG00000258167_0 (sequence is synthesized)
aaaaatgtctaaagaaccaaaacagattcaatgcagtgacggcagaaagtgtatgggcatgaagattcaaagaaaaagatgcggccgttgaaagatttatatgctcctttgctccaggag

SEQ ID NO: 1012778 - DNA, 120 bp, Artificial Sequence
  ENSG00000258167_1 (sequence is synthesized)
gcaaccctgtgactaccaactctattgaaaccatttctccaatagcatgagctcacttcaggtctttgtatcacattttcataattctcacaatatttcaaatttattattattattata

SEQ ID NO: 1012779 - DNA, 120 bp, Artificial Sequence
  ENSG00000255495_0 (sequence is synthesized)
aggaggcgggacccagagcagagcccaggagacaggtcttagggcggggctaaggccaggcccagagaagggctcaggaggcggggcaggggcggggcgttgactatgtcgtagaacatg

SEQ ID NO: 1012780 - DNA, 120 bp, Artificial Sequence
  ENSG00000255495_1 (sequence is synthesized)
gccaggcggtgcgcggactctgggaggcgaagcttaggacgggcccacttggggaggggcccagtgcccgggaggcggggccgagtccgggctgggctgcgctcaggaggcgggccctgg

SEQ ID NO: 1012781 - DNA, 120 bp, Artificial Sequence
  ENSG00000255495_2 (sequence is synthesized)
gaggcggagcttagggaggggccggtgttgggagggacccagggactgggaggccggttggggctgggctcaggggccgagacctagctgggcttggggcggggccgagacggagcgagg

SEQ ID NO: 1012782 - DNA, 120 bp, Artificial Sequence
  ENSG00000255495_3 (sequence is synthesized)
ggtccagggtgtgggaaacggggaggggtttgaggaggggatcggaatgtggctcaagttcgggaggcgttacctgcggagggtttgaggcaggcccaggagcgagcccatggtcttccg

SEQ ID NO: 1012783 - DNA, 120 bp, Artificial Sequence
  ENSG00000255495_4 (sequence is synthesized)
acgcggggccaggggcggggcccaggatccggagcttcgtgcggggccgagtccaggtttggggcccgggaggcggggccagttagggcgagggtccctgggatcgtcgggtcaggcctt

SEQ ID NO: 1012784 - DNA, 120 bp, Artificial Sequence
  ENSG00000255495_5 (sequence is synthesized)
aggtcttttcagcaggggccttacgggtgcatgcttcggtcctggaggccttatcctagcctcctctccatcagcgccacccgtctggggcccgaaaggagggagctttccctctgtccc

SEQ ID NO: 1012785 - DNA, 120 bp, Artificial Sequence
  ENSG00000255495_6 (sequence is synthesized)
ccagcctttggactgtcactaaacaagccattcgttcatcaaatactttttaagcgcctaccatgtgcctgacaagggagatgtaacggtgagaaaaactaggtgtggtccaggcccttc

SEQ ID NO: 1012786 - DNA, 120 bp, Artificial Sequence
  ENSG00000255495_7 (sequence is synthesized)
cttcaggggctcaggtgctcgtggaagaagtggacattgaagtacttatcacacaaatgaggataaaagtacgataacgatatctaccacgaagctgttgttccccaccagaaccaaatg

SEQ ID NO: 1012787 - DNA, 120 bp, Artificial Sequence
  ENSG00000255495_8 (sequence is synthesized)
caagatctgacaaagaaaaaaaaaggttcatcttttattcctccaaacactttcatttaaatcaagaggatgggatgtggttattgctgtgtttttagacagaatcaacggtttctgggt

SEQ ID NO: 1012788 - DNA, 120 bp, Artificial Sequence
  ENSG00000255495_9 (sequence is synthesized)
ctgagatgttgcatacaccttctcagtccctgtatcctgagatggagtcacctgagaatccacagcaagtcctaaccagggatgggtctgggtgattaaggaaggttggcttcagaactg

SEQ ID NO: 1012789 - DNA, 74 bp, Artificial Sequence
  ENSG00000255495_10 (sequence is synthesized)
ggccaggagacaagaaaaaccaacgggaacaggttagttatactgataaatcctgggcttattttattaactca

SEQ ID NO: 1012790 - DNA, 120 bp, Artificial Sequence
  ENSG00000255494_0 (sequence is synthesized)
ccgccctccctctgagagtgtataactgtgcttcaacaagctttgtttcaagcttgcattttggtgttagtttgcatttctttgctcactatcacaagaaccgagactgctgatctagag

SEQ ID NO: 1012791 - DNA, 120 bp, Artificial Sequence
  ENSG00000255494_1 (sequence is synthesized)
ctccagctctgttgatctccttggctgaagggtccatcccaactcaagatcccagaatgtcctgtatcattttaatgactggagtgtgactttgttctcagcacaatgagtaacaaagcc

SEQ ID NO: 1012792 - DNA, 120 bp, Artificial Sequence
  ENSG00000255494_2 (sequence is synthesized)
tattcaagaaaacctcagacaaggaagaatgctttcataatacagtacattaaaatcagacgaagcctcgaagggcagaatcaccgaccctgaaaaatcagagtgtactacagaagaaga

SEQ ID NO: 1012793 - DNA, 120 bp, Artificial Sequence
  ENSG00000255494_3 (sequence is synthesized)
cgacagcgtttgagcacatttgttgaagcagcctcctctcccttatggtacgataatcccacaccgttttaccatgctctctggccttcccagaacatcaataaaaactgcatcccctga

SEQ ID NO: 1012794 - DNA, 120 bp, Artificial Sequence
  ENSG00000255496_0 (sequence is synthesized)
ctcctctgcatggaaccaggtggggagagagcgaacctcaaagtcatgcaaagggcttcttagcctggcttgaccactttggaacaggctgtctgtgggcaaaggattcaacctcactga

SEQ ID NO: 1012795 - DNA, 120 bp, Artificial Sequence
  ENSG00000255496_1 (sequence is synthesized)
atgaataacatgcacagatgagcttcaaaagtgaatgagcaaacttactggttacactctgcatccatttactctgtttagtatggagtaatgttaggcaataaatgatgctggcaaatg

SEQ ID NO: 1012796 - DNA, 120 bp, Artificial Sequence
  ENSG00000255491_0 (sequence is synthesized)
agaggaggagctactgatttccagctgcaaggttgaaataaaaccagcaaaagtgcaagccaagggttcagtttcccaatagctgcagctgtctagcacccggagctatttttaaactcc

SEQ ID NO: 1012797 - DNA, 120 bp, Artificial Sequence
  ENSG00000255491_1 (sequence is synthesized)
ttttcagaacttccagtgcttgcgatggatctattttcttaactgccaagagataatgcttaaaagggatagcttgaaaatattccacggcgctcatacaaatgactgaaatagatagtg

SEQ ID NO: 1012798 - DNA, 120 bp, Artificial Sequence
  ENSG00000255491_2 (sequence is synthesized)
tacaagacggcctttgtctggagcagcagaggaaagcaagatgaagtctttcagaccccaggaccatggtgctgctggatctgctgctgacaaccgtggctttgtgtcttgaatgtgcac

SEQ ID NO: 1012799 - DNA, 120 bp, Artificial Sequence
  ENSG00000255491_3 (sequence is synthesized)
tgtgaccagaaaaggcaagaaaaccaaacagtaattgtaaagaacatcagagacctggcatttaaattggtcattgattccaggaaacaggagaccccaaaatagctcccaaagaatccc

SEQ ID NO: 1012800 - DNA, 120 bp, Artificial Sequence
  ENSG00000255491_4 (sequence is synthesized)
ccttgacttgaagagtgctgccttatctgcaacgtggatggagctggaggccattatcctaaggaaactaacacaacaacagaaaaccaaatactggataagtgagggctaaacattgag

SEQ ID NO: 1012801 - DNA, 120 bp, Artificial Sequence
  ENSG00000255491_5 (sequence is synthesized)
gaatttccaggatgacagccctggttcaggtctggagatcaactgccgtatacgtacttgagaacaagtatgaaagtgtccctgagggaggtatccagggaacaaataaaggggagagca

SEQ ID NO: 1012802 - DNA, 120 bp, Artificial Sequence
  ENSG00000255491_6 (sequence is synthesized)
tggcaaagtatttctgatatgataactgcccagggaagaagaagaaaataagaagatggcttactgctggagcatttaaacacttcaaagaacactatttatgtagccaacaatagtgct

SEQ ID NO: 1012803 - DNA, 120 bp, Artificial Sequence
  ENSG00000255491_7 (sequence is synthesized)
ttaacaatattaagaggatgatgtggagaggtgcagatgatggtgtaagaattaaatctcataggaaggaaaagtttaaaaatcactaggtaatatatgaaattgtaaattaaaaatcag

SEQ ID NO: 1012804 - DNA, 120 bp, Artificial Sequence
  ENSG00000255491_8 (sequence is synthesized)
acttttaatcgcaatgatagtaataataataaagttgaaaaattaaaaaatatttttaaaagttcattttaaactatgtatcactttaaatatacagttctattgtcctctggcttgcat

SEQ ID NO: 1012805 - DNA, 120 bp, Artificial Sequence
  ENSG00000255491_9 (sequence is synthesized)
tattgtcctctggcttgcattgtttttaaaagaagtttggaaaattcttatacttattcctctgtgtgtaatatattttttattgtgctgctttttaatttttctctttatcattaattt

SEQ ID NO: 1012806 - DNA, 120 bp, Artificial Sequence
  ENSG00000255491_10 (sequence is synthesized)
ttagtaatttaattatgatagcttttgagtagttttctttaagttaatcctgctttgattttgtttaagttcttaaattttggggtttaagttttcattaaatttagaacttttaaaatg

SEQ ID NO: 1012807 - DNA, 120 bp, Artificial Sequence
  ENSG00000255491_11 (sequence is synthesized)
tagagcccgaggcagccctgagccagtgggagccctgctcctggtgaaggcacaacttctgctgcagaactcccctgcagggtcaggctactgctgggacattgcaagaatcactcatca

SEQ ID NO: 1012808 - DNA, 120 bp, Artificial Sequence
  ENSG00000255491_12 (sequence is synthesized)
gccaaaggatgaagagtcctttttatggttcaagctagaagccaagccagtctcctcacctgaaaaatgggaagagcaaaatatcctaccctagagggttgctgtgagagccgaaagcgt

SEQ ID NO: 1012809 - DNA, 120 bp, Artificial Sequence
  ENSG00000255491_13 (sequence is synthesized)
agcccggtgtaaactatgcagggtgccagagcccccactgacagcgctggtgtccacatgtggtcacagggatacagcggcagcatcccaaagccctagcctggtccatcaccctcaaaa

SEQ ID NO: 1012810 - DNA, 120 bp, Artificial Sequence
  ENSG00000255491_14 (sequence is synthesized)
ctgcctctggtttgtccaagtctaccaggattcaagttcatttcagaaaagcagtggccagaaaccaaggcctggagggggctggggaggtgtcagggaagggatcagaggccaagctct

SEQ ID NO: 1012811 - DNA, 120 bp, Artificial Sequence
  ENSG00000255491_15 (sequence is synthesized)
ctgggccacaggcctgggcagcagccgtggcagccaaggggataatggctctctttgtcctgcgtgtaaattctccggaaaagaaaggattccagggcctgcttctccggcttgcacaat

SEQ ID NO: 1012812 - DNA, 120 bp, Artificial Sequence
  ENSG00000255491_16 (sequence is synthesized)
gctggccgcctggggccccactgcgagggcctgccatggcattcggggagcagtgaggccccttctctgtctcgttccttccaggcgtgcagaagcggaaagtcaggctgccgtgccaga

SEQ ID NO: 1012813 - DNA, 120 bp, Artificial Sequence
  ENSG00000255491_17 (sequence is synthesized)
cattctgcagggggttgggaggctgggctgaggcacagcctgtgccaggagctttgtttcacagcctcgaggaaaccaaagcatcttgaagctctgaattagaaagagtcttagagagca

SEQ ID NO: 1012814 - DNA, 120 bp, Artificial Sequence
  ENSG00000255491_18 (sequence is synthesized)
tccatgccagctcttcctaatacttgtcccaccccctaccttctctgcctaccactccccactcccctgccttcagcagccaagaatggttacaaacacaggctttggagtcagagaggg

SEQ ID NO: 1012815 - DNA, 120 bp, Artificial Sequence
  ENSG00000255491_19 (sequence is synthesized)
ctgagttcaaatgctgacaatgccactcacaagctatttcatctctatgggcttcagtttctccacctgcaaaatggacataatagcacctactcataagattgtcaataggaataagtg

SEQ ID NO: 1012816 - DNA, 120 bp, Artificial Sequence
  ENSG00000255491_20 (sequence is synthesized)
agaaaatgcatgtaccatgcttaatgtggacacagcctccagaagcgctcaataagggtagacggtccagtaggtcacccagcctgtacttgatttcctccaagggcaggcaatcactgc

SEQ ID NO: 1012817 - DNA, 120 bp, Artificial Sequence
  ENSG00000255491_21 (sequence is synthesized)
ttgcattccattttcagaccaagttcaaatctgtctcttataccctcatgggtgctgagggtaaaggggagagggcctacatacattaaacatttcctacatgttactgttgccataaat

SEQ ID NO: 1012818 - DNA, 120 bp, Artificial Sequence
  ENSG00000255491_22 (sequence is synthesized)
gttgccataaattactcacagaacttaagggcctgtcttagtctatttgtgttgctataaaggaatacccgaggctgggtaatttataaagacaagaggtttatttggctcatggttctg

SEQ ID NO: 1012819 - DNA, 120 bp, Artificial Sequence
  ENSG00000255491_23 (sequence is synthesized)
ttccattcatggaaaggggaaggagagctagtgtgcagagatcacatgctaagagaggaatggggagggggtggtgcagaggtgccaggatttttagcagccagctctcatgaaaactaa

SEQ ID NO: 1012820 - DNA, 120 bp, Artificial Sequence
  ENSG00000255491_24 (sequence is synthesized)
tagagtgagagctcatttattacaatgcaagaatggcaccaagcaattcatgagggatcagccaccatgacacaaacacctcccatgaggccccacctccagtattggggatcacatttc

SEQ ID NO: 1012821 - DNA, 120 bp, Artificial Sequence
  ENSG00000255491_25 (sequence is synthesized)
aacatgagggttggaggggtcaaatatccaaaccatagcagggcctgtccagggccacacagaggaagtgaccaggatttgagcctgagtctttccagccttctgcaccatgatgccgta

SEQ ID NO: 1012822 - DNA, 120 bp, Artificial Sequence
  ENSG00000255491_26 (sequence is synthesized)
agggaaaactttatatatgtgaaaacagctccacggccccctcagtgtcttctcttccccacagaaaacatctcctaggcctcagggtttcgttttgtgttctgccaccatcctggcccc

SEQ ID NO: 1012823 - DNA, 120 bp, Artificial Sequence
  ENSG00000255491_27 (sequence is synthesized)
tatcctcttgacaggctctaatttgttactgtctctcttaaataaatagcttgcagacttattccagctgtcttctgaccagtgcagaataggaatgcactctcacctcctttattctag

SEQ ID NO: 1012824 - DNA, 120 bp, Artificial Sequence
  ENSG00000255491_28 (sequence is synthesized)
gggctctgtttttgctaataacacctaagatgatgtggcccttggaccattcacattatgctgatggctctctcatacttaatgatcttcaatctgcaagaataacaagagcctttgtgc

SEQ ID NO: 1012825 - DNA, 120 bp, Artificial Sequence
  ENSG00000255491_29 (sequence is synthesized)
tctgaacagctcgtagcagtcattgcagatcttcatttcaggtaatagaaccttcttcaactagtttaagcagtcaagccttttatatatttggtggctcacagaatctccagcagggct

SEQ ID NO: 1012826 - DNA, 120 bp, Artificial Sequence
  ENSG00000255491_30 (sequence is synthesized)
gaagagtcaggcgtggaagagacacacccaggaacaactcaccaaccactcctgacccggcttctccactggagacaccattgccattagacaagaatgaacctgcacaccttgctgatg

SEQ ID NO: 1012827 - DNA, 120 bp, Artificial Sequence
  ENSG00000255491_31 (sequence is synthesized)
ctggtgtagcactgtcgctagaacctctgcctctgctcctcttggtctcccacattcagtacctccttcttcaccttggtctcttctaagcctccgtgggtgcatttcagggattaaatg

SEQ ID NO: 1012828 - DNA, 120 bp, Artificial Sequence
  ENSG00000255491_32 (sequence is synthesized)
agttaatagatgtatagtcagcctccaacatggttccagtaattctcacctcctggtattgtgtctttgtataggcccctcccacaatggatagggctgacctgtgtaaccaacaggatg

SEQ ID NO: 1012829 - DNA, 120 bp, Artificial Sequence
  ENSG00000255491_33 (sequence is synthesized)
ttgcagaaatgacatagtgtgacttcaacactaagtcacataagacatcgcaacttctgccttgctcttttggagcacttgttgtagggaaaaccagctgccatgtcataaggacactta

SEQ ID NO: 1012830 - DNA, 120 bp, Artificial Sequence
  ENSG00000255491_34 (sequence is synthesized)
agcaatgctctggagagatctacatggcaaagaactgaggcctcctgccaacccccagcacaaatgagccaggcatgcaagacatcatcttggaaagggatcctgcagcctcacttgagc

SEQ ID NO: 1012831 - DNA, 120 bp, Artificial Sequence
  ENSG00000255491_35 (sequence is synthesized)
cttcagatgatgcagctccagctgacatcttggctgcaacctcatgagggaccctgggccagcaccacccagccaagctgctccagacacctgatccacaaaaactttgtgagataataa

SEQ ID NO: 1012832 - DNA, 120 bp, Artificial Sequence
  ENSG00000255491_36 (sequence is synthesized)
ggaagaaaagaaaatggccgccacagtgctttcccctcacagtgcacaatttgccaatgagttcaaagtgtctccgtaacttcatgccatttcttctgctagaagccaagccagtctcct

SEQ ID NO: 1012833 - DNA, 120 bp, Artificial Sequence
  ENSG00000255491_37 (sequence is synthesized)
tttcatgtacagtcctgccttaccccggttgtcttccttgttgcctgtgaccatgtcttctcactgtatttggccccacacctagaggagcaccttgaaaccagtggagggtccacagga

SEQ ID NO: 1012834 - DNA, 120 bp, Artificial Sequence
  ENSG00000276831_0 (sequence is synthesized)
ggcctgcggttaccaaggcgacgaaactttattgacagctctgcctggctacaaagggctcctcagtctctctccctccctccccgtttacaccgttgcgttttgggagtatccacacgc

SEQ ID NO: 1012835 - DNA, 120 bp, Artificial Sequence
  ENSG00000276831_1 (sequence is synthesized)
cgctcccctggggcaccccctaattgggatcaccccccctacctcaatcctagaggcaaacgtaactaacaattcatcataattacgccgagaataataagctccacactcagaacaggc

SEQ ID NO: 1012836 - DNA, 120 bp, Artificial Sequence
  ENSG00000255498_0 (sequence is synthesized)
gacaggaaatggcactttaatagttggggccagggtgacaggaccaagatggggtcagtggcaggagccacccagaagccccgcagatgacggagctgagaacagggacttcacctccac

SEQ ID NO: 1012837 - DNA, 120 bp, Artificial Sequence
  ENSG00000255498_1 (sequence is synthesized)
cctgagctcagggctcttcggtgggggttggggcaggggcagggcgggcacttgcaggtggcacaggcttcatcaaggcaggacacgggcttcatcaaggcaggagccacagcgcccgag

SEQ ID NO: 1012838 - DNA, 120 bp, Artificial Sequence
  ENSG00000255498_2 (sequence is synthesized)
ccctggcaggggaggtaaggcccaggatggggcagggccgtgtgctcctggaacggacatccttctctgccagagacctgctccccaagccctgtccctcccaatccccaggcagcccac

SEQ ID NO: 1012839 - DNA, 62 bp, Artificial Sequence
  ENSG00000230115_0 (sequence is synthesized)
actatttatttaaaaatacacaagaaactgttgactatcacccatggagggaaggctgaaga

SEQ ID NO: 1012840 - DNA, 120 bp, Artificial Sequence
  ENSG00000230115_1 (sequence is synthesized)
taagatatatactcacttgtccagggacatcccagggaaggtgaacttgcccaggcagatgcgatagacagcgctcagaggaatccgctgcagctgcacacaactcagcatgatgaagtc

SEQ ID NO: 1012841 - DNA, 120 bp, Artificial Sequence
  ENSG00000230115_2 (sequence is synthesized)
gtatttgcagatcaagagagtcttgtctgtgaccagtagaattctctccttctcattgttccagtggtctatcctataggaatcatcatagcaaataaaaattgatgacacagcctaagt

SEQ ID NO: 1012842 - DNA, 120 bp, Artificial Sequence
  ENSG00000230114_0 (sequence is synthesized)
gctgtgctagcaatcagcgagactccgtgagcataggactctcctagccagatactgcagtctgacagagatggtaaaaaaaaaatggcttgcagattgcacattagaagattcctctcc

SEQ ID NO: 1012843 - DNA, 120 bp, Artificial Sequence
  ENSG00000230114_1 (sequence is synthesized)
tagaagattcctctccctcactgaaaacttgtgagaaggcagccaaaagaggttctccttcctgcgtgatgggaaagtcaaggataataaatagaaaaccagccgagtggatggcttcaa

SEQ ID NO: 1012844 - DNA, 120 bp, Artificial Sequence
  ENSG00000230114_2 (sequence is synthesized)
taataggacagatgaaataacagcatttgatcaaatctagggtagggtgacagtggatgagactacattgactaaagcccaatgattccaactgaatccatcttagaccaacatatagac

SEQ ID NO: 1012845 - DNA, 120 bp, Artificial Sequence
  ENSG00000230114_3 (sequence is synthesized)
ggttgacttccaaatatatgagagcacccagacaagatcagcagattaatctacagttgatcactaatacagaaaaaccatccggttggcccatggacttaacgagcattaataaatgtt

SEQ ID NO: 1012846 - DNA, 120 bp, Artificial Sequence
  ENSG00000230113_0 (sequence is synthesized)
ggaacaggagagaggcagacagaagggaggactcaaagaaaagaagccactagaaatagccttccctctggagtggggaggaatccaaaaatcccaggagctgcccagcgggtgtgacct

SEQ ID NO: 1012847 - DNA, 120 bp, Artificial Sequence
  ENSG00000230113_1 (sequence is synthesized)
tagctaataataacaggccagcgttttctcacgagaaaaaggatcagcatagagcacggtggagggaaagagaagctgcttagcccccacaccgcaaggggaagagaagacaatgaaaag

SEQ ID NO: 1012848 - DNA, 120 bp, Artificial Sequence
  ENSG00000230113_2 (sequence is synthesized)
ctgtcctctgcccttgtccaaaagaacacccctcagttcctgcttcttactaagccggttgaggggcgtcaaggggctggacaggacaccccgcaaactttccagccattcctgctgttc

SEQ ID NO: 1012849 - DNA, 120 bp, Artificial Sequence
  ENSG00000230113_3 (sequence is synthesized)
cttctcactggggcaagtgaggacaaatctccgctctggggtgacaatggtgagtccggctttccagcgatttcctcggatgcccttgggcaggtcttcgtaggcttcatatccctgctc

SEQ ID NO: 1012850 - DNA, 120 bp, Artificial Sequence
  ENSG00000283982_0 (sequence is synthesized)
agctcagatgtaacctaaacccatggaacttggaaaaagaagcatctgccgagaggagcggggttgatcttgatttgctttcagggagttgccacggagcatcgtctgcagagacctgca

SEQ ID NO: 1012851 - DNA, 120 bp, Artificial Sequence
  ENSG00000283982_1 (sequence is synthesized)
ttatgtgaagcagcatcttctttccccttgatgttgaaactggatgaaggatcttgtcaggctcacagatacctaaatcatatcaacaagaagtttatggaaaagagaactacaatcatc

SEQ ID NO: 1012852 - DNA, 120 bp, Artificial Sequence
  ENSG00000283982_2 (sequence is synthesized)
ataaacccaatcatgttttacttggtgttgaaggacattaaaaaatacctcccaccttaatttactaaattatcaaacaaatcctgttccccgatctcagaagaccacctggctcagtat

SEQ ID NO: 1012853 - DNA, 120 bp, Artificial Sequence
  ENSG00000283982_3 (sequence is synthesized)
cacaaagcaccctgatttctccctcatcttgagatgtcaggatccctcagaaaacttcgtagaggtgccctagagagaatcagagcaccagtggaacaacagcagtgagaagctcatcag

SEQ ID NO: 1012854 - DNA, 120 bp, Artificial Sequence
  ENSG00000283982_4 (sequence is synthesized)
cttcacgaactgaccacagaccaatcagtgaattcctgtcctgctttcactttgctttccgtgctatgtggaaataagagctctcctcatgggtccagtgtgaggaacagatagcaagca

SEQ ID NO: 1012855 - DNA, 120 bp, Artificial Sequence
  ENSG00000283982_5 (sequence is synthesized)
ctgattgggtggaaccagccaaagggattgtctcctggcttgattcagctcttcaggccctggagatgaagttctgtgtcaggcaccaagcatctgtatgcggtaggcagctggaggtca

SEQ ID NO: 1012856 - DNA, 120 bp, Artificial Sequence
  ENSG00000283982_6 (sequence is synthesized)
ctctcttgatcacctcttgtgtggacaagttttcttacaagcagaagcccatccccaggcatcctctagtgctgactgacgagataggagcaaaactcatgcaacctgcctttcagatgc

SEQ ID NO: 1012857 - DNA, 120 bp, Artificial Sequence
  ENSG00000283982_7 (sequence is synthesized)
aaatagaacattcctaagtcctttgaggcactctgccaatgtggctccttccattttgtggctctgccggtcttcttgaacacatggctcctgaggctggggtagagaaaggtattcacg

SEQ ID NO: 1012858 - DNA, 120 bp, Artificial Sequence
  ENSG00000283982_8 (sequence is synthesized)
tgaccagattcacgtctgtcagatttagttaacacacttcaacagtgcgactaaaaggaactgcacccagagcttgcaagccagtgccctgctcatccctgcaccagggtggaggaatag

SEQ ID NO: 1012859 - DNA, 120 bp, Artificial Sequence
  ENSG00000283982_9 (sequence is synthesized)
tcaccaaagcttctggtggctgcccaagttcttggcttgtggctgcatcactccagtctctgtgaccacaggccttctcttgtgtcaccacgttgccttctgcttccctattataagaac

SEQ ID NO: 1012860 - DNA, 120 bp, Artificial Sequence
  ENSG00000283982_10 (sequence is synthesized)
acacctgactatatctagagttcacccagataatccaagataatctccccatctcatgatccttaatcgtatcttcagaatcctttttaacatataagttctagttaggtgaaaacatag

SEQ ID NO: 1012861 - DNA, 120 bp, Artificial Sequence
  ENSG00000283982_11 (sequence is synthesized)
ctctctagtagtttgctgcacatttcctgtgaaagtgaagattctcctttcttaatgaagagcagctcatatatgatgacaaaacagaggcaagagagcatatgttggagaacctggcgt

SEQ ID NO: 1012862 - DNA, 120 bp, Artificial Sequence
  ENSG00000283982_12 (sequence is synthesized)
tctatgtcatgagagaatgaaccagaatggggcatatgcttctaacctgaagacaagactgcagaattgactatatacacagtcctgtgtcacttaaagacagggatacattctgagaaa

SEQ ID NO: 1012863 - DNA, 120 bp, Artificial Sequence
  ENSG00000283982_13 (sequence is synthesized)
tgcatcatgaggcagtttcatcattgtgcgaatatcatggagtgtccttacacaaagctagacggtatacacctactacatacctagcctctatggtatagcctgttgatcctaggttac

SEQ ID NO: 1012864 - DNA, 120 bp, Artificial Sequence
  ENSG00000283982_14 (sequence is synthesized)
aaacctgtacagcatgttactgtattcaatactgtaagcatttatgacacaatggcacggtcttcccatttcccagatgaagaaactgaagcaaaaagatacatcactggcttatctgat

SEQ ID NO: 1012865 - DNA, 120 bp, Artificial Sequence
  ENSG00000283982_15 (sequence is synthesized)
tagacacagcagagtaaggcatctgccccaggcaatggagaaattgaagctccaaatggctaagcaatctacccaagatcacacagccagattggtggcatctaaaattcgaacccagtc

SEQ ID NO: 1012866 - DNA, 120 bp, Artificial Sequence
  ENSG00000283982_16 (sequence is synthesized)
ctgatgtgctgaacttcgcatctggatttctcaaaatgcacagaaaattaaaagcaggttattgaaacccattttctgggtcctgaaggataactgttagccttggatgatcagaaggag

SEQ ID NO: 1012867 - DNA, 120 bp, Artificial Sequence
  ENSG00000283982_17 (sequence is synthesized)
cagctatgcacctattaggctttgtcagccttggccacactgggttatggggattcctaacctcctgaacactactcactagtttggtgattatctatctccttgagagaaggcaagtat

SEQ ID NO: 1012868 - DNA, 120 bp, Artificial Sequence
  ENSG00000283982_18 (sequence is synthesized)
ggcccaatggaaatagcacagccttggagtcgggacacctgagcatcttgcctcattctgccatgtacaaactctgtggcctccagcaagttcctttaccactctgaaccacagtgtcct

SEQ ID NO: 1012869 - DNA, 120 bp, Artificial Sequence
  ENSG00000283982_19 (sequence is synthesized)
catctgcagagggacgacaacccctatttgatgattgttgggagaattcaagataatgtatgcaaacaacttacctacacttgtacattcaactatcatcttcttcaaagaagaaactgt

SEQ ID NO: 1012870 - DNA, 120 bp, Artificial Sequence
  ENSG00000283982_20 (sequence is synthesized)
gtgctattccacaacccatgtttatgttcaagctttgttggattcctgtttgggaatttccttccgaggcgggcggtgtcacattcatttgaagtcagtcaataatgacccagatgtggc

SEQ ID NO: 1012871 - DNA, 120 bp, Artificial Sequence
  ENSG00000283982_21 (sequence is synthesized)
acatgaaacagagttggccaggaaaaagaagtccctgtaaagctcatgtcagagagagagagagaaggaagaagcatggatgggccttaaagatattctaggaagatgtggccaaggaga

SEQ ID NO: 1012872 - DNA, 120 bp, Artificial Sequence
  ENSG00000283982_22 (sequence is synthesized)
aacaacttcctattcctatcctgtagcctgccaagcctgagaagctacctccctgaaaatcttcctaggactcctcagcttcctcaatgctaccaaatacccactatctccatagacaca

SEQ ID NO: 1012873 - DNA, 120 bp, Artificial Sequence
  ENSG00000283982_23 (sequence is synthesized)
cacaaatgacagaagtaaaaggagccacgaagatgatggaagtcggttaccacatcgtccctaactgtagggaatgggtataataacacatctgcctcttcaaattgtggtgaagatgaa

SEQ ID NO: 1012874 - DNA, 120 bp, Artificial Sequence
  ENSG00000283982_24 (sequence is synthesized)
aacagtgcatgttttaggctgaactacctgaaattaccagggttttatagagaatgattggcctggagcaagcatagaagcagagaggtgcataaggaggctattgcaacagctcagctg

SEQ ID NO: 1012875 - DNA, 120 bp, Artificial Sequence
  ENSG00000283982_25 (sequence is synthesized)
agaaatagtgtaggcagagcccagggcagcagcagtgtgcctgaagaggagtggatgaaaatgaactatttccaagtcctcctgggactccagtaagacaagtcttgcctttcatgtgga

SEQ ID NO: 1012876 - DNA, 120 bp, Artificial Sequence
  ENSG00000283982_26 (sequence is synthesized)
ctcatacaatggtgctcacattggcggagtaagaagcactgcacagaaatagctcattggcagaattgcgctctcaaggatggatatcttcaagccatccttgaccctctagagcagaaa

SEQ ID NO: 1012877 - DNA, 120 bp, Artificial Sequence
  ENSG00000283982_27 (sequence is synthesized)
gacaaacaagtgtaatgctgaggaatgggaaaaatgtttaattgcaagcagaagaatctcacgtgaaatttttacaaatgaggaaacggaagcacaaaaaggctgtgctaaggtcaagca

SEQ ID NO: 1012878 - DNA, 120 bp, Artificial Sequence
  ENSG00000283982_28 (sequence is synthesized)
gatcatactgcctaacaggattttggcaccattggtagtcactttgacatgtcaataatgataattgcaaagaagactgttgttccaagtaatggataacacagcatctgaacctacctg

SEQ ID NO: 1012879 - DNA, 120 bp, Artificial Sequence
  ENSG00000283982_29 (sequence is synthesized)
gatactttttcaatatctaaagaattatgttgtataaaaagatgctcgaagcccagaaaaaataaaagatgagcacttctggaaattactatcttaaacttgttctgcagaattactcca

SEQ ID NO: 1012880 - DNA, 120 bp, Artificial Sequence
  ENSG00000283982_30 (sequence is synthesized)
tttttgtcctctgttaacattttaagaagattccagttctttttggacctttttagttgtaatggagcccagcccatgcctttgaggcagggagcagggaaatggtgaaagtcaagtgac

SEQ ID NO: 1012881 - DNA, 120 bp, Artificial Sequence
  ENSG00000283982_31 (sequence is synthesized)
tcttagcttgcgctgttgtcatcctctctggactattgctacatttctagactactctcattctcagcccacgtaggaaatcagaagataatttaaaattaaataatgatggctcagagc

SEQ ID NO: 1012882 - DNA, 120 bp, Artificial Sequence
  ENSG00000283982_32 (sequence is synthesized)
ttaaagcacttaaaaaagagaagaaagaaaagcatcacatcttgacagtgctgggagtgatggtggaaagcttgccaaggaggcccggaagagtggttggaaagaccattattcataaca

SEQ ID NO: 1012883 - DNA, 120 bp, Artificial Sequence
  ENSG00000283982_33 (sequence is synthesized)
aaaaccaactcaaaatggattaacgacttaaacataaggctggaaatggtaaaactccttgaagaaaacataggaaaacgtgtcttgacattggtctgggcaacaaatttttttggatat

SEQ ID NO: 1012884 - DNA, 120 bp, Artificial Sequence
  ENSG00000283982_34 (sequence is synthesized)
gacgacaaaagcacagtttaccatggaataaagttggtgttcagtgaatagatgctgaaaaaagtaaaatttgcctctagagatgtcatcactacttcctgtgagatacaaagttttgtt

SEQ ID NO: 1012885 - DNA, 120 bp, Artificial Sequence
  ENSG00000283982_35 (sequence is synthesized)
actaaagagaacaataacaaaaataaacaacagtaacaaagtggatttgaaaagaaactttcctctcaagaaaaaaaggaaaaaagacaggcttagtgtaaaaatggaaagacccttgac

SEQ ID NO: 1012886 - DNA, 120 bp, Artificial Sequence
  ENSG00000283982_36 (sequence is synthesized)
taaaactgacatttaaagaccagattggagggataagaaagcaaaagaggaaaatcagatactcaagctttctgaactcagaaaggaaaaaagcagaggagacagatcaaagaatcaaaa

SEQ ID NO: 1012887 - DNA, 120 bp, Artificial Sequence
  ENSG00000283982_37 (sequence is synthesized)
ctccattaagggcaacaactggaaagtaaagggatgagggtgtccctgcaagatacagaagcattttgatttagctgtagaaacagaggaaggtcacacaaaaacagaggggaggctaca

SEQ ID NO: 1012888 - DNA, 120 bp, Artificial Sequence
  ENSG00000283982_38 (sequence is synthesized)
tgaaaactaccctctgttactcaggagagaagctaggattgacattcagtttttttctcactctccattcagagaactgctctctagattattcacctcttgatatttacccataaactt

SEQ ID NO: 1012889 - DNA, 120 bp, Artificial Sequence
  ENSG00000283982_39 (sequence is synthesized)
gataaccagattagaataatgcctgctcatgaaggattcgtgctatgacaactcagccaccttgcgttttctagctactgtcatgtacctttataccccttaaacctgaccttgaaacca

SEQ ID NO: 1012890 - DNA, 120 bp, Artificial Sequence
  ENSG00000229941_0 (sequence is synthesized)
gctgatttctcaacctctctgtcgtgagttgactcgtgtactcccaaaagctatgttgaagttctaaccccggtacctgtgaatgtggccatgtttggaaatagggtctttgcagatgtt

SEQ ID NO: 1012891 - DNA, 120 bp, Artificial Sequence
  ENSG00000229941_1 (sequence is synthesized)
agttatcaaggtaaggtgagatcatattggattagaatgggccctaaatccaatggtttgtgtctttataagaaggtcatgtgaaaacacagacacaaaagaacgttatgtgaaggcaga

SEQ ID NO: 1012892 - DNA, 120 bp, Artificial Sequence
  ENSG00000229941_2 (sequence is synthesized)
ggcagaggatgtcaagaactgctagcagccatcagcaacgaggagagatgcatggaacggactctccctcagagccttcacaaggaaccacccctgctgacacctgaattctagcttcta

SEQ ID NO: 1012893 - DNA, 120 bp, Artificial Sequence
  ENSG00000229941_3 (sequence is synthesized)
gaactgttttcttagtgtgaaatatgaactcatgagcatctggcctgggaactggaccagttttaaatctcgtgttgagagccggaagatgctggagaaggaatgtggtggaatgactgc

SEQ ID NO: 1012894 - DNA, 120 bp, Artificial Sequence
  ENSG00000229941_4 (sequence is synthesized)
ctgagaatgaaccattctccagtgagagggggcttcgatattgaaagggcaatttggccttaacttggaaatgctggagattgattgcatacaatctgtcctgctagtgagagaagcaag

SEQ ID NO: 1012895 - DNA, 120 bp, Artificial Sequence
  ENSG00000229941_5 (sequence is synthesized)
gactgcatctaagtgcaacatgaagacttttggtcccaagctttcctccaacttcagtgggaggcagcccaaaaccaccgtcggttcaagaatacaagtgacctgcaattcttggaaaga

SEQ ID NO: 1012896 - DNA, 120 bp, Artificial Sequence
  ENSG00000229941_6 (sequence is synthesized)
ggtaggaattattgaatataatataatataatgtaaaatatcggaattatttttcttaggtgcttagtaaggagggtattagattttaatcatatatgtgttatttctttaaatcttgcc

SEQ ID NO: 1012897 - DNA, 120 bp, Artificial Sequence
  ENSG00000229941_7 (sequence is synthesized)
atttaataagtgaagatttgctaggcgaatcttagtgataaattaatacttaatgttagttactatttgtcttacatagagttcatttctatgaagacacgtgtttcaaaacgtatacta

SEQ ID NO: 1012898 - DNA, 120 bp, Artificial Sequence
  ENSG00000229941_8 (sequence is synthesized)
tatgcctttgtcttggctgttgaaattctgtgatgctttatatgcatatcacatcctagagcctggcatagagtaagtgctttaaaaaatattggttgcttgtctaataagcttacagta

SEQ ID NO: 1012899 - DNA, 120 bp, Artificial Sequence
  ENSG00000229941_9 (sequence is synthesized)
gttactatgtcgagagattacagttcaagttgggaggttgataataagtgtgttagcatattttataatactaatattattattaataaagctaccattagtatctaccatgcggtagtc

SEQ ID NO: 1012900 - DNA, 120 bp, Artificial Sequence
  ENSG00000229941_10 (sequence is synthesized)
tatatattaacaacttaatacattatagcatttagtcctgacaatgaccatgatataagtattattttctcatttacacatgaggaaaacagggctcagagaagttaagtaacttttcca

SEQ ID NO: 1012901 - DNA, 120 bp, Artificial Sequence
  ENSG00000229941_11 (sequence is synthesized)
aggtcacacagctagcttgtaccagttccagatttgaatccaagtttttaagcttcttgttacataatgaaaatgataattataacatacatttctgacatttgattctccatttttact

SEQ ID NO: 1012902 - DNA, 120 bp, Artificial Sequence
  ENSG00000229941_12 (sequence is synthesized)
aatgaaccattctccagtgagaggggagaagcagaacatcaggcctgtacctcactttgaaggatcatcacggcgtggttgaaatggtgatgctccaaggtagcagaggttccatagagt

SEQ ID NO: 1012903 - DNA, 120 bp, Artificial Sequence
  ENSG00000229941_13 (sequence is synthesized)
cttctcccaatatgtggtcagcttttccagcaggattagggagggaggagtttcagctgtgcttctaagatcttccagaatgaattttctacctcaaaaatcaaggacttttctggaaac

SEQ ID NO: 1012904 - DNA, 120 bp, Artificial Sequence
  ENSG00000229941_14 (sequence is synthesized)
tgcagtcagaggacagaacatcagcctcaagctggtaaataggatggattttctccctaaacatcccttctgctttctagtttgaattatcaataaaatggtttggcttatctctgaaaa

SEQ ID NO: 1012905 - DNA, 120 bp, Artificial Sequence
  ENSG00000204990_0 (sequence is synthesized)
agcacaaaataattcccaagttcaagatttatttctgccttctggagacatggtctctgtcactggaaaagaaaaagagtcagggccttccgtgcttgtaggatttggatgtagaggtgg

SEQ ID NO: 1012906 - DNA, 120 bp, Artificial Sequence
  ENSG00000204990_1 (sequence is synthesized)
tgggaatgtctctggacttgggacagcacctccgatgtctatgaataggacggactcactggtgtgtcctccacatgttcttgaggaagttaacaaggctaaacaaggaactcactgtcc

SEQ ID NO: 1012907 - DNA, 120 bp, Artificial Sequence
  ENSG00000204990_2 (sequence is synthesized)
tgcctgctcagaagactcagcacaagagaacacacagcaagactcaaagttttggaactgcaagaaagcagaaacctggctccttctggctctcagatcttatgactcaacaaagaattt

SEQ ID NO: 1012908 - DNA, 120 bp, Artificial Sequence
  ENSG00000204990_3 (sequence is synthesized)
aaaaagaatattctccctattgaaaggtctcaattttcccatctctatggacaggcggtaaaatgagatagtttacatgaaatgctgtctggccctcagcaggagctcagtaagtattgg

SEQ ID NO: 1012909 - DNA, 120 bp, Artificial Sequence
  ENSG00000204990_4 (sequence is synthesized)
tcttcttccctcttgcagatccactccccagagtctgtctttccagagtttctctgctccaattcatttcatatcctattgccagatgacttctgctaaagccaacctcattctctctcc

SEQ ID NO: 1012910 - DNA, 120 bp, Artificial Sequence
  ENSG00000204990_5 (sequence is synthesized)
cctccttcacacactcagtgccatagccaactgggcagctggctcacccttctccatgccctgcttcatgccctgcttgtccgcagcctttgctgacgctggagagaaggcacttcctct

SEQ ID NO: 1012911 - DNA, 120 bp, Artificial Sequence
  ENSG00000204990_6 (sequence is synthesized)
ccagccttgcaaccttctagctcagcatgacccttagccctcagaaagatacacttatcttctaatgacatggaaatgatcaactgagcttgatttgtagcaaataatagaataaataat

SEQ ID NO: 1012912 - DNA, 120 bp, Artificial Sequence
  ENSG00000204990_7 (sequence is synthesized)
aacgcacacatataattgacccaacttttggaactctgcagggatcatttaatttctcaaagttagataatgtttatgtgaagcagatgctactactaaatatataaatacacatttata

SEQ ID NO: 1012913 - DNA, 120 bp, Artificial Sequence
  ENSG00000204990_8 (sequence is synthesized)
ataacttagtgtatttgtgggtatgtgagtatagatagggagagagatgctcagagaagatggagatagatataagctagacaatagctttctatataaacatttacatctttctatcta

SEQ ID NO: 1012914 - DNA, 120 bp, Artificial Sequence
  ENSG00000204990_9 (sequence is synthesized)
gcaaattagtttgagaaggaaaagtcatttgcagatactctctagtgaagtattaatttccaaatgttatcggctgaccaactatatccttttatgtaagaagcatattgcagacattaa

SEQ ID NO: 1012915 - DNA, 120 bp, Artificial Sequence
  ENSG00000204990_10 (sequence is synthesized)
atactctattgtgaagactgaaaacgacctaaactattccaacaattggtatatggttatagaaattatggtatactcacattatgagctattacacagccataaaaatgatgtttttgg

SEQ ID NO: 1012916 - DNA, 120 bp, Artificial Sequence
  ENSG00000285205_0 (sequence is synthesized)
gagtcgacgtcatcctggatttagttcctggtaatatgcagatgacaaacagaaccagatttggccctttcttttcctttgggtgggggaagagggttggggggagggggagaggtgcca

SEQ ID NO: 1012917 - DNA, 120 bp, Artificial Sequence
  ENSG00000285205_1 (sequence is synthesized)
aggggagggggttacaaggcctgaaaagagattgtggattgcgaattaatgaaattaacctaatcttttccattcggcagccgggccgcgggccggccgagctgggcgggcggcctaatt

SEQ ID NO: 1012918 - DNA, 120 bp, Artificial Sequence
  ENSG00000285205_2 (sequence is synthesized)
gccttggttaatctcattaattcctttgtgccgccgcagttaacaactccctccgcccgagctctccacccccacccttttttctcagattgggtcctattattgggtgcgatttcctct

SEQ ID NO: 1012919 - DNA, 120 bp, Artificial Sequence
  ENSG00000285205_3 (sequence is synthesized)
gcctgtagctcaaattcattgtggacgattttactttggggctacttttttccccctttcggaattggttttgttttagaaaatgtgaggggctgcatcccctctcaagcaggattgaaa

SEQ ID NO: 1012920 - DNA, 120 bp, Artificial Sequence
  ENSG00000285205_4 (sequence is synthesized)
attccaccactcctccgcgcccccacgtactcaccgcctgatttacctcttttttaaatcttgagtttctctcccgaatggaacttgttaacccccccaaaaaacttttggttttgtaaa

SEQ ID NO: 1012921 - DNA, 120 bp, Artificial Sequence
  ENSG00000285205_5 (sequence is synthesized)
atccaaattttgtaaaggcaaaaacgactaaaggaggggtgcatcgtgcttcttaaaaagatttttttttccagccactctgggtctgaaaactaccatggcagtccctaggtcctacac

SEQ ID NO: 1012922 - DNA, 120 bp, Artificial Sequence
  ENSG00000285205_6 (sequence is synthesized)
agcgaagaccaaattcagccgctctttaaaattcgccaccaagagttgcagtctgaagcggtgcttctagctgctcccagcgtgggtgtcggtagtttttgtgcttttaaaaaattagtt

SEQ ID NO: 1012923 - DNA, 120 bp, Artificial Sequence
  ENSG00000285205_7 (sequence is synthesized)
ttggaaatgtggtgccttctctcccaaactatttttttgattttcaatccagatggggtctttgggacttccctatcttcttccccaataattgggtcgcatttttccttacgacctgct

SEQ ID NO: 1012924 - DNA, 120 bp, Artificial Sequence
  ENSG00000285205_8 (sequence is synthesized)
ggctgccggtaggcctgcccttccgcctggcaggcccagagtggattccctgggccgcagtggcctggacgatggccgggtctgatagcggcaggcggccgcgatgatttgcgggattct

SEQ ID NO: 1012925 - DNA, 120 bp, Artificial Sequence
  ENSG00000285205_9 (sequence is synthesized)
cggcatggcacggccagcctgcccgagccacgggaggcgcagccagcccaccactcacggcaagcaggcggccgagcgcccttcgagaaggtaggcgacggtacgcgcggaacaaaagca

SEQ ID NO: 1012926 - DNA, 120 bp, Artificial Sequence
  ENSG00000285205_10 (sequence is synthesized)
gtcccccagatcctgtggaccgggtgcaagctcccggcttgcaactcaggccactccaggggaaggggcagtacccgacccaggcgatacccccgagagccggagagggagatggggttg

SEQ ID NO: 1012927 - DNA, 120 bp, Artificial Sequence
  ENSG00000285205_11 (sequence is synthesized)
cgggagacctcgggtttcctgaaggaagtccgcctttaactcacacctatttttcgcgatttctctcaggctaattaaccaagggaccccgcaaagttgtctgaagtcgccgccgtaagg

SEQ ID NO: 1012928 - DNA, 120 bp, Artificial Sequence
  ENSG00000285205_12 (sequence is synthesized)
ctaagtaagtgggctgcccactccccggctcaggggcaaaggggaaagcccacttgtcaatttctgttcgggtttcaaagagccattgcacggaggtttagtcctgtccgagggcactac

SEQ ID NO: 1012929 - DNA, 120 bp, Artificial Sequence
  ENSG00000285205_13 (sequence is synthesized)
tgtggcggcgcgcagaagcggcccagtggagccaggcggcgacgtttctcctcctaggcctcccagcgtggacctctgtgtcctcacggccaccagcttgtggcctgagagttgctcctt

SEQ ID NO: 1012930 - DNA, 120 bp, Artificial Sequence
  ENSG00000285205_14 (sequence is synthesized)
ccagtgctgcgcaaactagaggtggttgtaaatggggattaggacatgacggagatgggtctcaatttggggaagtgaatagagttttcctttttttcttttttaacaataaaaacaaag

SEQ ID NO: 1012931 - DNA, 120 bp, Artificial Sequence
  ENSG00000285205_15 (sequence is synthesized)
agggagtgtgaccctccccttagagaggtcaggtctagggtaagaagtgaggcaccttccatctcccactgactaggatgaagtcttttttattgttgttccgttctcagagacttaagt

SEQ ID NO: 1012932 - DNA, 120 bp, Artificial Sequence
  ENSG00000285205_16 (sequence is synthesized)
caccatgctccagggcagatactcccccaccaatctttcccaggtttaaagctacagggcagttgatggacgacaactagaggctgcaacttatcagtgactgcctgcgtttgtgttgga

SEQ ID NO: 1012933 - DNA, 120 bp, Artificial Sequence
  ENSG00000285205_17 (sequence is synthesized)
ggctgggtgtgcgctgcggtgcgcgtgtgagtggatcttttaagacctttgtctgagccgggcagaggcacaagtgccacctgacgcttggggcagattcctcgtcctgttcttgcaaag

SEQ ID NO: 1012934 - DNA, 120 bp, Artificial Sequence
  ENSG00000285205_18 (sequence is synthesized)
atgccaaatcaggagagtgtcaagatttcaaccgcagacctaaaaaaagtgtctccatgtttttaaaagtatcagacaaccacctccacacacccctccgtctccccttccacctggaac

SEQ ID NO: 1012935 - DNA, 120 bp, Artificial Sequence
  ENSG00000285205_19 (sequence is synthesized)
aaactgctatactgcgcctgtgctttcctgcagccctccgctgtaccagctgagccctgtacagaatctgagcgtcagagttgcagacccaaccttgccaccttgcaaatcatcccttct

SEQ ID NO: 1012936 - DNA, 120 bp, Artificial Sequence
  ENSG00000285205_20 (sequence is synthesized)
ctggaggcctcaggattttagttgatcaaaccaacaccaacattcattgggtccctttgcaaccctaacatttaatgagacttggtaattgtcatccgttcgccaaggaggttggggatg

SEQ ID NO: 1012937 - DNA, 120 bp, Artificial Sequence
  ENSG00000285205_21 (sequence is synthesized)
aacttgggggcattttcttgtttatttttcattgagacaaaggagtgtgctgtccccacctccgcccccagacaaggacagggttcctacatcagctgggtctaaaataaggaaaagcga

SEQ ID NO: 1012938 - DNA, 120 bp, Artificial Sequence
  ENSG00000285205_22 (sequence is synthesized)
gtgctgccgcagaggggactttccgggaagggggtcacaggaaccccaaggccacacagctccagacactctgccggagctctaggggagctcacccctgcgcggcgggacctcccccat

SEQ ID NO: 1012939 - DNA, 120 bp, Artificial Sequence
  ENSG00000285205_23 (sequence is synthesized)
cgggttgccccttcaatctgcagccgcgcggaggcaggccccgggaaaggcagtcggcgctcggtgctcgcactgcgcctcggcgggcggaaactcacaagtgtcctcaacgtgctaaac

SEQ ID NO: 1012940 - DNA, 120 bp, Artificial Sequence
  ENSG00000285205_24 (sequence is synthesized)
aaaccatcagggccccgcatcgcctggcgcaattggaataacaaatgcgacgcacgcaaattgtccacctcgtgttgctaagcgattgtttgtcggccccgcacgcacagctcagcatgg

SEQ ID NO: 1012941 - DNA, 120 bp, Artificial Sequence
  ENSG00000285205_25 (sequence is synthesized)
gaggaccgcgagcgtccagaggcagccggcgagcgcttaggtcggaaatgcagtaaacatgccgctgattttccctattatcacccaaacacgatttcacacaaagcaatcaccacgcag

SEQ ID NO: 1012942 - DNA, 120 bp, Artificial Sequence
  ENSG00000285205_26 (sequence is synthesized)
aagtctatgaaaatgtgtttgttgaggagtcactcgccccagtaatagtcctcatttttaagatattaaagaatagctcagcggattccacatgcataaggtctatttgccgttcggcat

SEQ ID NO: 1012943 - DNA, 120 bp, Artificial Sequence
  ENSG00000285205_27 (sequence is synthesized)
ctgtcacggcgcttttgcactgcggtcatcactaaattgattcatagagtgtagattaaattgcttctctgatttaaaacagtgtccaactttggagtatgcgtgtgagtatcttctccc

SEQ ID NO: 1012944 - DNA, 120 bp, Artificial Sequence
  ENSG00000285205_28 (sequence is synthesized)
gccccaaggtatttttgtcagggagaaaactgtcgccccactatccttacaccccattccgcataactgtaaaaaaataatgcatcttcgaccccaacttcttacggttcgtttcaggaa

SEQ ID NO: 1012945 - DNA, 120 bp, Artificial Sequence
  ENSG00000285205_29 (sequence is synthesized)
ctttcttaattctctccgtctcctgcccggccacagagcagagttcacaatcggatgcgtttaagtcggatttttcgtgtcatgtgcaaaaagccggtgtgtccttttcaaggtacggag

SEQ ID NO: 1012946 - DNA, 120 bp, Artificial Sequence
  ENSG00000285205_30 (sequence is synthesized)
ccctcatcggagggcgcattagcggggtcagaggaattaggagcaatgcgcagagccccctgcagcccgcgtgctgcgccgagacctcagccgtcctcactgagcggaatggttgtgttg

SEQ ID NO: 1012947 - DNA, 120 bp, Artificial Sequence
  ENSG00000285205_31 (sequence is synthesized)
tttgtattgggacttttaaaaaatccagtctcaaagctaagtgctcaaaccccgttccatggctctgctgctttctggaggacatctccggtagccccaggggattgtccgtgtgaggtt

SEQ ID NO: 1012948 - DNA, 120 bp, Artificial Sequence
  ENSG00000285205_32 (sequence is synthesized)
gggtgggtggagtagagccagaggcgcaaatgcctcctggctaaggggcagcgcgcattagagctgggtctcctgctttcggagcggagggcgtaagggagctttctagctgattttttg

SEQ ID NO: 1012949 - DNA, 120 bp, Artificial Sequence
  ENSG00000285205_33 (sequence is synthesized)
ctagaagttttccaacgctccaaataaaagcacccgatcccctaaggacgaaataatcaaggtgttagggaagctcaacagaagagaagagacgagaagagaagagaagagaagaagggg

SEQ ID NO: 1012950 - DNA, 89 bp, Artificial Sequence
  ENSG00000285205_34 (sequence is synthesized)
tggactttccggggttgcagaaatccgatttcagccgggctatttaccaaaatttgtttcaaaatgactgcacctttgcttttgcaagt

SEQ ID NO: 1012951 - DNA, 120 bp, Artificial Sequence
  ENSG00000285205_35 (sequence is synthesized)
aaatttgtttcaaaatgactgcacctttgcttttgcaagtcacagaatgcaaatgacgataatttgttctcagaagaagtttctcttgaaatgattagcaaagtcagtcatttgaaaatt

SEQ ID NO: 1012952 - DNA, 120 bp, Artificial Sequence
  ENSG00000285205_36 (sequence is synthesized)
agaacgaagcccttcgctaactgatatctgcttctaaagttttcattcatgtaaacctcattaatgaagatcttttatttaaacgtcaaggggatttgaaatttagagtaaattatgaag

SEQ ID NO: 1012953 - DNA, 120 bp, Artificial Sequence
  ENSG00000285205_37 (sequence is synthesized)
cttgtatgtctagccaagtcatgggtcaaatgcatttgtgaaaaactgctaaagagcatatggttttgaatttttctacaatgactagtgtttaaataaattgcttgtactgcttaactt

SEQ ID NO: 1012954 - DNA, 120 bp, Artificial Sequence; identical to SEQ ID NO: 909801
  ENSG00000285204_0 (sequence is synthesized)

SEQ ID NO: 1012955 - DNA, 120 bp, Artificial Sequence; identical to SEQ ID NO: 909802
  ENSG00000285204_1 (sequence is synthesized)

SEQ ID NO: 1012956 - DNA, 120 bp, Artificial Sequence; identical to SEQ ID NO: 909803
  ENSG00000285204_2 (sequence is synthesized)

SEQ ID NO: 1012957 - DNA, 120 bp, Artificial Sequence; identical to SEQ ID NO: 909804
  ENSG00000285204_3 (sequence is synthesized)

SEQ ID NO: 1012958 - DNA, 120 bp, Artificial Sequence; identical to SEQ ID NO: 909805
  ENSG00000285204_4 (sequence is synthesized)

SEQ ID NO: 1012959 - DNA, 120 bp, Artificial Sequence; identical to SEQ ID NO: 909806
  ENSG00000285204_5 (sequence is synthesized)

SEQ ID NO: 1012960 - DNA, 120 bp, Artificial Sequence; identical to SEQ ID NO: 909807
  ENSG00000285204_6 (sequence is synthesized)

SEQ ID NO: 1012961 - DNA, 120 bp, Artificial Sequence; identical to SEQ ID NO: 909808
  ENSG00000285204_7 (sequence is synthesized)

SEQ ID NO: 1012962 - DNA, 120 bp, Artificial Sequence; identical to SEQ ID NO: 909809
  ENSG00000285204_8 (sequence is synthesized)

SEQ ID NO: 1012963 - DNA, 120 bp, Artificial Sequence; identical to SEQ ID NO: 909810
  ENSG00000285204_9 (sequence is synthesized)

SEQ ID NO: 1012964 - DNA, 120 bp, Artificial Sequence; identical to SEQ ID NO: 909811
  ENSG00000285204_10 (sequence is synthesized)

SEQ ID NO: 1012965 - DNA, 120 bp, Artificial Sequence; identical to SEQ ID NO: 909812
  ENSG00000285204_11 (sequence is synthesized)

SEQ ID NO: 1012966 - DNA, 120 bp, Artificial Sequence; identical to SEQ ID NO: 909813
  ENSG00000285204_12 (sequence is synthesized)

SEQ ID NO: 1012967 - DNA, 120 bp, Artificial Sequence
  ENSG00000285201_0 (sequence is synthesized)
agaaatggctttgctggggacccagagaaccaacagggcttttcccgctgcttcctctacccctgtgtttcgctaggctctctaaattgactcagctccaggtgtcaactcgactgaact

SEQ ID NO: 1012968 - DNA, 120 bp, Artificial Sequence
  ENSG00000285201_1 (sequence is synthesized)
cactctcaatgtgggcaggcaccgtacgatcagttgggggcctagggatgagaaaaaacaggggaaaaaagaggtgattggtgattctctctatctccctccctcttctctctttccctc

SEQ ID NO: 1012969 - DNA, 120 bp, Artificial Sequence
  ENSG00000285201_2 (sequence is synthesized)
catccctttctcctcccccgacactcctttcctggagcaggatacttgttctccttctgcctttggacacaagactccaagtttttcagcttttggactcagcaacttgcaccagaggtt

SEQ ID NO: 1012970 - DNA, 120 bp, Artificial Sequence
  ENSG00000232117_0 (sequence is synthesized)
gaaacagagaccctcgaggtggcaggatgagtcaacgtcacagggtgagcaggagagccaggacaggcccctggcagggcactgagctcctctggtgggcctttgacctcccagcaggaa

SEQ ID NO: 1012971 - DNA, 120 bp, Artificial Sequence
  ENSG00000232117_1 (sequence is synthesized)
aatatcaacagccctgtttgttccatgtcctctggggacgtttgtgagaaaagtccatgcagctctacacaaaagcacagagcagtgctctttaaaagaagtgttgttctaaaataaaga

SEQ ID NO: 1012972 - DNA, 120 bp, Artificial Sequence
  ENSG00000232117_2 (sequence is synthesized)
tcttctaggaaactgcatctccaaaagacagtgtggggtggtaggaagagcgctggatggaggtcagaccgttttgtcctgttttcaccatgaatcatttgcatgaccttggggaagtca

SEQ ID NO: 1012973 - DNA, 120 bp, Artificial Sequence
  ENSG00000232117_3 (sequence is synthesized)
ttttacctccggggactttggtttataaaatgaagcagttgagctcgatggggtggttttccaatttatctgatggtggagcaacttctgaaattccccaatggtggaaaacttttctta

SEQ ID NO: 1012974 - DNA, 120 bp, Artificial Sequence
  ENSG00000232117_4 (sequence is synthesized)
ggaacccagtatataaaacagataaaacgggagctgcacttgttgaagatcgggtgaacacagggccaggaatccactcactctgggcaccttcccaaaccccagacttcccagggaccc

SEQ ID NO: 1012975 - DNA, 120 bp, Artificial Sequence
  ENSG00000232117_5 (sequence is synthesized)
acagggctccacacagtgccggagtcgctgcaggcctccctcacacactgccatatttcttaccaggagatggctctcttacctcatttccaaactgtactacttggaggaaaagttatt

SEQ ID NO: 1012976 - DNA, 120 bp, Artificial Sequence
  ENSG00000232117_6 (sequence is synthesized)
gatcaaactagtttgtggtcttgctgaggaaaaatgccttctgaactcagctggaggaaaccaccaggcaatgtgccctcattgaccctgccctgtggtttataacaatgggccaccagc

SEQ ID NO: 1012977 - DNA, 120 bp, Artificial Sequence
  ENSG00000232117_7 (sequence is synthesized)
atccatgactggagaccctcctcccattctgccattctgcctcctgaagaatgcactcctagactagcatggaagacatggatcttttctacccccaacatcccaatgagaccatcctta

SEQ ID NO: 1012978 - DNA, 120 bp, Artificial Sequence
  ENSG00000232117_8 (sequence is synthesized)
aatcaatgaagcatagcactaaggtctgaatgtttgtgcctctaccccaattcatatgcaaaatcctaaccccccaggtgatggtatcagcagatggggccttttgagaggtgatcaggt

SEQ ID NO: 1012979 - DNA, 120 bp, Artificial Sequence
  ENSG00000232117_9 (sequence is synthesized)
catgaggacagagccctcatgaatgggactagtacccttagaaaagagactgcagagagctagccagtgcataccaccatgtgaggacacatggaaggtgtcatctatgaggaagaggcc

SEQ ID NO: 1012980 - DNA, 120 bp, Artificial Sequence
  ENSG00000232117_10 (sequence is synthesized)
ctcaccagacactgctagtggcttgatcttggacttcccagcctctggaactgtgggaaacaaatgtttgttgtttataagctgcctcatttatggtatttttgttatgccagcccaaat

SEQ ID NO: 1012981 - DNA, 120 bp, Artificial Sequence
  ENSG00000232117_11 (sequence is synthesized)
gaagaaaacagaatatttttttctgtttcagaaaaaaattttctgaattttttttctgtttcaggaaaacagaataatttttaaaatacctaaatgagcattaaagtaaaataggaacag

SEQ ID NO: 1012982 - DNA, 120 bp, Artificial Sequence
  ENSG00000232117_12 (sequence is synthesized)
tcacttccaagatggttggctacagtgttcttctccaactaaccctccccttgagaacaactagaaaactgcataaaatattttcgaaactctgctgagggtatcagagtgctcccaggg

SEQ ID NO: 1012983 - DNA, 120 bp, Artificial Sequence
  ENSG00000232117_13 (sequence is synthesized)
cagtgaggacttgaggaaccaaaatcaagaggagaaggggatcacagagagggtgccggacattcaggtccactttccctgctgaagcatttgccaattcagagtgtcggtggaggggct

SEQ ID NO: 1012984 - DNA, 120 bp, Artificial Sequence
  ENSG00000232117_14 (sequence is synthesized)
gagaagctgagtagaactttgggcagtctcacagggctggggaaacacacctcagtgttcaggccctgctgtgcaggaggcggccaggcaagcactccagactttcaggtggggcagcgg

SEQ ID NO: 1012985 - DNA, 120 bp, Artificial Sequence
  ENSG00000232117_15 (sequence is synthesized)
acgggatatccccaggcaaaacgctgaaccagaaatagacccatcttcacaaagaccgaaaccagctttgaatcagctcatccagtctggcttaagacaatctgcccctggcctaaatgc

SEQ ID NO: 1012986 - DNA, 120 bp, Artificial Sequence
  ENSG00000232117_16 (sequence is synthesized)
ctgccaaaagcaaaagtaaatcctctgcaggcaggcggataacatcatctagtatctcagattatatcaatgatgttgtatttagaatatctggtattcaaaacagagagataggtgtga

SEQ ID NO: 1012987 - DNA, 120 bp, Artificial Sequence
  ENSG00000232117_17 (sequence is synthesized)
gacccagtttgggaactggcccgggggtctggttcagcatatgatttctcatgaggtgggcagttctttgcagaggggcccatgtgatggtgctaacagtgttagctgcggtgcagagga

SEQ ID NO: 1012988 - DNA, 120 bp, Artificial Sequence
  ENSG00000232117_18 (sequence is synthesized)
tggtgtgagctgtgcacactctctcatcttctccaaacaacagctcgggtgtcgctgttgtgatctttctcatttcacaggtgagaacacaggctggggggtctgacttatgtctatctg

SEQ ID NO: 1012989 - DNA, 120 bp, Artificial Sequence
  ENSG00000232117_19 (sequence is synthesized)
actacatagcctgcttctccgcaggggctcttatttgtgaatgttgtggggtgacgggctcaaggaagatactcactctgcgacttagcttcagggcctggcttaagacttgttaaagga

SEQ ID NO: 1012990 - DNA, 120 bp, Artificial Sequence
  ENSG00000232117_20 (sequence is synthesized)
aacactcatttatcggacgtcacatgcagacagctcctgggtctaagaggtacagagcaccacatctgcaggggcggcatgtcataccacttggctggagctccagtgtcaacttgctga

SEQ ID NO: 1012991 - DNA, 120 bp, Artificial Sequence
  ENSG00000232117_21 (sequence is synthesized)
cggctgctaatgctgagcaacggttgcccgaacgtgggactgaattcctcctcatctcctgggaggccggcatggaaggtgaagcagatgccttcacacctctgggaccatggactgggg

SEQ ID NO: 1012992 - DNA, 120 bp, Artificial Sequence
  ENSG00000232117_22 (sequence is synthesized)
gccctgcagtgggtttcccaggcacgccctcagggagtccaagcagaaacctggagccccgagaaagctctcttgggaagtcactgggagctgcaggatgttcttagcaagcacctcatt

SEQ ID NO: 1012993 - DNA, 120 bp, Artificial Sequence
  ENSG00000232117_23 (sequence is synthesized)
cagagggttttgaattgggctccttgggccctggaagttctttggagcaatgcggggtggggcgggggaaaggggacaggagggctcggccctgcccagccccggataagcagtatgttt

SEQ ID NO: 1012994 - DNA, 120 bp, Artificial Sequence
  ENSG00000232117_24 (sequence is synthesized)
caccctgatctgctttttacattgatgttacacataagattttattgtttaaaatgtttaacttttttttaatttaaaaaaagagtccaactctttttttaaaaagctgcaagatggcct

SEQ ID NO: 1012995 - DNA, 120 bp, Artificial Sequence
  ENSG00000232117_25 (sequence is synthesized)
ttctgatctaagcttattggagagatgaatatctcaggcccagtgagggtagctgatgtctccacacacagagacaatggcagagccatgagcgtggtttttcccgacgacttcccctgc

SEQ ID NO: 1012996 - DNA, 120 bp, Artificial Sequence
  ENSG00000232117_26 (sequence is synthesized)
cctgagtcaggcctgtaaagacggtactaaaatatacactggatgatgtgtgttgatgctgagcctagaagacacgccagattgtcctctaccccagacagaaagtagtgacagccaggc

SEQ ID NO: 1012997 - DNA, 120 bp, Artificial Sequence
  ENSG00000232117_27 (sequence is synthesized)
tccagaggcaggtatgggccagctagttatgacggtgttttaatagcagggcagggttaaggtcaggaagttctcttcctctgaaatagctggccccacagcacaatgcctgccggtctg

SEQ ID NO: 1012998 - DNA, 120 bp, Artificial Sequence
  ENSG00000232117_28 (sequence is synthesized)
aaggcaagaggcggcttcctcttggccaggacccgcctggtcctcagcctccttcgctcttcccttccctgaaccccttcccagagtggggttggggcaggggtcaccgacagagcctct

SEQ ID NO: 1012999 - DNA, 120 bp, Artificial Sequence
  ENSG00000232117_29 (sequence is synthesized)
tctagttcttatttccccttccagagccctcctcagaactcaccggtgactgtcaacaaaatgcccctaatttaactttgggagtaatgaatcaatctgggtaaaatacctatgcatttt

SEQ ID NO: 1013000 - DNA, 120 bp, Artificial Sequence
  ENSG00000232117_30 (sequence is synthesized)
aggaagaagagagagcatttcggtgtctcctccatcttctgtgagtcagggcctgctcaggtggccagagcaggcacctcaaggagaaatgcctcagcccgtgtggaggtcacaaattcc

SEQ ID NO: 1013001 - DNA, 120 bp, Artificial Sequence
  ENSG00000232117_31 (sequence is synthesized)
aaaaacattcttctccccacaactttttcccctttaatgacacttgctataaattgccagatactttaagtacttagggctgactgcttttcctcttcccagccaccaccccttctgagg

SEQ ID NO: 1013002 - DNA, 120 bp, Artificial Sequence
  ENSG00000232117_32 (sequence is synthesized)
gcagccccgtgtcttctcttcatttccatcccagcacaccagcctgccacccgggcaccaccttggatgcttcagtctcctcactccccacttccagtgtatcgcccactcagaagtcct

SEQ ID NO: 1013003 - DNA, 120 bp, Artificial Sequence
  ENSG00000232117_33 (sequence is synthesized)
tcttgagtcctttccctctcctccaccctcctaccagggctttagctcaggggcaccctcttttgccagcacacgcccctctccagattgactggcaggtgccccctccatggggcagag

SEQ ID NO: 1013004 - DNA, 120 bp, Artificial Sequence
  ENSG00000232117_34 (sequence is synthesized)
gtagatcaccaagctctcatttgggccacgggctggcctcccagcacctctgcatcgatgctcatccgttctgcccatcacgaggatactgacttcccctcctgtgtgctggtatcacgc

SEQ ID NO: 1013005 - DNA, 120 bp, Artificial Sequence
  ENSG00000232117_35 (sequence is synthesized)
tttgccagcatacacgacggcagaggacacagacctggacatgacttcctgggtcatatagaccaactggggagaccagcagcagccagggagaaacacacctgtgctttctccctgtgc

SEQ ID NO: 1013006 - DNA, 120 bp, Artificial Sequence
  ENSG00000232117_36 (sequence is synthesized)
tccatcctctagatcaggaggccggggtgtccttgaggaggagggaggctcagagggctgaaggggacaattcagccaggtggcgaggggaggggagatgccaaaggtctggaggtgctc

SEQ ID NO: 1013007 - DNA, 120 bp, Artificial Sequence
  ENSG00000232117_37 (sequence is synthesized)
atgtgccctgcctgcagggggaggcggggtgagtggagcacaatgggcggggggagcctggtgagggctgacactggcgaggacctgcgggagctggtgtgggatctggaacaatccagc

SEQ ID NO: 1013008 - DNA, 120 bp, Artificial Sequence
  ENSG00000232117_38 (sequence is synthesized)
gtgaggcccagggtatggacttggggtccgactgcctaggtccaaatccgggctctatccctcactagtctgtgattgggccagagccttcacctccctggacctccgtttcctcactgt

SEQ ID NO: 1013009 - DNA, 120 bp, Artificial Sequence
  ENSG00000232117_39 (sequence is synthesized)
aaagtgggacggtgtgataatagacatcttaccttcagagttgtgtggggagaaggaatgaactgcggaaagcctctagcagacggcccactgaaccgtgagcgcggtcctgctgactga

SEQ ID NO: 1013010 - DNA, 120 bp, Artificial Sequence
  ENSG00000232117_40 (sequence is synthesized)
ggggctctgcgcagcctcacggcctcgctgcgctctcaaggccgctcgtggttgtgtggagatcacagcaatgggggcgagagtggacgccggagtgcaggtggggctggtgcagacctc

SEQ ID NO: 1013011 - DNA, 120 bp, Artificial Sequence
  ENSG00000232117_41 (sequence is synthesized)
caggtgcgggtaacggggactggcccggggtggtgacgggggagatgcagggaatgggcagacaggagagatacttggggcaagaacaaacaggacttgctgatggagtcggtatggggt

SEQ ID NO: 1013012 - DNA, 120 bp, Artificial Sequence
  ENSG00000232117_42 (sequence is synthesized)
gggggtgcaataagggacattgaccctcaggtgtgtgggcttggaaactaggagcgtgacgagattgtgcatctgagaagtttctctgacttgcccaaggtcacacaaggtgtaggtggc

SEQ ID NO: 1013013 - DNA, 120 bp, Artificial Sequence
  ENSG00000232117_43 (sequence is synthesized)
agagctggggttgttctgacaacgaggtgcggttctttcctctgcacaagccggcttcctgggatcgtggctcttctggggagagggaccttggagagcgcctgccttcgggcaggagaa

SEQ ID NO: 1013014 - DNA, 120 bp, Artificial Sequence
  ENSG00000232117_44 (sequence is synthesized)
tctccactggacgagagagaatctggaggtcaggtggttttctggaacgcacatagccagggagggggaagcaggcaggggctgcatctggctgcctggggtgggcaggcactctctgtt

SEQ ID NO: 1013015 - DNA, 120 bp, Artificial Sequence
  ENSG00000232117_45 (sequence is synthesized)
ccatgccacacagagagtccccaaggcctttctgaaaagctcttcccagcccttccgtgataaacaacctgctgtccccggctccgggcgggaagaatctaaggggagacgctcctccgt

SEQ ID NO: 1013016 - DNA, 120 bp, Artificial Sequence
  ENSG00000232117_46 (sequence is synthesized)
tagtcacgcaagcttgcctgggtggttagcacaatgaagccgtcaagccactaggcaggaagggcgggagctggcgtttcaagcaccgctgcccacccgagggatgtgcagggtagcaac

SEQ ID NO: 1013017 - DNA, 120 bp, Artificial Sequence
  ENSG00000232117_47 (sequence is synthesized)
agcccacgccggcggtggggagcagcctggtcacccacaggagcttgtgaggcccgaggagtgtccgtgtggcaaggcccctgccccagcttttcatttatgaaacagagcgtgacctcc

SEQ ID NO: 1013018 - DNA, 120 bp, Artificial Sequence
  ENSG00000232117_48 (sequence is synthesized)
agaactcactggggttctgtatgacggagctccccgcgttgggcaagcagggtgaccccgtcctccatcatggctctctcactgtgacgccgaccctcggtccccacgctcggcttgcag

SEQ ID NO: 1013019 - DNA, 120 bp, Artificial Sequence
  ENSG00000232117_49 (sequence is synthesized)
tagaacgtttcctctctccaggttgtcatgacaattttcactgagaagctgtttctgtagagggagcaaaaaaagaaacagggggaaatgcttattaaagccaggcctagtgagtctgag

SEQ ID NO: 1013020 - DNA, 120 bp, Artificial Sequence
  ENSG00000232117_50 (sequence is synthesized)
gatttcagtggtgtctttacattctcagtggcttctgaagaaaaagtggaatttctgtcctctacaccagctggctgctaggaactttgctgttatatagaggcaatgcatgaagtccag

SEQ ID NO: 1013021 - DNA, 120 bp, Artificial Sequence
  ENSG00000232117_51 (sequence is synthesized)
aatccattacattatactaattatagtaataatgataataacaattaaatgtgagccttcaaaggcaggtcccctccggcagaatccattaaggagaatgggtgtaattattcgggcagt

SEQ ID NO: 1013022 - DNA, 120 bp, Artificial Sequence
  ENSG00000232117_52 (sequence is synthesized)
ggaggcacagtgcaattttaggggtggtcagtgttatcctgataacaatcccattctctcctccttcgtcactggccatctggccttccagtgtcttctccccagatctcaaccatctgt

SEQ ID NO: 1013023 - DNA, 120 bp, Artificial Sequence
  ENSG00000232117_53 (sequence is synthesized)
ccatcaatgtctcactaattattgcaaacaattctgtgtaaaatgagaagaaagtaaaggttaactttcccattttacagattagtcattgtcttcctgaacaaacagtgaggaaaccca

SEQ ID NO: 1013024 - DNA, 120 bp, Artificial Sequence
  ENSG00000232117_54 (sequence is synthesized)
ggggaggtgacccctcagtgaatgtatcctacagaagagccggatctggaactctgcttgagcaagccagtgtaaaaattacaacagcttactgagccctgtgcagaagctgatattgag

SEQ ID NO: 1013025 - DNA, 120 bp, Artificial Sequence
  ENSG00000232117_55 (sequence is synthesized)
agcatggaggcttcctgctaaaggccagcatcagcttgtcagccacacaggtgaggctgggagaggatcctcagtcctgatcaagacttcagatgagatcacagccctggctgacatctg

SEQ ID NO: 1013026 - DNA, 120 bp, Artificial Sequence
  ENSG00000232117_56 (sequence is synthesized)
actgcaacttcatgagagaccctgagccacagcccccagcccagccactcctgaatttctggtccacagaaactgtaagagatgtaaataaattattattgctgcttttaagccactaaa

SEQ ID NO: 1013027 - DNA, 120 bp, Artificial Sequence
  ENSG00000232117_57 (sequence is synthesized)
aggttgtcatgacaattttcactgagaagctgtttctgtagagggagcaaaaaaagaaacagggggaaatgcttattaaagccaggcctaattagtcattgtcttcctgaacaaacagtg

SEQ ID NO: 1013028 - DNA, 120 bp, Artificial Sequence
  ENSG00000256218_0 (sequence is synthesized)
acattttggaatccaaaacttttgaacccagcattgtaaaagaaagatcttaagacatttgtttttgtgtgtgttcagtatattcaattaatatgaaagcagcttggtttccaaacatac

SEQ ID NO: 1013029 - DNA, 120 bp, Artificial Sequence
  ENSG00000256218_1 (sequence is synthesized)
ggaagaaatttttcatcaaaagaaggactttttagtgggtttcagatttctgcttgttgcctgtcacttgatacaaaatatctgattttctagattctttgaagccaagtggaaaagtag

SEQ ID NO: 1013030 - DNA, 120 bp, Artificial Sequence
  ENSG00000256218_2 (sequence is synthesized)
ataaaaccgctttctctccccagatgggatggatgtgtgtttgtgggggcttatagaggacgcagccccatcggtgacactgtgccaagtcaatacagcctgggaagatgaggctggacc

SEQ ID NO: 1013031 - DNA, 120 bp, Artificial Sequence
  ENSG00000256218_3 (sequence is synthesized)
aatagcagtaagcatgcttactttcccaggaggaaaggctggggcatccccagggaagaggattctggtctccatggtaaactgtggagggaatccacaaagaagaaagctgtgggaaca

SEQ ID NO: 1013032 - DNA, 120 bp, Artificial Sequence
  ENSG00000256218_4 (sequence is synthesized)
cttgaggaagcccacctaaagctatgcagctacctggatcagaattacctgtggtgaacaagcagtgaggaatgcttttgtttactctagggaaatactgccttagtatcagttcagcaa

SEQ ID NO: 1013033 - DNA, 120 bp, Artificial Sequence
  ENSG00000256218_5 (sequence is synthesized)
tagaaaacctgggtcagccagtccttcccacttgtcttcacaactctcaggtcatccagtttggtttcccaacaaacctcccagcatcagcctcttcatgctcaaaaggagaaagactga

SEQ ID NO: 1013034 - DNA, 120 bp, Artificial Sequence
  ENSG00000256218_6 (sequence is synthesized)
aagggaaactgagtggccagactccggccctgacgcagccttgggaagagatgttgctgtggcccccacgcacaactgggactttaatgactgagaccagcctaaccctggatttgctgt

SEQ ID NO: 1013035 - DNA, 120 bp, Artificial Sequence
  ENSG00000256218_7 (sequence is synthesized)
aatgttctgattattgctggtttgctccactggacagtaagtaccttaatattactcactgcttctcatccatcatttccaatgccaaacacaattaattggatgagtgaatttttaaaa

SEQ ID NO: 1013036 - DNA, 120 bp, Artificial Sequence
  ENSG00000256218_8 (sequence is synthesized)
gaatttttaaaaattgtacatgggatacatgtataattttttttaaattatgcttttaaaaaaattatacatgggatacatgcacatggcatacttgtgcaggtttgttacataggtata

SEQ ID NO: 1013037 - DNA, 120 bp, Artificial Sequence
  ENSG00000256218_9 (sequence is synthesized)
atggtgtatatgtgccacattttttttgaatttttaagaatatgttaggcaacaccagtcatatcattattctctctaggacttatttgtccatatttaagatgtagcaactggtataaa

SEQ ID NO: 1013038 - DNA, 120 bp, Artificial Sequence
  ENSG00000256218_10 (sequence is synthesized)
acttatttgtccatatttaagatgtagcaactggtataaagcctcttccaatggtcatgtgctaggattctagatgtgggagggcaggggatgaggctagggataaacagaaaactacac

SEQ ID NO: 1013039 - DNA, 120 bp, Artificial Sequence
  ENSG00000256218_11 (sequence is synthesized)
cattaggtacagtatgcactactcaagtgacaggtgcagtaaaagctcaaaattcacaactttataattcatccatgtaacaaaagctacttgacccccaaaactactgaaataaagatt

SEQ ID NO: 1013040 - DNA, 120 bp, Artificial Sequence
  ENSG00000243762_0 (sequence is synthesized)
cccttctggacagtttgctttatgtgttcagacaatcaaggctcgccttccaggcacagcccagtgccctggatggcatcagcacaggtgccagtccaccaccagggccagcctttgagc

SEQ ID NO: 1013041 - DNA, 120 bp, Artificial Sequence
  ENSG00000243762_1 (sequence is synthesized)
acaccctggtgcctcagactccggcaggaacacatttccatcgcacacccacccataggggccaccagtcgagaagcaagctgggcaccaggcagctgcctttgacatccagagaaaccg

SEQ ID NO: 1013042 - DNA, 120 bp, Artificial Sequence
  ENSG00000243762_2 (sequence is synthesized)
cccttgcttcctgtttcaacaagtccacttgctaaaatgcatgattccaaatctaccttctactctcactgtgaaagtctttcaaaatgctaaaatatcacaaaagctttaaaaatcaat

SEQ ID NO: 1013043 - DNA, 120 bp, Artificial Sequence
  ENSG00000243762_3 (sequence is synthesized)
gggtggacatatggactcgactgcaaaaaatctttgtaaaaaactgttgccggaggccaggaaaggcagagagggcctcagtgtccaaagaggcgcttttagggaattaagacttcatca

SEQ ID NO: 1013044 - DNA, 120 bp, Artificial Sequence
  ENSG00000243766_0 (sequence is synthesized)
tgctaaagcctagagggtcagtggggaaggtagttagttctgaactgaaatgaaatcacccagggctccagtgacttccccaacccggccatcctgcaggagcagcgcgtaggcagcctc

SEQ ID NO: 1013045 - DNA, 120 bp, Artificial Sequence
  ENSG00000243766_1 (sequence is synthesized)
gagtgatagcctggtccaacggcccacaccttagcgccaggctcaaggaaccggcgcgtatttctgcagtgagaccacaggacggacatcggcgccttcggcttcgatggagttgcgatt

SEQ ID NO: 1013046 - DNA, 120 bp, Artificial Sequence
  ENSG00000243766_2 (sequence is synthesized)
ttgctctttccagggaaacagtggcagggtgtttgctgcttatcggttcctgcggatatgcctgggtcccaggacattccactggaggcttggactgcatttaggagcccctatcccttc

SEQ ID NO: 1013047 - DNA, 120 bp, Artificial Sequence
  ENSG00000243766_3 (sequence is synthesized)
gactcatcacacacacacacagtgtacactgacacactcacattcgcacacttaggtatacagcctgatccttgctctgacctggtaacaacgcttcctcctccagagactttgagatag

SEQ ID NO: 1013048 - DNA, 120 bp, Artificial Sequence
  ENSG00000243766_4 (sequence is synthesized)
agcgagcgatccctgtgcaccattcatccatgctcccacctcgccagtatggctggcttagttctggaaggggcttaagaggaacaagccccagctgtgcttctggctgggacttaaacc

SEQ ID NO: 1013049 - DNA, 120 bp, Artificial Sequence
  ENSG00000243766_5 (sequence is synthesized)
ccccttctgggccctaaagccacgcttctttgtggaccggacctgactctccaggaatctgggaacccgctatttcactctattttgggacaagaaaaaggggctctttggggccacttc

SEQ ID NO: 1013050 - DNA, 120 bp, Artificial Sequence
  ENSG00000243766_6 (sequence is synthesized)
ggctggtagctttccatgggaagacccaagggttcgtggcgcgactcgccggggcccccgaggcccggcaccactggcatatccaggaaccggcgcgtatttctgcagtgagaccacagg

SEQ ID NO: 1013051 - DNA, 120 bp, Artificial Sequence
  ENSG00000243766_7 (sequence is synthesized)
tttcttgggagcatggtagggtgttggtgctgaagaaccaagcagcgacccgtcttgtagctgccatgttttgtcgaggggttctgggggtcctgctgctttagagccacatacttccac

SEQ ID NO: 1013052 - DNA, 120 bp, Artificial Sequence
  ENSG00000243766_8 (sequence is synthesized)
ttcctgattcactactgtgagctggtcagatgcctagaagaggaacaagcgttcaaagtgaaagtgggcacattaccggaatagtgctggggagagtgctggattcttttccaccccagg

SEQ ID NO: 1013053 - DNA, 120 bp, Artificial Sequence
  ENSG00000243766_9 (sequence is synthesized)
cggactggtgagaagccaggcttggacctgtcctctgctcctagcttgcacactcagccctaaactcagagcagcacgcataccacccctcacacacaccccaccatctgctgtctaagg

SEQ ID NO: 1013054 - DNA, 120 bp, Artificial Sequence
  ENSG00000243766_10 (sequence is synthesized)
cccctgggcttcctgcaggatccagaccaatgtggctgggcttgggcttttatctgtcctgatcctggatttgtcctgaccaatgtaagtgtcgcccaataaaaccttctatgaccccca

SEQ ID NO: 1013055 - DNA, 120 bp, Artificial Sequence
  ENSG00000243766_11 (sequence is synthesized)
gtggggcccagacccgcgcaaccaggcggggaggggaggtgggcgcgcgattgggttgcgatctggagcagtggggacaggtcaggaaccggcgcgtatttctgcagtgagaccacagga

SEQ ID NO: 1013056 - DNA, 120 bp, Artificial Sequence
  ENSG00000243766_12 (sequence is synthesized)
gactttttagcagttctgggtaaatattgatttgcccccagtttaccttctccctgactggccatttgcagactcaggaactagcctctgtagggacttgatttttctgttactttctgg

SEQ ID NO: 1013057 - DNA, 120 bp, Artificial Sequence
  ENSG00000243766_13 (sequence is synthesized)
ccgtttcaccaccccccttcctccctccaagtggcattgtaaaactcacagtgacaaagagacagagtagggttctaggcccctgttcctggggacttgaaggcggttttacatactggt

SEQ ID NO: 1013058 - DNA, 120 bp, Artificial Sequence
  ENSG00000243766_14 (sequence is synthesized)
cagacacggctggaggccaaggtcaagttgaaagttgcagtccagccagcatgagaactgccatgcgagcgtagagacacaggcagcagcaaaaggcccattgcccacatcccctcactc

SEQ ID NO: 1013059 - DNA, 120 bp, Artificial Sequence
  ENSG00000243766_15 (sequence is synthesized)
ttaattttctctctctttttaaaattctcgcctctgactctgttcggctgcccagaattttttggtgccttcgtggggtttttggggcggtgtttaccgactcttctctgcctccgccct

SEQ ID NO: 1013060 - DNA, 120 bp, Artificial Sequence
  ENSG00000243766_16 (sequence is synthesized)
gctcagccagggctttgagcctcttcggttttccggccagacccggaaaaacgaaaacacagcttggggagcccccactagccggcgcctgtgccagctcacctctggccatggcgcagc

SEQ ID NO: 1013061 - DNA, 120 bp, Artificial Sequence
  ENSG00000243766_17 (sequence is synthesized)
tgccggtgcacacggcggccaaggccagctccacattcttccctccccctcccacttcaccgtagccccgaaccctgcgcgcagagaaagggtctcagctccacagacgactgggtccct

SEQ ID NO: 1013062 - DNA, 120 bp, Artificial Sequence
  ENSG00000243766_18 (sequence is synthesized)
cctcaccaaaaatggtgagacaagatttcatctgtcggccgaggagccacaagcaggtttgtctgagagggatggtgctgggggaaggctttggattgcatctcaaattaagctttgctc

SEQ ID NO: 1013063 - DNA, 120 bp, Artificial Sequence
  ENSG00000243766_19 (sequence is synthesized)
cttaaatgtggcgctctcgccaagaaaaagcttggggactgaattcttgagatttatggtgcaccttattgatcaaatttatctggactttttttagttccccgatgtgtccctatcatt

SEQ ID NO: 1013064 - DNA, 120 bp, Artificial Sequence
  ENSG00000243766_20 (sequence is synthesized)
gagcccaaggaaaactccaatttgagtacagccctgccttgtttcccccagagagtccctgagcaaggagacctccaccccacacacaccatttcagaacaaccaggttccagactccca

SEQ ID NO: 1013065 - DNA, 120 bp, Artificial Sequence
  ENSG00000243766_21 (sequence is synthesized)
tgaggagcatctcccactgcagagccttggccagccgcgcccggactcctcagagctggcgcaaactccgtcctccaaaactcggctctgggaggcctaagtgactccgaagccggcggc

SEQ ID NO: 1013066 - DNA, 120 bp, Artificial Sequence
  ENSG00000243766_22 (sequence is synthesized)
agccgcggcagcggccgtggtggtggaagagctcttttccccgacagtgccactgatcgctcttcactggagctggaaacagccttcgcggaaaggaccggagcatgcgttagaagcaga

SEQ ID NO: 1013067 - DNA, 120 bp, Artificial Sequence
  ENSG00000243766_23 (sequence is synthesized)
gggagcttggtgaagggctcggctggaaggaggaaacgccttctcgcagtgcgcggccagcccgcgggggacaccggcttgctggactgcaggggcccgtgccacccaggaagtgacctg

SEQ ID NO: 1013068 - DNA, 120 bp, Artificial Sequence
  ENSG00000243766_24 (sequence is synthesized)
cgggtcactcagccggggcgctgggcgagcgcgggacggcccggagaattccgtgcggctgcgacgggaaaaggacgaggggtctctgtacccgacgctgccactggcccaaaggaattt

SEQ ID NO: 1013069 - DNA, 120 bp, Artificial Sequence
  ENSG00000243766_25 (sequence is synthesized)
tacccgcgagcgcccaccccaccctagcttgatgcttacgcccgcaacaaaacaggaaaccaggactgggcagtgcattctttaagtcaacaaatacactgaagacttcgagcgtttgaa

SEQ ID NO: 1013070 - DNA, 120 bp, Artificial Sequence
  ENSG00000243766_26 (sequence is synthesized)
tcgccctagactcctaagaactcccacggccctgttcccagctgcgaattcttaatgcacaacgcgacggagggaaggaaattcaccagcgcagcgacgaggaaggggaactcaggaccc

SEQ ID NO: 1013071 - DNA, 120 bp, Artificial Sequence
  ENSG00000243766_27 (sequence is synthesized)
cttcaagtacacactgaggtgtgatcagagttttatgggcactttatatgctgtaatcataacgatgtgtgtgccttgatatgcacgcatattcacgcatcaaacgtgcatacacacaca

SEQ ID NO: 1013072 - DNA, 120 bp, Artificial Sequence
  ENSG00000243766_28 (sequence is synthesized)
gagtgaatgtgcgcatccaatgtcatgtgggtgaaatacaagcatcatacccagccctacgaaaaaaaaattcaccctgtcggaccaggctggtgacatacttcgctggcgcatctcctt

SEQ ID NO: 1013073 - DNA, 120 bp, Artificial Sequence
  ENSG00000243766_29 (sequence is synthesized)
actcactcttacttttccgacccctcaccattccctctcctgtggcttggtaaatacacctgccctccgtggaaggtgagtcctggactggcgttgccaggttcgcatgtcctccccaga

SEQ ID NO: 1013074 - DNA, 120 bp, Artificial Sequence
  ENSG00000243766_30 (sequence is synthesized)
acctccgtctggctccagggactctcactgagcgggtctagagcacccagcacttttcaaggaacagccgcggttcctttgtcccgcggctccagccccgttcggcccagctctcaggga

SEQ ID NO: 1013075 - DNA, 120 bp, Artificial Sequence
  ENSG00000243766_31 (sequence is synthesized)
aacgaagcgctcagtaagaacttttgatattagtttgtatgggtatttacactctggtgaggggagctgagtacggaagttccattaatcatactccaaccttgggtttagatattcagt

SEQ ID NO: 1013076 - DNA, 120 bp, Artificial Sequence
  ENSG00000243766_32 (sequence is synthesized)
ttatgggttgggagagggagtttgccggaaagaaagcatcaaggttggccgctgactccagagaaatgaaaagggagcaaggtcgttttctgtttctggaaatcaagaattaggaatggg

SEQ ID NO: 1013077 - DNA, 120 bp, Artificial Sequence
  ENSG00000243766_33 (sequence is synthesized)
caactacaggtgctaaccaacagaccacttttttgttttttggtagccctttggcagggatagtttttccacctttgcccgatacaatttaaaaaaaaaaatccttttattatggaattt

SEQ ID NO: 1013078 - DNA, 120 bp, Artificial Sequence
  ENSG00000243766_34 (sequence is synthesized)
gtcaaacacacacacaagcataacaaacccctaggtacccatctccaagttttgacccctattataatttcatcttcagtgttttattatccacttcctctctctctatctttagtattt

SEQ ID NO: 1013079 - DNA, 120 bp, Artificial Sequence
  ENSG00000243766_35 (sequence is synthesized)
taaagtaaatcccagatagcatcacatcatttcacccccaccataggatttcaaagatctgttatatttcaagattgagtaaaagggcttgaaattgggttattgcaatgaaactctaga

SEQ ID NO: 1013080 - DNA, 120 bp, Artificial Sequence
  ENSG00000243766_36 (sequence is synthesized)
aaaagcttgagggttcacccaggagtaagctggacaaaaaaggggtttgaggggtggacccatcttgcctaaaaatcttgtctcatctttctaaaaattacatatgaaagaggaagattt

SEQ ID NO: 1013081 - DNA, 120 bp, Artificial Sequence
  ENSG00000243766_37 (sequence is synthesized)
atgttacttttttatatgagagaatcgtcctttaatagaaaatttctattgctgcatcagaattatggaggaacacaaaaaacatacctcagtccttagtgtgtcctaaattaacacata

SEQ ID NO: 1013082 - DNA, 120 bp, Artificial Sequence
  ENSG00000243766_38 (sequence is synthesized)
ttcacttattagtgggtaaatgactatatttcatttcagcacaacttctcccctggtagaaacacaaaagaaatttctaatgattaaactaggaaagtttgcactgaattgatggcttat

SEQ ID NO: 1013083 - DNA, 120 bp, Artificial Sequence
  ENSG00000243766_39 (sequence is synthesized)
cagagcaaccgcagttttcaggaagaaattcaatgccatgcgttgaaaatatccccctagcaataagggattatttttaaaaaagaatgaataaagatgttctggtttcttttgttttaa

SEQ ID NO: 1013084 - DNA, 120 bp, Artificial Sequence
  ENSG00000285294_0 (sequence is synthesized)
gcgggggcgggcgcgcggggccttgccggagaacctgactctccgcagcagcagtggaagccggagtgacgcgttgtgttgaacaccagttttctggagcgctgtgtgttcttaacagct

SEQ ID NO: 1013085 - DNA, 120 bp, Artificial Sequence
  ENSG00000285294_1 (sequence is synthesized)
gagcagtctgtttctccaatcaggtttcaaagccacttcaactgcactggcccctgtgggtcactgctgcaccgccctgacccatgtgggtccctgaggagcgacctgccggggccacct

SEQ ID NO: 1013086 - DNA, 120 bp, Artificial Sequence
  ENSG00000285294_2 (sequence is synthesized)
ggctggacgaaaaagacacaccttggacttaagccgtgagaaaaaaacttcatcagtaagaagaatgaataaacagactaggttgaatccatacaatggaatgttagcagacaataaaaa

SEQ ID NO: 1013087 - DNA, 120 bp, Artificial Sequence
  ENSG00000285294_3 (sequence is synthesized)
gaaaatgaactattgatgtcccctactgcacagcagaagctctgaatcgtgttcctgaatgaaagaagtcagagatgaaaagatgggccaggagtccagtttctggaaggccaagaatcg

SEQ ID NO: 1013088 - DNA, 120 bp, Artificial Sequence
  ENSG00000285294_4 (sequence is synthesized)
aagtagcaagctgcagccgttttccagacaagcaggatgtggggatgcagaagaattcaggactggaggggcaaactccgatgtgactgaggccccactgccaaatggcagcatgctcag

SEQ ID NO: 1013089 - DNA, 120 bp, Artificial Sequence
  ENSG00000285294_5 (sequence is synthesized)
atagcacccaggaatttggggaaaaaaactggtgctcacagctgcccagttaaggcacaagtctcccgcctgctgcaggggttgtgaggtgtatcagaaccttgaagagatactctggga

SEQ ID NO: 1013090 - DNA, 120 bp, Artificial Sequence
  ENSG00000285294_6 (sequence is synthesized)
agaaaggccttcccagactgcctctccgcagcgctgtaagaatcagatttcttctatgggggacttccaggtctcttcagcattttctcagtcatcactgtatccctgccactcagtgaa

SEQ ID NO: 1013091 - DNA, 120 bp, Artificial Sequence
  ENSG00000285294_7 (sequence is synthesized)
ccacagcaacaactcccagcttccagccgagaagcttgaccctgaagctggcctcgattctctacagaagtgaggccacagagcacaggtgaagggccacttacctggtatcatctctgg

SEQ ID NO: 1013092 - DNA, 120 bp, Artificial Sequence
  ENSG00000285294_8 (sequence is synthesized)
tctcagctctggagaactagctcctctgccactgccacatcctgtccaccaagacctccttgctgaaccccacccccacccggtgcctcaggaccctaacttgtttgctgacctccatgt

SEQ ID NO: 1013093 - DNA, 120 bp, Artificial Sequence
  ENSG00000285294_9 (sequence is synthesized)
cctctcaccagatccagccctggggagctgaacttcctctggcccactgccagctctggatcagtccacaccccagccagccacagcccagccctgcctctctctgtctctctctcatgg

SEQ ID NO: 1013094 - DNA, 120 bp, Artificial Sequence
  ENSG00000285294_10 (sequence is synthesized)
ctgggttggccttggccaatgctctctctagagatcaagacacaggcacctctcttggtctgttctggctgctgtgacaaaatgccttaagctgggtggcttataaaccacagaaattta

SEQ ID NO: 1013095 - DNA, 120 bp, Artificial Sequence
  ENSG00000285294_11 (sequence is synthesized)
tcacatggcagagagagagagagagagagacagaaagacagagaaagagagagagagagagagagagcatgctctttggtctcttctggtaagggcctaatcccgtcatgaagaatcccc

SEQ ID NO: 1013096 - DNA, 120 bp, Artificial Sequence
  ENSG00000285294_12 (sequence is synthesized)
ataacttcaactaaatctaatcacttctcaaaggctccatctccacataccatcccattgtgggttagggtttcaacataggaattctggaggcacacaaacgtgcagttcaaaacatgt

SEQ ID NO: 1013097 - DNA, 120 bp, Artificial Sequence
  ENSG00000285294_13 (sequence is synthesized)
ggagacaagggggcaaggactagagagccctaccatcctcgttcaaacccttgaatcaagcctgaagtcaaagaacttcctttggagagccccattccatgagccgataatttccccatt

SEQ ID NO: 1013098 - DNA, 120 bp, Artificial Sequence
  ENSG00000285294_14 (sequence is synthesized)
ttgccatcacccacttgagtttgggattttcccccagttactgagtgcctgactgacatgatgccccccacagatgggcctccctgcccccaatctcacctcctctgttagtttcctggg

SEQ ID NO: 1013099 - DNA, 120 bp, Artificial Sequence
  ENSG00000285294_15 (sequence is synthesized)
gttgccacaacaaagcgttacaggcagagcggctaaaacgacagaaacttatggtctcacagttctggaggctgcaagttcaaggtcaaggtgtcagcagggttggttccttcggaaggc

SEQ ID NO: 1013100 - DNA, 120 bp, Artificial Sequence
  ENSG00000285294_16 (sequence is synthesized)
tgtgcaggagcctgttgggtgcctgtccctcagcttctagtggattacttccatcttcagcatgccttggcttgtagaaggactaccctgaactctgccttcatggtcacaacacatcct

SEQ ID NO: 1013101 - DNA, 120 bp, Artificial Sequence
  ENSG00000285294_17 (sequence is synthesized)
ccctgtgtgtgtttctgtgtccaaatttccccttcttataaggacaccagtcttatacggacaatgctcaatgtatgaacctttgccaagggattggattagggacccactatattccag

SEQ ID NO: 1013102 - DNA, 120 bp, Artificial Sequence
  ENSG00000285294_18 (sequence is synthesized)
tatgacctcatcttaactaattatacctgcaatgacactgcttccaaagaaggccacatgatgaggtaccgttggttaggaattcaatatatgagtttggggggacacagttcagcccac

SEQ ID NO: 1013103 - DNA, 120 bp, Artificial Sequence
  ENSG00000285294_19 (sequence is synthesized)
accacctcctctgaccctgaattggatgctgtttctgctctgcttatgatcctcttgtcctcactggcctcttggtccagcacccactgaggcaccagctctgagagagctcactggctt

SEQ ID NO: 1013104 - DNA, 120 bp, Artificial Sequence
  ENSG00000285294_20 (sequence is synthesized)
cacacaggtgcgacctgatggcgcctcacctcataccccaaacatccttctcatctctgcaggacctgctctgtttatgtccaggtatgttcagtgttcctgtgtgtccccagagtgtgg

SEQ ID NO: 1013105 - DNA, 120 bp, Artificial Sequence
  ENSG00000285294_21 (sequence is synthesized)
ggaggtaatgctccatgtacgaacctttgccaagggaatatggaaaccgatggatgagttcttacctcttttttcgtccagacaaactgtcctaagatggttttaagagataccgagtaa

SEQ ID NO: 1013106 - DNA, 120 bp, Artificial Sequence
  ENSG00000285294_22 (sequence is synthesized)
tcagctgccagctcagtagcgcatcttcagattgactctccctccttccctgtctccttccccatattcttcatcttgttccctgggatctttctccctaataaaggaaaagctcataga

SEQ ID NO: 1013107 - DNA, 120 bp, Artificial Sequence
  ENSG00000269940_0 (sequence is synthesized)
ctagtccataggtaaagagcatacaaaacagacgccgaggtgatcagtgattccaaaggctgacgctcagcagcgccacctccatgccagccaactaggctacgggatggaggggcggtc

SEQ ID NO: 1013108 - DNA, 120 bp, Artificial Sequence
  ENSG00000269940_1 (sequence is synthesized)
tgtgaaacaccagccatcccgtgaaagctcagcttgccactgtcatgtaacagggtgggtggtggcacagcagaggctcacacttgtcaccttcagcctctagaagctccccgtggggca

SEQ ID NO: 1013109 - DNA, 120 bp, Artificial Sequence
  ENSG00000269940_2 (sequence is synthesized)
gacagagtgtcctgaggttttgttacaaggctagactttaaaatacctttcaaagtttcatcccgcctcatgtcgcaggactgctgtgtttgtgaaagcgcgtttgtttccacaagacaa

SEQ ID NO: 1013110 - DNA, 120 bp, Artificial Sequence
  ENSG00000269940_3 (sequence is synthesized)
gctccgtgtagtcgccagcgggtgcctggcccaggagctgccctgtggagccagcgttgtccccgagctgctcgcctgtggccgtggctccttttctgaggctcctgactccattcttgc

SEQ ID NO: 1013111 - DNA, 120 bp, Artificial Sequence
  ENSG00000269940_4 (sequence is synthesized)
agattctggtggatcaggagcttacattctaaatgctacatagaggtgttgaagaaaatttcataggttctgtaatagtggatgggattaaaagaaaaaatgttaaattatatatatata

SEQ ID NO: 1013112 - DNA, 120 bp, Artificial Sequence
  ENSG00000237464_0 (sequence is synthesized)
gagagacggactagaaggctgacgagagtggcggagagggcattttccgtgagcaggacgagttcgtcatccgcgcagaggacatcctttccctcaaggtttgcattctgaaagagtggc

SEQ ID NO: 1013113 - DNA, 120 bp, Artificial Sequence
  ENSG00000237464_1 (sequence is synthesized)
acagagccctcagcacagggctccaggcagctgctacagctgcccattgattggggttgatagatagatttgctacccctgatttaactcaagaaataaaatgctaatggtgaaaagtca

SEQ ID NO: 1013114 - DNA, 120 bp, Artificial Sequence
  ENSG00000177553_0 (sequence is synthesized)
cgatgatgagtggtggggatagggtgggattctagacccccactgccaagtcctgtgctcaaccactagccataaacattgctatggactgagcactcacaacgtgccacacacggcatt

SEQ ID NO: 1013115 - DNA, 120 bp, Artificial Sequence
  ENSG00000177553_1 (sequence is synthesized)
ggggaatgtatgtgccgtgcctcgccattgccccactggagccagtactattaaccccattttacagataggcaaatagggcacagagaagttatgcaacttgcccaagatcacacagcc

SEQ ID NO: 1013116 - DNA, 120 bp, Artificial Sequence
  ENSG00000177553_2 (sequence is synthesized)
aatgaggggcaaagctgggattagaacccagggagaccaactcttatgcattgtgctataaatgaataaatgaaggaacctcagctgcaaaatctccaagaggaacagtgactctgtaga

SEQ ID NO: 1013117 - DNA, 120 bp, Artificial Sequence
  ENSG00000177553_3 (sequence is synthesized)
gtgcctcaccactccccgacaccctctcagtaggacggggcaggaagacaggaggaactgaagccccctgaggtgcagaccccaaggggctgctgctgtgaaggccaagggtggaaggga

SEQ ID NO: 1013118 - DNA, 120 bp, Artificial Sequence
  ENSG00000177553_4 (sequence is synthesized)
gaaggggccgggaaacaagagtcttggagtgtgctgctgctcagtggctccagagccgagggggtcttggtgcagcttgatgtggcatctgggcccagtgccctcaagtgccaccatctc

SEQ ID NO: 1013119 - DNA, 120 bp, Artificial Sequence
  ENSG00000177553_5 (sequence is synthesized)
aggctgcgctgcagcatccgctgctgcaggccctggaagaaggagctagagaaggggcagggtctggctctgtgacccaggctggagtgcagtgggacaatcttagctcactgcaacctc

SEQ ID NO: 1013120 - DNA, 120 bp, Artificial Sequence
  ENSG00000177553_6 (sequence is synthesized)
tcccgagcagctgggattacaggtgcgtgccaccacgtctggctaaccgagctagtgctccacctgcttcactggctggcctcatcatgctcccggggtggctgggagcccaagcagctg

SEQ ID NO: 1013121 - DNA, 120 bp, Artificial Sequence
  ENSG00000177553_7 (sequence is synthesized)
atcccagactccagaggccacccctacaaccacaccagtacttctgcctgcactcacttataaagataagaaagctgagcccaggggaagatcatttccccaaactccaaatagcagcag

SEQ ID NO: 1013122 - DNA, 120 bp, Artificial Sequence
  ENSG00000177553_8 (sequence is synthesized)
acctgggactcatctaggcccaggagggtgccccgggagagctgccaggagatatgaactgtgccctgaagtccaaaggccagaggatgggctggagagggagggcctgggggttgtggg

SEQ ID NO: 1013123 - DNA, 120 bp, Artificial Sequence
  ENSG00000177553_9 (sequence is synthesized)
gcaggcatgtgagcagtgcccccacattctgaaaggtcacggtgaattgaattcccctgaagttgcaggggtacactgaaagaggctgagggtccatgtggaccatgtgggtgtgtggct

SEQ ID NO: 1013124 - DNA, 120 bp, Artificial Sequence
  ENSG00000177553_10 (sequence is synthesized)
gctgagggtccatgtggaccatgtgggtgtgtggctttcaaggacagaattccttttttttttttttgagatggattctcgctctgttgtccagggtgcagtggcatgatcttggctcac

SEQ ID NO: 1013125 - DNA, 88 bp, Artificial Sequence
  ENSG00000177553_11 (sequence is synthesized)
acagaattcttaaccctgcaactgctcgcttccattcctcctgacatcccctccgggaagctggcttctcctgatcgccaccctcccc

SEQ ID NO: 1013126 - DNA, 120 bp, Artificial Sequence
  ENSG00000177553_12 (sequence is synthesized)
ccctccgggaagctggcttctcctgatcgccaccctcccctcacctacagccttcttctgggctccgaattccatcagtgaccatcttgtgtgggggcagcacccaggtctcaacacagg

SEQ ID NO: 1013127 - DNA, 120 bp, Artificial Sequence
  ENSG00000177553_13 (sequence is synthesized)
accttcttgctcctgactcccactgggatttacagcaagctgctccagccctctgagcctcagtttctctagttgtgtaatgaggccaatgggagaggagataaaagcttgatccctggc

SEQ ID NO: 1013128 - DNA, 120 bp, Artificial Sequence
  ENSG00000237460_0 (sequence is synthesized)
agtggaagctaagcaattggacaaagccatctaaacccaaagcaatggctcgatggagttcaccagggaggatcttgctctgatctaaatatacagtggaaatctgatgtgatctaggct

SEQ ID NO: 1013129 - DNA, 120 bp, Artificial Sequence
  ENSG00000237460_1 (sequence is synthesized)
gctgcacctcatctactaaaaccaaatcctggaaaagatttctatgagatggtttctgtcattcttcctaaactgggagctaagtgattaatatagaggaaaactcacagataaacatat

SEQ ID NO: 1013130 - DNA, 120 bp, Artificial Sequence
  ENSG00000237460_2 (sequence is synthesized)
ctctgcaaatgcaaataagtactaaagtgctggtaaccaacatccccaccctggttcctcttagcacttcagtcaaaggcacacttcgaacagaagaatctgaaccacaaatttagccag

SEQ ID NO: 1013131 - DNA, 120 bp, Artificial Sequence
  ENSG00000237460_3 (sequence is synthesized)
tctctactaccttcagaaaggcttccagaagtcattttcctcccagacctcctagatttctaatttctctattcctgctaggagggacactactacccaatctaggagtatcttggaaga

SEQ ID NO: 1013132 - DNA, 120 bp, Artificial Sequence
  ENSG00000237460_4 (sequence is synthesized)
ttcaagtgggaaaccattcagatctgtctcttcccctcatcgcatcaacattttaatctgtctctacacaacgcaggattcacaagggaagtctcaaatcccatagcgttgcttacaagc

SEQ ID NO: 1013133 - DNA, 120 bp, Artificial Sequence
  ENSG00000237460_5 (sequence is synthesized)
tatggtacaaaattttaaaagcatgaatttccctcaaccttaagaagagatggaatgttcataatgaggaagaagtcttctgattttctaaataggtaatcacaacacagaagagtgaag

SEQ ID NO: 1013134 - DNA, 120 bp, Artificial Sequence
  ENSG00000237460_6 (sequence is synthesized)
aaggacacaggctcttagccaccatggcctaaaactgtcccacacctcttcaactcacatcctactgtccacaaccagtcatcagtcatgtgcaacgttcacacataaaagccctggaaa

SEQ ID NO: 1013135 - DNA, 120 bp, Artificial Sequence
  ENSG00000237460_7 (sequence is synthesized)
atgaaggccagtgatttgcctaggaaaagtaaccagaatataatatgacaatgcacgaaggaggtgcccaggaaatactgtggcatgaaagaaggaaggaaggaagacattcatacgtcc

SEQ ID NO: 1013136 - DNA, 120 bp, Artificial Sequence
  ENSG00000237460_8 (sequence is synthesized)
cttgtatagacattggcatgcacactacatatataatcgaattcttctcaaatttgtcttgattagacacagttcctctcaatagaagataatgcaatgcatcaattccatcctcaacta

SEQ ID NO: 1013137 - DNA, 120 bp, Artificial Sequence
  ENSG00000237460_9 (sequence is synthesized)
tctggaatcccttgccatataaaggatgctctattgctgcaaaaagcctcatttagtcttcatgatattctgtggcagtggtgttattacttatcctggagatgaggaaagttacaaaca

SEQ ID NO: 1013138 - DNA, 120 bp, Artificial Sequence
  ENSG00000237460_10 (sequence is synthesized)
ggacatgaactgagattttctatctctaaatctcttgctctttcctccaaactaaattcttagcttctcagtatctgtggtactgaaataaaagaaatacaaatgttggttgtacactaa

SEQ ID NO: 1013139 - DNA, 120 bp, Artificial Sequence
  ENSG00000237460_11 (sequence is synthesized)
atgaaacacttcatctggcacctggtttatctctgcctctgaaaaatacctgcatgaccaagaactattgtataatgacacctggcttccactatggctccataggattcttaccagttc

SEQ ID NO: 1013140 - DNA, 120 bp, Artificial Sequence
  ENSG00000237460_12 (sequence is synthesized)
tcgtatctgtgtccatgccacacaccagcaaagggacccgctaaattacaaaatagaccctctttgtggttgaccatgattcccatgttagcatggatttgttctgtatggtgacctctt

SEQ ID NO: 1013141 - DNA, 120 bp, Artificial Sequence
  ENSG00000237460_13 (sequence is synthesized)
cagatcactaatggggactacagctagagtcctccccatctacgattttcaagctatcaatttctcatgaatctgtatcttcaatccaatatctcaccaacttcgctctcatcttcagtt

SEQ ID NO: 1013142 - DNA, 120 bp, Artificial Sequence
  ENSG00000237460_14 (sequence is synthesized)
gtctctactcataattatccctggatgaaaaaggagtaaagttcccttttactgcttctatgttacatcctgaggtagcttcctttcattatggaataaattctatgatgtgatccaaaa

SEQ ID NO: 1013143 - DNA, 120 bp, Artificial Sequence
  ENSG00000237460_15 (sequence is synthesized)
aaagactaaagaatgaaacaatgaaaatgggcaaggaagagacctgggcaagatggccaaataggaccagctcctttctgcagctcccaaggagatcaatgcagaaggcgggtgatttct

SEQ ID NO: 1013144 - DNA, 120 bp, Artificial Sequence
  ENSG00000237460_16 (sequence is synthesized)
gcatttccaactgaggatgaagagagcagactggccttacctttgaataaccctaagcaagttatcaacctgtcttaacctacttcttcttctaaaagatgggaataacaacaccagcat

SEQ ID NO: 1013145 - DNA, 120 bp, Artificial Sequence
  ENSG00000237461_0 (sequence is synthesized)
atcttggactcggttcgaccaggtctggtgaccggcgacgaggggccgggctcggcgccgggggtcggggaaagaagaactaggtctggcagtagatcagaatctacctgttggggaaaa

SEQ ID NO: 1013146 - DNA, 120 bp, Artificial Sequence
  ENSG00000237461_1 (sequence is synthesized)
ccagaaataggaagaagagttattaatggttcattcttggctgagaagaattcagtatggaataattaagaactactatcaatgccttttacaaaatgaggtcattggattgcagagttg

SEQ ID NO: 1013147 - DNA, 120 bp, Artificial Sequence
  ENSG00000237461_2 (sequence is synthesized)
gctttcgagaagattttgtggcctttctcagctgtctaggtgctgtaggtgctgtgtttctatggctgcaaggatgaagattatgatatggatggatgatggaaggaaggatctatgaat

SEQ ID NO: 1013148 - DNA, 120 bp, Artificial Sequence
  ENSG00000237461_3 (sequence is synthesized)
ataatatttgagtttcagttactggcctttacttcttccagaaagtcaggccaaaagaacaaagtcctagaaggtcttctggtgagtcacattctgagcagcaaaactggcattgaggca

SEQ ID NO: 1013149 - DNA, 120 bp, Artificial Sequence
  ENSG00000237461_4 (sequence is synthesized)
taattaacattcagattgcccccagtttctatggagatgagtctagcccctcgggggagtagtgatggatgtgtaatctccaagataagtaactgacaggctgtattctaggaactcaaa

SEQ ID NO: 1013150 - DNA, 120 bp, Artificial Sequence
  ENSG00000237461_5 (sequence is synthesized)
atgaaagaaaaataggatatgtttcttactttagagaccacagaaactagtctcctatattggaccttcttggtaagagccccatcccttcaaaggccacatgaatctgaaggccaatat

SEQ ID NO: 1013151 - DNA, 120 bp, Artificial Sequence
  ENSG00000237461_6 (sequence is synthesized)
acagttactgcaagtataatggagctgagaggatggtgtgagcaatagcaccaatgtaagagttatcatagattaacacactactggttctgatgcagcacataaggcaagtaccatggg

SEQ ID NO: 1013152 - DNA, 120 bp, Artificial Sequence
  ENSG00000237461_7 (sequence is synthesized)
aatgcagaggagaaagaaattagggagatcaacaaggtttcacaaagcagctatggtgaacttggccttgagagtagggttttcctggtgaagaaaaacattctaggcagaagaaatagc

SEQ ID NO: 1013153 - DNA, 120 bp, Artificial Sequence
  ENSG00000237461_8 (sequence is synthesized)
atacacaaagactcagaggcaccaaagagtcctgtgtgtgtggtgaataatgaacagaaattgccatagattaggtgggaagtcattggtgttaatttataggtttgatagaagccaatt

SEQ ID NO: 1013154 - DNA, 120 bp, Artificial Sequence
  ENSG00000237461_9 (sequence is synthesized)
cttgaagggttttgtatgccacagtaaaggacagagttttatttaaggagccactgaaaagcttcattcattctacaaataactttttcggtgagccagtatgtgccaagcatggttgta

SEQ ID NO: 1013155 - DNA, 120 bp, Artificial Sequence
  ENSG00000237461_10 (sequence is synthesized)
agtacttgtaatacatcagaataataataaaaagagtattcatgtacccaccacccaatttaaaaactaagaaattgtcaatccttatgtaagtctctgtgtttcccttgtcaatggaat

SEQ ID NO: 1013156 - DNA, 120 bp, Artificial Sequence
  ENSG00000237461_11 (sequence is synthesized)
ccttctccttgctccccaaaagtaacccaaacgctaagttttgtgtttgtcattttcttgtttttcatttcagttttactcatatgtgaggaaaggggcttaagaaatatttgctcaatt

SEQ ID NO: 1013157 - DNA, 120 bp, Artificial Sequence
  ENSG00000237461_12 (sequence is synthesized)
gggagtgcggagggggcgggggcggagtcgccatcttggactcggttcgaccaggtctggtgaccggcgacgaggggccgggctcggcgccgggggtcgggaactactatcaatgccttt

SEQ ID NO: 1013158 - DNA, 120 bp, Artificial Sequence
  ENSG00000237461_13 (sequence is synthesized)
agtcatggcaattgagaaggcgtaggaggaagaaatcttgttgcctcttccctcaaaatacatccagaacttgtcctcttttatcacctccaccgccctgaccttggcccaagcctctat

SEQ ID NO: 1013159 - DNA, 120 bp, Artificial Sequence
  ENSG00000237461_14 (sequence is synthesized)
tatccacaataattgagatgctctcaagctgggccagtggccaactgcagaacggagagtggccgagcagggaaggtcatagaaggcacaggatggggaaggacactggagaccaggttc

SEQ ID NO: 1013160 - DNA, 120 bp, Artificial Sequence
  ENSG00000237461_15 (sequence is synthesized)
ctgtaggcttccagagaccacctgcatttgttggttgatagcctcttcctcgaatcaccctgatcctctgcttctgtggccacattttcatctctccaaatctgagtcttctgcctgtct

SEQ ID NO: 1013161 - DNA, 120 bp, Artificial Sequence
  ENSG00000237461_16 (sequence is synthesized)
cctctagggacccttgagatgactttgggcccatccagatcatccaagataatctccccttctcaagtttcttaatcacttcggcaaggtcttttttgccacataaagtaatatttgcac

SEQ ID NO: 1013162 - DNA, 120 bp, Artificial Sequence
  ENSG00000237461_17 (sequence is synthesized)
tgggttcaggaatcaggatgtgggcatctttgtggggggagtcactattccacctaccacacagagccccttcaacaagtgagattagatgagaaaatgttggtgaagcactgagcccag

SEQ ID NO: 1013163 - DNA, 120 bp, Artificial Sequence
  ENSG00000237461_18 (sequence is synthesized)
agatagagcatagtaggtgtggatgctggtgatagtgaaggggtgaatggctgacaaagaccaggtgactaatttcacagctgccagaaatcagcctccagggacacacaaggagctttg

SEQ ID NO: 1013164 - DNA, 120 bp, Artificial Sequence
  ENSG00000237461_19 (sequence is synthesized)
ccacacgctgaatcagataaggcctctgactttgttttgccccagaagcagacctcaagaagaggactccagtgcaagtagtttatttagaaggcaagcccacaaaaagtgggaaagcga

SEQ ID NO: 1013165 - DNA, 120 bp, Artificial Sequence
  ENSG00000237461_20 (sequence is synthesized)
gacaggcaaggcaaggcaaggaaaccaatggagaatgccatgaagctagttaccaccataggcaggtggagcttaatcccactggggaattgtggaaaacagtgtggagctctgcacctc

SEQ ID NO: 1013166 - DNA, 120 bp, Artificial Sequence
  ENSG00000237461_21 (sequence is synthesized)
ctgagaggtgacagggctggggtatggatgcaccaattcccttcagtctgttgcaagttgttccagggagggggagagtggagttaattcacctacacacccatctgcacacacatatat

SEQ ID NO: 1013167 - DNA, 88 bp, Artificial Sequence
  ENSG00000237461_22 (sequence is synthesized)
taacacatggacatagggaggggaatatcacacactgaagcctgtcagggggtgggaggaaagggaagggagagcattaggacaaata

SEQ ID NO: 1013168 - DNA, 120 bp, Artificial Sequence
  ENSG00000237461_23 (sequence is synthesized)
aaaaaaaattaaaaagtaaagcaggctctgatggccagagaatgcctacctgcaaatatccataggtgctggcaactggaagtctggctgcgtgcactgaaatggcaaagataggggtgc

SEQ ID NO: 1013169 - DNA, 120 bp, Artificial Sequence
  ENSG00000237461_24 (sequence is synthesized)
tgcggccaggtactggtggtgtctgctaccccaccttgagcctatagtcttcatttcttgtggacactatccacaggccaagataatgcagaaagatgagaaaatcaaggagtcagcgtc

SEQ ID NO: 1013170 - DNA, 120 bp, Artificial Sequence
  ENSG00000237461_25 (sequence is synthesized)
tgcccaaagtgaaggtaagaggatggcttggaattcacagctggcaactgaagctgttgaaagacatcaccttaatgttgctctccagggcttgcagccctcttaggacaggtgctgtct

SEQ ID NO: 1013171 - DNA, 120 bp, Artificial Sequence
  ENSG00000237461_26 (sequence is synthesized)
gcagggcggccttgcggtgacagtggtcgccccgctgaatccccaatgctgtcttatattgccactttcctgggaggctgtcatccatctctgatttagactaccccgaggtcttacggt

SEQ ID NO: 1013172 - DNA, 120 bp, Artificial Sequence
  ENSG00000237461_27 (sequence is synthesized)
taagctgttgagtaggttttgtcattctgtattattttcctttgtactttttgttcaggaaggttcctggctgtctttggtgtagtttgtatcatatcttccaataaaataaacacatct

SEQ ID NO: 1013173 - DNA, 120 bp, Artificial Sequence
  ENSG00000237463_0 (sequence is synthesized)
atagtatctgtacccgctccccatggagctgtagtagattaggtgacattggaccccctaatctgcaggccatagagggaacatgggacatctccaggccaactccttttcttagtgatg

SEQ ID NO: 1013174 - DNA, 120 bp, Artificial Sequence
  ENSG00000237463_1 (sequence is synthesized)
agcagtgacttgcttgagccctgttttctttagacgctgactcctgctgtctaccagatcctcgtggtacaatgactggtgtagactggcttgttgaagtcactctctggatctgagcaa

SEQ ID NO: 1013175 - DNA, 120 bp, Artificial Sequence
  ENSG00000237463_2 (sequence is synthesized)
cgctggctgagccgtgatgaagtattcctatccatccactatgcttcacagtgggaatctctcactgttcatcaccgctgccctagcagccgcagggattcttcacccatggttgcttag

SEQ ID NO: 1013176 - DNA, 120 bp, Artificial Sequence
  ENSG00000237463_3 (sequence is synthesized)
ttcctctctggatgagcccctgggtttctggaagagtcttaaaatcacccctaaatggcttccaagcactgaagcccgagatgttagctggcctgtgtgaggccttgagacagaatgcca

SEQ ID NO: 1013177 - DNA, 120 bp, Artificial Sequence
  ENSG00000237463_4 (sequence is synthesized)
cagccacaccccaaggatgctgaaggggatttccctcctctgtggtttttctcctttcttcccgcagcactcctcctacgtgctaacatcttctagtcaaacaactctccttttcaaagg

SEQ ID NO: 1013178 - DNA, 120 bp, Artificial Sequence
  ENSG00000237463_5 (sequence is synthesized)
gaccaggcacagtttctgcttatccctgagtagcagtgttcagtttcctgccagcctgtggagtttttcaaacaagccaatcacctcctcctgtgggaactgagaagcaccccaccctct

SEQ ID NO: 1013179 - DNA, 120 bp, Artificial Sequence
  ENSG00000237463_6 (sequence is synthesized)
cgatactacaaagcccctgcttgttccctagtgcaactcccatgtggtcctgtggagcatatggtatcttcctcttctgggcagtgagcatatgtgactaataaactatctatctcatct

SEQ ID NO: 1013180 - DNA, 120 bp, Artificial Sequence
  ENSG00000237463_7 (sequence is synthesized)
tgttgttacatagattgcctgtgatttaaggaaacacgatagccactatttactatttaccctgtgtcaagaatgtgatcctcccagcaacgcaatgagtcatattgcatgaccctcatc

SEQ ID NO: 1013181 - DNA, 120 bp, Artificial Sequence
  ENSG00000237463_8 (sequence is synthesized)
ttatgaatgaagaaacagaagctcccagaggtgccactcgcccgtggtcacagagctggtgggagaatcactgagtgagtctgaggacagagaatgacacactgtggtttccaagagaga

SEQ ID NO: 1013182 - DNA, 120 bp, Artificial Sequence
  ENSG00000237463_9 (sequence is synthesized)
acatcaatgtttttgaccaactcgtaatttcaaagactggaaaaaccatgcttatatgcgcagcctcttttctgaggaacagactagaggatgtttgtttatgccagcagaaagcaaagc

SEQ ID NO: 1013183 - DNA, 120 bp, Artificial Sequence
  ENSG00000237463_10 (sequence is synthesized)
cacttctagatcagatcacctgctgctgacagtcagatcaaatcaacagcactgaatgagctcctcccagggacagtgcagctgcctggaatttgaatgtggtatctggagcttcagtag

SEQ ID NO: 1013184 - DNA, 120 bp, Artificial Sequence
  ENSG00000237463_11 (sequence is synthesized)
ttctcctcttcagatggactgcagggggccacgagactccagtggcagccgctcaactctgaacacagccactgcatagagggttcagtgaagtgagtggggttgttactccccaccaag

SEQ ID NO: 1013185 - DNA, 120 bp, Artificial Sequence
  ENSG00000237463_12 (sequence is synthesized)
cagtgagtggctttctgctgttccactccagaggcctcacctcctgtgtttttaaactccagtttctgtctttccctgttggcaccaaacttatcttcataaaatataaatcaaatcaca

SEQ ID NO: 1013186 - DNA, 77 bp, Artificial Sequence
  ENSG00000237463_13 (sequence is synthesized)
agtaacctctgcgcatggggacaatggagagctaggccaggatgatggccctgtggatggcccgttgtagcccgcaa

SEQ ID NO: 1013187 - DNA, 120 bp, Artificial Sequence
  ENSG00000237463_14 (sequence is synthesized)
tggccacaaacgccttgaacctggttcgctggccggctccggtctgcttctgcaccggcataatcttcaaaacctaggcctcgagagaggccccccaggaaaaaatcaatgatctcagat

SEQ ID NO: 1013188 - DNA, 120 bp, Artificial Sequence
  ENSG00000237463_15 (sequence is synthesized)
tccgtgatgggcagggagaagagacagatctcctccagggaagtgatcttcatgtgcttgaccaggcagcccagcttgctgacgggcatccactccttatccttggccttgcctccgcga

SEQ ID NO: 1013189 - DNA, 120 bp, Artificial Sequence
  ENSG00000237463_16 (sequence is synthesized)
gctccgtggcttcggccccagcctggtccacggcagtgaccccggcctcggatgccactgccgaaacctccacggaagccaccatggttccccatcccagggccccggggcctccgggac

SEQ ID NO: 1013190 - DNA, 120 bp, Artificial Sequence
  ENSG00000237463_17 (sequence is synthesized)
tccccccgcaacccaatgccggctgcgccggcgtcatccgccatttggtgttttctcggagaagaagctacatgtggaatatattaacgcaacaaattgtgcgtacttgctagacattag

SEQ ID NO: 1013191 - DNA, 120 bp, Artificial Sequence
  ENSG00000237463_18 (sequence is synthesized)
gcatgatagcaagtgctagggttacaaagtattgctttttggggaacccatggttgttggggagaaaccagaagatcagtcatcacagtgcggcaagatcagacttgtggtttgttcagg

SEQ ID NO: 1013192 - DNA, 120 bp, Artificial Sequence
  ENSG00000237463_19 (sequence is synthesized)
ttctgggagccgtcactgcagtgagaatggaccccacaatgtctcataaggggatctgcaaggcagccctaaattccaagcaggacatgtaactcctcaatggacaaatggacactggac

SEQ ID NO: 1013193 - DNA, 120 bp, Artificial Sequence
  ENSG00000237463_20 (sequence is synthesized)
caggcacgtggccacatctaacagcaagggagtctggaaaacacagttcagctgtgtgaaggatatttataaacatttagcaagatccaaaggaatggaccatagcacagccctgttttc

SEQ ID NO: 1013194 - DNA, 120 bp, Artificial Sequence
  ENSG00000237463_21 (sequence is synthesized)
caccgctgccctagcagccgcaggttcaagagctgctgggatatagcagttaagagatgaaccctgcagcctgacttcctttgctagaatcctggcactgttacttattccttgtatgtc

SEQ ID NO: 1013195 - DNA, 120 bp, Artificial Sequence
  ENSG00000237463_22 (sequence is synthesized)
tctagctggaatgagagactggatggcgttgaaatgaaatgctggagccatccatccatgtgcttccagggtggcttcctggctgtgagaacacagtgaccctgtgaggccaacatggac

SEQ ID NO: 1013196 - DNA, 120 bp, Artificial Sequence
  ENSG00000237463_23 (sequence is synthesized)
tcggttctcctgacataacatggctggaggagctccagctctgggatgttatcttgctgttttacactggtggttcagccagcccatgggaaactgaacttgggctgggagacctggcag

SEQ ID NO: 1013197 - DNA, 120 bp, Artificial Sequence
  ENSG00000237463_24 (sequence is synthesized)
caaatccaaactgaaataagaatcagcacttcgagttcaactgtgaaacaaatgtgggcccaaggcctaaatgcccgaaagacatagggaagggttgaagtggaataaagaaagcttttg

SEQ ID NO: 1013198 - DNA, 120 bp, Artificial Sequence
  ENSG00000237463_25 (sequence is synthesized)
gtgacactatgggaagggctattgagtatcttctcaggacagtacaaaatgtcagaggcacagcatatttcgaaacctatttttaaagctgctttagattttttaacttgatggatagat

SEQ ID NO: 1013199 - DNA, 120 bp, Artificial Sequence
  ENSG00000237463_26 (sequence is synthesized)
atattcattttttaaaaaaagaaatggtgaccctcttaagaggcaaagtacgagcctcaagtgttgtgggatgtatccatcattggttactaagttttccaatggctcagacactcccag

SEQ ID NO: 1013200 - DNA, 120 bp, Artificial Sequence
  ENSG00000237463_27 (sequence is synthesized)
aagcgaagactcctgagccaaaggaagatgagagctgaaaggagcatcgagctcatccagtgcaatgcttctcagcttgtgcccactttggattcacttggaaatattttagaaatactg

SEQ ID NO: 1013201 - DNA, 120 bp, Artificial Sequence
  ENSG00000237463_28 (sequence is synthesized)
atgcctgggccccattccagaccagttaaatcatactatctgggagagatacccagaaagtggtatgttttaacacctccttagggattctgctgatcaaccaaggttgagaagaatcaa

SEQ ID NO: 1013202 - DNA, 120 bp, Artificial Sequence
  ENSG00000237463_29 (sequence is synthesized)
actagactcattttacatatgaagaaatggaaacccagatattgagataaaaaatgttgcccaagtcacgtagctagtgtcaaaacctgactcttaataaatgcccttatgtcacactaa

SEQ ID NO: 1013203 - DNA, 120 bp, Artificial Sequence
  ENSG00000237463_30 (sequence is synthesized)
aggaaagaggtttaattgactcagagttccatatggctggggaggccttgcgatcatgcagatggcgaatgaggagcaaaaacacatcttacatggtggcagaagattccatgaagctca

SEQ ID NO: 1013204 - DNA, 120 bp, Artificial Sequence
  ENSG00000237463_31 (sequence is synthesized)
accatccaggatgcagaaatgggacctggaaagactccgtattccttttagggaagaaaaggtccatctcgaattacctcattgttcagagaataataagtatttgttcagcaataacaa

SEQ ID NO: 1013205 - DNA, 120 bp, Artificial Sequence
  ENSG00000237463_32 (sequence is synthesized)
aaatatgcggtgaaaaagatctactttataatcccattcaactgtggattgaactgaagagtcaaggagtccaaagtggtcagcctgaaaattctgagaagatacaactgtgcaagcaga

SEQ ID NO: 1013206 - DNA, 120 bp, Artificial Sequence
  ENSG00000237463_33 (sequence is synthesized)
ggcacagtgagagggaggttttccaggcttcctgtgctgtcttggggacctgctcagaggctggaccgcgtcatgctcagaaggctgcctggaatttgaatgtggtatctggagcttcag

SEQ ID NO: 1013207 - DNA, 120 bp, Artificial Sequence
  ENSG00000237468_0 (sequence is synthesized)
agcgggggcggggccctgggggcgggctctgcggcctgtggctgcagagggacgcaagagcataaactgaaatcccacatccccgtggaggaacttggagataagatgcaaagcgcagca

SEQ ID NO: 1013208 - DNA, 120 bp, Artificial Sequence
  ENSG00000237468_1 (sequence is synthesized)
aataggagccactctttcagagatgacagaccacctggtttcgaggagcagcagacagcgtgaatgaatgaagttggccaggtaaagaactgaaatgcagacaggaaatgggacttgcct

SEQ ID NO: 1013209 - DNA, 120 bp, Artificial Sequence
  ENSG00000237468_2 (sequence is synthesized)
gacatggagcaggtggtaggtggcagaggaagattggccactccataacctgtgctctctccaattctctggactaactgtccatacagatgattgccctgggactgagcttagggattt

SEQ ID NO: 1013210 - DNA, 120 bp, Artificial Sequence
  ENSG00000237468_3 (sequence is synthesized)
ccaaactcttgctatttaacaactgtcaaagactgagaaacagggcttatattttattcaagctacccagaatagggcctctctctaatctatacttccttttcggggaagagatatttg

SEQ ID NO: 1013211 - DNA, 120 bp, Artificial Sequence
  ENSG00000237468_4 (sequence is synthesized)
gcttcaggcagcagtagcgcctgctccctagggaagtggttagaggtacccacttccccatatcagcagaaacaaaacaggcaggagtctctctgcttgaggatctgcctaaatagggaa

SEQ ID NO: 1013212 - DNA, 120 bp, Artificial Sequence
  ENSG00000237468_5 (sequence is synthesized)
gtgagaattggcaaccacttctccctccaccaatgggaatcctagatggagggaactgggtgggagatggcaggggtgggcagagtggcagcatttctgtttcttaaatccataactcca

SEQ ID NO: 1013213 - DNA, 120 bp, Artificial Sequence
  ENSG00000237468_6 (sequence is synthesized)
tcttcagacacttgattccacagccatagggaattgtatatattttgctgctcagctacctctttgcaattaggtcaattataaaattacttggaatttaaccagccaaatgagaaagta

SEQ ID NO: 1013214 - DNA, 120 bp, Artificial Sequence
  ENSG00000237468_7 (sequence is synthesized)
tgcattctacatgttctgtgtaaggttgaatttaactgtcacttcaagttctgttcttttcacatttccatggaaatttacacccttctcctttatttcccacagaactttatttgttca

SEQ ID NO: 1013215 - DNA, 120 bp, Artificial Sequence
  ENSG00000237468_8 (sequence is synthesized)
tcttttaaaattcctataatattctgtcttgtttttattaatacttatgccttgttttttctcctttactagactgtagggtcactcaaagcaaaaactcctcttctaccaaattcattc

SEQ ID NO: 1013216 - DNA, 120 bp, Artificial Sequence
  ENSG00000237468_9 (sequence is synthesized)
taagagcttacatttgttgagcacttgctatgtgcttgaccctcttctaagctatttttctgtattaattcacttaatccttacaaacaccctagggatttgctattataatctctcttt

SEQ ID NO: 1013217 - DNA, 120 bp, Artificial Sequence
  ENSG00000237468_10 (sequence is synthesized)
tataaataggaacataggcaaagagtggctaaattaagttagtaagtgatcaggcatgattcaaactcatggctctagacccatgctctttataaccacattattctgcctctgacacct

SEQ ID NO: 1013218 - DNA, 120 bp, Artificial Sequence
  ENSG00000237468_11 (sequence is synthesized)
tcagtgatcacaaccctatgaagtatgaaactctgcccattttatagcgaagaaaatgagctttagaaaggcaaagcaacttgcccaaagtccaaagcacagggggaatggagtcaaaat

SEQ ID NO: 1013219 - DNA, 120 bp, Artificial Sequence
  ENSG00000237468_12 (sequence is synthesized)
gcataggtgaacactttggtttcagagtgcaggctcctaaactctctgctacatacacactgcctacttcagagttcaaaacatatttacttcagatcattggaaatggtattaaaaatc

SEQ ID NO: 1013220 - DNA, 120 bp, Artificial Sequence
  ENSG00000237468_13 (sequence is synthesized)
acaactgacattcagttgtgtccagtaatattcagtctctacacctgttaaggagaagttggatcctgcagatatgaaacctgctggccctgccacagaaagccccgttattctgggaaa

SEQ ID NO: 1013221 - DNA, 120 bp, Artificial Sequence
  ENSG00000237468_14 (sequence is synthesized)
aattgaatttatagttttaatgacctgtgaaaggaaattctgaatagaggttctttaaaaaatgggggatatggaaataagttattagttgaaaaacaatttccattttgataagctgct

SEQ ID NO: 1013222 - DNA, 120 bp, Artificial Sequence
  ENSG00000237468_15 (sequence is synthesized)
tcaagaagaagcaatgactaactgtaactaaatgcttcatcaggatgcaaacaaacctattttgtacaatgctgcaattatctgtgcagcagatgggtggttctgtttccccttctggac

SEQ ID NO: 1013223 - DNA, 120 bp, Artificial Sequence
  ENSG00000237468_16 (sequence is synthesized)
agagacactcaccctttgttgtatacttgcactgagagctacatgtgtcccactagtttatgtaagaaggggatataaatggggcaactctgaaaggtgcttctctctccagaacttccc

SEQ ID NO: 1013224 - DNA, 120 bp, Artificial Sequence
  ENSG00000237468_17 (sequence is synthesized)
ttatgacccatgaaggcttctgttacaactgcgttgcagtttaacttctccttctccccaatcctgcttcccctacagatgttattgagaatactcactaataaacctcatgcatgcaaa

SEQ ID NO: 1013225 - DNA, 120 bp, Artificial Sequence
  ENSG00000115934_0 (sequence is synthesized)
cccgccatgatcgtgaggcctccccagcgatgtggaactgctggagtgcaataccgtgatctcagctcattgcaaccaccgcctcccgggttcaagtgattcccgtgcctcagcctcttg

SEQ ID NO: 1013226 - DNA, 60 bp, Artificial Sequence
  ENSG00000115934_1 (sequence is synthesized)
tacaggcacgtgagatggtctctatctcctgacttcgtgagccgcctgcctcggcctccc

SEQ ID NO: 1013227 - DNA, 120 bp, Artificial Sequence
  ENSG00000115934_2 (sequence is synthesized)
gggattacaggtgtgagccacagcgcaaggaccataatttattacttttcatgattccttggatcaggaatttgggcaagacacagctggatagttctttggcttcacagatggcggctg

SEQ ID NO: 1013228 - DNA, 120 bp, Artificial Sequence
  ENSG00000115934_3 (sequence is synthesized)
ggcttcacagatggcggctggagtcattgtgtagatgcatgtatctgagagcttggctagggttgagacatccgtgatggcctttagatctcagaaaactctgcccacgtgaactctaag

SEQ ID NO: 1013229 - DNA, 120 bp, Artificial Sequence
  ENSG00000115934_4 (sequence is synthesized)
catttactagtttttgctgaacttccttccagtatgttcactgagtcccaagaagaagcaaaagagagctgctaagtttcttaagcctgtgttcggaagtcccagaacatcaattttatc

SEQ ID NO: 1013230 - DNA, 120 bp, Artificial Sequence
  ENSG00000115934_5 (sequence is synthesized)
tggtcaaaacacatcacaagtccagagcatattcaagaggaggaaaatacagttcatctctgttatgagcagcttgcatgaacaagaatggcagtaataattggtgaccatatttgggga

SEQ ID NO: 1013231 - DNA, 120 bp, Artificial Sequence
  ENSG00000115934_6 (sequence is synthesized)
ctctttaccaaatcagttaaaagaacactatggcaccggccatttgagcccctctgctcccaaaccaccccctgaaagctggatagaaaatggaaaacctatcaggagaacactatgagt

SEQ ID NO: 1013232 - DNA, 120 bp, Artificial Sequence
  ENSG00000115934_7 (sequence is synthesized)
ttggtaataacaaagctacaagatattacagagagagaaaggaggtcactaccaccaacagtgtggtccaggatgtttgctggtgacatcattgtggaacaagagacagcagtggatgat

SEQ ID NO: 1013233 - DNA, 120 bp, Artificial Sequence
  ENSG00000115934_8 (sequence is synthesized)
gaaaacagctagacgaaaatattccagagttgcagagattggtttgatttatatatgagagcattctcctctctttctcttactcacattttggacctcagcacagactcttgaagagac

SEQ ID NO: 1013234 - DNA, 120 bp, Artificial Sequence
  ENSG00000115934_9 (sequence is synthesized)
ttaagggtttccttcctctatttgaaagatgatcagggacacctagtgatataagctgttaaggtgaccttcctaagttgcaccagctgctaatgtccaagggacatttacattgcataa

SEQ ID NO: 1013235 - DNA, 120 bp, Artificial Sequence
  ENSG00000115934_10 (sequence is synthesized)
agctgctaatgtccaagggacatttacattgcataaaaatttactatttgcatattcttacttcttaatttaaaagaaaatttatttatgtatttttatatgtatacctatacatatgaa

SEQ ID NO: 1013236 - DNA, 120 bp, Artificial Sequence
  ENSG00000285973_0 (sequence is synthesized)
agtggcccggtggtggagatgcttccgagacgaaagcacagaaagcaaatgcagaacttccctgcctctccgtccttccctcattttgaacagagacagcagctacctgtgactgccctg

SEQ ID NO: 1013237 - DNA, 120 bp, Artificial Sequence
  ENSG00000285973_1 (sequence is synthesized)
gggtgaatgtgcagcatctggggtaaatttcttcccacgcctgcccgcagcagtcgagacagaagctggcacagggctgcccttcttgtgagccaggcagcaaaaaccaggcgctgaggc

SEQ ID NO: 1013238 - DNA, 120 bp, Artificial Sequence
  ENSG00000285973_2 (sequence is synthesized)
tcagaactgctgactcaagcctccatgaaggaacagaaatccagaaagccgggccagaaatagcatccgtgagcatctattgatagcataaagtccgtgggcagagtcccagttcccacc

SEQ ID NO: 1013239 - DNA, 120 bp, Artificial Sequence
  ENSG00000285973_3 (sequence is synthesized)
ctgagtcctgccaaacagtgctgcaacagtcagcgttctggccacagagagtgaggatgcaggatggctcggcccatttccccaactacgtcagtctggacagatgtctcaggctgtgtt

SEQ ID NO: 1013240 - DNA, 120 bp, Artificial Sequence
  ENSG00000285973_4 (sequence is synthesized)
ggcagaggcactgctggtaccacgtgccaacctcgggacaagctgcctcctcttggaaatgaagcagggacgatgcaccagggaatcatgtcatcaagtcagccgtgtcaacacgcgttt

SEQ ID NO: 1013241 - DNA, 120 bp, Artificial Sequence
  ENSG00000285973_5 (sequence is synthesized)
atggaatggaatggaatagagtatcactgcagcccaccaaaacagctgtctctgtctgcctccttttccccatcactgctgggagttggagtggggggaatgtgaattcaatgcctccta

SEQ ID NO: 1013242 - DNA, 120 bp, Artificial Sequence
  ENSG00000285973_6 (sequence is synthesized)
cttgtcaaacactgagctacattcttcatgtacatttactactcacaataacccccaagagaacccacaggcccagtccaatcatgagaaaagcatcagacaaattccaatagtggggca

SEQ ID NO: 1013243 - DNA, 120 bp, Artificial Sequence
  ENSG00000285973_7 (sequence is synthesized)
tcctactaaatacccaaccagaactccttagaactgtcaaggtcatcagaaacaagacaagtctaagaagaaacagccacagccaagaggcacctacagaaacaaaatggaaatgtggtt

SEQ ID NO: 1013244 - DNA, 120 bp, Artificial Sequence
  ENSG00000285973_8 (sequence is synthesized)
tcctggatgggatcctggaacagaaaaaggacattagggaaaaactaagaaaacgtgaatcaactattgtattagttcattttctgttgcttatagcagaatacctgaaactagataact

SEQ ID NO: 1013245 - DNA, 120 bp, Artificial Sequence
  ENSG00000285973_9 (sequence is synthesized)
tataaagaaaagtagttgttttcttacagttatggagtctgagaagtcaaaggtcaaggggcagcatctggtgagggccttcttgctggtggggactctgcagagtacagaggtggttca

SEQ ID NO: 1013246 - DNA, 120 bp, Artificial Sequence
  ENSG00000285973_10 (sequence is synthesized)
gggtatcctataacgagggggctgagtaagctagctcgggtctttcttcctcttcttataaagccaccagtcccactcccatgatatcccagcaatccattaattcatgaatggattaac

SEQ ID NO: 1013247 - DNA, 120 bp, Artificial Sequence
  ENSG00000285973_11 (sequence is synthesized)
ggcctcacctctcaatactgccagattgggggttaagtttcagcatgaattttggaggcaacaaatactcaaaccacagcaactatagactttagttattataataaagatgtatcaata

SEQ ID NO: 1013248 - DNA, 120 bp, Artificial Sequence
  ENSG00000285973_12 (sequence is synthesized)
tattgataactttttttttttgagatggacctcagggtccatgcacatgctgtttctccccaacaatatctattctcttctgtatcttcagcaacctccggcccagcccacacataaacc

SEQ ID NO: 1013249 - DNA, 120 bp, Artificial Sequence
  ENSG00000285973_13 (sequence is synthesized)
cactcagcctaagctctcagtcgattccctgggaagccatcctcagctacccagactaagtgaggttgtgggtcgcatccatccagggtgctgcacttctcccctagtaactcattgctc

SEQ ID NO: 1013250 - DNA, 120 bp, Artificial Sequence
  ENSG00000285973_14 (sequence is synthesized)
catgtctatctgccagcactggatgctccttgagggcaggacggtgcctgtcttccagacctctgtgtcctgtccctagcacagtgattggcccagagtaatcccaagttcatgttgctg

SEQ ID NO: 1013251 - DNA, 120 bp, Artificial Sequence
  ENSG00000285973_15 (sequence is synthesized)
aatggctcagatgtgtaaatgaatgagattcagaagcaacccacacagagtgggctccagggctaaaggtgagatcacccagtgtgccttctatgacaggttgagagccgtgagcccatc

SEQ ID NO: 1013252 - DNA, 120 bp, Artificial Sequence
  ENSG00000285973_16 (sequence is synthesized)
tgacctcaggaaagaaagacatagagcaaatgggtaccacttgtgtctgctggtgccaggaggcaccagagatgctctctgaccctaacactgcatcagcaaaaggtctgaaggttgaaa

SEQ ID NO: 1013253 - DNA, 120 bp, Artificial Sequence
  ENSG00000285973_17 (sequence is synthesized)
tttttattttagatttcatcaaaaatctactctagcccttggataagttcttttaaaaaaaatgaggtataacttacataccaaaaaatagtaaaattcactctttttaagtatatagtt

SEQ ID NO: 1013254 - DNA, 120 bp, Artificial Sequence
  ENSG00000285973_18 (sequence is synthesized)
ccacaaattttacagaacatttccatcaccccccacaaagatctcttcatgctcatttgtagtcaatacaaatcccagcccccagtgcccactgatctgttttccattccttattgtttt

SEQ ID NO: 1013255 - DNA, 120 bp, Artificial Sequence
  ENSG00000285973_19 (sequence is synthesized)
gcctttcccagaatctcatctagactgaatcatgtagaatgtagtcttttgagtccagtctttctcacttagcctaatgcatttgcgattcatcaatttagttgcatgaatcaatagctt

SEQ ID NO: 1013256 - DNA, 120 bp, Artificial Sequence
  ENSG00000285973_20 (sequence is synthesized)
gttcctttttatgggtgagtaatattccttggcatagatataccacaatttgttgatcctttcaccagtggatagatatctgggttgtttcaaatttggggcaattatgaagaatacatg

SEQ ID NO: 1013257 - DNA, 120 bp, Artificial Sequence
  ENSG00000285973_21 (sequence is synthesized)
catacaagtttttaggtagacatatattttcatcgttcataggtaaatatctaaaaatgggattgctgggtcatattgtggatttatgtttacctttataagaaactgaagggcagaata

SEQ ID NO: 1013258 - DNA, 120 bp, Artificial Sequence
  ENSG00000285973_22 (sequence is synthesized)
gcagcccaccaagtaagggaaggctgaagccagcgggacagcccagcacccactccgcggcagctcacatttcggagactgagcgggaaccaggggacccatcaatgcctccgcgcgtct

SEQ ID NO: 1013259 - DNA, 120 bp, Artificial Sequence
  ENSG00000285973_23 (sequence is synthesized)
caccggccggtgacgtggctcagcgtagttatgctcagtctgccccggacccagtgggcctcagaggcaagagaacaatggaaacttgacctgcgtaaccaaggaatgatgccacgagag

SEQ ID NO: 1013260 - DNA, 120 bp, Artificial Sequence
  ENSG00000285973_24 (sequence is synthesized)
cccagtttggtcagcgcagagtctaatccccggagaccctcagcccaacaacccagcccctttccctagtgaggcagagaggctcatctgcaccccgcctacaaggcaaagtgccgcgct

SEQ ID NO: 1013261 - DNA, 120 bp, Artificial Sequence
  ENSG00000285973_25 (sequence is synthesized)
ggggagcggactggcgaactggctccagagcgaagatgcatcatgttttccaaagggctgacttctctaactcgggtggagggaatggggaggtttctgcccttcccctcctgcgcagga

SEQ ID NO: 1013262 - DNA, 120 bp, Artificial Sequence
  ENSG00000285973_26 (sequence is synthesized)
gccacagccgccacagtctgcagctcagggtagcatttctcaaggggtgtctcctgggcctcctgcccagcaccggggatccggcttcctcctccctgcaagaagctcagctgcttctcc

SEQ ID NO: 1013263 - DNA, 120 bp, Artificial Sequence
  ENSG00000285973_27 (sequence is synthesized)
catcccgtttctcccgcgtctatccagacagcccttggccaggtttccaagtcaccaattcctaggggacagctgtccgcagcagggagtgagaggccaactctgaacagagatgatgct

SEQ ID NO: 1013264 - DNA, 120 bp, Artificial Sequence
  ENSG00000285973_28 (sequence is synthesized)
tgcgtgggctcacacccacacccactcagctcatgtccaacacaccaggctctttgccacaagctctcagaggtcagctgtggctgccttggtgaggtgagggctttcagcttgtattcc

SEQ ID NO: 1013265 - DNA, 120 bp, Artificial Sequence
  ENSG00000285973_29 (sequence is synthesized)
tggaaattcttattatcagacccctcgcctggcttcagcctcgtacagctctccaaagagctgacagctctggaaaagtcagggtgacctgctgaccccacaaagcctcaggagggctac

SEQ ID NO: 1013266 - DNA, 120 bp, Artificial Sequence
  ENSG00000285973_30 (sequence is synthesized)
gatggaggggaaaggaaggcccatcagaagcgtggtgactgcagcaatggtctccctcccaggcagggataggaggcagagacttgaagctctctctccttcccagaacctcacttttct

SEQ ID NO: 1013267 - DNA, 120 bp, Artificial Sequence
  ENSG00000285973_31 (sequence is synthesized)
ccctctcaaagtcacatctgttctccccaaggcctacggcctaatgattaccaatgagagtggggggaggggagtgtgaaaactcctggagaaaagccatttgcactggaaacgtgggat

SEQ ID NO: 1013268 - DNA, 120 bp, Artificial Sequence
  ENSG00000285973_32 (sequence is synthesized)
tgtgtcatcgtttccacagcagccgcaagaagcaggaagaggcagcaggaagtcacccagcatgtttgcaagaacagagcatctgtcaattctgtaataagatgtgccctgggctttctt

SEQ ID NO: 1013269 - DNA, 120 bp, Artificial Sequence
  ENSG00000285973_33 (sequence is synthesized)
tgtcaatacaccaggtctcactgcctcgctgctcccctccaaacccaaagagagaagacaaagccacagatatggcgggcactgcagctgcctgcgcataacacccagaaggcacgctgg

SEQ ID NO: 1013270 - DNA, 120 bp, Artificial Sequence
  ENSG00000285973_34 (sequence is synthesized)
ctggctccaacaggcgatgcctggctggtggcaggaacccatggaagacgtatttccaaaatcaagagtccatccaggacctcaaattctggcccagggctgggcatggtggctcacgcc

SEQ ID NO: 1013271 - DNA, 120 bp, Artificial Sequence
  ENSG00000285972_0 (sequence is synthesized)
cgatgctcccagctgaataaagccctgccttctacaactcagtgtctgagaggttttgtctgcggctcaccctgctacatttcttggttccctgactgggaaacgaggtgactgacggat

SEQ ID NO: 1013272 - DNA, 120 bp, Artificial Sequence
  ENSG00000285972_1 (sequence is synthesized)
tgactgggaaacgaggtgactgacggatggccgaggcagccccttaggcggcttaggcctgccctgtggagcatccgtgaggggaactccggccagcctgagtgacgtgatccaaagagc

SEQ ID NO: 1013273 - DNA, 120 bp, Artificial Sequence
  ENSG00000285972_2 (sequence is synthesized)
agtgacgtgatccaaagagcgctcccgggtaggcaattgccccaatggaacgccttgccagagcagcgtgtagcaggcccccacggaagattaacacagtggctgaacaccaggaaggaa

SEQ ID NO: 1013274 - DNA, 71 bp, Artificial Sequence
  ENSG00000285972_3 (sequence is synthesized)
ggaactggcacttggagtccggacatctacaacttggcccaaccaccgagaccagccaacccttgcaaagt

SEQ ID NO: 1013275 - DNA, 120 bp, Artificial Sequence
  ENSG00000285972_4 (sequence is synthesized)
gactctgaagaagacgacaagccttgttccggtcacacccggaagctgactggttcacgcatggccgaagcatgaggaaactcatcgcgggaataattttccttaaaatttggacttgta

SEQ ID NO: 1013276 - DNA, 120 bp, Artificial Sequence
  ENSG00000285972_5 (sequence is synthesized)
tgatcagtggacaggtagctgtgtaattggacaggtagctgtgtaattggcaccattaagccatctttcttcttactgccaataaaaacaggtgaacttctaggcttcctagtctatgct

SEQ ID NO: 1013277 - DNA, 120 bp, Artificial Sequence
  ENSG00000285972_6 (sequence is synthesized)
ctagtctatgcttcccgtgaaaaatgaagcatagccataggtgattagaaaataatgaatggccccctgaaagaatcatacaatactatagacccaccacttaggcacaagatggctcat

SEQ ID NO: 1013278 - DNA, 120 bp, Artificial Sequence
  ENSG00000285972_7 (sequence is synthesized)
aaaaccggtcaagccttgactgttcttgcccggcaagagactctgatgagaaattttatctatcaaaatatactagctcttgactacttgctagcagctgaaggagaagtttgtaaaaaa

SEQ ID NO: 1013279 - DNA, 120 bp, Artificial Sequence
  ENSG00000285972_8 (sequence is synthesized)
tttaaccttactaattgttgtctacacataaatgattaagggcaagtagttaaaaatatagttaaagatataacaaaactggcacatgtacccatgcaagtgtggcatgggctcaatccg

SEQ ID NO: 1013280 - DNA, 120 bp, Artificial Sequence
  ENSG00000285972_9 (sequence is synthesized)
catgcaagtgtggcatgggctcaatccgggagccatgtttgcaaattggttcccagcaatgaaaaaatttaaaactcttataataagagtaataatagtaatagaaacctgcttactgct

SEQ ID NO: 1013281 - DNA, 120 bp, Artificial Sequence
  ENSG00000285972_10 (sequence is synthesized)
atgataaaaaactttgtcacgaccttagttcaccaaaatgctttagcagaagcatactatataaatcactatcaatctattgcacaaaaagacataagtagcaaaaataagactcagaac

SEQ ID NO: 1013282 - DNA, 86 bp, Artificial Sequence
  ENSG00000285972_11 (sequence is synthesized)
tgcacaaaaagacataagtagcaaaaataagactcagaactcccactaataaaaactgagagtctcaaaggggggaaatgagggaa

SEQ ID NO: 1013283 - DNA, 90 bp, Artificial Sequence
  ENSG00000285972_12 (sequence is synthesized)
tttatactcagtacctcttttaagaaaaagtgtggtgccaggcctgaaaccaggcctgggcctgtctggcctaaacccagtagttaaaaa

SEQ ID NO: 1013284 - DNA, 120 bp, Artificial Sequence
  ENSG00000285971_0 (sequence is synthesized)
gaaagggccttttttccccactctagtttctaacttcccattacacacactccctctgcaaggcaccgcgccaatggagccggttcactctgttctctccttgatgacagctgtcagtct

SEQ ID NO: 1013285 - DNA, 120 bp, Artificial Sequence
  ENSG00000285971_1 (sequence is synthesized)
gtcgccgcctgaacatgcaacatttcaacaaaatccaaagcggaactggaagggcaggggctgaagcacacagcctgatctccttcctggaggtcccagactccttaaccatcacttttc

SEQ ID NO: 1013286 - DNA, 120 bp, Artificial Sequence
  ENSG00000285971_2 (sequence is synthesized)
aacctgcttaaggttagaaccacctcactcttcactaacagagttgaggcagcttctgtctcctcagaacctgggcattcccacacagtgtaattaagcaacattcctggaaatcatcct

SEQ ID NO: 1013287 - DNA, 120 bp, Artificial Sequence
  ENSG00000285971_3 (sequence is synthesized)
aagaagaaagagcccgcaagtccccgtgtaacttcagcacgaacgcggagggtgctaaaccagcacaaaaatgggatgtatttttgagcatcattttgattgccatcaggagcgaagagg

SEQ ID NO: 1013288 - DNA, 120 bp, Artificial Sequence
  ENSG00000285971_4 (sequence is synthesized)
agagtatgtctacaatttcaggatccactgggttgttcctttgtgtttctatgcctggtgaaaactgtggatggacaattgtagcaaccatggcttaaaaatggcaaggtaaccaggaca

SEQ ID NO: 1013289 - DNA, 120 bp, Artificial Sequence
  ENSG00000285971_5 (sequence is synthesized)
gatccctcaggcttgaagatatgagacatgctaccaggcaagcaacttagttctgcaggagtactgggaatctaatgaaaactaagaagtttggaagataattgtattaaggtgatttag

SEQ ID NO: 1013290 - DNA, 120 bp, Artificial Sequence
  ENSG00000285971_6 (sequence is synthesized)
gaactgagtcctatgaagtttggaaaaacaaaaccctgcacattttattcttcatcatcatggttgcacaagcaagatgcatggcatctgatttataagagcatatccaagttgggattt

SEQ ID NO: 1013291 - DNA, 120 bp, Artificial Sequence
  ENSG00000285971_7 (sequence is synthesized)
ttttcctcacatatcaagaagtctgcatataggtgactactggctttgcttcaacaatgctccaatgccaggaccagggtttctgcagatcctcttgacgtcctcctcataattgttacc

SEQ ID NO: 1013292 - DNA, 120 bp, Artificial Sequence
  ENSG00000285971_8 (sequence is synthesized)
ttacaccaggaaatactactgctcagctcacattgaaagcccctgatatcactcagagggtgcagccttgggcatggacagtttccagggattacagtagtattagcatgattttttttt

SEQ ID NO: 1013293 - DNA, 120 bp, Artificial Sequence
  ENSG00000285971_9 (sequence is synthesized)
ttttttggttactttctctgatctttctatttagctgtctacttctgatggtatcacctatagctgttaggctgcactaatagctgactaattgctgtattttcaacaatgccctagggc

SEQ ID NO: 1013294 - DNA, 120 bp, Artificial Sequence
  ENSG00000285971_10 (sequence is synthesized)
acacatttctctgaggtctgatagcatttacaggcacatttttttagttttgctctgaccccttggaggcatttaaaaatctgtctctttctttagttctttctggtaaaatagctggcc

SEQ ID NO: 1013295 - DNA, 120 bp, Artificial Sequence
  ENSG00000285971_11 (sequence is synthesized)
ggagctaccagcttccttttaataactttctacaaaattcttcattgttttttaacagtaaccttagacttgaagagccctacactcaattttaaatgaagtcagtttccttgataaaag

SEQ ID NO: 1013296 - DNA, 120 bp, Artificial Sequence
  ENSG00000285971_12 (sequence is synthesized)
ctacagagctctgttcttgtgaccagagcaaaatctctgagctgctgctcttgagctgggggtgggatggtggtccccttctttttttttttaatttatgaagaacagaaatttatttct

SEQ ID NO: 1013297 - DNA, 120 bp, Artificial Sequence
  ENSG00000285971_13 (sequence is synthesized)
catagttccagaggctggaaagtccaagatcaaggggctggcaagtgtggtgtctgataagggcccagtttcttcctagatggtgacttgttgctttgtcccctggaggagataaatgct

SEQ ID NO: 1013298 - DNA, 120 bp, Artificial Sequence
  ENSG00000285971_14 (sequence is synthesized)
ggaggagataaatgctatgtcctcacaagacagaaaggagagaaagggctaagccaacccctccagtactttcgccactgcacttcagcctgtgcaacaagagcaaaactccatctaaaa

SEQ ID NO: 1013299 - DNA, 120 bp, Artificial Sequence
  ENSG00000285971_15 (sequence is synthesized)
aaaaaaataaaataaaaggactggtggtccacttctttcagagtgacactgctgattgatgaggagtagctgggtgaaggcagcagacacaggtcattccagcttgtctctcacagcttg

SEQ ID NO: 1013300 - DNA, 120 bp, Artificial Sequence
  ENSG00000285971_16 (sequence is synthesized)
gaacctctgtgttatgaggatcccaggatgaagatgattaggacccagtattcttgggagccctgactagaatagaggctctgccctatgagtggggccagatggaggaagaaagcccta

SEQ ID NO: 1013301 - DNA, 120 bp, Artificial Sequence
  ENSG00000285971_17 (sequence is synthesized)
acacttgggttcactcacctgcctaaatttagcctttacgaaatggagctgggggacagtaagaaatcctggcagcctgatcctcctggggaagataacattgtcctagacttggtcctg

SEQ ID NO: 1013302 - DNA, 120 bp, Artificial Sequence
  ENSG00000285971_18 (sequence is synthesized)
tggccacacccatcccatctggactggagtattttgttgcaagttggctagggagggagggggcaggcaggtcctggtcaagtgtcagagactgtgctctaaacaaagtggagtaaattt

SEQ ID NO: 1013303 - DNA, 120 bp, Artificial Sequence
  ENSG00000285971_19 (sequence is synthesized)
tcttggaaaaaaaaaagtttctgtattttctgtatgcccttagcacaatttgcaaagactttaattttttaaaaattaatattttcatcagttattgttgtcttgctaggctgtaggtct

SEQ ID NO: 1013304 - DNA, 120 bp, Artificial Sequence
  ENSG00000285971_20 (sequence is synthesized)
gtggaacttctcacattgcctttctagaagctatgtctttccttgatttttaacattgttgactccattagagactcaacacatctatgtgtgatattagttgcaagtatttttttgcca

SEQ ID NO: 1013305 - DNA, 120 bp, Artificial Sequence
  ENSG00000285971_21 (sequence is synthesized)
gtttgtcatttgtctttttccatcacttgttattttgccatgcaatttaacaataacattatctaatttaatcatttttctcattacttggatttttgaatgttagttggaaaaacattc

SEQ ID NO: 1013306 - DNA, 120 bp, Artificial Sequence
  ENSG00000285970_0 (sequence is synthesized)
cagggatgtctcttagggacggaatgtggaaagctctccatggtcttggtggaaagtgtaatgcctgaagcccaccatagtgcaaagcagctgtgtttcaggagagtagagccctccagg

SEQ ID NO: 1013307 - DNA, 120 bp, Artificial Sequence
  ENSG00000285970_1 (sequence is synthesized)
atgggggcacctgtcttttctccccctacttcattaatgtctagaacaggtgggtcattgtgatcaatgcccctgctgtggtcctcccggaagcctggattctgaaggtcaggggaagga

SEQ ID NO: 1013308 - DNA, 120 bp, Artificial Sequence
  ENSG00000285970_2 (sequence is synthesized)
gaccccgcgacgcttcatgtcccaccctccctccagctgggaaccaccgcctgacccctgggccaaaggctcacacttatctgaagcgccaacatgcaggtggggtgaggacttacggcc

SEQ ID NO: 1013309 - DNA, 120 bp, Artificial Sequence
  ENSG00000285970_3 (sequence is synthesized)
ttcattgtagagggacttacagctcggacggccaggatgtcctctacagaaagccatttcaggatgtgaaagagcacatcttcggggagactcaagatggtcaggtttcggggcctcctc

SEQ ID NO: 1013310 - DNA, 120 bp, Artificial Sequence
  ENSG00000285970_4 (sequence is synthesized)
attcttcgctttgtaggataacagaaacacttggcacacctacagtggaccactgaaggaaaaaaagacagaagccttgataagatgaaaaattattctatatacacacccttgaaggga

SEQ ID NO: 1013311 - DNA, 120 bp, Artificial Sequence
  ENSG00000285970_5 (sequence is synthesized)
aaaaaaaaggataaaagttacatctgaagatgatctaatggttactattccctgtgccacaaaagatggaactatgcttcttgtcccaaacaaagattatgtaaaggagtggcattgcac

SEQ ID NO: 1013312 - DNA, 120 bp, Artificial Sequence
  ENSG00000285970_6 (sequence is synthesized)
aaattacagaagagatcattcattttcaaatattcaacaaatatttatggcaaatagcgcatgtcatgtaacttggctattgggaaactttctgatccagagcccacatgacaggcagga

SEQ ID NO: 1013313 - DNA, 120 bp, Artificial Sequence
  ENSG00000285970_7 (sequence is synthesized)
aggggaaaaagctgccgaagctgaggacggttttccttctatttcactctcaggaaaactcctggggcctttgctggatagctttgctttttgcacacgtgaccaaggtgcataatgttc

SEQ ID NO: 1013314 - DNA, 120 bp, Artificial Sequence
  ENSG00000285977_0 (sequence is synthesized)
aggacagcagcagatgtgtcagtgttcccgagaggggagcctggggcaggaaaggatcgtgcattggtctatgtgaacgctcaggacagcctgtgccaggacaggagccttcgtaggaac

SEQ ID NO: 1013315 - DNA, 79 bp, Artificial Sequence
  ENSG00000285977_1 (sequence is synthesized)
tcaggacagcctgtgccaggacaggagccttcgtaggaacatttactattaggatcaaaaacaggctgtggttaatgga

SEQ ID NO: 1013316 - DNA, 120 bp, Artificial Sequence
  ENSG00000285977_2 (sequence is synthesized)
agtgctgggattacagtactctaaacggttcccaaagaaatcactctgcactcctcgaacgtctcctcaaaatggcattctacgtatgcggataggaggaagaaatataaaatggaatat

SEQ ID NO: 1013317 - DNA, 120 bp, Artificial Sequence
  ENSG00000285977_3 (sequence is synthesized)
caagatgaaagcaacatcctaactctaaggacaataaacaagtagaaatatgacatatttttctctatttcaaacaaaaaattgtcggtaactgagtgattcatatgaacctaagtaggc

SEQ ID NO: 1013318 - DNA, 120 bp, Artificial Sequence
  ENSG00000285977_4 (sequence is synthesized)
cctgtactaaacataacccagcaagtaaaagaaaaaaacattctgttgtacatacaactcacaataaagctctctgaggcacaggtatcaatttatttactgttcactcaaactccaaaa

SEQ ID NO: 1013319 - DNA, 120 bp, Artificial Sequence
  ENSG00000285977_5 (sequence is synthesized)
tgaaatatgtttctaattgttctaacttaatatttccgctgtcgatcctgttataatattgaagatggtaagaatgttgttttatatttattaatataaaatgatcataatagtaccata

SEQ ID NO: 1013320 - DNA, 120 bp, Artificial Sequence
  ENSG00000285977_6 (sequence is synthesized)
agaccataagagataatacattattgaaagacatacctgtcagtcaaattaagacaggttttctatatatgaaagaactagagtaaataaaaatattgagagaaagaaaatggaaacatt

SEQ ID NO: 1013321 - DNA, 120 bp, Artificial Sequence
  ENSG00000285977_7 (sequence is synthesized)
tttaagagagcatatttttaacaagcattttttaatggaaaggtaaagtcataattttaacgtagagtcacacacattggcatttgaataaaatggattgtctaattcttttttctgtaa

SEQ ID NO: 1013322 - DNA, 120 bp, Artificial Sequence
  ENSG00000285974_0 (sequence is synthesized)
tttttctttcttttttttttttaagacaggctggagtacagtggttcaatcatggcttactgcagcccctaccttcccaggctcaggggggccctctcacctcagcctcctcagtagctg

SEQ ID NO: 1013323 - DNA, 120 bp, Artificial Sequence
  ENSG00000285974_1 (sequence is synthesized)
aggggggccctctcacctcagcctcctcagtagctggcactacaagctcaggctactatcctggttaatttttgtattttttgtaaagaagggatttcaccatgttatccaggctggtct

SEQ ID NO: 1013324 - DNA, 84 bp, Artificial Sequence
  ENSG00000285974_2 (sequence is synthesized)
atccgtctgcctcggcctcctgaagtgccagcctggtcaacatagcaaaaccccatttttactaaaaatacaaaaattagccag

SEQ ID NO: 1013325 - DNA, 120 bp, Artificial Sequence
  ENSG00000285974_3 (sequence is synthesized)
cactctccagcctaggcgaaagagcaagattctgtctcaaagaataaacaaacaaccaaccaattgcacaaacagatatatttttaggcagctatttgtgtgggaaaaggtcttcagttt

SEQ ID NO: 1013326 - DNA, 120 bp, Artificial Sequence
  ENSG00000285974_4 (sequence is synthesized)
gtgattgacaataggtttggtgtgagctaatagtctgaagtagctgctaactcaatcttaggttttccttcatgaagcacagggacagtttataaagtaacaggttcctttaatggtcac

SEQ ID NO: 1013327 - DNA, 120 bp, Artificial Sequence
  ENSG00000285974_5 (sequence is synthesized)
ttcctttaatggtcacctatatctgaagtattattctgttagaaacgacaggttgggccaaagaggatggcaagatgcctgtaaatcatatcttacaggctgggcgcggtggctcatgcc

SEQ ID NO: 1013328 - DNA, 88 bp, Artificial Sequence
  ENSG00000285979_0 (sequence is synthesized)
tttttttttttttttttttcgtgaaacagggtttcaccatgttgcccaggaggctaaggctgcagtgacccatgatcgcaccactgcg

SEQ ID NO: 1013329 - DNA, 120 bp, Artificial Sequence
  ENSG00000285979_1 (sequence is synthesized)
tcaataaataaattaattaattagtaataaaactaatatcataattctggcattcccttgatccccaaataaagaaaataagccaagttagatggacacacatagtaataaatttctgta

SEQ ID NO: 1013330 - DNA, 120 bp, Artificial Sequence
  ENSG00000285979_2 (sequence is synthesized)
agtttaaaaagactagactaaaacatagactgctttatgcatcttttttcaaattagcattttcttctgtaggtcttcattctctgcatggctttgctcaggctgttccctctgccagga

SEQ ID NO: 1013331 - DNA, 120 bp, Artificial Sequence
  ENSG00000285979_3 (sequence is synthesized)
atgcccttgctttcttttcacccgatgcaaactgctgctccaaccgcccagaatcagactaaagaccatctcctttatgaagctttccaagacctcctagagtagttaatatgtatttcc

SEQ ID NO: 1013332 - DNA, 120 bp, Artificial Sequence
  ENSG00000285979_4 (sequence is synthesized)
ttcctttgtgttcctgctatgatcattcataactctactacagcccttattctttgtgttttatcatctgtgactgttccaacagctctttgtctccacagtgcttattattattagcac

SEQ ID NO: 1013333 - DNA, 120 bp, Artificial Sequence
  ENSG00000285979_5 (sequence is synthesized)
agtgtctggcatatattaggtattcaaatacttactgaataaaccaaccacgaggagctgaagaatctgagcagggaggaatgaactcacatgaatattcctaggtactgtgcaatgtaa

SEQ ID NO: 1013334 - DNA, 120 bp, Artificial Sequence
  ENSG00000285979_6 (sequence is synthesized)
gttatagagattggtagccatcaagcaagtatttgctgaagtgtcagtatcatgggaattctattcaaacgccatacaatttgtgcagtaagaaacaaaggactaaaaattaaatctctt

SEQ ID NO: 1013335 - DNA, 120 bp, Artificial Sequence
  ENSG00000285979_7 (sequence is synthesized)
tactatattatataattgatgtcatctttcaaaaataactgctactttccgttaatttcaactgattaaaaatggtcacttatcctgcgaaagcagtacttgatggagacagcgtttttg

SEQ ID NO: 1013336 - DNA, 120 bp, Artificial Sequence
  ENSG00000285979_8 (sequence is synthesized)
tttgaagagtccaatggctgtttattctgcaagaaagaggtgataagtacctgtaacttactgacctgctggaagtagacaaagaagctagaaaattagattgtgttgacttctaattcc

SEQ ID NO: 1013337 - DNA, 120 bp, Artificial Sequence
  ENSG00000285979_9 (sequence is synthesized)
tattgtctaggtaaattttcacaagtctcttctttttcccttttgtttgctagggtaattaaaaacaaatcaaaagacaaacagcccagggatatcagggatacgggctctaactgtgaa

SEQ ID NO: 1013338 - DNA, 120 bp, Artificial Sequence
  ENSG00000285979_10 (sequence is synthesized)
gagccctgtaggaatgcagaggacttacattaggaatgcttactttgtccttactgtgttccactttagaaagagtaaacaaatgctgtcagctttcctttactcacgttttccaaagtg

SEQ ID NO: 1013339 - DNA, 120 bp, Artificial Sequence
  ENSG00000285979_11 (sequence is synthesized)
actcaagtttaattatcaaactaaacattacattattttttaaaggatttattcaatttcttcaaatagggaattcatggaaaactaaaaccatttcaaaattcactttgtccaccaaac

SEQ ID NO: 1013340 - DNA, 120 bp, Artificial Sequence
  ENSG00000285979_12 (sequence is synthesized)
ttagagtccaaattggcacaaataaagaacgtggttttcaaatctgcctgaccgtcaagaaaacaaagttcttatatttcaagccaaagtaactggtaacactgaactactgggtttaca

SEQ ID NO: 1013341 - DNA, 120 bp, Artificial Sequence
  ENSG00000285979_13 (sequence is synthesized)
ttggagaccgtcccatttaatttccagggtggtgggacaaaatgggctcagttcttacatagcacactacacatgttttaaaatacaaaacttacattgttgctccccaaataattgcta

SEQ ID NO: 1013342 - DNA, 120 bp, Artificial Sequence
  ENSG00000285979_14 (sequence is synthesized)
aaagtaatgagatctggtttcctatggaattgaattatgtgatggcaaactacttgagtgtttacatcactggccaccatatccttctaattctaaaattaattagattgtacatgttaa

SEQ ID NO: 1013343 - DNA, 120 bp, Artificial Sequence
  ENSG00000285979_15 (sequence is synthesized)
aacacaccagaatcaggtttctgtgttctgttgttttaaggcttcactttcagtagcaaaagcaataggtcaatccatttccttttgtgagtaaatatagattattgctttccaacattt

SEQ ID NO: 1013344 - DNA, 120 bp, Artificial Sequence
  ENSG00000285979_16 (sequence is synthesized)
tttactctgatgttcaagtcacactgtacttcaaaatgcaggacagcaactaagaggaatttgccatctggctaactcatctatatttcaaataaagacttatttctggccagaaggcac

SEQ ID NO: 1013345 - DNA, 120 bp, Artificial Sequence
  ENSG00000285979_17 (sequence is synthesized)
ttctaccaagatacagttatttagatttttaaaaatttagctgacttttcctatatcataaaatttatttagagaacaacaactactaacagagagcccgctgttagtatttattactag

SEQ ID NO: 1013346 - DNA, 120 bp, Artificial Sequence
  ENSG00000285979_18 (sequence is synthesized)
gcaaagtgaagtcaatcttctaacaccaaagcttaattaacatattccggtagcaaaggagactaaaagaatctaaaaactaaaccacagaaaaagaaatttaatccatattttaaatgt

SEQ ID NO: 1013347 - DNA, 120 bp, Artificial Sequence
  ENSG00000285979_19 (sequence is synthesized)
ttatcataaggagcaatttgcaataacctttcaggcatctatgaaacacatacaataaaaaattcagctttgcaataatctttcaggcatctatgaaacacatacaataagaaattcagc

SEQ ID NO: 1013348 - DNA, 86 bp, Artificial Sequence
  ENSG00000285979_20 (sequence is synthesized)
gtctggcctggtgcactagctcacacctgcaatctgagcactttgggaggccaaggcaggattgtttgagcccaggagttcaagac

SEQ ID NO: 1013349 - DNA, 120 bp, Artificial Sequence
  ENSG00000285979_21 (sequence is synthesized)
ggattgtttgagcccaggagttcaagacctgcctgggcaagatggtgagaccccaactctattaaaaacaaacaaacaaacaaacagacaaacaggctaggcacagtggctcatgcctgc

SEQ ID NO: 1013350 - DNA, 120 bp, Artificial Sequence
  ENSG00000285979_22 (sequence is synthesized)
cagacaaacaggctaggcacagtggctcatgcctgcagtcccaaagctgtgggaggccaagctgggagcatcacttaaggccaggaatttaagaccagcctgggcaacacagtgagactc

SEQ ID NO: 1013351 - DNA, 120 bp, Artificial Sequence
  ENSG00000285979_23 (sequence is synthesized)
ccaggtgtgatggtgcactacttaggaggctgaagtgggaggaaggcttcagccaaggagttccaggctacagtgagctatgagggccattgcactacagcctgggcaacagcacaagac

SEQ ID NO: 1013352 - DNA, 120 bp, Artificial Sequence
  ENSG00000285979_24 (sequence is synthesized)
cgaccttgcctggcgagggggaaaaaaaagaagttaaaaaaaaagtattgatttatttatctttccatagcacaagggcagggtctcaaatgtgcatttatcttgaattcacctatacac

SEQ ID NO: 1013353 - DNA, 120 bp, Artificial Sequence
  ENSG00000285979_25 (sequence is synthesized)
actagaagaaagataactaatttaaatatcggttcccttagctgatcctcattcacatgcacctctctgaatataaatacttccctcactatgcatgaatgattgtattcattgtatttt

SEQ ID NO: 1013354 - DNA, 120 bp, Artificial Sequence
  ENSG00000285979_26 (sequence is synthesized)
ttacatattgtgactcctaaatacaaaccaacaacttcatctggggctcacaggaagaaaaacagcagttttttccaaagccgaaataaaacttgcctgaggatatagagaaaaaaaaaa

SEQ ID NO: 1013355 - DNA, 120 bp, Artificial Sequence
  ENSG00000249515_0 (sequence is synthesized)
ccccgcaaaactgcagcacaaaagaatttcagatccacccactcagaagtctgaagccagtgtggctcgccctcactgatctcagggtctgcatttgcaatgtaccaagacagacctgat

SEQ ID NO: 1013356 - DNA, 120 bp, Artificial Sequence
  ENSG00000249515_1 (sequence is synthesized)
ggtacactcggttgttcccttagaccacctttgttagtcttcgcctcaaagaaaaacatttccactgaaaaccacataatctggtttaacagattaaatatataaactatgatgtgctgg

SEQ ID NO: 1013357 - DNA, 120 bp, Artificial Sequence
  ENSG00000249513_0 (sequence is synthesized)
attcagattccattttatctttctagtctaccttccaacacctccactgtgaatgtctgagcacattagctcagagtgagcatatttgtgtcatggggaaggatatctgtcctttcaagg

SEQ ID NO: 1013358 - DNA, 120 bp, Artificial Sequence
  ENSG00000249513_1 (sequence is synthesized)
tttgatgacttttcagcccagtttggctaagtctcaggattttacagtgacattcccagtgtcagcagtggcttcatcaacagttacgtaaaatgtgaagatgccaccaggaagtcctgt

SEQ ID NO: 1013359 - DNA, 120 bp, Artificial Sequence
  ENSG00000249513_2 (sequence is synthesized)
ttcacactttagaaaacgaatgattcccagaatatcacactataagcattggacaacctagagattttgtgaaaaatgaacactcttaaggaagaaggattttttgcatctgtttcaggt

SEQ ID NO: 1013360 - DNA, 120 bp, Artificial Sequence
  ENSG00000249519_0 (sequence is synthesized)
agactcctgcaaacagcagctggcttagtggaggctgccagacttcggggattctgagatctctcagcgaagatgctgatacaacttctgacactgttggtgatgagtggtgcataacag

SEQ ID NO: 1013361 - DNA, 120 bp, Artificial Sequence
  ENSG00000249519_1 (sequence is synthesized)
ccgtttcagctctgaggctatcaaatagtgaaagagaatcttctacatacaaatcccaggacaccagaacagctcttaacagccctcactttcctgagtaagctgaaggtggctaactaa

SEQ ID NO: 1013362 - DNA, 120 bp, Artificial Sequence
  ENSG00000249519_2 (sequence is synthesized)
aacaaggtttcaatttgatacaatgtggggaatttcagtttaattctaatttatactaatttctcataattgtcttgatcctttacgtagagatcggtttggataaaggaatcatagcta

SEQ ID NO: 1013363 - DNA, 120 bp, Artificial Sequence
  ENSG00000249519_3 (sequence is synthesized)
tgagaaggcagttagttactcagtgaatccaaatggcaaattctctgatgagaaaggggatgtcctcagggaggtctaatcatatgttttcttaaaccaaactcttttccttttcattag

SEQ ID NO: 1013364 - DNA, 120 bp, Artificial Sequence
  ENSG00000241720_0 (sequence is synthesized)
gggcccttgttcactagaagcaaggagtcccctgacccccttcttcaaaacatactcttcagtctttgtctttattcccgccttggtcctcctttgttcagtccagcaaggtccacagca

SEQ ID NO: 1013365 - DNA, 120 bp, Artificial Sequence
  ENSG00000241720_1 (sequence is synthesized)
ccacagcaaagtgctgcccgaaaacagggtcttgaggacatgaacaaagaaggtctgctggagcagaggaagtgaaattgaccagatgaacagggaccctgggatgaatctgctggcagt

SEQ ID NO: 1013366 - DNA, 120 bp, Artificial Sequence
  ENSG00000241720_2 (sequence is synthesized)
ggatataaggggcaaagccaggatctgaacccagacggcccggctccggagtccatgctcctgagcaccacacagtgctgctcccttggaaattcagaaaggctggaccccgtgctccag

SEQ ID NO: 1013367 - DNA, 120 bp, Artificial Sequence
  ENSG00000241720_3 (sequence is synthesized)
gctggacaccagtaacataagtgctattcattgaaaagagcaaagcaagagcgctgaccccttacggacaggatgaaacaaaacaagctctgcaagtctgcctcctgctcagcatacagg

SEQ ID NO: 1013368 - DNA, 120 bp, Artificial Sequence
  ENSG00000241720_4 (sequence is synthesized)
cttgttgccccactgggccatcttgttgttgatgggcatcttgcagaactgatcagacttgaatagccatggagctcctaaaaagaatgggacctttcacttgacctcccttctctccct

SEQ ID NO: 1013369 - DNA, 120 bp, Artificial Sequence
  ENSG00000241720_5 (sequence is synthesized)
tgcctactgcccctgagcgagtgcttcagctacagtctgggagccgaagatgcctgtgtttgatgcctccagcaccctgtctctgcatcttgaatccagccacgtgaccatctcttgccc

SEQ ID NO: 1013370 - DNA, 120 bp, Artificial Sequence
  ENSG00000241728_0 (sequence is synthesized)
ttaggtactggctaaccggggcggtggagatgcctgtctacaccagtcctgtccccaggactccccttctgtggtctggaggttctaggctggcctgggctcttaaagggaggattttgc

SEQ ID NO: 1013371 - DNA, 120 bp, Artificial Sequence
  ENSG00000241728_1 (sequence is synthesized)
aggctgtcctccctaataaaagattttcccaaggttgatctggaggtgacgtttcccaaggcatggttgtgacagtcttcctgaaagcaagggccgtttctccacagaatgaggaggtct

SEQ ID NO: 1013372 - DNA, 120 bp, Artificial Sequence
  ENSG00000241728_2 (sequence is synthesized)
ctgctcagcaggcaggcagcagcctcccgcacccatgggagagagttttgttttcttggccgggctgggcaggccgctgttctcccaagctcggggccatgccgtgccaccgtcaccaga

SEQ ID NO: 1013373 - DNA, 120 bp, Artificial Sequence; identical to SEQ ID NO: 475768
  ENSG00000241728_3 (sequence is synthesized)

SEQ ID NO: 1013374 - DNA, 120 bp, Artificial Sequence; identical to SEQ ID NO: 475769
  ENSG00000241728_4 (sequence is synthesized)

SEQ ID NO: 1013375 - DNA, 120 bp, Artificial Sequence
  ENSG00000241728_5 (sequence is synthesized)
gaggtgcaggagcacgccgagtgaccgcaggacctgaacgccgctccagcctccacggggaccccagcgtcttccccagcccccgggagctggagggtggctgccatggccgcagccccg

SEQ ID NO: 1013376 - DNA, 120 bp, Artificial Sequence
  ENSG00000241728_6 (sequence is synthesized)
gccccacacaaaagcctccccgaatgaggaggtcttcacggatggctttgccgattccagcccttggtccttggatagatttctgttgggcaagggagacttcgagaatgctggcaccca

SEQ ID NO: 1013377 - DNA, 120 bp, Artificial Sequence
  ENSG00000276791_0 (sequence is synthesized)
atgccccgcgccgcgtcccttcccccggcgcagccccgccccgtgccgccccgcagccgccgccattttaagtgatctggaagcgggcggtatcgaggggcgtgcggccgccatcccgac

SEQ ID NO: 1013378 - DNA, 120 bp, Artificial Sequence
  ENSG00000276791_1 (sequence is synthesized)
ggcgggcatggcctttggaggcggtggcgccgtcttgggactggcagaggggaggtccccgtgttggtgcggtccggcgggctccaagctcgggcacaccgagctcggggccgtcttgtc

SEQ ID NO: 1013379 - DNA, 120 bp, Artificial Sequence
  ENSG00000276791_2 (sequence is synthesized)
gcggcgtagtcgtggccgccatcttgggcaggctccgcatttggggtcttctggccgccgtgctggggacagtcacccccgctccctgacccgggctggatgcgaggactgtcgccgctc

SEQ ID NO: 1013380 - DNA, 120 bp, Artificial Sequence
  ENSG00000276791_3 (sequence is synthesized)
agaggggcttatgacctgtgaagagccctgggggctgctgttgggcttagggatggcccgggcgaactccttgggctagaagaggaggcacgggagcggttggcgaccgctcttcgcagg

SEQ ID NO: 1013381 - DNA, 120 bp, Artificial Sequence
  ENSG00000276791_4 (sequence is synthesized)
aggagggaaggggcagctccttgccccaggagccctgggcgcctgtccgccttcctgcttggctgcatttcggctctgaaaaggcctagagacttgattctcctggctggccgctctttc

SEQ ID NO: 1013382 - DNA, 120 bp, Artificial Sequence
  ENSG00000276791_5 (sequence is synthesized)
caccaaggccctgtttcctgaatgctggacactatcctgcatcgccccaagttacatttacatgagagtgagggccccccacttgacctctcccttgcagagacaccccaggctgggtcg

SEQ ID NO: 1013383 - DNA, 120 bp, Artificial Sequence
  ENSG00000276791_6 (sequence is synthesized)
tgctgggcgggtgtcggaggcggcgttggagagatgagccagagggtggccctggacgccaaaccgccctgcagtcctccgagctgcgctttgagggctgttgagagaggggtggaaggt

SEQ ID NO: 1013384 - DNA, 120 bp, Artificial Sequence
  ENSG00000276791_7 (sequence is synthesized)
ggaggtgcgatttttgcctcggcatctagagaggcgaaggagcagccctgggctccgctgctgactgtggccatgggccgttaacctcatcaaagcccagtttcctcctgttgtagatgg

SEQ ID NO: 1013385 - DNA, 120 bp, Artificial Sequence
  ENSG00000276791_8 (sequence is synthesized)
gagaggaacagtttttgaactgcgtagaacctcggcaagtcttagcgctgcatttgtgttttctaagctgtaattctagttattgctacttttgacttgtggaatgtggctcctccctgg

SEQ ID NO: 1013386 - DNA, 120 bp, Artificial Sequence
  ENSG00000276791_9 (sequence is synthesized)
ggagtcctccaaagtcccttccctcgtgtgacttccttcactgcggttcactgcagcccctacccccgctcccagggtcctcagcatcgcagtccctgcagaacctgtctcttcttcatg

SEQ ID NO: 1013387 - DNA, 120 bp, Artificial Sequence
  ENSG00000276791_10 (sequence is synthesized)
ctcttcttcatgacgtgagtcatgaggcattggacaggtaattgctgggaagagctcttggccaggctaaaatttctttctcagtcgcagtgtctggctgggggcggtggctcacgcctg

SEQ ID NO: 1013388 - DNA, 89 bp, Artificial Sequence
  ENSG00000276791_11 (sequence is synthesized)
ttcaagaccagcttggccaacaacaaaattaggtgggcacggtggcgcacgcctgtggtcccagctgctcgagaggctgagccaggagg

SEQ ID NO: 1013389 - DNA, 120 bp, Artificial Sequence
  ENSG00000276791_12 (sequence is synthesized)
cgcctgtggtcccagctgctcgagaggctgagccaggaggattgcttgaacccggaggcgcaggttgcagtgcgccgagatcgcgccactgcacatcgcctggcgacagagtgagactct

SEQ ID NO: 1013390 - DNA, 120 bp, Artificial Sequence
  ENSG00000276791_13 (sequence is synthesized)
aattaatcccagtgtctttacctacatagaactggcaactttaaatcctgtgcttctgtggagggagagcgaaggaagagtgtggacagtgggggccaggaagttctcaggtagcccagc

SEQ ID NO: 1013391 - DNA, 120 bp, Artificial Sequence
  ENSG00000276791_14 (sequence is synthesized)
aggccacgcagaagtcaaggggtgtgtaggtacaggaggggccgtctccacagggagacgcctggatccatactccatccaggcttcatctgcagagaccaggggtggacacctcgtttg

SEQ ID NO: 1013392 - DNA, 120 bp, Artificial Sequence
  ENSG00000276791_15 (sequence is synthesized)
tgggggccgtcacagctgatgccccagctcaggatgtccaccagaaaccaggagtcaccatcctcttaagggtggtgcctgtcctccagagagcatatcactgggttcaaaccccagctc

SEQ ID NO: 1013393 - DNA, 120 bp, Artificial Sequence
  ENSG00000276791_16 (sequence is synthesized)
ctaccggcaaagcccggggcctccacctgggtgttcccatccatgaagcggggatacacagtgtggagcccttgggaggttggggagtgtgcctgccctcaccgcgcatcagctcataaa

SEQ ID NO: 1013394 - DNA, 120 bp, Artificial Sequence
  ENSG00000276791_17 (sequence is synthesized)
tacaacaacagttgccttcacgtgctgatgctcagtgagcagtggcgcagttccccagctggcgcagtcagtggtgtctgtctgctgtcagaggtcacctggacccagcacgagtccttg

SEQ ID NO: 1013395 - DNA, 120 bp, Artificial Sequence
  ENSG00000276791_18 (sequence is synthesized)
cccctagagggagtctccacacaccccacgacgctgtcctccctgtgggataactacacgaggagatggcaggccatcgtatcattcagtgcagcgatacctcctgtggtgggaatgggg

SEQ ID NO: 1013396 - DNA, 120 bp, Artificial Sequence
  ENSG00000276791_19 (sequence is synthesized)
tcaggagggattttcccggagcagggccactcgctggcctagcctggggtctccacttttggaagtgtggtcttgtggggtccaggttctccttaagggcctttacaaggaatgggagcg

SEQ ID NO: 1013397 - DNA, 120 bp, Artificial Sequence
  ENSG00000276791_20 (sequence is synthesized)
tccagtggtggagaggagctggctggctgcgcctgctacccacacgggaatgtcctcctgggctcctctcttcaactggccttcacctctccgcctcacagatttcactcggagaatccg

SEQ ID NO: 1013398 - DNA, 120 bp, Artificial Sequence
  ENSG00000276791_21 (sequence is synthesized)
gcctcacagatttcactcggagaatccgccttgcagcctgtcttctgctccctcccatctaccttttgtttttttttgagacggagtcttaccctgtctcccaggctggagtgcaatggc

SEQ ID NO: 1013399 - DNA, 74 bp, Artificial Sequence
  ENSG00000276791_22 (sequence is synthesized)
tacaggcatgcaccaccatgcctggctggctagtctcgaacccctgagcttgtgatccacctgcctcagcctcc

SEQ ID NO: 1013400 - DNA, 83 bp, Artificial Sequence
  ENSG00000276791_23 (sequence is synthesized)
agcgtctgtctaccttttattcccatcactccccaccccagacagggtgttgtgttatgatggggaaggcccttgtgtctttt

SEQ ID NO: 1013401 - DNA, 120 bp, Artificial Sequence
  ENSG00000276791_24 (sequence is synthesized)
agggtgttgtgttatgatggggaaggcccttgtgtcttttgggtgtgttagacctgggaaacaatctgtcttctcctttcacgtgccccaaagcaggactccaatcttccccgggccttt

SEQ ID NO: 1013402 - DNA, 120 bp, Artificial Sequence
  ENSG00000276791_25 (sequence is synthesized)
ctgattgggagtcttaagaccctccccagagagggccccaccctgttccctgggaaaggaatgctgacaaaaccctacaggacggtttggagacagggttagttcaactcgtgtgtgtcc

SEQ ID NO: 1013403 - DNA, 120 bp, Artificial Sequence
  ENSG00000276791_26 (sequence is synthesized)
ccagagggtgacaccacagggatgaatgggagctccaggcccctccccagcacctcaacctgcacattgcttcatctggatcctttgtaacatcctttataataaaccagtgaaggtgtt

SEQ ID NO: 1013404 - DNA, 120 bp, Artificial Sequence
  ENSG00000276790_0 (sequence is synthesized)
tctgaggaagatgaaagtctcccgtgcacccagctctggctgaggacggaatgacctggggagaacttgggcacttcaggttttgtgcccagactcctcctgttgtccctgcccacctct

SEQ ID NO: 1013405 - DNA, 120 bp, Artificial Sequence
  ENSG00000276790_1 (sequence is synthesized)
cctaccccttcctcctctggaagcagtctttctcttgctcaaaaaagccccaatcctatctctgattctagctgcccacaaagccccagggagaaaaccttcccaaaaaggcagtggata

SEQ ID NO: 1013406 - DNA, 120 bp, Artificial Sequence
  ENSG00000276790_2 (sequence is synthesized)
cagatgctgaagaagacagcagggaccggagcccagcaaactggatgagagcagcaaggccttcatgcatcttcaggctccatcagcagagggagagaatgcattagacgggagtttcct

SEQ ID NO: 1013407 - DNA, 120 bp, Artificial Sequence
  ENSG00000276790_3 (sequence is synthesized)
gactcctattttctaatgtggcagtcctaatgagaagagggtttgaagcgctaagatgtgctgacagtcctaatggtttgttatgagtttccttagaaaaattaaacactgaaaaacaaa

SEQ ID NO: 1013408 - DNA, 75 bp, Artificial Sequence
  ENSG00000234021_0 (sequence is synthesized)
agaacttcaggctgagaatttcagaagagaaagagtctctcagcatttctcactggacatgcctgaagaagcatg

SEQ ID NO: 1013409 - DNA, 120 bp, Artificial Sequence
  ENSG00000234021_1 (sequence is synthesized)
tctctcagcatttctcactggacatgcctgaagaagcatgtagtcttaattgctactgacatcatcccataaccacaatggaaaaggactggagatattgtctgagagctcttgttatgt

SEQ ID NO: 1013410 - DNA, 120 bp, Artificial Sequence
  ENSG00000234021_2 (sequence is synthesized)
acaggcatttcttgaaaacagtatggaatcatctgataacactgaggtgatatgaatactcctttaaccggcaatgtggctcttaggaactgatgggcatgcacatcaggatatacacaa

SEQ ID NO: 1013411 - DNA, 120 bp, Artificial Sequence
  ENSG00000234021_3 (sequence is synthesized)
aagatttcccagcagcactgtttgtaatagccttgagctagaaacaataaatgtccaccaagagtaaaatgtataaaatatacaatggaataccagacatcaatgaaaatgaataaacta

SEQ ID NO: 1013412 - DNA, 120 bp, Artificial Sequence
  ENSG00000241180_0 (sequence is synthesized)
gaacagcagggacctgacggcagcccccgcacccctccctgggctgaagttcaggctgtctcatcccttgccaggagctcagggctgagctaggttggcaggggatgggttgagggtctg

SEQ ID NO: 1013413 - DNA, 120 bp, Artificial Sequence
  ENSG00000241180_1 (sequence is synthesized)
cgcaggcatgcagggcactgtcgtgagcacaccagtggggacagacgtccaggcaggagggagcagccagacccccatcccgccagggtcaccagctgggcatggtggcgcatgcctgta

SEQ ID NO: 1013414 - DNA, 120 bp, Artificial Sequence
  ENSG00000279687_0 (sequence is synthesized)
ggactaaaaccgtgtgtgaaacctgaacggccccaaaatcatctgttcccttctcatctctcccagaagtgtccgtgacagtcgctgtcatggaagtcacctccccagcaccacaaggga

SEQ ID NO: 1013415 - DNA, 120 bp, Artificial Sequence
  ENSG00000279687_1 (sequence is synthesized)
tcagaactgtgtcccaggatcgtggcccagacccacagggcaggggcgtgcacttttgagggttctgaagacgactcaacagggtgcctgacctgctggtaaggactcaggagacctcac

SEQ ID NO: 1013416 - DNA, 120 bp, Artificial Sequence
  ENSG00000279687_2 (sequence is synthesized)
ctgtcctcgtcacactcatggaaggggactccagatccctggcgtagctggtctgggaactggggagggatgggcagtgcccggtatagggtgcaacctccagtgcccacattagcacgt

SEQ ID NO: 1013417 - DNA, 120 bp, Artificial Sequence
  ENSG00000286729_0 (sequence is synthesized)
cccgcccccaagggcccttggttcccgcggtgccctcgggccccggaggcggcgtcttctcccctccggtttgggatgaattttctcccgtttccccaggagacagtgactgccttggga

SEQ ID NO: 1013418 - DNA, 120 bp, Artificial Sequence
  ENSG00000286729_1 (sequence is synthesized)
gacatatcgatcccaagcttctcgggactccactttcctccatattggccgttccctggcggggttaaccttcctccccgcccccagcgtgtttcagggctggcagggaaggttcccgcc

SEQ ID NO: 1013419 - DNA, 120 bp, Artificial Sequence
  ENSG00000286729_2 (sequence is synthesized)
gcgctgagtctagggcacagggtcatggaaggcgggaaaccaggaaactccactccttacttcacagtcctgccagctgcctcacagtgcgaggcaaaaatggaggaacactgaagaaat

SEQ ID NO: 1013420 - DNA, 120 bp, Artificial Sequence
  ENSG00000286729_3 (sequence is synthesized)
gaaagtcagaagaacttccaggaatcgcgcacttcgccctcaaacattggtgggcactagaataagcctttcctgccccagcccctcagctgaatctctaagggtgaggcccagattttt

SEQ ID NO: 1013421 - DNA, 120 bp, Artificial Sequence
  ENSG00000286729_4 (sequence is synthesized)
ctccccttgggacctaaaccggagattcttcatctgcaaccaacagagaatgctctagagggctgttcgcctatgctgattcgctgaactgaacagggagcagaaaccccagggcacact

SEQ ID NO: 1013422 - DNA, 120 bp, Artificial Sequence
  ENSG00000286729_5 (sequence is synthesized)
ccatgtaagaccagatgctggaacgatcagacacaggacccaagccctttggagcctccatttatcgactatcaaaggaggatgcgttgtgaagaagcacgaacgggagggagtgtgaac

SEQ ID NO: 1013423 - DNA, 120 bp, Artificial Sequence
  ENSG00000286729_6 (sequence is synthesized)
tctgcctgttagctgattcactcaaccaccctctaccgctcccacccctgggcttggtgctgggacagcgatgacggggagagggtcctgcctcacaggactacaacagccaaagggctg

SEQ ID NO: 1013424 - DNA, 120 bp, Artificial Sequence
  ENSG00000286729_7 (sequence is synthesized)
tgggtgcaagggggacagggcaggtgttctgcctctttaggggaggccttgaaggggaaggtggagccctgaagcatgagtctgcagaagtagcaatcattcaataaatacatgctgatt

SEQ ID NO: 1013425 - DNA, 120 bp, Artificial Sequence
  ENSG00000286728_0 (sequence is synthesized)
gagcccgggttggagggcgagaccgtaggcgagaatggccgcgcgggctgggagacccgggccggtatggagtgagtggagccgcccgagtgcactggatggatggatgaaggcactctc

SEQ ID NO: 1013426 - DNA, 120 bp, Artificial Sequence
  ENSG00000286728_1 (sequence is synthesized)
ccaggcttccaactcttgaacacctgagcgaccatctggagcccacacatcctcaacagatcacactgctgcttggccactgctctccaccctcttctgaggctgctgcttataccacag

SEQ ID NO: 1013427 - DNA, 120 bp, Artificial Sequence
  ENSG00000286728_2 (sequence is synthesized)
tgttgatggcctcctctctgctccccagagcagatgctcccaccaacactgctgctcttgggcatcagataggttctgcgagcttcaccattgtcagaaggcccagatggctccgggagg

SEQ ID NO: 1013428 - DNA, 120 bp, Artificial Sequence
  ENSG00000286728_3 (sequence is synthesized)
tcccatggatgctcagcccaaaccaggagttttctcacactccatgcaagtgagttggcgcagatagacgtgcggaaattggaatctaactccacataaaccagttatgtatacgggaag

SEQ ID NO: 1013429 - DNA, 120 bp, Artificial Sequence
  ENSG00000286728_4 (sequence is synthesized)
tccttattttgcatagtaatgcaagaccataaaaatgactgtgtaagctgaaaccctgcaaagcaatcttaatcgaagggaataattacagttgttctgtgacctttaaacatttttgtc

SEQ ID NO: 1013430 - DNA, 120 bp, Artificial Sequence
  ENSG00000286728_5 (sequence is synthesized)
aaaacattaaacattctcttactgttgtttataaatgcatggggaaatgaaaaattaacaaaactaatatttatttattacactgtaatttaaaacattagaaacattgagaattaaggt

SEQ ID NO: 1013431 - DNA, 120 bp, Artificial Sequence
  ENSG00000286728_6 (sequence is synthesized)
gttttatttctttgtaaagaacatatcaaaagtagtttgcacagttcttgcctttctccccttactgtatagcttatgatacagctggagcaacttttctatgccttggtgaattgtcgt

SEQ ID NO: 1013432 - DNA, 120 bp, Artificial Sequence
  ENSG00000286728_7 (sequence is synthesized)
actttgttgtaagtgtagtctagttctaagtcaggtcctaatgttttatcctttgctcttgcaatgttacaaaatatctataagaattccttgaaggtgaagttttttgccagtgccact

SEQ ID NO: 1013433 - DNA, 120 bp, Artificial Sequence
  ENSG00000286728_8 (sequence is synthesized)
tccactggcacatcttcattttcttggaatctggatgcagatttcccagctgcatgcttacatgtgctagcagcttcatcactagcttgacatcaatcaattcatgctaaattctggaat

SEQ ID NO: 1013434 - DNA, 120 bp, Artificial Sequence
  ENSG00000286728_9 (sequence is synthesized)
gaggaaacaagcctttactggcagtaaaatattcttcttcagtatccttgtaattaccattttctttcaatgtggcaactaagatcaatgctttggccaggatgcaagccaaactacttc

SEQ ID NO: 1013435 - DNA, 120 bp, Artificial Sequence
  ENSG00000286728_10 (sequence is synthesized)
ggattttgaaatattacagtcttcaatccaaagtagaaaactctccaagcataagcagctttctggtcctattgcaatttaaactaagagatgaagcaacgttaccttgcttttaataca

SEQ ID NO: 1013436 - DNA, 120 bp, Artificial Sequence
  ENSG00000286728_11 (sequence is synthesized)
tttttccagtgcagtttgttccatagctccatgcaggccatggtgcatccagtctttgctctgctcttgccaatttcacatcttcaatctaatcacatccagtttactgccggcattatc

SEQ ID NO: 1013437 - DNA, 120 bp, Artificial Sequence
  ENSG00000286728_12 (sequence is synthesized)
actttttgtttctttgttgcatttttatttttgttagcttaccctctatccagtgatccattttttgtaaaattttcatcacatggatttatcactggaagacaaggaggcaacacaact

SEQ ID NO: 1013438 - DNA, 120 bp, Artificial Sequence
  ENSG00000286728_13 (sequence is synthesized)
tcacattttgctgtctgggcatgaactgagtaacagatatgcaatgactaatcaaggacaggctttgaaagaagtgatgtgattggttcatcatgatgtgcatctgttgtttatatcatg

SEQ ID NO: 1013439 - DNA, 120 bp, Artificial Sequence
  ENSG00000286728_14 (sequence is synthesized)
atttgcggactggcaagcaggcagtgaagtttgtactttatgcaattatagttaatatatactgtggtgactgaaatttgaactagtttttgggaacgggtattatttcgctaaactgaa

SEQ ID NO: 1013440 - DNA, 120 bp, Artificial Sequence
  ENSG00000286728_15 (sequence is synthesized)
acttgtgcacatcagtgccataaaaagcaaggactgcttattaatgtgtaccaaccaaatacttttgggcacattcacagcacagcacttcctcctccttgtggttggacggttccacgt

SEQ ID NO: 1013441 - DNA, 120 bp, Artificial Sequence
  ENSG00000286728_16 (sequence is synthesized)
gaccagtctagccaatggattgtgagcagaagttacatgtgtcagttccgtgccaaaccatttgatggacagtcagtcgtgtcctagcccctgaggatatcggaggaggtggctgctctg

SEQ ID NO: 1013442 - DNA, 120 bp, Artificial Sequence
  ENSG00000286728_17 (sequence is synthesized)
ttagcctaagtctctgagcaacaaaggtgagcagaggccccctgctgagatatgatggacatgtagcataagcaagaagtaaacctttgttttaagccactgagatcttggggttatttg

SEQ ID NO: 1013443 - DNA, 120 bp, Artificial Sequence
  ENSG00000286728_18 (sequence is synthesized)
tttctgtagcatagcaactcgttatgattgatataaaatatcatcaggaggtaatctaggaaaaggaggatagggagctgggcagaatttagaactcagaaattggcagctgatagtaaa

SEQ ID NO: 1013444 - DNA, 120 bp, Artificial Sequence
  ENSG00000286728_19 (sequence is synthesized)
agggctccaaatttgtaggggtaggaggagaggaagaatcaggggcatgtacttaaaaaatctttatatgataaaaaaaaaattagcacagacacagaaaataaatgtatagcttaataa

SEQ ID NO: 1013445 - DNA, 120 bp, Artificial Sequence
  ENSG00000286728_20 (sequence is synthesized)
attattaaaaaatgaaggttatccatttatggattaatagattaatggactatcatgggagtgggactcgtggtttataagaagaggaagagagacctgagctagcactcagcccccttg

SEQ ID NO: 1013446 - DNA, 120 bp, Artificial Sequence
  ENSG00000286728_21 (sequence is synthesized)
ccatgcaatgctctgtaccagtttaggactctgcagaaagtgcctaccatcaagaatgtctctcgccagacgtggtaacttgaccttgaacttctcagcctccataactgtaagaaataa

SEQ ID NO: 1013447 - DNA, 120 bp, Artificial Sequence
  ENSG00000286727_0 (sequence is synthesized)
agtgctggcgcgtgtcgggagaggagccgagggcatggccggcagctgggagcctcggcccgcgtcctgcagggtcctgacgcaggaaccgtgtgctctccacacaaacattgggaagga

SEQ ID NO: 1013448 - DNA, 120 bp, Artificial Sequence
  ENSG00000286727_1 (sequence is synthesized)
aagcagaaacctgagctctgtgaaggccgaggaagaatgaggtgctgcagtcgcaggcatgtggggcccagccaggtgcaggcagaggtggggaggagcgctgcccagaaccgaggctcg

SEQ ID NO: 1013449 - DNA, 120 bp, Artificial Sequence
  ENSG00000286727_2 (sequence is synthesized)
gaaactcaccatgtgcgttctgattgaagcaaccagtcctgtagaaggaaaatcagcaatgaaggcatgcttgagaatctccaaatgcaataaatgcaagaagaaaataagataaaaatt

SEQ ID NO: 1013450 - DNA, 120 bp, Artificial Sequence
  ENSG00000286727_3 (sequence is synthesized)
atgagaaatgaaatacctaagtaaaaggcaaaatattgaagaaaaaaagattttgatgaatgtctttaacttttgagatttaaaaaatacctacactctagccaagaaaatgagtttact

SEQ ID NO: 1013451 - DNA, 120 bp, Artificial Sequence
  ENSG00000286727_4 (sequence is synthesized)
tataaagaaataaaaatgagaatggctttttggccttctcctgtcaatatgaaactaggtgtatcagtaatcgatgcctctgctggctgccttacaaacaaccccaacacagcacctcaa

SEQ ID NO: 1013452 - DNA, 120 bp, Artificial Sequence
  ENSG00000286727_5 (sequence is synthesized)
tcacgatcattcacttaacttacaatgtgggagttgaagaagcactgccagctgctttttatttaaagtcactcaatgaaaccgcggccagactttacagaggtctgctggtcatctgga

SEQ ID NO: 1013453 - DNA, 120 bp, Artificial Sequence
  ENSG00000286727_6 (sequence is synthesized)
aggctgaagcgtccttcatgcacctacctgtgacccaggcaggtaaactcaaacagctgagggtccctgggcctgccccccacttcttaatctttatctgtctatctgtttctttatctt

SEQ ID NO: 1013454 - DNA, 120 bp, Artificial Sequence
  ENSG00000286727_7 (sequence is synthesized)
tctctctctctctcactttgccacatgacagcttcgtggaagccagcaggaggcaccccctgccagtattgcgaaggcacccgtgtccgtgtccagaagggagtcttcaggagctccacg

SEQ ID NO: 1013455 - DNA, 120 bp, Artificial Sequence
  ENSG00000286727_8 (sequence is synthesized)
gggttttctacccaagctcggaagtgatgctgcattcacctgtgcacctgtcacaggggtcagtccaggcaggaccacctctccatagggggagagtcacagcacgctggacatgttgta

SEQ ID NO: 1013456 - DNA, 120 bp, Artificial Sequence
  ENSG00000286727_9 (sequence is synthesized)
gacacacaataggtagagttacggcctctttgagggagcagaggcttgagtcaagaaagccatattcaccattttgtggttgaacaaagaagggggggcagccccctcccacccaaaatt

SEQ ID NO: 1013457 - DNA, 120 bp, Artificial Sequence
  ENSG00000286727_10 (sequence is synthesized)
gacatccagactaatgatgcccctggctcaggtggtctgagaggctgagttcttggtacctcagcagttggagcaccagtattctttttttcaaaattgtagttaattgaaagtgttgaa

SEQ ID NO: 1013458 - DNA, 120 bp, Artificial Sequence
  ENSG00000286727_11 (sequence is synthesized)
gtgttgaaaatgttgaatgtttgtaaccataacttttgcaactttgaaaagaaatatacatatttttaaagaagaattctataaaaggtaatttgaaaaataagttattaaaatactgat

SEQ ID NO: 1013459 - DNA, 120 bp, Artificial Sequence
  ENSG00000286727_12 (sequence is synthesized)
tgttgacatcatcaagaactttttagattaagtgaatatgcaacagtaataataactgcttgtgtttaatattcagatactattataaagaaacatttttattttgctcaaatttacatg

SEQ ID NO: 1013460 - DNA, 120 bp, Artificial Sequence
  ENSG00000286727_13 (sequence is synthesized)
aatatatacttttttaagtacataaaattttaatgttttagcactttcttttattctcagctggatattctagtttggataataaattacacagttactgctgtgacggggcattagccc

SEQ ID NO: 1013461 - DNA, 120 bp, Artificial Sequence
  ENSG00000286725_0 (sequence is synthesized)
gattccaacggaattaacgtccattgaaaacttactgtgctcaaggcacagaacggggtagttttatacacattctcccatttggatttttcaaagacaacatctaatcatccccagaga

SEQ ID NO: 1013462 - DNA, 120 bp, Artificial Sequence
  ENSG00000286725_1 (sequence is synthesized)
tgagaagacaggatgatgaagtgccctgggggccagagtccagacaagtattttggcacctccaaggactcgcagaacacagagaggaaaagagagaccctgttatctttccgcaggggt

SEQ ID NO: 1013463 - DNA, 120 bp, Artificial Sequence
  ENSG00000286725_2 (sequence is synthesized)
ggccgttcaaactctcagagatggaagttaagatttcctttggtataagtggcagtttgactggctgcaaggagagcctcagtttgtttaatttggagtaaaattttatgagttaatctc

SEQ ID NO: 1013464 - DNA, 120 bp, Artificial Sequence
  ENSG00000286724_0 (sequence is synthesized)
gaggaggaaggaaaagggggcggcccgggagagccgctgcgaaatcagcaacgggcgggaaccaggttgcctccctgagtcccttctctccccggccggctgccaaccacagccaaggcc

SEQ ID NO: 1013465 - DNA, 120 bp, Artificial Sequence
  ENSG00000286724_1 (sequence is synthesized)
agagaaacaggcccttctgccgcggccacctgggcgccttggacccgccctccggactcgcccccgcccctgccgcggagtggaacgtttggaaccctgaggggcacagctcctctagca

SEQ ID NO: 1013466 - DNA, 120 bp, Artificial Sequence
  ENSG00000286724_2 (sequence is synthesized)
attccgatgtgaaaagaagatggatggagaagcactgattcagccatggctgacatgtcggagttggaatggacagtgcccggacctcacagtctcagagaactggagaagagtaaagct

SEQ ID NO: 1013467 - DNA, 120 bp, Artificial Sequence
  ENSG00000286724_3 (sequence is synthesized)
gaagagggcatcatctggttacaaatgacaagtccagggctccagtgctttggggatataaattcatcccaggatgaacaaatcatgcaaagttgtgtaaaaaccattttcaagccaggc

SEQ ID NO: 1013468 - DNA, 70 bp, Artificial Sequence
  ENSG00000286724_4 (sequence is synthesized)
gagatttgcgcctgtgaataggcaccgcattccagcctgggcaacacagtgagacccaggctctaaaaca

SEQ ID NO: 1013469 - DNA, 120 bp, Artificial Sequence
  ENSG00000286724_5 (sequence is synthesized)
tccagcctgggcaacacagtgagacccaggctctaaaacaacaacagcaacaacaagaaaaccatttttaatgcttcaggactaaatattggggaagtggttaagaacacgagttctaga

SEQ ID NO: 1013470 - DNA, 120 bp, Artificial Sequence
  ENSG00000286724_6 (sequence is synthesized)
atctcaccacctccactttccagctgtgtgaatttggaaattacccaaactgtccaagccaaaaataagcactttctggatcttggtactgtttctttctgggtaacctagaaagtcact

SEQ ID NO: 1013471 - DNA, 120 bp, Artificial Sequence
  ENSG00000286724_7 (sequence is synthesized)
atgtatgcgaaggtgcttcgtcaaccgcaaagacctacaggagtgtccagttgtgttgctgctgctgttgttaatctttagtaccagtactatgtatgaagtagtactaaagaatctgtc

SEQ ID NO: 1013472 - DNA, 120 bp, Artificial Sequence
  ENSG00000286724_8 (sequence is synthesized)
tttagtaccagtactatgtagtagtactaaagaatctgtctttagtaccagtactatgtagtagtactaaagaatctgtctttagtaccagtactatgtagtagtgctaaagaatctgtc

SEQ ID NO: 1013473 - DNA, 120 bp, Artificial Sequence
  ENSG00000286724_9 (sequence is synthesized)
tttagtaccagtactatgtagtagtactaaagaatctgtctttagtaccagtactatgtagtagtactaaagaatctgtcttagtatacacagtactggtactaaaggcactatgaagaa

SEQ ID NO: 1013474 - DNA, 120 bp, Artificial Sequence
  ENSG00000286724_10 (sequence is synthesized)
ccactgcactccagcctggacaacacagcgagactctgtctcagaaaaataaataaataaataaataagatactatgaagagacactgggattcttcaatgaagagcaaggcaaggacag

SEQ ID NO: 1013475 - DNA, 120 bp, Artificial Sequence
  ENSG00000286724_11 (sequence is synthesized)
caacgataacttgggggatttgccagtcggcaagagccacttctagagcttttatccattttgaaatcaagagattactggctttgttataactttaaaagcctttgaaattgcctcaca

SEQ ID NO: 1013476 - DNA, 120 bp, Artificial Sequence
  ENSG00000286724_12 (sequence is synthesized)
ttacaaatgacaagtccagggctccagaactcaggccatgtagagaggccacatgggaactgaggttcctagtcctcagcttccactgagctcccagccaacagccagcaataacttgcc

SEQ ID NO: 1013477 - DNA, 120 bp, Artificial Sequence
  ENSG00000286724_13 (sequence is synthesized)
agatgtgtgcacaggccatcctggaagcagaggatccagccctcagccaagatgccccagttgattccatgtgaactaggaatgagccctcctgctgagctctgcccaaattacagatct

SEQ ID NO: 1013478 - DNA, 120 bp, Artificial Sequence
  ENSG00000286724_14 (sequence is synthesized)
gtgagcaaactaaatgacagttgtattaagctacacagaaatagataactggaataccacccatgtctttctttccaaacttagttaactgagtctgagctaaagagaattcacactgta

SEQ ID NO: 1013479 - DNA, 120 bp, Artificial Sequence
  ENSG00000286724_15 (sequence is synthesized)
tatcttatattgaatacccactatatctggggcatgattgctaataatcctcacaatagccctacaataggaaacgatcatcctcatttcacagatggagagtttaatgcttcttcggct

SEQ ID NO: 1013480 - DNA, 120 bp, Artificial Sequence
  ENSG00000286724_16 (sequence is synthesized)
tactgccaaggtcaaaagcaacaataagcgacgtggggctcagtctgttctcgtgggctacaatgcatgcttctggtttccaggttgttcttgctctcccttattttacatttatccttc

SEQ ID NO: 1013481 - DNA, 120 bp, Artificial Sequence
  ENSG00000286724_17 (sequence is synthesized)
cttcccaactgcctgtccgatagatgtcgagtcccaacatcagatgtgaagatgagagctttatagagactgcttaaccagctcccacagttgtattaggacaaatccctgtagcaaatc

SEQ ID NO: 1013482 - DNA, 120 bp, Artificial Sequence
  ENSG00000286724_18 (sequence is synthesized)
tgtgtgtgtgtatgtgtgtgtgtgtgcgcgcgcacgcgcgtgcacgcaccttagtggttctcctgtgattgaatcctgacttacacagtttgagatagaaaccttctgaagcaattagat

SEQ ID NO: 1013483 - DNA, 120 bp, Artificial Sequence
  ENSG00000286724_19 (sequence is synthesized)
agaaaccttctgaagcaattagattaaatggtctataactgtgctgtccaacatggtagccattagctacatgtggctatttaaatttaaattaattaaagttaaacataattagaattt

SEQ ID NO: 1013484 - DNA, 120 bp, Artificial Sequence
  ENSG00000286724_20 (sequence is synthesized)
agtaccccagtcaagtttcaagtgctcaatactgtggtcacatgtggctggtggccactgttttgggcagcacagatatagagcacttccgttattgcaaaaaaatgttctatgagcact

SEQ ID NO: 1013485 - DNA, 120 bp, Artificial Sequence
  ENSG00000286724_21 (sequence is synthesized)
ggtctatagtgataattactagtatttactgagttctcaccatgtgtcagatgcagattccaagtttgctctggagagcacgatgcggcaggcaaacggggaaagagagagagtgatggg

SEQ ID NO: 1013486 - DNA, 120 bp, Artificial Sequence
  ENSG00000286724_22 (sequence is synthesized)
ggcgcgaagaagacgccagcccaccccagccgccggggagatcgcccaggccgcgctcagccccgcccctggctctgcccccgccgcggagcggaaccctccaagtcgcggcctgaggag

SEQ ID NO: 1013487 - DNA, 73 bp, Artificial Sequence
  ENSG00000286724_23 (sequence is synthesized)
acccctgacctcaggtgatccaccctccttgaggtgggagatttttaatgaccaggcctggaggtggcacaca

SEQ ID NO: 1013488 - DNA, 120 bp, Artificial Sequence
  ENSG00000286724_24 (sequence is synthesized)
gtgggagatttttaatgaccaggcctggaggtggcacacatcacttatacccacatccattggccagcactcagttacacggccacttctaactacaagggaggttgggaaatgtagcct

SEQ ID NO: 1013489 - DNA, 120 bp, Artificial Sequence
  ENSG00000286724_25 (sequence is synthesized)
agctgtgtgctgaggaagaaaaagtaaaagctttggtgccagccagtctctgccacatcagatttaatttgagcgctgtgaagtaattaatgcccattaaactaagggtgggacaagatt

SEQ ID NO: 1013490 - DNA, 120 bp, Artificial Sequence
  ENSG00000286724_26 (sequence is synthesized)
aatgctaaaatcactctccccagccaccattttctctcttgttctttgtcatgatattgacaaggtcaaaagtcaggcagtcagcatgaacccgaggaggagaagtccttgccactttga

SEQ ID NO: 1013491 - DNA, 120 bp, Artificial Sequence
  ENSG00000286724_27 (sequence is synthesized)
ggctgaatatgaacagccccttctttatgactcaccctatcagctttgctcctagcgaatgttcatatcgtggttctccgggacccttgaaagtgggactcctatgtgaggaactagttc

SEQ ID NO: 1013492 - DNA, 120 bp, Artificial Sequence
  ENSG00000286724_28 (sequence is synthesized)
tataaacaactacatgctagtaaaaaaccattaagagggttggaattaggcatagtcctgctgcatagaaatcctacttagttggaaaaattgtatttttaagttgcctctgttttgaag

SEQ ID NO: 1013493 - DNA, 120 bp, Artificial Sequence
  ENSG00000286724_29 (sequence is synthesized)
ccacgttaacccttaaccttcagaaaatccttagccagcctttatacattggtagctcctgttctaataatgtcttctcctcctattttctttggcttgtcatgagctttgaaagtttga

SEQ ID NO: 1013494 - DNA, 120 bp, Artificial Sequence
  ENSG00000286724_30 (sequence is synthesized)
tctgagatccctcacttttaataatctgtaactctgatttggtaatctcctacatatgaataaaatgtctgtgttcatttatttctaatgaataaatgaacatgcctgctgagccaagcc

SEQ ID NO: 1013495 - DNA, 120 bp, Artificial Sequence
  ENSG00000286724_31 (sequence is synthesized)
ttaaatgtgattaaggagactgacttgggttcagatcctggctctgccttgagtaagtttctaacattcctctgcttgtatttccttatctgtaaaatgggagtgatttctttgaatgaa

SEQ ID NO: 1013496 - DNA, 120 bp, Artificial Sequence
  ENSG00000286724_32 (sequence is synthesized)
attatattacatttatcaagcattttatcacagtttcaacaataaggtgtaattattattaattcagactatatgattctgtgcccttggataaagtttaccattatataataaactact

SEQ ID NO: 1013497 - DNA, 120 bp, Artificial Sequence
  ENSG00000286724_33 (sequence is synthesized)
agactcagacttgtttgacttgagagcccatacctctttcactaagccataccatctccattcactctatgctgtctggccacctgagaggctgtctgtaagtctatctccttattaacc

SEQ ID NO: 1013498 - DNA, 120 bp, Artificial Sequence
  ENSG00000286724_34 (sequence is synthesized)
catcattcctgctacttccatgataatcggcaaggctgaatgatagctctcagttctatggggtctttccaggagaagggccaaagaggagtggttgatcacaaagtcatcggcacaaaa

SEQ ID NO: 1013499 - DNA, 120 bp, Artificial Sequence
  ENSG00000286724_35 (sequence is synthesized)
agatggtggccaagctacagtcctgcatggcacatgagccagatgatcaagtaatgaaagctatgctaagaaatgtgggctttatcttgtggagaaggagatgcagtagaggctttttaa

SEQ ID NO: 1013500 - DNA, 120 bp, Artificial Sequence
  ENSG00000286724_36 (sequence is synthesized)
tttatcttgtggagaaggagatgcagtagaggctttttaaggtacatttcagaacaattattatttttatatttattatatattatttatatatataaaaccacaaattatatgctacat

SEQ ID NO: 1013501 - DNA, 120 bp, Artificial Sequence
  ENSG00000286724_37 (sequence is synthesized)
acgtttatatatatatacatatgtatatacaacacataaaatttaccatcttaaccttttttttttccaagatggagtctcattctgttgccctggctggagtgcagtgacacgatctcg

SEQ ID NO: 1013502 - DNA, 120 bp, Artificial Sequence
  ENSG00000286723_0 (sequence is synthesized)
gttgactcatgcatactcaagaaaccctgtgaagcagccttgaaaagagatttttctggccaaggtttggaactagaattcttgggccgtcaacatccagcacagaatatgacgacatag

SEQ ID NO: 1013503 - DNA, 120 bp, Artificial Sequence
  ENSG00000286723_1 (sequence is synthesized)
agagagccggtgccctgatctggtctcacaccatgagaggccttctgtgtatacattttgggtacctctgttgatatgttgaaactcagtctaccactgtagctctagcaaaaagcttcc

SEQ ID NO: 1013504 - DNA, 120 bp, Artificial Sequence
  ENSG00000286723_2 (sequence is synthesized)
cattggcccacagggcctctagttgtgcactctgtatacgtggttcaccatgaaagacagaactggtggagaggaccatggacgctggaagcagtctcaaaaccctttgaagacagaatt

SEQ ID NO: 1013505 - DNA, 120 bp, Artificial Sequence
  ENSG00000286723_3 (sequence is synthesized)
taaactccttgtactttggggaggaatgtggccagagagaggaccatagtggagcccttgaaagcacaggctccagggcaaagtgttcttttgctcaattatatgggcattcttcttatg

SEQ ID NO: 1013506 - DNA, 120 bp, Artificial Sequence
  ENSG00000286723_4 (sequence is synthesized)
ggtgtagttatttgcttattgctatgtaatgatttggatttaataatgctatattgaaagtgcaatggcctacagaactgagggatcacgttttagcttaaattcaatagaaaaaaatga

SEQ ID NO: 1013507 - DNA, 120 bp, Artificial Sequence
  ENSG00000286723_5 (sequence is synthesized)
agaaaaaaatgactcttttataaaaaaaagtatttaaatttgtaaattgtcatccctatccactaagggatattaaatgtattaaatgctgggaaatatatatgcacatatatatttata

SEQ ID NO: 1013508 - DNA, 120 bp, Artificial Sequence
  ENSG00000286722_0 (sequence is synthesized)
gagagagaaggtcacattgcatactgcttattgacatctctggaagagaaaagtttgcttccaattctctggttgaagattttgtgttttgagtaactccccgggagacgctgatgctac

SEQ ID NO: 1013509 - DNA, 120 bp, Artificial Sequence
  ENSG00000286722_1 (sequence is synthesized)
cagtctgaagaccacactttggaaaccactgctctaacactttctccaagccagtaaagctgtctgaacagggctaagaaaatccttcacatgaaaacagctgaggagcagaggctccag

SEQ ID NO: 1013510 - DNA, 120 bp, Artificial Sequence
  ENSG00000286722_2 (sequence is synthesized)
gagaagttttccagtgattgatggaacgtaaccttgaaagtctacctcgtcagttcttgagattggggttcttcaggcttcatcccggcttatttccctgctggaaatcagagatagaaa

SEQ ID NO: 1013511 - DNA, 120 bp, Artificial Sequence
  ENSG00000286722_3 (sequence is synthesized)
caaatgaagcatcaggttgaaaacagaagtgcaaaacagtcacaggaaacacaacccatacatcacaccagcagccggaggaaagcccctgcccaccagagatgaccaggcaacaagccc

SEQ ID NO: 1013512 - DNA, 120 bp, Artificial Sequence
  ENSG00000286722_4 (sequence is synthesized)
tggccaggcaactctcacacctttcccagcttcgtggataattaagaaacagtggtgacctagtacctaggaactaatcagaacgtagagtaataactgtttttccaaccacggatcttg

SEQ ID NO: 1013513 - DNA, 120 bp, Artificial Sequence
  ENSG00000286722_5 (sequence is synthesized)
gtaggagcttctcagaggtgatccttgtcacccgtcagaaatggttgcctctcattatcaagaaacagaaggagaaacaaaacgaccagtgaactcaccatccactcaggcatgtgaaaa

SEQ ID NO: 1013514 - DNA, 120 bp, Artificial Sequence
  ENSG00000286722_6 (sequence is synthesized)
gctgaggtgccctcattaccgtcccacttctccatagtgcaggcttgggtaagatatgtcctgaagcaaaagggaaagctggtttggaaatactggggttatctgagtgccccaaagcag

SEQ ID NO: 1013515 - DNA, 120 bp, Artificial Sequence
  ENSG00000286722_7 (sequence is synthesized)
acccaaccctagtgagattcagaagttcacagtggctagcagaagctgcatcccttttcacagcagcctccgattcaaatcaagagcattagtcaactgcctgacaaccccttactggcc

SEQ ID NO: 1013516 - DNA, 120 bp, Artificial Sequence
  ENSG00000286722_8 (sequence is synthesized)
ggcttcaaagccttctgtgtctgatttcaaaatcagagctgatgcaaagtgctgcacccaggcactgtgcttctcacagggcactcactgttttaatgctacccaaacactctacccgca

SEQ ID NO: 1013517 - DNA, 120 bp, Artificial Sequence
  ENSG00000286722_9 (sequence is synthesized)
cctccccagtggggactttctgcagcaatagttggacttccttctttccctgtgtgtgaggcacttgtgaattctctcccacccttcaggacacgtcactggaggtgcggataccaagat

SEQ ID NO: 1013518 - DNA, 120 bp, Artificial Sequence
  ENSG00000286722_10 (sequence is synthesized)
gcactcccatttctcaagagttgcttgatttggatcagtaaacaggcgtttccttgaaatcaagagctcctagggctttcaagtttaaacagctatgcagaagctccccatctgctcaca

SEQ ID NO: 1013519 - DNA, 120 bp, Artificial Sequence
  ENSG00000286722_11 (sequence is synthesized)
ccaggggtctggcaccaaactctcgcatatctcaagttagagtcttattgcatgggaggttcggatggagcctaggaagatctttttcaaaatcagaatttcttagcagctctaagaaag

SEQ ID NO: 1013520 - DNA, 120 bp, Artificial Sequence
  ENSG00000286722_12 (sequence is synthesized)
ttctgggacgacagctccctctgctggctccctgtgctacatacacgaaggcctcagggcccgcagctacagacacacaggtgctgattgcaaagtgacttcactgaggctagtcagaag

SEQ ID NO: 1013521 - DNA, 120 bp, Artificial Sequence
  ENSG00000286722_13 (sequence is synthesized)
ccaccacagtgtaggtttagaggacagccagggtttccaaccaagactagtgctgcctcaaagtccctaaccaatgctggattttacacacagatctggtttcaggaagaaacaggatgc

SEQ ID NO: 1013522 - DNA, 120 bp, Artificial Sequence
  ENSG00000286722_14 (sequence is synthesized)
cagtgcagtagccctgtacactatcaccttaaaggacctccgaagttgtttctgctttatctctccataccaactccctccttgctgcacacttcagaattttggaaataagacataact

SEQ ID NO: 1013523 - DNA, 120 bp, Artificial Sequence
  ENSG00000286722_15 (sequence is synthesized)
agaaaaaaggtaagctagcctatctcacctgcttagttcattcctagagtatattatccaataagagtaccacaggtttcaggcacaaaggaagcctaacaagatatgcctgctttggtc

SEQ ID NO: 1013524 - DNA, 120 bp, Artificial Sequence
  ENSG00000286722_16 (sequence is synthesized)
cctttaaggaccaggactctttacagtgttaattcccattgaagaggatagtttctctacagctaacagtgacaatattataattatgattataggctctgtgaaaggaaaacatcttgg

SEQ ID NO: 1013525 - DNA, 120 bp, Artificial Sequence
  ENSG00000286722_17 (sequence is synthesized)
actaagccaaagggaaaagtcaagctggaactgcttagggcaaacctgcctccgattctattcaaaatcacccctctgctcactgagataaatgcacatctgattgcctactttgaagag

SEQ ID NO: 1013526 - DNA, 120 bp, Artificial Sequence
  ENSG00000286722_18 (sequence is synthesized)
aatgcaaccatttgtctcttatctacccatgacctggaagccccctccctgcttccagatgtctcgcctttccaaactgaaccagtgttcatcatacatatgttgattgatgtctcatgt

SEQ ID NO: 1013527 - DNA, 120 bp, Artificial Sequence
  ENSG00000286722_19 (sequence is synthesized)
agatgtctcgcctttccaaactgaaccagtgttcatcatacatatgttgattgatgtctcatgtccccttaaaatgtataaaaccaaactgtgttctgaccaccttgggcacatgtcatc

SEQ ID NO: 1013528 - DNA, 74 bp, Artificial Sequence
  ENSG00000286721_0 (sequence is synthesized)
cattgcccaggctggaattggaatacaatggcgcgatctcggctcgctgcaacctcctcctcctgggttcaagt

SEQ ID NO: 1013529 - DNA, 76 bp, Artificial Sequence
  ENSG00000286721_1 (sequence is synthesized)
tgacactataaatgtttagttgtcacattcagtttgggaagcttcccttgaagtaaatgttgggcactgcttggct

SEQ ID NO: 1013530 - DNA, 120 bp, Artificial Sequence
  ENSG00000286721_2 (sequence is synthesized)
ggaagcttcccttgaagtaaatgttgggcactgcttggctgtagctgcatttctcagtgaataacaacctcaaattttcttcacaaaattgtctttgcatcctacaactcacagttcttg

SEQ ID NO: 1013531 - DNA, 120 bp, Artificial Sequence
  ENSG00000286721_3 (sequence is synthesized)
atgggaatagggatggaactcttgatatttagtcatgtcccatggaaaaaaaattgcttttaaatgtgctttcaataaaatatcagtaatcatgtgtattatgtaaattagtatttgtta

SEQ ID NO: 1013532 - DNA, 120 bp, Artificial Sequence
  ENSG00000286721_4 (sequence is synthesized)
tattaaggaattcagcattacttatgtacacatttgttgcagagaaagaaatggtttatgaattgaaaagtcaaatgtattctttatatagtcttttatattacagagctactgttttgt

SEQ ID NO: 1013533 - DNA, 120 bp, Artificial Sequence
  ENSG00000286721_5 (sequence is synthesized)
catcaggttagccattattcacttctgactgaagggatattatatagacataatggtctcaaaagtgctttaacagaacacgtatatcattgaaagtgatattaattttgagaactcagc

SEQ ID NO: 1013534 - DNA, 120 bp, Artificial Sequence
  ENSG00000286721_6 (sequence is synthesized)
atactattacaacaagtagttactagtcacattttatacgcagtatttacttcatgtttatttgagaagtacttacctaggcacattttttgattcaatgaaaaacccacagagagctga

SEQ ID NO: 1013535 - DNA, 120 bp, Artificial Sequence
  ENSG00000286721_7 (sequence is synthesized)
agagctgaactttaatccattgcaaaaagataaatcagttaacacttttaaaaatataaaccatagctaggtgcagtggctcacacctgtaatgtcagcactttgggaggccaaggcagg

SEQ ID NO: 1013536 - DNA, 120 bp, Artificial Sequence
  ENSG00000286721_8 (sequence is synthesized)
accctggccgcatcccgcccctactcctgtcaaaaaagttttttaaaaaggcagccaggcatagtggcctgtgcctgtagtagtagctactagggaggctgaggcaggaagatcacttga

SEQ ID NO: 1013537 - DNA, 120 bp, Artificial Sequence
  ENSG00000286721_9 (sequence is synthesized)
cagcctgggcgacagagcaagaccctgtgtcataaaaaacatgaacatttgataaaaaacataatacatttcataaaaaacacttttacatatacatacatacataacacatatacatac

SEQ ID NO: 1013538 - DNA, 120 bp, Artificial Sequence
  ENSG00000286721_10 (sequence is synthesized)
tacatacataacacatatacatacatatgtatgtatgaatatgccacatataaaagtattaatgaaaatagaagcactagctattgcaagagatccctctcatataaaagttttcaaact

SEQ ID NO: 1013539 - DNA, 120 bp, Artificial Sequence
  ENSG00000286721_11 (sequence is synthesized)
aatgcccaaattcaaaattaaaatgctcagtatgacaggtacttataagaagaaatctgaaccaaataaccgaaatcaaaactaacataaaagccatatctaatttacaacaaaggtgga

SEQ ID NO: 1013540 - DNA, 120 bp, Artificial Sequence
  ENSG00000286721_12 (sequence is synthesized)
ttagtaaatccactgtcagtatctctaagttatctctgaaaaatcagactataatgaaattctcaatattgcatcatcagagtttaaaattccatccatttagcaaaaataccatttcaa

SEQ ID NO: 1013541 - DNA, 120 bp, Artificial Sequence
  ENSG00000286721_13 (sequence is synthesized)
ataggcagcacagtaatctcaggctcttctcagaaattgtcatcttgccggaagatatctggttgcagaattacatggtcataggaagctctgtgtagaatgtaaagcattcaaagtcca

SEQ ID NO: 1013542 - DNA, 120 bp, Artificial Sequence
  ENSG00000286721_14 (sequence is synthesized)
aatctctgtagaacttgaatgtcatgaatatctctaaaatgagcctcttaaatcatttcagatgggaaatggtccagggtgaatagaaatctgacaagctatctctggttacttcacttc

SEQ ID NO: 1013543 - DNA, 120 bp, Artificial Sequence
  ENSG00000286721_15 (sequence is synthesized)
ccggattatttaaaaccttgtttggaaaggtatttacctactgtattttcaagttctaaaaagatttgcctgttgtttatgtgcaagagagttactgaactatgcatttgcaaaagttaa

SEQ ID NO: 1013544 - DNA, 120 bp, Artificial Sequence
  ENSG00000286721_16 (sequence is synthesized)
taactaatgtgaattttttttccttcaagtaaccagaagtattttgctgttttgccctggaaacaggcgctttagaagacgtgaaatacagattgcaaagggctggctcctctgtcttcc

SEQ ID NO: 1013545 - DNA, 120 bp, Artificial Sequence
  ENSG00000286720_0 (sequence is synthesized)
gtctccaatgtgcaaattgcagaaattggcttctcccactcctcttttgccaggaaatgaggaacgcacagaggaggaacactgaagacctggggaacattcattttcatgttactgtat

SEQ ID NO: 1013546 - DNA, 120 bp, Artificial Sequence
  ENSG00000286720_1 (sequence is synthesized)
tacggtgttgtgtttggtgggttcaggggagacagcagagggggccggactagaaggaatgggctggaggttgacttggccgagtcccatgggtcagagaaggcaatttcagccactaaa

SEQ ID NO: 1013547 - DNA, 120 bp, Artificial Sequence
  ENSG00000286720_2 (sequence is synthesized)
gagcgaaaatgtcacaggatctctatccacttccacatttatgcagactgaaaccccacatgccccaaactgaattcatcttcttccctccaaagcctgttcttttctgctggcccttct

SEQ ID NO: 1013548 - DNA, 120 bp, Artificial Sequence
  ENSG00000286720_3 (sequence is synthesized)
gtctcccaattgctccaatgagtgtaaggaactaaagtcatcttgactctccctcttccttatctcattaatacatcttacgagttttataagattatagtatctctggaatcatctatc

SEQ ID NO: 1013549 - DNA, 120 bp, Artificial Sequence
  ENSG00000286720_4 (sequence is synthesized)
ctcccacctccacttctccatcttagtccaagcacttgtcccttctggcctggatgactgcaatggccgcattcttgttgtctcccaatccattcctcagcctgcaggaaagttcacatt

SEQ ID NO: 1013550 - DNA, 120 bp, Artificial Sequence
  ENSG00000286720_5 (sequence is synthesized)
tttttaaggctaaagatcatattgttatccctcttgctctaaagctcttgcatgttttccactgccctttaagtttgggctcaagtctcaaagtccttaaccatgatttcctaggacttc

SEQ ID NO: 1013551 - DNA, 120 bp, Artificial Sequence
  ENSG00000286720_6 (sequence is synthesized)
ctcagtgcagtcctgcccttacccacccatccctgctctcctccactgcctccctgctcctgggtgccttcaggcctttcacgtgctcacactcatctcagagcctctgactatgtggtt

SEQ ID NO: 1013552 - DNA, 120 bp, Artificial Sequence
  ENSG00000286720_7 (sequence is synthesized)
ccctctgcctgatatcagggttcagaacatgataccccagagtatggctccttggtatgctgggtactttgaactgacagagattacaagggcctcggaaacaaggtcactctgaccttc

SEQ ID NO: 1013553 - DNA, 120 bp, Artificial Sequence
  ENSG00000286720_8 (sequence is synthesized)
tcctatcctgctttctccctcaaacaaggcacagaaactagaattcttcatctcaaagcaagtcataaacctaggaaggtctttgaccttctcccttccctgctgaaagccctcctgtga

SEQ ID NO: 1013554 - DNA, 120 bp, Artificial Sequence
  ENSG00000286720_9 (sequence is synthesized)
caggtgtcctgccccataccttgcggggaggcatgtcttacagagacacagaaaagactctggacaaacaggccctgcagacctccactgcccctcagttcattcccattagatcagacc

SEQ ID NO: 1013555 - DNA, 120 bp, Artificial Sequence
  ENSG00000286720_10 (sequence is synthesized)
cttttttgtccaatcgtatttcttcataaccatgcacttttttcttcagaccttacataaaaatgtaactttctttcggtttttgggtcttcatttctgaagacttcatgtcacataaaa

SEQ ID NO: 1013556 - DNA, 120 bp, Artificial Sequence
  ENSG00000286720_11 (sequence is synthesized)
ctttgttaagtaagtttgttgtgctttccttgtgttacactctttcattatcagaattgtcagtcatgattgtatgactgatggatgaagaaaaggtatgactttttcccccctaccctg

SEQ ID NO: 1013557 - DNA, 120 bp, Artificial Sequence
  ENSG00000286720_12 (sequence is synthesized)
gaacggcccttctttgctctgttctcttccatagcaccaagcctggtgtcatttatttacctatgtttttgtgtttctcacttgactcagctccatgggggaaggcactatgtctgtttt

SEQ ID NO: 1013558 - DNA, 120 bp, Artificial Sequence
  ENSG00000286720_13 (sequence is synthesized)
ggttcccactccatccctagcaggcaacacaatgcctagcacctattagatgctgtctctatagatatagatatagattatatgtagattatacatagaatatttatagaattaatgaga

SEQ ID NO: 1013559 - DNA, 120 bp, Artificial Sequence
  ENSG00000286720_14 (sequence is synthesized)
ttatggtaaaactgctttggaattataaaggctatacaataccggtaatttctatttctgccttccacctcagaaaaggcaggatagatattctattatcatttaaacttgagtggaact

SEQ ID NO: 1013560 - DNA, 120 bp, Artificial Sequence
  ENSG00000286720_15 (sequence is synthesized)
atttgtgcctctttaaaggaatttcaggcaatagccagcaggtccctgctgtgtgctgtactaggtgctggagtgccataaaaggaatcacactcgaggctgatcacaagacttcttttc

SEQ ID NO: 1013561 - DNA, 120 bp, Artificial Sequence
  ENSG00000286720_16 (sequence is synthesized)
cacttggaagaagctcatgggagccagcactgatgcaggtccaggcctggggaaagcatatgcccccaagacccatcaagcttgtccctgccatctctctccatcattctagcttcgccc

SEQ ID NO: 1013562 - DNA, 120 bp, Artificial Sequence
  ENSG00000286720_17 (sequence is synthesized)
tagcttgtgggtaccacgggtacctatttccaggaacccagggaattccttttgaccttgctgggaaactgcaaatcacccaacaggagcttagctgtgcagccaacatttggaactact

SEQ ID NO: 1013563 - DNA, 120 bp, Artificial Sequence
  ENSG00000286720_18 (sequence is synthesized)
caatagctttctggagtcaacaaataaggaaataatttctttaggataaaaaaatgttttgttttagtaaagggtaatggcactccattgcgaatggaaactgttctccccttggtttaa

SEQ ID NO: 1013564 - DNA, 120 bp, Artificial Sequence
  ENSG00000286720_19 (sequence is synthesized)
gtggagcccatttgtcagcactgcttgaggcctgcgaagtgaccatctaggtatttttctcaagtgaagaatgatctgaggacatcttcgccactgggtccctcttactcatgtgacttc

SEQ ID NO: 1013565 - DNA, 120 bp, Artificial Sequence
  ENSG00000286720_20 (sequence is synthesized)
caagttttctggtggtaaagttggaggcagagagagcatgcccctgaattggacagtagagtgtccttcagctgatagaagatcacttcagggcaggtggagcagccacagaagaaaatg

SEQ ID NO: 1013566 - DNA, 120 bp, Artificial Sequence
  ENSG00000286720_21 (sequence is synthesized)
gtctcttatgttggagaagactttatatgatcacttggaccagtaattgccaattctggatggtcaccagagggttctttaaaaacagaaccaaggtctgcactgcatctccaagcctgc

SEQ ID NO: 1013567 - DNA, 120 bp, Artificial Sequence
  ENSG00000286720_22 (sequence is synthesized)
agagaaatgatgtgtgacagcccgccttgacaaatcagcactgcttacagccctgccaccagaatgccttcactctgtccaacttgaattccctttaaagcaatggaaggaatctgcttt

SEQ ID NO: 1013568 - DNA, 120 bp, Artificial Sequence
  ENSG00000286720_23 (sequence is synthesized)
ccaagatcccttcagaaggaaagatttgcattgtttaaaggagaataaaaatcagatgtctaagaaaaaggaaaaagacaaagtctcctttcaagaagtaacaactctgccagcttactc

SEQ ID NO: 1013569 - DNA, 120 bp, Artificial Sequence
  ENSG00000286720_24 (sequence is synthesized)
aggtcatgaaataatgctgttggcaatgactttggggtgttctgtcacagtctcagtacactttctcccccctgggcagtattttatagttactgcttctacgccccattggctcagaca

SEQ ID NO: 1013570 - DNA, 120 bp, Artificial Sequence
  ENSG00000286720_25 (sequence is synthesized)
cccattggctcagacataatttattatttgtttacatgtttcacttactctgctaaggtggaagtccggtgatgcattattactgacagcatcagtgtgtgtgtgtgtgtgtctgtgtgt

SEQ ID NO: 1013571 - DNA, 120 bp, Artificial Sequence
  ENSG00000286720_26 (sequence is synthesized)
ttgaaagactcaaggagatctgacgggttctgaacctgcaagttttcagagcacaagtggcccccccaggtctacaagagcctccctgggctcttggctcagatcaaatgtgtcctatgt

SEQ ID NO: 1013572 - DNA, 120 bp, Artificial Sequence
  ENSG00000286720_27 (sequence is synthesized)
ccctgtagttagttccttctacttctctgaggaccaagacaattccaggaagacacaggctccccgggactgtgactttctattctctcctttgacttgtcttcctgtgtagtgatcaaa

SEQ ID NO: 1013573 - DNA, 120 bp, Artificial Sequence
  ENSG00000286720_28 (sequence is synthesized)
gtcctcccatttctggggggaacgtcacagtttacacagcactttcttcacgacaatagcatgaagaaaataatacctgccctttatctccacatgagacacagacaggtcaaggacgtg

SEQ ID NO: 1013574 - DNA, 120 bp, Artificial Sequence
  ENSG00000286720_29 (sequence is synthesized)
tgcaagttcaaagagcaagagtggaatccagcccgaaccagcaccccatgatggaaggggaatgaccgtggctggcccagtcacttacagctctttgaccaggggcagctcacgaaaagc

SEQ ID NO: 1013575 - DNA, 120 bp, Artificial Sequence
  ENSG00000286720_30 (sequence is synthesized)
tcaggttcttcacctgctaaaagatggcagtgatagtgcttactgcacagggctgttttagaaataaaatagatttctaaaagtgctcagcaaaatgactagcatgtaataaacgtgcaa

SEQ ID NO: 1013576 - DNA, 120 bp, Artificial Sequence
  ENSG00000286720_31 (sequence is synthesized)
gggaaagaagaacccatcagcaattatatcgtctccctcaaggcaagtaaaatctgagagatggagatagaaaatccaggaatggctactgaattaagaaggagcaagaaaggacaaaac

SEQ ID NO: 1013577 - DNA, 120 bp, Artificial Sequence
  ENSG00000286720_32 (sequence is synthesized)
aagtgtttttaggaaggtggcaacacctccggttggtctaaaggatctatggggaagcagctgcagacccagttcactgctccagggtcctgccacagccataagtctagaaatgaccca

SEQ ID NO: 1013578 - DNA, 120 bp, Artificial Sequence
  ENSG00000286720_33 (sequence is synthesized)
gatcctcaaacagagttttcctgtgtcccaggaagagttgcccactggccagtttcctcaccttcagctcatcaggcaaagcggggaagaaggcaggctggagtgcctggaaaggacaga

SEQ ID NO: 1013579 - DNA, 120 bp, Artificial Sequence
  ENSG00000286720_34 (sequence is synthesized)
gaggaggcatccaggtggagggagaagagatccttacaggtctcttatgttggagaagactttatatgatcacttggaccagtaattgccaattctggatggtcaccagagggttcttta

SEQ ID NO: 1013580 - DNA, 120 bp, Artificial Sequence
  ENSG00000286720_35 (sequence is synthesized)
aaaacagtggtgcccttgaggatgccccactttggggacctttgctctcgtcccctatgcagcatcacctctcaacctggggcccggggaggcttgaccatgagaagtgtctcttccatc

SEQ ID NO: 1013581 - DNA, 120 bp, Artificial Sequence
  ENSG00000286720_36 (sequence is synthesized)
cctgactaagactttctgtggcatttgaaaacatggttttccttctttgaagcttcctgagccctgaacttccatatgctatgttctcgattctgcactgcctgtctgcaggggcccgtc

SEQ ID NO: 1013582 - DNA, 120 bp, Artificial Sequence
  ENSG00000286720_37 (sequence is synthesized)
ttcccggcccgcgcctgctgcgtgcctattggtgttccccaggattctcttctaactcactgttcctcttgtgctgccacacacactccctggagaagctcatcctctctcgtgggacat

SEQ ID NO: 1013583 - DNA, 120 bp, Artificial Sequence
  ENSG00000286720_38 (sequence is synthesized)
gcaaattactctcaaatccctgtctccaatggaactctttgccctagcttttcccataggcaacacaaagccagcactcccaaaatggcagtgggagcacagtcattttcctgttaaact

SEQ ID NO: 1013584 - DNA, 120 bp, Artificial Sequence
  ENSG00000286720_39 (sequence is synthesized)
gcccactctccccaccttgctaaacggcactgtggccccctgcaggggtgggggtgctgctaccgcactacccgctcgctacacgcatccactcaattgccatgtcctcccaaatctctc

SEQ ID NO: 1013585 - DNA, 120 bp, Artificial Sequence
  ENSG00000286720_40 (sequence is synthesized)
tcctaagtatctcctaaaggtctccctctctccctgttatcttacctccatccacagctgcctggatgtttgccttgtttgcaggccttaccatcttcttcctagctgctggagtgaccc

SEQ ID NO: 1013586 - DNA, 120 bp, Artificial Sequence
  ENSG00000286720_41 (sequence is synthesized)
ctctgaacaatgaaactggtcttgccaagtccctgcttcaaaccttttcatcgtccctctaccacctccttaagtctggactctatgcagatcgtgggaggtcttctggggccagagctg

SEQ ID NO: 1013587 - DNA, 120 bp, Artificial Sequence
  ENSG00000286720_42 (sequence is synthesized)
ctgctccttctccgcagccttgtgctttctgcacctgcagtgccaaatcaccggtgctggctctggttttcccctcagcgcaaagtggcttgtcctcctcctccctgcccactcatctct

SEQ ID NO: 1013588 - DNA, 120 bp, Artificial Sequence
  ENSG00000286720_43 (sequence is synthesized)
attagtaaatctgtacagtatacaagtgaggttccattttgttcctgaccatccatgagaggtcatgggagagaaattcctcaagaacagaatgctcaggtaggttgatgctactgcatt

SEQ ID NO: 1013589 - DNA, 120 bp, Artificial Sequence
  ENSG00000286720_44 (sequence is synthesized)
tggtttttttaagctgcaaatatggaggaaagaatattcctgaatgtgttattgcatgatttatgatcctctcaatcctaagaagcaaattaaagtctagcagatggttctccaaagccc

SEQ ID NO: 1013590 - DNA, 120 bp, Artificial Sequence
  ENSG00000286720_45 (sequence is synthesized)
tgtaactatagttacatgttttaaaagtcagaaacatcttagtgaattgttattgaattgtagagcttctccatgccacagaaaggctctccaaccccctggctcagttcctggcaggag

SEQ ID NO: 1013591 - DNA, 120 bp, Artificial Sequence
  ENSG00000234022_0 (sequence is synthesized)
ccgaagtgtcacaggatgaatctatgctatttggagagggagtatacatttaacttgaagcaatccctggaagaaaaattctactagcagagatgctctgagcagagagaaagcctgtct

SEQ ID NO: 1013592 - DNA, 120 bp, Artificial Sequence
  ENSG00000234022_1 (sequence is synthesized)
agaggtagagacttcatctgatacaagcatgcttgaaacaagagacacctgtatgattccatcttcccaggagctagcaggcagttcttgttgagttcaagccagttgagaccatcaacc

SEQ ID NO: 1013593 - DNA, 120 bp, Artificial Sequence
  ENSG00000234022_2 (sequence is synthesized)
cttcaactgagcctgcatggccctgttttcagggaggtggatttgcgatttgttctccttctccttgctcagcagcctggtaagcaatctcacaaaataaaatcttttcttttttgcaaa

SEQ ID NO: 1013594 - DNA, 120 bp, Artificial Sequence
  ENSG00000204250_0 (sequence is synthesized)
cacataagacatgcctgcttccccttccgccatgattataaattttctgaggcctctccagccatgcagaactactttttcagataaaattatcctgttgtggtagccatggagatgcaa

SEQ ID NO: 1013595 - DNA, 120 bp, Artificial Sequence
  ENSG00000204250_1 (sequence is synthesized)
cacttggagtgcccttcaagatagaaattcctgattagctgggaagaatgcagtttgctgactggctccatccttccgggtggacaatagaaatcttgaatgcttatggtatgggtgacc

SEQ ID NO: 1013596 - DNA, 120 bp, Artificial Sequence
  ENSG00000204250_2 (sequence is synthesized)
gatcaccaaggattcagaccgataccaatgatgcaataaagacatcatttttcctccaggaaaaaaagagaaatatgggtttagtcaccaaggaagaaggcagtaaatagctttgaacac

SEQ ID NO: 1013597 - DNA, 120 bp, Artificial Sequence
  ENSG00000204250_3 (sequence is synthesized)
tcacatttacactctaatatatctgtgtaaaggatatgaaggatataaataatttagaaattgtgggggaagtaggtatctctaatattgaataaaaagaaaataaatgaccagatcaaa

SEQ ID NO: 1013598 - DNA, 120 bp, Artificial Sequence
  ENSG00000204148_0 (sequence is synthesized)
gtgggatatgaagcatgagacggaatgaggtcaccaagagagtgaatgtatataaagcaaagagggtgtccaagggctgagttctgagatacttcaatagcagaagatgatgctgagaag

SEQ ID NO: 1013599 - DNA, 120 bp, Artificial Sequence
  ENSG00000204148_1 (sequence is synthesized)
cagaagccagctaaagagactgagaaagtgctggtggtgaagcaccaggaaaatcaacagatcatgctctgtgttagtggattcacaagcaacctgtactcctcaaagaaagatgataag

SEQ ID NO: 1013600 - DNA, 120 bp, Artificial Sequence
  ENSG00000204148_2 (sequence is synthesized)
atgaaggagatctctagaaccagcaactggggctcttccttcagtgaaaaaagtgggtgtatgcagactcatccatccatgaatctagattgcagggatgtgacctatgtaatgaacttg

SEQ ID NO: 1013601 - DNA, 120 bp, Artificial Sequence
  ENSG00000204148_3 (sequence is synthesized)
aacaatgaatacgtctcttgggcaaaataaataatgagattgttacagcaacctgatttttgaaaagaaaaaaggaacttcctcgaactaaagcagttaagacctcgacatttgctcata

SEQ ID NO: 1013602 - DNA, 120 bp, Artificial Sequence
  ENSG00000204148_4 (sequence is synthesized)
gaaaaagtcgctgagtcgtttctagttgtgaaggtgcaaaagatgcagttatcccttatggaaaattccaagaacttgtgcctaatttgagtcatgcaaacctgagttctgcatgactga

SEQ ID NO: 1013603 - DNA, 120 bp, Artificial Sequence
  ENSG00000204148_5 (sequence is synthesized)
gctctgtcactcaatggttgggaaatttgtgatcatctctacgccttgctttctgcatctgtaaagtggaaatgataatatctaccttgtgtgattcctggaagaattaaatacattata

SEQ ID NO: 1013604 - DNA, 120 bp, Artificial Sequence
  ENSG00000251027_0 (sequence is synthesized)
agttttataagagtctggcgtttcccctccttgtgcttttctctcgtgtgccatgtgaagaaccttgcttcctctttgccttccaccatgattggcttccgaggtgactgggcagcgtca

SEQ ID NO: 1013605 - DNA, 88 bp, Artificial Sequence
  ENSG00000251027_1 (sequence is synthesized)
tctgccagcttcaggtgcctggatgttgaggggcaaataggactgttcactgaaggagctagagaatggaagagaaggttgtgtcaga

SEQ ID NO: 1013606 - DNA, 120 bp, Artificial Sequence
  ENSG00000251027_2 (sequence is synthesized)
gaagagaaggttgtgtcagatagaaataacagaagctttctgaaatgaaaacagaaatgttacaacttgcaccacagtactggactgaaacgaagatgtaacacagccataataatttaa

SEQ ID NO: 1013607 - DNA, 120 bp, Artificial Sequence
  ENSG00000251027_3 (sequence is synthesized)
attaatagcaaataaataaagaaaaaaagaacttcattgtgaggaccatagtcatgggatagctctgtcttttcggggaaagtggagtagagggacagagtcaccccaggagaaaaaatg

SEQ ID NO: 1013608 - DNA, 120 bp, Artificial Sequence
  ENSG00000251027_4 (sequence is synthesized)
cttaaattaagactccctgagagactgaataagagtatgattagttcagccttgctttcatcctccacttccccctcccactgtagacttcagttttaataatgattaaagaataatgcc

SEQ ID NO: 1013609 - DNA, 62 bp, Artificial Sequence
  ENSG00000251027_5 (sequence is synthesized)
tctgccagactcttcagaggttcctgctgggcctcccactgctccagtgcttttgatgaagc

SEQ ID NO: 1013610 - DNA, 120 bp, Artificial Sequence
  ENSG00000251027_6 (sequence is synthesized)
cctgctgggcctcccactgctccagtgcttttgatgaagctagactattccctgcagcagttccttttcccatgttttggcctctgaggatcaacagtacagctctatcttctttttgat

SEQ ID NO: 1013611 - DNA, 120 bp, Artificial Sequence
  ENSG00000251027_7 (sequence is synthesized)
cgtttcccctccttgtgcttttctctcgtgtgccatgtgaagaaccttgcttcctctttgccttccaccatgattactcttaccagttgttttaattgctaagacaacccagttctgcat

SEQ ID NO: 1013612 - DNA, 120 bp, Artificial Sequence
  ENSG00000251027_8 (sequence is synthesized)
gatttctcacgagatctgacagttttataagagtctggcgtttcccctccttgtgcttttctctcgtgtgccatgtgaagaaccttgcttcctctttgccttccaccatgattcttcagg

SEQ ID NO: 1013613 - DNA, 120 bp, Artificial Sequence
  ENSG00000266102_0 (sequence is synthesized)
agtctgtctcagcacacactcacacatgcacgctcatacccgtgctgagtgaatccagttaattcccagagaactgcaaataaagtgtcagcactttaggatgctgcatcaaataccatt

SEQ ID NO: 1013614 - DNA, 120 bp, Artificial Sequence
  ENSG00000266102_1 (sequence is synthesized)
atgtcccctgtgctacaagctgaagccacaaagaccagtgtcaacggaggagaccctagtgcccacaaataaagcccagcactgtacatccacgtaaagtcctgtgaagtcagaagtaag

SEQ ID NO: 1013615 - DNA, 120 bp, Artificial Sequence
  ENSG00000266102_2 (sequence is synthesized)
ggagaaattaaggatttagtagggtcccacaaagtctttggaaccagatctgattgtttcctttagttaaattcactcaaacatgcaagcatttgtataaacatcaatgtttttttcagt

SEQ ID NO: 1013616 - DNA, 120 bp, Artificial Sequence
  ENSG00000270302_0 (sequence is synthesized)
tgaaagaatgaaagaatctctgaagtgttgattggctgtttctggaacttggcccaagttcctactacagatgtaccatgtccacttttctcagaattcaagtttcctggttgggccctg

SEQ ID NO: 1013617 - DNA, 120 bp, Artificial Sequence
  ENSG00000270302_1 (sequence is synthesized)
aagcaacacattgtgccatttgaaattctcaagtgaagtgcaaaagtttccttgtccgtttacaatccacttctgagtaatctgacccaacgtcatcagagagaaaatggcttccttggg

SEQ ID NO: 1013618 - DNA, 120 bp, Artificial Sequence
  ENSG00000270302_2 (sequence is synthesized)
gagtgctgaaagcattagagagatgtgaccagagatctccgtcacactgattcctcccttaccttgccaggagcactgggccagcctacattggctactcagcgcttgtcgaggttgggt

SEQ ID NO: 1013619 - DNA, 120 bp, Artificial Sequence
  ENSG00000237588_0 (sequence is synthesized)
ctgtcccggcccactgcagcactggccagcctctccagcttcctccaggcatccagccgctcacagggggcggtggagagacccaatggcagaggcagagaggagggcaattctggaagc

SEQ ID NO: 1013620 - DNA, 120 bp, Artificial Sequence
  ENSG00000237588_1 (sequence is synthesized)
cgtcagggcagatctgggggcgtctggaggagtctagacttgagcctcagctcccacccccgctgcttgaggtgagcgggtgtgtcaggccaggcagggactcaagctggtgactcaagc

SEQ ID NO: 1013621 - DNA, 120 bp, Artificial Sequence
  ENSG00000237588_2 (sequence is synthesized)
ccgacagctgcatggtcctcagcaaggagtcctccctcccgcagccccaaggtggaatcttagaagctgggaattccagaaccagagagcagagtcccagaaggaagggacctcagggat

SEQ ID NO: 1013622 - DNA, 120 bp, Artificial Sequence
  ENSG00000237588_3 (sequence is synthesized)
cctgcctctcctttgtgtgagaggaaactaactggaggaccacaaaagggcatggccagcttgggggtcacccaggtgtcagggaaatcattagtcacagaagaggggctgcttgggttc

SEQ ID NO: 1013623 - DNA, 120 bp, Artificial Sequence
  ENSG00000237588_4 (sequence is synthesized)
agtacaaaccagcttagtcccaacgggtgtcagccagacccctccgcaccctcttcctcaccagcgaggggcctgggttcttcagtgtggaaagaaatgtcagtctttcccacagcctac

SEQ ID NO: 1013624 - DNA, 120 bp, Artificial Sequence
  ENSG00000237588_5 (sequence is synthesized)
gttcccacctctcatcccggagtgggcaagcccctgcccccgtgctgggcctctctcctgtccttccccgctgcagatgatgaggccgggacaggtgtggggccctctaggctcaggtga

SEQ ID NO: 1013625 - DNA, 120 bp, Artificial Sequence
  ENSG00000237588_6 (sequence is synthesized)
ggggttatgagctaaggtttcaagaggagcctgagagcaggggacccaggtctcagcgagagctgcgtggggaggaggagccaccttgcctgatgcaggttgcagccagaaggggggacc

SEQ ID NO: 1013626 - DNA, 120 bp, Artificial Sequence
  ENSG00000237588_7 (sequence is synthesized)
cagaagattcctcagccgcccaaccagcccctaagtccatcgcagcccaccccaggacgtgcctgagtagaaggagacccaagacacaggcacagccttccatccattgaggaagtattt

SEQ ID NO: 1013627 - DNA, 120 bp, Artificial Sequence
  ENSG00000237588_8 (sequence is synthesized)
tctgagctcctactctctgccaagcacatccactcccgctcctcccaccaagttctggagccaggacgggacctccagagcaagcactgtgggacgggtgtccagaagaacccacttcta

SEQ ID NO: 1013628 - DNA, 120 bp, Artificial Sequence
  ENSG00000237588_9 (sequence is synthesized)
ccaccgccagcctctgctgcccgcaggctgcctgtgtctcagccccagcccccgtcctcacagctgcaaataaaggctcaatctttcatcaaaactttcctgcaattgtccttctgtcat

SEQ ID NO: 1013629 - DNA, 120 bp, Artificial Sequence
  ENSG00000237588_10 (sequence is synthesized)
cacagcccctgatgcagaaaccaaccaaggagctgtagaaacacagaggcagaaaggtgaggtcatcccgtctagcacccagtctcagggcaagaacgcgttccacagcccagctgagtc

SEQ ID NO: 1013630 - DNA, 120 bp, Artificial Sequence
  ENSG00000237588_11 (sequence is synthesized)
tcagagagagtccaccctcccacagccttctttggctcacttctccccagggtttgcccacattcctccagggaagtccttcctggaggctaacttaagtgcctcctgctgtcgctttaa

SEQ ID NO: 1013631 - DNA, 120 bp, Artificial Sequence
  ENSG00000237588_12 (sequence is synthesized)
cttctcaaggggatgaaacccagaagataggcttattttctcaaggggctcagggactggggtggggagtgctgtgggcgcacaagtgggaaaactttctccacctctctcagctttctt

SEQ ID NO: 1013632 - DNA, 120 bp, Artificial Sequence
  ENSG00000237588_13 (sequence is synthesized)
ttctttctcttctccacacctcattctttccctttccctcctctctctttagtcgtctcccactcaactcagctgctggctgggagccagcattgttcctgcctggctcccctctcccct

SEQ ID NO: 1013633 - DNA, 120 bp, Artificial Sequence
  ENSG00000237588_14 (sequence is synthesized)
cctccttccctctctgcgcccccctccagccagcccagtccctggcatgcggtagccccagctggggggcagggcagcacgcaagacctttcctgccccgtcttctgcctcctcctcact

SEQ ID NO: 1013634 - DNA, 120 bp, Artificial Sequence
  ENSG00000237588_15 (sequence is synthesized)
cttcccttccagtccccattgatggcccccacccagcataggaggctggggagcttgggttacccaggcccctggttatttttattgccaccagctcaggagataaatatacctcccctc

SEQ ID NO: 1013635 - DNA, 120 bp, Artificial Sequence
  ENSG00000237588_16 (sequence is synthesized)
cccgcagctgtcctggacggagtaacacatcccttcccaattcactccctctcctaccgttcatccactcacctcaacgtcgagttgactcacccgaacgtcttctgctcacattctctc

SEQ ID NO: 1013636 - DNA, 120 bp, Artificial Sequence
  ENSG00000237588_17 (sequence is synthesized)
gcttgacccccaagctcagaaatgggacgggaggagagcctcggtgtcttggctccacctagtggcttctcgagacaccacacctagcgaaggggtctagcgggagcctcgccttgatgc

SEQ ID NO: 1013637 - DNA, 120 bp, Artificial Sequence
  ENSG00000237588_18 (sequence is synthesized)
cacccggctggggcaggacttcacaacactgcggggaggaggcgccgcgcagaagttgcttctgctagtggttgagcctccaggctgagcctgggccctgagacccctctcccacttggc

SEQ ID NO: 1013638 - DNA, 120 bp, Artificial Sequence
  ENSG00000237588_19 (sequence is synthesized)
caggcgaggggctggtggtctacagcccactgcctcttcctccttgtgattccaaaccgttctgttagatcccacaatccagggaggttcttggaattcatttgcgggtctctggaaata

SEQ ID NO: 1013639 - DNA, 120 bp, Artificial Sequence
  ENSG00000237588_20 (sequence is synthesized)
gttaagggcagaaactgaagctccccagagaggacagaaggggaacccagggatcaagatggactgctgttcattcccagcttgttagagttcctgggattcaagaagccaccagtcctc

SEQ ID NO: 1013640 - DNA, 120 bp, Artificial Sequence
  ENSG00000237588_21 (sequence is synthesized)
tagaacagatctcaaaatgaatcccccaagagtggttatctggtctgtgtttgaacacccaggaacagggtcctcactccctctggtggcagttcgttccaggacagagacaagtattgt

SEQ ID NO: 1013641 - DNA, 120 bp, Artificial Sequence
  ENSG00000237588_22 (sequence is synthesized)
gactggctcgtttgggctgaaattggtgcctgtagcttccacccttcagacctggttctgcctcctggaaccatataagaaaagtccaagctcttttacccaagagccttttagacactt

SEQ ID NO: 1013642 - DNA, 120 bp, Artificial Sequence
  ENSG00000237588_23 (sequence is synthesized)
aagatggccccactctaggttttatttattttgaaatagttcatgtactcgatcaataaagaatcacattccagacggtggtgtgcgtctctcaagcccccacagctcccaagcatcaat

SEQ ID NO: 1013643 - DNA, 90 bp, Artificial Sequence
  ENSG00000237588_24 (sequence is synthesized)
gtgtgcgtctctcaagcccccacagctcccaagcatcaattccctgctggcttctctttttttgtgtgtgatggagtctcgctctgtcgt

SEQ ID NO: 1013644 - DNA, 90 bp, Artificial Sequence
  ENSG00000237588_25 (sequence is synthesized)
gatcccctgctggcatctctttcttcctcccaagtcagagccactgtcctctccattctttttattgttattttgccttttgaaaatatt

SEQ ID NO: 1013645 - DNA, 120 bp, Artificial Sequence
  ENSG00000237588_26 (sequence is synthesized)
ctccattctttttattgttattttgccttttgaaaatatttttgcatgctgggcatggtggctcatacctgtaatgccagcactgtaggaggctgaggagggcaggtcacttgagtgcag

SEQ ID NO: 1013646 - DNA, 87 bp, Artificial Sequence
  ENSG00000237588_27 (sequence is synthesized)
ctgaggagggcaggtcacttgagtggcgagacctatctctatttttaaaaacattttaagccaggtgtggtgtctcacgcctgtaat

SEQ ID NO: 1013647 - DNA, 120 bp, Artificial Sequence
  ENSG00000269416_0 (sequence is synthesized)
ggcggggcttttgtctctcgctgcagccagagcttgggatcgctttctgctattcaacgtcctccacctctgcccccctctcgccccagccggtgacaggctgttgccctgtgatctgca

SEQ ID NO: 1013648 - DNA, 120 bp, Artificial Sequence
  ENSG00000269416_1 (sequence is synthesized)
ggtcctgggacgtgcacagacagctaagatgccaggacattccagaaggtgggaaaggcacctgagtaatttgactctcctgcctggacccagcgtacagatgggattgtgcttcattgc

SEQ ID NO: 1013649 - DNA, 120 bp, Artificial Sequence
  ENSG00000269416_2 (sequence is synthesized)
tgcctggacccagcgtacagatgggattgtgcttcattgctggacccagcatttagggatcgtcactcccgtggatgatcaaagctactccgggggctgaggcaggagaatcgcttgaac

SEQ ID NO: 1013650 - DNA, 120 bp, Artificial Sequence
  ENSG00000269416_3 (sequence is synthesized)
atctcaaaaaaaaaaaaaagaaaaaaagtgtactaacaagacccagcacacagaggagacttttaccattgtatgaacacccatcaaacagtacacatcatcattgtgagttctgaatct

SEQ ID NO: 1013651 - DNA, 120 bp, Artificial Sequence
  ENSG00000269416_4 (sequence is synthesized)
cagtacacatcatcattgtgagttctgaatctcacacatagaggaagtcaaaggtggaaaacttgactctcatatttggatccagtccacaggtgtgattttgacgcacacttctgccca

SEQ ID NO: 1013652 - DNA, 120 bp, Artificial Sequence
  ENSG00000269416_5 (sequence is synthesized)
gcacctgagtaatgtgattcttcagaattggcccggcccacaaataggattgtgccacactgctggacccagtgcctaagtgatgtaactctattcttctgccttggtgctactcgaaaa

SEQ ID NO: 1013653 - DNA, 120 bp, Artificial Sequence
  ENSG00000269416_6 (sequence is synthesized)
agacattgtaacatatctcagagccttacacccaggtaatgtgagtctcctcttctgccttgctgctgcacacagaagcggaatatgtacaggattgttaatctcatcttggatcttcct

SEQ ID NO: 1013654 - DNA, 120 bp, Artificial Sequence
  ENSG00000269416_7 (sequence is synthesized)
gcacttgtgattgtgacacatgcctctgtgtagaacctgagtgagtttactctcctgcctggatttaacccatagatggaatcgtgacatatcactgtaccagaaactaggtgatgtgac

SEQ ID NO: 1013655 - DNA, 120 bp, Artificial Sequence
  ENSG00000269416_8 (sequence is synthesized)
tctattttcttgcctctgtgtttttatatggggcatcgtgacatatcactgggccttgcacccaagtgatgggagttttctctcctgctttggtgccgtccacaatgaaaattgtgaaat

SEQ ID NO: 1013656 - DNA, 120 bp, Artificial Sequence
  ENSG00000269416_9 (sequence is synthesized)
gtttgggttctgcctgcaggagtcattgtcacatatctctatgctcatcacccaggtaatatgattcccttttactgcttagttccttctcacaaaacaacttgtgacatattgctaggc

SEQ ID NO: 1013657 - DNA, 65 bp, Artificial Sequence
  ENSG00000269416_10 (sequence is synthesized)
agttccttctcacaaaacaacttgtgacatattgctaggcccaatacacctagctggtgtaactc

SEQ ID NO: 1013658 - DNA, 80 bp, Artificial Sequence
  ENSG00000269416_11 (sequence is synthesized)
cccaggctggagtgcagcggcatgatttcagctcactacagcctctgcctcctaggttgaagcgattgtcctgacttgcc

SEQ ID NO: 1013659 - DNA, 60 bp, Artificial Sequence
  ENSG00000269416_12 (sequence is synthesized)
gtgatccttcttctcttctttctaggtttcaactgcagcagagattgtaacaaaccactg

SEQ ID NO: 1013660 - DNA, 120 bp, Artificial Sequence
  ENSG00000269416_13 (sequence is synthesized)
tctaggtttcaactgcagcagagattgtaacaaaccactgggcccagccgcataatgatgttactcttttgccttgggcctgccctcagaaggcactgtcacatattcatgggcccaacg

SEQ ID NO: 1013661 - DNA, 120 bp, Artificial Sequence
  ENSG00000269416_14 (sequence is synthesized)
ccaaggtgatatgtgtctccagcctggaccctgcccacagggggcattgtgacatatctcttggcccatcagatgtttgattgttatcccctcccctcttctaccctgtgtttgcctata

SEQ ID NO: 1013662 - DNA, 120 bp, Artificial Sequence
  ENSG00000269416_15 (sequence is synthesized)
aaagacacagtcatatgttcctgggcccagcacctaggtgttgtcttactggaatgtgtccacatggggattgtgatatgtcacgtggcccagtacttaacttgatgtgactctcctctc

SEQ ID NO: 1013663 - DNA, 120 bp, Artificial Sequence
  ENSG00000269416_16 (sequence is synthesized)
gtggcccagtacttaacttgatgtgactctcctctcatgcctaggccttgtagagaatccccttccccttttgttttcctttttttctttgcagatccaggagataatcaactaagagcc

SEQ ID NO: 1013664 - DNA, 90 bp, Artificial Sequence
  ENSG00000269416_17 (sequence is synthesized)
tccttaacctaaaccttccctttcattgatcccaggtcttcagattccaccacttgtcaaccacaaaatatttaaatttacctggaagcc

SEQ ID NO: 1013665 - DNA, 85 bp, Artificial Sequence
  ENSG00000269416_18 (sequence is synthesized)
aaaccttccctttcattgatcccaggtcttcagattccaccacttgtcaaccacaaaatatttaaatttacctggaagccgcccg

SEQ ID NO: 1013666 - DNA, 120 bp, Artificial Sequence
  ENSG00000269416_19 (sequence is synthesized)
gtggggctctacgccaatgtgacattactgttctgccttggcctgtacctgaaaaggcattgtgacatattgctgggcccagcaacaaggtggcatgagtcttccgtatggaccctgaca

SEQ ID NO: 1013667 - DNA, 120 bp, Artificial Sequence
  ENSG00000269416_20 (sequence is synthesized)
ttaggcccactacctatgagattgcatgctcctgcctgggctgtgcccacagtgaccttgtgacatatatctgcatccatgacctaaaagatgtgacacttcttgcctgcaacctgccct

SEQ ID NO: 1013668 - DNA, 120 bp, Artificial Sequence
  ENSG00000269416_21 (sequence is synthesized)
atcagcacgcctatgaggctgtgacttcactaattagactaagtccacagcaggagtatgggctgttaggtacaaattttgtctactgttgagattgtaactcctgttcttagacacaac

SEQ ID NO: 1013669 - DNA, 120 bp, Artificial Sequence
  ENSG00000269416_22 (sequence is synthesized)
atataggaagggttaacctcctatacctaaaaccggaacatgtgtgggattgttaatttgatccctgcaccttctcacaggtttacttggaacatatttctctgcccagcacctgagtga

SEQ ID NO: 1013670 - DNA, 120 bp, Artificial Sequence
  ENSG00000269416_23 (sequence is synthesized)
tctgactgtcttgcctacagatggaatagtgacatatagctgaacccagaactgactctctttttctgcattggtgctgctcacagggggcattgtgacatatcgctgggccttgcactt

SEQ ID NO: 1013671 - DNA, 120 bp, Artificial Sequence
  ENSG00000269416_24 (sequence is synthesized)
aggtgatgtgagtctcctttgccttggcactgcccacagaatgcattgtcacatatctctgggccccacaccaggttttttgactttcctacctgtcacctgaccacataagcaattgtg

SEQ ID NO: 1013672 - DNA, 120 bp, Artificial Sequence
  ENSG00000269416_25 (sequence is synthesized)
acatattgctgggacatacaccctggtaatgcaactctactacccacaaggagcattgtgacatatattttcacacctcacccacatgatgtgactttcttctcctgcctggtccctgct

SEQ ID NO: 1013673 - DNA, 120 bp, Artificial Sequence
  ENSG00000269416_26 (sequence is synthesized)
acttctccctggaagcagacaccaggagagaactgtaacatatccctggatgagcacccaggtgatgtgatattcctgcttggttctttccctcagggaagattgtgagatacccttggc

SEQ ID NO: 1013674 - DNA, 120 bp, Artificial Sequence
  ENSG00000269416_27 (sequence is synthesized)
cctggctctttcacagggggcattgtgtcatattgctgggccccacacataggttatgtgagtctcctgcctgtgccctacccatgtaggccattgtgacatattgctgggtccaacacc

SEQ ID NO: 1013675 - DNA, 120 bp, Artificial Sequence
  ENSG00000269416_28 (sequence is synthesized)
caggtgatgtaactctactgcctcggtcctgcctacagcggacattgtgatataaccctgcacccatcacacaggaggagactgtaacgtatccctaattgagcacccaggtggtgtgac

SEQ ID NO: 1013676 - DNA, 120 bp, Artificial Sequence
  ENSG00000269416_29 (sequence is synthesized)
tgagagattgtgacacatcttctggcacagaaatcaagtgatgtgtttctcctgcctgagctttgctcatagaaagcattgtgacatatctctggtctcagcacccaggtgtgattttga

SEQ ID NO: 1013677 - DNA, 120 bp, Artificial Sequence
  ENSG00000272817_0 (sequence is synthesized)
cgcccttagctttcccttccccacgcctcccccatcaaccctccctaagccggcaggcagtctcagccgttccagaaattgacaaagaagttgcagagggagtgccacttctcagcgcac

SEQ ID NO: 1013678 - DNA, 120 bp, Artificial Sequence
  ENSG00000272817_1 (sequence is synthesized)
cgcgaggaggcaaccactcagcagcagcagcagcgacggcgacagcgacgctcgcagcttcggaggagtcatgctccgcggtttccgcgctccgctgttctcagaccacgtttgtcgggg

SEQ ID NO: 1013679 - DNA, 120 bp, Artificial Sequence
  ENSG00000272817_2 (sequence is synthesized)
tgcacctgcgaactactcttccgcagactttctagaatctgcagcctgcgaggagaccctctgaggagctttcctggggaaactgcttactgtctaaataatcactttcgaaccatgtat

SEQ ID NO: 1013680 - DNA, 120 bp, Artificial Sequence
  ENSG00000272817_3 (sequence is synthesized)
gcattgagattttcttccccttgcaaatacgatagcaaaacgatgcgtgataattgccccctctaccccttccttcattttctcccttctccaacctgcaataaactatctacaaaatca

SEQ ID NO: 1013681 - DNA, 120 bp, Artificial Sequence
  ENSG00000272814_0 (sequence is synthesized)
acgtaatgcagtttgcccaggatcagcatggcctcacacatgtactgtggctgaaatgacaaggacatgttaccagcgcctgccccaaagttaccttggggtgaacacccccactgaacc

SEQ ID NO: 1013682 - DNA, 120 bp, Artificial Sequence
  ENSG00000272814_1 (sequence is synthesized)
cccctcctcctccagaaagccttctttgatgctcaagcacatgccgacagctccccgctctcacccatggtctgcagcctacattgtggttctcaataaaattctcctatgagtccctaa

SEQ ID NO: 1013683 - DNA, 120 bp, Artificial Sequence
  ENSG00000272812_0 (sequence is synthesized)
gtttagatgggaagtggatgggtctgaggaatttgaacaaacaccgacaatgaaggagagtgacctgagcaagtagtagtggggtaaatggaaatagacaaaatgggaatcagcagagat

SEQ ID NO: 1013684 - DNA, 120 bp, Artificial Sequence
  ENSG00000272812_1 (sequence is synthesized)
atggaggacagaatacaatgaggaggccttgaccgtcagtagcagagagggcagcagaagcctaattcccaaattctttagatggttttctgatttccaaattagtttcccttttaaatt

SEQ ID NO: 1013685 - DNA, 120 bp, Artificial Sequence
  ENSG00000272812_2 (sequence is synthesized)
attcagtgtgcacttcgtaaggataatgatgatttgagttagtttagtattcaacagcttcctctattcctttatatgatctctgtatttaatggctgtggcataaagtttccaactaag

SEQ ID NO: 1013686 - DNA, 120 bp, Artificial Sequence
  ENSG00000272812_3 (sequence is synthesized)
tttaagtatcaagttttctttgtgctgttttctgcaaatattgaaggatgacctggattgtcctagaactttgttccaacagattacatgtgttcataatgaatagactgctcaaagata

SEQ ID NO: 1013687 - DNA, 120 bp, Artificial Sequence
  ENSG00000272810_0 (sequence is synthesized)
ataggattacatttgttttatttccattttatatgtttcaaaaacaggcatactaaattacagcattggaaatcaaaataggggttatgtttagggcagatggagtgataatgtgactgg

SEQ ID NO: 1013688 - DNA, 120 bp, Artificial Sequence
  ENSG00000272810_1 (sequence is synthesized)
aagcaagcatcaggcggctctgggagggttggctgattttctgtttttttacttgtgtggcaattattatggtgttcactttgtgttcatttattgagctttgcatttttgttttgctgt

SEQ ID NO: 1013689 - DNA, 120 bp, Artificial Sequence
  ENSG00000272810_2 (sequence is synthesized)
aatgttgaaatcttctaatacgaaattttttttcaatgagaaggattttaagcatccagaatcaattttaaaatctccaatttgctttatatgtaggtttatggactgcttaactgctac

SEQ ID NO: 1013690 - DNA, 120 bp, Artificial Sequence
  ENSG00000272810_3 (sequence is synthesized)
tcattttttccttcatttatcaatagtgaaatatgaaattaaaataatgactatttgtggcaaaattagggactatgtagcatattaacaactttataaataaaagaataaatcaactca

SEQ ID NO: 1013691 - DNA, 120 bp, Artificial Sequence
  ENSG00000265702_0 (sequence is synthesized)
tatgcatcaggactgggctagccactgcctccgttttctctgggctcctgagataacctccacctgcctctagattctgtgccagctgatcgttatctatctcatcaactcttgttccat

SEQ ID NO: 1013692 - DNA, 120 bp, Artificial Sequence
  ENSG00000265702_1 (sequence is synthesized)
caggaaactgcatcttgagacccagacacatgcaaatggccttctgagttcattcttgatggagaggagctggaagaatccactaaggacaaattgccctgtggatttagtaagagatct

SEQ ID NO: 1013693 - DNA, 120 bp, Artificial Sequence
  ENSG00000265702_2 (sequence is synthesized)
cactggcaaatggagtcctatttctaatgggagacagtggttggcaaacatgaaaccctgagtttccctctgagtctgagctgtgaactgaagtcgatgacattgacaagtctactggaa

SEQ ID NO: 1013694 - DNA, 120 bp, Artificial Sequence
  ENSG00000265702_3 (sequence is synthesized)
tatcatctctcagagcagaatgcatgaatgatgcaggagggttataggatgaattcactgatgatcttggagatattggtctgccagaaataaagtagtcaagagaattttgagaactgt

SEQ ID NO: 1013695 - DNA, 120 bp, Artificial Sequence
  ENSG00000265702_4 (sequence is synthesized)
gaggcaactgcctggccagtgtggaggcagctttagtccctgggaccgtttctgtgcccaaggagagggagggcaggggaaggatggaatttcatctagagtagcaggtcctggttgcct

SEQ ID NO: 1013696 - DNA, 120 bp, Artificial Sequence
  ENSG00000265702_5 (sequence is synthesized)
catacattttcagcattgacaccaacctcttgtctgggctcggatttggtgtcccacgaaagagggctctttttcgcattttcactgccacctctgtccttctctgtagcagattcccta

SEQ ID NO: 1013697 - DNA, 120 bp, Artificial Sequence
  ENSG00000265702_6 (sequence is synthesized)
tgacctctgcaattttcagcattttcttcaaaatttttatttttggcctgaggggtcgatgtccccccaaatctacttcttttgtgatgggaaggagaacagggtgagcgcacaccaacc

SEQ ID NO: 1013698 - DNA, 120 bp, Artificial Sequence
  ENSG00000265702_7 (sequence is synthesized)
cacagacattcttcagactgggtttcctcttcagtgtcatcgctttctcttctgctgttcaatgacaaaatggaataaaagtcttcatctcggaacctaaatgatgcctttcttggccct

SEQ ID NO: 1013699 - DNA, 120 bp, Artificial Sequence
  ENSG00000265702_8 (sequence is synthesized)
cctacagtggtgggtgtgagtggtggccccgagaactcactcaatacttgaggactattttttccttggaaggcctgggacagggctggatgcagctcactctgggaaggagcactcggg

SEQ ID NO: 1013700 - DNA, 120 bp, Artificial Sequence
  ENSG00000265702_9 (sequence is synthesized)
tctccttttttggctctatcaggggcgttctcagtcattggctgtgacgatgggaccaagtttcttctctcttgatttggcctcttcagcttagtgttacacatcaggccttcttgttga

SEQ ID NO: 1013701 - DNA, 120 bp, Artificial Sequence
  ENSG00000265702_10 (sequence is synthesized)
actacttgatctgcattgagaaaagacacatttatcgttccagtaaaagggcccatggatgaaaggcctctagcaccaagtgcaaaattgccctttaaatgcaacagacaagacctagag

SEQ ID NO: 1013702 - DNA, 120 bp, Artificial Sequence
  ENSG00000265702_11 (sequence is synthesized)
aagaaaacagacacggtcaaaatggctggaggtacaagaggagcagagcccagcaggcttcattttactgccccgtattctcctttgtacccctgtggtcctagggaaatggggggaccc

SEQ ID NO: 1013703 - DNA, 120 bp, Artificial Sequence
  ENSG00000265702_12 (sequence is synthesized)
tgaggatacagattctttctgcagaagctcccggaagactggcccagccccagccagtcaggactgatgatgcgcaaacctcacactaaatactggcttttgttccatacgtactgaaag

SEQ ID NO: 1013704 - DNA, 120 bp, Artificial Sequence
  ENSG00000265702_13 (sequence is synthesized)
ggaaaaccaccactctgggaatgacttctacaaaaaccaccagccctttctcatccacgttcattcaatgtacatttatgacaccctgcctcccacgcagctttacaagaacttaagaga

SEQ ID NO: 1013705 - DNA, 120 bp, Artificial Sequence
  ENSG00000265702_14 (sequence is synthesized)
agtataacatgtcttggcagatcaggaggaaggctataggagctggcgcccggggaacactggggattttggtcatgtttactatttagtgaaaataaaaattataaatcgctcatgaaa

SEQ ID NO: 1013706 - DNA, 120 bp, Artificial Sequence
  ENSG00000265702_15 (sequence is synthesized)
gaaactgcatcttgagtcctcacgggactgggggccatctggtcaaggaaaggaaactggctagagactaaaatcaaaagaggaagaaatggacattgctctggatggagaaatatatgc

SEQ ID NO: 1013707 - DNA, 120 bp, Artificial Sequence
  ENSG00000265702_16 (sequence is synthesized)
tcaatttcttgaaagacttttttccccatgaaagggcagctcagtgtaaagaagcagaattacagttttccattatggacattctcaataacttaaagacattttcaacattcagacttc

SEQ ID NO: 1013708 - DNA, 120 bp, Artificial Sequence
  ENSG00000265702_17 (sequence is synthesized)
aatacatttcaacataatttccatattttcgtaagtaatcaggaagaacatgtgtacatgggagtgagtgctccaactggtgaagataaactagagagagatcttgcaagtttgagaaga

SEQ ID NO: 1013709 - DNA, 120 bp, Artificial Sequence
  ENSG00000265702_18 (sequence is synthesized)
atgatgaaccaataaacctggacacaatctcccgaataacaccacacatgccaacaaatgacatcagcattccagaatgtaagcggctggaatctgatgaagataagaactaacgaaaat

SEQ ID NO: 1013710 - DNA, 120 bp, Artificial Sequence
  ENSG00000265702_19 (sequence is synthesized)
cccacatgagtcatgctaatatacacaaagagggctcaaattccaagaatcaatttccagatcagtaagccaagatcagagcatggtaaacacctatcataaatgaaatggtagaatcct

SEQ ID NO: 1013711 - DNA, 120 bp, Artificial Sequence
  ENSG00000265702_20 (sequence is synthesized)
gacatggtgtttaatgatggctttacaaagtatcacatttcatagctgtgaactatccccaaatcatctcacaaaaaaggaaagatcaaagaaaagggcaattcagaaaagatcttattt

SEQ ID NO: 1013712 - DNA, 120 bp, Artificial Sequence
  ENSG00000265702_21 (sequence is synthesized)
ctctctctctcttgcatgaaaaagagcacataaaatagaagcagtggttaccccagcgtggcccttcagagaaccgaggtaactatggtaactaagaacggtcttttagttcgcaaggtt

SEQ ID NO: 1013713 - DNA, 120 bp, Artificial Sequence
  ENSG00000265702_22 (sequence is synthesized)
cgaattctagaactgttggttggatttggggtaagtcccataagggagagctgcgaacttcaagtgtggactggttcattctctagggagatagcaaccttttcctaaaaaatcttggtt

SEQ ID NO: 1013714 - DNA, 120 bp, Artificial Sequence
  ENSG00000265702_23 (sequence is synthesized)
cttcattgctggagagaagaacaagccctgtgaagcagtcagagatccttatacccagcagacttaagggtgtggtattcaaggaaaaaaacactttgggaaatagagaagaaactgatc

SEQ ID NO: 1013715 - DNA, 120 bp, Artificial Sequence
  ENSG00000265702_24 (sequence is synthesized)
aggaacaccagacttttctttataaatacgtatattttaagagcaacaaaacagagacaattttctcaaaataagcaaccactaaaatgtcaaggaaggacccatttatgacttaaaatt

SEQ ID NO: 1013716 - DNA, 120 bp, Artificial Sequence
  ENSG00000265702_25 (sequence is synthesized)
cccatggctctctaacgaaagcaatgctaattttggccttgggaaagtggaaaaaatatataattatgaaaagtcctcacctttcttgcaatttcttgagtttctcagggtctgccttta

SEQ ID NO: 1013717 - DNA, 120 bp, Artificial Sequence
  ENSG00000265702_26 (sequence is synthesized)
tcttactggtttccttttcatctgtgaaaccagaggctgccatcctgctcccattatcattttgatttgggaaatgagacactgcaaagaaagtaaatggtgtattttcttgcagagacc

SEQ ID NO: 1013718 - DNA, 120 bp, Artificial Sequence
  ENSG00000265702_27 (sequence is synthesized)
accctgttccagccaacagtctccagcgtccctgacagatgtcgggaagttcttttccccgtaagatcccggagaatgtcctgaggctgccgtgtggaagctctggggcctttctcgtct

SEQ ID NO: 1013719 - DNA, 120 bp, Artificial Sequence
  ENSG00000265702_28 (sequence is synthesized)
cccactgccagcttaatgagctgtgctggtagcaacagatggcgccccgcagggtctcacttggatagcttggaaagttcctggacaccagttggacttgccgcgaaaaccattaatctg

SEQ ID NO: 1013720 - DNA, 120 bp, Artificial Sequence
  ENSG00000265702_29 (sequence is synthesized)
gcctttcagagaaaatcttcagaagaatgtatttgcaaggtgaattatgaggatttaggatttgccctcaaatttctctttcaggctgctcttcaaataaatatttccccatccaaaaga

SEQ ID NO: 1013721 - DNA, 120 bp, Artificial Sequence
  ENSG00000265702_30 (sequence is synthesized)
gttcaaaaggctcattttctcatagagtttgaggccatttttgtgagtggaggaacttgaggttttaggaattttatttaaatcatggagatattttcgactcgaatggctcttaacttt

SEQ ID NO: 1013722 - DNA, 85 bp, Artificial Sequence
  ENSG00000265702_31 (sequence is synthesized)
aatcatggagatattttcgactcgaatggctcttaactttgatcttgggtctaggctgcctggttgaaactactactggttttcg

SEQ ID NO: 1013723 - DNA, 120 bp, Artificial Sequence
  ENSG00000265702_32 (sequence is synthesized)
aggcgtgagccactgtgcccagcgaacctactggttggttttcaagagttgcatcactttaactggaacatatcggaagagtgggaccagattttaagagacccagacacatgcaaatgg

SEQ ID NO: 1013724 - DNA, 120 bp, Artificial Sequence
  ENSG00000265702_33 (sequence is synthesized)
gagcagctttgagctggttcgcgccttccaggcaggactactgggagttctcaaaagcacccccgcagtcggctgtgtcaggatcacctgggtccggtgtgaacacgattccagggcccc

SEQ ID NO: 1013725 - DNA, 120 bp, Artificial Sequence
  ENSG00000277825_0 (sequence is synthesized)
tctcaaactcctggcctcaggtagatttatttttaaaaagcagtttttcagcctcagatattttgttacatagactcgtctcagggcagtaattcatgagattgaaaatacagggccggg

SEQ ID NO: 1013726 - DNA, 120 bp, Artificial Sequence
  ENSG00000277829_0 (sequence is synthesized)
gaaatgaggatggaagagtgtgcagagcctgagacacttcaatgccaggtccagaagcttgcagtttctcttcaaggccacaaggagccatagaaggttatagagcaggggagtgcagca

SEQ ID NO: 1013727 - DNA, 120 bp, Artificial Sequence
  ENSG00000277829_1 (sequence is synthesized)
ccatcagagctgcaattgagctccaggcctcaggtgtgtagcagacaaaggcacccctaattcaaggggtgaatcaggcatggtctctacccttgcagagagtttgggtacctgagccca

SEQ ID NO: 1013728 - DNA, 120 bp, Artificial Sequence
  ENSG00000277829_2 (sequence is synthesized)
agcatttcctgacccaagggacccaacaaacagctgcgataggattttggagggacctgtacccgcacctccaccttcacaagttgtgcatttatttcatggtttaatgacttcaccttc

SEQ ID NO: 1013729 - DNA, 120 bp, Artificial Sequence
  ENSG00000277829_3 (sequence is synthesized)
ttttggacttttatattatgaaaaatttcaaacctatagaaaagtagacagaatagtatcatgaatacccacatacctatcacccagatttaataaatcttaacattttgtcatgcttca

SEQ ID NO: 1013730 - DNA, 120 bp, Artificial Sequence
  ENSG00000288044_0 (sequence is synthesized)
tccgcccacagctgtgtccggaagcagcaagcgtgcctgggcagagacccccagagtgtaaagaggtcctgggacaggctttgcacgttccacaagagtgtctcgctgtgtcgtctagac

SEQ ID NO: 1013731 - DNA, 120 bp, Artificial Sequence
  ENSG00000288044_1 (sequence is synthesized)
gtgccaccatgcctggctcaaacacaaagttttttcataaaactcacttggcggcaaaattctaccttacctgaagttatttacggggtttttaatttccactttgaataaatattcaca

SEQ ID NO: 1013732 - DNA, 120 bp, Artificial Sequence
  ENSG00000288045_0 (sequence is synthesized)
ggcctttcccggggcgctggtggccggcggggcgtctagagctcaggctggactggggcccccgcggcgtgtgtccgcgctggcagcagggagagggggcttgtccgtgagaaacggccc

SEQ ID NO: 1013733 - DNA, 120 bp, Artificial Sequence
  ENSG00000288045_1 (sequence is synthesized)
caggaaattcccagggcaaggtcgttttcggagaacaaagtcctctcgccccctccccacgcctgcagcgagacaaaaagcctcagggaggtgagaggtgccgcaccccgggagctggag

SEQ ID NO: 1013734 - DNA, 120 bp, Artificial Sequence
  ENSG00000288045_2 (sequence is synthesized)
agaggagtctgggacggagaaactttaaaaagtaaatgcccaaaccaactccttgaatgtcctacaaaagaataagaaaaccccgagggaggtgaaccacaaaaattgctttgcaagcaa

SEQ ID NO: 1013735 - DNA, 120 bp, Artificial Sequence
  ENSG00000288045_3 (sequence is synthesized)
tgtccggcaccatcagcaactcctactggactcccaggagtttgcaagcgttcttaaccccttcggacgctccagccagatgccagtcaaacagatgatgctcttgcctgaggggaaagg

SEQ ID NO: 1013736 - DNA, 120 bp, Artificial Sequence
  ENSG00000288045_4 (sequence is synthesized)
aaagacacaacctagtgccacaggttttactcagaaactgtttccccagcttctccagctctttgtacttatttgtgtgtttttatatgcaagttagaactaacagtctattaaagctgt

SEQ ID NO: 1013737 - DNA, 120 bp, Artificial Sequence
  ENSG00000288045_5 (sequence is synthesized)
ggctagtgatggggaacggtcctcctgcttcccgcttttgtttccacttcccccattaactgttgtactctgttgagggaactcctttcagaaacagcaaaccagagaaactgcctcgct

SEQ ID NO: 1013738 - DNA, 120 bp, Artificial Sequence
  ENSG00000288045_6 (sequence is synthesized)
agcaaattcatgggctcagaaaataaacgtcaagaaggctcagattaaaataccttttaaagataaaagactccagttcgcagtctcataatcttgtcgaattgtctcaaacgcttggaa

SEQ ID NO: 1013739 - DNA, 120 bp, Artificial Sequence
  ENSG00000288045_7 (sequence is synthesized)
aaggaactcgctaggcagataaccttttgttcattaacattactgggaaacaagatgagaggcctcaagaaaggggtggaactcagaaaggagtgaaagcagcaaaatttagtcagatgc

SEQ ID NO: 1013740 - DNA, 120 bp, Artificial Sequence
  ENSG00000288045_8 (sequence is synthesized)
caaaggcttggcagaaaaaaaaatagggaaaaccactacagtgtttttagctagttatcatggagaaattgatgccttcagtctcttatctgtctactctccaatatttctactcgtgga

SEQ ID NO: 1013741 - DNA, 120 bp, Artificial Sequence
  ENSG00000288045_9 (sequence is synthesized)
cgttccaaatagttcacttgaaagcaatatgaatgtccggagatgagggagtttatgtaaattatggggttgaaaatatacaggaaaatgtttttaataaattaaggaattgcttgttag

SEQ ID NO: 1013742 - DNA, 120 bp, Artificial Sequence
  ENSG00000288045_10 (sequence is synthesized)
ggcacaaaactgcagaactggatatgcagctataaaattaagagcttatttacgttaaatgttcagagaaaaagactgtaaggaaatacagcaaaatgttaagaagctctctgggtcttg

SEQ ID NO: 1013743 - DNA, 120 bp, Artificial Sequence
  ENSG00000288046_0 (sequence is synthesized)
gacagcgcgctgaggcggcttgggcgccatgccctttgggttactcagctcttcagcctcctggaacgctaggacaaaggagtgccttggtgctggcagaagccggggggcacagctggg

SEQ ID NO: 1013744 - DNA, 120 bp, Artificial Sequence
  ENSG00000288046_1 (sequence is synthesized)
ttttacaaggaaggacgaaatctcatctcagcaatcgggatagatcaaccgttgcccgtctgaggtgacccaattcagggaccagccgcttggctctgaacacacacgtgtcacaacccc

SEQ ID NO: 1013745 - DNA, 120 bp, Artificial Sequence
  ENSG00000288046_2 (sequence is synthesized)
agctcgtacccaggccttgctagagctccaggtttatgagccgtaactcagcagaagcctagcatgagaacaactcatctgaagctccaacatttggggaatgcaacctttcgacagaca

SEQ ID NO: 1013746 - DNA, 120 bp, Artificial Sequence
  ENSG00000288046_3 (sequence is synthesized)
tttgctgaatggataggagactcctgaaagcagaattctgcacattctgtggaccagccctgactacggagagcaggtgttagccagtatccatgcgcagtgcctcttagtcttacctgt

SEQ ID NO: 1013747 - DNA, 120 bp, Artificial Sequence
  ENSG00000288046_4 (sequence is synthesized)
ctgctgccttacgcaagcatggagcttaatatgctagctgtgttctcctaacctcagatatctgtaaaaccagccacagtaagataacatggtagagcacaaaatgcttagaagagattt

SEQ ID NO: 1013748 - DNA, 120 bp, Artificial Sequence
  ENSG00000288046_5 (sequence is synthesized)
atttgaagcaatgcttcccagaagtttttcaatgcagcttatggcgagaaacacattttacatctctactcagtacgcagccactcatactcaactgaaacatcttctgaaacaatattt

SEQ ID NO: 1013749 - DNA, 120 bp, Artificial Sequence
  ENSG00000288046_6 (sequence is synthesized)
cacttcactctctgcaatacagaaaataccagatcgtattgtatgttatttcattgttttaaaatcctgagcctagcttgctaatagattacaactcagtttgaaaagcacaggctaagg

SEQ ID NO: 1013750 - DNA, 120 bp, Artificial Sequence
  ENSG00000288046_7 (sequence is synthesized)
ggcttcaaataggggtgacacattgaacacacacatttatcacctctcccttcacagatctcattaaaatgataataaaggaacaaaatggcagaaatccacaaggacaaacagcaaaca

SEQ ID NO: 1013751 - DNA, 120 bp, Artificial Sequence
  ENSG00000288046_8 (sequence is synthesized)
agagggacatcagcagataggcaacctcaacaagtatatcacaatgagtgacacaccccctataacagccaattttgatggtcctcccatagctcttgccttattctttgtaataggatt

SEQ ID NO: 1013752 - DNA, 120 bp, Artificial Sequence
  ENSG00000288046_9 (sequence is synthesized)
cagattgtttaaaatccccatattctaccgcaaagtcatgttatcaggaaagaccaaccctaaccccagttccatggagtaaagattaattaatctaaactctattaattgtattccctt

SEQ ID NO: 1013753 - DNA, 120 bp, Artificial Sequence
  ENSG00000288046_10 (sequence is synthesized)
tatctggtgataagtttaagagctgatcccttaattttggacatgggagcacaagagaaactcactcaagactgggattaattgtaggaaatatttcacagtttccacaagtcagaagag

SEQ ID NO: 1013754 - DNA, 120 bp, Artificial Sequence
  ENSG00000288046_11 (sequence is synthesized)
ctaatcccaaccctctgtatctggaacatacactgctgccattttctgcccatgaagggaaatacccaaggtactctggcagaacagatttttgaaaacttgagtccctgatgatgtaag

SEQ ID NO: 1013755 - DNA, 120 bp, Artificial Sequence
  ENSG00000288046_12 (sequence is synthesized)
tcagccacaatgttaatcaaccccagagccaccttatttctagacttattatgcaagataaaaaaaatcaacttgcagtatgaaccacttttagttgggttttatttcggcaaacatatg

SEQ ID NO: 1013756 - DNA, 120 bp, Artificial Sequence
  ENSG00000288046_13 (sequence is synthesized)
ccaaggcacagcataaaattccacaagggacaaatcaatgagcccagaacttccaatgagggggacaactaagtcatatacacaataactagaatgtaaatggtattgaacttcaagcac

SEQ ID NO: 1013757 - DNA, 120 bp, Artificial Sequence
  ENSG00000288046_14 (sequence is synthesized)
aacattggatgctagaaaaaaagaatgccttcaaagttttaaaagaaaacacttttctaccttgaattctgcaatcaaccataccattgatcaagaacaaaagtagatagaattatcctt

SEQ ID NO: 1013758 - DNA, 120 bp, Artificial Sequence
  ENSG00000288046_15 (sequence is synthesized)
agacatgcaaggacgaaaatttaccttccatatgccttctaggagctaatagttgatgggtttcaggaaaagaaaggaatataaatgaaaataagggaagagaagggacctaggaaccag

SEQ ID NO: 1013759 - DNA, 120 bp, Artificial Sequence
  ENSG00000288046_16 (sequence is synthesized)
tgagtccagtcagcagggtggaagagctgacagctacactgtgcagtccacacaagagtagaaggggaagacatccagggaaaaattacatagacttaacagagtagaaatatggcagat

SEQ ID NO: 1013760 - DNA, 120 bp, Artificial Sequence
  ENSG00000288046_17 (sequence is synthesized)
ctagtggcaaagtgatcatcagaaagaaatcaaatatgctgtactgtataacgaattaccctgagactttcagacttaaaataagcatttattatcttctattttctgagcatgaggcat

SEQ ID NO: 1013761 - DNA, 120 bp, Artificial Sequence
  ENSG00000288046_18 (sequence is synthesized)
agtttcagctcaggatctcttctgaggttgtcaagatgtcagctggggctccagtcagctgagagcatgaccagaaccgtagaatcagcctccaccatggctgactcatgttgcagttgg

SEQ ID NO: 1013762 - DNA, 120 bp, Artificial Sequence
  ENSG00000288046_19 (sequence is synthesized)
cagaaggcctcagttccttgctggctgtgggcaacaggcctcagctgcctgccacatggacctgttcagagggctgctcaagtggcctaacatggcagctggttttccccaaagcaatcc

SEQ ID NO: 1013763 - DNA, 120 bp, Artificial Sequence
  ENSG00000288046_20 (sequence is synthesized)
atgagaaagttcgtgggggggggctgtaatgccttttatgacctagtctcagaagtcacatgtcattatttctgccatgttctatttgttagaagcaattcactaagtacagcccactta

SEQ ID NO: 1013764 - DNA, 120 bp, Artificial Sequence
  ENSG00000288046_21 (sequence is synthesized)
taaggcaagggaaatagggctctgcattttataagaatattgaatttttgacatgtttttaaactattacacatatgcatataaaagtagcatgtaagttaataagtgtggcaaagagat

SEQ ID NO: 1013765 - DNA, 120 bp, Artificial Sequence
  ENSG00000288046_22 (sequence is synthesized)
aacttcaagggaaacaaaatctaaagaaaaaatgtaatcctaatgcaccacgcagatttgctattaacaatatcgacatagttttggtgttataaagtgattattgatgtaattaaaagc

SEQ ID NO: 1013766 - DNA, 120 bp, Artificial Sequence
  ENSG00000288046_23 (sequence is synthesized)
tgtactccagcctgaatgacagacttaaacaaaaaactatgcagctatataaagagggatgaggaaagataagagcataagggagccaacttttcattaactctgaggaagccaattgat

SEQ ID NO: 1013767 - DNA, 120 bp, Artificial Sequence
  ENSG00000288046_24 (sequence is synthesized)
attacctgtaattgataaatcaaaaaactatgatcaagacagtcttgcactggcaaaataggtcaatgaccatatttgttcattgaaaaaatagaaaacccagacagacctcacccaaat

SEQ ID NO: 1013768 - DNA, 120 bp, Artificial Sequence
  ENSG00000288046_25 (sequence is synthesized)
ataatcaactgatctttgacaaaggggaaaggatagtcttttcagtaaatggtgctgaaacaactggacatccacatgcaaaagaatctagtcacagactatatccttcacaaaaattaa

SEQ ID NO: 1013769 - DNA, 120 bp, Artificial Sequence
  ENSG00000288046_26 (sequence is synthesized)
tttaaaatggatcatagatgcaaatgttaaacctaaaactaagactcctagcaggtcacataggaaagcatctagatgacccctgggtttgggaatgactttttagacaacaccaaagaa

SEQ ID NO: 1013770 - DNA, 120 bp, Artificial Sequence
  ENSG00000288046_27 (sequence is synthesized)
atgattaaagaattgataaattggactttattaaaattaaaaacttctgctctgtgaaaggcactgtcatgaaaataagaaaagccacagattggagaaaatatttgcaagagataaatc

SEQ ID NO: 1013771 - DNA, 120 bp, Artificial Sequence
  ENSG00000288046_28 (sequence is synthesized)
tgataaaggactgttattcaaaatatataaaaagtcttaaaactcaataaggaaacaacttaattaaaaatgggcaaaagatctgaacagatacctcacaaaagacatacagctggcaaa

SEQ ID NO: 1013772 - DNA, 120 bp, Artificial Sequence
  ENSG00000288046_29 (sequence is synthesized)
taagcatatgaaaagatgctccacatcatatatcattagagaattgcgaattaaaacgagatactgctacacacttattagaatggccaaatctagaataccgtcaacaccaaatgttgg

SEQ ID NO: 1013773 - DNA, 120 bp, Artificial Sequence
  ENSG00000288046_30 (sequence is synthesized)
caaggatgtggagcatcaggaactcccattcattgctgtgtgaatgccaaatagtagtttggaagacagtttggcagtttcttacaaagcaactacttttgcaatatactccagaatttg

SEQ ID NO: 1013774 - DNA, 120 bp, Artificial Sequence
  ENSG00000288046_31 (sequence is synthesized)
tactccttggtatttactcaaatgagttaaaaacatgtccacacaaaaccctgcacatacccttcactgcttccatgttgtagcaaccaatgaataaaattgctagaaacaatgtccttc

SEQ ID NO: 1013775 - DNA, 120 bp, Artificial Sequence
  ENSG00000288046_32 (sequence is synthesized)
aataggtgaatggataaaccatcgtgcatcaagacagtggaatattatccagtactaaaaaacgcaatatggaagccatgaagacatggaagaaacttaaatgcatattgctaagtaaac

SEQ ID NO: 1013776 - DNA, 120 bp, Artificial Sequence
  ENSG00000288046_33 (sequence is synthesized)
aaagccaatctgaaaaggctacacatgctgtatgagtccaactatgtgacatgctggaaaagacaactatggagacaggaagatgatcagtggttgccaggagttagaggggagggaagg

SEQ ID NO: 1013777 - DNA, 120 bp, Artificial Sequence
  ENSG00000288046_34 (sequence is synthesized)
atgactaggtggagaacagaggatttttagggcaatgaaactgtatattacagtgatggattcatggcataatacatttgtctaaacccatagaatgtacaacaccaagagtaaacgcta

SEQ ID NO: 1013778 - DNA, 120 bp, Artificial Sequence
  ENSG00000288047_0 (sequence is synthesized)
gcaatgccgtctgcgctccgtccactgaaaagctctgctcagagatgtcagtcagtgccctgggccggccacccccctgctctgctggatgtcgggagaatgtattactgagagagaaga

SEQ ID NO: 1013779 - DNA, 120 bp, Artificial Sequence
  ENSG00000288047_1 (sequence is synthesized)
gaaacactctgaatggagcatgattattttcagatctccattttgctgatggcttgagcaagcccaggccctcaaaataggctgaatgaaaagaggtgtgatcgatgaaaactggccgct

SEQ ID NO: 1013780 - DNA, 120 bp, Artificial Sequence
  ENSG00000288047_2 (sequence is synthesized)
ccttctttgcaactccttccattaggtggtggagtctacgttgccctccctttgatccaggctggccacacaaattactttcaccaacagaatgctgtagaagtgatactgcatgacctc

SEQ ID NO: 1013781 - DNA, 120 bp, Artificial Sequence
  ENSG00000288047_3 (sequence is synthesized)
tgagcccaggccttaagggactttgcagcttctgttcttggcctctggctgctctgtgactaccatggaaggagttccacactaacctcctgtagggtaagagacacgtggaggcagact

SEQ ID NO: 1013782 - DNA, 120 bp, Artificial Sequence
  ENSG00000288047_4 (sequence is synthesized)
acctggctgaagcctggcccccagtcacccactgacggcagctgcaaaggtgcccgtgatgagacaagaagaccaaggctcagggaggttatgcaatgagtcaccagcaaggacgtgcca

SEQ ID NO: 1013783 - DNA, 120 bp, Artificial Sequence
  ENSG00000288047_5 (sequence is synthesized)
gagctgagatgcaaaccaggtcctcgagttcctgctcttgtgccctttccagcacctctgctctctcttggaagctgccggggcgaggctcaggctgtggctggtccatcctatgctgga

SEQ ID NO: 1013784 - DNA, 120 bp, Artificial Sequence
  ENSG00000288047_6 (sequence is synthesized)
ccaagttgtccctaaccctccagggctctctcacatctggggaaagatctgtgggcttctggacagcatttcatttggctacgtcttgtgcttgtggcactatgcggggcctctggggaa

SEQ ID NO: 1013785 - DNA, 120 bp, Artificial Sequence
  ENSG00000288047_7 (sequence is synthesized)
cttcttttgctcaccatatttcctcatttcccgacctgtcccctgcacagccaggttccctttgaaatgccatctggagcagcaatggcccccagacaggccggctaagcagcagggcag

SEQ ID NO: 1013786 - DNA, 120 bp, Artificial Sequence
  ENSG00000288047_8 (sequence is synthesized)
ccactccccagagcaagcctggtggccgagccggtgtgggcaaaacaagaagactctttctgcttctgaatgatctggccctgctgccatggggtcctttataaactctctcctgagtta

SEQ ID NO: 1013787 - DNA, 120 bp, Artificial Sequence
  ENSG00000288040_0 (sequence is synthesized)
gggagcagaagcagaggtgaccagagtcctaaatcatcaagacaggatggaggtgggtccagccctatggggcttagcaggtgttctccccgtgtgtggagacgagagattgttataaat

SEQ ID NO: 1013788 - DNA, 120 bp, Artificial Sequence
  ENSG00000288040_1 (sequence is synthesized)
acacaagacaaagagataaagagaaaagagctgggcctggaggactactaccatcaagatgcggaagactggtagtggtcccgaatggatgggctcactgatatttattgcatacaagac

SEQ ID NO: 1013789 - DNA, 120 bp, Artificial Sequence
  ENSG00000288040_2 (sequence is synthesized)
agacaaggggacagggtaaggagggtgaatcttctaaatgactgacaaggtgaagcaagtcacgtgattacaggacaggaggcccttcccttttaggtagccgaagcagagagagaaggc

SEQ ID NO: 1013790 - DNA, 86 bp, Artificial Sequence
  ENSG00000288040_3 (sequence is synthesized)
acactatctactgtgaacttcaaagagggaccagaagtacgggcggagcatgaaagaggacaaggagggtgaccactgaagcacag

SEQ ID NO: 1013791 - DNA, 69 bp, Artificial Sequence
  ENSG00000288040_4 (sequence is synthesized)
tctactgtgaacttcaaagagggaccagaagtacgggcggagcatgaaagaggacaaggagggtgacca

SEQ ID NO: 1013792 - DNA, 90 bp, Artificial Sequence
  ENSG00000288040_5 (sequence is synthesized)
gggtgccgtcccagacactggcgttaccccttgaccaaggagccctcaagtggcccttatgtgggcgtgacagagggctcacctcttgcc

SEQ ID NO: 1013793 - DNA, 120 bp, Artificial Sequence
  ENSG00000288040_6 (sequence is synthesized)
ctttattatactgaaacagtttgtgctttcaatctcttgccttggcacctaggtactctttcacccacaatttctttttctgtattgaggtaatctgaaaaaaatgagtggaagagctaa

SEQ ID NO: 1013794 - DNA, 120 bp, Artificial Sequence
  ENSG00000288040_7 (sequence is synthesized)
gaaaaaaatgagtggaagagctaacaatttctactaaagataagtaataatgaagcccttaagaaatattataaacctgtactaactaaaaaataaataaacatatctaaataatggaca

SEQ ID NO: 1013795 - DNA, 120 bp, Artificial Sequence
  ENSG00000288040_8 (sequence is synthesized)
ctgctccctcatgggccaaaagtatataagaaattaacctgaaagcagtgatatcataaaatagtgagaaaggaaaattcatttaataaatagtattgaaagcaagatttgctacataaa

SEQ ID NO: 1013796 - DNA, 120 bp, Artificial Sequence
  ENSG00000288040_9 (sequence is synthesized)
aaacctcacttgatgtagtctaaaataaattttgattaaagtaacacgtaacttccacataagattctaagaccaggtagttcaacttatgattattattttaaaatttgaaaagtctgc

SEQ ID NO: 1013797 - DNA, 120 bp, Artificial Sequence
  ENSG00000288040_10 (sequence is synthesized)
atgattattattttaaaatttgaaaagtctgcaaaaaaagtctatttagagtagctaaactagagtacctctaattttagagtttaaaaaataataattaggctgggcacggtggctcac

SEQ ID NO: 1013798 - DNA, 120 bp, Artificial Sequence
  ENSG00000288041_0 (sequence is synthesized)
gcagagtggatccatggaaaacactgggtaggaaaaaaagaaaaccttgaaatattagcttcaatgaaggaaaatctggataacttattcttatgaatctgaaacaatttaagaaaacaa

SEQ ID NO: 1013799 - DNA, 120 bp, Artificial Sequence
  ENSG00000288041_1 (sequence is synthesized)
atgactgcttgatttttgtgccaattgaatagaatgggattcaatttttaatagcaagttggcatggctaagtaaggtccctgggattctcttgcaatgccgtgaaagcaaaaggacagc

SEQ ID NO: 1013800 - DNA, 120 bp, Artificial Sequence
  ENSG00000288041_2 (sequence is synthesized)
tctcctaacaagaagccaagattgctacaggaggctgaggagaggaaaaagcccttttctcatcaccattgattccttcagtctccatgatttcctctcaagaactgccatttgttgctg

SEQ ID NO: 1013801 - DNA, 120 bp, Artificial Sequence
  ENSG00000288041_3 (sequence is synthesized)
tagatggcccagttgcagacgtgcctgagttcaggatttggagtgggagaaccttatggcccagacctggaagatggaacatcacattccattgagaagaatccattgtctcatggctaa

SEQ ID NO: 1013802 - DNA, 120 bp, Artificial Sequence
  ENSG00000288041_4 (sequence is synthesized)
cctaactgcaatagctagaaatgtgatctagcttggtgcccaggaaaaagcaaaagagtacaacatggatattgagtaacactagcattttcaaccatgaagagagtagagtcgttgtga

SEQ ID NO: 1013803 - DNA, 120 bp, Artificial Sequence
  ENSG00000288041_5 (sequence is synthesized)
gaaaagtatgtaaagttatcgaggtaatcggtgatgaaaccctgacatggaatgtaaattgcttgtggttgaagacaaaggagagttttgtgttggccagctgggttggcagatattaaa

SEQ ID NO: 1013804 - DNA, 120 bp, Artificial Sequence
  ENSG00000288041_6 (sequence is synthesized)
gcaaaggaagaatagatggccttagtgttgagctgagactcttcatataagcttctcatcttgactggcaccatgatgtactctgagcaaataatttcacttccataggcctcaatgtct

SEQ ID NO: 1013805 - DNA, 120 bp, Artificial Sequence
  ENSG00000288041_7 (sequence is synthesized)
ttagctgtatctttacttggaacagaaatagacatatgtactctaagatcacaactcttgactgcttgtctgctaaaagcattcttgtcatgtttttagattgtgatatttttgcctttt

SEQ ID NO: 1013806 - DNA, 120 bp, Artificial Sequence
  ENSG00000288041_8 (sequence is synthesized)
tggagaaatttgcagacatatattccacagttacaaataacagtgaccagttcagttccctatgcttacttcctgtcatttgtacctttaaattccattcattcaaggcttaaaatgaca

SEQ ID NO: 1013807 - DNA, 120 bp, Artificial Sequence
  ENSG00000288041_9 (sequence is synthesized)
ccttttctgtttagattattcacattagtctctgataataatacctacaatttatggagccctaactctagaccaagttctttacttaatgtatcctcacaataaccattggagggaagt

SEQ ID NO: 1013808 - DNA, 120 bp, Artificial Sequence
  ENSG00000288041_10 (sequence is synthesized)
gctgttattcccatcctcaagatgagggaattgaggtgaggagattgggtggcctgacttagcatgccacgtagctaggtttacgaaacattttctttgacccggaaagagttttaacaa

SEQ ID NO: 1013809 - DNA, 120 bp, Artificial Sequence
  ENSG00000288041_11 (sequence is synthesized)
tgagcactgttattaaaagttcaaattagcctttctatttctgggtcttacattttatcatgtatgtatctattatttgtatttctcactagtattttaaaaatctacaactcttgctat

SEQ ID NO: 1013810 - DNA, 120 bp, Artificial Sequence
  ENSG00000288041_12 (sequence is synthesized)
cctcaatgctattgtgtatagttatttacccaactttctcacccttgttcatataatattcaataaattttagagagcaagtaataatcttatttaaatcattactctaaatataaatat

SEQ ID NO: 1013811 - DNA, 120 bp, Artificial Sequence
  ENSG00000288041_13 (sequence is synthesized)
aagaacctttacctttaataaaatagaattgattgtctaattgaaattgaaactgattatcttaaaactttaggagacaaacattcctgaaatgagaatgtagatgtcattgccttgctt

SEQ ID NO: 1013812 - DNA, 120 bp, Artificial Sequence
  ENSG00000288041_14 (sequence is synthesized)
ttcctaacaaaactattctttttagtactagtttatttaatctggactccaaaacaatttccagatgaataatgatcctaaagaaaactgaagctttggtctttatattcatgattcctt

SEQ ID NO: 1013813 - DNA, 120 bp, Artificial Sequence
  ENSG00000288041_15 (sequence is synthesized)
ggggatattccctatagttgttaaaattgttctataagaaaactgaaactatagttgaatattttcaatcatgtggaaatgttagatgcctttttgagaagtctggtggagtttacataa

SEQ ID NO: 1013814 - DNA, 120 bp, Artificial Sequence
  ENSG00000288041_16 (sequence is synthesized)
tcaactaaatagcttttatttgcatgcttggatattaatgtattggtattttgaatactggttgagaaacaacagccagtatattaattctgtctaaaaaagatacttgctcatatttta

SEQ ID NO: 1013815 - DNA, 120 bp, Artificial Sequence
  ENSG00000288041_17 (sequence is synthesized)
gcacatttaagaggtaaatttatagctaattttctgtatgaagaattgctttggcttatttattgatatgcagaagaaatgttcattttctttcctttagaaacattccaagtaaatgac

SEQ ID NO: 1013816 - DNA, 120 bp, Artificial Sequence
  ENSG00000288042_0 (sequence is synthesized)
ggaaggaaaacaaggaaaagcgatattgaagaacataaaagtatagccagtttcctcctttgatcagcacattcaactggtgcaatacagggatggaaaggaaggcaagaaatggaggga

SEQ ID NO: 1013817 - DNA, 120 bp, Artificial Sequence
  ENSG00000288042_1 (sequence is synthesized)
agcctgctgccatgtcttgaggaccctccaacagctctgtggagaagcccacatggtgagaaactgaggccttcatgcaacagccatgtgaaaaagtcttcatggaagtgggtcttccag

SEQ ID NO: 1013818 - DNA, 120 bp, Artificial Sequence
  ENSG00000288042_2 (sequence is synthesized)
gatgactgcagccccagctgacagtttcacaggaaactaatgagagaccctgaaccagagccacctgggcccctgagtttctggcagttacagtcagggccctctgctgaaagaagcatc

SEQ ID NO: 1013819 - DNA, 120 bp, Artificial Sequence
  ENSG00000288042_3 (sequence is synthesized)
atggaaacctggacacacatgagaaccggccttccacgcaggcaagaagcagaaactgaggctcctccttctccatcatgaggaatgtcttctggaaggccctctgttgacctctcttga

SEQ ID NO: 1013820 - DNA, 120 bp, Artificial Sequence
  ENSG00000288042_4 (sequence is synthesized)
gagatggctttggtctgggtcaccctgggccatcagtcatattctaataatttgaaccttaaaaagaaggggttctggtttctgtttcctctttttgtgtcccatataaatttcagatgc

SEQ ID NO: 1013821 - DNA, 120 bp, Artificial Sequence
  ENSG00000288043_0 (sequence is synthesized)
aaaaggccatgtgaagacactgagaagacagccatctgctactgaagggagaggtctcaggagaaactaagcctgctggcaccttgatcttggatgtccagcatctagaactttgagaaa

SEQ ID NO: 1013822 - DNA, 120 bp, Artificial Sequence
  ENSG00000288043_1 (sequence is synthesized)
acaaattcctgttgtttaagccacctgtttgtggtattttgttatggcagccttagcagacaataaatatatactgtcaagtaataagggagcattttgaagaagaaaatatcaaggctg

SEQ ID NO: 1013823 - DNA, 120 bp, Artificial Sequence
  ENSG00000288043_2 (sequence is synthesized)
acggtgaatgaagcgcattagactgagaatagctgctgagtagaaaaccggtgggaaaacagagaatttcctggaggcatgggaggggcacgctgtaatgagtgggaatgtcacaggcgc

SEQ ID NO: 1013824 - DNA, 120 bp, Artificial Sequence
  ENSG00000288043_3 (sequence is synthesized)
tgtttcaaaaagagtggatgaaagcctgagaatgcggctgtaaaggctactggaaggctcctcgggcaggggacaggatgtgagcccctggaatagactcataaaagaaaatgttagcac

SEQ ID NO: 1013825 - DNA, 120 bp, Artificial Sequence
  ENSG00000288043_4 (sequence is synthesized)
gaattcactgagacacatgagaaaatatgggaaagtcggagagtggaagaaaatgtaaagacccccctcctccccaaagagtacgttgtgtagtggggtagagtggaaaatcaatccaag

SEQ ID NO: 1013826 - DNA, 120 bp, Artificial Sequence
  ENSG00000288043_5 (sequence is synthesized)
aaaagtagcaaacggacccaaagatgaagaggaagaaaagaaacagcaacacgaaacgaaaaaaaaagccaccagatttgttgcaacgttgatgtaaacctggccgtcttcctgaaccag

SEQ ID NO: 1013827 - DNA, 120 bp, Artificial Sequence
  ENSG00000288043_6 (sequence is synthesized)
tgacccagggtttccgcttccctttgctgtcatcttgctcaagtctagaagctgaaatatcatcatcaactcgacatgaggggataacctctagatccactcatcagatgctcatcagac

SEQ ID NO: 1013828 - DNA, 120 bp, Artificial Sequence
  ENSG00000288043_7 (sequence is synthesized)
gttccaattacaaaactgaacctcttcttagtgctggggcggttagaatgcaaacatttcaagaaaaaaaaaacattgttttctagtggtgatagaattgagggtgagttcttccttcct

SEQ ID NO: 1013829 - DNA, 120 bp, Artificial Sequence
  ENSG00000288043_8 (sequence is synthesized)
ttatttttgtcttttatttttttctactttactgaagggcacatgcaataaagcagataaaaatgcactaatctggagtttacagttgggtgaatatttatatctgtattcacaggcata

SEQ ID NO: 1013830 - DNA, 120 bp, Artificial Sequence
  ENSG00000232234_0 (sequence is synthesized)
aggtggagaagtgatggtaaatttccactcgaactgttggggagctagttactggtagaaaggccccaaggccgggcttcggtggctgcagtagactggatctggatctctaaatggcaa

SEQ ID NO: 1013831 - DNA, 120 bp, Artificial Sequence
  ENSG00000232234_1 (sequence is synthesized)
tctattgacatggctgccagcggttgaagacctgaaaactgtgacccctgttgcctagcaactgagaagctcagcctcaactccgggtgggggagatgatggagaaagcttccaagatca

SEQ ID NO: 1013832 - DNA, 120 bp, Artificial Sequence
  ENSG00000232234_2 (sequence is synthesized)
tccccatatagctgttcgagacctcaatttattgaacctaatggagatgagtgacagaatggtgagactgatgatgattatgatgtgcagcttcactgaggtcatgggcttggttaattc

SEQ ID NO: 1013833 - DNA, 120 bp, Artificial Sequence
  ENSG00000232234_3 (sequence is synthesized)
ccttccaaagggatggaaggagagaaagagagcaagaagggtactgcattttgataaattgaaggtttgtggaacgctgcattgagcaagtctattggtaccattttccaacagcatgtg

SEQ ID NO: 1013834 - DNA, 120 bp, Artificial Sequence
  ENSG00000232234_4 (sequence is synthesized)
agagaggaggagatttacatcacacagcaaacaacctaataaatctgttaaacgccatgcatgtgaataggcgttttcctctttttgaccctttctttccacatagaactcagtgctcct

SEQ ID NO: 1013835 - DNA, 120 bp, Artificial Sequence
  ENSG00000232234_5 (sequence is synthesized)
tcctcgtcctccgttacagtatttatcgccttccttcttccacgccggggagcagtcgaggcttgtgttcttcagcggacttgccaaatcatcccctccagcatgctgctctctcccttc

SEQ ID NO: 1013836 - DNA, 120 bp, Artificial Sequence
  ENSG00000232234_6 (sequence is synthesized)
cacagatcatctgttaagaaaatacatttttcatgtcgttaatttacatatacatgtgcattatatatatgtttatacaatgagagattgttaggaaaatcactaccacatatacatgca

SEQ ID NO: 1013837 - DNA, 120 bp, Artificial Sequence
  ENSG00000232234_7 (sequence is synthesized)
ttatatatattacatatacatacatatgcattatatatatacctgcacacacatgcatatggaaaattgttaggaaaaacagcacagtggtagtgttagtgctggttgtctttcggtggt

SEQ ID NO: 1013838 - DNA, 86 bp, Artificial Sequence
  ENSG00000232234_8 (sequence is synthesized)
gagctcttaacaattaatgttgctgcttagtgtttgggtctgtgctgctgtatgtatgtgagctgtaatactcactgtgaaggtct

SEQ ID NO: 1013839 - DNA, 120 bp, Artificial Sequence
  ENSG00000232234_9 (sequence is synthesized)
gctgtatgtatgtgagctgtaatactcactgtgaaggtcttcaacttcactcctgaagtcagtgagatcacgagcccaccagaaggaagaaactccacacacttctgaacagctgaagga

SEQ ID NO: 1013840 - DNA, 120 bp, Artificial Sequence
  ENSG00000232234_10 (sequence is synthesized)
acgaactccggacacaccaccttgtagaactgtgacactcatgccttaaaaaggatattctgtcatgtgtggcaagatggataaacctggaggacattacgctccagtgaaacgggtact

SEQ ID NO: 1013841 - DNA, 120 bp, Artificial Sequence
  ENSG00000232234_11 (sequence is synthesized)
atgaaaacagattgctgggcttcatcctcgagtttctgattcagtagggcagggtggggactaagaatattcatttctaatgagttccagtggtgctgatgtttccagtccagggatcac

SEQ ID NO: 1013842 - DNA, 120 bp, Artificial Sequence
  ENSG00000232234_12 (sequence is synthesized)
cggtggagacccattagtctatgccatcctagtcccacccgcctgacacctcatgctcaccagaaggacaccttgggctgaccagagaggagggtttctgtgtgagaagtgctcccaaag

SEQ ID NO: 1013843 - DNA, 120 bp, Artificial Sequence
  ENSG00000232234_13 (sequence is synthesized)
actcgaactgttggggagctagttactggtagaaaggccccaaggccgggcttcggtggctgcagtagactggatctggatctctaaatggcaatctattgacatggctgccagcggtac

SEQ ID NO: 1013844 - DNA, 120 bp, Artificial Sequence
  ENSG00000232234_14 (sequence is synthesized)
ttgtgtgtatgcgagtagcactagaaatgccataacaatggaatcatatgtccacagttctacctctttgagccatgcaatttaaggttgaagacctgaaaactgtgacccctgttgcct

SEQ ID NO: 1013845 - DNA, 120 bp, Artificial Sequence
  ENSG00000232234_15 (sequence is synthesized)
agcaactgagaagctcagcctcaactccgggtgggggagatgatggagaaagtattctagctcccaatccaagaatggaggcatatggaagtggatgaagctaaactatggtatcggaaa

SEQ ID NO: 1013846 - DNA, 120 bp, Artificial Sequence
  ENSG00000232234_16 (sequence is synthesized)
ctgaccctgagtgaagaatctgtgttactgttgaggctctgccctgaggatctctgtgacatggcagagctcaccgcgtcccctgatgcttcttcatctgtgggagtctgtgatggggta

SEQ ID NO: 1013847 - DNA, 120 bp, Artificial Sequence
  ENSG00000232234_17 (sequence is synthesized)
taattttctgtattttcctaattttctgtgatccatatatgtttttaatcatcaaaagatgttgaaatttaaaccatgttctacgtacattttacatccccatttaaagctttctcatgg

SEQ ID NO: 1013848 - DNA, 120 bp, Artificial Sequence
  ENSG00000232234_18 (sequence is synthesized)
ttctccatggcctgcaggatgatgcttgatgttcagcttaagagcttcctctcctcacttcccacccctctgtcacttgtagctcatgccctaataataccagagtgtttcctgtgcaca

SEQ ID NO: 1013849 - DNA, 120 bp, Artificial Sequence
  ENSG00000232234_19 (sequence is synthesized)
acactggaacagacttcctgattcacatcaaccagccaggcctgatcctttcattacaaggcgagtgctgacctcaccttgcaaagctctctgaagtgtctgagcagagggtccactcct

SEQ ID NO: 1013850 - DNA, 120 bp, Artificial Sequence
  ENSG00000232234_20 (sequence is synthesized)
ccccggcatacctttgcagcaatatcctggcagatactttatgtcatgttgccatgaactgcattgttctgccccaagccccaggctactggaaaaaatggttgaagacctgaaaactgt

SEQ ID NO: 1013851 - DNA, 120 bp, Artificial Sequence
  ENSG00000232234_21 (sequence is synthesized)
acagccacctcgacagcgtctgttccagtcacccctgcatgcatgctagaacacctttgaacaatggatgacagtctgcagagagcacagagctcccggagaacataaaaatgcaatgga

SEQ ID NO: 1013852 - DNA, 120 bp, Artificial Sequence
  ENSG00000232234_22 (sequence is synthesized)
acagaatgaagggatgcaagtcacaatcgtctcaactgcaagttggccaaagtaaacattgccccaaagtgctcccaaagcttgctggcacataaacatgaatgaatgaacaatgtagaa

SEQ ID NO: 1013853 - DNA, 120 bp, Artificial Sequence
  ENSG00000232234_23 (sequence is synthesized)
ttggaatgaagagaatctgaactaagatggggtgaaagtaggaaatcattcccccatgtcaagtgcaagggctatccagttagaggccaacacagatgtctgatcaaagtgctcccaaag

SEQ ID NO: 1013854 - DNA, 120 bp, Artificial Sequence
  ENSG00000232234_24 (sequence is synthesized)
gacgtttcataatctttctgtttttaggatgggagctccctgcctctccaccgtgcctggcatctggagcctctctaggtactgcattttgataaattgaaggtttgtggaacgctgcat

SEQ ID NO: 1013855 - DNA, 120 bp, Artificial Sequence
  ENSG00000232234_25 (sequence is synthesized)
aaaaaaaaaaaaaaaaaaaaccgtaacacgcacagcgaaggtctgaaggtctgcagctttagtcctgagccagccagactatgaactcaccagaaggaagaaactgcgaacatatccgaa

SEQ ID NO: 1013856 - DNA, 120 bp, Artificial Sequence
  ENSG00000232234_26 (sequence is synthesized)
gaaggtctgcagctttagtcctgagccagccagactatgaactcaccagaaggaagaaactgcgaacatatccgaacatcagagggaccaaaccccagacgcgccaccttaagagctgta

SEQ ID NO: 1013857 - DNA, 120 bp, Artificial Sequence
  ENSG00000232234_27 (sequence is synthesized)
aacccaccaattccggacacagtatcttatcaattactgtgcccagcgcactaacggacgttaagtaacgaataatcaccaacctgaagcttgttgctatcataatttcactgaagggaa

SEQ ID NO: 1013858 - DNA, 120 bp, Artificial Sequence
  ENSG00000232234_28 (sequence is synthesized)
aagtcacctgttcaagggtagagctaatcagcggcatgttcaaatatagggttgtttccgtaattttgtagtagtctatttgcccagaaaggcaaaggaatattaattttagaaaaggct

SEQ ID NO: 1013859 - DNA, 120 bp, Artificial Sequence
  ENSG00000232234_29 (sequence is synthesized)
gcaccgaattctgccacctgtgcaggtagcctccctctggactccagatgccactgtgattaccccattctgacccactcttggagcttcctgtcaccagccatccattctcttctctgt

SEQ ID NO: 1013860 - DNA, 120 bp, Artificial Sequence
  ENSG00000232234_30 (sequence is synthesized)
cttggttcactcctgagggcttcctgtgttatcctaatgtgcaccctaatgtacacaaatcactttcacagacagtgtcatgagtatgaggtctggaggctagaagtctgaaatcaagaa

SEQ ID NO: 1013861 - DNA, 120 bp, Artificial Sequence
  ENSG00000232234_31 (sequence is synthesized)
gtctgcatgcccgtactccctccacaggctctaggggaggatccttccttgcttcttccagcgtctggtggctccagtctctcagtccatatacctatgtgaaataagagatcatctctg

SEQ ID NO: 1013862 - DNA, 120 bp, Artificial Sequence
  ENSG00000232234_32 (sequence is synthesized)
actcgaactgttggggagctagttactggtagaaaggccccaaggccgggcttcggtggctgcagtagactggatctggatctctaaatggcaatctattgacatggctgccagcgtaat

SEQ ID NO: 1013863 - DNA, 120 bp, Artificial Sequence
  ENSG00000232234_33 (sequence is synthesized)
ggaacccctgattgatacatggacccatgactgtccacaagaaagactacatttcccaactcccatgcatctaggtgaggcatatggctcggttctggttagtgggatttaggccaaagt

SEQ ID NO: 1013864 - DNA, 120 bp, Artificial Sequence
  ENSG00000232234_34 (sequence is synthesized)
gtcatgtgaatgagccctcccttgtctgaccttcttccttttgctgactggaaagcagatgtgatggcttgagctgcaacagccatcttggacgatgaggaggaagccatacatgaatgt

SEQ ID NO: 1013865 - DNA, 120 bp, Artificial Sequence
  ENSG00000232234_35 (sequence is synthesized)
tcttcctagccttcagtgagaatccaaaaacctctattgttaggaaaacccccaggaagggcagaaagcaactgaaacctagctcccctcctcacccctgtccctgctccccaaagacta

SEQ ID NO: 1013866 - DNA, 120 bp, Artificial Sequence
  ENSG00000232234_36 (sequence is synthesized)
aaggttggatgggcctgggtgatatgatgacatatgccaatctcgatcacgtgccagatgcctccatgtcaatcttctggcttccctgggtcacactggaagaaggattgtcctgggcca

SEQ ID NO: 1013867 - DNA, 81 bp, Artificial Sequence
  ENSG00000232234_37 (sequence is synthesized)
cttccctgggtcacactggaagaaggattgtcctgggccacatataaaatacatggaaattgcggccgggcgtggtggctc

SEQ ID NO: 1013868 - DNA, 120 bp, Artificial Sequence
  ENSG00000288048_0 (sequence is synthesized)
gaagcttgagggaagggcctggagactgataataatccattgtcggtctccggcttcaaagacaaaaggcagccgcggagggaggagtcagcagagcctggagataacaggaccactttg

SEQ ID NO: 1013869 - DNA, 120 bp, Artificial Sequence
  ENSG00000288048_1 (sequence is synthesized)
caaccggggagagtgcaaacgaggactccaagtcgcgtcccgggtctgccgcgacggtcgctcaccgcaggggtctccttcctcttctggcagcgagtgcgacctcttttatcctagcag

SEQ ID NO: 1013870 - DNA, 120 bp, Artificial Sequence
  ENSG00000288048_2 (sequence is synthesized)
gccaccaccttcgcggcaacaaacatcatttcctatgcagttgcaaagcatgctcccttgcaatcagcgatcaatactggcaaagtggctccaggataggaaaggtcgcacgtgtgttgg

SEQ ID NO: 1013871 - DNA, 120 bp, Artificial Sequence
  ENSG00000288048_3 (sequence is synthesized)
taaatggaaaggtttatgaggcgcaggtggtcgtgctccgcggagattgtggtattagcatgtcaaagacaaaacggaaccaaggtatacaggcacagagtctcttcctggggctccggg

SEQ ID NO: 1013872 - DNA, 120 bp, Artificial Sequence
  ENSG00000288048_4 (sequence is synthesized)
aaagcttggcacgaccctcttgagccttcagtttaaaatgaaacgctggcgccagatgtggccaccacattgctgataagtccagtaccttccgtttgtgcaaagctttgtgatttaagg

SEQ ID NO: 1013873 - DNA, 120 bp, Artificial Sequence
  ENSG00000288048_5 (sequence is synthesized)
ttaagtagttttgcttacttctctcatttgagccttataaagacagtgtgaagtctgtagtgagtaaaagccctattttaacagaaaaggaaccaagggaccaagttggaacttgaatct

SEQ ID NO: 1013874 - DNA, 120 bp, Artificial Sequence
  ENSG00000288048_6 (sequence is synthesized)
ggggtctactgatgttccattcactacactgcttggtataactgcatatcaggttatttggattttattttatttttttctttttcagcctttattcagtaactactaccagattaggta

SEQ ID NO: 1013875 - DNA, 120 bp, Artificial Sequence
  ENSG00000288048_7 (sequence is synthesized)
ataggcacatagagacatgagacatacattccctaccttgctatgctgttcaacatagtagcacgtggtaatttaaatttaatgaaaagtcaataaaatttaaaattaactttctcagta

SEQ ID NO: 1013876 - DNA, 120 bp, Artificial Sequence
  ENSG00000288048_8 (sequence is synthesized)
aagttctaccgggcagcactgtgtctacaggctaacaatctaatgaagattaaagacagtctcacttcttttctgtcctatttgctacttccttgcagttcattcgttccttggtacatg

SEQ ID NO: 1013877 - DNA, 120 bp, Artificial Sequence
  ENSG00000288048_9 (sequence is synthesized)
tgtgcctcttgctttctaaaagacaccctgagcagtttccagctttattgaggtcaaatgtgcatgcaatggatgcatccattctcatgcacaagtcaatgagttttgactcttgaacaa

SEQ ID NO: 1013878 - DNA, 120 bp, Artificial Sequence
  ENSG00000288048_10 (sequence is synthesized)
ttgaacaattgtgtgaacaccaccataatcaagacacaggacatttatattttagcaaaatattccctgtgtcctttcccactcattctgttaccggaaaggggtcccgatccagacccc

SEQ ID NO: 1013879 - DNA, 65 bp, Artificial Sequence
  ENSG00000288048_11 (sequence is synthesized)
atggctctagacagagcagccccgagggctgctgattgcccatttttatcgttatttcttgatta

SEQ ID NO: 1013880 - DNA, 120 bp, Artificial Sequence
  ENSG00000288048_12 (sequence is synthesized)
tatgctaaacaaggggtggattattcaggcctcccctttatagaccatatagggtaacttctgacgttgccgtggcatttgtaaacttatggcacaggtaggagtgtagcagtgtggact

SEQ ID NO: 1013881 - DNA, 120 bp, Artificial Sequence
  ENSG00000288048_13 (sequence is synthesized)
gtaaacttatggcacaggtaggagtgtagcagtgtggactcccagaggtcactctcctagtcatctcggttttggtgggttttggccagtttctttactgcaacctgttttattagcaag

SEQ ID NO: 1013882 - DNA, 120 bp, Artificial Sequence
  ENSG00000288048_14 (sequence is synthesized)
ctctttatgacctgtatcttgtgccgatatcctgtcttattctgtgacctagaatgctttaaccatctgggaatgcagcccagcaggtctcatcctcatttttacccagcctttattcaa

SEQ ID NO: 1013883 - DNA, 120 bp, Artificial Sequence
  ENSG00000288048_15 (sequence is synthesized)
gatggagttgctctggttcaaatacctctgacaattcctccccccaaccgttgttcaggcaagactgccctattttctgtcattatatattaaattttagtttctagaattttaaataaa

SEQ ID NO: 1013884 - DNA, 120 bp, Artificial Sequence
  ENSG00000288048_16 (sequence is synthesized)
tggaattatgtaatatttattcttttatctggcttctttccctcagcataatgtttttgagattcatccatgttgttgcatgtatcaggagtacctttttattgctgagtaatattcttt

SEQ ID NO: 1013885 - DNA, 120 bp, Artificial Sequence
  ENSG00000232233_0 (sequence is synthesized)
atctgggtgagcaggcagcggacaagtgacgtctcccggcctgctgccccaggccccccacaagccgcgttctggggccgtggcctccccagagcagatcagtgggggctgtgtgagcaa

SEQ ID NO: 1013886 - DNA, 120 bp, Artificial Sequence
  ENSG00000232233_1 (sequence is synthesized)
cactgggggcagctgggcagcgcctccctggaggcccctctgaaatcccgccggatgctggcaggctccaagggggctggacaccatcttctcagggccctgcagggaagcgtggaaagg

SEQ ID NO: 1013887 - DNA, 120 bp, Artificial Sequence
  ENSG00000232233_2 (sequence is synthesized)
cggcacagggctggacccagaggagctctcagatgctggactggactgtttcaggggtcatctagcccattccccgcctccaggcgaggatttgcttgagcctggaaagatgaaggatcc

SEQ ID NO: 1013888 - DNA, 120 bp, Artificial Sequence
  ENSG00000232233_3 (sequence is synthesized)
tcccagtgccgtcaagccccggattccacctccctgtaggtggactgccagcgcaggccctgacaacgcagagaaagacacaggacccagctgggccagtgacagcaggagctcctggtg

SEQ ID NO: 1013889 - DNA, 120 bp, Artificial Sequence
  ENSG00000232233_4 (sequence is synthesized)
ccacaggaatggaaactgtgactcataatagccagctagtcaatgattattccccccagtccctggcgcatcaagatttgctgtgctcaatggtgcccagactggagtacagtggcgtga

SEQ ID NO: 1013890 - DNA, 120 bp, Artificial Sequence
  ENSG00000234173_0 (sequence is synthesized)
gacagaaactggaagcattgcccagagaggtaatcagaagcactatgctcccaagactttccttaacaggtgctcattttcatcctgttttgatgaatggctacaccagtgaaacctgct

SEQ ID NO: 1013891 - DNA, 120 bp, Artificial Sequence
  ENSG00000234173_1 (sequence is synthesized)
atactgagaggacaaagagcacatatacttctcttccccaaccactatctaccccaccctttccataaaggaatacagggaaaagctgggtgtataatctgctcatgctgaactgagctg

SEQ ID NO: 1013892 - DNA, 120 bp, Artificial Sequence
  ENSG00000234173_2 (sequence is synthesized)
gggaaaagaactatggcaaatgtttgcaagctcattcaaaccacagactttttcaaactgttgctttgatctctgtagcctccatgggcctaatggatgctgatctccattagttctcat

SEQ ID NO: 1013893 - DNA, 120 bp, Artificial Sequence
  ENSG00000234173_3 (sequence is synthesized)
agacacgtcagttgaaagctagttcctcaggtagcagctggaaaagttaaggggatagatatgtagataaattccttccagactgaagctagaggcttgcttttatcattagagtgagca

SEQ ID NO: 1013894 - DNA, 120 bp, Artificial Sequence
  ENSG00000234173_4 (sequence is synthesized)
agtgggagaatttgtggaaatatccacatgcctgtttaaaatggctgctttgttttctatagcccacatgtaaatagtgaatggcaacaccaatagctctcatagacagtgagttagaag

SEQ ID NO: 1013895 - DNA, 120 bp, Artificial Sequence
  ENSG00000234173_5 (sequence is synthesized)
ccagacctcaggtaggagctagaaaacttagaatgcttgatttgtagtctaacttctttcatagagaatctgggaactgggctttgttgttgtagctagttggtgaatgaggaggtgaag

SEQ ID NO: 1013896 - DNA, 120 bp, Artificial Sequence
  ENSG00000234173_6 (sequence is synthesized)
tggaggagatatgggaagaacccatttgtttgggcattttttctcaatgtaccttagtttgtctgtagtagctggccacagtagtgatgattctatttcctgagaggtgagaattgctgc

SEQ ID NO: 1013897 - DNA, 120 bp, Artificial Sequence
  ENSG00000234173_7 (sequence is synthesized)
caaagaatgtctgccatggatgagaatacaaagaaaggaaactaagaactctcaaagcagctactagaaacccttcatagaggacaagaattatcttcagttttgagatatatgagaatg

SEQ ID NO: 1013898 - DNA, 120 bp, Artificial Sequence
  ENSG00000234173_8 (sequence is synthesized)
attacaactcctttgagcaggcttcacatactgcccaaagatgcttctctagtttgtgtccttcttgctatcagaaagagagaaggaaactaaataaaacaaaataaaaattttagaatt

SEQ ID NO: 1013899 - DNA, 120 bp, Artificial Sequence
  ENSG00000234173_9 (sequence is synthesized)
aagcaatgggtcaggatcaagattgtggaaagatgccagttcggatgcaggctagaaaaattagtattgtcctcaactggaatcagcaaccaaaagactaagtgtatgtgtctctgtagg

SEQ ID NO: 1013900 - DNA, 120 bp, Artificial Sequence
  ENSG00000234173_10 (sequence is synthesized)
ctgaagggttttcagatatcataaaagataagaagtcaagctacacttgtttggaagcatgtggcagagaacacagattaattgtttaaaggatggcccaaacttaaggccaagtcacat

SEQ ID NO: 1013901 - DNA, 120 bp, Artificial Sequence
  ENSG00000234173_11 (sequence is synthesized)
caaacccatcagaaaccaaaagtgtggcagaattcctaacagaaggatgagagaggaagagccttatatagatctgtcttctgtttcacattctgactattctaaagcttttaatgaaga

SEQ ID NO: 1013902 - DNA, 120 bp, Artificial Sequence
  ENSG00000234173_12 (sequence is synthesized)
attccctagagtcataaaacaaaggctaaatggtttaatctaacttaaaaaaaatgttaaataaaagacaatgaaattgaagacccctcctggagaaactagtgaggatactaatataga

SEQ ID NO: 1013903 - DNA, 120 bp, Artificial Sequence
  ENSG00000234173_13 (sequence is synthesized)
ctctacctcctcaaaaacctaacttcaaagagattttaaagaagtcatcaattctctcacatggcagactgggataacatctgttaatagagacttaaaaaaagacaaataagaacatct

SEQ ID NO: 1013904 - DNA, 67 bp, Artificial Sequence
  ENSG00000234173_14 (sequence is synthesized)
taacacgttctgttgctttccaggatatacacatggctttaacagagtctattactggaatacggag

SEQ ID NO: 1013905 - DNA, 120 bp, Artificial Sequence
  ENSG00000234173_15 (sequence is synthesized)
tacacatggctttaacagagtctattactggaatacggagaagctattgaagtaatccttcaaggcataaggtcagaacttagagaagtcacagagtttgtatttctgaacctgattacc

SEQ ID NO: 1013906 - DNA, 120 bp, Artificial Sequence
  ENSG00000234173_16 (sequence is synthesized)
agaaaattcttctaaagcaggaaaagatatatgctttcaaactgttatcctacaaccaaatccattttggagacacaaggatccacaagattactcaccttcaggaaaacatgaagacaa

SEQ ID NO: 1013907 - DNA, 120 bp, Artificial Sequence
  ENSG00000234173_17 (sequence is synthesized)
gaaatgctagtcttggtacaacctaatgaaaagacatagctgagatttcatatgaagataacattgagattgcttagaaaaaaattattggagttaacattgaaagtaacaatggtattt

SEQ ID NO: 1013908 - DNA, 120 bp, Artificial Sequence
  ENSG00000234173_18 (sequence is synthesized)
cttgtcatccctttctaaatggcatatatggtatgtaatctagaaatatgtacatatacatgtaatagcttacaaagcttccaataaaaaagacaaaatctctggattttgccatctaac

SEQ ID NO: 1013909 - DNA, 120 bp, Artificial Sequence
  ENSG00000234172_0 (sequence is synthesized)
gtcaaccctgatccttttgtttcagagtgaatgatttaatcatctgatatggcaataactctgaagaattctggctaggatgtatcagcaaactgcaatgcagcacagaatttcaatgaa

SEQ ID NO: 1013910 - DNA, 120 bp, Artificial Sequence
  ENSG00000234172_1 (sequence is synthesized)
aattcatattcaagattccccatgatccaggaaagccactgatgctacagctattttcttcacatttcatataagaagaaggagtaaaattgggaattccagcgaaatgacatctgctta

SEQ ID NO: 1013911 - DNA, 120 bp, Artificial Sequence
  ENSG00000234172_2 (sequence is synthesized)
catctgttggccatctctagctgccaaggagactgaaaaatatagggtttttttggccaagtatgttgtttatcagcacaaaattatggtgctgcaagtaaaattgaatggaaacataaa

SEQ ID NO: 1013912 - DNA, 120 bp, Artificial Sequence
  ENSG00000234171_0 (sequence is synthesized)
ggtacttgaagaagcggagccagggctgagatcccgaaggcgggcgaggtctgggatggggcggggcctatgggagcggggctgaagccctgggcccggcagaggaaggtcgagatggac

SEQ ID NO: 1013913 - DNA, 120 bp, Artificial Sequence
  ENSG00000234171_1 (sequence is synthesized)
catgttgggccccttctctccccgcccccaggccgcagttcgggggccacgccccggcgtgctcgggtcaccgcgggaagcccttgaaccccctggcgcccggcacccacgtgcggtaac

SEQ ID NO: 1013914 - DNA, 120 bp, Artificial Sequence
  ENSG00000234171_2 (sequence is synthesized)
cgcggctcctcgagagctccagggatgcggatctacagtaagggctgtggccagatgaatgaatgcacattttttagtgggcagaaagatgttagaattcatgaattagaataagcacaa

SEQ ID NO: 1013915 - DNA, 120 bp, Artificial Sequence
  ENSG00000234171_3 (sequence is synthesized)
aggagggcgagaggggaggccgtggaagccgcattcctccccttgccttgggcgcccacccccgaaggggcgcgtcccctccctgctccactgcacgtgggtgtttaaccaggggatatc

SEQ ID NO: 1013916 - DNA, 120 bp, Artificial Sequence
  ENSG00000234171_4 (sequence is synthesized)
cagtgcctcaagcaccacgacccgggagaaaactgagttgagaaggccttggggatgaaggtgagaaattcgagaatccccggagataacacatcagcaaatagtgcgcaggcagaacaa

SEQ ID NO: 1013917 - DNA, 120 bp, Artificial Sequence
  ENSG00000234171_5 (sequence is synthesized)
gctgttggaggtgagagacacagagcagagaagcacccgcacctggagagtcaggagggcctcacatcagaacgcctgagcaaatacagttttgaaggatactaattttttaaaaagttc

SEQ ID NO: 1013918 - DNA, 120 bp, Artificial Sequence
  ENSG00000234171_6 (sequence is synthesized)
attcacatgagttagacaaagagaaagaagcaggacattctaggaagaaggaacggcccaggcaaaagcgacgcgtacattggcgtgggtccattcaagaattgtgcccacaatatacca

SEQ ID NO: 1013919 - DNA, 120 bp, Artificial Sequence
  ENSG00000234171_7 (sequence is synthesized)
ggcacttgtccagacctgcatcgtccaatgcccacctcgacctcccaaagtgttgggattagaggcgtgagccaccgcgccctgcctgcatgtggctattgagatgtgctgtatgataca

SEQ ID NO: 1013920 - DNA, 120 bp, Artificial Sequence
  ENSG00000234171_8 (sequence is synthesized)
caccggactttgaagactcagtgtgaaaaataaaaagaattttaagaggggtgggggtcgaggggaggcagagcagtaggacaaatagctaatgcacgcagggcttaaaacctagacaac

SEQ ID NO: 1013921 - DNA, 120 bp, Artificial Sequence
  ENSG00000234171_9 (sequence is synthesized)
aggttgatgggtgcagcaaaccaccatgacacatgtttatctatatagcacctacatgttctgcacttgtatcctggaacttaaaattagaaaaaaaaaataataaaagccaacatggca

SEQ ID NO: 1013922 - DNA, 120 bp, Artificial Sequence
  ENSG00000234171_10 (sequence is synthesized)
ttcattactgccaaaaaaattaaaacacattgttaattttgtatattgattacaggttgaactgataatattttgaatatattgggttaaagaaatacatttaaaattagtggctaggca

SEQ ID NO: 1013923 - DNA, 120 bp, Artificial Sequence
  ENSG00000234171_11 (sequence is synthesized)
gggtgacagagtgagactccatcttaataataataataaaactatttcttgctgttttacttttctaatgtgaccaccagaaaagtttagatggcttgtgtgactctcatcattgaacgg

SEQ ID NO: 1013924 - DNA, 120 bp, Artificial Sequence
  ENSG00000234171_12 (sequence is synthesized)
ttgaacggagctgttctaaacatgggtaagacaacgcagagcttcggttgcaggacagagaatgaaataatagacccataagacagataagtgactgattgtgactgctagggtgtttac

SEQ ID NO: 1013925 - DNA, 120 bp, Artificial Sequence
  ENSG00000234171_13 (sequence is synthesized)
agcataggccggtgacaggaacgaggagtgtggggatgagagccgacgtgggcgagagtgcatgcaatgcagggtcagacgttggattcatctctcaggagttgaaaaaggtggcgttcc

SEQ ID NO: 1013926 - DNA, 120 bp, Artificial Sequence
  ENSG00000234171_14 (sequence is synthesized)
tgttctttattggcattgcttgtgacacgaggattgcccctcttcctgaagaggttggtcaggaaaattttttgttaacttttattttaggtttgagggtccatgtgcaggtttgtttca

SEQ ID NO: 1013927 - DNA, 120 bp, Artificial Sequence
  ENSG00000234171_15 (sequence is synthesized)
tgagtaaactcatgtcatgggggatgggtgtacagataatttcatcactgaggaataagcctagtacccgatgggtattttttcggatcttctccctcctcccatcctccaccctcaggt

SEQ ID NO: 1013928 - DNA, 120 bp, Artificial Sequence
  ENSG00000234171_16 (sequence is synthesized)
ccctcctcccatcctccaccctcaggtaggccccgttgcccaccgttcccctcctaatatccctgtgttctcgctgtggagctcccacttataagtgagaacacgcggtgtttggttttc

SEQ ID NO: 1013929 - DNA, 120 bp, Artificial Sequence
  ENSG00000234171_17 (sequence is synthesized)
tgcaaaggacatgatctcgttccttttttatggcttcatggtattccacgatgtaaatgtaccacatttgctttgtcaagtctactgtggatgggcatttatgttgattccacatctttg

SEQ ID NO: 1013930 - DNA, 120 bp, Artificial Sequence
  ENSG00000234171_18 (sequence is synthesized)
ctatcatgaatagtgttgtggtgaacatacacctgcatgtgtctttatggtagaacgatttagattcctctgggtatatacccagtcatgggattgctgggttgcatggtagttctgttt

SEQ ID NO: 1013931 - DNA, 120 bp, Artificial Sequence
  ENSG00000234171_19 (sequence is synthesized)
taagttctttgcagaatcactatgctgctttccgcaatggttgaactaatttgcactctcaatattatattgtctatagctgagaaagctgaaatgtaaagattaagtcacttgtcctca

SEQ ID NO: 1013932 - DNA, 120 bp, Artificial Sequence
  ENSG00000234171_20 (sequence is synthesized)
gacatgtagacaggaagtggtacagccaggactcaaacctgcctccagagcccgtcctcctaaacctaagtcatggttttcaaagtgtggtccttggatcagcagcaaaagcaccacctg

SEQ ID NO: 1013933 - DNA, 120 bp, Artificial Sequence
  ENSG00000234171_21 (sequence is synthesized)
ggcactcattagacatggaaattctgggcctcaacccggacctcagcatgggaatccctgggggtggagcccggcggtttgtgtttgggcagccccagctgactctgaggcaccatcagg

SEQ ID NO: 1013934 - DNA, 120 bp, Artificial Sequence
  ENSG00000234171_22 (sequence is synthesized)
ttggaggccacagtgggtgatagtccctgccctgtggtagcagccggcctccctccttcatttctgttattccatctccttcttaaaacaaccctgtgaggctggcagggcagatgtcga

SEQ ID NO: 1013935 - DNA, 120 bp, Artificial Sequence
  ENSG00000234171_23 (sequence is synthesized)
ttttatttaacagatgaagaaactgacccttgaggttttatgacttacccaaagtcatcgcattagttttggaactgaaacttcaatggcagatcttctggctgttagtctgagactgga

SEQ ID NO: 1013936 - DNA, 120 bp, Artificial Sequence
  ENSG00000234171_24 (sequence is synthesized)
actagtacccacaaggactctgggagcagtaaggtcagagcaggagctactgcttcatttcattgcctctagtgaaggaggaggggggttcccagagcacggcttctccatgggtctagc

SEQ ID NO: 1013937 - DNA, 120 bp, Artificial Sequence
  ENSG00000234171_25 (sequence is synthesized)
ccatgatagctgggtgcttaccctgatgtgctgatgagattctgccttatctcctgcaagccatttgtgctgtgctaggattaaacagtacactttggaaccttagctgcccacaccctg

SEQ ID NO: 1013938 - DNA, 120 bp, Artificial Sequence
  ENSG00000234171_26 (sequence is synthesized)
agagccaatcacgcagaacccacaggaaatctcggggcagaagtagtttgccataaatgtccattttctcattttttgttgttgtgacggggtcttgctctgtcgccgaggctggagtgc

SEQ ID NO: 1013939 - DNA, 120 bp, Artificial Sequence
  ENSG00000234171_27 (sequence is synthesized)
ctgcagcctcaacctcctgggctcaagtcatctttccacctcaacctccaaaatagctggtattacaggtgtgcgcctcctgtataattaaaaaaaaaacatgttttgaggccgggtgtg

SEQ ID NO: 1013940 - DNA, 120 bp, Artificial Sequence
  ENSG00000234171_28 (sequence is synthesized)
gtgaaactctgtctcaaaaaaaaaaatgttttgaggttacagggagctatgatcacactactgcactccagtctagataacagagcgagaccctgtctctgaaaaaaaagaaaaaaaatt

SEQ ID NO: 1013941 - DNA, 120 bp, Artificial Sequence
  ENSG00000234171_29 (sequence is synthesized)
cagtctagataacagagcgagaccctgtctctgaaaaaaaagaaaaaaaattctttgtagagacaaggtttcactatattgctcaggctggaatcaaactcctggcctcaagcaatcctc

SEQ ID NO: 1013942 - DNA, 120 bp, Artificial Sequence
  ENSG00000234171_30 (sequence is synthesized)
aagggctgggattacaggcgggagccactgtgctcagcctgcatttcctgatgcaactcgttcacattccatccattatcaacaatccccacaacttcacctcctgccatggatgcctga

SEQ ID NO: 1013943 - DNA, 120 bp, Artificial Sequence
  ENSG00000234171_31 (sequence is synthesized)
ctcctgccatggatgcctgaggctggggaaggggaacttcattcgggtgtgggcgtcaccttagccacagagaacctaaaagagtgatcaagcctcacctgaggttgggagttcgagacc

SEQ ID NO: 1013944 - DNA, 120 bp, Artificial Sequence
  ENSG00000234170_0 (sequence is synthesized)
ggcaacacggaaagagctggcttgcgagctccctgcttaacagaaggctcagttgcccaagtgacgaaggcattgtggggcacgaaccaggctttggtgaatttatctcattatacacca

SEQ ID NO: 1013945 - DNA, 120 bp, Artificial Sequence
  ENSG00000234170_1 (sequence is synthesized)
aacggattttaaagcagaacttccatgactgtgaaatccaaccgggtgcgcgaccacgaggaaggatggcgagggaggaaaccgcgctttgttgttgaggtgcagaaagtttaatattaa

SEQ ID NO: 1013946 - DNA, 120 bp, Artificial Sequence
  ENSG00000234170_2 (sequence is synthesized)
cctgaatttgattaccggactcctcagtacttcattcgatgatgttgacttggtaatttgattgctatgcagatgtgagctgttctgattacattaaaatacgtaaaggaaatgagaaaa

SEQ ID NO: 1013947 - DNA, 120 bp, Artificial Sequence
  ENSG00000234170_3 (sequence is synthesized)
cagtcaaaggcatgcaggttgtgaatacaaacctcacttgtttccagacagattcttcatcataatgattaggacaatgacagtacaaacattctcatcctacaaaaataagtaatcaca

SEQ ID NO: 1013948 - DNA, 120 bp, Artificial Sequence
  ENSG00000234170_4 (sequence is synthesized)
accacaccttatccaatatctgtacagcaattgtgccatacacattaaattcagatttttataatgtaatttaatctgtatttcaagccacaatcttgctgaagttcataatgttttgtt

SEQ ID NO: 1013949 - DNA, 120 bp, Artificial Sequence
  ENSG00000234170_5 (sequence is synthesized)
aaccattcttgtaatcccctctggtgacatgccatggtgccagcatcttagttgttcccatggcactagtaggtggaggcatcgagactgctgtgtcctctcttcttgcagggaatccca

SEQ ID NO: 1013950 - DNA, 120 bp, Artificial Sequence
  ENSG00000234170_6 (sequence is synthesized)
tccagcgtccctctactctcctctgcagcttccatggttggaatgctgagccattgctaggacgatgaggctacaggaaagtgaaatgcacctgctgcgatctgatccaactgaccactc

SEQ ID NO: 1013951 - DNA, 120 bp, Artificial Sequence
  ENSG00000234170_7 (sequence is synthesized)
ctgctgctcctcccttgcacctcaggcatctccttccaatctggaggaaacacttttacctccacttttcttttacagtcctccaaactctgttccttctagggagcacaagtacagaaa

SEQ ID NO: 1013952 - DNA, 120 bp, Artificial Sequence
  ENSG00000234170_8 (sequence is synthesized)
tagaaacctggactcccatcatcctgcttcacaaacttacaatgttaaagaaagaaaaaaaaaaagaccaagtacattacctggtagaattggagagatgggcacgaaagagctgtaaat

SEQ ID NO: 1013953 - DNA, 120 bp, Artificial Sequence
  ENSG00000234170_9 (sequence is synthesized)
acagttagaaaacacactagcatttacaaatgtgtatgagaaacaatgaggaggattttcagagactatcataaccatttatttttctaatatgtgataagtaaacgcacagaaaatcaa

SEQ ID NO: 1013954 - DNA, 120 bp, Artificial Sequence
  ENSG00000234170_10 (sequence is synthesized)
ccacgaggaaggatggcgagggaggaaaccgcgctttgttgttgaggtgagccgggtgcgcgaccacgaggaaggatggcgagggaggaaaccgcgctttgttggtgaggtgagctgggt

SEQ ID NO: 1013955 - DNA, 120 bp, Artificial Sequence
  ENSG00000234170_11 (sequence is synthesized)
gcgcgatcacgaggaaggatcgcgagggaggaaaccgcgctttgttggtgaggtgttcacggataatgaagctgatgtgagagccctggagagaaacatcagtcaaaggcatgcagggaa

SEQ ID NO: 1013956 - DNA, 120 bp, Artificial Sequence
  ENSG00000234170_12 (sequence is synthesized)
ttggcaattttgtcatttatatgggagaaatagctaaaggtgtagtataaagtatttgctcgtaggtaatggaatgttacctttacccaaagatataaaaaataaacggtagaacaaaaa

SEQ ID NO: 1013957 - DNA, 120 bp, Artificial Sequence
  ENSG00000234170_13 (sequence is synthesized)
acgaggaaggatggcgagggaggaaaccgcgctttgttgttgaggtgagccgggtgcgcgaccacgaggaaggatggcgagggaggaaaccgcgctttgttggtgaggtgaaccgcgtgc

SEQ ID NO: 1013958 - DNA, 120 bp, Artificial Sequence
  ENSG00000234170_14 (sequence is synthesized)
acgatcccgaggaagtattgccagggaggaaaccgcgctttgttcttgaggtgagccgggtgcgcgaccatgaggaaggatggcgagggaggaaaccgcgctttgttggtgaggtgaaac

SEQ ID NO: 1013959 - DNA, 120 bp, Artificial Sequence
  ENSG00000234170_15 (sequence is synthesized)
cgctttgttggtgaggtgaaccgggtgcgcgaccatgaggaaggatggcgagggaggaaaccgcgctttgttggtgacgcaactgtgtctagttttccctttgttgttggttacctttgc

SEQ ID NO: 1013960 - DNA, 120 bp, Artificial Sequence
  ENSG00000234170_16 (sequence is synthesized)
tggactctgctgtgacacaccagacgtgctagctgaggaagtggggtcagaagcaatattcctgaactttggggtcacctctcacccactgttcttcccggtgctaccatagcgtttgct

SEQ ID NO: 1013961 - DNA, 120 bp, Artificial Sequence
  ENSG00000234170_17 (sequence is synthesized)
ccacaaaccctgaagtcactgatggacatcacgcattccactttcaaggattcctataagcttatgaagaaggacaaggcaatatcacggaatgttgaaatacatataggtgatctgaca

SEQ ID NO: 1013962 - DNA, 120 bp, Artificial Sequence
  ENSG00000234170_18 (sequence is synthesized)
tagagaagggaaaaatgtacaagagcatgtcacacatttttttggcttagctcagtctgcagaaaaatttaaatttcctttcctatgacttttgttctaatctatccttagaggagaaat

SEQ ID NO: 1013963 - DNA, 120 bp, Artificial Sequence
  ENSG00000234170_19 (sequence is synthesized)
acacctgaaagccaagggaaagaccgcgggtgttggaatccacgtgacttccacggtattgaacggagctgccgggctaagaacttccatttcttttctcagggaactcccatcttattt

SEQ ID NO: 1013964 - DNA, 120 bp, Artificial Sequence
  ENSG00000234170_20 (sequence is synthesized)
aaggcacagaataaggagttccattaactttagacaggttgttttaaatcaaaaattaagaaaaaatgattgaaaacaaagccctaaactggaacacatgaattttaaaatatatttaaa

SEQ ID NO: 1013965 - DNA, 120 bp, Artificial Sequence
  ENSG00000234170_21 (sequence is synthesized)
ttgtgaccattgtgtttaaactgtggtagggcttgattttccaaatctcagaataaaatttcttaccgaattccttatgatgtcctaaaaataacccattaaaatcacatgtagatctgg

SEQ ID NO: 1013966 - DNA, 120 bp, Artificial Sequence
  ENSG00000234170_22 (sequence is synthesized)
aagagtctggttttcacaattaattaattagttaatgtaatgaaaggacagaaggcaaaggacaatatctggacagagattcaggtgttcacggataatgaagctgatgtgagagccctg

SEQ ID NO: 1013967 - DNA, 120 bp, Artificial Sequence
  ENSG00000234170_23 (sequence is synthesized)
agagattagaatgccagcattgggaacaaaatcccatgtgggaaaattgaagaaactcagaatatttgacaggaagctctgtacaacagaggacaaggatgacactggtgtcccagtggg

SEQ ID NO: 1013968 - DNA, 120 bp, Artificial Sequence
  ENSG00000234170_24 (sequence is synthesized)
attcactaactgatgttacatatgtggaagaacaaagggaaaaataagtaacgcaggggaaaatgtagacgtaaacctcctcaaaggaagaagtagcagtgaaagacttttaacaatgga

SEQ ID NO: 1013969 - DNA, 120 bp, Artificial Sequence
  ENSG00000234170_25 (sequence is synthesized)
acgtcttctttgttaaatggcagagtctgaagaggatggcatatatttctgttccagcaggttcctgctaactctatgattctaagaaacagttcttccaaaaatttgatcatggctgta

SEQ ID NO: 1013970 - DNA, 120 bp, Artificial Sequence
  ENSG00000234170_26 (sequence is synthesized)
ttctgcacgatattttccaagataaagcaaagaggttttcattttggaaatattcatgagttttccctaagtcaagagttttttgttgttgttcttttgtttttcttcatcatttgcaaa

SEQ ID NO: 1013971 - DNA, 120 bp, Artificial Sequence
  ENSG00000234170_27 (sequence is synthesized)
gagctgccagtggtgcatgcctgaaagccatcttgctgcagggaccacatggggaccaccaaatctgtcagacagcaagccaggcagtgctcacagctccacttcctcctctatgacaac

SEQ ID NO: 1013972 - DNA, 120 bp, Artificial Sequence
  ENSG00000234170_28 (sequence is synthesized)
ggcagatgacttggctcttcgtggaattgcacaatgaataaacttcccgaccaagtgatagtcgctgatgtgaatcctacccatggggaaaatatctcagtgttgtttatttctgtcaat

SEQ ID NO: 1013973 - DNA, 120 bp, Artificial Sequence
  ENSG00000234170_29 (sequence is synthesized)
gggaaaatgacatttgttacaaaacaactaaaaatgtgtcttggagcattcaagcactattcactgctaagattcggtggaaacctgaatcacatacatttatgagactataaacaaagg

SEQ ID NO: 1013974 - DNA, 120 bp, Artificial Sequence
  ENSG00000234170_30 (sequence is synthesized)
gtggtatgagaaacgcgtcctttgaccttgcatagttcagggctcaaatgatgtagctgccctggcctaggtgaattacactttcatctgtgtctgcttccctgtctttaccgtgggggt

SEQ ID NO: 1013975 - DNA, 120 bp, Artificial Sequence
  ENSG00000234170_31 (sequence is synthesized)
aagcctgactcaccaccggtgcactacagaacgtaaatcatacagtgtgcgtgaagaggacatccaatcaagggtccactcgtttcccccaccccccaactcctttccatgactgacagt

SEQ ID NO: 1013976 - DNA, 120 bp, Artificial Sequence
  ENSG00000234170_32 (sequence is synthesized)
tcaccaaaggcttcacacccatgaactggaaatggtgaggaagttctcaggcaggaaatgccagggggtgttatttcccggcaatcctgaaaaccatcaactgtttttagatacatgatt

SEQ ID NO: 1013977 - DNA, 120 bp, Artificial Sequence
  ENSG00000234170_33 (sequence is synthesized)
gttaattaagacccctgagaggcttgttccaagacttcgatgctgggttcatactgaaagtacagtattcctttcatgccttcccgaagggaaggggattaaagtaagtttaaaaagcca

SEQ ID NO: 1013978 - DNA, 120 bp, Artificial Sequence
  ENSG00000234170_34 (sequence is synthesized)
tcaattcaagtccagtttctgcctcttgacatccatggaaagcactcagcagctttgtcctagaaacatggtgcaggccaagaaggtgttcacggataatgaagctgatgtgagagccct

SEQ ID NO: 1013979 - DNA, 120 bp, Artificial Sequence
  ENSG00000234170_35 (sequence is synthesized)
atgaatgtaaaacaggtcacaggaccctggacaaaacgaaactcaacatgggaggcgacgtgagaagatcctagtgatggatttaagcatgttttttaaagtgggaagacagtgagaatt

SEQ ID NO: 1013980 - DNA, 120 bp, Artificial Sequence
  ENSG00000234170_36 (sequence is synthesized)
atgggtagaacattgactatcacagattgaaaaaaatctggtccccttccaagaatgtttgcccttttccccagaacattgcagtgatgttccaccttccgcctggcctcagttccaaga

SEQ ID NO: 1013981 - DNA, 120 bp, Artificial Sequence
  ENSG00000234170_37 (sequence is synthesized)
tggccaggccaatatgatgcaagaagatgctgggaaagtgtttgtgcaattgtatttgctttttctcttcacagcattcatcactatgagaaagacatacttgagctacccatttggtcc

SEQ ID NO: 1013982 - DNA, 120 bp, Artificial Sequence
  ENSG00000234170_38 (sequence is synthesized)
taaggaggatgaagcatgctgtgtgacagagacaaccagcagacatttgagccaggacagccttcttttaaaaagtaacatgccagagttggcttcaatagattctagtccttaagaaat

SEQ ID NO: 1013983 - DNA, 120 bp, Artificial Sequence
  ENSG00000234170_39 (sequence is synthesized)
gcaaccctgaaaaatacattctaagtctagactgaagtgtgtgccctgagtatatgcacttcttagcctgtaagtcaggcttcagaattaaatgcattttcagaaaatccagctcatttt

SEQ ID NO: 1013984 - DNA, 120 bp, Artificial Sequence
  ENSG00000234170_40 (sequence is synthesized)
gtctgatctactactttggaggaagaaaaattctatgacaattttttaaggagatcctgcattagtacactgtgatttaataatttaacagatctgtggccctatgcctaatcattgatg

SEQ ID NO: 1013985 - DNA, 120 bp, Artificial Sequence
  ENSG00000234170_41 (sequence is synthesized)
gaaaatgtcaccaaaaatagattatatgtggggggaaatagggtctggtgtctgatatgctggtatatacttgtgaaaaccaatttacctgaggaataaatacgatatcatttaatttaa

SEQ ID NO: 1013986 - DNA, 120 bp, Artificial Sequence
  ENSG00000234177_0 (sequence is synthesized)
atccagagacggattgctgagatgattcctgctttccggctccccgacacccgctgttctttagatccgctcagcggcgctttttcctgtgccacgtgcccagatctgagcgaggcttgg

SEQ ID NO: 1013987 - DNA, 120 bp, Artificial Sequence
  ENSG00000234177_1 (sequence is synthesized)
gaagacgcgaacgggctgtaaaatctgtccccagaactggagagtaagaatgagcggtgtggggctgagctgagtccagggagtgcgagaatttagcagtcgtgctgtgcctgggcattt

SEQ ID NO: 1013988 - DNA, 120 bp, Artificial Sequence
  ENSG00000234177_2 (sequence is synthesized)
cagactgtgccacagccgggcctgcctgttccgcaatgtggctgaggaagggagccaaaaacgctgctgcagggctggctgtgggcagtggcaggaagcaaacagaggctctctggcgac

SEQ ID NO: 1013989 - DNA, 120 bp, Artificial Sequence
  ENSG00000234177_3 (sequence is synthesized)
ttctctcccctggaggccctcctccctctacttctagccccactgctgtgggacagttgcatcctggggctttctgtggctctcccatcagtgccctggggctggcatatgcgacacctc

SEQ ID NO: 1013990 - DNA, 120 bp, Artificial Sequence
  ENSG00000234177_4 (sequence is synthesized)
ctctgcctagggcattcaggcattcttcagtacttggtgagcacctcctagtgccaagctctgtcctggtcacaggagagcactcctatccatgtgttgtccctgtcctcactgcgcttt

SEQ ID NO: 1013991 - DNA, 120 bp, Artificial Sequence
  ENSG00000234177_5 (sequence is synthesized)
gggccggagaggagctcactgtctgatccttttccccgactgtggcttaaggggtttcgtctcttgctagagcccttctaggcaggcagcaggtcctggtttgtgagcaaggggctcctc

SEQ ID NO: 1013992 - DNA, 120 bp, Artificial Sequence
  ENSG00000234177_6 (sequence is synthesized)
ctccattttggagcctcggctgccctgcctccccggtaatctggtattctggtagtgcctctctgggccctggtttaaaaggccgagagaagctgtattctggagatcagctccaggttc

SEQ ID NO: 1013993 - DNA, 120 bp, Artificial Sequence
  ENSG00000234177_7 (sequence is synthesized)
tcccgcagagagcaagctccaggcacaggcaaagggtgtggcttcagagaagagcgaggatcttgccatctcttttacaggttggtgcagactttttagcagcgttaaacccctgattgc

SEQ ID NO: 1013994 - DNA, 120 bp, Artificial Sequence
  ENSG00000234177_8 (sequence is synthesized)
cgggggcaggacctggtctggggactgtcaagtgctttatcttatctaagccttacctctagatccgtggaaggcagagagaatttgggaacctctgtgctataagcatggaaaattggg

SEQ ID NO: 1013995 - DNA, 120 bp, Artificial Sequence
  ENSG00000234177_9 (sequence is synthesized)
actcaggtaaaaaggctggttcctggtcgcacagctggtcatgggtgagtgtggtttttgaactctgatatttggattctgagtacagaacatgttatattgtggcccatgccctcctcc

SEQ ID NO: 1013996 - DNA, 120 bp, Artificial Sequence
  ENSG00000234177_10 (sequence is synthesized)
tgagttcttcagttttaatcatttcattttctactctttttaggcactttggcaaaggagtgtgagttttggggaagctcaaggaagaggtaccaggtagagagagggccagggctgagt

SEQ ID NO: 1013997 - DNA, 120 bp, Artificial Sequence
  ENSG00000234177_11 (sequence is synthesized)
tcacgggctctttctaaatggaaatgtctcacattcagctgttgtctgcctttgagtcacacagaaccacttgcaggaagaactctagagaatttgggaagaaagggggagaggacagac

SEQ ID NO: 1013998 - DNA, 120 bp, Artificial Sequence
  ENSG00000234177_12 (sequence is synthesized)
aaaagatgcatttttctttcaagaagcaggaaaatgtaaggaaaattgaaggtgttctcaagtgtgtctgctgctgcctgacacaggttaaccccgtcgcaggtcactccgctctgttaa

SEQ ID NO: 1013999 - DNA, 120 bp, Artificial Sequence
  ENSG00000234177_13 (sequence is synthesized)
ttgcatcctaaccttcctcggctcttcggcagcgaaatcgcagcagaggagatggagcagcttcgtgcgcattgctcatttgcgccaacgtgaaaagaactgccaggatgcccaggacac

SEQ ID NO: 1014000 - DNA, 120 bp, Artificial Sequence
  ENSG00000234177_14 (sequence is synthesized)
cagctccctggcttctgcggtgcttgcacagtcctgaatcagcccgagagctgtggatctgcgtcccctggctgcatagccgactgccggctccatggaggggcctgtgccggagaacgc

SEQ ID NO: 1014001 - DNA, 120 bp, Artificial Sequence
  ENSG00000234177_15 (sequence is synthesized)
acatgttgacttatttcttcagtctaggcctttcttggcccccttggttattcattctagatgatacaactcttatttcagttcaaatgtctcacggaagaggcattgaagacagagtgg

SEQ ID NO: 1014002 - DNA, 120 bp, Artificial Sequence
  ENSG00000234177_16 (sequence is synthesized)
atgcccgtgtttgttggcagtaggtagtatttaccactccggttgtagtaaaagaacaaaaggagaaattacacctatttctcatatttaagggaaaagcaattaaatcaccaaagtcag

SEQ ID NO: 1014003 - DNA, 120 bp, Artificial Sequence
  ENSG00000234177_17 (sequence is synthesized)
ttacgatgcccccaaagagctggcgaagatctcaggattggctttggagggtcttggcagtgctactatattcttattatgaataaaaattttaaacccaagctgataaacatatttttt

SEQ ID NO: 1014004 - DNA, 120 bp, Artificial Sequence
  ENSG00000234177_18 (sequence is synthesized)
ttcacactgaattcatcaggaatacattaacattttctaaaaggtaaagacagcaaaaatgaaagaattgaaaggagaacattaggatgtatttggccactaggactctgtttccatcag

SEQ ID NO: 1014005 - DNA, 120 bp, Artificial Sequence
  ENSG00000234177_19 (sequence is synthesized)
ctcctgcatatgagccagaacttcaccccatataactaatgcgcagggaattagcctatggaataatgatcattcctgatgaaaagaataagatcttgttcccgtgtatgtgcagagcca

SEQ ID NO: 1014006 - DNA, 120 bp, Artificial Sequence
  ENSG00000234177_20 (sequence is synthesized)
ttcatcctaagaaagaaatctggagtgaaagcgcacagcatattttgcataggttctgtaaaaggatccaggcaaaacaggctttgcaacattagttatgatcatatatggaaaaagcag

SEQ ID NO: 1014007 - DNA, 120 bp, Artificial Sequence
  ENSG00000234177_21 (sequence is synthesized)
ttactttctggggtgacatatggctgaattggtacaatgcccaggaatctcaatgtcccccttagaagggtgagccctggcttcatccttcacccacatcatcagtgggacaaactgcac

SEQ ID NO: 1014008 - DNA, 120 bp, Artificial Sequence
  ENSG00000234177_22 (sequence is synthesized)
agctcgtggacagatcaccggtaaagaaaatcacatccacctgtgctgagaccaaggctgctgttgggctctggcagttggcaagcgctaaggtccccttctgtgatcataactttttct

SEQ ID NO: 1014009 - DNA, 120 bp, Artificial Sequence
  ENSG00000234177_23 (sequence is synthesized)
aaagcaggaaaattatgaatggagcccaagcccgtctgcttaagattcaagcatggtgacattccatagtaaacaacaacagcgacaatgctgacaaaaacaacacgtttattgtgaggg

SEQ ID NO: 1014010 - DNA, 120 bp, Artificial Sequence
  ENSG00000234177_24 (sequence is synthesized)
tgattccacccttaaatgtggaaaatttaaccttgctctgatactattctgtaaccagtatacctatgtccaacattcctaacatagccaaaccaatcaattgagccttattgtggaaga

SEQ ID NO: 1014011 - DNA, 120 bp, Artificial Sequence
  ENSG00000234177_25 (sequence is synthesized)
gacaggaaatgtgatcacttgaatgtgtgatattcattcatccactcattcattttgctgaccattaattaattcaattaaccctcctgagtacagctctgtgctaagcattagggactc

SEQ ID NO: 1014012 - DNA, 120 bp, Artificial Sequence
  ENSG00000234177_26 (sequence is synthesized)
aagatgattcttatcttcaaggcatccagcctggggagaaaaacagacgtacaactaagctgcagacggacacatcctttagtgatggggacacctggaagggattgagaaactccttgc

SEQ ID NO: 1014013 - DNA, 120 bp, Artificial Sequence
  ENSG00000234177_27 (sequence is synthesized)
ttctaagtggccctgggagcaaccggaggtggggtgggccagtgcctgtaggcctgggcctgcctggctgaggatcccagctggactactgccttgctgtctacaaatgatggagccctt

SEQ ID NO: 1014014 - DNA, 120 bp, Artificial Sequence
  ENSG00000234177_28 (sequence is synthesized)
ccagtctcagcttcctcacaagtaaaatgcagacggcaatgcctctttccagtgacgttgtgaggattcgatgggaagtttcatgaaagcacttagcagggtttttgttgagtgctcaga

SEQ ID NO: 1014015 - DNA, 120 bp, Artificial Sequence
  ENSG00000234177_29 (sequence is synthesized)
aggtgatagtttggtgttgctaggggaacagaagcctgggctgagaacaggccgtggagagtcacaaatggtcttcagccgtcggaaggcactgttagatttactcttcacaaagaacat

SEQ ID NO: 1014016 - DNA, 120 bp, Artificial Sequence
  ENSG00000234174_0 (sequence is synthesized)
agagagagagagagagagaagacagtgctactgaaggcctgtggtgaggccagcagaggctcaggaagggagcagaggatggcggtctgaggttccaccagccccaacctaggcagaccc

SEQ ID NO: 1014017 - DNA, 120 bp, Artificial Sequence
  ENSG00000234174_1 (sequence is synthesized)
acttagctcacctccaaaggacccaagaatggatggcttggcctgggctccccaagagcacttcctggctcacagtcggcttgcccagtgaatgtggctgtgacggctggagcttccgac

SEQ ID NO: 1014018 - DNA, 120 bp, Artificial Sequence
  ENSG00000234174_2 (sequence is synthesized)
gcctctcttcctaggcccagcgcctgcagcccctttccccatgcccctgctccttggaggcccccaccctgcacaccagcctagaaagaacctgccatggtggaactggcctctccctgc

SEQ ID NO: 1014019 - DNA, 120 bp, Artificial Sequence
  ENSG00000234174_3 (sequence is synthesized)
catgcaggggcctgggattgaaaggggaaggggccgaggcctggttggtaagcaggccccacctccttcctccctgcgcttctgccccaggttctcagtcttgctctggctcttggtccc

SEQ ID NO: 1014020 - DNA, 120 bp, Artificial Sequence
  ENSG00000234174_4 (sequence is synthesized)
agtgctactgaaggcctgtggtgaggccagcagaggctcaggaagggagcagaggatggcggtctgaggttttacaactctctctctccatcaagctgggtaagtcagaaacctgaagtc

SEQ ID NO: 1014021 - DNA, 120 bp, Artificial Sequence
  ENSG00000234174_5 (sequence is synthesized)
accaagacctaaatgcaaaccctccactctgggccccagccgctaggggtgtctccggaacatggccaaggctcaaagtcagcacctgctctgtgcaggctctatgctacaagccgctga

SEQ ID NO: 1014022 - DNA, 120 bp, Artificial Sequence
  ENSG00000234174_6 (sequence is synthesized)
actgagtgaccccagttccaaggcagggcctctacaatttccagtttatctattgtttcctgtgtaagagcagatacttactgtaagtccgtaagtgctactcgtaggtcaaacaacctt

SEQ ID NO: 1014023 - DNA, 120 bp, Artificial Sequence
  ENSG00000234174_7 (sequence is synthesized)
gatgatatcacacttcaattgtcttataaatcccatctgaaccactcctaccctatggtatatgagccctgggtttgggtgctaatgcggggatccaccatctcatctcattgccgcctg

SEQ ID NO: 1014024 - DNA, 120 bp, Artificial Sequence
  ENSG00000274554_0 (sequence is synthesized)
ggtgaattcaacattgattgggaatgaggtaaccacaaacaccgctgtctcaaatgaaaagggattcaagatctgacccagaaaacaagcatcgtaaccaccagataaaattttaatgat

SEQ ID NO: 1014025 - DNA, 120 bp, Artificial Sequence
  ENSG00000274554_1 (sequence is synthesized)
aaacacaagatgctctacatacaagcaagactgaagtctctcatgctaagccatcaacgtaaggttttcttagaaagaggagccaccaggagcctctcgacccacagatcaagtttcatc

SEQ ID NO: 1014026 - DNA, 120 bp, Artificial Sequence
  ENSG00000274554_2 (sequence is synthesized)
ctatcgatccacagaacgtggccatcgtgctctgtgctggcataatctgtaatgttgaacagaccccgagggaacagagaggcagagagagaaggactggcatctggactcgtagggggc

SEQ ID NO: 1014027 - DNA, 120 bp, Artificial Sequence
  ENSG00000274554_3 (sequence is synthesized)
ctgcccttcgggagctccagagaagaaattcataattggctttgagagtcaaggctctcctttatttttaagttcttttgcgactctttcagtccagtctcagccttctgtcctcaagtg

SEQ ID NO: 1014028 - DNA, 120 bp, Artificial Sequence
  ENSG00000274554_4 (sequence is synthesized)
tcttctgacactctaggcagagatccctttaagctggaatgatctaagtaccttccggagttcacaccaaactgtagcatccgtgggtagaaaggagctgcatatcagttgatcgcaggc

SEQ ID NO: 1014029 - DNA, 120 bp, Artificial Sequence
  ENSG00000274554_5 (sequence is synthesized)
ccacattttagcaacgagcatcgataacttaatggacagaatcgcaagtatctggaccatcaacctttctaaaactagttctgcagcactcccaagaagggctttcacctctaaatcata

SEQ ID NO: 1014030 - DNA, 120 bp, Artificial Sequence
  ENSG00000274554_6 (sequence is synthesized)
gccagtgaaacagaaactgaagaaaagcctgcctcctgggtacatcttgtttaaagcagaaatactttttttcataggcactgcatgccacaaaatattaaaataatccgactgtgtgga

SEQ ID NO: 1014031 - DNA, 120 bp, Artificial Sequence
  ENSG00000274554_7 (sequence is synthesized)
atttctattcaaaaggtgctctttaaggaatgctgcttaaagaaagatttttctttaaagaaaaggactcctctactactgagttttaaagtccaaggtttgttttattttcccataggc

SEQ ID NO: 1014032 - DNA, 120 bp, Artificial Sequence
  ENSG00000274554_8 (sequence is synthesized)
aggaagttccctaaggcgtctcactccatagctgatccaaactaagaaatttaagtgttctgctttctactttatggcattaagtatacagtctgaggctgtagttcatgacatcttcct

SEQ ID NO: 1014033 - DNA, 120 bp, Artificial Sequence
  ENSG00000274554_9 (sequence is synthesized)
aatccaaaaagaaaactgatcttattgtagagtaaataaatatataaatgtacctctgtaacaaagtaggaagacttcatcaaagtggtttttgggacagaagctgaaggaatttacaga

SEQ ID NO: 1014034 - DNA, 120 bp, Artificial Sequence
  ENSG00000274554_10 (sequence is synthesized)
agctaaaattaaatgtgttggccatggagaaaaaaaaaaacaatgtcaggacaacttaagtaacaaataggtactatatggtggggaaggaagattatgtgtggccaaagcccttcttca

SEQ ID NO: 1014035 - DNA, 120 bp, Artificial Sequence
  ENSG00000274554_11 (sequence is synthesized)
gccaacacttattatctttgcttgacttttttatgtcttcataaaatacaaactgtttgccttaatgaaaatctcacataacatgccacaagagtgatttaaaagctgggaaagacatat

SEQ ID NO: 1014036 - DNA, 120 bp, Artificial Sequence
  ENSG00000274554_12 (sequence is synthesized)
tgagacaaatggatcacagatccgctctacaccatgtgcttctcacccttgctgcgcgctctcacgtccttgggaacagaatcacggagactctccctcttccacatgggctgtaactga

SEQ ID NO: 1014037 - DNA, 120 bp, Artificial Sequence
  ENSG00000274554_13 (sequence is synthesized)
gggaggtacatgctctcaaaggaagctaaggtcactggtactcagagggtggtatgagaaaaatgaaagaccttcagatgcagagcactcagtggaaacggtttggcttaccccgcaatg

SEQ ID NO: 1014038 - DNA, 120 bp, Artificial Sequence
  ENSG00000274554_14 (sequence is synthesized)
accacaccatcgtgagaatgcacatcacacaaaactgtgtcaggaacatgctccagctcgctcacggcacctttgcgattctgcgtgaggaaaagggggatgcagtttagactgctctcg

SEQ ID NO: 1014039 - DNA, 120 bp, Artificial Sequence
  ENSG00000274554_15 (sequence is synthesized)
ggacagcccgaaagccaagcatcgtgctttttcacctactttccacagcaattctctacagcatggacaacaagtgcattcaaagttccatgggcattcaaaaagacaaagatgatgact

SEQ ID NO: 1014040 - DNA, 120 bp, Artificial Sequence
  ENSG00000274554_16 (sequence is synthesized)
aacatgctaagctgttaagcatgggcgagttaccatatatcccaaaggcactgaactcgaggacacaggacgtgtgagacattgccccatcctccaggaggttacagaatagaaagcaaa

SEQ ID NO: 1014041 - DNA, 120 bp, Artificial Sequence
  ENSG00000274554_17 (sequence is synthesized)
tatgtgctcaccaataactaccatccacaataggctggcatgtatctgctgggagtggcaagtatctaaagaaacttataaagtatgtgaaaaagttccgttcagcaaaaagaaagtatt

SEQ ID NO: 1014042 - DNA, 120 bp, Artificial Sequence
  ENSG00000274554_18 (sequence is synthesized)
acatgataccttacctgttaattcttataaggactctcagaataaaatgcaaaattatatacaaatagataaagatcaggatgaggaaaaggagatgagatgatactatttctaactgag

SEQ ID NO: 1014043 - DNA, 77 bp, Artificial Sequence
  ENSG00000274554_19 (sequence is synthesized)
atgaggaaaaggagatgagatgatactatttctaactgagaggccagaggtttcatggaaatggtatttgaatgaca

SEQ ID NO: 1014044 - DNA, 120 bp, Artificial Sequence
  ENSG00000274554_20 (sequence is synthesized)
cagaggcaggaagatcacttgagctcagaagttttgagaccagcctgtgcaacacagggagaccccatctctgcaaaaaatttaaaagacagtcaggtgtggtggcatgcacctgtagtc

SEQ ID NO: 1014045 - DNA, 120 bp, Artificial Sequence
  ENSG00000274554_21 (sequence is synthesized)
acttgagtccaggaacttaaggctacagtgagttatgattgcaacactgtacttcagcctgggcaagagagtgagaacctatctctaaaaaaataaaaaattaaattgaattaaaatgaa

SEQ ID NO: 1014046 - DNA, 120 bp, Artificial Sequence
  ENSG00000204261_0 (sequence is synthesized)
agttagtgcctggaccaggaccatcacactggggaccggcttctctgctctcccgttatgggggtcgggggaatgatgggtcaagggtcttccgaagaaagcgagaaaggaacaggcgcc

SEQ ID NO: 1014047 - DNA, 120 bp, Artificial Sequence
  ENSG00000204261_1 (sequence is synthesized)
ttcaaaagcccacttggcgatgggttacagtaagaggtacctccaggcccgggcatccgctggaaacaggggtgggtagggtcgtgtcatctaaaggcgcagcttcaaccagaagactag

SEQ ID NO: 1014048 - DNA, 120 bp, Artificial Sequence
  ENSG00000204261_2 (sequence is synthesized)
aagtcagccaggagctgggagtagtgtcacgcggggtgggggttcctatgagcatcactttacaaaaccaggagggacggaagtgcgagggggcagagtcttggaaacaggtcctgggcc

SEQ ID NO: 1014049 - DNA, 120 bp, Artificial Sequence
  ENSG00000204261_3 (sequence is synthesized)
aactgcaacagaatatacccgccgcgtgtaggggaaggcggcgccagggagagggcgcagtctctgaatctttccacggggtccatcctagggcccctccaggttcaacggtctcctaac

SEQ ID NO: 1014050 - DNA, 120 bp, Artificial Sequence
  ENSG00000204261_4 (sequence is synthesized)
ctgtagtcacccacaagagcgtgccctttctgcccgcccttcctagcgttgctccctgcttggctgagcactgcggagtttcacgcctctaaaccccgcctcttcttgcaacctgtgttg

SEQ ID NO: 1014051 - DNA, 120 bp, Artificial Sequence
  ENSG00000204261_5 (sequence is synthesized)
gcctcatctacccagcaactgtcgacgtcacacgacctgggcctccctgaatgggagatatttactaggcaatcccgcctactgttctgaggtttcccctccaggtgcagcttcagagcc

SEQ ID NO: 1014052 - DNA, 120 bp, Artificial Sequence
  ENSG00000204261_6 (sequence is synthesized)
aggcgagccaggaaggaccagcgggcgaggtggtgagttgtgaggcgcgcccagtccctctgttcccgcctggcacttgctctggccgcgcccgccccatctgccacttcggagaggcca

SEQ ID NO: 1014053 - DNA, 120 bp, Artificial Sequence
  ENSG00000204261_7 (sequence is synthesized)
cggctctgagctgcggccgctagtgccctgatgggccctgtggctggggtcttgcacattcttgggggtgggcctaaggggataggggaagtggaaggggcctcataggaattaaaaagc

SEQ ID NO: 1014054 - DNA, 120 bp, Artificial Sequence
  ENSG00000204261_8 (sequence is synthesized)
ttaagggaaaaggtgatgcagttagggggtaaaacattgaggatgataaaagaggagacatccgcagctgaaaagtgcgctgcaaaaggcagtgggccgtttggtgtgccggaaacataa

SEQ ID NO: 1014055 - DNA, 120 bp, Artificial Sequence
  ENSG00000204261_9 (sequence is synthesized)
attttattataaatatcaagaacctacagggtgtttatgggccagcatatgccttcagttatgttgaaaatagctgatcatctttccgtacattctgaacatttctcagtttcagagtgc

SEQ ID NO: 1014056 - DNA, 120 bp, Artificial Sequence
  ENSG00000204261_10 (sequence is synthesized)
tggccacaccaaagcatcagccctggctctaaactccgttacagtaaggaattacaaatcctgtgtttgtactccaggaagtctgcattatcacgaggagcttggaaaggaggtaacaca

SEQ ID NO: 1014057 - DNA, 120 bp, Artificial Sequence
  ENSG00000204261_11 (sequence is synthesized)
ctcaaggcaaatttcaagtaactcatcctggaggcagctgcctactctgcagctgtggttctccaccacagagagaagaaaagggagggagatggagtgcgcaggtctgagaaggctttc

SEQ ID NO: 1014058 - DNA, 120 bp, Artificial Sequence
  ENSG00000204261_12 (sequence is synthesized)
attctggagcatctgcaggagcctgcaccatggcccagtagcacccctttttctccatgagctgctggtgggttcccccctcccggatagcgcctccttccagaaagaggatgtggtcag

SEQ ID NO: 1014059 - DNA, 120 bp, Artificial Sequence
  ENSG00000204261_13 (sequence is synthesized)
cctgctccaccaggctgaggtgctgggtgatgagaagcactgagcgggagtaccgctcagggctttcgtacaggagctgctccacctgaggaaagacatcggaccgtcagagccggggac

SEQ ID NO: 1014060 - DNA, 120 bp, Artificial Sequence
  ENSG00000204261_14 (sequence is synthesized)
taccctcagcccagggagacacctgtgtttccagggctgggactgacctcacaggatcactgctggctctgctaacaaccccaaggacaccaacgtttcccattctgagtacttctccgc

SEQ ID NO: 1014061 - DNA, 120 bp, Artificial Sequence
  ENSG00000204261_15 (sequence is synthesized)
aaaccctttgtttcattaaggactgttttacatgaagggtgcaaaagtaggataaaaatgagaaccctagggtgaaacacgtgacagaagaataaagactattgaatagtcctcttctct

SEQ ID NO: 1014062 - DNA, 120 bp, Artificial Sequence
  ENSG00000204261_16 (sequence is synthesized)
acccatggacttggcatttttatattcgattttaaggaaatataacttagtagtaaagagatgagcattcaagtcaggcagacctgaatttgggtcaaggctgcgccactcaaaagctat

SEQ ID NO: 1014063 - DNA, 120 bp, Artificial Sequence
  ENSG00000204261_17 (sequence is synthesized)
atgacctctatatgagcagcttattcaacctcttttaacctccattttgtcatctgtagaatgatgataaatgcctagctcagaaggattcctaatgaataaatgagtgacagtgcatgt

SEQ ID NO: 1014064 - DNA, 85 bp, Artificial Sequence
  ENSG00000204261_18 (sequence is synthesized)
cactttgggaggtcaaggagggaggatcacttgggggacgctgtctgtacaaaaaataatttttttaaataaacgatattatgag

SEQ ID NO: 1014065 - DNA, 120 bp, Artificial Sequence
  ENSG00000284618_0 (sequence is synthesized)
gagttcaggtccggcagagagcgcggagagacgaagaatgcggcctgctactccaggggcctccaggccctccggcccctggccggcgggtgaactggggggccccgggacagtctgagc

SEQ ID NO: 1014066 - DNA, 120 bp, Artificial Sequence
  ENSG00000284618_1 (sequence is synthesized)
cctctgccctgcagataccggatggaggcctctgctgtggctgcccactggctgtgcccaggccttgaagccacagcgaacctctcttccccccctcccacctcggtgactgatggcggg

SEQ ID NO: 1014067 - DNA, 120 bp, Artificial Sequence
  ENSG00000284618_2 (sequence is synthesized)
ggcggcctctcccagcccgaacccccccggcccaagcctaccgggcctccgctaaacctccgcagagctgtcgggacgcagcgcctttgggcggctgcaggagtggagggccgggaagca

SEQ ID NO: 1014068 - DNA, 120 bp, Artificial Sequence
  ENSG00000284618_3 (sequence is synthesized)
tggcggccgctcgaacgccgcgcggcggaggctgttagggcgtggagggcccgggaaagcggcccagggacgcaggcaggctaggccgcctctttaggccacggagccgcgcagatccgg

SEQ ID NO: 1014069 - DNA, 120 bp, Artificial Sequence
  ENSG00000284618_4 (sequence is synthesized)
gtcccaggtgaccactctgtcgccattgggcgagacctacctagtcctgaagacaacggacaaagggcttaaccggcctggtaggtgagcgaagtcccagacggcgacgggtggaactgt

SEQ ID NO: 1014070 - DNA, 120 bp, Artificial Sequence
  ENSG00000284618_5 (sequence is synthesized)
tagcggccatcgggcggttggtcttcgttctaccagaccttgctgtcgaaagagagaaatgatagaatgacaggccacgtttggcccgttggaaatgcccaccaccctctgggaagattt

SEQ ID NO: 1014071 - DNA, 120 bp, Artificial Sequence
  ENSG00000284618_6 (sequence is synthesized)
actggccgtttatggaaggcctgtgtatataatatgaaaaaactgctctcaactccaccccaaccttttaatagaaaacatttgtcacatctagcccttctagatggaaagaggttgccg

SEQ ID NO: 1014072 - DNA, 120 bp, Artificial Sequence
  ENSG00000284618_7 (sequence is synthesized)
acgtatgataaagtagagttagaaagtcacacgtcttgtaaattctcatttgtttaaaataaataatagaaaatacatgtcttctggagatgacttttggaaatggagttgttagacggg

SEQ ID NO: 1014073 - DNA, 120 bp, Artificial Sequence
  ENSG00000284618_8 (sequence is synthesized)
ctctggaagctatacgtccacgtttgttcggtgggttagatgacaaggagctagaagacctgagaaggaagagaagaaggttctttcctagactggtcatatttagaagacattttcgta

SEQ ID NO: 1014074 - DNA, 120 bp, Artificial Sequence
  ENSG00000284618_9 (sequence is synthesized)
ttctatccattgttttgtgtgcattttattcctcactactgtgtacatagttgacaatgctaagcttttttgaaatgtctgttctttttagatgttctgaagtactgatatgttaaaatt

SEQ ID NO: 1014075 - DNA, 120 bp, Artificial Sequence
  ENSG00000284618_10 (sequence is synthesized)
agaggtagcaaaatcacattttgtaagtatctttttgttacaattcataggaaatttttttgaggggaatggccaaatcacctgtggagtaatactcattgtgtttgtgcagtggttcag

SEQ ID NO: 1014076 - DNA, 120 bp, Artificial Sequence
  ENSG00000284618_11 (sequence is synthesized)
gggaggagagaggagggggaggtgcagagagctctatgccatcctttttacaagatgaatcattatctctgtgcattttgttttacttatctgtgtatatagtgtacgtaaaggacaaac

SEQ ID NO: 1014077 - DNA, 120 bp, Artificial Sequence
  ENSG00000284618_12 (sequence is synthesized)
gattcctaattgacaacatctagtctttctggatgttaaagaggttgccagtgtatgacaaaagtagagtaatatattttgtacattttgttttacaagtcctaggaaaactaatatatt

SEQ ID NO: 1014078 - DNA, 120 bp, Artificial Sequence
  ENSG00000284618_13 (sequence is synthesized)
ttgtacattttgttttagaagtcctaggaaagattgtcttctgaaaatttgagcattcttacccactaggttgatggagatgggaagggttctaggccagaatgttcacatttggaagac

SEQ ID NO: 1014079 - DNA, 120 bp, Artificial Sequence
  ENSG00000284618_14 (sequence is synthesized)
tctttcaaattataactgttgttacatgtttgcagtttattcaagactgctgtgtacatagtggacaaattaactccttacttgaaacatctagtctatctagatgtttagaagtgcctg

SEQ ID NO: 1014080 - DNA, 120 bp, Artificial Sequence
  ENSG00000284618_15 (sequence is synthesized)
atgtatgttaaatgtagaggtagtaaaataccactttgtaaatatctttttgctaaaattcataggaaatacttttggaaattgaattttgaagccacctttgtgagcagtatagtaatg

SEQ ID NO: 1014081 - DNA, 120 bp, Artificial Sequence
  ENSG00000284618_16 (sequence is synthesized)
tttgtgcattttgttttgctctgtatatagtgtatataatggacaaatagtcctaatttttcaacatctagtttctagatattaaagaggttgccagtgtatgacaaagtagtaaaatta

SEQ ID NO: 1014082 - DNA, 120 bp, Artificial Sequence
  ENSG00000284618_17 (sequence is synthesized)
gcatattttgtatgctttgtgttgaaattcataggaaaacttgtcttctgtaaatgacttttgcataggaatttactcaaccatctctaagcattacacgtgcctgtacttgtccactgg

SEQ ID NO: 1014083 - DNA, 120 bp, Artificial Sequence
  ENSG00000284618_18 (sequence is synthesized)
attgaaggcagagaaggaagaggggagggaatgattcaaggccaaagtggtcacatttagaagatacctcagatgataaccattgttatgtgtgtgtaattttaacagtgctgtgtacgt

SEQ ID NO: 1014084 - DNA, 120 bp, Artificial Sequence
  ENSG00000284618_19 (sequence is synthesized)
ggtggacaagtatgaaatatctagtctttctagatatttggaagtgcttgatgtatttaaaagtagtagaataacactttttgtaaatagcttttaaaaactgatgggaaatgctgtttg

SEQ ID NO: 1014085 - DNA, 120 bp, Artificial Sequence
  ENSG00000284618_20 (sequence is synthesized)
gaagtggaattgttgaaccacctgggaggtgggagggaagaagttgcaaaaggtgttttgccattgtttattagaaaatttccgcttaatccattgcctatatgttacgtgcatttcatt

SEQ ID NO: 1014086 - DNA, 120 bp, Artificial Sequence
  ENSG00000284618_21 (sequence is synthesized)
taactttgctacactctatatattgtgtatatactggacaaatgagtccgattttataatatctagtctctagatattaaagaggttgccaatgtatgacagaagtagggttagtaaact

SEQ ID NO: 1014087 - DNA, 120 bp, Artificial Sequence
  ENSG00000284618_22 (sequence is synthesized)
aacacattttgtacacttcgttaaaattcatagaaaggctgtcttctgaaaaggactttcggaagtgaaatgataacatcagctctaagtgacacgtgcctatatccaccaggttggtgg

SEQ ID NO: 1014088 - DNA, 120 bp, Artificial Sequence
  ENSG00000284618_23 (sequence is synthesized)
tggagaggagttggaaggaatgaagcattctataccagaatgttcctatttagaagacactttcagatataactattgttacgtgtgtagattattcaacactactgtgtatacagcgga

SEQ ID NO: 1014089 - DNA, 120 bp, Artificial Sequence
  ENSG00000284618_24 (sequence is synthesized)
caaacttaagtccttatttgaaacaactggtctttctagatgtttagaagtgcacaaagtatgttaaaagtagagatagtaaataacacattttgtagctatccttttgatatgaaatat

SEQ ID NO: 1014090 - DNA, 120 bp, Artificial Sequence
  ENSG00000284618_25 (sequence is synthesized)
tgtcttggaaattgatcaattctctgagcagtacagattatgatatttgtgctggttcagggggaaggaggagcacaaagtgcaaagggctttctaccagtgtccactgtgtttatgatg

SEQ ID NO: 1014091 - DNA, 120 bp, Artificial Sequence
  ENSG00000284618_26 (sequence is synthesized)
aggcacattgaccattgtcccttatgtctgcattttcatttactgtgctgtgtatatagtgtatataagcggacataggagtcctaatttacatgtagtcgatgttaaagaggttgccag

SEQ ID NO: 1014092 - DNA, 120 bp, Artificial Sequence
  ENSG00000284618_27 (sequence is synthesized)
tgtatgacaaaagtagaattaggaaactaatgcattgagtacactttgtgttaaaattcatagggaagacttcttaaaaacagaagtgaaattgttaaaatccaccctaagcattacaga

SEQ ID NO: 1014093 - DNA, 120 bp, Artificial Sequence
  ENSG00000284618_28 (sequence is synthesized)
tggcttatagctgtccacggggttggtagaggtgggaaaaggaagggttctaggccagaatgttcctatttagaagacactcaaattactgtctgtgttatgtatgtataccatttattc

SEQ ID NO: 1014094 - DNA, 120 bp, Artificial Sequence
  ENSG00000284618_29 (sequence is synthesized)
aatgctactgtgtatataatggaaaacttaagtccagtttgaaacgtctagtctttctaggtgtttaaaagtgcacaacagcctggtgcagtggctcacgccagttatcccaacactttg

SEQ ID NO: 1014095 - DNA, 120 bp, Artificial Sequence
  ENSG00000284618_30 (sequence is synthesized)
caacaacagcaaaaaggtgtacaacatagcttaaaagtagagggctaaagtaacacccctctaagcatttgttttcagtacttcctagcagtggttgcgtaagtgaatgcagactattca

SEQ ID NO: 1014096 - DNA, 120 bp, Artificial Sequence
  ENSG00000284615_0 (sequence is synthesized)
ggaaacgaacaagggaaactggaagcggccaagggatttgcagaaccttctgagcccactgcaaaagaccatgccatttccattctgaagacaaaaacgtgaagtccctgttcccaagac

SEQ ID NO: 1014097 - DNA, 120 bp, Artificial Sequence
  ENSG00000284615_1 (sequence is synthesized)
cccctacagaatccaagaaaaaacaaaaagggaacatcaaaatgaaagagagaattcttcatggatggatgtcacgaacgtgttttcagggaagaaccccaaatggcagtcagatggagg

SEQ ID NO: 1014098 - DNA, 120 bp, Artificial Sequence
  ENSG00000284615_2 (sequence is synthesized)
tgcccattctgagaactgtttcaggagaaagaagcgcaaaaggccggggcgctgcctgtcccaccctgccgccagtgctgtgtgtcttgggtggctctatcacaggacataactggtgct

SEQ ID NO: 1014099 - DNA, 120 bp, Artificial Sequence
  ENSG00000284615_3 (sequence is synthesized)
ctatcacaggacataactggtgctgggaaatatggattcttctctatgtcaaaggcccactggtgactgcttttaatgagtcattaaacaagaacccacccaaatgcccatcaatgatag

SEQ ID NO: 1014100 - DNA, 120 bp, Artificial Sequence
  ENSG00000284616_0 (sequence is synthesized)
ccttccggcagcaagcacatcatagagactttcccagatcaagcaaaagtggggacagtattgaggatgtagcttctccttccgcacgcactgttgggcctgacctctgcctgcagggct

SEQ ID NO: 1014101 - DNA, 120 bp, Artificial Sequence
  ENSG00000284616_1 (sequence is synthesized)
gggacgaggcagaacttgctcttggggcagcgcaagttagggggtcacccctgggagtgggcacttcctggaacaattcaccctgaaaatctcatgcctcgcccgccccaggcctgcccc

SEQ ID NO: 1014102 - DNA, 120 bp, Artificial Sequence
  ENSG00000284616_2 (sequence is synthesized)
tgacctagaacctcaattttactttctcaactctaaacagggcttgcacttctgggcttgccttaatctgcacttctgggtgtaaacctccactcactctgaaggcatttactaagagcc

SEQ ID NO: 1014103 - DNA, 120 bp, Artificial Sequence
  ENSG00000284616_3 (sequence is synthesized)
tgttgtgcttcagcacttgtgtaagatcccggagacgccatttagaagtttacagaccagcagtgcaaacatataacttcttacagaagaaaaggagaaggaggaagaaagaggtggcag

SEQ ID NO: 1014104 - DNA, 120 bp, Artificial Sequence
  ENSG00000284616_4 (sequence is synthesized)
tacgcgggttatgacatcattccagagacatcttatctaaatcctcataacagatgtttgaggaaaggtgaaactaagacataagcttcttagaagtattgtcaaaccattgtaatctct

SEQ ID NO: 1014105 - DNA, 120 bp, Artificial Sequence
  ENSG00000284616_5 (sequence is synthesized)
tccgcacagggtggcccagcacgccgcatgttatcaacactcaccagatactgctctgaactgctgaagtgcaggtgactttgaaacagagaaaggaatcttttgtgcttaaggagaatg

SEQ ID NO: 1014106 - DNA, 120 bp, Artificial Sequence
  ENSG00000284616_6 (sequence is synthesized)
gcagtgcacaaaccgctgaatgttcagaagaaaatgcactatcaattaggatgcatcttatctgtgtgcttttttttttcttaaagaagaaagccaaaggtcattaaatgatccatctgg

SEQ ID NO: 1014107 - DNA, 120 bp, Artificial Sequence
  ENSG00000284616_7 (sequence is synthesized)
aaggaatcctgccatcacattgcacattttcctactttcccaggagcttgcacatgagtgtcccaggaagagcattgtctgctcatccctcagttatccaggaaaactcaaattttaaat

SEQ ID NO: 1014108 - DNA, 120 bp, Artificial Sequence
  ENSG00000284616_8 (sequence is synthesized)
acttcaagagcagtggctgccacttccttgcagtctgttggtattgatcaccaaaaagagatgtgtttattagggacctttcctttcagggattttgatacacaaatacttggccctgtg

SEQ ID NO: 1014109 - DNA, 120 bp, Artificial Sequence
  ENSG00000284616_9 (sequence is synthesized)
ttacaactgcctacagtattcagcacagccacaagctgcacaggtttgcctaacagtcatggcttcttgaggatccttgagtcaaaacaataacaacaaaaattaaagcaagcaaacaaa

SEQ ID NO: 1014110 - DNA, 120 bp, Artificial Sequence
  ENSG00000284612_0 (sequence is synthesized)
gagaattcaaaggctcctgcaggagtccaagcaagaggattgcagattgtagcctggaagaggccagtagctgtggtgacaatggacaccaggtggatatgttggagagacacttagaag

SEQ ID NO: 1014111 - DNA, 78 bp, Artificial Sequence
  ENSG00000284612_1 (sequence is synthesized)
atgaccttaaatgatccacccgcctcagcctcccaagtgctgggattttaggtgtgagccactcgcctggcaggtgat

SEQ ID NO: 1014112 - DNA, 120 bp, Artificial Sequence
  ENSG00000284612_2 (sequence is synthesized)
gctgggattttaggtgtgagccactcgcctggcaggtgattatttaaaagcagaagtagtataatcatatttttttgtaaatagctttttaaaaatggatgggaaataatatttggaagt

SEQ ID NO: 1014113 - DNA, 120 bp, Artificial Sequence
  ENSG00000284612_3 (sequence is synthesized)
ggagttgttgaactacctctgtgaacagcatactctctctaattgttcattgggttgagggtggtgagagggaagaaattgcaaaagttgctttgctagtgtttattagcacgttgtgca

SEQ ID NO: 1014114 - DNA, 120 bp, Artificial Sequence
  ENSG00000284612_4 (sequence is synthesized)
gtataataataataaaattttaaaaaaaggttttaaaaaaaaagaaaatttcagcttaatccattgcctgtatgttacatgcgtttcatttacctttgctgtactgtatatattgtgtat

SEQ ID NO: 1014115 - DNA, 120 bp, Artificial Sequence
  ENSG00000284612_5 (sequence is synthesized)
gtactgtatatattgtgtatatactgaacaaatgagtcctaattttataatatttagtcgagtctctagagagtaaaaaggttgccaatgtatgacagaaagagttagtaaactagcata

SEQ ID NO: 1014116 - DNA, 120 bp, Artificial Sequence
  ENSG00000284612_6 (sequence is synthesized)
agttgtatgctttgttaaaattcacagaaagactgtcttctgaaaaggacttttgggagtgaaataacatcagctctaagtgactcatgtgcctatatccacctggttggtggtgaagag

SEQ ID NO: 1014117 - DNA, 120 bp, Artificial Sequence
  ENSG00000284612_7 (sequence is synthesized)
gagttgaaaggaatgaaggattctaggacagaaggttcctattgagaagacactttcggctataaccactgttacgtgtgtgtaatttattcaacactactgtgtatataacggacaaac

SEQ ID NO: 1014118 - DNA, 120 bp, Artificial Sequence
  ENSG00000284612_8 (sequence is synthesized)
aaatcatatttaaaacatcatctagtctttttagatgtttagaagtgcacaaagtatgttaaaagtagaggtaaataacacattttgtagatatccttttgatgtgaaatattgtctttt

SEQ ID NO: 1014119 - DNA, 120 bp, Artificial Sequence
  ENSG00000284612_9 (sequence is synthesized)
ggaaattgagcaaaccaattccctgagccgtacacattattatatctgtgtcagtttggggaggaaggaggagcagaaagtacaaagggcttttcaccagtgtgtttatggtgaggcaca

SEQ ID NO: 1014120 - DNA, 120 bp, Artificial Sequence
  ENSG00000284612_10 (sequence is synthesized)
ttgactattatctttttttttttttttttgagacgacgtctcgctctgtcaccaagctggggtgcagtggcgcaatcttggctctctgcaacctctgcctcctgtattcaagcgattctc

SEQ ID NO: 1014121 - DNA, 120 bp, Artificial Sequence
  ENSG00000284612_11 (sequence is synthesized)
tgcattttctttgtgctgtgtagatagcgtacataagaggacaaaccaatcctaatctatatcatctagtctttgtagatgttagagaggtccagtgcgtgacaaaagtagatttagtga

SEQ ID NO: 1014122 - DNA, 120 bp, Artificial Sequence
  ENSG00000284612_12 (sequence is synthesized)
cagtgcgtgacaaaagtagatttagtgaattaaaacactgagtacgttttgtgttaaaattcatagggaagactgttgttaaaaacatagaagtgggcagggcacggtggctcacgcctg

SEQ ID NO: 1014123 - DNA, 120 bp, Artificial Sequence
  ENSG00000284612_13 (sequence is synthesized)
aattgcttgaaccctggaggcagaggttgttagaatcctttctacacaatacatttggcttatagctgtccacagggtggacagaggttggaacgggaagggttctaggccaaaatgttc

SEQ ID NO: 1014124 - DNA, 120 bp, Artificial Sequence
  ENSG00000284612_14 (sequence is synthesized)
attacagtctatgttatgtatatgcaccatttattcaatgctactatgtatatagtggaaaacctaagtcctctttgaaacatctagtctttctaaatgtttaaaagtgcacaacatagg

SEQ ID NO: 1014125 - DNA, 120 bp, Artificial Sequence
  ENSG00000284612_15 (sequence is synthesized)
ttagaagtagagggctaaagtgacaccctttaagcattttctttattactttttaggagtgtttgcatttggaaatggaatggttaaacttgatgctttggactgttcatagggtgatgg

SEQ ID NO: 1014126 - DNA, 120 bp, Artificial Sequence
  ENSG00000284612_16 (sequence is synthesized)
tgggtgtaggaggaggaagtatgcaaagggaagggttctgtgcccaagagttagattagttcacatgatctaaccattgttctatatgcattttagttaatagtgttttgttttttattt

SEQ ID NO: 1014127 - DNA, 88 bp, Artificial Sequence
  ENSG00000284612_17 (sequence is synthesized)
tcctgagtagctaggattattggtaatttttagtagattcggtgtttcaccatgttggccgggcttgtcttgaactcctgacctcagg

SEQ ID NO: 1014128 - DNA, 120 bp, Artificial Sequence
  ENSG00000284612_18 (sequence is synthesized)
ggtgtgagccaccgcacctggccaatagtgggtattaaaagataaacaagtcttaatgctcaaagtatgttaaaaatagatgtagtaaaacaatccgtctacaaatgttcttttgttata

SEQ ID NO: 1014129 - DNA, 120 bp, Artificial Sequence
  ENSG00000284612_19 (sequence is synthesized)
gtctacaaatgttcttttgttatattttaggaggcctgtcttctgggagtgacctttgttattccacctcttggagctaggcatagtcctatacctagtcactgggatggtggaagaggg

SEQ ID NO: 1014130 - DNA, 120 bp, Artificial Sequence
  ENSG00000284612_20 (sequence is synthesized)
agaaaaggaaggatgaaggaaagagctatttgctagtatctccacatctagaagatggttttagatgataaccataggtctacatgagcatttttagtaaagtgcttgtgtgtaattctg

SEQ ID NO: 1014131 - DNA, 120 bp, Artificial Sequence
  ENSG00000284612_21 (sequence is synthesized)
gacaaagtttattattttgcactatctaagctttatgaatgtcctggggtgataatgtgtgataaaaagtagaactagtgaattagccaatttgtaaattttttcttgttataatttata

SEQ ID NO: 1014132 - DNA, 120 bp, Artificial Sequence
  ENSG00000284612_22 (sequence is synthesized)
gaaaagatgcaacttggacatggaactgttaaaccatctctgagctttgtatgccaggacttgttcattaggttggcagcagagcagcaaaaggaagtataaagagagagatgtatgcag

SEQ ID NO: 1014133 - DNA, 120 bp, Artificial Sequence
  ENSG00000284612_23 (sequence is synthesized)
atgtgtcgatatttacattttgatgatagccattgttgtatgtgcatctcttttagctgtactataggaatacattaggtatttcaatgaaaacataccttgctaatatttgaatagtat

SEQ ID NO: 1014134 - DNA, 120 bp, Artificial Sequence
  ENSG00000284612_24 (sequence is synthesized)
agatctgctaatggattctcttagaaacattatacttagtgtattctattgctgtatatttcattttaaagtgagcactaaaggaatgcggtattttaataaaaactctgccaacgcttt

SEQ ID NO: 1014135 - DNA, 120 bp, Artificial Sequence
  ENSG00000284612_25 (sequence is synthesized)
tacttagaggcgtgttgccaatttttgtcttttatgaaaatttggcccaagaaaggcaggattacattgtttttccaacagattgagtgggtgtagtgtattcttgatgatcaaaatact

SEQ ID NO: 1014136 - DNA, 120 bp, Artificial Sequence
  ENSG00000284612_26 (sequence is synthesized)
catatagctttgagattttgaattggtaaatactcaagatgtgtgaaaaagcatgatacatactatatgatctcagtcccataaaattgactattgtatctacacccacacaggacctag

SEQ ID NO: 1014137 - DNA, 120 bp, Artificial Sequence
  ENSG00000284612_27 (sequence is synthesized)
aaggacatgttaaactgtaaactgcttgtgattgtggatgacctttttcgttgcttcttgtgtttttcagtttcctataatgcacatagtaacttaaaaaaataaagattatttttgaaa

SEQ ID NO: 1014138 - DNA, 120 bp, Artificial Sequence
  ENSG00000284612_28 (sequence is synthesized)
cctaaaaaaaagaggttacagaattgaatactccctgagataaggtaaaatcatcttatgctaacggttgcaagataatggtataagtaagctttcgtcgtacatatcaatgaactttaa

SEQ ID NO: 1014139 - DNA, 120 bp, Artificial Sequence
  ENSG00000284612_29 (sequence is synthesized)
gatttggaagacaaaattcagtttatgtattcaattaaatgtgctcagattgtattgtgctagataggcacattattctaacataatatgaatgaatcaataaaatccttataatactga

SEQ ID NO: 1014140 - DNA, 120 bp, Artificial Sequence
  ENSG00000284612_30 (sequence is synthesized)
gcagtgtggagaatggattggaggggtcagaatgaatgtagagagaattcaaaggctcctgcaggagtccaagcaagaggattgcagattgtagcctggaagaggccagtagctgtggtg

SEQ ID NO: 1014141 - DNA, 120 bp, Artificial Sequence
  ENSG00000131484_0 (sequence is synthesized)
cttaaatgtactgaaatcctaacagctctagctgaaaaaatgtccaaagcaggccgtgaaaataaatttaaatgacaaactccaaaatgatctatgctagaatcccaaggctgtcaggga

SEQ ID NO: 1014142 - DNA, 120 bp, Artificial Sequence
  ENSG00000131484_1 (sequence is synthesized)
aaactggttccatggaagaaggtagtcaaagaaataagcagatgacctagaccctcacccaatatgcgcgatgtacttggggagaaagtaacctctttcctttattcacctacataggtt

SEQ ID NO: 1014143 - DNA, 72 bp, Artificial Sequence
  ENSG00000131484_2 (sequence is synthesized)
gctcctccatacaagacctcggactgcatcatgtaaatgctttttcaggggcaaaaactagagaatctgaaa

SEQ ID NO: 1014144 - DNA, 120 bp, Artificial Sequence
  ENSG00000131484_3 (sequence is synthesized)
gagattacagcatgagacaccatgcccagctgtgagcctgtatcttaatcaaagtcctgagaataaccttgaagaagactcccttgcaatgagcaacaacagaagaagcaagggacctgg

SEQ ID NO: 1014145 - DNA, 120 bp, Artificial Sequence
  ENSG00000271897_0 (sequence is synthesized)
aaaccggtgtaagtgcaaagagcagagccagctcctccccagctctttccccaggctgttcttcctgctttttgatctcagcctcactctactccatcccttcttgatccaagtccagag

SEQ ID NO: 1014146 - DNA, 120 bp, Artificial Sequence
  ENSG00000271897_1 (sequence is synthesized)
agatggacggagaaattcacagaatcttgggaaaagagagcttgggaaaatcctgaagtctctctttgcagcctttcttctaccaacagacaagatggaaactggccatttcagagcact

SEQ ID NO: 1014147 - DNA, 120 bp, Artificial Sequence
  ENSG00000271897_2 (sequence is synthesized)
ggcttcaaggatgtctaagggtagagattccttgggcttgtgggcaggggctcatttctgtgtgttgttccagatggtccaggttcttctgtctgtcccattaaaatgtatccttcttga

SEQ ID NO: 1014148 - DNA, 88 bp, Artificial Sequence
  ENSG00000271895_0 (sequence is synthesized)
gatatggaatttcactactgttgcccaggctagagtataatggtgcgatctgggctcaccgcctcagccgctcgagtagctgggatta

SEQ ID NO: 1014149 - DNA, 120 bp, Artificial Sequence
  ENSG00000271895_1 (sequence is synthesized)
caggcgtgagccacacctggcctaaaaatcatttaattttttatgcttgcctagttataaggtcaaagagaatcaaatgactgatgcagtcagcacctaacaacctctgtatatgggaag

SEQ ID NO: 1014150 - DNA, 120 bp, Artificial Sequence
  ENSG00000271895_2 (sequence is synthesized)
ataacagcctaagagccaagtgctgaagttacatttctgcctaccacagctaaagctctcctcactgtctcctacccagtcctcctttccatcaattaccagtctcttgtataaatgtat

SEQ ID NO: 1014151 - DNA, 120 bp, Artificial Sequence
  ENSG00000271895_3 (sequence is synthesized)
ccattaccaggctcacagactgggagtgatttttctcctttggagctcgtccagaatccatcagcctcacacacatatttacctgcaaatcattggaaaagcaaaaatgtttaactgcat

SEQ ID NO: 1014152 - DNA, 120 bp, Artificial Sequence
  ENSG00000271895_4 (sequence is synthesized)
gtataagatggttgtcatttgcttgaatacccccttgaaaaatgttgattcttgagcatcagtgggacatagaggtgtctgaagaaccattttacatgatttcataaataggaggtctct

SEQ ID NO: 1014153 - DNA, 120 bp, Artificial Sequence
  ENSG00000271895_5 (sequence is synthesized)
gcattaccatgtttgcttgcaaagtggaaaccttttagatgtgtaacttgaatatgtatcaagatctcaagtgcttaatgataaggtgttgacttgttaaattaaaccatttggaataca

SEQ ID NO: 1014154 - DNA, 120 bp, Artificial Sequence
  ENSG00000271893_0 (sequence is synthesized)
cagccagagtgggcgccaaggcccaggaggcacggagagcgagcgagggctgccagggctgccagcatgctgtcacctctcaatattaggagcagagaagccagctcagccaacctggca

SEQ ID NO: 1014155 - DNA, 120 bp, Artificial Sequence
  ENSG00000271893_1 (sequence is synthesized)
gctgtctctttccgattcctcggttttgacaagtcataaggataatataacactttgttttattatgtggtgagaaactcttcagaatgtttctgggtccagcatgggctttgagagtct

SEQ ID NO: 1014156 - DNA, 120 bp, Artificial Sequence
  ENSG00000271893_2 (sequence is synthesized)
gcaatgggaactagctcccagataagcctgatgtttctgctcttcaggccatgcttggagaggcaacgagccagacagcactgagccttagaagaaaaggaggccaggcacggtggctca

SEQ ID NO: 1014157 - DNA, 120 bp, Artificial Sequence
  ENSG00000271892_0 (sequence is synthesized)
aagagtgaaactccatctcaaaaaataaatagacaaataaaataaaataaaagattttttttaaagttagcaacttgtaaaaatgtttcagtaggaaagttctgtgatgagactgtgatg

SEQ ID NO: 1014158 - DNA, 120 bp, Artificial Sequence
  ENSG00000271892_1 (sequence is synthesized)
agataacagccattgactgtccacgattgtcatcatgcagctatatttgtcataagcatcatgtgcttggatacattatgtcataagcataaatgtcctagagtaaattgtacacgagtt

SEQ ID NO: 1014159 - DNA, 120 bp, Artificial Sequence
  ENSG00000271892_2 (sequence is synthesized)
gcattatgtgctagatgtctatccaaaggaatactctggcaattcatttggcaaagtaataattttgtgtgcatgtgcaagtatataccaatttatgcaataaaaatttttgaagtatga

SEQ ID NO: 1014160 - DNA, 85 bp, Artificial Sequence
  ENSG00000273026_0 (sequence is synthesized)
tctgcactccagcctgggccacagagcaaaagaaaaacaaacaaacaaacttgtcagctccatctgctgtaagaattatatgagt

SEQ ID NO: 1014161 - DNA, 120 bp, Artificial Sequence
  ENSG00000273026_1 (sequence is synthesized)
gactagaccctgttcccgtttttacccttagcccgttcaaatcttcataaggataattagtagcagtttgagttctgggattcacactccaaactactgttttactcacccagctaccct

SEQ ID NO: 1014162 - DNA, 120 bp, Artificial Sequence
  ENSG00000273026_2 (sequence is synthesized)
tttctgaaatactactgaaaaccatacctgtatcagtttacctccattgttttacttgaagtgaattcctggaccatcagacattagaccaaggcaaaaaaataaaaataatcaatcaac

SEQ ID NO: 1014163 - DNA, 120 bp, Artificial Sequence
  ENSG00000273027_0 (sequence is synthesized)
tctccgggacaggactcagaactggaagagggaggggcagcgaggaaaggtccctgcctggcggtgctgccttccatgggggccttgtggggcagaggctggaacacccacttggggttt

SEQ ID NO: 1014164 - DNA, 120 bp, Artificial Sequence
  ENSG00000273027_1 (sequence is synthesized)
acctagtgttgaccagggtccagcgtcagtgtttaggttctctagctcttccccacctccaatgtcctccatgtccgcaccattcccacgtgcctgtgtcccacctcttctcccacacac

SEQ ID NO: 1014165 - DNA, 120 bp, Artificial Sequence
  ENSG00000273027_2 (sequence is synthesized)
tgtccccactccccatgccccattcctctccagagaatcactggtctagaatagagacctacaaacttgggcccttaggctggccctccacctgtttttgtcaataaagttttattggaa

SEQ ID NO: 1014166 - DNA, 120 bp, Artificial Sequence
  ENSG00000285568_0 (sequence is synthesized)
agaaagaggaaacctgtaagaagagggtgtttgaggcctagcacctgaaagagacttggaagagaaagaatggagtgcaaaacataacatctagatgctcttcccagccagatgaatgaa

SEQ ID NO: 1014167 - DNA, 120 bp, Artificial Sequence
  ENSG00000285568_1 (sequence is synthesized)
attcgagccctgctcaagtggaagcagactcagggcactgagaacttaaagttttaactcagcagtatgcagacggtcactcaatctttatgctagagtgcaatggtgtgatcatgactc

SEQ ID NO: 1014168 - DNA, 120 bp, Artificial Sequence
  ENSG00000285568_2 (sequence is synthesized)
actgcagcctcaacctcctgactcaagtgatcctctcttctcagcttcctaagaacctgggactacagtcatgtgtcatcatgcctgcatgatgcatcaaacataccatggcatggctag

SEQ ID NO: 1014169 - DNA, 120 bp, Artificial Sequence
  ENSG00000285568_3 (sequence is synthesized)
gacccaacctagtaccagaaatgaaggaattgaccctggaggaactgcaaccctggacgatgcagcgtactcggacaacacaagtcccgaacatcacctgggagatgccgaagaagacaa

SEQ ID NO: 1014170 - DNA, 120 bp, Artificial Sequence
  ENSG00000285568_4 (sequence is synthesized)
tcatgtaggggtatagatcaaaagcaccttgcatgtctgcaagccctcaaggctgccttggaatatgtaggggagccgcaagatgcactggcattccgacagcaattaaactgtgactgg

SEQ ID NO: 1014171 - DNA, 120 bp, Artificial Sequence
  ENSG00000285568_5 (sequence is synthesized)
gagcaaaagcatatctatgtcacctctctaccttggaatcaatcaatacatagttgggatgaagtaaaacaacacctctggcgaaccttacatgataatttaacagcagattcaaggcaa

SEQ ID NO: 1014172 - DNA, 120 bp, Artificial Sequence
  ENSG00000285568_6 (sequence is synthesized)
cttaaaactaaaattctagactccctaaacgccatagatctacacacccaacaaacagccacatggaaggatgtgtgagaacatctctcctggatagatccccactccggcgggggcggg

SEQ ID NO: 1014173 - DNA, 120 bp, Artificial Sequence
  ENSG00000285568_7 (sequence is synthesized)
tgtcactccttcattggaaaaggatgttactgattattctcaggactgctctctactccgaggatcaacaatgttaattacccacaaattgtgtttgctccaagcttttgtcattaaatc

SEQ ID NO: 1014174 - DNA, 120 bp, Artificial Sequence
  ENSG00000285564_0 (sequence is synthesized)
gtctgctgtgtggatggagcagcaggagccagtgagtcctgggcagcctcagggccacctgggcacagcccccctctgtccctctgtcccgggggccctgtcctcttggcggggctccag

SEQ ID NO: 1014175 - DNA, 120 bp, Artificial Sequence
  ENSG00000285564_1 (sequence is synthesized)
gcctctggcggctgcttttgtgctcttttgcggggcatctgtgagaacagtctggaagacaatgacagagtgcttgcctggggagtcggaggagctccggttatgtccaagccgaacccc

SEQ ID NO: 1014176 - DNA, 120 bp, Artificial Sequence
  ENSG00000285564_2 (sequence is synthesized)
tggagcctctggactgcctggcactgagggagcgggaactggacggtgggcatgtggccgggaggagccttccaaccagaagaaactaagttttcaagtttcctgctgtgtcatctcaac

SEQ ID NO: 1014177 - DNA, 120 bp, Artificial Sequence
  ENSG00000285564_3 (sequence is synthesized)
tggaaagtaggcatatcggggtatttctgaaggtgtcgtcccccaggaagtctcctgccctccctctctgcacagggagccgcttcccactctgtccttcgatggacacgctgatgcagc

SEQ ID NO: 1014178 - DNA, 120 bp, Artificial Sequence
  ENSG00000285564_4 (sequence is synthesized)
tgggaatgagcttggaaacgctaactgaccagagtgatttctgggccctgagtgcattacagatggagaaagcttctgaattctctatggaactccaggcctgaccttgggatgggagac

SEQ ID NO: 1014179 - DNA, 120 bp, Artificial Sequence
  ENSG00000285564_5 (sequence is synthesized)
gggcggctgggcgcacaaggaaagaggcctcgccttgcgccacggaggaggtgctaccccgagcactgtctggggaggatttcaaggctgtgcccaggccacccctgatggatgcatcag

SEQ ID NO: 1014180 - DNA, 120 bp, Artificial Sequence
  ENSG00000285564_6 (sequence is synthesized)
tcacttcagccatggtgccggcagggagcccaagcgcgggagcatcctctgtcgtcctcgcagccgggaccctctcatttcctgtctgcacagcagccccggcgtgttcctctgtgaaag

SEQ ID NO: 1014181 - DNA, 120 bp, Artificial Sequence
  ENSG00000285564_7 (sequence is synthesized)
ccaggagcacgggggtgacgccttctgggcctgccactgttccttcagaagcgacctttgacctccccatcagcctgtgctgctaggtctggggtcattttctgctcagatatctcctct

SEQ ID NO: 1014182 - DNA, 120 bp, Artificial Sequence
  ENSG00000285564_8 (sequence is synthesized)
ccctgacgatcgattccccctggaggggtgagccactgtcgggaggggagacggagctgagcatgcaaggaagggcaaccccagcccagatcctggagggctttgggcttccaggtagaa

SEQ ID NO: 1014183 - DNA, 120 bp, Artificial Sequence
  ENSG00000285564_9 (sequence is synthesized)
gccggtcttcgcgtcagcaaaccaagaaaatgcctccctgaaatggtctccaggtccccccaaacacctgcctccccctccagccttctccactgatgcctgcagctgcataagtagtgt

SEQ ID NO: 1014184 - DNA, 120 bp, Artificial Sequence
  ENSG00000285564_10 (sequence is synthesized)
ttcattgcaccccagcaggagctggtaccggttcttcccttgcctcatgctggggtagattttatttaggattgggagcagggaaaggagctagagaaaggaagggttccaggaagctgg

SEQ ID NO: 1014185 - DNA, 120 bp, Artificial Sequence
  ENSG00000285564_11 (sequence is synthesized)
gaagggagatgtcaggtggggtgatgggaaaggaggccaaggaccacctttgcctgtatggtgggctgaactgtgtccccacaaaagatagggcgtcctaaccccagatacctgtgaatg

SEQ ID NO: 1014186 - DNA, 120 bp, Artificial Sequence
  ENSG00000285564_12 (sequence is synthesized)
tgaccttatttgggaatagagtttttgcaaatggaatcaagtcatgatgacgtcattagcatgagccttaatttaataggattgatgtccttctaagaagagaagacagggacacacagg

SEQ ID NO: 1014187 - DNA, 120 bp, Artificial Sequence
  ENSG00000285564_13 (sequence is synthesized)
agaaagccatgtgatgaagcaggcaggagctggagcgacactaccacaggccaaggaacattgggaccagaagaggcgaggaggggccgttccctagaggctttggagagagcatggctc

SEQ ID NO: 1014188 - DNA, 120 bp, Artificial Sequence
  ENSG00000285564_14 (sequence is synthesized)
atcaacaccttgacttcagactggtagcccccaaacggtgacagaataattgtctattgttttaagccccctggcttatagtacgttgtaaaggcagccctaggaagccctaagccagtt

SEQ ID NO: 1014189 - DNA, 120 bp, Artificial Sequence
  ENSG00000285564_15 (sequence is synthesized)
tcactcattatgataaatatcatagatgatgactgtcatatattggatgtgctggagatcttcacagccacagaataaactgcaggccaaaaaaagaacattcatatgaggtccccagca

SEQ ID NO: 1014190 - DNA, 120 bp, Artificial Sequence
  ENSG00000285564_16 (sequence is synthesized)
ggggctggctgtgcaagtcagagactgcagaaccaggtaggcagacaaagcgaaattgcctggagctggacacatatgtgcaccactgggaaataaatagacttgcggtggaaatgacca

SEQ ID NO: 1014191 - DNA, 120 bp, Artificial Sequence
  ENSG00000285564_17 (sequence is synthesized)
acgtggatggccagggaaatgccagcagcaataaaagaaaagagtgcacaaggcctgtaaatcagcagatgcgagagctcccgaaaagtagcgaagtctgaaataaaaggcaggctcagg

SEQ ID NO: 1014192 - DNA, 120 bp, Artificial Sequence
  ENSG00000285564_18 (sequence is synthesized)
ctggtggtccaagaagttaaagcaggaaatgagagcgtgggcactgtgtgtgctgggctcccaaagactgcagggagtggccagatgtctccagaggcagcgtcatgtggagcaaagggg

SEQ ID NO: 1014193 - DNA, 120 bp, Artificial Sequence
  ENSG00000285564_19 (sequence is synthesized)
tctggtctcttacttaggataattgtaggaactgactttttttttttttcttttctcacctattggctgactgaaagaaccgacttttaaatgagcacctccctcattagaattgctcaa

SEQ ID NO: 1014194 - DNA, 120 bp, Artificial Sequence
  ENSG00000285564_20 (sequence is synthesized)
atgacaacagctgcagcggtgggagcagcagcaagtttgaaaatccaacagtctgcattccacagtgacagtattcttggtcacctcggagacatggcagccgggagccacggctctcat

SEQ ID NO: 1014195 - DNA, 120 bp, Artificial Sequence
  ENSG00000285564_21 (sequence is synthesized)
tgctcggggttggttgggttaccagccctagggctacagaatgtatctaaaagagaggcttggctggcagtttaagaggggtgcaggacagcaggatggggttcatgaggcaagagtgga

SEQ ID NO: 1014196 - DNA, 120 bp, Artificial Sequence
  ENSG00000285564_22 (sequence is synthesized)
tggagcctgtggcccagttgggatgagatgggacagttccaatgggcaggacaaaccccagccaccgtctcagggtatttgacaggaggtaaacagcagacaaaatcctggagcacaggg

SEQ ID NO: 1014197 - DNA, 120 bp, Artificial Sequence
  ENSG00000285564_23 (sequence is synthesized)
gggcagggctgtctcgttcccatgaatggcaacattggaggactgacccccaagagcgtggttttgtcgtcagcctcaaaggcatggctttctctctggcgttggcagcagccgctcagc

SEQ ID NO: 1014198 - DNA, 120 bp, Artificial Sequence
  ENSG00000285564_24 (sequence is synthesized)
accatagctagggagcagcggcctagatccctcacatttatttcactttgactcttttgaccaaagcaccactgtttaaggcctcatttttcttctcccatgtggaaaatcatattgctt

SEQ ID NO: 1014199 - DNA, 120 bp, Artificial Sequence
  ENSG00000285564_25 (sequence is synthesized)
aaatttaaaaatgaagatagatagatggatgaaaaaatccccatagagcaaaattctgcctgtgacaaaaaggtctccacgtctgaggtgacagtcaacttcaagtgacgccaagaacat

SEQ ID NO: 1014200 - DNA, 120 bp, Artificial Sequence
  ENSG00000285564_26 (sequence is synthesized)
caaaatctctctataaaaaaagaataggaagcaatggggctcgtgaaaatgccacatcaagaaaagtcaacaaatacatacttagtggtaactatggttgcagagaaagagaaaacttaa

SEQ ID NO: 1014201 - DNA, 120 bp, Artificial Sequence
  ENSG00000285564_27 (sequence is synthesized)
aacaatatgaacatatgtggtcatatagactgaaaacccaccgtgtcataaaaccccaggacacagaacgcatcagcgtagacagcagctgtacagacaatgctggggcggttgtggagt

SEQ ID NO: 1014202 - DNA, 120 bp, Artificial Sequence
  ENSG00000285564_28 (sequence is synthesized)
gggattagaagacaggaggcgccatcgagtcagctccaaggccattagccttgtgacgccagcaaaatgtcttcaaaagtcactggatttttcaatgagaaggagaagttaggcagctac

SEQ ID NO: 1014203 - DNA, 120 bp, Artificial Sequence
  ENSG00000285564_29 (sequence is synthesized)
caaatagctgaaagaatattaaatctgatggatccagccaaataaaaatgttcattcataggatctgtggttgttgaggaatcttctaagtttcataaatggcaaaaactctttctcaga

SEQ ID NO: 1014204 - DNA, 120 bp, Artificial Sequence
  ENSG00000285564_30 (sequence is synthesized)
cttacagatcagacctcacatatgcatgagaagagaagctatttttgtctctgggttccagttacacagccacagcctggaagctttgttctcagaattcatgctgtcatcaaaaggact

SEQ ID NO: 1014205 - DNA, 120 bp, Artificial Sequence
  ENSG00000285564_31 (sequence is synthesized)
caatacaaacactgcagccagcctgccatggcttagctgtgaccgcagctgcaaactcttctgtcatgtgaaaacttttggctttttccgggtgtggaatgcctgttggtcccagctccg

SEQ ID NO: 1014206 - DNA, 120 bp, Artificial Sequence
  ENSG00000285564_32 (sequence is synthesized)
cctgcctttcctccttctggaatcgtgtccatcctttcagtcaactcagtttgtccgcatcttccaggcctcatacctccgcctgatctgcatggcagtggtgggcttgctctttgtgct

SEQ ID NO: 1014207 - DNA, 120 bp, Artificial Sequence
  ENSG00000285564_33 (sequence is synthesized)
attacactgactgtgatcgtgtttagtgagtcagcttctacaaagttgacctgcacctgtgtgatgtctctccctagctggatgcagcttctccatgggctaagttcatcatgttaacag

SEQ ID NO: 1014208 - DNA, 120 bp, Artificial Sequence
  ENSG00000285564_34 (sequence is synthesized)
tgcctgccccacaggccctcaggggatcttagtgggtggtctatggagagactttagtgggtatatgaatccccaaaattgtaggcaaagtttgtgtatgctgtggcctatcgacagcgg

SEQ ID NO: 1014209 - DNA, 120 bp, Artificial Sequence
  ENSG00000285564_35 (sequence is synthesized)
ggactctgccgctgatttctcctaagaagcctcctgggggtttgagcgaatcgtggtggtctccttccctctggagtgattagttttggctttggctcaacatggtgcagacccatggga

SEQ ID NO: 1014210 - DNA, 120 bp, Artificial Sequence
  ENSG00000285564_36 (sequence is synthesized)
tccaaagggaagttggccgggcatttctgggaaggatgtctcttcttctgatttctgagtgagggtaggaagccctcttcttcatcagacgccatggctcttacacgaatgatgcctaga

SEQ ID NO: 1014211 - DNA, 120 bp, Artificial Sequence
  ENSG00000285564_37 (sequence is synthesized)
gcagacacagcccttccaggaccagaggccaaggctgacaatgggacaagagggcggaggaagaagtggggagcacctaagccttcctctgaccaagcactgtcctaaccaattctgatt

SEQ ID NO: 1014212 - DNA, 120 bp, Artificial Sequence
  ENSG00000285564_38 (sequence is synthesized)
cgccagcaaaatgtgtgagtggggagcctctacgttctctcctgtgaaatggggatgacagtacttccttgtagggttgtggtaacgaagttattcagcacagagcttggcatgtggtca

SEQ ID NO: 1014213 - DNA, 120 bp, Artificial Sequence
  ENSG00000285564_39 (sequence is synthesized)
taacaaggagtggcggataatgataatatggtaacagtaggcatcattgtgagaagggacagagactcaatgtgaaaagtatagaaagggctcttacaaatctccaagcacataaaagtc

SEQ ID NO: 1014214 - DNA, 120 bp, Artificial Sequence
  ENSG00000285564_40 (sequence is synthesized)
cctaaaagacaaatggcgaagggttcacagttcacagaaatggaaaaaaagaaatgaatgaattcaatgaatattaggggaagaaaaccgttactaattagtgacgaagcacaaagtaat

SEQ ID NO: 1014215 - DNA, 120 bp, Artificial Sequence
  ENSG00000285564_41 (sequence is synthesized)
gcaagtatccaacaccattttgacagcacttgagaaatgatcgagaattcagaaacgcggtaaaaactgacgctggtcccgacagttaagtaggaatatccaggagttcctgacggtagt

SEQ ID NO: 1014216 - DNA, 120 bp, Artificial Sequence
  ENSG00000285564_42 (sequence is synthesized)
gcaaatgtgtttgattactttggaagaccatttggtaattctcatcaaaagccagaatacgctacacttggatctcatcattctcttcctgagaatgaaataattcaaattaagagaaag

SEQ ID NO: 1014217 - DNA, 120 bp, Artificial Sequence
  ENSG00000285564_43 (sequence is synthesized)
ctatacttataatgagacatgtagttagaattatgagaataaaaataggttagcatcccctaatacagaaatggttactttgtcataagaatactaattctataacatattacatggtga

SEQ ID NO: 1014218 - DNA, 80 bp, Artificial Sequence
  ENSG00000285564_44 (sequence is synthesized)
aattaattacggatatttttaaaatatgtagctaaagatgagatgaagctatcagttaatgcaatttatctgatgtaggt

SEQ ID NO: 1014219 - DNA, 120 bp, Artificial Sequence
  ENSG00000285564_45 (sequence is synthesized)
cagttaatgcaatttatctgatgtaggtagaggaacttagatacacctatgtatgttattttattaataagtactttaaatgacacataactaaattatcttaatttctctgtatcacct

SEQ ID NO: 1014220 - DNA, 120 bp, Artificial Sequence
  ENSG00000285564_46 (sequence is synthesized)
gttatgaatacacgactccccatgattcattttgtactgacctatacgagggtatacaaatctaaatcaggcactgaattaaggcacaagctagctgtgtcctccctggaacatttcctg

SEQ ID NO: 1014221 - DNA, 120 bp, Artificial Sequence
  ENSG00000285564_47 (sequence is synthesized)
actcaatttagaaatatcagctgagcgtgtagagttgtctctttgaggaaagctttattctctcaagactacttggctccctgatactctctttaatgttattataagaacgctgatctt

SEQ ID NO: 1014222 - DNA, 120 bp, Artificial Sequence
  ENSG00000285564_48 (sequence is synthesized)
gccccaggctggaacctgaggaacccaaaacaccaaacgctggggaaactttcccttccttttttccaaacatatgttcaagctgggggtctgaatatgcagtgggctgccctatttccc

SEQ ID NO: 1014223 - DNA, 120 bp, Artificial Sequence
  ENSG00000285564_49 (sequence is synthesized)
aacctggctttggggaagtaagtcaacacaggcagttgctgagtttgcttactctgtgcaacttgtgtggtaaccagcagctatcaatacactttacaggtgtgctggaagatagttatt

SEQ ID NO: 1014224 - DNA, 120 bp, Artificial Sequence
  ENSG00000285564_50 (sequence is synthesized)
tgtgctggaagatagttatttcaaggaaaacaatgattctttttagaaagtaaacttctgaaggaggcatcaaaactttgaattttgatgcagcattttttttttttttttgagatggag

SEQ ID NO: 1014225 - DNA, 120 bp, Artificial Sequence
  ENSG00000285564_51 (sequence is synthesized)
tgtgcctggcctgacgcagcatatttttaaagacaggatgcacatgtaatttggagagagatggccgattccaaaatattgcaggtacgatggcatccttcaatgataaatacttcccaa

SEQ ID NO: 1014226 - DNA, 120 bp, Artificial Sequence
  ENSG00000285564_52 (sequence is synthesized)
atggtcctgtgagcactcccaacttcctcctctggccagtagcctttcaagccaagacctcaaaccagcaggattttattttaactgtaaggagaggacaaaggccatggaacgatgcca

SEQ ID NO: 1014227 - DNA, 120 bp, Artificial Sequence
  ENSG00000285564_53 (sequence is synthesized)
tccaggctgcccttggccggcctcactgcccctatctgcaggaggctcaggaaggtttccaaatgcccagagtagtgtggctcgagtgcttctcggagtcattctcaccctactcaccgg

SEQ ID NO: 1014228 - DNA, 120 bp, Artificial Sequence
  ENSG00000285564_54 (sequence is synthesized)
aagtgggaaggacaggagaactgtcagtcaggtcggccatggaggtcaaaggcagccctgttgagaatgtgcggatgtttgtccttccagatggtccagacaagggatggcacagatttc

SEQ ID NO: 1014229 - DNA, 70 bp, Artificial Sequence
  ENSG00000285560_0 (sequence is synthesized)
acttccacctccagggtgcaagcaattctcacgtcgcagcatcctgagtaggtgggattacaggcgtgtg

SEQ ID NO: 1014230 - DNA, 65 bp, Artificial Sequence
  ENSG00000285560_1 (sequence is synthesized)
aaccaggctggactcaaactcctaccctcaagtgatccgtctgccttggactcccaaagtgctgg

SEQ ID NO: 1014231 - DNA, 120 bp, Artificial Sequence
  ENSG00000285560_2 (sequence is synthesized)
cctcaagtgatccgtctgccttggactcccaaagtgctggattacaggtgtgaggcacacacccagcccagggagaccctgtttctacaaaaaaattaaaaaaattagctgggtgtggtg

SEQ ID NO: 1014232 - DNA, 120 bp, Artificial Sequence
  ENSG00000285560_3 (sequence is synthesized)
aggatcacttgggcccaggaattcaaggcaagggagccgcgatcgtgccattgtgctccagcttgggcgacagagtgagacttaaaaattatgaaatgtcctctcaccctcgcccaaaag

SEQ ID NO: 1014233 - DNA, 120 bp, Artificial Sequence
  ENSG00000285560_4 (sequence is synthesized)
agatcactcatacgatcaacacgccacggctagtaattggtaaagagtgaccaataacaagatcctctaactctccgttgtgttctgtcaactcttccttctaaatcattaatttatggc

SEQ ID NO: 1014234 - DNA, 120 bp, Artificial Sequence
  ENSG00000285560_5 (sequence is synthesized)
gaggtggtgagtagttaatgatgctgtaatagacagaggatgtgacaaaaggttgaaaacacattcctcgatgattatggtataaggagaaccacctctgagtttagaatttataggatg

SEQ ID NO: 1014235 - DNA, 120 bp, Artificial Sequence
  ENSG00000285560_6 (sequence is synthesized)
ataggatgtttcaacccctgtgtttctataatgggcttttcttttcttttgagacagggtctcactctgttgccaggctacagtgcagtgaggctatcttggctcactgcagcctcgacc

SEQ ID NO: 1014236 - DNA, 120 bp, Artificial Sequence
  ENSG00000285561_0 (sequence is synthesized)
agttgcctcaccggcagtgccctagtcttccaggcatccactgactttctcctgcagcctcctccttcccccaaagtcagaggatgtagactgctctgaagggggagaggggagaaaggg

SEQ ID NO: 1014237 - DNA, 120 bp, Artificial Sequence
  ENSG00000285561_1 (sequence is synthesized)
gctcaatgctcattccctggcgtttctgacagctcagcctgctgccctctctctcctgggctcaagaacagtatgtgggaatacggacacattccccaaggctctgttaccggctcctga

SEQ ID NO: 1014238 - DNA, 120 bp, Artificial Sequence
  ENSG00000285561_2 (sequence is synthesized)
cacagaattccacatttttggcccctcatttcccacttcccatgctaatctgccgcttcttggacggtgctttttatttctggtggaagcattgagtattggtggaactgaatactaagc

SEQ ID NO: 1014239 - DNA, 120 bp, Artificial Sequence
  ENSG00000285561_3 (sequence is synthesized)
tgtctggcaaagtagaaatctaatctccagaggctcagctccagcatcataaagaaaagtatatccccagagtcaaagcataaaggaaaagaataggtgtatggatttggacagagagga

SEQ ID NO: 1014240 - DNA, 120 bp, Artificial Sequence
  ENSG00000285561_4 (sequence is synthesized)
aaccatatacatatgcctaatgatttatatattggtttactcattacattaaaaaataataacaaaggactgagattaacctcagttaataacaaaggactgagatagtcctttgattat

SEQ ID NO: 1014241 - DNA, 120 bp, Artificial Sequence
  ENSG00000285561_5 (sequence is synthesized)
tcatcaaagagggacagatcaaatagattttcagatatctgtacaaaaactgctatctaggtgtataaaaaatgaagactacctttatgtatgaaataatctccaaaagatattgttaag

SEQ ID NO: 1014242 - DNA, 120 bp, Artificial Sequence
  ENSG00000285561_6 (sequence is synthesized)
tggaaaaatctctcttacaccattgttccagtctagcctggttggtccatatggtgactgcacaggtatctgggactcctctttactactcttctgaatctactcttcctgggtcctaag

SEQ ID NO: 1014243 - DNA, 120 bp, Artificial Sequence
  ENSG00000285561_7 (sequence is synthesized)
tcttactcattcttcagtcgtttctcaagaagtgatagataggaaattaaaagcgagttgaaaaacagtgcatacagtatactactatttgtgtaaaatttgtgggataatgcatgtgaa

SEQ ID NO: 1014244 - DNA, 120 bp, Artificial Sequence
  ENSG00000285561_8 (sequence is synthesized)
tttcattatgcagttatgcactgcatgatgatgttttggttgatgacagattgcacatatgatggtagtcccctaagattataatggagctgaaaaactcctatcccctagcaatgtcat

SEQ ID NO: 1014245 - DNA, 120 bp, Artificial Sequence
  ENSG00000285561_9 (sequence is synthesized)
agccatcaaaaggtaaagacatagcacaatgcattacccacatatttgtagtgatcctggtgtaaacaaaccaactgtgctgccagtcatatcaaaggatagcacatattattatgtaca

SEQ ID NO: 1014246 - DNA, 120 bp, Artificial Sequence
  ENSG00000285561_10 (sequence is synthesized)
gtacataatacttactaatgaatgactgttactggtttatgtattaagcttactatactctttcatcattattttggagtgtactttttctacgtattaaaaaaaattaactgcaaaaca

SEQ ID NO: 1014247 - DNA, 120 bp, Artificial Sequence
  ENSG00000285561_11 (sequence is synthesized)
acctcgggcaggttcttcaggagggattccaaaagacggcattgttaccataggagatgacagctccatatgttattgtccctgaaaaccattcaatgaaacaagatgtggaggtggaag

SEQ ID NO: 1014248 - DNA, 120 bp, Artificial Sequence
  ENSG00000285561_12 (sequence is synthesized)
acagtaatattgatgatcctgaccctgtgtaagcctaggttaacatgtgcatttgtgtcttagtttctaacaaaagcatttataaagtaaaaatgttacagtaacctaaagttaatttat

SEQ ID NO: 1014249 - DNA, 120 bp, Artificial Sequence
  ENSG00000285561_13 (sequence is synthesized)
tattgaagaaagaaaaatattttaagataaatttagtgtagcctaagtgtagagtgtttataaagtctacagtagtgtagagtaatgtactagacctccacgttcacctgccactcactc

SEQ ID NO: 1014250 - DNA, 120 bp, Artificial Sequence
  ENSG00000285561_14 (sequence is synthesized)
actgactcacccagagcaacttccagtcccacaagctccattcatgaataaacctccagtcttctgctggggtgtaggaggatcactcttctggatgcaccgagtagaagagagaatctg

SEQ ID NO: 1014251 - DNA, 120 bp, Artificial Sequence
  ENSG00000285561_15 (sequence is synthesized)
gggatctgcctacttctgtaacagactttcaagccgccttcctgtttttatgctcaccatcacccctactttcagaggtgagctgtgccaccacattactgagcacgtgagacacgctat

SEQ ID NO: 1014252 - DNA, 120 bp, Artificial Sequence
  ENSG00000285561_16 (sequence is synthesized)
ggcgtaatctggatatttgcttccactacggagctctgaattcagctttctggggaccaccgagtcagttactgattatcactgtgccttccagctttctgatttttttttttcctgctg

SEQ ID NO: 1014253 - DNA, 120 bp, Artificial Sequence
  ENSG00000285561_17 (sequence is synthesized)
tctttcccctgtgttcttgtcccagtaagttaatgaaacatgcttgttcttctgccttgtaatgccttcattaacattttagtgggctttcagaaagtagcagtggttaaaatggatgag

SEQ ID NO: 1014254 - DNA, 120 bp, Artificial Sequence
  ENSG00000285561_18 (sequence is synthesized)
ttcaactgtatttctctaacccaaagtcctctggctaagtctctaaggtgatgtctgtgagcacacaaagcctgcacaattctatctattggcaaaaacactcctctcctgagctgatat

SEQ ID NO: 1014255 - DNA, 120 bp, Artificial Sequence
  ENSG00000285561_19 (sequence is synthesized)
acctttgcttagataaaggatccttgagatctaaactccacaagtaagttatctgattattttggaaggtttacttattcatttcatcaaataaacatctgtagaggatttaagtatgaa

SEQ ID NO: 1014256 - DNA, 120 bp, Artificial Sequence
  ENSG00000285561_20 (sequence is synthesized)
gaagcaacagaagaaactgagaattgcacaactaatgggtaactggtgttaacaatgctaagctcttttattaacttaccttttaaaatctctacacaagtatctctgttttacacaggt

SEQ ID NO: 1014257 - DNA, 120 bp, Artificial Sequence
  ENSG00000285561_21 (sequence is synthesized)
atcaaccaaggcttagcttaaatgcttttgcccaagttgcaaaaactagtggcagagccaggattcaaacacagatctttcttaatgtaaaatttatctctgttacagtgctatacataa

SEQ ID NO: 1014258 - DNA, 120 bp, Artificial Sequence
  ENSG00000285561_22 (sequence is synthesized)
aaatgaaagtaagcgctgccacagaaatttgtacaaggtacaatagtgccatatattaagagccttttcattcgaagtgattgcttttcagtaattactttcggtaattcagatttaaca

SEQ ID NO: 1014259 - DNA, 120 bp, Artificial Sequence
  ENSG00000285561_23 (sequence is synthesized)
aacctgagccaaatcagtttaaacaaaaaagttcatttaatgggaaagtccaagtaatgcagggcaggcgagcccctacattggggcttaacctgggagaattcttggcttctctcagaa

SEQ ID NO: 1014260 - DNA, 120 bp, Artificial Sequence
  ENSG00000285561_24 (sequence is synthesized)
aagaattccgagatgagccagtggtaatagacagcagcttttattgaagtggcaatgtatggcagcagcagaggtactgctcctctcaggggcagtgtgcactgtgcagcagctcagagg

SEQ ID NO: 1014261 - DNA, 120 bp, Artificial Sequence
  ENSG00000285561_25 (sequence is synthesized)
ttgttctgcagtcctatttatacctacttctaattgcatgcaaattaagagacaagttattcagaaatttctagaaaaggggtggtgacattgagtattgccatggtaatggtaaatttt

SEQ ID NO: 1014262 - DNA, 120 bp, Artificial Sequence
  ENSG00000285561_26 (sequence is synthesized)
catggcactggtgaacatgtcttatggggaggcgccttccatgcctctttcctgcttcagccagtcttcaatttatatgaagggcagctccctaaaatagtagatggagtcgagtcctgc

SEQ ID NO: 1014263 - DNA, 120 bp, Artificial Sequence
  ENSG00000285561_27 (sequence is synthesized)
ctcctagggacacattttgcttcagatttgtctggatccaaggggtcacagggattgtgcctctttttcaatttttctgatgtgcttggttctatgtggctttttcttagacagatttct

SEQ ID NO: 1014264 - DNA, 120 bp, Artificial Sequence
  ENSG00000285561_28 (sequence is synthesized)
tcacctatagacaagaagaccccattctgctccttatgaacatgtgtctccacctttattactctcagccatggaaagagccacttacaataaaattttcagaaaaataggacaggagag

SEQ ID NO: 1014265 - DNA, 120 bp, Artificial Sequence
  ENSG00000285561_29 (sequence is synthesized)
aatgttctcaatttagcaaaagaaacttattaaaaaactacatcttacatcatagttaatggttgaagactgagtactttccccaaaagactggaaacaaactaagattattctctctcc

SEQ ID NO: 1014266 - DNA, 120 bp, Artificial Sequence
  ENSG00000285561_30 (sequence is synthesized)
tctatgtttggtgaagagcctagcttgttgaaatatgacagaaaaatgaaataaaatgccaatggattgaaaaggaagaggacaaataagcattgttcacctaaaataattgcttatgta

SEQ ID NO: 1014267 - DNA, 120 bp, Artificial Sequence
  ENSG00000285561_31 (sequence is synthesized)
gaaaattattttaaaaattacaaaacaaaaataccagagctaaaaaatgaattcaggtctcaggatacaacgtcatcaaacataaatcaactgtgtttctatatactggccacaaaaatt

SEQ ID NO: 1014268 - DNA, 120 bp, Artificial Sequence
  ENSG00000285561_32 (sequence is synthesized)
tggaaagttacattaatacatacatcatttatagtagcatcccaaactaacttaggaataaatttaatgaaagatgtgcaaatgtctaaactgaaaactttaaaaccttgctctgagaaa

SEQ ID NO: 1014269 - DNA, 120 bp, Artificial Sequence
  ENSG00000285561_33 (sequence is synthesized)
gaaaaataatatgaataaatgcaagatacatgatattcatggaatggaagatacaatgttattaacatgtccgtctattagatctgtagatttaatgcaattccagtacacatattgtat

SEQ ID NO: 1014270 - DNA, 120 bp, Artificial Sequence
  ENSG00000285561_34 (sequence is synthesized)
caatatgttcaaaattctcagaaaaattaagctttaaactggaggtttaaattaacttttaaactggaagttaaaccctaccattgccaatcaaagaagaaggcaaaaaagaggcaattt

SEQ ID NO: 1014271 - DNA, 120 bp, Artificial Sequence
  ENSG00000285561_35 (sequence is synthesized)
cagacaggcaatttctataaaatttgtatttcatgtacattttctctagaaattaatagaaaaattttcaatcaaaatgaggaagaaaactattacagttgagaggaatgtaaggagaat

SEQ ID NO: 1014272 - DNA, 120 bp, Artificial Sequence
  ENSG00000285561_36 (sequence is synthesized)
tgaaaattaaatgtaatggggtaacctggatgacctggcacagaaaaatgacattaggtgaacactgaagctatataaatacagactttagttaatgaaaatgtaacaacattggtttat

SEQ ID NO: 1014273 - DNA, 120 bp, Artificial Sequence
  ENSG00000285561_37 (sequence is synthesized)
taattgtaataagtgtaccatactaaggtaagatttaatattaggggacatgagagtggggtatatgagaactctctgtactacgttctcaatttttctataaatctaaaactattctaa

SEQ ID NO: 1014274 - DNA, 120 bp, Artificial Sequence
  ENSG00000285561_38 (sequence is synthesized)
aaaatgaagttcactttaaaaatggagagagaaatgaagaaacaggaaaacagaatctagaaaacaggttacctaacacaggtatgaggtgaagagaattcccagaaagatggtgacaag

SEQ ID NO: 1014275 - DNA, 120 bp, Artificial Sequence
  ENSG00000285561_39 (sequence is synthesized)
agatctcaaaatgttagattttcaacaaagctagaggacatcccattaaacttctgatctggtagtagatcacaagtttcttaggatgacatttttgagaagatgaaatttttgaaatat

SEQ ID NO: 1014276 - DNA, 120 bp, Artificial Sequence
  ENSG00000285561_40 (sequence is synthesized)
cagctaacatcatatggctacaactgtatatagtgagaaaagatatatacaaatggagaagaggtcatgaggataattcaaggaaatcatagactatcaaagcaaatgagagcccccaaa

SEQ ID NO: 1014277 - DNA, 120 bp, Artificial Sequence
  ENSG00000285562_0 (sequence is synthesized)
taataggctgaatcttacaacagccctcagtctatagtccaatatcacaccagtgcacaattccagaaaagattttcaacagacactgcaggtgcttgggtcacagtcattgcagaacta

SEQ ID NO: 1014278 - DNA, 120 bp, Artificial Sequence
  ENSG00000285562_1 (sequence is synthesized)
cctactaccattaccctgtgttccagcagaagaatcccttacctcaaggcaaacccaaatcaaagcatctagaaatcttagaatacagaagggtgcagaatatgcaagtgctaaaatggg

SEQ ID NO: 1014279 - DNA, 120 bp, Artificial Sequence
  ENSG00000285562_2 (sequence is synthesized)
aagaacatggacatagtttcagggatttgggattctcaagctgactgcatggccaacatgagtcacatgctcattccagggaaaccaagcagatagtgaggttatgggattgtcccagtc

SEQ ID NO: 1014280 - DNA, 120 bp, Artificial Sequence
  ENSG00000285562_3 (sequence is synthesized)
tgaaactgtgccattcgtgcatttgtgctcaggtatctcttttcagaatatgtgggcaaggtgtgactttgccataaacatggactgaagataagtactgttatgatccagaccgcctga

SEQ ID NO: 1014281 - DNA, 120 bp, Artificial Sequence
  ENSG00000285562_4 (sequence is synthesized)
gaaattcgtgtctctgcacagtgactataatcacagtcagcatatattcttctcacctatgtggcagtgacctagaatccaaagagactgctgtgatgcttttctgtatgacggtgtggt

SEQ ID NO: 1014282 - DNA, 120 bp, Artificial Sequence
  ENSG00000285562_5 (sequence is synthesized)
atccactgggcaccattattgtcaatgtaccaatgctgactatagatatagatggcatttgtttgctgttatctaacaacaacagcagagtatagaagaagaaatctcaatgctcatgcc

SEQ ID NO: 1014283 - DNA, 120 bp, Artificial Sequence
  ENSG00000285562_6 (sequence is synthesized)
catcatattggtccaattcttctgaaaccttgcaggatgcaaacacaaggaaggagagaagagacacagcagatcttatccctaagtgtgtatgtagaagtgagtggatcatggaaggct

SEQ ID NO: 1014284 - DNA, 120 bp, Artificial Sequence
  ENSG00000285562_7 (sequence is synthesized)
tcgtgtaataggtggaattttaactgatgactacaatttacccagcattattattataattataccctctgtaaatttttccagtcacacaaatttttgtattagggaaggagagataaa

SEQ ID NO: 1014285 - DNA, 120 bp, Artificial Sequence
  ENSG00000285562_8 (sequence is synthesized)
taggatctggacagatggaaatagaagaagagataatttacagtggcactgttaataaaagcgtacagttttttagggaatggtgaataattcatacatgagttttattccttgtatcac

SEQ ID NO: 1014286 - DNA, 120 bp, Artificial Sequence
  ENSG00000285562_9 (sequence is synthesized)
cccatgtatctggtcatggtggcaagatccctcttaaatagaatcacaaggctggagtgctctgaataatgaacattatcttttgtggccttgaagtagtaggtgttggtgttaattttg

SEQ ID NO: 1014287 - DNA, 120 bp, Artificial Sequence
  ENSG00000285562_10 (sequence is synthesized)
tgatattcgtaggagtgaactctataataatgtaaagtccagagtgggccaggcaggtcaggccaacaggacaagccacaaagtcaatgtcctgctctccataccctcctccagccctcc

SEQ ID NO: 1014288 - DNA, 120 bp, Artificial Sequence
  ENSG00000285562_11 (sequence is synthesized)
gccccttctctggagcagcatttttacctgcaaaaggcccacattgggagtaaaggagatagttaatctttgagttaattttaacattttatttttcacataaaaatttaactctaaact

SEQ ID NO: 1014289 - DNA, 120 bp, Artificial Sequence
  ENSG00000285562_12 (sequence is synthesized)
tttgcatagccttgatattggtgctaggttaagagttggtaaccagtcgtccaaaatatctctattcaaattctgtgtgtcatcttgcacctcttttgtaatgtagtatctatagtgtgt

SEQ ID NO: 1014290 - DNA, 120 bp, Artificial Sequence
  ENSG00000285562_13 (sequence is synthesized)
tgatatttagctcagtactcctggtttaatatcctgatacacgtgtgaaagaataatacataccaacctgagaagttctaaagaagttgatgagaattgtcattccctgtccaggtcctc

SEQ ID NO: 1014291 - DNA, 120 bp, Artificial Sequence
  ENSG00000285562_14 (sequence is synthesized)
aggcacacttaccttcttatcaaattcatatacagttactagtgagagtagagatgcaggattcagcctttaattgtgtctgtaaaagtttatatactaattgcaagagaaattggaagc

SEQ ID NO: 1014292 - DNA, 120 bp, Artificial Sequence
  ENSG00000285562_15 (sequence is synthesized)
aaatatgataaaaatttaatatgtgctcaatttcgtggtaggtgtgtgactcattattatatcatcttctaccctatgtccctggcttgcaaacttccttccagtacaccccatgtcctc

SEQ ID NO: 1014293 - DNA, 89 bp, Artificial Sequence
  ENSG00000285562_16 (sequence is synthesized)
gtgaggtttaattgactcacagttctacataggtgggtaagcctcacaatcatggcggaaggcgaacggggagcaaagtcacatcttac

SEQ ID NO: 1014294 - DNA, 120 bp, Artificial Sequence
  ENSG00000285562_17 (sequence is synthesized)
tcatggcggaaggcgaacggggagcaaagtcacatcttacatggcagcaggcaagacagcacgtgcaggggaactcccctttacaaaaccatcagatcttgtgagactcactgtcacaag

SEQ ID NO: 1014295 - DNA, 85 bp, Artificial Sequence
  ENSG00000285562_18 (sequence is synthesized)
ttacaaaaccatcagatcttgtgagactcactgtcacaagaacagcatgggaaaggacccccccatgattcagttatattggagc

SEQ ID NO: 1014296 - DNA, 120 bp, Artificial Sequence
  ENSG00000285562_19 (sequence is synthesized)
catatcacttggtgacttcaatatctatggaggttatccatacaaagaaaaggcctttcagttgttttttaagttttcattctcaactaattgtagactatgaagaagttacaaaaacag

SEQ ID NO: 1014297 - DNA, 120 bp, Artificial Sequence
  ENSG00000285562_20 (sequence is synthesized)
tacagagagtttctgtatgcctaccacccaaactacagcaatagtaacatataacataaatgtattatcaaaagcaaaagattgacattggtaccatctaattactacacttcaaatctt

SEQ ID NO: 1014298 - DNA, 120 bp, Artificial Sequence
  ENSG00000285562_21 (sequence is synthesized)
atcagatttcaccaaatatctacagtacgatcttaccagattttaccagtgtttgcatgcactcatttttgaagtgagctatgcctctgtgtttcattccataatattttgtcccatgta

SEQ ID NO: 1014299 - DNA, 120 bp, Artificial Sequence
  ENSG00000285563_0 (sequence is synthesized)
cttcatcatccttttggatgggcatggatcaaacgtcgtacttcgtacttctgtctcagctctttggaaagagaggaagacaaaatcttcctgcgaatgtgggaaggtgcactgaaatga

SEQ ID NO: 1014300 - DNA, 120 bp, Artificial Sequence
  ENSG00000285563_1 (sequence is synthesized)
cttttgtggttcttgcttctgtcagaagtcacaaagggattgaacttcattttggctgctcccacttcagtgatggctgcaaaaggaaagagctccatgttcttactcttaattcatttc

SEQ ID NO: 1014301 - DNA, 120 bp, Artificial Sequence
  ENSG00000285563_2 (sequence is synthesized)
caaactgtcccctgcacttgtctgattgcctgaattcattttaaggcatctggctttatgccattttcatcttgcagaatactctcaaggagccctctaatctgcaacacaggcacattt

SEQ ID NO: 1014302 - DNA, 120 bp, Artificial Sequence
  ENSG00000285563_3 (sequence is synthesized)
gttcactaagccagctgctcaggtatcttggagatattcttagcatctcttgaattgttttacctgtttttatgtttttccatttggaagttggtttcttgtttaattggagcacatcct

SEQ ID NO: 1014303 - DNA, 120 bp, Artificial Sequence
  ENSG00000285563_4 (sequence is synthesized)
gtttaattggagcacatccttcagtagctttctagtaaggttcatgggaaataaagtttttgataccttttgatacctttgtatctgaaaatgtcttttttttttttttttttttttgag

SEQ ID NO: 1014304 - DNA, 120 bp, Artificial Sequence
  ENSG00000285563_5 (sequence is synthesized)
tgagccaccacacctgacctctgaaaatgtctttagtctatcctgatatttaatcagaagtttttcagggtctgaaattatagttttgaaacaatttactcttacgtattttaatctttt

SEQ ID NO: 1014305 - DNA, 120 bp, Artificial Sequence
  ENSG00000285563_6 (sequence is synthesized)
aaattgagaaatatatagttatgatatctacaatgtattatgaaatacattaacataaacaaatgttctataagcatgacatttagtcagctacacaaatttggtcaggaactcgtaccc

SEQ ID NO: 1014306 - DNA, 120 bp, Artificial Sequence
  ENSG00000285563_7 (sequence is synthesized)
aaatttggtcaggaactcgtacccaaggtcagctggcattataatggataaatttaagctccaagtactattgtaatgcttcagttatttttatttttttgagatggagtctagctctgt

SEQ ID NO: 1014307 - DNA, 79 bp, Artificial Sequence
  ENSG00000285563_8 (sequence is synthesized)
ttgctggaattatagccgtgagccaccacacctggccagttatcttaatcttacaccaatccagagaaaattacacatc

SEQ ID NO: 1014308 - DNA, 120 bp, Artificial Sequence
  ENSG00000285563_9 (sequence is synthesized)
ttatcttaatcttacaccaatccagagaaaattacacatctcgttaaattacaataatgaattatagtagacatcaaaaataggatgacattggggtgaaatgtgctattagagatacat

SEQ ID NO: 1014309 - DNA, 120 bp, Artificial Sequence
  ENSG00000285563_10 (sequence is synthesized)
ggattgactgaaatatttgaggatctgtaaatacagtggcttccttggacaagaaaacaatcatagtttaaagacagaatcgttcttgtaagtgataagagtttcataaacgaaaaatat

SEQ ID NO: 1014310 - DNA, 120 bp, Artificial Sequence
  ENSG00000285563_11 (sequence is synthesized)
aattgtgtatttccagcatccctactctgcactccgcttgccagtttctggctacttaatattccactaccaaccttatgccccaagaaatcatcactataatattcttttccccatttc

SEQ ID NO: 1014311 - DNA, 120 bp, Artificial Sequence
  ENSG00000285563_12 (sequence is synthesized)
ctaggttggacagtttgtggcagttatcaatatattgcctctaactttatcttttcaaagaatcagctttggttttgttgattttctgtcttgtttccaatttcaattttattgatttct

SEQ ID NO: 1014312 - DNA, 120 bp, Artificial Sequence
  ENSG00000285563_13 (sequence is synthesized)
gctctaatttttatttttgtccttctgcatgctttacattgaaaagctttacatttgcttttgttctgtctagtttcttaagaggtcagacatcccctgtgagcttcttccttgaagcag

SEQ ID NO: 1014313 - DNA, 120 bp, Artificial Sequence
  ENSG00000285563_14 (sequence is synthesized)
cctgctctataggacaggtgagcccagcgggagccagcccactgcagagccaaaccctctagtccttgtcacaaaaaggggctgggacctgatggtgattatcttcctgccttttcctgg

SEQ ID NO: 1014314 - DNA, 120 bp, Artificial Sequence
  ENSG00000285563_15 (sequence is synthesized)
tggtccttctgagttggagttgcttggtaatttcagtggtgtgacaaccggagtgttgctactaaaattcctccctgggctgcatgagcggctgacagggcacggggagaaaacgattag

SEQ ID NO: 1014315 - DNA, 120 bp, Artificial Sequence
  ENSG00000285563_16 (sequence is synthesized)
cttctcccaggattggtgaagccaccgctgttggacaagtatagtcgtcgctggatctctgcaaagagactgtcgaagcggctgcggttcagcgtaaggtctgttagggagacctgaagc

SEQ ID NO: 1014316 - DNA, 120 bp, Artificial Sequence
  ENSG00000285563_17 (sequence is synthesized)
tagggagacctgaagccctgtgccaggaacgcagtgctcgcttagcccaccctgcagggatggctttccaggcgctgggtccagtgagaaaagcgtgtccggaattggttccttccggtg

SEQ ID NO: 1014317 - DNA, 120 bp, Artificial Sequence
  ENSG00000285563_18 (sequence is synthesized)
gtctcgctgacttcaagaatgaagtcacggaccttcttcgcggtgagtgttatagttcttaaagatggtgtgtccggagtgtgttccttgcaatgttcagatgtgtccggagtttcttcc

SEQ ID NO: 1014318 - DNA, 84 bp, Artificial Sequence
  ENSG00000285563_19 (sequence is synthesized)
gacttcaggagtgaagctgcagactttcagagttgtttgttcctcccggtgggttcgtggtcttgctgacttcaagaatgaagc

SEQ ID NO: 1014319 - DNA, 120 bp, Artificial Sequence
  ENSG00000285563_20 (sequence is synthesized)
cagctcataaaggtagtgcggacccagagtgagcacagcaagatttactgtgaagagcaaaagaacaaagctcccacagtgtggaaggggacccgagtggttgccgctactggctagggt

SEQ ID NO: 1014320 - DNA, 75 bp, Artificial Sequence
  ENSG00000285563_21 (sequence is synthesized)
agatttactgtgaagagcaaaagaacaaagctcccacagtgtggaaggggacccgagtggttgccgctactggct

SEQ ID NO: 1014321 - DNA, 85 bp, Artificial Sequence
  ENSG00000285563_22 (sequence is synthesized)
cagctagacagaaaagttctccaagtcccgactggacccaggaagttcagttggcttcacctctcaagaggacagctgccctgcc

SEQ ID NO: 1014322 - DNA, 120 bp, Artificial Sequence
  ENSG00000285563_23 (sequence is synthesized)
ttcagttggcttcacctctcaagaggacagctgccctgccacacggcacatccttccatccactgtggtacctggcgctgcccctggtctccaacatcatcgacctccatggtctcaccc

SEQ ID NO: 1014323 - DNA, 120 bp, Artificial Sequence
  ENSG00000285563_24 (sequence is synthesized)
agaagttgaagtccagaggcggtgccggccatgcacaatcactgctcagctgccccgacttctgtacagacttgctggaggtgtcgcccagccacctgcaggaagccctgcaggacacct

SEQ ID NO: 1014324 - DNA, 120 bp, Artificial Sequence
  ENSG00000285563_25 (sequence is synthesized)
aggcctcctgagaactttgtattctgtgagaagtttgcattctcaaggaacctcagctgtttggtttgctcttctgccacccacctctacctgtgccagattgagggcactccctgcccc

SEQ ID NO: 1014325 - DNA, 120 bp, Artificial Sequence
  ENSG00000285563_26 (sequence is synthesized)
accctaacagaacaggattccagttgctgttttaatttactgaatgttatttgtaactggtgggagaaaaatgtggttataattcacactgtagagcttattaaaagtcacagtaacact

SEQ ID NO: 1014326 - DNA, 120 bp, Artificial Sequence
  ENSG00000261651_0 (sequence is synthesized)
acagccaccctctgagctctccgcagcaggaggaaaacgtcagagagcccttgaggccctgtttcctcaccagaaggaaggtggctgacacagccatgatcacccccaatctggaggctc

SEQ ID NO: 1014327 - DNA, 120 bp, Artificial Sequence
  ENSG00000261651_1 (sequence is synthesized)
atccttggggacaaggccagaaagtggatgtggccacacagacagctcacagaagttgaaatctaccaaggacatgcatggcacacgggcgtgtacacacactcgtctgactcacacctc

SEQ ID NO: 1014328 - DNA, 120 bp, Artificial Sequence
  ENSG00000261651_2 (sequence is synthesized)
atcctccctttcgcttcagctggggaaggaggtggaaaggtgacgttcaagactggagggtaatttgcccaagaatgcagcgagcaaacatcttaaaacaccacggagagcctctgaaaa

SEQ ID NO: 1014329 - DNA, 120 bp, Artificial Sequence
  ENSG00000261653_0 (sequence is synthesized)
gaagagaatatctacccataaccttcaagtcggtatcctcgtctaatccactatagcctcctatctgaactattcaatagcctaattggtttctctggttcttctcttgctattctacaa

SEQ ID NO: 1014330 - DNA, 120 bp, Artificial Sequence
  ENSG00000261653_1 (sequence is synthesized)
tgtactgtccattcagcagtcaggatgaatcccttaaatgtgaatccaatgtttcttacctgctcaaaacactccagtgtcttctcatcacactcagaataaaactaaaattccctacat

SEQ ID NO: 1014331 - DNA, 120 bp, Artificial Sequence
  ENSG00000261653_2 (sequence is synthesized)
ggccgactaggtcaagtataatatatcctctaactgtatcactctgactgtatcacttgaaactctcctgctctcctattcagctctagccatactcattgtatttctgcttctggaaat

SEQ ID NO: 1014332 - DNA, 120 bp, Artificial Sequence
  ENSG00000261653_3 (sequence is synthesized)
acctcatgtctttatcagaggctttgtactcactacttcctctgcctagaatatttccctcttcagatagctttatatgctccgtccattcaatcatataaacagtgaaatgccagctcc

SEQ ID NO: 1014333 - DNA, 120 bp, Artificial Sequence
  ENSG00000261653_4 (sequence is synthesized)
gcttacactattctgtgtagacctttccctcacttcgtcttcatagcatttacggctacattagaaatgtgttaatgttgttctctctctcaaaagtgtaagctcaattaagtagcttcc

SEQ ID NO: 1014334 - DNA, 120 bp, Artificial Sequence
  ENSG00000261653_5 (sequence is synthesized)
ccataaatcccaagggaatgcttgcccgtagtgatgacaatttagtgaacagttgaataagttaatgaataaattgataccatgtaccaatgtatataagtagtaagatggatcatttat

SEQ ID NO: 1014335 - DNA, 120 bp, Artificial Sequence
  ENSG00000261653_6 (sequence is synthesized)
tggatcatttatcccaaacccactagacttccacataattgtgacttcatttgaattttttcttaggcttaatttattaaagattcttgtggaccaggtgcagtggctcaaacctgtaat

SEQ ID NO: 1014336 - DNA, 120 bp, Artificial Sequence
  ENSG00000243243_0 (sequence is synthesized)
agtaaatgagagcatgaacgtagattgcagcacagcgcccatcatgcgggatgctttcaataactgatgtaaaagagctaatgacacctgttgtaatgagctctctgcaggagtgtccta

SEQ ID NO: 1014337 - DNA, 120 bp, Artificial Sequence
  ENSG00000243243_1 (sequence is synthesized)
ctctctgcaggagtgtcctatgaatctgacggatgtgaattctgggggtaactatggagttctagtgactacacagagacaaagcacttcttgctgccaccatgtgaagaaggatgtgtt

SEQ ID NO: 1014338 - DNA, 120 bp, Artificial Sequence
  ENSG00000243243_2 (sequence is synthesized)
ttgtaagtttcctgaggacttcccagccatgctgaactcagaagaggaagttggaggcatgtgaggtgcaggaaggattctaagcagtggtgctggctttgaagatggaaggcattgtac

SEQ ID NO: 1014339 - DNA, 120 bp, Artificial Sequence
  ENSG00000243243_3 (sequence is synthesized)
caatgaatgtgactggtttctagaagctgagagtagccagcccccagctgacagccaacaaggaaacagggaccttggttctccaaccacagaaaatagattctaccaacaagaatgagc

SEQ ID NO: 1014340 - DNA, 120 bp, Artificial Sequence
  ENSG00000243243_4 (sequence is synthesized)
ttgaaagcagattcttccctcgcacttaaagtctcctgcaactatggtgatacaccttgatccggcatcttccattcacctctccagattcattctccatgcctcagtactctgtgctat

SEQ ID NO: 1014341 - DNA, 120 bp, Artificial Sequence
  ENSG00000243243_5 (sequence is synthesized)
ttcccagaaggctgatccttaaggactacacctgtgggatcccttgtcactggcaatgggacaatgggaggtgccagcagaaaatcagagtgatgaagaatgaggtctgggtatttatct

SEQ ID NO: 1014342 - DNA, 120 bp, Artificial Sequence
  ENSG00000243243_6 (sequence is synthesized)
cctggctttctgtaagtatacaaggtgataaaaaggaaaatgattcctaacaacttgggggtatgtggaagcaggggaagggggtgctgtgggctgaactgtgtttcctcaaagtcatat

SEQ ID NO: 1014343 - DNA, 120 bp, Artificial Sequence
  ENSG00000215196_0 (sequence is synthesized)
cacccgcggggctcagccccgaaggctgcagcttcgggggaggcgcggtcgccgaggtccagctggtggggcgagagacgtcgcccctcggaggatgctctcggaacttgggagaggaag

SEQ ID NO: 1014344 - DNA, 120 bp, Artificial Sequence
  ENSG00000215196_1 (sequence is synthesized)
gagggaagagaagaggggaaaggggccgtcgatgtttttgatgtctgtgctttaatggaggccaccaatattgagaagacggggttggccgaggcagcccgcacgctgctgcttgcgagc

SEQ ID NO: 1014345 - DNA, 120 bp, Artificial Sequence
  ENSG00000215196_2 (sequence is synthesized)
gctcgagtcaaagctagggccaaccgcggcttgtccgggtgccctaagggggcggacacttggtttagcaccgggacacagaatagccaccggggtaggaagatgcgttcactttgctta

SEQ ID NO: 1014346 - DNA, 120 bp, Artificial Sequence
  ENSG00000215196_3 (sequence is synthesized)
cctgttggcaagagggacatacaaaaataacgtaacgtgacatcgttgacaacggtagctctttgattacacaaaagccaattttaccttcccgcaaaagccagttgacgcctttggaac

SEQ ID NO: 1014347 - DNA, 120 bp, Artificial Sequence
  ENSG00000215196_4 (sequence is synthesized)
ttttatttgcggcattttggcgccctctggctgtgtttggatcgctttcatgctcgcctgcgtcccagccaagaaaaaatcgatggagctgcaggttgtcctcaggatggttctgccctc

SEQ ID NO: 1014348 - DNA, 120 bp, Artificial Sequence
  ENSG00000215196_5 (sequence is synthesized)
aggacctgggcgtgaattcagggacagggtggccctccagaaccggagtgacaaactgtaaccatacttagggaggcagacgtcaaaggcaagtacatctgtattcaactgggtaaagcc

SEQ ID NO: 1014349 - DNA, 120 bp, Artificial Sequence
  ENSG00000215196_6 (sequence is synthesized)
attgtaagcttcctgaggcctccccagccatgcctgctgtatagcctgcagaacagtagcaacccttctttggattctgctgcagcattgtggtggtcccctgaaactaaggggtaaaac

SEQ ID NO: 1014350 - DNA, 120 bp, Artificial Sequence
  ENSG00000215196_7 (sequence is synthesized)
gctaaaaagccaagaggttggatgtctgtatcgagttgtggcttgcttttctgttctttcttaaaagtattgacaaagcagaaggtcagtgctattatggaatttacatttctatgagaa

SEQ ID NO: 1014351 - DNA, 120 bp, Artificial Sequence
  ENSG00000215196_8 (sequence is synthesized)
agataaggaggaagcaggatgaaaatgctgacagggttccattgtaaaagggaagaacgctgagaaagagaagcttgccctgagaccattttcaaataataataataaactcatcagcaa

SEQ ID NO: 1014352 - DNA, 120 bp, Artificial Sequence
  ENSG00000215196_9 (sequence is synthesized)
gaaggataacaaagagaacaaagaaatctggaagaaatgaaaataatggaattcactttgattttatggctttaatgcataataaacatgctagaaaatatcaagtctaacccacactgg

SEQ ID NO: 1014353 - DNA, 88 bp, Artificial Sequence
  ENSG00000215196_10 (sequence is synthesized)
aataaacatgctagaaaatatcaagtctaacccacactggtccttggctccctgtttcttccactcttcttttctttttttttttttt

SEQ ID NO: 1014354 - DNA, 83 bp, Artificial Sequence
  ENSG00000215196_11 (sequence is synthesized)
cgcccccagctcttccactcttttctattggcaagactgtcttactcttctggaattgtccccactctagaaaagagataaaa

SEQ ID NO: 1014355 - DNA, 87 bp, Artificial Sequence
  ENSG00000215196_12 (sequence is synthesized)
ccccagctcttccactcttttctattggcaagactgtcttactcttctggaattgtccccactctagaaaagagataaaaaaggaga

SEQ ID NO: 1014356 - DNA, 65 bp, Artificial Sequence
  ENSG00000215196_13 (sequence is synthesized)
tataaaaattagcccagtaagatggcaggtgactgtaatcccagctagtcttgaggctgagatgg

SEQ ID NO: 1014357 - DNA, 120 bp, Artificial Sequence
  ENSG00000215196_14 (sequence is synthesized)
agacttagggagctgcctcgaggtgatgaatgacaccccctggcaccagctacccttctcagaccccagtccagcccgctcccgacgtcgactacgattccgctacctcggctggcagcg

SEQ ID NO: 1014358 - DNA, 120 bp, Artificial Sequence
  ENSG00000215196_15 (sequence is synthesized)
ctctaccctacgaaacccacctctcactgaaacaagtggatatctttgtggttgctgccacgggatttaagagtcctttttttttttttgatacggagtcttgctctgtcacccaagctg

SEQ ID NO: 1014359 - DNA, 64 bp, Artificial Sequence
  ENSG00000215196_16 (sequence is synthesized)
ggccaggatggtcttgatctcctgaccttaagagatcctcctgagtccatttgaagcattttta

SEQ ID NO: 1014360 - DNA, 120 bp, Artificial Sequence
  ENSG00000215196_17 (sequence is synthesized)
cccagcctaagagtccatttgaagcatttttattctaagaaaatttatttccatatgtagttgggatgaaaagtctatgaaatccattcaaaacaaaggtgctttcaactatactgtttg

SEQ ID NO: 1014361 - DNA, 120 bp, Artificial Sequence
  ENSG00000215196_18 (sequence is synthesized)
aagttacagttttgtttcttcccttatcctgtgctatcttaagccatatgttgttgtaaattaacaggaaagagggcatttaaaacaaatggtttatgtgaatagcattaatcccgtcaa

SEQ ID NO: 1014362 - DNA, 120 bp, Artificial Sequence
  ENSG00000215196_19 (sequence is synthesized)
gactagtttgtgacaagggctaaagattgcactcttgccttttaagctcaaccaagttaaacatctgaactatttctgctgtcttgtaaatattaagatgtaacacgtttctgatgtttg

SEQ ID NO: 1014363 - DNA, 120 bp, Artificial Sequence
  ENSG00000215196_20 (sequence is synthesized)
ttgacatttgttgtacttttgatgaacaattagcctgcaagaatattaacaggaaattccattcatgagataagcagctgtttgtgcaaagcttcagccagatcatgggaccaaaaatct

SEQ ID NO: 1014364 - DNA, 120 bp, Artificial Sequence
  ENSG00000215196_21 (sequence is synthesized)
tctttatgcaactactgtttgttgaatagtcagcattccttgcatgttcaaaaggaaatgctttggaaataacttttatggctaattttgacttttatattttcgtaaggagaaaataac

SEQ ID NO: 1014365 - DNA, 120 bp, Artificial Sequence
  ENSG00000215196_22 (sequence is synthesized)
tttcatggttaatgttgactcttatacttgcaggtagtaaaataatgtcctttatcaccatgtaaatttcaaacagtagtcattgacaaatccctagtaatttccaaattgtaatgcaga

SEQ ID NO: 1014366 - DNA, 120 bp, Artificial Sequence
  ENSG00000215196_23 (sequence is synthesized)
cacctgggccatgttgatcttggggaaggagaaggcaaatgacaagagcacgcaatggctcttcagtatccgctgggaagaggcacaccacattcccactgacattttatggaagcaggc

SEQ ID NO: 1014367 - DNA, 120 bp, Artificial Sequence
  ENSG00000215196_24 (sequence is synthesized)
tgtgtggccatgcttgagatcagtgtgtggggaagtaaattcacccacagggtagacagagcaaccccatggcaggagtggatgtgttcaaccctccacatagggcagccaatgagaaga

SEQ ID NO: 1014368 - DNA, 120 bp, Artificial Sequence
  ENSG00000215196_25 (sequence is synthesized)
aaaacacagtccaccacacttcaacatgtttgaattttggtcctttttcaatgacattcctatttgagatctcttctgacggctttagggccattcctaagattcagagagcagtgtagc

SEQ ID NO: 1014369 - DNA, 120 bp, Artificial Sequence
  ENSG00000215196_26 (sequence is synthesized)
gtgactcactgtatgcccctggcaaggactgagtgtggcccacaaagcctagaatatttattttctgactctttccaaaagagtttgtcaacccccagaataaaactaaatttggaggcc

SEQ ID NO: 1014370 - DNA, 120 bp, Artificial Sequence
  ENSG00000215196_27 (sequence is synthesized)
aggtgtgatggctcaaacctataatcctagcactttgggagtcaaaggcaagaggatcccttcagcccaggggttcaagaccagcctgggagaacttgtctctgaaaaataattaattaa

SEQ ID NO: 1014371 - DNA, 120 bp, Artificial Sequence
  ENSG00000215196_28 (sequence is synthesized)
ttaattaattaatttaaaaaaaaaaaaaaccttaaatgtgggattggtcctggaagcttggtttcattggcactgggagcaattatgtccatcccagatgaaatcagcttctacaagtaa

SEQ ID NO: 1014372 - DNA, 120 bp, Artificial Sequence
  ENSG00000215196_29 (sequence is synthesized)
caaatctcacctttaaagccagcggttactaatcagtgtagaattactcctctagaatctggagtccagacgccactccagtgaatctgtgtatccatgttcctggtgttgcacttacca

SEQ ID NO: 1014373 - DNA, 120 bp, Artificial Sequence
  ENSG00000215196_30 (sequence is synthesized)
cacaggattataattacaattttatgtcccacaaacagactatggtaacatcccatactcagcccagtgcttgacaaaggtatttttgtaactgtttttgattgaattaaactaaactat

SEQ ID NO: 1014374 - DNA, 120 bp, Artificial Sequence
  ENSG00000215196_31 (sequence is synthesized)
gtaataaagaggggcagcttttacaggaaaaagaacccgagggaagctgttggcagtctgtgaaacgacggtcatggtggaattcgtttttctgcacattagatgtttaaaacagctggt

SEQ ID NO: 1014375 - DNA, 120 bp, Artificial Sequence
  ENSG00000215196_32 (sequence is synthesized)
tttcgttgttgttgttgttgttgttttcctgaaagaatcttgttccccacaatatgttcttggtattcaaaatggcttttgctcctactttttggaaaatgcacttcagtttccaattta

SEQ ID NO: 1014376 - DNA, 120 bp, Artificial Sequence
  ENSG00000215196_33 (sequence is synthesized)
atagcctgcagaacagaagcgttccactgtaaaggagcaacttgacaggctgagcctggcggtgacagcatacaggatgggcgcagcccccacatctgggtcatttcgtgtcatcatgtc

SEQ ID NO: 1014377 - DNA, 120 bp, Artificial Sequence
  ENSG00000215196_34 (sequence is synthesized)
tggaatatcaagtttgagcacgtatgcagcaaggatacccttcaactaaaagttgcatcctcaaattggggctttctaactcagcgtggcgatgttgtggatcaggtcaaaagtgctttt

SEQ ID NO: 1014378 - DNA, 120 bp, Artificial Sequence
  ENSG00000215196_35 (sequence is synthesized)
ccttagagccaagttgagagttgagaggcctctgccacctgcatctgtgcttatgagcaacacatgtggtctcggagggggcttcggcgagcacaaactccagcattgtcattcagaacc

SEQ ID NO: 1014379 - DNA, 120 bp, Artificial Sequence
  ENSG00000215196_36 (sequence is synthesized)
caggacaaagcctttcacacttgcacgacatgtgctttctgaaatgaatgcaactgcatacttccttcttgagctcgcagtaatgaatgacttcacagatggatggatgatcttgtggct

SEQ ID NO: 1014380 - DNA, 120 bp, Artificial Sequence
  ENSG00000215196_37 (sequence is synthesized)
ggctacaaagaatagactaaaacccgcggaaatgcagatagattaaaaaggagtgacaggtgggtccatcctacactccctacactctctgtttgtccaacaaaatggtagtcctctagc

SEQ ID NO: 1014381 - DNA, 120 bp, Artificial Sequence
  ENSG00000215196_38 (sequence is synthesized)
tagtcctctagcggctgccggagtcccagtatcccagaggaaactgcgaaaaacctcctcaaatgagtaattaggtcgccggacccagtggttcaggcctataatcccagcactttggga

SEQ ID NO: 1014382 - DNA, 78 bp, Artificial Sequence
  ENSG00000215196_39 (sequence is synthesized)
caggaagaggaggttgtagagagtatgaaagagaagcaaggaaggcaagaaggcaggaaggcagaaaggcagaaaggc

SEQ ID NO: 1014383 - DNA, 74 bp, Artificial Sequence
  ENSG00000215196_40 (sequence is synthesized)
tactccagcctgggtgacagagtgaaatgaaagagaagcaaggaaggcaagaaggcaggaaggcagaaaggcag

SEQ ID NO: 1014384 - DNA, 120 bp, Artificial Sequence
  ENSG00000215196_41 (sequence is synthesized)
aaggaaaaaggagaggaaggaaaggaaaggcaggcaggaaggaagaaaggaagaaagggaaggagaggaaggaaaggaaagggaagggaaggagaggaaggagggaaggaaggagagtaa

SEQ ID NO: 1014385 - DNA, 120 bp, Artificial Sequence
  ENSG00000215196_42 (sequence is synthesized)
ttagatcagcagcactggcccctgccagttcactttttcaaaagtcaacctcctcaagtcacctttgtttctcaaaggcttcacatacagaagatgctgtgactacagcggattgtctcg

SEQ ID NO: 1014386 - DNA, 120 bp, Artificial Sequence
  ENSG00000215196_43 (sequence is synthesized)
cagatctgcagtctgcattggtcctagtgaggagagacctttggctccgtcctcatagggctttttccttaagagaagaagatattgtcccacttgatgaatttgggggaaatgtacgtt

SEQ ID NO: 1014387 - DNA, 120 bp, Artificial Sequence
  ENSG00000215196_44 (sequence is synthesized)
agagaacatgtacagcaaggtcaatagtaacaacacagaccctagtataagcattccatcatctgcttattataacctctccaggctgtgagaaattaacactgaggccaacaatgggtg

SEQ ID NO: 1014388 - DNA, 120 bp, Artificial Sequence
  ENSG00000215196_45 (sequence is synthesized)
ctcactactctgaatgagcagtactttgcatttactaggagcactggggaagtagccattcaccaaaagggtacaaaaacacatagaatgaaaacaattctcattttattttcattcaga

SEQ ID NO: 1014389 - DNA, 120 bp, Artificial Sequence
  ENSG00000215196_46 (sequence is synthesized)
tgtgtaagtcgaactgttttcattgctgtttgtccaagtaatcttcctcccagggggtgcttacaaagccactgaattccctggatgtcaggtgcagtaatgagtcattagccacaaggc

SEQ ID NO: 1014390 - DNA, 120 bp, Artificial Sequence
  ENSG00000215196_47 (sequence is synthesized)
atacaatcaaaagagaaagacaacttcaaatacagattagaagaacacttacctaaacaacaaaaataaggaaaaccaagcacctcaaaaatcagtttgctaatccaacactttacatta

SEQ ID NO: 1014391 - DNA, 120 bp, Artificial Sequence
  ENSG00000215196_48 (sequence is synthesized)
ccaacactttacattaaacaggtgattttattgattctatccctaatttgctgtaagattttgcttagttcccttgaaaacggcaacatggcagatgcagtgactcacacctgtaatccc

SEQ ID NO: 1014392 - DNA, 120 bp, Artificial Sequence
  ENSG00000215196_49 (sequence is synthesized)
gcagaaggaatcagaccccactgagtagtgctgcaggccctgaggacgctgttccggagagctctgtcattctccctaacgctcacagacacaggaacatgagtcatcaatgagacagtg

SEQ ID NO: 1014393 - DNA, 120 bp, Artificial Sequence
  ENSG00000215196_50 (sequence is synthesized)
ttgccacccgcctttctcccaagcctccctataaaaagaggaaatggcctctgacactgcgatgtatgaacaagagttccacacacagcacacagcctgagaacttctgccatggacttc

SEQ ID NO: 1014394 - DNA, 120 bp, Artificial Sequence
  ENSG00000215196_51 (sequence is synthesized)
aaggtcaaatggtaccactgtgatatgacttctacaatttaaaaaataattctacctttttaaaagagtattttggcaatggagaagatggacatgaaaagatctataattaggctgggc

SEQ ID NO: 1014395 - DNA, 120 bp, Artificial Sequence
  ENSG00000215196_52 (sequence is synthesized)
ctgggcgacagaacaagactctgtctccaaaataaaaaataaattaaaaagagctataattgtttttaaagtgcataaagcaatattatggaagaaaaacgatcaattagcgacaccaat

SEQ ID NO: 1014396 - DNA, 120 bp, Artificial Sequence
  ENSG00000215196_53 (sequence is synthesized)
acaccaatcaataaagctggaatgagacataattaagctagttcaaaggaaagtctgatgaaagattacaaaaagctctctaattatgagaggaaagaagaatctcaggcaagactgcca

SEQ ID NO: 1014397 - DNA, 120 bp, Artificial Sequence
  ENSG00000215196_54 (sequence is synthesized)
aggaggttacaaatttgttaaccctgcagcagaaatgagaaactcaacaattaaagagaaaataaaaatcaatgtcattccaacaatggacaggctccattctccagttaaaaggatcta

SEQ ID NO: 1014398 - DNA, 120 bp, Artificial Sequence
  ENSG00000215196_55 (sequence is synthesized)
ccaccagctttaaagtcatcagccaagttctttccagatttctcagaaccacacaagcaaacacacatggcaagagcaaccctcaactcactctattatgagtacaactcatcaaggact

SEQ ID NO: 1014399 - DNA, 120 bp, Artificial Sequence
  ENSG00000215196_56 (sequence is synthesized)
gaggaccctggagcatttcttctccaaactctgatcttccagatgccaaacaaagtaggctgatagactggcctgaaggtagtgagttatctcaattgattattcagtcagttacagatt

SEQ ID NO: 1014400 - DNA, 63 bp, Artificial Sequence
  ENSG00000215196_57 (sequence is synthesized)
gcgggcggatcatgagagaaaaaattaactgggtgcggtggcgggtgcctgtagtcccagtta

SEQ ID NO: 1014401 - DNA, 120 bp, Artificial Sequence
  ENSG00000215196_58 (sequence is synthesized)
catctcaaaaaataataataataaaataaaataaggtttgcatattggttataagcattttctcacatcagtctaataccttgtggctactgatttcctgcactgggagtcagcagacct

SEQ ID NO: 1014402 - DNA, 120 bp, Artificial Sequence
  ENSG00000215196_59 (sequence is synthesized)
cactgggagtcagcagacctcatggcgatgcaaaacgtctgccaatgtatattaaaaggaaaccaagtaagaacagactttgccgccatttgggcaactcctcacgtagatgcttggcaa

SEQ ID NO: 1014403 - DNA, 120 bp, Artificial Sequence
  ENSG00000215196_60 (sequence is synthesized)
gtaacagtcagagacagtgtgctattgttcaaatgcacagactggattctgatgagctggattctgatgaatctcagttgtgctactaactaactggaattatgcaagtctctaaacttg

SEQ ID NO: 1014404 - DNA, 120 bp, Artificial Sequence
  ENSG00000215196_61 (sequence is synthesized)
tgttcccacttctaaacattgtgggcaataataatatcacctcccacattgggctgttgtgaaggcttaaattagtaagataatgaatatgataagtttaacatagtacctggcacattg

SEQ ID NO: 1014405 - DNA, 120 bp, Artificial Sequence
  ENSG00000215196_62 (sequence is synthesized)
taaattaatgaataagcatcacctattattaccagcataaaaacttaccaattaaaaaaaagggggagggaagacggatttgagtaataataaaatgctcagaaatagctccagtgggac

SEQ ID NO: 1014406 - DNA, 120 bp, Artificial Sequence
  ENSG00000215196_63 (sequence is synthesized)
ttcagagtcagaagtttccactagctctgaacaagggttggcagcagtctcagggcctccatccatccagccctcattggctcccacccacattgtgccaagcagagtatccacaggata

SEQ ID NO: 1014407 - DNA, 120 bp, Artificial Sequence
  ENSG00000215196_64 (sequence is synthesized)
tggagtcatcttccgtggtcccagctggatttgattgcgctgtgatgacttggctgttgcagaggctagattgaaagcatgtctcaacttcacctcttgaatgcaatgctgtttatattt

SEQ ID NO: 1014408 - DNA, 120 bp, Artificial Sequence
  ENSG00000215196_65 (sequence is synthesized)
gcctaatatttttctcccccttgggttatttgaagatcatgccaaacttttgtttcttttaactggatagagtattctataaagatattttaaagcagttattctcatcgacattttgca

SEQ ID NO: 1014409 - DNA, 120 bp, Artificial Sequence
  ENSG00000215196_66 (sequence is synthesized)
aatctggaagagagtttttatagctatacagccgttctctcaccatggcctggctccacatacagcaaagtgatccttctaacccagatcacgcccccactgtactccaaaccactcact

SEQ ID NO: 1014410 - DNA, 120 bp, Artificial Sequence
  ENSG00000215196_67 (sequence is synthesized)
gccttcatcttaggatggaaaataacatcctcagatggtttacaaggactctgcaatgtccccttgctcccatgtcatcttcctccactctccccctgcctttcttgctagcccttgaat

SEQ ID NO: 1014411 - DNA, 120 bp, Artificial Sequence
  ENSG00000215196_68 (sequence is synthesized)
agccccaaatatgttcctgccttgaggcctttgcacttgctgttccctctgcctggaatgctctttgccctacatatctgcacagctcacttccttctgttgtcatttcaaatgtcacct

SEQ ID NO: 1014412 - DNA, 120 bp, Artificial Sequence
  ENSG00000215196_69 (sequence is synthesized)
tctcaggcaagcttctcctgtcatcctaccaccttacattatatttttgtttattgatttattagatggctcctgcattacaatgtaaagtaggtaacacgatggccttggctggcaggg

SEQ ID NO: 1014413 - DNA, 120 bp, Artificial Sequence
  ENSG00000215196_70 (sequence is synthesized)
ttgattataaagcaaaggtttgggaagaaagactcatattcctcctgagatgcaacctcaagtcttaggaaaagaaagttttgaactcaggttccgggaatgtggaagaggaagctctta

SEQ ID NO: 1014414 - DNA, 120 bp, Artificial Sequence
  ENSG00000215196_71 (sequence is synthesized)
aagggcaagtagactttgcaacatgctcgttttcaggattctcctcctttgtcctcaaccctgcccagtgttcccctaactccacctaagccactccataaagttaggtcccattcctct

SEQ ID NO: 1014415 - DNA, 120 bp, Artificial Sequence
  ENSG00000215196_72 (sequence is synthesized)
attccttcactactaatgacagctaatagagctaaacagaataccacaataagccagaagctgcctttttttattattattattattcattgcccaatttgtagaactctctgaattcaa

SEQ ID NO: 1014416 - DNA, 120 bp, Artificial Sequence
  ENSG00000215196_73 (sequence is synthesized)
ccaaaagttttctagagaactaactgaaagagattttcaccaaatctttttatttttttaatctagagaatacaattgagaaccaaatcaataaatatcctcaactgttacctttgttat

SEQ ID NO: 1014417 - DNA, 120 bp, Artificial Sequence
  ENSG00000215196_74 (sequence is synthesized)
aagggaactacgatgaaccgtgcttgccccacatttaccctagcagcaactatgctttttctatctctggccttaccctgccttcctgcctccagagtctgagatggagaaaggcaaagt

SEQ ID NO: 1014418 - DNA, 120 bp, Artificial Sequence
  ENSG00000215196_75 (sequence is synthesized)
cagatggaggatagagctgggcagggagttgctgccagcaacaattggagttgctggtttgctttcaacactgaccccactttattggccatgagttaaggcagtcaaatgggcatctag

SEQ ID NO: 1014419 - DNA, 120 bp, Artificial Sequence
  ENSG00000215196_76 (sequence is synthesized)
gaaacatgaccaagatctgcattagggaagcaaagcagattaaaaggcacaattgctggccaggcatggtggctcacacctctaatcctagtgagaggtgaagccagttggacttcctgg

SEQ ID NO: 1014420 - DNA, 120 bp, Artificial Sequence
  ENSG00000215196_77 (sequence is synthesized)
gagaggtgaagccagttggacttcctgggtcgagtggggtggggtcttggagaaattttctatctagctagaggattataaatgcaccaatcagctctgtgtctagctaaaggtttgtaa

SEQ ID NO: 1014421 - DNA, 120 bp, Artificial Sequence
  ENSG00000215196_78 (sequence is synthesized)
caccaatcaatgctctgtgtctagctgaaggtttgtaaatgcaccaatcagcactccgtaaaacggactgatcagtgctttgtaaaatggaccaatcagcaggatgtaggcagggccaaa

SEQ ID NO: 1014422 - DNA, 120 bp, Artificial Sequence
  ENSG00000215196_79 (sequence is synthesized)
taagggaaaaaaagctggcacccaagccaacaggggcaacctgcttgagtccctttccacattgtggaagctttgttccttcactcttcatgataaatcttgctgctgctcactctttgg

SEQ ID NO: 1014423 - DNA, 120 bp, Artificial Sequence
  ENSG00000215196_80 (sequence is synthesized)
tgagctgtaacactcaccacgagggtctgtggcttcattccttaagttagcaagaccacgaacccacagggaggaacaaacaactccgggcacaccacctttaagagctataacactcac

SEQ ID NO: 1014424 - DNA, 84 bp, Artificial Sequence
  ENSG00000215196_81 (sequence is synthesized)
ggaacaaacaactccgggcacaccacctttaagagctatagtcagcaaaaccacaaacccaccggaaggaagaaactccagaca

SEQ ID NO: 1014425 - DNA, 86 bp, Artificial Sequence
  ENSG00000215196_82 (sequence is synthesized)
gtccgtggcttcattcttgaagtcagggagaccaagaacccaccggaaggaacaaactccggacacactagcacttacaggaggcc

SEQ ID NO: 1014426 - DNA, 90 bp, Artificial Sequence
  ENSG00000215196_83 (sequence is synthesized)
agcctgggcaacgtagtcattagccgagcatggtggcaagtgccagtaatcccagctactcttggaggctgaggcaggaagagcccttga

SEQ ID NO: 1014427 - DNA, 120 bp, Artificial Sequence
  ENSG00000215196_84 (sequence is synthesized)
cccagctactcttggaggctgaggcaggaagagcccttgagcccaggagctggaggctgcagtgaactatgatcaaaccactgtagtccagcctgagtgacagagtgagaccctgcctct

SEQ ID NO: 1014428 - DNA, 120 bp, Artificial Sequence
  ENSG00000261659_0 (sequence is synthesized)
ttgccccatccctcccctgccgattccctttccccctgaggaagccctctgggagtgatcctgagggcctctgatgcacggagcccttttccgcctgcatggacaggctgggcaccggca

SEQ ID NO: 1014429 - DNA, 120 bp, Artificial Sequence
  ENSG00000261659_1 (sequence is synthesized)
gagacgcccacctgccctgacctgcctctgtggcctcacccgagaaggtgctgacagagtcctttctgcggaggtcaaagcacttcatgaagccatcctgggagccactgagcagcacgt

SEQ ID NO: 1014430 - DNA, 120 bp, Artificial Sequence
  ENSG00000261659_2 (sequence is synthesized)
gggcttcggtggggtggaagcagactttgtttaccgtgcgcttgtgttctgtgaacagctggtcctgcttgttgcgggatggccggcccaggttccacgtgaccaccacgccattggtgg

SEQ ID NO: 1014431 - DNA, 120 bp, Artificial Sequence
  ENSG00000261659_3 (sequence is synthesized)
ctgctgtggccagcaggttctcatccatctggtgccagaccacgtcagcacagctcaggttaagcgaaggcttgcgccccacacgcaggttcagcttttccacgaactgttcctcctcga

SEQ ID NO: 1014432 - DNA, 120 bp, Artificial Sequence
  ENSG00000261659_4 (sequence is synthesized)
tggcatagatcttgaagatgctacggcctgccacgaccacctgggctgcgtcgcggcacacactgatggcattggcgggagcatccaggtggcagtgcatggtgcggcctgtcagcacgc

SEQ ID NO: 1014433 - DNA, 120 bp, Artificial Sequence
  ENSG00000261659_5 (sequence is synthesized)
tgccacccagggctgtggtcacacgggacatcttctccatggctgcacaggtgatgaggtcaggggtcaggaggtcagtgaggtgggctggcctggtcagcctgggtgggtcatcagttc

SEQ ID NO: 1014434 - DNA, 120 bp, Artificial Sequence
  ENSG00000261659_6 (sequence is synthesized)
agaccttccacccaggttgggaccccagaactgcttggtcccgggctggtcagtcttagtgagccaatccagggctgtctatcagccaatcagcctgacaggcaagctcaaattcactgg

SEQ ID NO: 1014435 - DNA, 120 bp, Artificial Sequence
  ENSG00000261659_7 (sequence is synthesized)
agtctgtcagtccagcccatcaccctggctgagcggtgaggggacttcctagcttcccttaggcctgtcagtttcatgtctgacttccacggaagactctagctggacattcccggccca

SEQ ID NO: 1014436 - DNA, 120 bp, Artificial Sequence
  ENSG00000261659_8 (sequence is synthesized)
ggccacctctcggtacccccatcagccagatctgggcagtcactaaacgctcggtcagtcaatcccagcaggggagcgaggagactcccgccgtccacactgtcagccctgagggcggcg

SEQ ID NO: 1014437 - DNA, 120 bp, Artificial Sequence
  ENSG00000261659_9 (sequence is synthesized)
gggctctagggaggaacaaaagaggggagggaacagagggctagaggggcccggggactcaggcgatagacgcgggaagggcccagagggacgtcaaggaccgagctacttaaggagctc

SEQ ID NO: 1014438 - DNA, 120 bp, Artificial Sequence
  ENSG00000261659_10 (sequence is synthesized)
gaggtgtctggcgggaccggaggcaggagagaagccggcgaccccggagtacagggttcctgggagcggcgcagtggcgcgggggagcggacgctgcgggacgagaaccagagggcccgg

SEQ ID NO: 1014439 - DNA, 120 bp, Artificial Sequence
  ENSG00000261659_11 (sequence is synthesized)
ggcagcccttctcccccgcgcgaaccccaatcttttactaaaagcgcacggttgtccggaaccgccgcgccggaagccgctgtctttcccgtccctcgccggaagtggtcctcttcttac

SEQ ID NO: 1014440 - DNA, 120 bp, Artificial Sequence
  ENSG00000261659_12 (sequence is synthesized)
ccatccctctcaggaagtgggcacaaactctcgcccgacaccacgaaagttccgggtcagggagctgcgttggcagaggccaggaggggcccgggattggggtctgcgggccgccctggg

SEQ ID NO: 1014441 - DNA, 120 bp, Artificial Sequence
  ENSG00000261659_13 (sequence is synthesized)
aggggcccgggattggggtctgcgggccgccctgggcgttgccattgcgctgcggtgctgtgcttgtgtgattggtttatttatttatttatttaaacggagtctcgctctgtcgcccag

SEQ ID NO: 1014442 - DNA, 87 bp, Artificial Sequence
  ENSG00000261659_14 (sequence is synthesized)
aattttgtatttttggtagacaaaactactgaactcaagcgatcctctggcgtcagcctcctgaagtgctgggaatgcaggtgtgag

SEQ ID NO: 1014443 - DNA, 120 bp, Artificial Sequence
  ENSG00000261659_15 (sequence is synthesized)
ggtgtgagccaccgcgcctggcctgttttttaagtctcaatttcagtattttaatgccatcacctattttaatccccaggtccatcatgacatctggtcatccctagacaagttccgagt

SEQ ID NO: 1014444 - DNA, 120 bp, Artificial Sequence
  ENSG00000261659_16 (sequence is synthesized)
gacatctggtcatccctagacaagttccgagtgcccccagtcttcccctccttcctcactcctcgacctcgggagcagcctcccaacggctttcctgggtccgtctttcccctttgatca

SEQ ID NO: 1014445 - DNA, 120 bp, Artificial Sequence
  ENSG00000261659_17 (sequence is synthesized)
gaaacccgcacagaagtcaggcaccaggtcttctgcctgaggcctctggcagctcccactatgctgtgaatgaaccccaactcctggcctccgccttcccctgcccacctccagccatgg

SEQ ID NO: 1014446 - DNA, 120 bp, Artificial Sequence
  ENSG00000261659_18 (sequence is synthesized)
cagcctccacccccattcccagcccaccaagccctttcctgcctcagggacattgtacgtgcgtgcgatgcctcctccacagagcggacctccctgaccactgccctaatgggcttctcc

SEQ ID NO: 1014447 - DNA, 120 bp, Artificial Sequence
  ENSG00000261659_19 (sequence is synthesized)
atcactgtggcctccacggcacttgtcaccacccattcgtttgtttactggttgttgtcggtcacatacgagtgtgaattccaccaaggcaggaatcacattctggctcaatccccaccg

SEQ ID NO: 1014448 - DNA, 120 bp, Artificial Sequence
  ENSG00000261659_20 (sequence is synthesized)
caaggcaggaatcacattctggctcaatccccaccgaatgcccagtgcctgacacacctgttcaaccagttgctctcgttcttttttttaaaaaactttttgagacggagtttcgctctt

SEQ ID NO: 1014449 - DNA, 120 bp, Artificial Sequence
  ENSG00000261659_21 (sequence is synthesized)
ttgagacggagttttgctctttcgcccaggttggagtgaggtggcgcagtctcggctcatagcaacctccaccccctaggttcaagcgattcagcctcagcctccctagtagctgggatt

SEQ ID NO: 1014450 - DNA, 120 bp, Artificial Sequence
  ENSG00000261659_22 (sequence is synthesized)
acaggcgtgagccactgtgcccagcctcagttgcctttttcgacctctctgtctctcctgggtgtgagccattgtctgctattggtgcattttgtaatcttttgcgacatccttgtcctt

SEQ ID NO: 1014451 - DNA, 120 bp, Artificial Sequence
  ENSG00000261659_23 (sequence is synthesized)
atccttgtccttgcctgttactgtgtatagaacagggtttatttctgcctctctggaagggtgggctagagtctggatatgttggagggaatattatgtgtagtgacttcagtgttgtct

SEQ ID NO: 1014452 - DNA, 120 bp, Artificial Sequence
  ENSG00000261659_24 (sequence is synthesized)
ctccctttaaggaatgggaggtcctctgccttccatgtagtcactgctgtttccattctaccatgtcggcatccagcctctacccctttgttgcaagaaagaataaatctgataagaggt

SEQ ID NO: 1014453 - DNA, 120 bp, Artificial Sequence
  ENSG00000261659_25 (sequence is synthesized)
tcctctgccttccatgtagtcactgctgtttccattctaccatgtcggcatccagcctctacccctttgttgcaagaaagaataaatctgataagaggtacaggagaatcccgagacctg

SEQ ID NO: 1014454 - DNA, 120 bp, Artificial Sequence
  ENSG00000261659_26 (sequence is synthesized)
ggatgcgcagggcagatatgcccacctacaccgctgtctggggacctaaaaacaactcagacacatgtttttacaacttttttaatatatatttttataaacaggtcacgtgataaaata

SEQ ID NO: 1014455 - DNA, 120 bp, Artificial Sequence
  ENSG00000231648_0 (sequence is synthesized)
gctcaaaggagataagtgaagacgtgcaaagccttgctaaacaggacccatgggggagagatttgaagaagccatcagggttttgactagaaggcaggggtcctcaaagctgtgaaagtc

SEQ ID NO: 1014456 - DNA, 120 bp, Artificial Sequence
  ENSG00000231648_1 (sequence is synthesized)
tgatctatcagaggtggctgccaagctgtgctttcttctgcagatggcaaaagaaaaagatgtgaaacaagacatgtttaaatggaagagagaggaatgagagaggaaggcaagaataca

SEQ ID NO: 1014457 - DNA, 120 bp, Artificial Sequence
  ENSG00000231648_2 (sequence is synthesized)
aatatttaagaaagctttattttcctgaagcaaagaatgacacttgaaaccgagggaatctcaatgtccaccttgcatttccatgaccagcaagagaggggaacccctacaggaatgttc

SEQ ID NO: 1014458 - DNA, 120 bp, Artificial Sequence
  ENSG00000231648_3 (sequence is synthesized)
atcctctgcctctgacctgggaagtctcagtcatccccgaggaccaattccaaatgtcaattcattcaccaccattgcccttgtcattgcatccactcctcctctctctctgacttgtgt

SEQ ID NO: 1014459 - DNA, 120 bp, Artificial Sequence
  ENSG00000231648_4 (sequence is synthesized)
taatggtaggtaactgtgtatgaatctaggctgggggtttgtctttgaggtcaaggactatttctgattcactgtgtgtctccctaaatccttcttccacccagcaaagatgctcaaaat

SEQ ID NO: 1014460 - DNA, 120 bp, Artificial Sequence
  ENSG00000231648_5 (sequence is synthesized)
atatatacaaatgatagccctttgtcctgtaccttttctgagctttggaatgtctctctgtactgatagagcatcatgcaacagacccagcagaggaggaaatagctgtgagattatctg

SEQ ID NO: 1014461 - DNA, 120 bp, Artificial Sequence
  ENSG00000231648_6 (sequence is synthesized)
ttatagcaggattcaaagaaagctgctttcatgccaggaagccaggggatcgtagtaaacggctgtctttaaccaaagacagggatcttccactattaggagggatcttccactattgaa

SEQ ID NO: 1014462 - DNA, 120 bp, Artificial Sequence
  ENSG00000231648_7 (sequence is synthesized)
agttgagaccctgggacccctgtctcatctatctctgccatcagacctgccgcttctcacatagttgcatatggacaagatgcctcattttggtgtgcactgggagatctggcctatcca

SEQ ID NO: 1014463 - DNA, 120 bp, Artificial Sequence
  ENSG00000231648_8 (sequence is synthesized)
tgaaactctctccattggttgcctgttgaaagggctccctaccaatttggtcataacacagaccaaattgaggaggttaaaagagatcaagtgtctgaacatggcttctttggactctag

SEQ ID NO: 1014464 - DNA, 120 bp, Artificial Sequence
  ENSG00000231648_9 (sequence is synthesized)
gaggagttgatcaagtgtcactccagtgcatatactgtttttatgcacagtatggatttgaacatcctggtgagtgagtccatgttaacagtatgttctcaagcaggaatatgcagctct

SEQ ID NO: 1014465 - DNA, 120 bp, Artificial Sequence
  ENSG00000231648_10 (sequence is synthesized)
agcttctgtttttagaaagctcagagattttttgcactggaagagaattagacatccaacatcctcatttcaaaaggaaactgaagtcagagaggagaagggacttcccaatggtacata

SEQ ID NO: 1014466 - DNA, 120 bp, Artificial Sequence
  ENSG00000231648_11 (sequence is synthesized)
acctgctattggcaaaggtgggaccagagcccttaagtttttcaacttctccagcaaattcctcatatctaagagcaacgcttcagttttccttaataaagtgccccagatcctcacatt

SEQ ID NO: 1014467 - DNA, 120 bp, Artificial Sequence
  ENSG00000231648_12 (sequence is synthesized)
gagtagcgtccaggaggactcctctcaagcccagccatgattgtgccttgctcagctcagaagacccagaggcccccccatccagatgagttcagtgacagcatctttacccacacaaca

SEQ ID NO: 1014468 - DNA, 120 bp, Artificial Sequence
  ENSG00000231648_13 (sequence is synthesized)
tggcctgactttccctcttggccttccctgctgctgcccctgcctgcatccagcactccagcccacctttctggttccagctccctgaacattttcaaggcttgcctgtctctgtgcttt

SEQ ID NO: 1014469 - DNA, 120 bp, Artificial Sequence
  ENSG00000231648_14 (sequence is synthesized)
tcctcagtctgaaagaatcctccccaccccttagcctatccacagagttttccaaacccagtcatatgccaccttcaccatgcagtcctttccttttcgttttagttgcaaaaggagtga

SEQ ID NO: 1014470 - DNA, 120 bp, Artificial Sequence
  ENSG00000231648_15 (sequence is synthesized)
attttattgtttaaaaaatgcagtcaaacttggaaagtataaagtaaaaagtttctctatgccgcacttcccactgtgactattgaaaacaacaaactggtaccaaggtaccaagttata

SEQ ID NO: 1014471 - DNA, 120 bp, Artificial Sequence
  ENSG00000231648_16 (sequence is synthesized)
atagctgtgatcttgttatcagtttggtgggtacctaaagccctctgatacccccttctagatcactgaataagatttctccaacctctgaacttccctagcatttggtaccccgttatg

SEQ ID NO: 1014472 - DNA, 120 bp, Artificial Sequence
  ENSG00000231648_17 (sequence is synthesized)
atgttttaccttgttctgcattgtgttatagttatatctatacttaccttaattgatccccacacttcagtctttgctgactcaattgatttgagggtctatatttccctgtcacagagc

SEQ ID NO: 1014473 - DNA, 120 bp, Artificial Sequence
  ENSG00000231648_18 (sequence is synthesized)
ttaggacaattggctgcacatttggtttagtccatcaaacctttatgaacacgtgttctgggccctattgacctaggggccaaggatacagaaacaaataaaacacagcccagccttaaa

SEQ ID NO: 1014474 - DNA, 120 bp, Artificial Sequence
  ENSG00000231648_19 (sequence is synthesized)
caaatggagaaattgcaaaggtcatcacaaagtcaggcttgctgcagaagatagcactgtgggtgaacaggagatacccaaagctccagcttctggactgacttactccatttgctacct

SEQ ID NO: 1014475 - DNA, 120 bp, Artificial Sequence
  ENSG00000231648_20 (sequence is synthesized)
tctactttaagcctagatgaccagatggagaatggctgcccaggccgctagggaaaatcaggacatgtctccaggggcaaatgcctaggctccaaagctcttgctaccatctagagggat

SEQ ID NO: 1014476 - DNA, 120 bp, Artificial Sequence
  ENSG00000264895_0 (sequence is synthesized)
acgaaatgtgtttaagagttcaactcacaaatttagtttatttctctgcctataaatagagatttgtagattcttataggtagagaaataaaccaaattccaactgctccttatgatcat

SEQ ID NO: 1014477 - DNA, 120 bp, Artificial Sequence
  ENSG00000264895_1 (sequence is synthesized)
tcctctaggtgttaagagtgagagagggaaggcttgacaaatttactgaaagaggtatgggagtgtgaaagctttagacaaggtacaaagatccactctcagaaagagaaaatctgaaaa

SEQ ID NO: 1014478 - DNA, 120 bp, Artificial Sequence
  ENSG00000264895_2 (sequence is synthesized)
aagctccaaaacattgatcataggtttggagtttgatagttcacagctctatgtatggagaagagcttaaaggtaagcagtaccagaattggtagctttaaattataagcattgcctcat

SEQ ID NO: 1014479 - DNA, 120 bp, Artificial Sequence
  ENSG00000264895_3 (sequence is synthesized)
aagggaaacatgaagacttggagacatgtcagtgaagacttggaaacatggcagtgaagaagaagaaagaagaaaaaattcttcaggaaaagaaaaaaactgaacttagagaagagggtg

SEQ ID NO: 1014480 - DNA, 120 bp, Artificial Sequence
  ENSG00000264895_4 (sequence is synthesized)
ttcttgaagtaggagctctgcctatgaaatgaacagaaatagaaaagagcaggccacatccatacagaactgtaagaaaaaacaaacaggaaatgtgaatcagcatttcaactgatgaaa

SEQ ID NO: 1014481 - DNA, 120 bp, Artificial Sequence
  ENSG00000264895_5 (sequence is synthesized)
atctacccccatcaaaaaaagcaggaaaaaattgacacaatgctccaagtgaaattaaacatcctcaaaccaatgtttggagatttgaaaaataaaattaagaaatattctgaaacaaat

SEQ ID NO: 1014482 - DNA, 120 bp, Artificial Sequence
  ENSG00000264895_6 (sequence is synthesized)
acaaagaacaaaaagcattaagaaatgaacacaaagtagattaaacagaaaaatagaagataaaatcataaccaataatgaagttttaacattcccacatttcaaattcaaatttaataa

SEQ ID NO: 1014483 - DNA, 120 bp, Artificial Sequence
  ENSG00000264895_7 (sequence is synthesized)
aaagtcttgaagaaaagcaggaaaacaggataattgagatgagatttttgttttgaaaattgaccaagttgaaatgggagatggatccaaagtctactgtatataattggtgtccttcaa

SEQ ID NO: 1014484 - DNA, 120 bp, Artificial Sequence
  ENSG00000264895_8 (sequence is synthesized)
gaagagaaaatatttaaaactataatccaagaaaactttctggaagtgaaaagagatctgaatctataccacagaagttcataccagaaggcacactcaaagatatttcctagtaaagct

SEQ ID NO: 1014485 - DNA, 120 bp, Artificial Sequence
  ENSG00000264895_9 (sequence is synthesized)
aaagatgcaaagaattctcagggtctccaggcaaagacgtgacatagaggcaagagaattagaccagtgtcagatttctcaaaagcaacataacaaagcaagacagtggagcagcatgag

SEQ ID NO: 1014486 - DNA, 120 bp, Artificial Sequence
  ENSG00000264895_10 (sequence is synthesized)
gaaagtgactgctagccaaggattttatatccagctaactgttgtccaggtattagggctgcagaacaacagtttgaacatgcaggaactcagggaatactgtactcgtttacccctcct

SEQ ID NO: 1014487 - DNA, 120 bp, Artificial Sequence
  ENSG00000264895_11 (sequence is synthesized)
gaggacactcgaaaaggatgactttcatctaaaagatatttgggacatttcctacaaaaagactgtgacaataagtatttcagatatctttttgaactaagattaaaaccaatagtaggg

SEQ ID NO: 1014488 - DNA, 120 bp, Artificial Sequence
  ENSG00000264895_12 (sequence is synthesized)
acctagagaatagtacataaacattatacattctgacaaagcagaaagaatgcaactaaaatataatgggatggaaaataaaaggaaaaactaaggccatgtgtggtggctcacacctgt

SEQ ID NO: 1014489 - DNA, 87 bp, Artificial Sequence
  ENSG00000264895_13 (sequence is synthesized)
ggtgggtggattacttgagcccaggacagtctctacaaaaaaaaaaaaaaaagtgtttaattagccaggcatggtggctcatgcctg

SEQ ID NO: 1014490 - DNA, 66 bp, Artificial Sequence
  ENSG00000264895_14 (sequence is synthesized)
acccagtctctacaaaaaaaaaaaaaaaagtgtttagtaggaggatcatttgagcccaggaggtca

SEQ ID NO: 1014491 - DNA, 120 bp, Artificial Sequence
  ENSG00000264895_15 (sequence is synthesized)
tgggcaacagaatgagaccctgtctagaactgttctttttcagaactagaataagaataattactgtaattgaagtaatatgagggagtcagaggctaccatctaaaactgaaagaccaa

SEQ ID NO: 1014492 - DNA, 120 bp, Artificial Sequence
  ENSG00000264895_16 (sequence is synthesized)
atagaaaagattaggtaagaaaaaaaatacagtgtactgtaaaagctattaatataaaggtaagcgtgacgaagactttccaaaatactgagagaaatttttaaagggacaaagaaaacc

SEQ ID NO: 1014493 - DNA, 120 bp, Artificial Sequence
  ENSG00000264895_17 (sequence is synthesized)
atgatggaacagaaaaaaaagtatacagtacataatgcataccctaatgataaaatatgtggagaattgagagcaaacataaaggccaggacaaatatgtaccaggcaaatagaaacccc

SEQ ID NO: 1014494 - DNA, 120 bp, Artificial Sequence
  ENSG00000250888_0 (sequence is synthesized)
gcaactgcagaaaataattttggcttatccgtctctccaaacagactatatataatttttaatatctgaattttaaaggcaaagaccaagatggttgaggatttgttaatgacaacatat

SEQ ID NO: 1014495 - DNA, 120 bp, Artificial Sequence
  ENSG00000250888_1 (sequence is synthesized)
ttagtataaatactgctctatgaatcactatactggtaggagcaggaagaagtggggagatggataagagaaaactggagagtaggtgggagaaaaagaggaatgtgtgggctgtttgag

SEQ ID NO: 1014496 - DNA, 120 bp, Artificial Sequence
  ENSG00000250888_2 (sequence is synthesized)
gtaaggcagagaaaagcgagtgatgctgttaacattgtatccaccagagtgatgctaaaagagaagcaacctcatccacagccaatatgtgttgagtgcctgccatacgcctagccttgc

SEQ ID NO: 1014497 - DNA, 120 bp, Artificial Sequence
  ENSG00000250888_3 (sequence is synthesized)
tataggcacttgggattcagcttcccaacttacggagtttccattctattggggaatataggcaaaagagaaattaaaagccctgttacattgattttatggcttctcctatccctcatt

SEQ ID NO: 1014498 - DNA, 120 bp, Artificial Sequence
  ENSG00000228176_0 (sequence is synthesized)
ccaacccagagagggaaggggactcacccacagtgactcagcaaggtcaccacagaggagggaacagaatctgggaatgtggagggatggaccaagctgtgagcctcagggccctcgtct

SEQ ID NO: 1014499 - DNA, 120 bp, Artificial Sequence
  ENSG00000228176_1 (sequence is synthesized)
gcaaaatgaggaaataaacactgcccaggcagttttgaaggaagatgtaaaagaacgacccacagcatctggccaagaacaggggctccacaaataacatcaacgggccaggcagtagcc

SEQ ID NO: 1014500 - DNA, 120 bp, Artificial Sequence
  ENSG00000228176_2 (sequence is synthesized)
tccagaagaccaagccctactcaggctcagcagccacccttgcccctttctgtggcccactctgtgtcatcgtctgaggaatggggcccagatgtggtttttttccacctggcagacacc

SEQ ID NO: 1014501 - DNA, 120 bp, Artificial Sequence
  ENSG00000228176_3 (sequence is synthesized)
tgctgacagcttctgtcgcttggcggctgtaattgcagtgctctctcccctttatgccctgctaggcacagactccatctgcctctgccagggagtttattaaatagtttattaaatctc

SEQ ID NO: 1014502 - DNA, 120 bp, Artificial Sequence
  ENSG00000233766_0 (sequence is synthesized)
tttaacttctctctgctttacagttacaagcggtaatacaaagagacaggattatatgatctccaaggtcccatccagcccatttaacacggcattgtggctctggagacctggaagcac

SEQ ID NO: 1014503 - DNA, 120 bp, Artificial Sequence
  ENSG00000233766_1 (sequence is synthesized)
tgctaactgttctctcgattttctgacgctcggccacatcaacctgtcatactagttgtgaggagaagtcaaggacagtgacacagccagccagtctgaggcattttccatcatcctgaa

SEQ ID NO: 1014504 - DNA, 120 bp, Artificial Sequence
  ENSG00000233766_2 (sequence is synthesized)
ggagttgccctatcctgcttttcactggagggggcatggatggatctggaatgtataattggagtagacattctcagcagctggcggaaaccccgcattggttccatgacatgtggaatg

SEQ ID NO: 1014505 - DNA, 120 bp, Artificial Sequence
  ENSG00000233766_3 (sequence is synthesized)
aaggctacgatggtaggaaaagataagtggaagctgctaaaactgcatttaccttgaaaaatattaaacacaaagaaacactacattcctggaaagactgcaccatcaaggacttgaaag

SEQ ID NO: 1014506 - DNA, 120 bp, Artificial Sequence
  ENSG00000233766_4 (sequence is synthesized)
gacagtggattattataagcttaactaggtgatgactccaattgcagctgctgtactggatgtggtttcattgctcgagcaagttaatacatcccctggtacctagtatgcagctattga

SEQ ID NO: 1014507 - DNA, 120 bp, Artificial Sequence
  ENSG00000233766_5 (sequence is synthesized)
tctagcaaatgcctttttctccttacctctcaataagaacaaccagaatcagtttgcttttagctagtaaggtcagcaatatagcttcactgtgctgcatcaggggtatgttaattctct

SEQ ID NO: 1014508 - DNA, 120 bp, Artificial Sequence
  ENSG00000233766_6 (sequence is synthesized)
accactatgtcataatttagtttgcaggaatctttatcacctttcccttccaaaagatatcacactagtctattacactggtgacatgatgctgatttgacgtagtgagcaagaagtagc

SEQ ID NO: 1014509 - DNA, 120 bp, Artificial Sequence
  ENSG00000233766_7 (sequence is synthesized)
aactactctatagttattggtaagacatttgcatgtcagagaatgaattttcaagaaaattcagtgaaatttctaggggtcagtatgtggagcatgtgagatattacttctaaggtaaag

SEQ ID NO: 1014510 - DNA, 120 bp, Artificial Sequence
  ENSG00000233766_8 (sequence is synthesized)
gataagttgatgtatttgcctcaccttcaaccataaaagaggaacaatgcctagtgggcctctttggattctggaggcaacatactccttatttgagtgtgttactctagtccatttact

SEQ ID NO: 1014511 - DNA, 120 bp, Artificial Sequence
  ENSG00000233766_9 (sequence is synthesized)
ccaggctaatccccagtcttgcgcctttggaccagaggttttctttgctcagaatactgtttcaacagatctttgcatagctggctctcgctatttgactaaaatgtcaatcctcagaga

SEQ ID NO: 1014512 - DNA, 120 bp, Artificial Sequence
  ENSG00000233766_10 (sequence is synthesized)
ggtactccttaaatatccaatcttaagtagcatccctttctcccaggatcctgtttttcagaactctgttttctttttaaaacacttgttatctgaaaggatgtcgtctgcttgcttgtt

SEQ ID NO: 1014513 - DNA, 120 bp, Artificial Sequence
  ENSG00000233766_11 (sequence is synthesized)
tgttcatttctttattgtctattccatctcaccccttctcaggatgtaagctgtttaaaggcaaggaccttatctgtgttacatgctgtattcccagggctcagacagagcatgacctat

SEQ ID NO: 1014514 - DNA, 120 bp, Artificial Sequence
  ENSG00000233766_12 (sequence is synthesized)
tttgaccgcgcgcgtgtgggcgctgaccttgcgggacttctccagcagcttgctcaccgtgttgctggtggaggcctggtacttggagagcttggtgaggtcattctggatgcccttcac

SEQ ID NO: 1014515 - DNA, 120 bp, Artificial Sequence
  ENSG00000233766_13 (sequence is synthesized)
ggagccctccaaactgatctgtcgctgctccatcttgtgctggttctcctgcacagcgtctagcatgttcaccagcttgtccaggagcgtgagcaccgtgactgcgttcacctgcattgt

SEQ ID NO: 1014516 - DNA, 120 bp, Artificial Sequence
  ENSG00000233766_14 (sequence is synthesized)
tgtgaactgacaagcccatggatgtctacaaagagtgaactgatcactgtgggctggcctttgaggcatcagtgagctccagtgcctgggacaatgcctgacacttagcagacagtcagt

SEQ ID NO: 1014517 - DNA, 120 bp, Artificial Sequence
  ENSG00000233766_15 (sequence is synthesized)
gaatgtgttatataaatgaatgaatacttggagcgtgagaatcagagcggcaaaaatatttgtccataatatgcctaaagataaaaacggaagcctcagaactagataagtgcattgtaa

SEQ ID NO: 1014518 - DNA, 120 bp, Artificial Sequence
  ENSG00000233766_16 (sequence is synthesized)
ttgaatgctgaattcacagagataacatctgagatttattaagcatcaagtcatgtcttaaaaattttatatacattttaggatttaactcttataaaaatcctgtggttacaagcggta

SEQ ID NO: 1014519 - DNA, 120 bp, Artificial Sequence
  ENSG00000233766_17 (sequence is synthesized)
tgccctatcctgcttttcactggagggggcatggatggggatcctggatgacaaagcagtcacctacttgaacactgctaattatgaagtcagaaagaggaaagtttgcagagttttgta

SEQ ID NO: 1014520 - DNA, 120 bp, Artificial Sequence
  ENSG00000233766_18 (sequence is synthesized)
ttggcaatcaaacattcagccacaggtcacagtctagaaccagacacatcagtgtcctcaactgcaaagtagccaggaagcagcatcccataacacagtcctatgtccactgttttggag

SEQ ID NO: 1014521 - DNA, 120 bp, Artificial Sequence
  ENSG00000233766_19 (sequence is synthesized)
tgtgaactgacaagcccatggatgtctacaaagagtgaactgatcactgtgggctggcctttgaggcatcagtgaggtgattattaagatagtcaagttaaagttacaagcggtaataca

SEQ ID NO: 1014522 - DNA, 120 bp, Artificial Sequence
  ENSG00000233766_20 (sequence is synthesized)
tcaagacctaagtgttttcttggaactgtgtttgttactgaggaagccacaaattaaatataagtctgctcttcaagaggttacattccagttaaggagattgcatatccatatttccag

SEQ ID NO: 1014523 - DNA, 120 bp, Artificial Sequence
  ENSG00000233766_21 (sequence is synthesized)
atgtgacacaaccatggtgatgaaaagaaatcagctgtggttggtggtgatagcaaagtgtaagctttcattgatacagaggcttactcatttctgcctttggttattgtgctgcttctg

SEQ ID NO: 1014524 - DNA, 120 bp, Artificial Sequence
  ENSG00000233766_22 (sequence is synthesized)
cttgctgtagccttcctgtttcaatgatgagaaggccaaaggaatctgtgagctgacccagagcccgcatgttgttgacaagccacagagttgcccaacctcttttattgttattttgat

SEQ ID NO: 1014525 - DNA, 120 bp, Artificial Sequence
  ENSG00000233766_23 (sequence is synthesized)
aggtaactcaactaaggtcaaaaagttggtcagggagctgggcctttatataaaacaccaaaatgagcccttgtgtagaacccttgagagagattttaatctaatggctgcaattttaaa

SEQ ID NO: 1014526 - DNA, 120 bp, Artificial Sequence
  ENSG00000233766_24 (sequence is synthesized)
ttgtgttcagttgtggtatgtagtttttcaaggaagatgacccacagcctttcttgctttctggctttggaaaaggtagagatgaccacttaaacattcaaggaaaataatccctgactt

SEQ ID NO: 1014527 - DNA, 120 bp, Artificial Sequence
  ENSG00000233766_25 (sequence is synthesized)
tgaaatcagaagatcattcagataatatacttacttataatcatcctctctaatgtctgactaaagcaagagtaaaagattgactgaacagcaacaaatactttaacagttaaaaataaa

SEQ ID NO: 1014528 - DNA, 120 bp, Artificial Sequence
  ENSG00000233766_26 (sequence is synthesized)
aaaagaataaaagcaggctgcccgagccggcagtggcaagctgctgggcttcccttccacattgtggaagctttgttcttttgctctttgcgataaatcttgcccctgctcactctttgg

SEQ ID NO: 1014529 - DNA, 78 bp, Artificial Sequence
  ENSG00000233766_27 (sequence is synthesized)
tgcccgccacgaaggtctgcagcttcacgaacccatcgggaggaacgaacaattccagacgcgctgccttaagagctg

SEQ ID NO: 1014530 - DNA, 64 bp, Artificial Sequence
  ENSG00000233766_28 (sequence is synthesized)
accgcgaaggtccgcagcttcgcaacatcagaagaaacaaactccaaacacatccgaacatcag

SEQ ID NO: 1014531 - DNA, 68 bp, Artificial Sequence
  ENSG00000233766_29 (sequence is synthesized)
cgatacttttcacactgcatgatgaagaaatttagctttattgttagggaattcctgaagattctgaa

SEQ ID NO: 1014532 - DNA, 120 bp, Artificial Sequence
  ENSG00000233766_30 (sequence is synthesized)
gttgcctggaattaagatttgtagaagagaagcctgaggtcattctcatttttgttcctttatggttctcagtgcctcatgagcgcaggattctggtgaccccatgagtcatgggaactc

SEQ ID NO: 1014533 - DNA, 120 bp, Artificial Sequence
  ENSG00000233766_31 (sequence is synthesized)
taaaaatcaccataggaagtcaagaaaaagacaccaacagaagaaagaaaaaaccctttaagggaacttcttcctgctttttgaactagggacttcacatatttcttttgcattgggccc

SEQ ID NO: 1014534 - DNA, 120 bp, Artificial Sequence
  ENSG00000233766_32 (sequence is synthesized)
cttatctgtgttacatgctgtattcccagggctcagacagagcatgacctatccattctgcagtgaaaaggacatggaccttggaattaaatttgagattgaactcaagatccacctcaa

SEQ ID NO: 1014535 - DNA, 120 bp, Artificial Sequence
  ENSG00000233766_33 (sequence is synthesized)
cctaccaacatatattcggcatgttacccacctctctgaaccttgctttccttctttgtacagatggaggaaagtcacgactaaccattctgttgtgaaagattaaataagatggtgcac

SEQ ID NO: 1014536 - DNA, 120 bp, Artificial Sequence
  ENSG00000233766_34 (sequence is synthesized)
gacactggtggaaaaagacagggcagactgtattttcttttcctttcagtcatttcttatcagcaagcaaaggtaggcagagttggtagaatgcgtgagcatcatgatgtgcaataaaaa

SEQ ID NO: 1014537 - DNA, 120 bp, Artificial Sequence
  ENSG00000233766_35 (sequence is synthesized)
cagttaaattcgttttgtgtaagtttccactattcttgtaagaatgaaatacacatgaatgtataagctatgagatacaaattgtgtaattttggtgattctatataaaaattagatgct

SEQ ID NO: 1014538 - DNA, 120 bp, Artificial Sequence
  ENSG00000233766_36 (sequence is synthesized)
taaaaataatactctggcatccacctcttctccccctccccccacgtccattctctacctaccatctctttcttaggggttgggggaagggagggaatttcagccattttgtcaagacac

SEQ ID NO: 1014539 - DNA, 120 bp, Artificial Sequence
  ENSG00000233766_37 (sequence is synthesized)
cttggccaacaaccaccaagagcctgagtattgccagcagacgcatgagtgagcttgcaagtggatcttccccctgctgagccttgagagaactgcagccctggctgacatcttgattgc

SEQ ID NO: 1014540 - DNA, 120 bp, Artificial Sequence
  ENSG00000233766_38 (sequence is synthesized)
agttgtaggaggaaccctaagtcagaagcacagctaagccacacccagattcccaacccacataaactctgagggaattcctgaagattctgaaattgtgaactgacaagcccatggatg

SEQ ID NO: 1014541 - DNA, 120 bp, Artificial Sequence
  ENSG00000233766_39 (sequence is synthesized)
aacattttactcatggacatgagatggtaaaacaagatgaaaatgattcttttattgggcattcaattaaaaaatgtcatgactttgccattagtttgtataaatcctagaaatgagttt

SEQ ID NO: 1014542 - DNA, 120 bp, Artificial Sequence
  ENSG00000233766_40 (sequence is synthesized)
aaattgctatgggatatctgaccaactggatattctgctggaagagcagaatgcacttcaaagactagccaataaaactctcatgggctcctgacacactgacctctgtcagttccttca

SEQ ID NO: 1014543 - DNA, 120 bp, Artificial Sequence
  ENSG00000250887_0 (sequence is synthesized)
ctttgtacaagcagatctcctgtgctgtcgccagctctcagctcatctgtcacttcctcctgacccaaacatcccctgctctccatgagaactcacctccctgacacagtgttatagagc

SEQ ID NO: 1014544 - DNA, 120 bp, Artificial Sequence
  ENSG00000250887_1 (sequence is synthesized)
agcggggagagtgccatgagctctcctactaaccctgcgactgtagtaaatgtgaccgtttggatatctgcagtcccagtaactgcgacctccatcttctcccggtcccgattctgtagt

SEQ ID NO: 1014545 - DNA, 120 bp, Artificial Sequence
  ENSG00000250887_2 (sequence is synthesized)
gtcaatccttgggaaccataataaacggcatctattttaaaatagccagatgccagtttggattccttcacaagttgccggctctcgttaggcagagcgggcacccagggagtcaggggt

SEQ ID NO: 1014546 - DNA, 120 bp, Artificial Sequence
  ENSG00000250887_3 (sequence is synthesized)
ctgagtcctactcccggcttacctggagcagatgattcagaatggtcttggacacggacctccaagagcgtcgaccgaggacactcttgcaccagactgaggtcagcgctgagacccaga

SEQ ID NO: 1014547 - DNA, 120 bp, Artificial Sequence
  ENSG00000250887_4 (sequence is synthesized)
tttatatgcaccagcagcaaggtcgcacttagggccccgtccaccgaggacttgcggccctgcccctgaggagcctgggcagggccaggctgtaaatgagctcctgatggattcggaccc

SEQ ID NO: 1014548 - DNA, 120 bp, Artificial Sequence
  ENSG00000250887_5 (sequence is synthesized)
aggacctctgaaaggctcagtggggcctctccaagtgccacccagctgtgtgcaggtttggagcacagcagtttcaccctgtctccctgatgcaatttctagcgctgcaggacgaggaat

SEQ ID NO: 1014549 - DNA, 120 bp, Artificial Sequence
  ENSG00000272049_0 (sequence is synthesized)
agaaagaaagaaaggaaagaaagaaaggcaagcaagcaagctacataccttcctcacaatttgcccacttggaaattccttgtgggctcaagatctttaccctaaaatggttctgttgaa

SEQ ID NO: 1014550 - DNA, 120 bp, Artificial Sequence
  ENSG00000272049_1 (sequence is synthesized)
ggctcaagatctttaccctaaaatggttctgttgaattttatcctgacagtgtaaattgatagcttatctaaacagttgcaggacaaaggacaaaaccgaaagtcatccctctgctcact

SEQ ID NO: 1014551 - DNA, 120 bp, Artificial Sequence
  ENSG00000272049_2 (sequence is synthesized)
ccccctccctgccaacatgtaaattgtgtattcagtgaaaggctgatcaaacacaaaaaagaatgaaacaatttgtctcttatctacccacaactttaaaagatgtattcctttttcccc

SEQ ID NO: 1014552 - DNA, 120 bp, Artificial Sequence
  ENSG00000272049_3 (sequence is synthesized)
aatatccaccctttccctttaaatattgaagccctcaaaataatctttggagaaaggcacagacatgtttgcttggtgtacatatttaaccttggcaaaataaacattctaaattcattg

SEQ ID NO: 1014553 - DNA, 120 bp, Artificial Sequence
  ENSG00000272046_0 (sequence is synthesized)
aggtcaggacaggcacacctgctttcccgcccaaacttcgcattttccaagaccaccctggctctccatgcccccattctgggcctataaaaacccaagacccttgcaggcagatacaca

SEQ ID NO: 1014554 - DNA, 120 bp, Artificial Sequence
  ENSG00000272046_1 (sequence is synthesized)
agtggctggacgtcctaatgaacaacacatcaggggaagaagacacaagcgctggtcatccataggagcaccccagcagaaggacacgctgacaggcacccggaagccagtaggccgtgg

SEQ ID NO: 1014555 - DNA, 120 bp, Artificial Sequence
  ENSG00000272046_2 (sequence is synthesized)
caggcacccggaagccagtaggccgtggaccagcgggaggaggcggaggttggcctgggcagtcaggggagagccggggctgccgagcaccccaactccaggggaaaaccatctcccttc

SEQ ID NO: 1014556 - DNA, 120 bp, Artificial Sequence
  ENSG00000272046_3 (sequence is synthesized)
taaaactttgcactcattctccaagcctatgggtgatccgattcttcaggtacaacaaggcaagaacccagatacagaaagccctctgttcttgccacaacgtagagggcctaattgagc

SEQ ID NO: 1014557 - DNA, 120 bp, Artificial Sequence
  ENSG00000272046_4 (sequence is synthesized)
gccctctgttcttgccacaacgtagagggcctaattgagctggttaacacgagccgcctatagatggcagactaagagagtatcctgtaacatgcccactggggcttcaggagctgtaaa

SEQ ID NO: 1014558 - DNA, 120 bp, Artificial Sequence
  ENSG00000272046_5 (sequence is synthesized)
gtcccacagcctgcccgtctgtatgctcccctggaggtctgagcagcggggcactgaagaagcccgctatgcccccatcgcgagccccgcgagggggaggagggagcctttgccttttca

SEQ ID NO: 1014559 - DNA, 120 bp, Artificial Sequence
  ENSG00000272046_6 (sequence is synthesized)
actggagacatcgaccgggatcctggaaggtgagtgtgtatgaattgcgaaactgtctggtcttcctctcttctgaaactctgccacctctctctctttcctgtgagtaagagactctgt

SEQ ID NO: 1014560 - DNA, 120 bp, Artificial Sequence
  ENSG00000272046_7 (sequence is synthesized)
ttcccttcagggagttttaaactgccctaaccggccgtcaaaacccccagactttaattataaaataagtaatgaacaattcttaatcagttataataacaatgataaattatgttattt

SEQ ID NO: 1014561 - DNA, 120 bp, Artificial Sequence
  ENSG00000272046_8 (sequence is synthesized)
aggctacaaacaatgagtgcatatttctgtaagcaaatatgctataggattttaaaataaattacctaatttaattattggataagttttattaactattattataactattccttaggt

SEQ ID NO: 1014562 - DNA, 120 bp, Artificial Sequence
  ENSG00000272046_9 (sequence is synthesized)
attataactattccttaggtgaaggcatagaggctctgaaagttcaaattatttgctctactaaccaatatacattttcaattatgaattggaaaatgtatgtctaaggaactcagtact

SEQ ID NO: 1014563 - DNA, 120 bp, Artificial Sequence
  ENSG00000272046_10 (sequence is synthesized)
aaattttttttcatgtatcaagtgcatttttagtatataaggagaatatgcattatatgttggcaagaagatgttgggataaatcaggaattattttttatcgatcctggtctagatata

SEQ ID NO: 1014564 - DNA, 120 bp, Artificial Sequence
  ENSG00000272046_11 (sequence is synthesized)
ctttatatgtattgttactttttttatcctgacaatgaagcctgtgaataagaaaaccattaaccgtcagagaaaaaagccattcacaggtatatagtcatctattttaattaagcatat

SEQ ID NO: 1014565 - DNA, 120 bp, Artificial Sequence
  ENSG00000272046_12 (sequence is synthesized)
tatatttaattaaatatagctaatagaattttctaaattttaccttttgttttcagtttagagaccaccaagaaaacaatgaaataaaatttacagatttatgccaattatttgttagaa

SEQ ID NO: 1014566 - DNA, 120 bp, Artificial Sequence
  ENSG00000272046_13 (sequence is synthesized)
atgccacattggaaatgaaagccacaaatatcagtactaacatttatgcatgtcaatatctaagaagcatctgaactctcttttttatattttgcttgaagtgtcagagaataccttcaa

SEQ ID NO: 1014567 - DNA, 120 bp, Artificial Sequence
  ENSG00000272046_14 (sequence is synthesized)
atcacaacttttttctttagttaactcctcctttgtattcagaagtgagtttagtcgtctcctaaatcttttctcttgcctccttgatttgttcaaatacctttatgccatcataagaat

SEQ ID NO: 1014568 - DNA, 120 bp, Artificial Sequence
  ENSG00000272046_15 (sequence is synthesized)
attcacttcttcttcaaagctttttcttagttataatattacatgcatttttgtaagtcttaatgtttgtctcatctactacatggtgaatttgaggagaacaaagatcatgcgtctttt

SEQ ID NO: 1014569 - DNA, 120 bp, Artificial Sequence
  ENSG00000272046_16 (sequence is synthesized)
ttgtggttgatattttaacatactctagctccaggacagtgtctggcacatagtacataggtaataagtatccaggaaatgaatgacaagatctattttcttaaacagaaaagtatttgt

SEQ ID NO: 1014570 - DNA, 120 bp, Artificial Sequence
  ENSG00000272046_17 (sequence is synthesized)
gaaatattactctttccttggcaaataaaaaccatgaaaacaacattttctatcaattgggcaaggatctgtgatggattgatggaaggagtaaacaaaggaataaaaataattgaggcc

SEQ ID NO: 1014571 - DNA, 120 bp, Artificial Sequence
  ENSG00000272046_18 (sequence is synthesized)
aaaaatctatttaccataaattacaaattctatactttgaacttctctcttgcttttttttttcaaatatgtataagtagctgcgggatgaataaactttttcacttttgaattatctag

SEQ ID NO: 1014572 - DNA, 120 bp, Artificial Sequence
  ENSG00000272046_19 (sequence is synthesized)
tgattctaaacacaaaggaccctggtaggattcagaaaacgtaagttgcattcagaattagtcattgaacatatgttattgtggtaagtagtgagcagcagaattagagttttgattgaa

SEQ ID NO: 1014573 - DNA, 120 bp, Artificial Sequence
  ENSG00000272046_20 (sequence is synthesized)
agtattttttcaaacctcctgtaagactgttaaagcctttttgtttctgtgtgggtcttaaactgtaaaacctaccagaaatttttacttttttagtttgctatgcctaggaaatggttt

SEQ ID NO: 1014574 - DNA, 120 bp, Artificial Sequence
  ENSG00000272046_21 (sequence is synthesized)
aaacaatttaaaattttggaaaacaacatgtattttcaacacatcgataagtcacacacacacacacacataaatatgatttctgattagcgctaggagattataaagctgaattgttaa

SEQ ID NO: 1014575 - DNA, 120 bp, Artificial Sequence
  ENSG00000272046_22 (sequence is synthesized)
tctattcagtaagagattttcacaaaatatattgaaaaagagaaataataaataaaaattatataccaatttgactgttaatttatgctgaggtatataaatgatgctacaactttcaca

SEQ ID NO: 1014576 - DNA, 120 bp, Artificial Sequence
  ENSG00000272046_23 (sequence is synthesized)
tctgggtcactcttgttgagaaatgcataaaggaggaaacaaagcatatagaatacatgctagaagaaaatgctttttcaacagaaaagaggtttgcttgttaaaagacaattaaaaaaa

SEQ ID NO: 1014577 - DNA, 120 bp, Artificial Sequence
  ENSG00000272046_24 (sequence is synthesized)
aatggatcagcagttgccaccttacacaagtcagaaggatatttatagctgaatattcagcctgtagctttccataaaagttttaaatatacattgaaaatctgaaggatcatcttcgaa

SEQ ID NO: 1014578 - DNA, 120 bp, Artificial Sequence
  ENSG00000272046_25 (sequence is synthesized)
atcaaccctatccattagtaatttacaatctatttactcttattcaattctaagtatgtctgtgagattttaaaatatattcagtgtttcccattatacttggagctttagagtattttt

SEQ ID NO: 1014579 - DNA, 120 bp, Artificial Sequence
  ENSG00000272046_26 (sequence is synthesized)
tcactctccatttgtgtatgtgagtggctataggagtgtttccttggaagttgtaggtgggtttttaggactgttatctatgagcatgcatggctataaacgcattaattgaagggtatt

SEQ ID NO: 1014580 - DNA, 120 bp, Artificial Sequence
  ENSG00000272046_27 (sequence is synthesized)
catgataacaggacagctctgacattgtttttgtcttgtaggatttgctctttatttggtgatgtaaaatttatcgtggtcgcattttgttaatgttaaaatattcttcaagaattcatt

SEQ ID NO: 1014581 - DNA, 120 bp, Artificial Sequence
  ENSG00000272046_28 (sequence is synthesized)
taactaagattgatcagaataactataactacaaagaaatgatatcatgaggaaaaaatcttttttgaaatacctaattatcactagtattaaataaataaaccttcaaatgattcagca

SEQ ID NO: 1014582 - DNA, 120 bp, Artificial Sequence
  ENSG00000272040_0 (sequence is synthesized)
gaagaatggagaagaattgtagggcccaagatcagagagatgagtagggccagatcatgtgggcaagcttttatgtattagcacgcttagaattaatattctgcttgagaactaacctga

SEQ ID NO: 1014583 - DNA, 120 bp, Artificial Sequence
  ENSG00000272040_1 (sequence is synthesized)
tatttgaaacagagtgaaaaagaaaatacctcccacagtatacttcatagcttcttatttagcccaagctgtcagggaaataaagtccagctatggctaagtttcacataatgcactgct

SEQ ID NO: 1014584 - DNA, 120 bp, Artificial Sequence
  ENSG00000272040_2 (sequence is synthesized)
ttggagtttttgtctcatctgttagagtaagataagtaccacatactattataaggctatatagcataaaatgatgatgcattttctcctgtcattgataagaggatttttttaaaagta

SEQ ID NO: 1014585 - DNA, 120 bp, Artificial Sequence
  ENSG00000272040_3 (sequence is synthesized)
aatttcttggtttagaatttgaaagcagtttcaaacttggataacacaattcagatctttttttaaaattattttttatttatattaaaaaaaaattttttttttgagatagggtctggc

SEQ ID NO: 1014586 - DNA, 120 bp, Artificial Sequence
  ENSG00000272040_4 (sequence is synthesized)
caccaccatgcctggctaatttttgtagagagggggtctcactttgttacccagactgggagatttttctgtacttggctgtatgctttccattgatctgctgctgttttcactattatt

SEQ ID NO: 1014587 - DNA, 120 bp, Artificial Sequence
  ENSG00000272040_5 (sequence is synthesized)
ttgatctgctgctgttttcactattattccttcttttgtgtgggtattttcttttgatttttagaattttacttgtaaacatgctacatatacatataatttggtgccctgtttttccat

SEQ ID NO: 1014588 - DNA, 120 bp, Artificial Sequence
  ENSG00000272040_6 (sequence is synthesized)
ttacatattatactttccatattagtacattgtctgatatttctgcataatactcaattcaacttacctgctattgtttttatcatatctctattacaaacattaggcccatttcccttt

SEQ ID NO: 1014589 - DNA, 120 bp, Artificial Sequence
  ENSG00000272040_7 (sequence is synthesized)
tttaaaagaggaaagtttgaggttatgggcggtgttctgataaaataaataatattttgtcatgtttgttttttcattgattaggaaacattgttttgaatttaatgcctcaaatttggt

SEQ ID NO: 1014590 - DNA, 120 bp, Artificial Sequence
  ENSG00000272040_8 (sequence is synthesized)
gcacaataatttgaagggaaaaactgacaagtttgaaatgaacattgatattacataatttacattaaaatgatacatcttttgtaaatttgtaagaagaataaataaatgaaaacctga

SEQ ID NO: 1014591 - DNA, 120 bp, Artificial Sequence
  ENSG00000272043_0 (sequence is synthesized)
ctagcttccgagggacttctctgcgagcaccgcaggcgtgtgcatttcttcgaatctgagaattccagcgaactcgggctctaccagagtttaagtcggcccctggggcgtctgtttgtt

SEQ ID NO: 1014592 - DNA, 120 bp, Artificial Sequence
  ENSG00000272043_1 (sequence is synthesized)
aatctccccaagcaaaagtgatataacttcaagtcgttatataagtggggggctccttcttcccctccctacgccgagccttctcattatcattccgggagtaaaatgtgtctcgctcaa

SEQ ID NO: 1014593 - DNA, 120 bp, Artificial Sequence
  ENSG00000249898_0 (sequence is synthesized)
agctgggccggctgcggacgcgggaagggaggtggtggcgactgacggaactgggtgaagcttctgcagatggcctcccctctctgcgactggttccttatcgaggcaatggagatgtgg

SEQ ID NO: 1014594 - DNA, 120 bp, Artificial Sequence
  ENSG00000249898_1 (sequence is synthesized)
actgcggtgactgatcaagcctcacatatctactgaatcaggaagcccgaaggcctgaggcctcccgagtggccccatgggagcgtcgtgcatttttctgggcccgatgacgatgctggc

SEQ ID NO: 1014595 - DNA, 120 bp, Artificial Sequence
  ENSG00000249898_2 (sequence is synthesized)
agttcacagagcttggccactggggggctgctggcaggcgagacaaacatcgctggctggtcggcaaagagggttccgcggtacggccctgcagacaagtggcactcgcttcggcacagc

SEQ ID NO: 1014596 - DNA, 120 bp, Artificial Sequence
  ENSG00000249898_3 (sequence is synthesized)
tgtggggcagacagagatagaattacagagcataataaataccgagcctcagcagctttcatgtgccttgcaggagacagtggcagcaggggcaaatgattcttcctggatggtgacttt

SEQ ID NO: 1014597 - DNA, 120 bp, Artificial Sequence
  ENSG00000249898_4 (sequence is synthesized)
ctagtcagtgggggaaagatatagcagtagggctagctgcattagaaataaggcccccttcccctcccttgtccagtgtgctctcgccattgttccatccgcgagatgcacccttctata

SEQ ID NO: 1014598 - DNA, 120 bp, Artificial Sequence
  ENSG00000249898_5 (sequence is synthesized)
aaagtaaattgccttggtgagaagacttctgcctgagtgctattttcacttggcagcactgagcatttacttccaacatcatcccatccaacagcctcacagttgccctgttatggctga

SEQ ID NO: 1014599 - DNA, 120 bp, Artificial Sequence
  ENSG00000249898_6 (sequence is synthesized)
acgagcttgtagtataggcctgggtagcatgaacacagattccagagtgagactgccagtgctgaaatgagacagttagtttttatttattccacttttgttctaggtttcactgaagaa

SEQ ID NO: 1014600 - DNA, 120 bp, Artificial Sequence
  ENSG00000249898_7 (sequence is synthesized)
atgttggtttcacagtgctgcccagattcccctgggctgttatctgcatattactttctgtctgatgggtcctctgggtagctgatacagacatggagttcaaagagcaagagatgacta

SEQ ID NO: 1014601 - DNA, 120 bp, Artificial Sequence
  ENSG00000249898_8 (sequence is synthesized)
gccatgcgtaaaactccaaggaaacaaattagaaaaaaaaaagtgtaggcctttgaattattccaaagcctcaaacaaaatattgaaaagcaactgttagcacagcagagccatagctag

SEQ ID NO: 1014602 - DNA, 120 bp, Artificial Sequence
  ENSG00000249898_9 (sequence is synthesized)
gctgaactctcactaaagtaacttggtgacgtgtgcaagtgacggcaagattctaatgcactgcaaatgccggctgtgctgggagagcgtcattcaatccagcgcgctccaggctgttgg

SEQ ID NO: 1014603 - DNA, 120 bp, Artificial Sequence
  ENSG00000249898_10 (sequence is synthesized)
cagaaaaggacttttataggatcataataaataccgagcctcagcagctttcatgtgccttgcaggagacagtggcagcaggggcaaatgattcttcctggatggtgactttaacaaaga

SEQ ID NO: 1014604 - DNA, 120 bp, Artificial Sequence
  ENSG00000249898_11 (sequence is synthesized)
cttcttctggggggcaccgatctccacctggccatgtcttcaagcccaaggagaagtcccaggatgggtctgagctaatcacggtgatcgcaatacaaatgactgcgctaagcatggcac

SEQ ID NO: 1014605 - DNA, 120 bp, Artificial Sequence
  ENSG00000249898_12 (sequence is synthesized)
agctggcctcaatcctggccaatgcaacgtgagaatcaattgctggtgggattctgggggagtttttctcactgttataaacagatgcaaagcagaaatacttctctttgctggacactg

SEQ ID NO: 1014606 - DNA, 120 bp, Artificial Sequence
  ENSG00000249898_13 (sequence is synthesized)
tcatgtctaatgtgacgcctggatcactgaagcccccagaggccacgggacacgctgaaaatggcccagtgggaaggcggaaagccttgggtcctgaaaaacacttctaagtcactgacg

SEQ ID NO: 1014607 - DNA, 120 bp, Artificial Sequence
  ENSG00000249898_14 (sequence is synthesized)
gaccaaactgaaatcatcctttattttgttcttttcatgtcagaaaaaaagacccctaaattctttaagtgacttttttgttaagtttttgtttctagaagcccaaaatatcctaataat

SEQ ID NO: 1014608 - DNA, 120 bp, Artificial Sequence
  ENSG00000249898_15 (sequence is synthesized)
aataattttaaataatccacctatttttggaaatagcttgttcatcattgagattatgaataatagatcagttctcacccctgccttccccaccatttaccagagttaacaactgtgaaa

SEQ ID NO: 1014609 - DNA, 120 bp, Artificial Sequence
  ENSG00000249898_16 (sequence is synthesized)
aattctctgtgtatttttaaaaatcctgtaaaatgcacacacaacacacacacacatttatgataatgcttgttcttaaccaaaaactgagatctaatctctatctcactatatggataa

SEQ ID NO: 1014610 - DNA, 120 bp, Artificial Sequence
  ENSG00000249898_17 (sequence is synthesized)
gggaagggaggtggtggcgactgacggaactgggtgaaggcagcagtctgtcaacaactatggcatccagctggtcagaaagactagaggatttgacattttgcggctgttctctagaac

SEQ ID NO: 1014611 - DNA, 120 bp, Artificial Sequence
  ENSG00000249898_18 (sequence is synthesized)
caaagaaatgagaacctcttggtaaaatccgctggtccaggagttattatctcctggattatctgccaaagaaattatctgccaaaattacaatgtaaaactgaagaagacaaccgataa

SEQ ID NO: 1014612 - DNA, 120 bp, Artificial Sequence
  ENSG00000249898_19 (sequence is synthesized)
ctcagttaaaattttggaaaaatacaaagaaactgtgactggggagaaatggattctttctttgattttataagctgacatgattgcttgttctgttgtgaatgcacgctgctctgggcc

SEQ ID NO: 1014613 - DNA, 120 bp, Artificial Sequence
  ENSG00000249898_20 (sequence is synthesized)
gctgtccacgggtgctttttctgcagtgttaacgtcatcttcatggtcggtatcatcacgatcaccttgattcagaaccattctggctatttccccaacagtcaatgaaatgaacaaccg

SEQ ID NO: 1014614 - DNA, 120 bp, Artificial Sequence
  ENSG00000249898_21 (sequence is synthesized)
gagcctcattatcaatgttaaaaatgacattaatgtgtacttcttcccgctgactgatgaactctgaaggtatattttttggaggtcagacatccttttcttctcacttgacaagctgaa

SEQ ID NO: 1014615 - DNA, 120 bp, Artificial Sequence
  ENSG00000249898_22 (sequence is synthesized)
ttcttctaaaccaccacctggttcatcatcatcactgaacacagtcgtaggccagaggtcacgccaggcacgcacatctgtgtctttagtcactgtgttgcaagcgttggcaacagcatg

SEQ ID NO: 1014616 - DNA, 120 bp, Artificial Sequence
  ENSG00000249898_23 (sequence is synthesized)
tatggcatccttcatgctcagctcctgaaaatcttctacacctacacctccgttcactgctgcgagcgtgcaattcaagacagtgtttttatatttacttttcattgatctaaagatacc

SEQ ID NO: 1014617 - DNA, 120 bp, Artificial Sequence
  ENSG00000249898_24 (sequence is synthesized)
ctccggccactgcgcatgctccccagctgggccggctgcggacgcgggaagggaggtggtggcgactgacggaactgggtgaaggattctttctttgattttataagctgacatgattgc

SEQ ID NO: 1014618 - DNA, 120 bp, Artificial Sequence
  ENSG00000249898_25 (sequence is synthesized)
attatctttgatgagaatttcagctggaggatgagcagaacagtagtcaaggcataagaaaatcttgctgtcatcatccggtccaacttttctgcagcgagcacaagaggcctgtacgaa

SEQ ID NO: 1014619 - DNA, 120 bp, Artificial Sequence
  ENSG00000249898_26 (sequence is synthesized)
gtgtttgtaaaaccgatcagaaaagatgtccctggtgatctatgcctttttgttagcataataatggactgcttctgcagatggcctcccctctctgcgactggttccttatcgaggcaa

SEQ ID NO: 1014620 - DNA, 120 bp, Artificial Sequence
  ENSG00000249898_27 (sequence is synthesized)
tcattaggggaaacgatgaatgagccaggccagcatgagaaggcctgcatgctatcggatctttttcctgaaaacatcgacatgggacatgttcaaaccaaattttctttataagttata

SEQ ID NO: 1014621 - DNA, 120 bp, Artificial Sequence
  ENSG00000249898_28 (sequence is synthesized)
aaagggagagtgaggcaatgcaaaagtagaattcctagagccattcccgaaacacgctgggtttgggggagagaggtgtctcgagattgtttcaatgagctgttgggaaacatttcagaa

SEQ ID NO: 1014622 - DNA, 120 bp, Artificial Sequence
  ENSG00000249898_29 (sequence is synthesized)
gcagggatgtgaagctgctctgcttctcattctggcaatgtgtggtcatctgtttgactcagaggaccgcgggaaggcccagttattctgaacacgcattttcctaactacgggttggta

SEQ ID NO: 1014623 - DNA, 120 bp, Artificial Sequence
  ENSG00000249898_30 (sequence is synthesized)
aagacttcttcagtgtacacaccctgcgagatgctatgggttatgtgccatccacgttttgttttgcgtattttccctgcttatttttcctacaatatctgaaattaatggttcacacaa

SEQ ID NO: 1014624 - DNA, 120 bp, Artificial Sequence
  ENSG00000249898_31 (sequence is synthesized)
attagagatttgaggggatgtatttcggggaagggatgaagggaccttctcagaggagtataacctggggtggggtgacgtcggggtcctctcagtcaggggcagcaggcaaggctgacc

SEQ ID NO: 1014625 - DNA, 120 bp, Artificial Sequence
  ENSG00000249898_32 (sequence is synthesized)
tcggaggcaggggtagggtgcaggttgggggaagagcagcaaagagtaaattccacagcccacatcactcacaaaatcagagaaacagtgaactattcttctgctaggttttcctactac

SEQ ID NO: 1014626 - DNA, 120 bp, Artificial Sequence
  ENSG00000249898_33 (sequence is synthesized)
tgtaatatttaacaaaagaggatcctactgtgaaaatatagctccagcatcaatggagtagatccgatacacttatatatgctcatggaatttgcttgttctctccccttgtgttgaatt

SEQ ID NO: 1014627 - DNA, 120 bp, Artificial Sequence
  ENSG00000249898_34 (sequence is synthesized)
cttatgcgtgcctgctgcatttgcacagcactgcacagtcattctgtccttggcatccttaattcctgtaggggctgtcccgtcagctgtagtcagcatctttctggggcagtagcaccc

SEQ ID NO: 1014628 - DNA, 120 bp, Artificial Sequence
  ENSG00000249898_35 (sequence is synthesized)
aaatggtcatgtctcatcagcaatacagacttgttctggcatcagattttcattagcgataatcttggcaaactcgtcaatgagtttcgacgctgccttgtgatctgcagatgctttaaa

SEQ ID NO: 1014629 - DNA, 120 bp, Artificial Sequence
  ENSG00000249898_36 (sequence is synthesized)
ccatgtcatttcttaaatttctgcaaccagcctgttgaatattcacagttcccttcaattttcagttcatcaggatagatcttcgcttgtttcatgatcagcctaccactgagtggcacg

SEQ ID NO: 1014630 - DNA, 120 bp, Artificial Sequence
  ENSG00000249898_37 (sequence is synthesized)
ggttcagtgtgatgccttcagatctagtttttcaatacactattcacatcttcatttttagctttacgtagagtttttctatttttcattaacttctgctcatcacattcagcatagaac

SEQ ID NO: 1014631 - DNA, 120 bp, Artificial Sequence
  ENSG00000249898_38 (sequence is synthesized)
ttcaaaagcgtatccttctgtttcttcaggtcatgtatggtggtcatcccaacaccatactcttctgtaagacgcttcacacttatactgctgttcagttcctccaacaagttgactgtt

SEQ ID NO: 1014632 - DNA, 120 bp, Artificial Sequence
  ENSG00000249898_39 (sequence is synthesized)
tgtgctattgataaacataaattattcctctttttctgatcactgttacacatagggggatctgcaggccttttcgacattttcagtaatatttttacatgacactgcagagaataagca

SEQ ID NO: 1014633 - DNA, 120 bp, Artificial Sequence
  ENSG00000249898_40 (sequence is synthesized)
aaaaaccacagtgagtaatgcatggagttctcggccccacgtgaggtatcgtggggaatctgcgttgggtgcgtccagcctgcacacgtgccattttattacacattgtgggcgtgcttg

SEQ ID NO: 1014634 - DNA, 120 bp, Artificial Sequence
  ENSG00000249898_41 (sequence is synthesized)
tgtgggggaatttgggtgtgcatggaaaagttatactatagttgaagggggctgggtgggtcttttttttcccttggggacgctaaatcaactgtgtcgtgcacctgtgctttgactatg

SEQ ID NO: 1014635 - DNA, 120 bp, Artificial Sequence
  ENSG00000249898_42 (sequence is synthesized)
ccctgtcacatgaggtcaggtgtggaattttccacttgtgttgacagattggcactcaaaaagtttaagatatcggagcatttcagattaaaattaggaatgttcaacctgtattacatg

SEQ ID NO: 1014636 - DNA, 120 bp, Artificial Sequence
  ENSG00000249898_43 (sequence is synthesized)
gctagccttgaatccactattatttactatgttttctgttacattttataattgtttatcattgggtatacaaatgctaaagatttcagtgagtggatcttacaaagaggaattttgctg

SEQ ID NO: 1014637 - DNA, 120 bp, Artificial Sequence
  ENSG00000249898_44 (sequence is synthesized)
aatgagttgtaacagtttattgactctctttgatgtttctatgtagacaactgtatgacatgcaaacaaaatgtgtcccttcctgtataattcttgtaatttttttttattttattccct

SEQ ID NO: 1014638 - DNA, 120 bp, Artificial Sequence
  ENSG00000249898_45 (sequence is synthesized)
tgactaggaatcatagaacactgttgaagagtaatagcattcatgtgtgtcttgtacatgatttaagccttaaactaaggttttcaccattcaatatttgttgtacgttttttatagata

SEQ ID NO: 1014639 - DNA, 120 bp, Artificial Sequence
  ENSG00000249898_46 (sequence is synthesized)
ttgtgctgtgacactgccttcagaattctgatcttggccaattttcctatccagcaaataaagcaccatttcccccacactggtacattttaaaaagttagctgtgaattctaagctgca

SEQ ID NO: 1014640 - DNA, 120 bp, Artificial Sequence
  ENSG00000249898_47 (sequence is synthesized)
aatattagatgcagcaggcggtgttctcattgtatcaccactggctctcgccaaggagcctgtgtgttacctggagatcaaggcgaaaagcctcaaacgcacaaattctgaagtcaactt

SEQ ID NO: 1014641 - DNA, 120 bp, Artificial Sequence
  ENSG00000249898_48 (sequence is synthesized)
acttgctgtttattattttcatggatttttcaatacccttggtaatcgcaatttacagcaatgtgctctaaactctaacttcagctgggcaaagtggctaacacctgtaatcccagcact

SEQ ID NO: 1014642 - DNA, 120 bp, Artificial Sequence
  ENSG00000249898_49 (sequence is synthesized)
tagattagatagatagatagatagatggatgatagacagacagacagacagacatagataagcaagcccggcatggtgtcacatgcctatagtttccgctacttgggaggctgaggtggg

SEQ ID NO: 1014643 - DNA, 87 bp, Artificial Sequence
  ENSG00000249898_50 (sequence is synthesized)
aactgtgattgtgacccttcactccagcgtacaactccccacccccaacaaaaaccaatgattctaatttcattgcaaacctttaca

SEQ ID NO: 1014644 - DNA, 120 bp, Artificial Sequence
  ENSG00000249898_51 (sequence is synthesized)
acaaaaaccaatgattctaatttcattgcaaacctttacacacacacacacatgcacacaccccagaaacaggagtgcgtgcaggacatgtggaggggacagacgtaagttggggaacga

SEQ ID NO: 1014645 - DNA, 120 bp, Artificial Sequence
  ENSG00000249898_52 (sequence is synthesized)
tggctcggtggcatcgtgttgttttatttttgttgttacctcagtgaaaacctcagatataaccaggctcatctatttatatattgacccagaagtttctagctaaaaaatgttaaaaga

SEQ ID NO: 1014646 - DNA, 80 bp, Artificial Sequence
  ENSG00000249898_53 (sequence is synthesized)
atattgacccagaagtttctagctaaaaaatgttaaaagataattttttaaaaatcataacttttgggaagctgaggcag

SEQ ID NO: 1014647 - DNA, 120 bp, Artificial Sequence
  ENSG00000249898_54 (sequence is synthesized)
gaactgttgcagtttacttccttttttatgaaaagaatagactgaatgtaaggctgccatgctcctgtgaattttgaattctgagaatccagagaagatgatgacattaatgacataaaa

SEQ ID NO: 1014648 - DNA, 120 bp, Artificial Sequence
  ENSG00000249898_55 (sequence is synthesized)
gataggcagtggaaagggctactgatttaatttgcagacaaagagactgagctgatgcaaggcaagagatttgctttggcaaatggtgagtcacactgcaagaaaaagccatggtcccta

SEQ ID NO: 1014649 - DNA, 120 bp, Artificial Sequence
  ENSG00000249898_56 (sequence is synthesized)
gcatcacggggccaagctgcatggaaatggaatcaagaaagagtatctttcattttaaagtaggacacacatacattcaaaaagttaattatgaaagtatctggccgggcacggtggctc

SEQ ID NO: 1014650 - DNA, 90 bp, Artificial Sequence
  ENSG00000249898_57 (sequence is synthesized)
ctgggaggtggaggtggcagtgagcagacacagcaggactctgtctcaaacaataaaataaagtatttgattgttgaagcaatacggaag

SEQ ID NO: 1014651 - DNA, 120 bp, Artificial Sequence
  ENSG00000249898_58 (sequence is synthesized)
tgttacagagatttccctggggtgccagagagtggtatgtggctgcaacactaatcccatgccttggtttcactacggacgaagtagggggctacgggacgcaaaatattgtgaagcgga

SEQ ID NO: 1014652 - DNA, 120 bp, Artificial Sequence
  ENSG00000249898_59 (sequence is synthesized)
agtcactgacagatgaagagcctttccatcctgaaaaagagagtcctctcactcattctgtcttttgggaatttatttggaaagaacataggctttggaaccagagagatggaatttgaa

SEQ ID NO: 1014653 - DNA, 120 bp, Artificial Sequence
  ENSG00000249898_60 (sequence is synthesized)
tctcccctctgctacttagacgtgggtgaccttgggcaagttacttaacccttaatagcaggcatttcttcttctctaatagtggttctgcggattgaatgaggcagcagtctgtcaaca

SEQ ID NO: 1014654 - DNA, 120 bp, Artificial Sequence
  ENSG00000249898_61 (sequence is synthesized)
caggagggctaaagggagccctcatgctatcaaccaaaatctctgttaaattccaaacataaaatatcttttctcactgttaaaatgtctaagcagtctccactagcagcccccgtcctg

SEQ ID NO: 1014655 - DNA, 120 bp, Artificial Sequence
  ENSG00000249898_62 (sequence is synthesized)
gacacaggagcactgccctgcctggccgtcaggtgctcccataagcatcattcagacagcgaggggggcagtggaggattcgggggcaggagatggggtggtggagagaaggatgtaacc

SEQ ID NO: 1014656 - DNA, 120 bp, Artificial Sequence
  ENSG00000249898_63 (sequence is synthesized)
atcaaaagtccattttccctgctgaagctacccatggaacttttaaattgggtgcagatttaaaaattaatacaaaatatttgaataatcggggatgtatcaaatgttcataaattacag

SEQ ID NO: 1014657 - DNA, 120 bp, Artificial Sequence
  ENSG00000249898_64 (sequence is synthesized)
ctccaactaggaatgcctaaggaactgttccttccgtttaattgtcctctttgtctatcaaaaagacagccactcgcgtgcctcttctaaacagtcaaataccatcctaagctctcatgg

SEQ ID NO: 1014658 - DNA, 120 bp, Artificial Sequence
  ENSG00000249898_65 (sequence is synthesized)
aaaatctcaagaggcttattggttgactaattctaaacctctgtttgctcaaaggacagtgtcagctacaatttttcatttgcttttgtattccatttatttttctttacagctttggga

SEQ ID NO: 1014659 - DNA, 120 bp, Artificial Sequence
  ENSG00000249898_66 (sequence is synthesized)
gatgtgtattatacttcttttcttttaatgattatcttggaaattgtttatatatacttaacagtctacagtgaaggactatttaccatccttctgaataacacaaagattttaggacag

SEQ ID NO: 1014660 - DNA, 120 bp, Artificial Sequence
  ENSG00000249898_67 (sequence is synthesized)
tggtccccagcctttttggcgccagggaccagtttttccatggaccagggtgcagggggatggtttcaggatgattccagcacattacatttattgggcacttcatttctattattatta

SEQ ID NO: 1014661 - DNA, 78 bp, Artificial Sequence
  ENSG00000249898_68 (sequence is synthesized)
taatgaaataattatacaactcaccatcatatagaatcagtgggtgtcctgagcttgttttcctgcaactgcaggcat

SEQ ID NO: 1014662 - DNA, 61 bp, Artificial Sequence
  ENSG00000249898_69 (sequence is synthesized)
cgctgatctgatgggaggtggagctcaggtggtaatgtgagcagtggggagtagctgtaaa

SEQ ID NO: 1014663 - DNA, 120 bp, Artificial Sequence
  ENSG00000249898_70 (sequence is synthesized)
ggggagtagctgtaaatacagatgaagtttcgctcatttgcctgcccacggctcctaactcttgctgtgcagcccagttcctaacatatccgttggtggcccaggggttggagaccttgt

SEQ ID NO: 1014664 - DNA, 120 bp, Artificial Sequence
  ENSG00000249898_71 (sequence is synthesized)
cttagaatggttttcctccgttgatcactgcttctagcttgtgtgctactgggatacaatattttgaatcaatctctgtttttaacctcacagattgtgtaattatcagtatctgcttaa

SEQ ID NO: 1014665 - DNA, 120 bp, Artificial Sequence
  ENSG00000249898_72 (sequence is synthesized)
tatgtatttagattagtcatatgtttaccattttgtttagctgccaaacgtcattgcatttcagactttctttctgggagcgtctcattcttcctgaagtacatcatttaaatgtgcctt

SEQ ID NO: 1014666 - DNA, 120 bp, Artificial Sequence
  ENSG00000249898_73 (sequence is synthesized)
taagtttggtggcaaacagtctcaatttctgtttatctcaaagtgcctttattctacctcatttttggtagtttcactggatttgtgatttttaaatctataattattttctagcacatt

SEQ ID NO: 1014667 - DNA, 120 bp, Artificial Sequence
  ENSG00000249898_74 (sequence is synthesized)
gaaggtatttcactttcttccatgttccattgttattaaaaagactcctgtcagtcttattgacattcttttgtagataatctgttttttcactattttatctatgtatgaatttaatct

SEQ ID NO: 1014668 - DNA, 120 bp, Artificial Sequence
  ENSG00000249898_75 (sequence is synthesized)
atttatgaatttcatctatgtatttcatcatgtatgaatttaatttatttctcttgcttgatatattatattgcttcctgaactctgaaaaattcttggccattatttcttagtctatta

SEQ ID NO: 1014669 - DNA, 120 bp, Artificial Sequence
  ENSG00000249898_76 (sequence is synthesized)
aatattctttaaatactgctgtcttgctgttactctactatttaattctgaaacttaaaatgaatatatgttggactttatttttcattttcttaacttctcttgcgtatttttaatttg

SEQ ID NO: 1014670 - DNA, 120 bp, Artificial Sequence
  ENSG00000249898_77 (sequence is synthesized)
tctttctgttacgcatcctgagcaatgtctttggatataatttccagtttacaaattctcttttgagctgtgtctaatgtgttattttttaaaatttttttcagagacagggtcttgctc

SEQ ID NO: 1014671 - DNA, 120 bp, Artificial Sequence
  ENSG00000249898_78 (sequence is synthesized)
tgttgccaaggctgtagcacagtggtgccatcatagcacactgcagcctctaattagcagattatgttttcataaaatgttttttatctttgaccatttaaaaatttgggagtttatctc

SEQ ID NO: 1014672 - DNA, 85 bp, Artificial Sequence
  ENSG00000249898_79 (sequence is synthesized)
tttttatctttgaccatttaaaaatttgggagtttatctctcctctcctttcctttccttccttctctctttttctttctttctc

SEQ ID NO: 1014673 - DNA, 120 bp, Artificial Sequence
  ENSG00000249898_80 (sequence is synthesized)
tcccttcctcccttcttccttctttccatgagatcttcctatgttgcctaggcgtaccacctatttacttactaccattgcataagtcacttatctctctctccattttgattgtctgaa

SEQ ID NO: 1014674 - DNA, 120 bp, Artificial Sequence
  ENSG00000249898_81 (sequence is synthesized)
gcttgatgtcgactagatttctcaggaaagactcagcaataatagtccctgagttctggcatgttgataaaagtttgtcttttattaattagatataaaattcttgtttcatatattctt

SEQ ID NO: 1014675 - DNA, 120 bp, Artificial Sequence
  ENSG00000228170_0 (sequence is synthesized)
ttttttttatgtttttatttttttttaagacaaggtcttactctgttgcccaggttggagtgcagtgatgcaattacagctcactgcagctttgaattgggctcaagtgatcctcccacc

SEQ ID NO: 1014676 - DNA, 120 bp, Artificial Sequence
  ENSG00000228170_1 (sequence is synthesized)
ctcccacctcagcttcctgagcacctgggaccacagatgtgtgccacttcgcctggctaattttgaaaaactcttttttgtagagccggagtctccctatattgcacaagctggtcttga

SEQ ID NO: 1014677 - DNA, 120 bp, Artificial Sequence
  ENSG00000228170_2 (sequence is synthesized)
ttcaatatgtcattattctcatttggttaggataagattgaagggaggggtagaaagtttcaaaggcggagagtttcaaaggcatcatgttaacaggcagcaacacgatcaagccccaca

SEQ ID NO: 1014678 - DNA, 120 bp, Artificial Sequence
  ENSG00000228170_3 (sequence is synthesized)
cgaaggaaccaccaagactggagtgtgcattctcattgtaggaagtcttctgctaacttgttgaattcatctgcaaaacgcaaatgcaggaaatgattacctaatggatcaaattggtcc

SEQ ID NO: 1014679 - DNA, 120 bp, Artificial Sequence
  ENSG00000228170_4 (sequence is synthesized)
ttcaatcacaaccattttgtaacaatgcactccaagattagatcttagctactctattttctcagtaattaaaaaaaaatgagattataaacataaacagctgtatgaaaataaactata

SEQ ID NO: 1014680 - DNA, 120 bp, Artificial Sequence
  ENSG00000249894_0 (sequence is synthesized)
gccatcttggctcctccccccagatgaggaagctggaacttgtaggggatttaagaacctagccacacatcaagcacttggtaagaggtgaagctatctatggtttggtgactccaagct

SEQ ID NO: 1014681 - DNA, 120 bp, Artificial Sequence
  ENSG00000249894_1 (sequence is synthesized)
ttcagctttacattattctgcctctcctcatctgcttctgcaggcggtcatgttagcacagatcaaagtcatgccatggtcccagtaccttttttcttttcaaaagttatctcaagttgt

SEQ ID NO: 1014682 - DNA, 120 bp, Artificial Sequence
  ENSG00000249892_0 (sequence is synthesized)
gtgttcagacagtgttatgaggactctgcctctgcatctttcatttctgcctcaacatcagctgctgcttcagtaggctcagaacgtgctacactgagacagcaacattactctatccat

SEQ ID NO: 1014683 - DNA, 120 bp, Artificial Sequence
  ENSG00000249892_1 (sequence is synthesized)
tcagaatcaaaagggagtaaactttgtccaaaatttttagcaaagttcatgtgtgtatctcaagagcattccacaacaaagattctgcctgcaatcctccacttcaagccatgtgaaggg

SEQ ID NO: 1014684 - DNA, 120 bp, Artificial Sequence
  ENSG00000249892_2 (sequence is synthesized)
tgattgtaaatttcctgaggcctccccaaaagctgagcagacgtcagcatcatacttccttaacagccgatggaattgcaaactgaagcagcattaatttcttaaaacagaaatttacac

SEQ ID NO: 1014685 - DNA, 120 bp, Artificial Sequence
  ENSG00000249892_3 (sequence is synthesized)
cttaaaacagaaatttacacttcaataactaatgatgtttccaacattccaagacttccagcagtatagatgctatgccacaaaatcctgacattgggccgggcatggtggctcacacct

SEQ ID NO: 1014686 - DNA, 62 bp, Artificial Sequence
  ENSG00000249892_4 (sequence is synthesized)
gggaggccaaggcaggaggatcaccttgggtcaggagcttgagaccagcctggcaaatataa

SEQ ID NO: 1014687 - DNA, 80 bp, Artificial Sequence
  ENSG00000264278_0 (sequence is synthesized)
gcggggccttagcggacggaggggagcgcgggggtcaccgggccgggccggcagccctagagctcggcctggcggggacc

SEQ ID NO: 1014688 - DNA, 120 bp, Artificial Sequence
  ENSG00000264278_1 (sequence is synthesized)
gtctcgtgcgtgtccgcgaactcgcgtgcgcgcgtcacctcggaccgcagcatggctcggagggcggccctactcgcgccgccctagtgctgcgaagggcctcggagcccaaacccggaa

SEQ ID NO: 1014689 - DNA, 120 bp, Artificial Sequence
  ENSG00000264278_2 (sequence is synthesized)
ccgccatctgggactgggaagacgacatggccagaagccgactggacagccggcaccaccccatgattcaaggatggccatagcccagtgcaggagcagatttgcttccagtttgccctt

SEQ ID NO: 1014690 - DNA, 120 bp, Artificial Sequence
  ENSG00000264278_3 (sequence is synthesized)
tagcccagtgcaggagcagatttgcttccagtttgcccttcctcctagagttttgctcttgtcgcccaggctacaggacaacagtggcgttatctccgctcactgcaacctccgcctccc

SEQ ID NO: 1014691 - DNA, 120 bp, Artificial Sequence
  ENSG00000264278_4 (sequence is synthesized)
acacacgtgctcaactcgtggaaaatgaacagcagagctgttctccagagatgttcagatctgcagcccagggcttttttctgtatgacctttacccacaacagctccgactccaatttt

SEQ ID NO: 1014692 - DNA, 120 bp, Artificial Sequence
  ENSG00000264278_5 (sequence is synthesized)
ttgagtttatacctggatcctacaccacccttctccagccctgtggtccttgacattgtttctttattcatctgcaccaaggactgaggcagaagtaacaatctgtttcaacaacatcta

SEQ ID NO: 1014693 - DNA, 120 bp, Artificial Sequence
  ENSG00000264278_6 (sequence is synthesized)
cattcagaacatactagaagatacagcacacttcttacacggatcagcaattcagaaatgttctcttctcattttattgcttagagcttcacgttggtgggaagcttgtttggtcataaa

SEQ ID NO: 1014694 - DNA, 120 bp, Artificial Sequence
  ENSG00000264278_7 (sequence is synthesized)
aagaactgccaagcacagatacgctatgaccctgcaggttcctggggagaggcaacacatcttcattggagaggacagttgaatatgtctcctctgacacaactacacagacccctttcc

SEQ ID NO: 1014695 - DNA, 120 bp, Artificial Sequence
  ENSG00000264278_8 (sequence is synthesized)
aagctctgcagccatcctccccacctaatgaaataaaatgtagatttctgttgtttaattgcacctaataaatcttttttttctttcaaccactttgaataaacatatattgtcaatcaa

SEQ ID NO: 1014696 - DNA, 120 bp, Artificial Sequence
  ENSG00000234948_0 (sequence is synthesized)
gatgacgcacagtgctggcgcaagtcgtcttgcgccaggcgactgggtctgaggaggcaggagttattcattcccttaagctttcaggccggggggagaatctttcaggtggtagctgca

SEQ ID NO: 1014697 - DNA, 120 bp, Artificial Sequence
  ENSG00000234948_1 (sequence is synthesized)
agaactcttagtatgttgacctcacctctgccttccacataccactaccagtgaggaattaggaatgcatgagaagagtgtccaagaagagtgtcctcattcatgcaaggcttaagagag

SEQ ID NO: 1014698 - DNA, 120 bp, Artificial Sequence
  ENSG00000234948_2 (sequence is synthesized)
accatgtcaatcagagctttcagagtgactaaccataccagtttgaccaagactgtattggctgcagcacttaaaagctcacatcccggaaatcctttggtcctcggtgaattgggatgg

SEQ ID NO: 1014699 - DNA, 120 bp, Artificial Sequence
  ENSG00000234948_3 (sequence is synthesized)
ttggttaccctattactgatgattgtaattctcagcgtagtttggaaccagcagcagcagcagctccccagacctactgaatcagaatctacattttgataagagcccagggtgactcca

SEQ ID NO: 1014700 - DNA, 120 bp, Artificial Sequence
  ENSG00000234948_4 (sequence is synthesized)
tgtacgtgaaaaagtttgagaagtccttagacctacagttcacagcttctccttctttcttattcaactgaattgcagtgggacctgagtatggttaaaataaatgaataaaaacacaaa

SEQ ID NO: 1014701 - DNA, 120 bp, Artificial Sequence
  ENSG00000234948_5 (sequence is synthesized)
aacatcaccatgtcaatcagaggaaagagatcttcatgtaaacagagtccctcttattggctgaagtgaagagtcattctgaggcatctcaagatgaaggtttcctatttgtgattatga

SEQ ID NO: 1014702 - DNA, 120 bp, Artificial Sequence
  ENSG00000234948_6 (sequence is synthesized)
ttctcactagggctacaaagtgcatagaatgcatgttggatgctctgttactgtgaagggagagtcacccagataataaagccagcattgaggtaagcagagatgaaaattagagaaaga

SEQ ID NO: 1014703 - DNA, 120 bp, Artificial Sequence
  ENSG00000234948_7 (sequence is synthesized)
attctgatgaaatcttgaaatggctggatctggtcctgggaggtaggcttattgcaaacaattccatgataagtaagacaataaagtccctttttttgctaaaatcagattaaattagat

SEQ ID NO: 1014704 - DNA, 120 bp, Artificial Sequence
  ENSG00000234948_8 (sequence is synthesized)
gttgacatctgctgccaaaagaatcccaaataaaacatttcctttaggataaattcccctgtactccagaacaatctccctcagaaactggagtggctcatgatggtatttcaaactaaa

SEQ ID NO: 1014705 - DNA, 120 bp, Artificial Sequence
  ENSG00000234948_9 (sequence is synthesized)
gtgccaatgactaggaatgcttgctgactcaaccactggaatgttctggagatgaaattgatatttgaaagcaactggagggtgactgacagttggtaggtacttaaaaaatatcctgag

SEQ ID NO: 1014706 - DNA, 120 bp, Artificial Sequence
  ENSG00000234948_10 (sequence is synthesized)
tcagaggttgaagttggagaccaaatcgtgtacctcgctctcctggcacaggaaattgtgtccaatgagggatattaaaactgttaaaccacaagcaccagccagtcaggagagaaaccc

SEQ ID NO: 1014707 - DNA, 120 bp, Artificial Sequence
  ENSG00000234948_11 (sequence is synthesized)
aggctgccagaacacatgctggaaatgaaccactggcatcgccttgccagagtgtagcagttgaatgtggccttaaatgcactcatgctgctagtgcatttggtatgcttttaatcacat

SEQ ID NO: 1014708 - DNA, 120 bp, Artificial Sequence
  ENSG00000234948_12 (sequence is synthesized)
agttgtcttagatagggactagtcgagtccatcacatgtacttttaatgtctatcaattaagcatatataaagcaaaggagaacaagagaaacaatttaataaagctagtgaatacactc

SEQ ID NO: 1014709 - DNA, 120 bp, Artificial Sequence
  ENSG00000234948_13 (sequence is synthesized)
cagagggaatgtaggatgggaaatgagaatttgctgtttcttcagttggtctttgttcctgcatttcacccaaagactgagcagttccccctatctgctgcggttctaacactgaaagag

SEQ ID NO: 1014710 - DNA, 120 bp, Artificial Sequence
  ENSG00000234948_14 (sequence is synthesized)
gtatattggtcttctaacatggtccttaaatgtaagtaagctataatgtgaacttgaaaagcaaccatctgtttcaatattgtaggaaaaatggtctgtgatgggtttactgggagatgg

SEQ ID NO: 1014711 - DNA, 120 bp, Artificial Sequence
  ENSG00000234948_15 (sequence is synthesized)
gttgtgagtagttgacatgacactctaaaaagataattttggccatttgtaaattgcacttcatgtgccgcctttagagctcaactcctgtgtaagttgccacttcactatgtttgcatc

SEQ ID NO: 1014712 - DNA, 120 bp, Artificial Sequence
  ENSG00000234948_16 (sequence is synthesized)
ttgtacctggccaaccagtgcaccttcaatttagaaagtatcatgaagccgccttctaggaagatgaaagtcaatgtaaaaccatgcaaaaggatccccttcttaaagtcaccattgatt

SEQ ID NO: 1014713 - DNA, 120 bp, Artificial Sequence
  ENSG00000234948_17 (sequence is synthesized)
ttagagatttctaggcccaataagccccacattttatcatttcatctctttacactatagtaagcccagataatcttatatttcaaagggtttctagcattgtgtccatagagtagaaat

SEQ ID NO: 1014714 - DNA, 120 bp, Artificial Sequence
  ENSG00000234948_18 (sequence is synthesized)
aatatagatgtgtgtttgacatctgaatcatccatttcacatcttccaaatacacctcttagtcccttaacatctgggttttccacttgccaaaaaaaaaaaaaaatccaaaattatgta

SEQ ID NO: 1014715 - DNA, 120 bp, Artificial Sequence
  ENSG00000234948_19 (sequence is synthesized)
tacaaaatagctgaccagtcctcaaaatgaacaagattttccaaaataaggaaagactgagaaactgtcacagtcaagaagatcctaaggagacgtgactcctagatttaatgtggtctc

SEQ ID NO: 1014716 - DNA, 120 bp, Artificial Sequence
  ENSG00000234948_20 (sequence is synthesized)
atcaatggaaccctagaacacaaaaaggacattaggtaaaaaaataaggaagtctaagtaaattatagattttagtttgtaacaatgtattaatattatttcattaaatgtaacgtggca

SEQ ID NO: 1014717 - DNA, 120 bp, Artificial Sequence
  ENSG00000234948_21 (sequence is synthesized)
cactaagatgttagtaagaggaaatactggatggagggtacatgggaattttctaagatatcttacaatttttctgtaaatctaaactactctataattaataaagttgatttaaagaaa

SEQ ID NO: 1014718 - DNA, 120 bp, Artificial Sequence
  ENSG00000234948_22 (sequence is synthesized)
aggctgagttgaggtggtactgaatttatgacaagcattcagcattttctgtgacaaatatctgttggacatcaattatgtgccagacactgttctaagttacagctcagctaagacaga

SEQ ID NO: 1014719 - DNA, 120 bp, Artificial Sequence
  ENSG00000234948_23 (sequence is synthesized)
cacaaagccttgagctgcatctgagtgagagcccgagcacctgccatatgttgagtgcttgctatctgccggcacagtgcagaacacctgtgatgttaatcctacagaaaattgtagaag

SEQ ID NO: 1014720 - DNA, 120 bp, Artificial Sequence
  ENSG00000234948_24 (sequence is synthesized)
tgtctgctttcaacccccaaaggattattttcagaatgaaatgatctgtggtctttaaggggtggggatgggaggagctgaagaactctcgatccttcgaagaggtcccagtggacttga

SEQ ID NO: 1014721 - DNA, 120 bp, Artificial Sequence
  ENSG00000234948_25 (sequence is synthesized)
tttctcagtggaaacagagggatttccttctgcagtgggaaagagacacgaagtgataaaccgagcaccctctttgaagatttcccagtatatttgtccctagaggagtgcgcctccggg

SEQ ID NO: 1014722 - DNA, 120 bp, Artificial Sequence
  ENSG00000234948_26 (sequence is synthesized)
agatttattgttggaagcttttatcctcaagcgtaatttttagaagtatgtatttccctagaaacagagtagctccatttaaaagtcacaggtgcccccaagctctgctgggaagattac

SEQ ID NO: 1014723 - DNA, 120 bp, Artificial Sequence
  ENSG00000234948_27 (sequence is synthesized)
ttcaagtttcatttaatacccatctcagacctggaggcaaattatttagttcatcactctgaaaatggattttttttcccttctacttcccatttcagcacctgccatcttgtggaaagg

SEQ ID NO: 1014724 - DNA, 120 bp, Artificial Sequence
  ENSG00000234948_28 (sequence is synthesized)
gacttgcttcccaagagatgagaaatggacaggagtggagcctgagtccaagtactgtgatttcttatctcccacaaatgtgcaggaatatttagtcagggagatcatcttcctggagaa

SEQ ID NO: 1014725 - DNA, 120 bp, Artificial Sequence
  ENSG00000234948_29 (sequence is synthesized)
attggcccatcctactcctagagtgctgtgttagttgtagttcctccaggtgccacctcgaagaccagggtcagagtacagtcgcttacatgggaggtaaatccacaaaacagtggcgga

SEQ ID NO: 1014726 - DNA, 120 bp, Artificial Sequence
  ENSG00000234948_30 (sequence is synthesized)
agagggggaaaatgagacaaggatgggaaggcaatcaggaaagggcatgttatcaagcaaggcactgttctgggcaattggagcttacacctgctagggaagcctgagacagtggggaac

SEQ ID NO: 1014727 - DNA, 120 bp, Artificial Sequence
  ENSG00000234948_31 (sequence is synthesized)
atgtacctcacagtgatgctcgtgagggccgggggaactgggatattaatccaccaattccatctgttactgattgagggctgcttactggcggtattgattccctggcacttcaggtca

SEQ ID NO: 1014728 - DNA, 120 bp, Artificial Sequence
  ENSG00000234948_32 (sequence is synthesized)
gagaaagccttcggtcatagagaacatgaagccatggggcccagagtgcccagggctgagtggatgtgggcgatggccaatgacaatggctaccaacagtggattggatctttggcatct

SEQ ID NO: 1014729 - DNA, 120 bp, Artificial Sequence
  ENSG00000234948_33 (sequence is synthesized)
catttcttctaagtctccttaacctctgtgcttggtgctgaggtgaagcaaacaattaagatccagtgttgtccttaggatgctcacacttcagtgagggagttgaggaagctaaacagg

SEQ ID NO: 1014730 - DNA, 120 bp, Artificial Sequence
  ENSG00000234948_34 (sequence is synthesized)
taagcaattttgagcctgtgaagttagtagtctacgaagatatatttaagaatatgtgcatcgtttgtgatatgcatattatttgtcaggctgtactctaagcatttaccttgactaact

SEQ ID NO: 1014731 - DNA, 120 bp, Artificial Sequence
  ENSG00000234948_35 (sequence is synthesized)
tatttgatgcccacaagaaccctctaaagtgggtgcatttgctgtctcttttagagataaggaagtggaggtatggaaacattaaagtgttcagctagtctgtagtgaagccaggatttg

SEQ ID NO: 1014732 - DNA, 120 bp, Artificial Sequence
  ENSG00000234948_36 (sequence is synthesized)
aatacaggctatctacttccagagccctgttcttatccactaggctatgggtcaggctttctcaacctttattattattgccattctgtgctgaataattctttgtcataggggctgtcc

SEQ ID NO: 1014733 - DNA, 120 bp, Artificial Sequence
  ENSG00000234948_37 (sequence is synthesized)
tgtgcattgtaggatgcttggcagcataccctctaccactagaagccaatagtacctgcctccccacctcctgttctgacaaccaaaaatgtctccagacattgccaaatgcccactggg

SEQ ID NO: 1014734 - DNA, 120 bp, Artificial Sequence
  ENSG00000234948_38 (sequence is synthesized)
atagaaggcagatggaaatttcttttcttgttgtttaatcttccttctcataaaaataaggagaaaagtagtatttcagagctgatcgcatctctaaatcaacagccaaatatctcccag

SEQ ID NO: 1014735 - DNA, 87 bp, Artificial Sequence
  ENSG00000234948_39 (sequence is synthesized)
gctgatcgcatctctaaatcaacagccaaatatctcccagggcagagaaaatggaagtagaaatcaagttattgaaaaatcaacttc

SEQ ID NO: 1014736 - DNA, 120 bp, Artificial Sequence
  ENSG00000234948_40 (sequence is synthesized)
gctgccagcccttcgaacaggctgtttccatggtcatttttaaaatgttgtcttgcaacatggtgaactgaggaattagcaaaaagaccgttaaaggagaataggcagtgtgttcacacg

SEQ ID NO: 1014737 - DNA, 120 bp, Artificial Sequence
  ENSG00000234948_41 (sequence is synthesized)
ggattgtttgtcttattatttttcattttccttgggcgattttatttgtaattttttcggagttttgttttgaactctctttatccaagtaaatacatccttcttccttctgtcacaagc

SEQ ID NO: 1014738 - DNA, 120 bp, Artificial Sequence
  ENSG00000234948_42 (sequence is synthesized)
tggtggattccaagctttattttccaaatcctcccaaccctattttatccatgtggcttcttggagctggtcaagtctgcaaactgatccttgagattttggggtgttctgtgtgaggac

SEQ ID NO: 1014739 - DNA, 120 bp, Artificial Sequence
  ENSG00000234948_43 (sequence is synthesized)
agtagccctaattttggcattaaagcgtccttgtttgtctcctttctttcttcttccaagatactctttaaaaattcagtcttctccaaatttggctttgtagctaatctatgtgatcag

SEQ ID NO: 1014740 - DNA, 120 bp, Artificial Sequence
  ENSG00000234948_44 (sequence is synthesized)
agaagcatcattttagtgttggaagcctgaataattcgctttttcagttggtcgtggaagtaaaattccagatgtttaagcattctttgtaacaaagctttttcatgtgcctgtggataa

SEQ ID NO: 1014741 - DNA, 120 bp, Artificial Sequence
  ENSG00000234948_45 (sequence is synthesized)
tttactaagcagtgctttgtgaatctgcttgcttctctatgacaaatgcttttgatgatcgctgctcatgctcatgctcaaatacatagtcactctaatgacttaaattacttttgcatg

SEQ ID NO: 1014742 - DNA, 120 bp, Artificial Sequence
  ENSG00000234948_46 (sequence is synthesized)
gtatttatgggaggtgaaaagccaccatggtcaagatcgttgactccggggttagatgggactgggtttgaatcctgacttcactactatcagctgtgtgagactaagcaagtgtgacag

SEQ ID NO: 1014743 - DNA, 120 bp, Artificial Sequence
  ENSG00000234948_47 (sequence is synthesized)
gcagagtaatggctccctgaggatgctagtgtcttaatccttgaaacctgtgaatatgttgccttacctggcaaaagggactttgcagatacgattatgttaagaaccttgaggtgggag

SEQ ID NO: 1014744 - DNA, 120 bp, Artificial Sequence
  ENSG00000234948_48 (sequence is synthesized)
attatcctgaatcatctgagtggaacaaatgtcatcccaaaaaggaggtcagaatcagagaggttagaaactgctagcatgttgactttgaaaatagaagaagagatgacaagccaaaga

SEQ ID NO: 1014745 - DNA, 120 bp, Artificial Sequence
  ENSG00000234948_49 (sequence is synthesized)
atataagaagcttttaaatgctggaaaaagtaagaaaatggactctcctctagacctagagcctccagaaggaacacagccctgctgacaccttgattttagcccaatgtgacccagttt

SEQ ID NO: 1014746 - DNA, 120 bp, Artificial Sequence
  ENSG00000234948_50 (sequence is synthesized)
tgactgttgacctccagaactgtaagattatgaatttgtgttgttttaaagccacaacatgtgtgctaatttgttatagtgacaataggaaattaatacagcaaagtgatgcaatctctc

SEQ ID NO: 1014747 - DNA, 120 bp, Artificial Sequence
  ENSG00000234948_51 (sequence is synthesized)
ctaaccattgtttggtcatgtacaaagtggaataataacaatatttaccccttcaagctattgtaaggtgtagaagagagaggcacttggcactgggcccagcataaagtacatatttaa

SEQ ID NO: 1014748 - DNA, 120 bp, Artificial Sequence
  ENSG00000234948_52 (sequence is synthesized)
aggtattgaattagtcatgggttttttattttgccataccttagcagttccatcatccttcctattattaagtttcagaaatacttatctgtgatggctaattttatgtgtcaatttggc

SEQ ID NO: 1014749 - DNA, 120 bp, Artificial Sequence
  ENSG00000234948_53 (sequence is synthesized)
aaggctatgatgcccagttatttggtcaaacagtggtctagatgttactgtgaagatatttgtgaatgtgattagcattcaaagcaattgcctttaagtaaagcagattgctttcttcat

SEQ ID NO: 1014750 - DNA, 120 bp, Artificial Sequence
  ENSG00000234948_54 (sequence is synthesized)
aatatgggtggtacctattctattcgttgaaggcttgaagagcaaagactgaggtttccaaacgaagacaccattatgtctcaagactggaacatggaaaccctgcctgagttttctacc

SEQ ID NO: 1014751 - DNA, 120 bp, Artificial Sequence
  ENSG00000234948_55 (sequence is synthesized)
tgctggcctacctgcagattcagacactagactgcaacatcaactcgtacttgaatttccagtctgcctgtctgccctacagattttggacttgccagcccccacaattgcatgagcaaa

SEQ ID NO: 1014752 - DNA, 120 bp, Artificial Sequence
  ENSG00000234948_56 (sequence is synthesized)
aacatcaccatgtcaatcagaggtgcagatgctgagagcactttctagtcaagtcctgcatgttcatttctgtctcaagtcagcttctctgagaatccaatttataaaaatatatttgtg

SEQ ID NO: 1014753 - DNA, 120 bp, Artificial Sequence
  ENSG00000234948_57 (sequence is synthesized)
aatgtataagtaaagtgacttggattttgtctacgtacaaggacttctatgcctgcataaaacaggaaagagatcttcatgtaaacagagtccctcttattggctgaagtgaagagtcat

SEQ ID NO: 1014754 - DNA, 120 bp, Artificial Sequence
  ENSG00000234948_58 (sequence is synthesized)
tctgaggttgttcaatataaaattggatcatctcaaacatacctaccgggatgtagaaagaaagataagtttagattttttttaatatgatgttttatctgttggagtgggttaaattgc

SEQ ID NO: 1014755 - DNA, 120 bp, Artificial Sequence
  ENSG00000234948_59 (sequence is synthesized)
aatactctttgagcacattctgttttcctgctccttcaggaaatcatctgtggctctgcttcttgggtaatgtagcctacttcattgaaaaaaagagtaactcagttttgttgcttatac

SEQ ID NO: 1014756 - DNA, 120 bp, Artificial Sequence
  ENSG00000234948_60 (sequence is synthesized)
atgggcttctggactgcttatgtgtttgtgtatcacacactcaattcaagggctccctttgactttctgcactgagcagagcaatttcattcaaattttcattcaaaattcaatgtcgtc

SEQ ID NO: 1014757 - DNA, 120 bp, Artificial Sequence
  ENSG00000234948_61 (sequence is synthesized)
atcagccacccaaatgcaaggatgtgatttagggatgagtgatgtcagttatgaagatttcaaagtctatttaaaattttcaagaatgctctgcattccaatcacacacactctagtcta

SEQ ID NO: 1014758 - DNA, 120 bp, Artificial Sequence
  ENSG00000234948_62 (sequence is synthesized)
ggatctgacctatttaggagcttctggactattttcatctagtcccttggctcatcagttgattcagtaaatacatattgagtacttgcaatatccaaggcactgttctaggatctgggg

SEQ ID NO: 1014759 - DNA, 120 bp, Artificial Sequence
  ENSG00000234948_63 (sequence is synthesized)
acacaatgtccaagactgacaagacgccgtgaaactggcagtttagtgggagttgccaggagaagaagctctccaaagcccatgcaagtgaaaggtattgtattgaaaagtgataggaag

SEQ ID NO: 1014760 - DNA, 120 bp, Artificial Sequence
  ENSG00000234948_64 (sequence is synthesized)
ccatcattggaaatggtaattcctcatggtatttggggccagaaactgctattctgttaggtataaacccactctttagtgttctctagggccatgttgtttttggacttctccttttaa

SEQ ID NO: 1014761 - DNA, 120 bp, Artificial Sequence
  ENSG00000234948_65 (sequence is synthesized)
tatgtgtctgctgcagtatttttcttctttctgaagatcagcatttttttgattcttctatcaagtgtatacttggcagaaaacatcccctccagccttgacttgatgtgaccgtgtagt

SEQ ID NO: 1014762 - DNA, 120 bp, Artificial Sequence
  ENSG00000234948_66 (sequence is synthesized)
tcttgagctcagtgccatctgactcttaagacgacattcttgagggagaatcagatgggttgctgttgagtcagtggaccccgccctcctgtgctagctgtttgttattggtgccacgtg

SEQ ID NO: 1014763 - DNA, 120 bp, Artificial Sequence
  ENSG00000234948_67 (sequence is synthesized)
ctgccatctgtgaagtcgagtcacacaccacagacatggctgccagagaccaaggcgggaggatgtttgcagggaaggcggcctgagaaacactcccaagtgcacctgcaaccggaggac

SEQ ID NO: 1014764 - DNA, 120 bp, Artificial Sequence
  ENSG00000234948_68 (sequence is synthesized)
tgttcatctgcagctccaaatgcattgtacaggcacaggctcactcttcccctttttctcacagttgtttagattgtggtatgttgtggaaaacagatatgctgagcttctggctctgtg

SEQ ID NO: 1014765 - DNA, 120 bp, Artificial Sequence
  ENSG00000234948_69 (sequence is synthesized)
gtttccaggattgaggagacataagtagggaagttggcctttccttctgtcttgcattttattatatttcattttaaggggggcatttctaaaaaatattaactttctcatattacaaaa

SEQ ID NO: 1014766 - DNA, 120 bp, Artificial Sequence
  ENSG00000234948_70 (sequence is synthesized)
aacaccatcagataaagagattctcctaacatgttggggccatagactaaggaagtttagcaagtctgggaggtgagaaatctaggggcagtgtggagagaaaaatagacccaactaaat

SEQ ID NO: 1014767 - DNA, 120 bp, Artificial Sequence
  ENSG00000234948_71 (sequence is synthesized)
ttcaatatacaaccctacatcatctcagcattattttccaaacaccatttcccctctttatgcaattataaatgtggaccagcctttgataaccaataaagtagctgatgcaatattttc

SEQ ID NO: 1014768 - DNA, 120 bp, Artificial Sequence
  ENSG00000234948_72 (sequence is synthesized)
ctggaccaacttgctagaagatgagaatgggtatgaaagagagctgagtccttcctacacaggacatcgtagaccagccacctccagccagcctgctagttgaccaaggtgcataggtca

SEQ ID NO: 1014769 - DNA, 120 bp, Artificial Sequence
  ENSG00000234948_73 (sequence is synthesized)
gctctgcctgatagaagttgggccttagtccagaggacatactaagccaatctacagacttgtaaactaaaacaaatggacattgctttaaaccactgagttctgtggttgtttgtgata

SEQ ID NO: 1014770 - DNA, 120 bp, Artificial Sequence
  ENSG00000234948_74 (sequence is synthesized)
aggaatctcaaaatcacataaagcaatgtaactttatttttctttaaccaaatgtgttttatcttctgagcccctattctattaggaggtgggaaattatttgtttgtttgtttttaaga

SEQ ID NO: 1014771 - DNA, 120 bp, Artificial Sequence
  ENSG00000234948_75 (sequence is synthesized)
cagtggcacaatcacagctcactgtagtgtcaacctcctgggctcaagcattcttccaccttagcctcccaagtagctgagactacagatgcatgctaccatgcctggctaatttttaat

SEQ ID NO: 1014772 - DNA, 120 bp, Artificial Sequence
  ENSG00000234948_76 (sequence is synthesized)
ccaagtagctgagactacagatgcatgctaccatgcctggctaatttttaattttttttgtagagatgggtctcactatgatgctcaggctgttctcaaacttctgggctcaagtgatcc

SEQ ID NO: 1014773 - DNA, 120 bp, Artificial Sequence
  ENSG00000234948_77 (sequence is synthesized)
gagctgggaatacaggcatgagccaccatgacctgccagaagttagttatttaatttccagttaattccagataatctagatcaatatgtttatgttatctttatgtaaattttcatcaa

SEQ ID NO: 1014774 - DNA, 120 bp, Artificial Sequence
  ENSG00000234948_78 (sequence is synthesized)
taactcctgttcttctcttcctctgggtgcatgagaagatggcacttccttacctccttgaagttaggtatgacaatatgacagtttcccccaatgcaatgtgagcagaaatgagtcact

SEQ ID NO: 1014775 - DNA, 120 bp, Artificial Sequence
  ENSG00000234948_79 (sequence is synthesized)
tctgggtggaagcattgaagagtttgtatgcaattgtccgtgttctctcttcctttaccttcggttgtggaaggacatattgacagacaaatacctcaaaattgaagtagcctcagatgc

SEQ ID NO: 1014776 - DNA, 120 bp, Artificial Sequence
  ENSG00000234948_80 (sequence is synthesized)
tgtgctgccacatgaatcacagattccccagagagttttctgggcctagagttggcttttcatgaacaagaataagccttcatttccagccattaaagtttgggactgtttgttaccaca

SEQ ID NO: 1014777 - DNA, 120 bp, Artificial Sequence
  ENSG00000234948_81 (sequence is synthesized)
gtcctgtggcttctctgagactttggttcggtttgggagaaaacgttccttggaatgccagtaagagaactgcagaatacttctgttgggttgaatgactctctgcccccaggttgaagt

SEQ ID NO: 1014778 - DNA, 120 bp, Artificial Sequence
  ENSG00000234948_82 (sequence is synthesized)
ggggcgcggcgagctccggagaaacccaggttgggcgtgagcgctgggcaaatcagcaaagcgctgggcgggtcccttgccccgctagggagactgagaggaccgcgaagaggtggggtc

SEQ ID NO: 1014779 - DNA, 120 bp, Artificial Sequence
  ENSG00000234948_83 (sequence is synthesized)
gtagcgcggagggacccctgctccaggagctgccaactttatcgtgcatcgcagtcgcctgaaaggcttgttagaacacacgctgttgggcccaccctagcgtttctgcttcagtaggtc

SEQ ID NO: 1014780 - DNA, 120 bp, Artificial Sequence
  ENSG00000234948_84 (sequence is synthesized)
agtgctggcgcaagtcgtcttgcgccaggcgactgggtctgaggaggcaggagttattcattcccttaagctttcaggccggggggagaatctttcagaatacttctgttgggttgaatg

SEQ ID NO: 1014781 - DNA, 120 bp, Artificial Sequence
  ENSG00000234948_85 (sequence is synthesized)
ctgaaaatgtagaggtgagacgctaatggcagagtggcctcagctttcaccaggttttgaaaacatctgtgagggaggcaccaaattcactgtcctgcagctttgacttcccaatcctcg

SEQ ID NO: 1014782 - DNA, 120 bp, Artificial Sequence
  ENSG00000234948_86 (sequence is synthesized)
ttgcctcgtgctgccagcctgtatgctggtagaagtgtgttcctgggaacatcctggcatcttgtgttaggactacactggtgcatgggacagatcacgctcaagaaggtcgatgtaatt

SEQ ID NO: 1014783 - DNA, 120 bp, Artificial Sequence
  ENSG00000234948_87 (sequence is synthesized)
tgaaaaacagatgggctctgctttgtgaaaactccaagcatatgaagtctaacttgaataaaaggcatctcaagatgaaggtttcctatttgtgattatgaaaaaaatgtcaagaacaag

SEQ ID NO: 1014784 - DNA, 120 bp, Artificial Sequence
  ENSG00000234948_88 (sequence is synthesized)
ctctgtggatggtatttgtctggggctggctgtgcacccagaaggccattcgttccatgaagaacatgacagaggtacctggtcctacctggattcttgggcatgcgggcagcagcagca

SEQ ID NO: 1014785 - DNA, 120 bp, Artificial Sequence
  ENSG00000234948_89 (sequence is synthesized)
gcagcagccacagtgaacttcatcctaaggaaattaagcacacgttgcgtgaggctgctgtgggggtgccaggtgctgaggtttctgtagtggataaaacacaaaaataccagccctcat

SEQ ID NO: 1014786 - DNA, 120 bp, Artificial Sequence
  ENSG00000234948_90 (sequence is synthesized)
ggtgaaaatggaatgacaataaacaagataaattagatctatggtaagataaattagatctatggtattgaggagggaggtgggacttgactctggaggctgggctccgatgacaccaga

SEQ ID NO: 1014787 - DNA, 120 bp, Artificial Sequence
  ENSG00000234948_91 (sequence is synthesized)
ccaaattgaagactagctaaaacagggacctgacggaagcagctttccataagacacctcacccgtctgccatgtcaggtttaccactgccatggcaacacccggagttaccaccccttt

SEQ ID NO: 1014788 - DNA, 120 bp, Artificial Sequence
  ENSG00000234948_92 (sequence is synthesized)
ccatggcaacgacccaaggatcccaaagttaccacccttcctctggaaatttctgcatcaactggcccttaatctccaagtcattaaaagtaagtgtaaatatggctgcaaaactgccct

SEQ ID NO: 1014789 - DNA, 120 bp, Artificial Sequence
  ENSG00000234948_93 (sequence is synthesized)
gagctgctactctcagcacactgcccatggggtagcccaactctgtaggagcagtcacagagatgtaatactgcctgagctataacactgccacttcaataaagctgttttcttctaccc

SEQ ID NO: 1014790 - DNA, 77 bp, Artificial Sequence
  ENSG00000234948_94 (sequence is synthesized)
gtgaacagatgctggcactatgtttcctgtacaacctgtagaaccatgagctgataaaaccacttttatttacaaat

SEQ ID NO: 1014791 - DNA, 120 bp, Artificial Sequence
  ENSG00000234948_95 (sequence is synthesized)
tcagagggaattattgcagagggtactaaatagcaagaagtcacccagctagtaagtggtggaaccaggaatcgagagagtctgggttctttacccctctgctgagcagtttgattataa

SEQ ID NO: 1014792 - DNA, 120 bp, Artificial Sequence
  ENSG00000234948_96 (sequence is synthesized)
aacaacagacctactgaaattattgtatgactctggaggaaacctccaatcaggtcagatgccctgctcaggatttcgatgagtgtataagcaacaataatgagctatgttgacttccaa

SEQ ID NO: 1014793 - DNA, 120 bp, Artificial Sequence
  ENSG00000234948_97 (sequence is synthesized)
tacactttcatgttgtttacattttattaaatggtttaagcagggtcatcatataaatgatcaacatattgactaaaacactcaagccttgaagaattgaaggccacagacagccaacca

SEQ ID NO: 1014794 - DNA, 120 bp, Artificial Sequence
  ENSG00000234948_98 (sequence is synthesized)
gattggtcaccttgaatttgagtcaatagcataaatatatatttggctacagagtcaaagcccactttatattcattattctgaaaaccctgctaaataaacagctccaaagtgtcccac

SEQ ID NO: 1014795 - DNA, 120 bp, Artificial Sequence
  ENSG00000234948_99 (sequence is synthesized)
gcgccaggcgactgggtctgaggaggcaggagttattcattcccttaagctttcaggccggggggagaatctttcagaatacttctgttgggttgaatgactctctgcccccagctttca

SEQ ID NO: 1014796 - DNA, 120 bp, Artificial Sequence
  ENSG00000234948_100 (sequence is synthesized)
agaattcatgggcaaggatttactgagaatgttcccccagaagaattgtgtagggtgatgggagaagcagcccagggaagggaaaggagccagccaggcaagatgtgacttcaggcaaat

SEQ ID NO: 1014797 - DNA, 120 bp, Artificial Sequence
  ENSG00000234948_101 (sequence is synthesized)
ctcagcctcagcctgatcctatggggagctcaggagtgtaaatctccccccagatttttttctcaactggcagaaaaagaagtggggtttcatactccccctacaattggtccttgccta

SEQ ID NO: 1014798 - DNA, 120 bp, Artificial Sequence
  ENSG00000234948_102 (sequence is synthesized)
agagccactgggagaggcataaactcccaggcacttctggttatcttccctgtaagcagagcagccctcatagcctgcggcagctccttaaaaagaatcacaagtataggaaagtgccca

SEQ ID NO: 1014799 - DNA, 120 bp, Artificial Sequence
  ENSG00000234948_103 (sequence is synthesized)
aagaagggggggaagtggggataggacccacaggagactgtaagaaggattcaaggtggtgtgagaggagaacagccgagtctgctgtccccaataaggagtattgagtactctgtgcct

SEQ ID NO: 1014800 - DNA, 120 bp, Artificial Sequence
  ENSG00000234948_104 (sequence is synthesized)
acaaggtgggagctgggggaggagccccaccccaaggcagagtacctacagtctatatagattttaaggacctctaaaatatttgagatctaaaaactaaaaaaataataataataataa

SEQ ID NO: 1014801 - DNA, 120 bp, Artificial Sequence
  ENSG00000234948_105 (sequence is synthesized)
ttcatttttgtttcccacaaagtttatgcctgaaatgtgtgtataaacaacatttgaaagaagaaatggaaatctcccatcactacatctcagtatgaagagatggagggaagttaagtc

SEQ ID NO: 1014802 - DNA, 120 bp, Artificial Sequence
  ENSG00000234948_106 (sequence is synthesized)
ctgcacagtaaactgaggcagaactgtaagtgatgagtaggtattcaagaatgaaagagatcatgaccaaggacagccacatccgaccattcgttgtgttttgttgatatgccctgacaa

SEQ ID NO: 1014803 - DNA, 120 bp, Artificial Sequence
  ENSG00000234948_107 (sequence is synthesized)
tagatgacataaccaaagaaagaaactgctgggggatacaggcctatacctctggatatatttttctattgtgattttagcttcagagcaacttccctctgacataacgaagactcttga

SEQ ID NO: 1014804 - DNA, 120 bp, Artificial Sequence
  ENSG00000234948_108 (sequence is synthesized)
gtattgaagatgaatatttattggggaaaaatgcaatgggaaataaagaaatcagaagattggagatgcttgacaaactactggaaattttattcccaagtaatttatttcttatttgta

SEQ ID NO: 1014805 - DNA, 120 bp, Artificial Sequence
  ENSG00000234948_109 (sequence is synthesized)
tcaatttgataaatattatgtaagttacgattatgttgaattgcaaataacaagagcaggtgtttatttttttttacataataacaagtccagaggtgtgtttagatgactgtgcaatgg

SEQ ID NO: 1014806 - DNA, 120 bp, Artificial Sequence
  ENSG00000234948_110 (sequence is synthesized)
ctaggccactggttctgatgttcttggcttcttccttatggtcacaagatggctgcttcagtaccagttcttatatctgcatttaagagattaaaaaagaaaaagaagaagaaaaagaaa

SEQ ID NO: 1014807 - DNA, 120 bp, Artificial Sequence
  ENSG00000234948_111 (sequence is synthesized)
agtgctggcgcaagtcgtcttgcgccaggcgactgggtctgaggaggcaggagttattcattcccttaagctttcaggccggggggagaatctttcagagcctccagaacgattcccccc

SEQ ID NO: 1014808 - DNA, 120 bp, Artificial Sequence
  ENSG00000234948_112 (sequence is synthesized)
agtgagggaaaaatacaaaatgcagcattttcatgcttagagaaagaaagagaaaacacaggctgaccgtacatagcaggaactgatacttgcttcttccttaactatgagccattcatt

SEQ ID NO: 1014809 - DNA, 120 bp, Artificial Sequence
  ENSG00000234948_113 (sequence is synthesized)
tacagccatgtgcaaatgcctatgtgcagatgtatgcacctatcctctttcacagaaaatatgtgcctcacttctggaacattattagtgaatttagaatgggagaaagatggcagatta

SEQ ID NO: 1014810 - DNA, 120 bp, Artificial Sequence
  ENSG00000234948_114 (sequence is synthesized)
tggtttgaggtggaaagatctggaggcacacacacaaaaaatgagcatccacccttcttccttgagcaactcccgggttgaaaggtgcttccagactcaactcagtcaatggtcctttct

SEQ ID NO: 1014811 - DNA, 120 bp, Artificial Sequence
  ENSG00000234948_115 (sequence is synthesized)
gacctgggaaaggaaagagccagttgaggaaaagccctttgtcccttctttgtttatatctccaacttcccgatttttcctgtggctgtgatggccaggatgtggcagccctctggttat

SEQ ID NO: 1014812 - DNA, 120 bp, Artificial Sequence
  ENSG00000234948_116 (sequence is synthesized)
tatgaatgaaattgtccatctttcctaggaatgagtcaatctgtgtatttgtgaatttcaaatataagtgtgactactatggtagaaggaaatagctgtcagaataaagagaaaaggaga

SEQ ID NO: 1014813 - DNA, 120 bp, Artificial Sequence
  ENSG00000234948_117 (sequence is synthesized)
tctatgcctgcataaaacagatacaacatataggaaaaaccagattcttcactgcaaatactgctttgcatgcttttctttcattgctttgggcttctgggagaaatcagaagaaaagaa

SEQ ID NO: 1014814 - DNA, 120 bp, Artificial Sequence
  ENSG00000234948_118 (sequence is synthesized)
acaaggcagtgaatggtggaaatcatgggggaaagatggcatatttgggatctgcagatggatattgaaaatgcaaactagtttgctgatttgtagttgtattagggtgggtgtccaaac

SEQ ID NO: 1014815 - DNA, 120 bp, Artificial Sequence
  ENSG00000234948_119 (sequence is synthesized)
tggtggtgttagtaatggaatttggaacttctcaatggatatgatcctgtgtgcaggcatgtggtcacctgaatagtaccactcaaaacccccaaacctaaaaaaaaaaaaaaaaaaaaa

SEQ ID NO: 1014816 - DNA, 120 bp, Artificial Sequence
  ENSG00000234949_0 (sequence is synthesized)
ggagactccaggtgcaggagagggggaggtggacttcctcttggtcttcccaagccatgaaacttcctggcttggtggtaacagaagagtctcctccagttcccttgaagaatccacctt

SEQ ID NO: 1014817 - DNA, 120 bp, Artificial Sequence
  ENSG00000234949_1 (sequence is synthesized)
cctgcagggttgggggagcgcagaatgggaggaagatacaaataccaattttatagcaagaatgcaaaaagaggccagcgcggtggctcgagcctggaatcccagcactttggaaggcga

SEQ ID NO: 1014818 - DNA, 120 bp, Artificial Sequence
  ENSG00000234949_2 (sequence is synthesized)
gctgggcggatcacttgagatgtgaccaggtgacccccctctggccagggaacaatgggccgaagtcctcaggggatttgtggggaagcgcgccccctcctccttggggttttcttgcgg

SEQ ID NO: 1014819 - DNA, 120 bp, Artificial Sequence
  ENSG00000234949_3 (sequence is synthesized)
agctgctgtgaagactcagctcagctgtgataattacctgaggtcagcttctccagaatgcccttatctcctaaggcctttgagataagcaggaattgtggtgtctgccttgcctccaaa

SEQ ID NO: 1014820 - DNA, 120 bp, Artificial Sequence
  ENSG00000234949_4 (sequence is synthesized)
cctttatccttgcttatctcagtggaaaattccagcagggatttctgaacaccaagttaaattcctccactcaacaatcagtttggcacgtggctgcccgccagtctgggcagaacagag

SEQ ID NO: 1014821 - DNA, 120 bp, Artificial Sequence
  ENSG00000234949_5 (sequence is synthesized)
acaggccagagaggctgacctacctgcccagaggcaggggaagaatccagaggacctctcccggaggaggcacgagaagcccacgtggcagccaagaagagggagagcatcctgggcccc

SEQ ID NO: 1014822 - DNA, 120 bp, Artificial Sequence
  ENSG00000234949_6 (sequence is synthesized)
ggaagcacaatgccaggggcagacatgcactgggaggcacggggccagggacaccttcagtgagcacagggtctgggtaggcttcgggaggggtgagggcggagaggcagccaagccggg

SEQ ID NO: 1014823 - DNA, 120 bp, Artificial Sequence
  ENSG00000234949_7 (sequence is synthesized)
cgggttgtgggaggccctgcctaattctgtaaagactaggattagaaacatgacaaaaatgggttaggcacggtggctcacacctgttatccactttgggaggctgaggctggtggatca

SEQ ID NO: 1014824 - DNA, 120 bp, Artificial Sequence
  ENSG00000234949_8 (sequence is synthesized)
atgaattaattcctcccactgtcagctagaagccatccctggctgagccctgcactggccagaggcaactgagtgtgagccagtccagggtcagatcctgggctgatgccacctgagggc

SEQ ID NO: 1014825 - DNA, 120 bp, Artificial Sequence
  ENSG00000234949_9 (sequence is synthesized)
ggggtgggggcgtggcctccgtgcacatgggagactccaggtgcaggagagggggaggtggacttcctcttggtcttcccaagccatgaaacttcctggcttggtggtaacagaagagtc

SEQ ID NO: 1014826 - DNA, 120 bp, Artificial Sequence
  ENSG00000234949_10 (sequence is synthesized)
cacctccctggaagccgccagcatgctcggctgggcccccgcactctggaggcttgagaatctctctatttttgaatgacgtccttatcctctgcccccaggctgttcccttgaagaatc

SEQ ID NO: 1014827 - DNA, 120 bp, Artificial Sequence
  ENSG00000234942_0 (sequence is synthesized)
gagaaaaacttgagtgaactgagaagacagacagcccgtgaccaaattctgagaactccaaccattcactggttgagtggaagagaacaagctcagaaaataaatggagaaaacatggta

SEQ ID NO: 1014828 - DNA, 120 bp, Artificial Sequence
  ENSG00000234942_1 (sequence is synthesized)
ggaggagcagaagaaaaatgaggagaatgctgtctcatggaagacaagggaattggtgcacatggtatggaccccagcaagtccccctctgcaggtcaggtggggatccagggaagatgc

SEQ ID NO: 1014829 - DNA, 120 bp, Artificial Sequence
  ENSG00000234942_2 (sequence is synthesized)
tggagaccatgttacagctccaatccaaagggactctgaagctagcaaagcttggagaagcctgaacaagctggtcaccctcactgtcaaagactttcatttccacggaagggaaactga

SEQ ID NO: 1014830 - DNA, 120 bp, Artificial Sequence
  ENSG00000234942_3 (sequence is synthesized)
tgacctgggaccattggaagaactagttagtaattaatcagttgcataatcttcccttatcctcttttctaatttcccttcaggactttaaggacccctttgaagatgaaaagaaagaaa

SEQ ID NO: 1014831 - DNA, 120 bp, Artificial Sequence
  ENSG00000234942_4 (sequence is synthesized)
gtttgagtggactcaattaaagtgggaagcaggtgtctaggttccagggctgctcaactctggattctggcagttgatagagggcctggccttttttctcagtcaattgagcactagccc

SEQ ID NO: 1014832 - DNA, 120 bp, Artificial Sequence
  ENSG00000234942_5 (sequence is synthesized)
agggtgttcaggagatgctcccattttgttagagtttggagagagggaaagcttaacttcctgtccaagaagaaagccacagggaggtaggaggttggaagtaagggacaaggtgaaaga

SEQ ID NO: 1014833 - DNA, 120 bp, Artificial Sequence
  ENSG00000234942_6 (sequence is synthesized)
actctctctatttaatgccagggaaacaaacatgggagcttcggggaagacagaccagccaaaattctctgaaggaagatgtaagtgagggaagtctctgagctggatgacttcaccact

SEQ ID NO: 1014834 - DNA, 120 bp, Artificial Sequence
  ENSG00000234942_7 (sequence is synthesized)
gaagtgcaagtgagagaacactggagcatggtggattgtcaagtgccaagctggaatagtaaacgtggtggtggggagtggatccggtaataatggagcatttagaatcaaggccagccc

SEQ ID NO: 1014835 - DNA, 120 bp, Artificial Sequence
  ENSG00000234942_8 (sequence is synthesized)
tgactaagtttattttactcacatttttttttgcttgtctcaaatcaagtatggatgaagcagttctaaggactgcaaagctgcgcagcgggaaccaactccctactgcagttatcattc

SEQ ID NO: 1014836 - DNA, 120 bp, Artificial Sequence
  ENSG00000234942_9 (sequence is synthesized)
gcctttaaagtctccgtgtcaagacacacagaaagtgtctacaccaaatggacaaacgttccagggggtttccttcccaactgcttattaagaaatccatcctcttcacatcagtgggac

SEQ ID NO: 1014837 - DNA, 120 bp, Artificial Sequence
  ENSG00000234942_10 (sequence is synthesized)
ttcattctactcaaattccatcaattcccaatagctccaacacgaggacaaaccctaggagatgagggtgccatctcaagtctcttattttggttatttaactgaataagaaaatgtgta

SEQ ID NO: 1014838 - DNA, 120 bp, Artificial Sequence
  ENSG00000234942_11 (sequence is synthesized)
taactgcagcaaatgactcctatctttcctggaaaacaaacgcagccatttgctgtgtctcacaatgtgtcctttaagtcgcctgctcctgctgctgtctgtgggagccagagctgaggt

SEQ ID NO: 1014839 - DNA, 120 bp, Artificial Sequence
  ENSG00000234942_12 (sequence is synthesized)
gcgcaggacagaccgcctggtttggaaaccttggaagcatggtctgcttgtattacctggggtcatagatttagcactcataaagtcatgtctgtctgttccttctgtgtctccagccaa

SEQ ID NO: 1014840 - DNA, 120 bp, Artificial Sequence
  ENSG00000234942_13 (sequence is synthesized)
ggaaagaggagacaggagtaatcagcctactcaaggaaagaggcaggagtgatttgaataattatctatcttttagacaaaatactgcattctattatgttatgcaaattcaaataatgg

SEQ ID NO: 1014841 - DNA, 120 bp, Artificial Sequence
  ENSG00000234942_14 (sequence is synthesized)
gcttttttatgtgaactacatccgtttacatcctcattatcccaaggtttcggtattcggccaggtaatgacagctgtgaaaacagacttggaaacttactgctatcttcattaatttac

SEQ ID NO: 1014842 - DNA, 120 bp, Artificial Sequence
  ENSG00000234942_15 (sequence is synthesized)
tgtaggtaactgacctagtcaaacatccctgaatatgatataaaattcacagactgtgtttacccgtgaatccggctgaattccagctctgcgtttctcatcccatattaaacatgacga

SEQ ID NO: 1014843 - DNA, 120 bp, Artificial Sequence
  ENSG00000234942_16 (sequence is synthesized)
cagatgcaccaacagaggttactggggaacctctcccaggcattgtcttgcagagataaagttctgtaattaagctgctgttcaccaatgtggaaataatacagtgtattggaaaacggt

SEQ ID NO: 1014844 - DNA, 120 bp, Artificial Sequence
  ENSG00000264270_0 (sequence is synthesized)
cactgggtaagccaacagtgaagaccaagaaggaaaagcacccctccaggaatgattctctagcagcctagagacttcctggggactcacagaaaaaatgctaccaaatcctgaactcta

SEQ ID NO: 1014845 - DNA, 120 bp, Artificial Sequence
  ENSG00000264270_1 (sequence is synthesized)
aagaacgagttattccttctgacccaagtaaagcacatggcccatttcctgttcaccagagaacttcattagagggaaactgcagacatagcattcaattataaaaacctattcagattt

SEQ ID NO: 1014846 - DNA, 120 bp, Artificial Sequence
  ENSG00000264270_2 (sequence is synthesized)
cctttctgactcctgctcagatccggttatcacccagcaggcccctagaacccccagaaccctagacctcaggctggggtaggttcttcccagcacagccactccacgagcttctggaaa

SEQ ID NO: 1014847 - DNA, 120 bp, Artificial Sequence
  ENSG00000264270_3 (sequence is synthesized)
ttccatgtctcccagctgtgcaaggcaaccctagtgttgttgaggaaaagcctaaagaagaccatccatcgtgttgagcgcagggaagtgccgaatgctacgtaggcttgggcattctca

SEQ ID NO: 1014848 - DNA, 120 bp, Artificial Sequence
  ENSG00000234940_0 (sequence is synthesized)
gactcaggacctctaagtagcatcaaggtaccacagcaatctccctgctatagcacttcatgcagttccagcccaccccgatccaagcacatggcagaactgtacttcctggatctcctg

SEQ ID NO: 1014849 - DNA, 120 bp, Artificial Sequence
  ENSG00000234940_1 (sequence is synthesized)
agttatacaggaatatttcacctcttccctattttaaaaaacaacctctgcaaagacaagatatgtctgccatgtgcctgaatgtcaaaatatttgaataaaattgaaaagttgacactg

SEQ ID NO: 1014850 - DNA, 120 bp, Artificial Sequence
  ENSG00000234940_2 (sequence is synthesized)
aaatccgatatgacttcttcgacatataaagccagagggagatggccccaagaacaccaggcaccacctgcatttacatcgtcgaaatgaaaaagtgaaaaaggaacaaatgtggtctca

SEQ ID NO: 1014851 - DNA, 120 bp, Artificial Sequence
  ENSG00000234940_3 (sequence is synthesized)
cttctggaaagtatggaatatgtatacacagaacagagccaaaagaactccagacaggtatgcctcaccctcagggactcatgtgttacagaaaatgttgggaaaactgaataataggga

SEQ ID NO: 1014852 - DNA, 120 bp, Artificial Sequence
  ENSG00000234940_4 (sequence is synthesized)
caaaagaaactcgccatgttaaggttttctaaactgaaattattcttacttgttttaatttacttttcttacaatgcttaattctcatattttttaagtaagttgcatttatacctttgt

SEQ ID NO: 1014853 - DNA, 120 bp, Artificial Sequence
  ENSG00000234940_5 (sequence is synthesized)
taaatgtaggccttttgatataagaagtcagtttggcagaattgcattgatacatatttgatgacattcgttcaaatattttcattattccaaatagggggaggattccataatagcccc

SEQ ID NO: 1014854 - DNA, 120 bp, Artificial Sequence
  ENSG00000264272_0 (sequence is synthesized)
ttttagtacaagtggtttatttctcttccaggtgaggccgcatgtatataagcaaaggtttgcccacctggttccttcaggaactccccgaggaatctgtttagtttccatgcattaaaa

SEQ ID NO: 1014855 - DNA, 120 bp, Artificial Sequence
  ENSG00000264272_1 (sequence is synthesized)
acaaccctctagttgccaataatgaaactttaagaagcaacactttgacgtcgcagagttcctctctgcatgtgacgcggatataccaaagtgagtttatggcatacagtatgcatgggt

SEQ ID NO: 1014856 - DNA, 120 bp, Artificial Sequence
  ENSG00000264272_2 (sequence is synthesized)
tgtggccccattctgttgtggaggcttcgctgggagctgagaacaccctgctgtccatgttttgatgacaggtggttcttccaaaacagaagcaccgagtcaccgcacgcccctgcttca

SEQ ID NO: 1014857 - DNA, 120 bp, Artificial Sequence
  ENSG00000264272_3 (sequence is synthesized)
caccgagtcaccgcacgcccctgcttcagtgtgcgaggccgtggggctctggtgttgtgaactccaggctggcatttaaaaggtgctgacttttaggctgggcgtggtggctcatgcctg

SEQ ID NO: 1014858 - DNA, 120 bp, Artificial Sequence
  ENSG00000234944_0 (sequence is synthesized)
ttttctcaagacttcagctgctttgttggcagccaggcctggctctcagcagctctgcaggctggaagggcccaagagacccttcacccacccggtgtctccagcagcagggaggggtcc

SEQ ID NO: 1014859 - DNA, 120 bp, Artificial Sequence
  ENSG00000234944_1 (sequence is synthesized)
ggggcacagcctattgctgctctgctctcctcccttcttgggtgtcctgcaggtttctgtgagcagagcagacagaaaggagatgcccagtgacgccagctgtcccccgcagagcttcct

SEQ ID NO: 1014860 - DNA, 120 bp, Artificial Sequence
  ENSG00000234944_2 (sequence is synthesized)
ggagcctgggctctaggctgagggtccttgaacagacgtcatctccctggcttcagcagaatcacccacaaacccaccctgtgcccaccctcccatcacagagagcagctgctggagaac

SEQ ID NO: 1014861 - DNA, 120 bp, Artificial Sequence
  ENSG00000234944_3 (sequence is synthesized)
aaggcatgagactttggagacctggaggagcaggagacacaggagacaatggccagggtggtcatggtggcacggctatgccatcactgatttctgcccacccgccccctaagtctcact

SEQ ID NO: 1014862 - DNA, 120 bp, Artificial Sequence
  ENSG00000234944_4 (sequence is synthesized)
tgctgctactctcaatttcctacttaatgcttcggagagcaccagtcctgagatgagaggcgggatgttcactctctgggagttgagatggaacccaggcagttagaaaaaagtgccaca

SEQ ID NO: 1014863 - DNA, 120 bp, Artificial Sequence
  ENSG00000234944_5 (sequence is synthesized)
accacgtgccggacctactacttgccaggagcttcgtgagtcatccaattcctaaaacaattgtgctgcgtatgctccaccacgcctgggcgactcggggaaatggggctgcgggaggct

SEQ ID NO: 1014864 - DNA, 120 bp, Artificial Sequence
  ENSG00000234944_6 (sequence is synthesized)
cagtgacctgccctgggtgacacggatagcgtggatgccctgtccatgcatggggctgtgctaggaggacaggaccatccccggaagctggtcctgtgtccactgctcacggtggcagct

SEQ ID NO: 1014865 - DNA, 120 bp, Artificial Sequence
  ENSG00000234944_7 (sequence is synthesized)
tgagtccttggatgtattcaggcacatggcagcaaggtctcctgtgtcccagaggcgactaggacccacaagtgagcagcaggtgccccactccttcatgctaaggctcatcacgggacg

SEQ ID NO: 1014866 - DNA, 120 bp, Artificial Sequence
  ENSG00000234944_8 (sequence is synthesized)
aaacccaaggtggtattggagccaggggctgtggccatgacagccacccactccagacgatatccacattcggaatagttcagagtggcctgccttgatgacatcacgaacttctccatg

SEQ ID NO: 1014867 - DNA, 120 bp, Artificial Sequence
  ENSG00000234944_9 (sequence is synthesized)
gaaatgtgtcacagaaccagaacttaagggcatttggatgaggttgaggtgagatcaggtcacagaagaacgttctcaagttaggtgggaaacagctggagactctgggatgtcctcagg

SEQ ID NO: 1014868 - DNA, 120 bp, Artificial Sequence
  ENSG00000234944_10 (sequence is synthesized)
acctttatctaagcaaacacatgataaggtctttcccaagaaataagcgtggctttttgtcctggttgaggagggttgttgtggatcttttcccccttttaccttggcttccaggaagct

SEQ ID NO: 1014869 - DNA, 120 bp, Artificial Sequence
  ENSG00000234944_11 (sequence is synthesized)
cagtgccaagttttatgctccacccaggcctactatccttggactggtcctcaggtgcagcccttggtctctcctttctttatcgcatgagcccgcttggtttctgtacattttgtccgc

SEQ ID NO: 1014870 - DNA, 120 bp, Artificial Sequence
  ENSG00000234944_12 (sequence is synthesized)
tggtgctgacggctggacaccctttcctgaaggagatggggcatagagtgagtggatgatgatgggctgtgacagggcccactaccaaggatgtgggctacgaggtgtgggctgggaagg

SEQ ID NO: 1014871 - DNA, 120 bp, Artificial Sequence
  ENSG00000234944_13 (sequence is synthesized)
aggaggaggaccctgcacctcagggggcaaccaggagcacattctggggagcacacacctgcggtgttatcacggccactgcccatgtcttggacactggaataaacaggatgtggcgaa

SEQ ID NO: 1014872 - DNA, 120 bp, Artificial Sequence
  ENSG00000234945_0 (sequence is synthesized)
gggcggatgtgcaatcttcacctgtttattcggtagagggtgccatcttcaggtagcccttcacgttgtacagaaaacaatggagacttctcctcctggggcagacagagtctggctgga

SEQ ID NO: 1014873 - DNA, 65 bp, Artificial Sequence
  ENSG00000234945_1 (sequence is synthesized)
tatgtcctttcatattctccagtttaatctcgcctacaactttactccaggctctatgctccagc

SEQ ID NO: 1014874 - DNA, 120 bp, Artificial Sequence
  ENSG00000234945_2 (sequence is synthesized)
aaaaccatcctctctggcaaacttctacttatccttcaagaagcaattcaactatcattcctctgtgaagcctaggcagttaattaccctttcctttatatgcctaaatcattttgttca

SEQ ID NO: 1014875 - DNA, 120 bp, Artificial Sequence
  ENSG00000234945_3 (sequence is synthesized)
ctcctggggtagtgctgattgcactgtgaacttgtgaggcaggatacactgtcttatttacgtttgttgtgtttcctaacagagaacagatactcaatatatgaatgaataatcttgttt

SEQ ID NO: 1014876 - DNA, 120 bp, Artificial Sequence
  ENSG00000234945_4 (sequence is synthesized)
gggcggatgtgcaatcttcacctgtttattcggtagagggtgccatcttcaggtagcccttcacgttgtacagaaaacaatggagacttctcctcctggggcagatgttgcacgtgaggc

SEQ ID NO: 1014877 - DNA, 120 bp, Artificial Sequence
  ENSG00000234945_5 (sequence is synthesized)
aagtaaggcactggtctcatatatgcaactggtgaccagacatctccagcagaatgacccatggcccatgggcacctcaaactcaacatgtcagaaagtgaattctgtcaggtgtggtgg

SEQ ID NO: 1014878 - DNA, 120 bp, Artificial Sequence
  ENSG00000234945_6 (sequence is synthesized)
agacaggccctgctatgctgtgaccaccactacagcagccccattctccttgctgtgctactcacctgggggttgctgagccagcagggcctccggatggggtagactgaatagcagtac

SEQ ID NO: 1014879 - DNA, 120 bp, Artificial Sequence
  ENSG00000234945_7 (sequence is synthesized)
tttcccgtctgagcaggccagagccaagagacccaaccggggcaggagaggagcctaaagggtaaaaggtatgctgaggcttgctgccttcagctgactcacagaaaacctttgaggttc

SEQ ID NO: 1014880 - DNA, 120 bp, Artificial Sequence
  ENSG00000234945_8 (sequence is synthesized)
tagtccctgaaatactgtatgaagttgctggaaaaactccatccactacactccaaccttcgttccttcaactctaagaattcccagggcctctttgtcctggctttgagtcctagggcc

SEQ ID NO: 1014881 - DNA, 120 bp, Artificial Sequence
  ENSG00000234945_9 (sequence is synthesized)
atcccacagttgactgggaagtaccttccgaggggtgcctggaagttcccatgctccactggggcagaacttgaggtcccagatgcagccgttgtcacaagcaatcccatagacaaagtg

SEQ ID NO: 1014882 - DNA, 120 bp, Artificial Sequence
  ENSG00000234945_10 (sequence is synthesized)
acatattgcgaggctcctgccccctctggcactgggcaccagtccagagcccagagcggtccccccgtgaagaaggacacatcccagcgctctggatgtgctgtgatcgagctaaatcta

SEQ ID NO: 1014883 - DNA, 120 bp, Artificial Sequence
  ENSG00000234945_11 (sequence is synthesized)
gagaaaaatcaaagatgggatgaagaaaggaattaatgaaagaatcagaaaaaagggcggatgtgcaatcttcacctgtttattcggtagagggtgccatcttcaggtagcccttcacgt

SEQ ID NO: 1014884 - DNA, 120 bp, Artificial Sequence
  ENSG00000234945_12 (sequence is synthesized)
tgtacagaaaacaatggagacttctcctcctggggcagtggtgtcacccttcctaagctacagagatgttgcttcaacttacagctcagataacaagtgccacttccaggctaaaggaat

SEQ ID NO: 1014885 - DNA, 120 bp, Artificial Sequence
  ENSG00000234945_13 (sequence is synthesized)
ccactcagcaaactcccagtatgaatgtttctgctctcggctggagaaacagaagaagcattaatgaaggagagggattctacagccgcacagtccaataaaactttctgtggggatgga

SEQ ID NO: 1014886 - DNA, 120 bp, Artificial Sequence
  ENSG00000234945_14 (sequence is synthesized)
gaacggacagagtcagagccattctcacatatgactgagaacccacgtttccagacatggttgatttttatctcaatggagcctcccaataaccccatgattaaccaattaactctatta

SEQ ID NO: 1014887 - DNA, 120 bp, Artificial Sequence
  ENSG00000234945_15 (sequence is synthesized)
atttccccttcccccttggaagatgaaaaaccagaaatctaagttatgtgacttggccgagatgactgagataacaaatgtggaatctgaacccaggtcttctcactccaagttcaatac

SEQ ID NO: 1014888 - DNA, 120 bp, Artificial Sequence
  ENSG00000234945_16 (sequence is synthesized)
atttttcatcctaccacagtcaaagaacacagagggcaagagaaagaatggaacagaatatatatactgacatatactggacagtaaaacaataaagagctgggtaaagtttgtgaaaaa

SEQ ID NO: 1014889 - DNA, 120 bp, Artificial Sequence
  ENSG00000234945_17 (sequence is synthesized)
gggcggatgtgcaatcttcacctgtttattcggtagagggtgccatcttcaggtagcccttcacgttgtacagaaaacaatggagacttctcctcctggggcagagcctctgtcaccctt

SEQ ID NO: 1014890 - DNA, 120 bp, Artificial Sequence
  ENSG00000234945_18 (sequence is synthesized)
tatgccagttgctagctccaattagctaccaagcacctaaaatgtggctagcgcagctgagaaacagagcctttcattttatttcactttaattaaagagttctagagctcttgcctcta

SEQ ID NO: 1014891 - DNA, 120 bp, Artificial Sequence
  ENSG00000234945_19 (sequence is synthesized)
cggatcttcttcggtttggtggggctgctcaccttggggccctcaggacaggacacaggggcaggcagggctgttgagagctcttcagccagttcctgaagatacagaagtgccctgtgg

SEQ ID NO: 1014892 - DNA, 120 bp, Artificial Sequence
  ENSG00000234945_20 (sequence is synthesized)
agaagggacgcagggctgccagaggtaagctccccttgtctcagcccaatccaagcccttccccctatcctgtccagaccccatcctgctgtcctcaaccaccctcccatggcagtgtcc

SEQ ID NO: 1014893 - DNA, 120 bp, Artificial Sequence
  ENSG00000234945_21 (sequence is synthesized)
gggcggatgtgcaatcttcacctgtttattcggtagagggtgccatcttcaggtagcccttcacgttgtacagaaaacaatggagacttctcctcctggggcaggttcagtgcatgatgc

SEQ ID NO: 1014894 - DNA, 120 bp, Artificial Sequence
  ENSG00000234945_22 (sequence is synthesized)
gaaactgctattcaacttcctccctcccttcaattcccaaatactgttaattctcttacatattccattatgtgagagaacacagaaacaaaagaattacaaaaataaaaataaaaaatt

SEQ ID NO: 1014895 - DNA, 120 bp, Artificial Sequence
  ENSG00000234945_23 (sequence is synthesized)
gggcggatgtgcaatcttcacctgtttattcggtagagggtgccatcttcaggtagcccttcacgttgtacagaaaacaatggagacttctcctcctggggcaggttacccctgaagtag

SEQ ID NO: 1014896 - DNA, 120 bp, Artificial Sequence
  ENSG00000234945_24 (sequence is synthesized)
atcctcgtggggtgcttcggggcactacaggctcaggttcagatgagctctcacttgggccctcactttcttccacatcttcagcctcaacctggagaaaaaagtcttcatcccgtggag

SEQ ID NO: 1014897 - DNA, 120 bp, Artificial Sequence
  ENSG00000258364_0 (sequence is synthesized)
accaatgcctggctacaggatcccctgaaactggaacaagcccttctttgacttcaacctgcttttcagaaaccaggggagatatggcgggaggggaatacttagcttccacataggcca

SEQ ID NO: 1014898 - DNA, 120 bp, Artificial Sequence; identical to SEQ ID NO: 990990
  ENSG00000258364_1 (sequence is synthesized)

SEQ ID NO: 1014899 - DNA, 120 bp, Artificial Sequence; identical to SEQ ID NO: 990991
  ENSG00000258364_2 (sequence is synthesized)

SEQ ID NO: 1014900 - DNA, 120 bp, Artificial Sequence
  ENSG00000258364_3 (sequence is synthesized)
ccccgcacatacacccatctatgactatttcaataactcctataacagatggaatttttgcaagttttagaataacaaataacattaaaaatccttatgaataaacattaatttacctaa

SEQ ID NO: 1014901 - DNA, 120 bp, Artificial Sequence
  ENSG00000258365_0 (sequence is synthesized)
aattcatagcagatgctgctgcacactgagggaggacggagcatatacttaatacaggatgtgattagcagaggaagatgacctttctagcaggctagagttaacacccagagtctgagc

SEQ ID NO: 1014902 - DNA, 120 bp, Artificial Sequence
  ENSG00000258365_1 (sequence is synthesized)
cacccagtaatgacacgctcagtatcacaacaaacaaatcaaatgccaatgtgaaatgcaacacacgcagagggcactgtgttgacacctttctgtatttcatgatgcaaggtgattccg

SEQ ID NO: 1014903 - DNA, 120 bp, Artificial Sequence
  ENSG00000258365_2 (sequence is synthesized)
tgcagtctcagggcctgcaatctcatcaatctgatttacagacgtaatatttaaagacaacaacaacaaacgccatctttgaaggaccgtgcttccttcgaagaatcaggatgcccatga

SEQ ID NO: 1014904 - DNA, 120 bp, Artificial Sequence
  ENSG00000258365_3 (sequence is synthesized)
aagaaggaagggagaagacagaaggaagatgctcgcccatacagagacagagggagggggggctccaaagccgaaagaggaggtccccaagtactgtggacactagccaggtatatatgc

SEQ ID NO: 1014905 - DNA, 120 bp, Artificial Sequence
  ENSG00000258365_4 (sequence is synthesized)
agaggctgcaggaggcaatgtctgatttgcctagggctcaggggagagatgaaaacacaaatcatatggaagatgggaaccctcaggcctacctcaacttaaaaatgggtgtaataacag

SEQ ID NO: 1014906 - DNA, 120 bp, Artificial Sequence
  ENSG00000258365_5 (sequence is synthesized)
taccggccttctagcattgttagggagattaaatgtgatcatgcattcaagggcttagcacggggccaggctgctgggaaaggcttgatgatagtatcggcaataaaacctgtacaatta

SEQ ID NO: 1014907 - DNA, 120 bp, Artificial Sequence
  ENSG00000258365_6 (sequence is synthesized)
atttagaacttcttcaggaagcaaggacctacacaaaagggctctgatgtttcaaaccacttcttccctgataagcctggaagtaaagccactgaagacaaaataatgcattctatgagg

SEQ ID NO: 1014908 - DNA, 120 bp, Artificial Sequence
  ENSG00000258365_7 (sequence is synthesized)
tatatgctcacacttgtgtgcccatgttcacaaagagaggcatgatatgaaccatctctgtaggctcctgttcggggtggagggggaggcatcagtgtgcgaaggtcccagcaccacagt

SEQ ID NO: 1014909 - DNA, 120 bp, Artificial Sequence
  ENSG00000258365_8 (sequence is synthesized)
gggcagactctctggccaaggctgctaacctatgcctagacgtaatatttaaagacaacaacaacaaacgccatctttgaaggaccgtgcttccttcgaagaatcaggatgcccatgaga

SEQ ID NO: 1014910 - DNA, 120 bp, Artificial Sequence; identical to SEQ ID NO: 1000429
  ENSG00000233627_0 (sequence is synthesized)

SEQ ID NO: 1014911 - DNA, 120 bp, Artificial Sequence; identical to SEQ ID NO: 1000430
  ENSG00000233627_1 (sequence is synthesized)

SEQ ID NO: 1014912 - DNA, 120 bp, Artificial Sequence; identical to SEQ ID NO: 1000431
  ENSG00000233627_2 (sequence is synthesized)

SEQ ID NO: 1014913 - DNA, 120 bp, Artificial Sequence; identical to SEQ ID NO: 1000432
  ENSG00000233627_3 (sequence is synthesized)

SEQ ID NO: 1014914 - DNA, 120 bp, Artificial Sequence; identical to SEQ ID NO: 1000433
  ENSG00000233627_4 (sequence is synthesized)

SEQ ID NO: 1014915 - DNA, 120 bp, Artificial Sequence; identical to SEQ ID NO: 1000434
  ENSG00000233627_5 (sequence is synthesized)

SEQ ID NO: 1014916 - DNA, 120 bp, Artificial Sequence; identical to SEQ ID NO: 1000435
  ENSG00000233627_6 (sequence is synthesized)

SEQ ID NO: 1014917 - DNA, 120 bp, Artificial Sequence; identical to SEQ ID NO: 1000436
  ENSG00000233627_7 (sequence is synthesized)

SEQ ID NO: 1014918 - DNA, 120 bp, Artificial Sequence; identical to SEQ ID NO: 1000437
  ENSG00000233627_8 (sequence is synthesized)

SEQ ID NO: 1014919 - DNA, 120 bp, Artificial Sequence; identical to SEQ ID NO: 1000438
  ENSG00000233627_9 (sequence is synthesized)

SEQ ID NO: 1014920 - DNA, 120 bp, Artificial Sequence; identical to SEQ ID NO: 1000439
  ENSG00000233627_10 (sequence is synthesized)

SEQ ID NO: 1014921 - DNA, 120 bp, Artificial Sequence; identical to SEQ ID NO: 1000440
  ENSG00000233627_11 (sequence is synthesized)

SEQ ID NO: 1014922 - DNA, 120 bp, Artificial Sequence; identical to SEQ ID NO: 1000441
  ENSG00000233627_12 (sequence is synthesized)

SEQ ID NO: 1014923 - DNA, 120 bp, Artificial Sequence; identical to SEQ ID NO: 1000442
  ENSG00000233627_13 (sequence is synthesized)

SEQ ID NO: 1014924 - DNA, 120 bp, Artificial Sequence; identical to SEQ ID NO: 1000443
  ENSG00000233627_14 (sequence is synthesized)

SEQ ID NO: 1014925 - DNA, 120 bp, Artificial Sequence; identical to SEQ ID NO: 1000444
  ENSG00000233627_15 (sequence is synthesized)

SEQ ID NO: 1014926 - DNA, 80 bp, Artificial Sequence; identical to SEQ ID NO: 1000445
  ENSG00000233627_16 (sequence is synthesized)

SEQ ID NO: 1014927 - DNA, 120 bp, Artificial Sequence
  ENSG00000233625_0 (sequence is synthesized)
gttcgtgtggctgttggcaggaggcctcagtttttcaccttctggacgcctgcacagggctgcttaagcagcctcacaacatggcagctgactctcgccatcgtgagtgattcaagagag

SEQ ID NO: 1014928 - DNA, 120 bp, Artificial Sequence
  ENSG00000233625_1 (sequence is synthesized)
agcaagatggaagccgcaatatctatgatgacctggtcacagtctgtcatttccacaactggtaacacaggttggccaagttcaagccccagttccgggatggagagctccatgccttgg

SEQ ID NO: 1014929 - DNA, 120 bp, Artificial Sequence
  ENSG00000233625_2 (sequence is synthesized)
gagaagaaaggtttcctttgagccctgccaggatcttgttacagtctccacagagcaagacttcagggtcagggtgttgcattatgaagacaggagccgtggagcctccagcaggagaca

SEQ ID NO: 1014930 - DNA, 120 bp, Artificial Sequence
  ENSG00000233625_3 (sequence is synthesized)
atggcttccattgagataatatgacttaacgaggccacaagtccacagccaccactcaggaaacaataaccatttcaagagggcacaggaggtgttacagagaggcgtggtgacacaccc

SEQ ID NO: 1014931 - DNA, 120 bp, Artificial Sequence
  ENSG00000233625_4 (sequence is synthesized)
cacccaccgtggcctcagagatggtgctaagggagaaagtttgctgggatttgtctgaaaaggtcagttattaaaaacagcttctggctgggcgcgctggctcacacctataatcctacc

SEQ ID NO: 1014932 - DNA, 120 bp, Artificial Sequence
  ENSG00000233620_0 (sequence is synthesized)
gttgcaggtttcaaatgtgctttctgtgagaaagtcaagaaggtgccactcccagccaaggataatcctaatccctgacttcagcttcttgctatctacaccatctgtaaaggttaccta

SEQ ID NO: 1014933 - DNA, 120 bp, Artificial Sequence
  ENSG00000233620_1 (sequence is synthesized)
tatgaatttttccataaaagcatcatcttcaggaaggacctcaggatccttcctgaggatggtataacttcgcgggagccctcccagaaagactcctgtgttatctccaataacagtact

SEQ ID NO: 1014934 - DNA, 120 bp, Artificial Sequence
  ENSG00000233620_2 (sequence is synthesized)
accattcaggatggcagaggaacctagagaagaggagatgagaaatacaccttcaccaggatactctagttttactagctcagcaaataataaaatccttcaccagcctttgggatacca

SEQ ID NO: 1014935 - DNA, 120 bp, Artificial Sequence
  ENSG00000233620_3 (sequence is synthesized)
ggtaatagtccttccttttatataaatgcacaaatacatgcatgtgtgtgtgtgcacatatgcatttgaagataagtatttacctgctcctgttgtacgtcctcgactccaatcactata

SEQ ID NO: 1014936 - DNA, 120 bp, Artificial Sequence
  ENSG00000233620_4 (sequence is synthesized)
cattttagccattgacagatgtattttcaaaccaaggcatgctctgtcagaagactacaaaaatattactgcttcaggaaaccatatcagtaaccatatgatatttaaaatcttgagatc

SEQ ID NO: 1014937 - DNA, 120 bp, Artificial Sequence
  ENSG00000275401_0 (sequence is synthesized)
ggggcaggcatttatgtttaaaggcaccataccagcagtcagttccctgcagaagcatccagaagtcacaggtcctttttctgccttggcctttgaggaccatcctgacttttttgccac

SEQ ID NO: 1014938 - DNA, 120 bp, Artificial Sequence
  ENSG00000275401_1 (sequence is synthesized)
cttttgccaactggctgtggctgcttgaacagatgccaggggaaggaatctgggtccacttgaggaagctgtaactgatgacagatgtctgccacagtggaggggacagcagtagaatac

SEQ ID NO: 1014939 - DNA, 120 bp, Artificial Sequence
  ENSG00000275401_2 (sequence is synthesized)
attacctaagtctaagcagtaatacagtacctaagtctgcatatttcatccggcatcagatcatcatgggtgcctctcgccactgttgcatgtgaggcaggagccatcccaggtcttaag

SEQ ID NO: 1014940 - DNA, 120 bp, Artificial Sequence
  ENSG00000275401_3 (sequence is synthesized)
ggcctgaggaactctgagaagagcagtccattaaccaaggtggcccaagagccaggattaggtcaaggaggcgtggcccttgctgggatatgtgcccagtatgagggcctgaggaagcag

SEQ ID NO: 1014941 - DNA, 120 bp, Artificial Sequence
  ENSG00000275401_4 (sequence is synthesized)
ctggttggagactccacagcagaactgacagccaggagaatggagagctgggagagtgaggctcattcactcaaaaagcattgtgcatttacttgggagccagacgctaagctggagaaa

SEQ ID NO: 1014942 - DNA, 120 bp, Artificial Sequence
  ENSG00000275401_5 (sequence is synthesized)
aggatacaagggtgagtaaggcagtttgtgtcctcaaggagatcccagcccagataaatatatgtagctgtgtttcagaggcttggttccagaccactgcaataaagtgagttgcacaca

SEQ ID NO: 1014943 - DNA, 120 bp, Artificial Sequence
  ENSG00000271538_0 (sequence is synthesized)
gcaccgcgcccgccaccgccctggcagcccgacttcctgctggaggtttcctgtggcttggggctccgcccggtatggggaaagtttaaggcggaagagccctcgtttgtcggctgcttg

SEQ ID NO: 1014944 - DNA, 120 bp, Artificial Sequence
  ENSG00000271538_1 (sequence is synthesized)
ggaagtctgaggattactgggactaacaggacttcagctggggcttcaacgtgtggtgtgggcttcctgacaccacggccactggtttccaagagtttcaacaatattttcatcatattt

SEQ ID NO: 1014945 - DNA, 120 bp, Artificial Sequence
  ENSG00000271538_2 (sequence is synthesized)
attgaaggcctcactgacagacttctcaaggcccctctaccttctattcgctgcctggccccaaagccagtgccacacattttaggtttttaactgcagcagcacctatgatgtttccaa

SEQ ID NO: 1014946 - DNA, 120 bp, Artificial Sequence
  ENSG00000271538_3 (sequence is synthesized)
aatctgtatcattaaagtttgatcagagaagcaaaaccaccttgagcaaaacaaggaatttattaaagagattaggatacacattgttatgaaagctgcaacctgctgcccctgtgtcca

SEQ ID NO: 1014947 - DNA, 120 bp, Artificial Sequence
  ENSG00000271538_4 (sequence is synthesized)
gaagtgggcctgaagtcagcagggctggcaaatggatgtgcagtgggagagagtaggcgtgagctgcacctgcagggaggagatggaactcctgtggatggactgaaactgatgtcttcc

SEQ ID NO: 1014948 - DNA, 120 bp, Artificial Sequence
  ENSG00000271538_5 (sequence is synthesized)
acgtcagcctctcaggcctccaacactccagcgctgatgatgaagatgacctgcagaggagctggtgcccttcaccatggaattgctcataaacccaagattcagtgaagctgaagaagc

SEQ ID NO: 1014949 - DNA, 120 bp, Artificial Sequence
  ENSG00000271538_6 (sequence is synthesized)
agttctggtgggagctggaggaactgcaggcacagctgctgccctgtaccaatacattgagccagtggctgcctggcattgtgtgtgagccaccacagcgcctggccctacacagacttt

SEQ ID NO: 1014950 - DNA, 120 bp, Artificial Sequence
  ENSG00000271538_7 (sequence is synthesized)
gactgtaaatatgactgctgtttcacttctgccttccaaattttgctcagattttctgagaaacatagttcagcttaggtacattgacacagtacaaagccaccgcagtggctggttagg

SEQ ID NO: 1014951 - DNA, 120 bp, Artificial Sequence
  ENSG00000271538_8 (sequence is synthesized)
gagggattatgaatgcaggctgagaatgcacgggaagcgtttgtctatttatagagtaggtaccattcaaggatttatgtgaatcaggtgcaaagaactcacacaaagatggggaaagtt

SEQ ID NO: 1014952 - DNA, 120 bp, Artificial Sequence
  ENSG00000271538_9 (sequence is synthesized)
agtacttagaaatcagtgatactagataaccaataaataaaaataaacttatttttagaaaataagaaaatagaaaagctttaataaaatagtattgggccgggtgcagtggctcacgcc

SEQ ID NO: 1014953 - DNA, 120 bp, Artificial Sequence
  ENSG00000271538_10 (sequence is synthesized)
aataaaaataaaaataaataaataaaatagtattgaaatggtgaataatactatttcagcacatcctaaacagatcatgcagatagtaagaggttttctgcatgagtttgctagggctgc

SEQ ID NO: 1014954 - DNA, 120 bp, Artificial Sequence
  ENSG00000271538_11 (sequence is synthesized)
gttttctgcatgagtttgctagggctgccgtaacaaaacaccatggacgggagctttaacaacagaaattgatttctcacagttctgcaggcagggtgttcaggaccaagatattggcag

SEQ ID NO: 1014955 - DNA, 87 bp, Artificial Sequence
  ENSG00000271538_12 (sequence is synthesized)
agttctgcaggcagggtgttcaggaccaagatattggcaggcttggtttctctgaatcctctctccttggcttgcaggtggcagatg

SEQ ID NO: 1014956 - DNA, 120 bp, Artificial Sequence
  ENSG00000271538_13 (sequence is synthesized)
aggtggctgctttcttgctgtgtgttcacatggtcattcgtctgtgtgtgcacacgtgtagtgtctgtgtctgtgtcctagcctcctcttcttataaggacaccagtcaaactggattag

SEQ ID NO: 1014957 - DNA, 120 bp, Artificial Sequence
  ENSG00000271538_14 (sequence is synthesized)
ggcccactttcctgacccccttttaccttaattcccattttaaaaggcttatcttcaaataccatcacattctaaggtactgggggttagagcttcaatatgtgagttttagggagacac

SEQ ID NO: 1014958 - DNA, 120 bp, Artificial Sequence
  ENSG00000271538_15 (sequence is synthesized)
agttgagctcataacattttctatagaacaatcaagtttgagacatgccacatgctatattttcttcttggaaatttgcaaggtatatatgcatatgaatgactgtgcaaagtcctggaa

SEQ ID NO: 1014959 - DNA, 120 bp, Artificial Sequence
  ENSG00000271538_16 (sequence is synthesized)
aacatccagtattcatctttcacactctccctgtttgatccattatttattgataaccttccactggcttcctttatgcattggctgagtgcattgagctgccgcatggaaatatgatct

SEQ ID NO: 1014960 - DNA, 120 bp, Artificial Sequence
  ENSG00000271538_17 (sequence is synthesized)
gccggctgccgctggcagtcaggaagggaaggtggacatggagagagcaagcaaaagctggagtctcaaggagatgaagtggaacccagggctgtatctcattagagcgcatgttggcct

SEQ ID NO: 1014961 - DNA, 120 bp, Artificial Sequence
  ENSG00000271538_18 (sequence is synthesized)
ctcatcacttccaggcctccggctttgaagatgctcggggagttgctttggagggctacgtggagagaatgggattggtaagtgggcaagagggttggttcttgctggatggaattgcgt

SEQ ID NO: 1014962 - DNA, 120 bp, Artificial Sequence
  ENSG00000271538_19 (sequence is synthesized)
cttccatctcttccaaggggacttctggattgccaggggcctggcatgtcctgcctcacccatacttgctggccagggtgagtggcctctcacctggcctaaccttgctgccctctttgt

SEQ ID NO: 1014963 - DNA, 120 bp, Artificial Sequence
  ENSG00000271538_20 (sequence is synthesized)
tgtgctctttgtgggtgaggaaaagagcagagctgcggatgccactggagcgtggccaggctgggtgaggacccacacagaaaagtgtgggcaggcgtggtgggtgggggcgggggataa

SEQ ID NO: 1014964 - DNA, 120 bp, Artificial Sequence
  ENSG00000271538_21 (sequence is synthesized)
ggcatgggccctgggcagtcagccagtgcccccgtcacgccctggctccaggtgtccagcatcagccgtgtgcacatcccacctcgcaggcctctcccggctgctggcccactttctgca

SEQ ID NO: 1014965 - DNA, 120 bp, Artificial Sequence
  ENSG00000271538_22 (sequence is synthesized)
tgctactcctacttctctgacctcctgctcagctcagctatcctagctccgagtttcgcctttcttcttgaatacaatcagaattctctctgttggccctggacccccatgctgaacaat

SEQ ID NO: 1014966 - DNA, 120 bp, Artificial Sequence
  ENSG00000271538_23 (sequence is synthesized)
tcccatggtgctggccttctctcaatcctctgaattaaaccccagactcactgcaagtcttcagccaagtgaagacttccggtggcctctctgccaccctggcactcgaggaagcagatg

SEQ ID NO: 1014967 - DNA, 120 bp, Artificial Sequence
  ENSG00000271538_24 (sequence is synthesized)
cttctctctcttcctgtagtgctcttaccatgaatcatctccaggtcctcccaacaggatcagtcagctcctcatctcagctgtgctgtaaccctggtatctctgcagcctggtgaagat

SEQ ID NO: 1014968 - DNA, 120 bp, Artificial Sequence
  ENSG00000271538_25 (sequence is synthesized)
gacggtgttttaatgaagcgtacatctctacagtaactggcctggcacatgcaaacaggaacagcagcttcctctcctgcaaggcacggtgcagattgctttccacgcattatttctgct

SEQ ID NO: 1014969 - DNA, 120 bp, Artificial Sequence
  ENSG00000271538_26 (sequence is synthesized)
cctcgcaccaccctccccaacccgaaagatagagcatattgtcctaattttaccaagcagaaaactggctcccagagagcagctctgctcagctagggcatgtcagagcactgcctggga

SEQ ID NO: 1014970 - DNA, 120 bp, Artificial Sequence
  ENSG00000271538_27 (sequence is synthesized)
cccacatctcctgactccagggccaaggcacctctgggccctcacacgggcattaatagagatacatttcatgttcaaaccagccctttggccaagcatcatcctcagtctctcagaact

SEQ ID NO: 1014971 - DNA, 120 bp, Artificial Sequence
  ENSG00000271538_28 (sequence is synthesized)
tactgcattttcttctaaaccccaattcaaaagttccatatagcatggtggttcgtgcctataatcccagtgggaggccaaagtggggggactgcttgaagccaggaatttgagaccagc

SEQ ID NO: 1014972 - DNA, 120 bp, Artificial Sequence
  ENSG00000271538_29 (sequence is synthesized)
ctgggtaacaaagcgagaccccatgtgtaaaaaataaaataaatgaaaaattagctgggcgtgaaggtgcactcttgtagtcccagctactccaaagtctaaggcgggagaattacttaa

SEQ ID NO: 1014973 - DNA, 81 bp, Artificial Sequence
  ENSG00000271538_30 (sequence is synthesized)
tcccagctactccaaagtctaaggcgggagaattacttaagcccaggagttcgaggctgcaataagtcatgattgtaccgt

SEQ ID NO: 1014974 - DNA, 75 bp, Artificial Sequence
  ENSG00000271538_31 (sequence is synthesized)
agggttgcacatacctgctaggaggtcaaggctgcagtgagctgtggccgtaccactgcactccagcctgggcga

SEQ ID NO: 1014975 - DNA, 120 bp, Artificial Sequence
  ENSG00000271538_32 (sequence is synthesized)
ctctccagaacaaatgagacagccagcattgggggtagggtgggaaaaggaaatggcagtcactggtggacacagcttggggcaggagcttcagtaggtgtcaccaggcctgtgggtctc

SEQ ID NO: 1014976 - DNA, 62 bp, Artificial Sequence
  ENSG00000271533_0 (sequence is synthesized)
ttctgttccattggtctatgtgtctacttttataccagtaccacgggtttaccccaaaagtt

SEQ ID NO: 1014977 - DNA, 120 bp, Artificial Sequence
  ENSG00000271533_1 (sequence is synthesized)
accaaaaaccacttttaccccaaaagttactgaaataagtatttttaaagattttaaaaaatagagaggaaagaggaggctatgaaattccataatggagttacagatgcttgacataat

SEQ ID NO: 1014978 - DNA, 120 bp, Artificial Sequence
  ENSG00000271533_2 (sequence is synthesized)
ttagtggatattggatttagaagcttacatgaatgaggcaaacctgagatctgtgatatttgtaaatgaagataggagtgaacttactgcccttaggagtggagggagggaaggaaggga

SEQ ID NO: 1014979 - DNA, 120 bp, Artificial Sequence
  ENSG00000271533_3 (sequence is synthesized)
gaaaatgagagatgccataaaatctattacttcaatggatttgaagtaatcctttgaagcaggcagtgagacttacttcataaatccatacctttttaatgtggattggagagaagttgt

SEQ ID NO: 1014980 - DNA, 120 bp, Artificial Sequence
  ENSG00000271533_4 (sequence is synthesized)
tgcgctgtaatacctctgttgctactgtgagagtcattgccagccactattctcatgtcaagctgcccttgaggaggtttctcttgacccaatttagaaacaacccaaaacaaggtttgt

SEQ ID NO: 1014981 - DNA, 120 bp, Artificial Sequence
  ENSG00000271533_5 (sequence is synthesized)
aacttagaggaattctttgattctgtgacaaggggtctgtgaccctcttaaagggatcaagtacacaggagatagtacaagtagtactaaatagccagcttaaaaaattggataggtgag

SEQ ID NO: 1014982 - DNA, 120 bp, Artificial Sequence
  ENSG00000271533_6 (sequence is synthesized)
atgagacaggaacagtggacagaatggctctaggcatccccaaacaccacatctgggataaggaaatagtacaatggaaagtctatccttggacctactatttgtcattccccatggcat

SEQ ID NO: 1014983 - DNA, 120 bp, Artificial Sequence
  ENSG00000271533_7 (sequence is synthesized)
gatggaatatctaaaataaaaagagttgctttggagaaggattgcaaaatattatttcatagaagagatttagaagaggggaaactcccaattacataaggtgggcattatagcttctca

SEQ ID NO: 1014984 - DNA, 120 bp, Artificial Sequence
  ENSG00000271533_8 (sequence is synthesized)
aaacattggttccctatatgggtcatgaagattgatcccagtatcagcctatggcttactaggccagtttaactgaaagatttaatgagcttggaaggatgctgccacctgcactctcac

SEQ ID NO: 1014985 - DNA, 120 bp, Artificial Sequence
  ENSG00000271533_9 (sequence is synthesized)
tttggcgggtgtttatcaccagtgagtgcggtccctaaaggagcaaaaggacaataagcacccagtggacaacagtgtggcattttgagtgaagatagcaactgaaaaggtcatcggctt

SEQ ID NO: 1014986 - DNA, 120 bp, Artificial Sequence
  ENSG00000271533_10 (sequence is synthesized)
ggctagattgggctgggcttgttttttaaaaataaaaaaaaagttttccttcatgataaaagtaacaggtgatcattgttaaaaaataaagtatgaattaaaaagtaaataatatgtata

SEQ ID NO: 1014987 - DNA, 120 bp, Artificial Sequence
  ENSG00000271533_11 (sequence is synthesized)
agccagaaaactaatttgtaatattcaggtgtatgtcctttcattctttttaaaaattatgtatataacacagttttataacaaaattgacatcatattgtatatatcattttattatct

SEQ ID NO: 1014988 - DNA, 120 bp, Artificial Sequence
  ENSG00000271533_12 (sequence is synthesized)
tattatctaattttttcatttgaaaattcacaagcatatttccatgttattgttctttgaaaaatacaatattaagtgctccataatatcttatggatttaacaaagtttatttagatga

SEQ ID NO: 1014989 - DNA, 120 bp, Artificial Sequence
  ENSG00000271533_13 (sequence is synthesized)
tgtcatgttattggacattttgattattaccaagtttgcgtataaaatttaaatgtaatgaacatcattgtacattaacctttatgcacatctggaattatttctttagaataaggttcc

SEQ ID NO: 1014990 - DNA, 120 bp, Artificial Sequence
  ENSG00000271533_14 (sequence is synthesized)
agaattaaaattatttagtttggatgatgagagcatttattagagcatctgacaggtgatgctgaattttcctcaatacagttgtgcaaattgcattcccaccagtagtgtataaatgtg

SEQ ID NO: 1014991 - DNA, 120 bp, Artificial Sequence
  ENSG00000271533_15 (sequence is synthesized)
tgctttaaaatttttatttctaatttacacacagtaaaattcactctttttagtatatggttctatgggttttgacaaatgcacagtcatgtatcttctacactagtaccatacagagaa

SEQ ID NO: 1014992 - DNA, 120 bp, Artificial Sequence
  ENSG00000271533_16 (sequence is synthesized)
gttctgtcactttaataatttctcttggtggctctttttgtattcaaccccttaccccatactcaatctctggaaaccatcaatttattcttcatccctatggttttgccttttccagaa

SEQ ID NO: 1014993 - DNA, 120 bp, Artificial Sequence
  ENSG00000271533_17 (sequence is synthesized)
ggtcatataagtggaatcaagcaatatgtagcccttttggtctggcttctttcacttagtaaaacgcagtcaagattctcccatgttttgtggataattatttcattcctttttatcact

SEQ ID NO: 1014994 - DNA, 120 bp, Artificial Sequence
  ENSG00000271533_18 (sequence is synthesized)
gagtagtacttcattgtgtggatgtaccacagttttattatccattcactaactgatgaacttgtaagatgtttctagttttggtgaatatgaacaaatttgctataaactttcaggtat

SEQ ID NO: 1014995 - DNA, 120 bp, Artificial Sequence
  ENSG00000271533_19 (sequence is synthesized)
aagttttgtgtgataaatgctcatttttatagggtaaatgctttggagtgggaatgagtgccagactgttttctaaagtttccctagcattttgcattccaattacaaatatgtgagagt

SEQ ID NO: 1014996 - DNA, 120 bp, Artificial Sequence
  ENSG00000271533_20 (sequence is synthesized)
tccctagcattttgcattccaattacaaatatgtgagagttccagtagctttgtatctttaccagtatttagtaattttgtattatacatatatatgtatgtaaatatatatatatattc

SEQ ID NO: 1014997 - DNA, 120 bp, Artificial Sequence
  ENSG00000271533_21 (sequence is synthesized)
tgatatatggtattatcttttatttgtttataattgacacataattatttatgggatacattgtgatgtttcagtacatgtgtacattgtataatgatcaaatcaggatatcacctcaaa

SEQ ID NO: 1014998 - DNA, 120 bp, Artificial Sequence
  ENSG00000271533_22 (sequence is synthesized)
ccttatgatgatcttacagttaaagatgatatattcttgcaaagtgtctgttcagatcttttgctcccctttttattggattattccttttcttactgtttttatatgttttttaatata

SEQ ID NO: 1014999 - DNA, 120 bp, Artificial Sequence
  ENSG00000271533_23 (sequence is synthesized)
ttgatacaaatcctttgtcagatacattatttggaaatagattttcctagtctgtgacttgtcttttcattctttgaacactgacttttttagagcaaaaattttaattttgatacaatt

SEQ ID NO: 1015000 - DNA, 120 bp, Artificial Sequence
  ENSG00000271533_24 (sequence is synthesized)
cactttatcaatttttttacttttgatgtgcaatgtaagaacacttgtctaacccaatgtcatgaagattatatattattttcatccaggaattttatagttttaagttttacatttata

SEQ ID NO: 1015001 - DNA, 120 bp, Artificial Sequence
  ENSG00000271533_25 (sequence is synthesized)
tctatgatactttttgaataaaggtttgtataaagtttagctatgggtcaaggttcagtttttaaaatatggctatctaattgttctagtaccatttgttgaaaagattgtttctttttt

SEQ ID NO: 1015002 - DNA, 120 bp, Artificial Sequence
  ENSG00000271533_26 (sequence is synthesized)
attgcattgcttttgcacttctgtcaaaaaatcaattgattatatttgtttgggtctaattctgggctgcctattctgttccattgttatccattcacaaataccacactttcctaatca

SEQ ID NO: 1015003 - DNA, 120 bp, Artificial Sequence
  ENSG00000271533_27 (sequence is synthesized)
taggaagtcttaaaattagatagtgtgtacaacttcgtccgtctcaaaaatcgtgttgattactactttgcttttccagaaattttagaattgttgctttctataaaaaattctgctagt

SEQ ID NO: 1015004 - DNA, 120 bp, Artificial Sequence
  ENSG00000271533_28 (sequence is synthesized)
atatctgttgagttagaactatagatgaatttgaagaaaatttacatcctcacaatattttgtctttaggccacaaacatgatatagctgtatatttattttggtcttgcttttttttcc

SEQ ID NO: 1015005 - DNA, 120 bp, Artificial Sequence
  ENSG00000271533_29 (sequence is synthesized)
actttcagcatacagatcctggacatattttatatttataccaaatattttatatattttctactgttgtcaatggtagtggtttttaaattttcaaacattcattactagtatatagaa

SEQ ID NO: 1015006 - DNA, 120 bp, Artificial Sequence
  ENSG00000233760_0 (sequence is synthesized)
ggagctggggttcttacccactccagtgactgcctctcagaaaagaacagggcaatgtccattctccttttattttctttaagcacctgatcattctaaaagcatgtgttcctccgtgtg

SEQ ID NO: 1015007 - DNA, 120 bp, Artificial Sequence
  ENSG00000233760_1 (sequence is synthesized)
tgtgagttgtgtacacgtgtgtgtgtgttcctttcttttctcggactccaggctcatgactgcttatttgcatggtgttttggtgtcaaaggagtgttgaatgtgttctccacacaccca

SEQ ID NO: 1015008 - DNA, 120 bp, Artificial Sequence
  ENSG00000233760_2 (sequence is synthesized)
gctttattccactctaggagtttaacttcttcagcattgttatgaggtccccggtgacctcagtttctcctctccgcgtcatccaggacttcacctgaagcttgagctacacgtaagact

SEQ ID NO: 1015009 - DNA, 120 bp, Artificial Sequence
  ENSG00000233760_3 (sequence is synthesized)
tcatctaccttgcacagggcaatggagagaggatggcataccagaatcaccagatgacagacatcggggtgctgtcggacccgggaatcagaacctctgcagatagatattttggaaggc

SEQ ID NO: 1015010 - DNA, 120 bp, Artificial Sequence
  ENSG00000233760_4 (sequence is synthesized)
gctccctagattggcacctctggttagaaccctgcccagggactggacaagttgggcccatggctcatatctggccagtgttcattgctttgttgaatcacacttaatcctttggttttg

SEQ ID NO: 1015011 - DNA, 120 bp, Artificial Sequence
  ENSG00000233760_5 (sequence is synthesized)
gtccagctataaccagacttgcctgtcctaaacaaatggattgactgcttccggcatcctcactttacttctgcatggtgaccaacatccggagcttaattacctgacagccaggagcca

SEQ ID NO: 1015012 - DNA, 120 bp, Artificial Sequence
  ENSG00000233760_6 (sequence is synthesized)
ggcttctgctgccatctggaaggtcctctgcaggaggtggcccctgtgttgcggtctgtggactgcgctgccctttcagctgtgctcctctgtgtgtagagccgaagtaggcccacagtg

SEQ ID NO: 1015013 - DNA, 120 bp, Artificial Sequence
  ENSG00000233760_7 (sequence is synthesized)
tggggagaaggccctgtagaagccacaagtgagataccatgagctgggagtggggtcatctgggtggacaatgacctgacctgaggatactggatctctgagtcctgggaaaagcacaga

SEQ ID NO: 1015014 - DNA, 120 bp, Artificial Sequence
  ENSG00000233760_8 (sequence is synthesized)
ccagcattatcaggcacagagtgctttctttgcttttagattgacagagatgatggtaatctcactcactgggcaaagtaggggaggtggtgacattactctgtttgtcagggtgaccag

SEQ ID NO: 1015015 - DNA, 120 bp, Artificial Sequence
  ENSG00000233760_9 (sequence is synthesized)
cagccaagggaggccacggacacactcaggggagatgagcacagccaccccctagaatgagggtttttgatgtttgcttgaatgttttaattgtgataaaataaacataatataaaatgt

SEQ ID NO: 1015016 - DNA, 120 bp, Artificial Sequence
  ENSG00000233760_10 (sequence is synthesized)
aacaataaaaccttgtatatagttttctcctataagaaacttctcagatatttaccaaaatcctggaaaaatatatattggtcaatataccacaattcccacaagaggtaaatatttaca

SEQ ID NO: 1015017 - DNA, 120 bp, Artificial Sequence
  ENSG00000233760_11 (sequence is synthesized)
aaatctactttgggcggtgatgctgcaagaatattaaaaggcgttgactttatcgtcaagtgaattatttcttaattttttaaaatttaaatcacagtatatttgacaagctacagcagt

SEQ ID NO: 1015018 - DNA, 120 bp, Artificial Sequence
  ENSG00000233760_12 (sequence is synthesized)
aggaaaacacctttgctttaaacaaaactaccttttctcagcaagaacagttactagagtgggaaataaggttaatttcagttttattaataatatctgaaatgaaataatgttacaact

SEQ ID NO: 1015019 - DNA, 120 bp, Artificial Sequence
  ENSG00000233760_13 (sequence is synthesized)
ctcccctctaacctcgttgctagacaacttagaatatttatttatttctccttcagagaaaataagagtggatgttacctttaagcaacatacacatttaattaatgaacacaaggaaaa

SEQ ID NO: 1015020 - DNA, 120 bp, Artificial Sequence
  ENSG00000233760_14 (sequence is synthesized)
tccatttgctaaaaacaaatgatgtggcatttgaatttaagacttctatcaaaagcagttgagtgtctgtaatcagttctcacctttacattttaatggagttgaggttgagccgttgca

SEQ ID NO: 1015021 - DNA, 120 bp, Artificial Sequence
  ENSG00000233760_15 (sequence is synthesized)
tttacaattatctaggctgacttcatgcctttgaaatgacttaaaaagattagcattcatggattatttattagctcctcgtgaacgtatttccaagaatggaaacaacgtattgcatca

SEQ ID NO: 1015022 - DNA, 120 bp, Artificial Sequence
  ENSG00000233760_16 (sequence is synthesized)
aagtctagtttccaagtttaactcttttaatgaacagcatgactgtacgatgctgcaaaaggcatctctgaagtcacaggacattttgtcatgcttttcccttcaagtgcatctttagta

SEQ ID NO: 1015023 - DNA, 120 bp, Artificial Sequence
  ENSG00000233760_17 (sequence is synthesized)
gcagtctttgttccttgcaagctcagggagaatgttgattccagccctggcagctgcccgagatgccctgtaaacactacggctagcagaaagcaggctgctcaggggggcaaggcagct

SEQ ID NO: 1015024 - DNA, 120 bp, Artificial Sequence
  ENSG00000233760_18 (sequence is synthesized)
gatcccagcctgctgtagctatcactgatagggaatgcctgtctggggctcggcagagaactcagtgacatgatggccctggcagtttaacccaaacacacttttctgcctagataacaa

SEQ ID NO: 1015025 - DNA, 120 bp, Artificial Sequence
  ENSG00000233760_19 (sequence is synthesized)
aaatgtcatgcctgagtccctgatagcaaccccagaggagctccaggtttgaggcagcgctggcaggacgtggtctatctgccatctgaagcccttcattgcccgcctggctgtgaatct

SEQ ID NO: 1015026 - DNA, 120 bp, Artificial Sequence
  ENSG00000233760_20 (sequence is synthesized)
cacctcctctgtagtggaaaacaggctgaacagaactggcaggcaggtaagggacagcaaaccttgcagggagggcctagtgctgaagctaagccagccctttgagttcaagctcaaaga

SEQ ID NO: 1015027 - DNA, 120 bp, Artificial Sequence
  ENSG00000233760_21 (sequence is synthesized)
catgtgatgccagctttgcaggggagctaagattcttccgagaaaaagcagaatgagagagagatatgcagctgcagtggaggacttggaagagaacaacgccaggtcctggatcctgca

SEQ ID NO: 1015028 - DNA, 120 bp, Artificial Sequence
  ENSG00000233760_22 (sequence is synthesized)
agaatctcctctggaaaagcaggggagagaaaagcaaggaaggaagcagggtcaccgcaagtgtgggatttgtcttattaaaatctgatactgtgtggcagtttgcttcactcttggtat

SEQ ID NO: 1015029 - DNA, 120 bp, Artificial Sequence
  ENSG00000233760_23 (sequence is synthesized)
aaaatgtctgagctccatgttaaagtaaatgtaagtaatataaatctgcctttcctgaggtgaaaatagatccatattatttaaaatatgaactgagatagatgacagttacaaacatta

SEQ ID NO: 1015030 - DNA, 120 bp, Artificial Sequence
  ENSG00000233760_24 (sequence is synthesized)
tacttgttcttattataattcttactaagctcaaggaataaaaactgggatgatgaaaaagaagttctgaatgtaaaaattggtgttttggataaaatacaaaccaacccagaaatgatg

SEQ ID NO: 1015031 - DNA, 120 bp, Artificial Sequence
  ENSG00000233760_25 (sequence is synthesized)
atcacattaatctttaaaacttcacaacaatgctttgagcctggtgcttttattattcccattgtacagttaataaaacaggtttacgtagttagtggctgagctgggttgcagactcag

SEQ ID NO: 1015032 - DNA, 120 bp, Artificial Sequence
  ENSG00000196951_0 (sequence is synthesized)
agtaaagaagcgaagctaagcggcgctggtgaagcggctcatcaggtctatcaggaaacctgagaattggagtgagaatcccagtgtggaaaatcaggaaagaggctggtatgagcgaca

SEQ ID NO: 1015033 - DNA, 120 bp, Artificial Sequence
  ENSG00000196951_1 (sequence is synthesized)
gagaagtcattcaggaaagaggttattgaattcattggagaatgaatgctgttctgaatttgtttacctcaacaaatagcttacacctccaatcctgtcttggcgtgccctgctcagaag

SEQ ID NO: 1015034 - DNA, 120 bp, Artificial Sequence
  ENSG00000196951_2 (sequence is synthesized)
acacaagacacaccaggagtgacgtgaggaaacaggcagtaaagataagcctttgcgactgggttactcagaccctccctgacaaggaggagcccatcttgagtgtcccaggagacctgg

SEQ ID NO: 1015035 - DNA, 120 bp, Artificial Sequence
  ENSG00000196951_3 (sequence is synthesized)
accttgtggacatcctgcagaatggcatatggatccattacaatgatgacatcatgctgactgggcaagatgacaagaggttgctatacaccagagggcttgggaagacacatgccctgc

SEQ ID NO: 1015036 - DNA, 120 bp, Artificial Sequence
  ENSG00000196951_4 (sequence is synthesized)
agaagcaatgcaaaaaaatgctaggtgacacctgcacatgcagtggctacattacagaagagactctgggctggccagaagcctgggagtaaaaacactgaaagattggtgaggagtcct

SEQ ID NO: 1015037 - DNA, 120 bp, Artificial Sequence
  ENSG00000196951_5 (sequence is synthesized)
ggggtagaggcatgtcaatggacatatagcattaagcattaagtgtcaagattgctgcaccacactttaatacccactaaaagtaatgggtgttacttataatcctcacagaagaggtac

SEQ ID NO: 1015038 - DNA, 120 bp, Artificial Sequence
  ENSG00000196951_6 (sequence is synthesized)
gtctttgttatcagctttctctgagctggcaggataagcacatgaatggaatcgccacagggacagagatggaggctgtgtatggacccaaaactgctggcttccacttgaaaaggctga

SEQ ID NO: 1015039 - DNA, 120 bp, Artificial Sequence
  ENSG00000196951_7 (sequence is synthesized)
tctggatactgctgcctttgaatgcacaacctgttggcactagttcttaaggagcccaatggaccatttggtgacaagtcacttacactgggtccctgccatcctggaacagtcagcagt

SEQ ID NO: 1015040 - DNA, 120 bp, Artificial Sequence
  ENSG00000196951_8 (sequence is synthesized)
tcacagaaaaacctgctcctgattacaaggatatgtcgattgcagggaggcagaggaagaaatacaacaggatgtctatcgaacacaactttggagtaagaccttgggacccaactcctg

SEQ ID NO: 1015041 - DNA, 120 bp, Artificial Sequence
  ENSG00000196951_9 (sequence is synthesized)
tttgcttcatatacaagctttgagacgtgatgagtttgcctcgattctctaagcctcagtttcctcatctgttgttgtgagggaaataatgcatggaaagcttttaacacaatggctggc

SEQ ID NO: 1015042 - DNA, 120 bp, Artificial Sequence
  ENSG00000196951_10 (sequence is synthesized)
acacagtgaaagtgcaagacgttaaccattatcatgagagttttcaattggaatgaataggagacttaaatttgcatgattgtacttttacactaagccattaatgatgcattcatttag

SEQ ID NO: 1015043 - DNA, 120 bp, Artificial Sequence
  ENSG00000196951_11 (sequence is synthesized)
ttttctactcccaaagaacatagatttgattaattataacaagaatttaaaaatatttccattattcagaaataacctacagagtctaagcctgtcctttccttcctccctttttcccaa

SEQ ID NO: 1015044 - DNA, 120 bp, Artificial Sequence
  ENSG00000196951_12 (sequence is synthesized)
catcgcatctgatctaagttcttcccagctttcagcccagcctgcttccccaggcttcagagcgcagctctgcaccaccctctccacccctgcttagcatcagaacattgccaaagctaa

SEQ ID NO: 1015045 - DNA, 120 bp, Artificial Sequence
  ENSG00000196951_13 (sequence is synthesized)
gcatctatgcaatgtttcttttgaatagttgtctacctacttggatatttttttccttctcccagaggcaaaaattggaccacttaatctatgctgtaggacagtcttgcccctcagaaa

SEQ ID NO: 1015046 - DNA, 120 bp, Artificial Sequence
  ENSG00000196951_14 (sequence is synthesized)
atacttgagcatattaagttgttatgaaatggatctgagaagcagagttctgaaccatgcccgtgaatttcccagcctcatcacactggcattctttcatagccccgaaatactttccac

SEQ ID NO: 1015047 - DNA, 120 bp, Artificial Sequence
  ENSG00000196951_15 (sequence is synthesized)
ttgcccttcctatgaatgcaagtaaagcaaagcctcttgacaaagcaaattaagagtaatcaatggtttgggttttttttttaattattatttcctgtgactcaaatcaaacctatttct

SEQ ID NO: 1015048 - DNA, 120 bp, Artificial Sequence
  ENSG00000196951_16 (sequence is synthesized)
caactgtaacgtacgaaaagagagagatcaagttgacatttaggaaaattgaacattgataagtaaattgccttcactcagtctcttaggtcctctctcctttccccctaccccacgaca

SEQ ID NO: 1015049 - DNA, 120 bp, Artificial Sequence
  ENSG00000196951_17 (sequence is synthesized)
ccccgtggccctgctctctctcacacacacagctgaaggtatctttaaagggtacctatttcctgcagatcacgcttatgttaatctcacttcaagtacagatgcaccgaggacattaca

SEQ ID NO: 1015050 - DNA, 120 bp, Artificial Sequence
  ENSG00000196951_18 (sequence is synthesized)
gggtcagtcattcttatccacaaagctttagattccactacattattcaaactggacaatggacttccccattttgtgcccagacttgctcactaatagagtgacctccttgttatgggt

SEQ ID NO: 1015051 - DNA, 120 bp, Artificial Sequence
  ENSG00000196951_19 (sequence is synthesized)
gaggatatatttgatgctaaaactgctacaaatttttatcagcatttaatcttgagactgtgaattactacatcctgcatgtgttggtaccttactttgattaaaaatgggataaatcaa

SEQ ID NO: 1015052 - DNA, 120 bp, Artificial Sequence
  ENSG00000196951_20 (sequence is synthesized)
aagtctttaggactccaggatataatctctaaagtaaaagacaaatgtcttgcagcccctatcacaaaaaaaggaagcatagcacctgacaggcctcccggcttcttttggagatagcac

SEQ ID NO: 1015053 - DNA, 120 bp, Artificial Sequence
  ENSG00000196951_21 (sequence is synthesized)
gtttcatacctaccaataccacacttaagaatattgggagactcagaagactgccagctttcagaaagcccaggagcaagaatgggctctgcagcagatccaggcttgccctgccactca

SEQ ID NO: 1015054 - DNA, 120 bp, Artificial Sequence
  ENSG00000196951_22 (sequence is synthesized)
ggccataaggtccagcaagccctgttgtgttgggagagccaatattagaaaaaagatatagtgtggagtttatggcaagttcccagtgagaaaacaataatgcaggcttctggggttctg

SEQ ID NO: 1015055 - DNA, 120 bp, Artificial Sequence
  ENSG00000196951_23 (sequence is synthesized)
gaacaaggttatgccatctatagcaaaattattatatgctttttgagaaagcccccacatgtttctgagcacagaatgcttagaatggaatgctggaccatggaacatcaagtgaccatg

SEQ ID NO: 1015056 - DNA, 80 bp, Artificial Sequence
  ENSG00000196951_24 (sequence is synthesized)
tagaatggaatgctggaccatggaacatcaagtgaccatgcatacagactgtccactgtgatgtggggtttgttaatgtt

SEQ ID NO: 1015057 - DNA, 87 bp, Artificial Sequence
  ENSG00000196951_25 (sequence is synthesized)
atctgcccacctcagcttcccccctactcaatccaggttcttttgaaactgccaattcatgaggtcacataggctcagcagtagtct

SEQ ID NO: 1015058 - DNA, 120 bp, Artificial Sequence
  ENSG00000196951_26 (sequence is synthesized)
actgccaattcatgaggtcacataggctcagcagtagtctattgtaagatggaaatgagtggaaccaaaggcatgggggaagttgcatgaacagggagcccaccctccacaattccatcc

SEQ ID NO: 1015059 - DNA, 120 bp, Artificial Sequence
  ENSG00000196951_27 (sequence is synthesized)
actatccccagctcttacctcttgtcaaatgagtgtcccaagtgaccagctgaagaaagaaagaggagaaagcccaaggttggtttatgatctgtgaagggtctgagattttaccctgcc

SEQ ID NO: 1015060 - DNA, 120 bp, Artificial Sequence
  ENSG00000196951_28 (sequence is synthesized)
tgtaagctaacaagttatcctgacactgttgtatggctgctggcagaagatttaaggtcagagacaaagaactttattattcagcacaattgcagcagccagagtatcagcattttctta

SEQ ID NO: 1015061 - DNA, 120 bp, Artificial Sequence
  ENSG00000196951_29 (sequence is synthesized)
acagagcctcagccagcaccactctccaagggtttacagtatccctgatccacagtcttaacatctcaagtaatacagcatccaacaggagacccacttcacagtgaaggaaatgagggg

SEQ ID NO: 1015062 - DNA, 120 bp, Artificial Sequence
  ENSG00000196951_30 (sequence is synthesized)
gtggagccatgggacacactcactctatcacctgtcacaccatccaaaagcagccagccttgaaatcccgaaaactcacttgaaaagggcggctgatatgctggctcagaggagatggga

SEQ ID NO: 1015063 - DNA, 120 bp, Artificial Sequence
  ENSG00000196951_31 (sequence is synthesized)
catcattctctaggacgcagtgtgtgcattaattcggaggctgctttgtggtgttgtgtcccagtgggaaaagtacaagcaggagtgaccctccttaatatcactctctatgactactgg

SEQ ID NO: 1015064 - DNA, 120 bp, Artificial Sequence
  ENSG00000196951_32 (sequence is synthesized)
ttcagttggtatttcctgccacacaactctgggctctgcaatgttagagttctggtccccaaaggagtacacttttgcaaggggacatagcaagacacatttgtgtctcctagcatctgt

SEQ ID NO: 1015065 - DNA, 120 bp, Artificial Sequence
  ENSG00000196951_33 (sequence is synthesized)
gttaatggtctgtgtgtgaggtcatgtatgttgtgtagtagtgagtgtgtgtgtcatgtgtgtggacatggaagagatttctgcatgtgtgtgcattgtgtgtgttgtgtgatcaggtat

SEQ ID NO: 1015066 - DNA, 120 bp, Artificial Sequence
  ENSG00000196951_34 (sequence is synthesized)
gtggtgtgtggcatgtgtatgtatgtgatgtatgtgtggtatgcatatatggtggagctgtgtatgtatgtggtatgggggtgtgttttgtatgaggggtatatagacatttgtgatata

SEQ ID NO: 1015067 - DNA, 120 bp, Artificial Sequence
  ENSG00000196951_35 (sequence is synthesized)
tgtgggtagtatgtgggtatttacgtgtactgtgtgaacatgtgtggtatgcgtagggggtatgtgcatgagggtgatgtgtgtggtgtgtgtacatgtctgtaacttgtatatgtgtgt

SEQ ID NO: 1015068 - DNA, 120 bp, Artificial Sequence
  ENSG00000196951_36 (sequence is synthesized)
gtagggtgttggggcacatgtatgtatatgtggtatatatacatgtgtgctgtgtggtgttttgtgtgtatatacttggtgttatgtatgtgtatgatgtgtgtgtatgtgatgtgtgat

SEQ ID NO: 1015069 - DNA, 120 bp, Artificial Sequence
  ENSG00000196951_37 (sequence is synthesized)
atgtgagtggtatgggtggtacatgtgtatatatgtttgtggtacggatatgtgtgtgtgtgcataggaggatttgtgtatgtgtgtagtgtttgtggtgtgtacttatgtgtgtagtgt

SEQ ID NO: 1015070 - DNA, 120 bp, Artificial Sequence
  ENSG00000196951_38 (sequence is synthesized)
ataggattgcgttatgtgtgtgatgtgtacatgtgtgatgtgtacctgtgtgtgttttgtgtggggtatttgcatggtgtttgcatgtgtatacaagtgtgcactgtaagtgcagtatat

SEQ ID NO: 1015071 - DNA, 120 bp, Artificial Sequence
  ENSG00000196951_39 (sequence is synthesized)
aggaggtatgtatttatatgatgtgtttgtctacgtgtacatagtatgtatagaattgtgggtgtgacacatgcatgtacatggggtgtgcatgtgtgatgtgtggtgtaggtcattttt

SEQ ID NO: 1015072 - DNA, 120 bp, Artificial Sequence
  ENSG00000196951_40 (sequence is synthesized)
atgcatgtgtagtatatctatgtggtatctatacataaaagtgtgtgctgtgtgtggtgcatgagtacagcatggggttgatatgtgcatatgtgtgtgataaatatagatatgtatata

SEQ ID NO: 1015073 - DNA, 120 bp, Artificial Sequence
  ENSG00000196951_41 (sequence is synthesized)
tgtgttgtatgtggcatatgtgtgtggtatgtgtgtaaagtgtggggtgtatgtacatgtgtggtgcatgtagtatgtgttcatgtggtatgtgtgcactctgtgtggtatgcatgtgcc

SEQ ID NO: 1015074 - DNA, 120 bp, Artificial Sequence
  ENSG00000196951_42 (sequence is synthesized)
cacacacatatgtggtgcaggtagtatgtgcacatatgttgtgtgtatgtggtgtgtgatatgtgtgcatgcatatgtctgtggtctgtgtgtcatagttatgtgcatagtgtgtgtcta

SEQ ID NO: 1015075 - DNA, 120 bp, Artificial Sequence
  ENSG00000196951_43 (sequence is synthesized)
tgtgtgtggtatatgtatagagtatgtatgtttacatgcatggtacgtatagtgcatgcacatgagtgtggtttgtggtgtacatatggtgtggcctgtgtgtgatatgcacgtgtgtcc

SEQ ID NO: 1015076 - DNA, 120 bp, Artificial Sequence
  ENSG00000196951_44 (sequence is synthesized)
atgtgtttggtgtgtgtatgtgtacatatgtgtgacatgtggtatatgtacctgcatactctgtgtggcatgtgcatatgcatgtgtgtagtgtgtgtacatatgtgtgatatatggtat

SEQ ID NO: 1015077 - DNA, 120 bp, Artificial Sequence
  ENSG00000196951_45 (sequence is synthesized)
atgcatgtgcatggtctgtgtggcatgtgtacatgatgtgtgtgtagtgtgtgtacatatgtgtggtgtatggtagatgtatgtgcatggtctatgtggcatgtgcacatgatgtgtgtg

SEQ ID NO: 1015078 - DNA, 120 bp, Artificial Sequence
  ENSG00000196951_46 (sequence is synthesized)
tagcatgtatgtacatggtatatgtatgtgcatggtctgtgtagtgtgtgtagtgtgtgtacatatgtgtggtctatggtttctacatgttcgtgatctgtgtggcatgtgcacatgatg

SEQ ID NO: 1015079 - DNA, 120 bp, Artificial Sequence
  ENSG00000196951_47 (sequence is synthesized)
tgtgtttagtatgtgtgtaaacatgtgtggtgtatggtatctatgtgtgcatggtctgtgtggcatgtgcacatgatttgcgcatttagcatgtgtgtacatggtgtatgtatgtgcatg

SEQ ID NO: 1015080 - DNA, 120 bp, Artificial Sequence
  ENSG00000196951_48 (sequence is synthesized)
gtctgtgtggcatttgcacatgatgtgtgtgtgtagcatgtgtgtacatggtatatgtatgtacatggtctgtgtggcatgtgcacatgatgtgtgtgtagcatgtgtgtacatatgtgt

SEQ ID NO: 1015081 - DNA, 120 bp, Artificial Sequence
  ENSG00000196951_49 (sequence is synthesized)
gatctatggtatctatatgtgcatggtctgtgtggcaggtgcatatgatgtgtgtgtagagtgtgtgtacacatgtgtggtatatggtatatgtatgtgtatggtctgtgtggtgggtgc

SEQ ID NO: 1015082 - DNA, 120 bp, Artificial Sequence
  ENSG00000196951_50 (sequence is synthesized)
acatgatgtgtgtatgtcgtatgtgttcgtggtgtgtgtgtggtcttccagctgggtagtcagggagccctctgggggaacagctagtatctcttctttctctcactttcctcccaaagt

SEQ ID NO: 1015083 - DNA, 120 bp, Artificial Sequence
  ENSG00000196951_51 (sequence is synthesized)
acctctgtactcagcaagatcttgagagtattggctgatgagagtcaatttcccaagtagcttagaggctgcgtgactcccacagtcgtccttgacagcggctccagcgccccgcctccc

SEQ ID NO: 1015084 - DNA, 120 bp, Artificial Sequence
  ENSG00000196951_52 (sequence is synthesized)
gcacacaccacaccgcccagtattgggccacaagctaaccaaccgtgatattggcagtcatgcttatgcgctcaagccacccatgtgcacgtgaggaacggcgcgggcacacggctgcac

SEQ ID NO: 1015085 - DNA, 120 bp, Artificial Sequence
  ENSG00000196951_53 (sequence is synthesized)
atgccgcccagtctgggctccaaacagcactgcattttaaatgagcaggctggctcattagagggaaaagcagtctctaattccgtgttacatcgccttttggctctgctttgtctttgc

SEQ ID NO: 1015086 - DNA, 120 bp, Artificial Sequence
  ENSG00000196951_54 (sequence is synthesized)
agacaccagatctcatctgttggaagctgcatatggctcgttaaaaggacagagtttgggaggggcaacagtggggttcgcaagccagatgccaccaccctatccctccctctgtttttt

SEQ ID NO: 1015087 - DNA, 120 bp, Artificial Sequence
  ENSG00000196951_55 (sequence is synthesized)
gttttttgtgtttttttttttcagcctttaacatttttccctttcttggcttagccttctttcacctacccagtaaaaacggtgggctggtaataactaccatttatcaagtacctactc

SEQ ID NO: 1015088 - DNA, 120 bp, Artificial Sequence
  ENSG00000196951_56 (sequence is synthesized)
catttatcaagtacctactctatgccagccacaattgtatgtgatctctgatcctcacaacaagccagcaaggtaagcattcttttttttttttattttgtgatggagtctcgctctgtc

SEQ ID NO: 1015089 - DNA, 66 bp, Artificial Sequence
  ENSG00000196951_57 (sequence is synthesized)
cctcccaggttcaaacaattctcctgccttagcccccgagcacctggaattacagacattgttggc

SEQ ID NO: 1015090 - DNA, 120 bp, Artificial Sequence
  ENSG00000196951_58 (sequence is synthesized)
tctcaaactcctgacctcaggtgatgtacctgcctcagccacccaaagtgctaggattacaagcgagagccacggcacccagcccagcaatgtaagcattctaacaccgtggtgcagata

SEQ ID NO: 1015091 - DNA, 120 bp, Artificial Sequence
  ENSG00000196951_59 (sequence is synthesized)
cagcaatgtaagcattctaacaccgtggtgcagataaggaaactgagtctgggagattggaggatatgccttcatagagatgcatggatggaaaccaggtctgtttccaaccatctgttg

SEQ ID NO: 1015092 - DNA, 120 bp, Artificial Sequence
  ENSG00000196951_60 (sequence is synthesized)
ctcttccctctgtgtcacttaaacacagggccactatactaactgcttagcaatgtcttggttcattgaaaaggggaagagatttctaacctacctagcctgtattacaagagaaatgct

SEQ ID NO: 1015093 - DNA, 120 bp, Artificial Sequence
  ENSG00000196951_61 (sequence is synthesized)
gcattctcacttaagtatctcctgaaattgtgaaaagccctatttctgtactacttctcttggcatctccttaatccaaaagacaaaagttacaatctagagatgcttacaaaatgccct

SEQ ID NO: 1015094 - DNA, 120 bp, Artificial Sequence
  ENSG00000196951_62 (sequence is synthesized)
agctttttaccaccccatcctagaatacagtgagcaaaagctcctgtcctgccagctctgtcattggtctttgtctttgagatactggccccttggccattgctggttttctatagcagt

SEQ ID NO: 1015095 - DNA, 120 bp, Artificial Sequence
  ENSG00000196951_63 (sequence is synthesized)
aaaccacaccccacatcaaataagtacactctctcccatttattttagttcagtcatctggtattttcaaagacctgtttgtgacaaagatatgctctaccacaattttcctcctatcat

SEQ ID NO: 1015096 - DNA, 120 bp, Artificial Sequence
  ENSG00000196951_64 (sequence is synthesized)
aaaatgttggttggatatctaaagtttaaaaaggaagagaaccacaccagctggagattaaagaagcatcagtagaatatcttaagggaaatactacaaaatgtcgcagaaggtgctgga

SEQ ID NO: 1015097 - DNA, 120 bp, Artificial Sequence
  ENSG00000196951_65 (sequence is synthesized)
tggatatctaaagttcaaaaaggaagagaaccacacgagctggagattcaggaagcatcagtagaagtcaatggccattaataaaaacattttttattaaaatattgaatctgaatagaa

SEQ ID NO: 1015098 - DNA, 120 bp, Artificial Sequence
  ENSG00000196951_66 (sequence is synthesized)
cttcatttcttaaatcccttgagggtagtaactgcatcttctccattgatatagcccctgccaagcacagtgcctgaaggcaggtccacagacattggctgaataaacgagtgctctgtt

SEQ ID NO: 1015099 - DNA, 120 bp, Artificial Sequence
  ENSG00000236469_0 (sequence is synthesized)
gacaaatgggaagggagagtttggagaagggaaacacttagaaggctggacattggcccagggctgtgttccatcctggctgccctgtggaagccctgaagaaatgggacgtggccctgt

SEQ ID NO: 1015100 - DNA, 120 bp, Artificial Sequence
  ENSG00000236469_1 (sequence is synthesized)
ggaagcaggctgacttgaagagctgctgatgctggagcccgtcctagagagtctgattcaaactgtctgagttaactacaatgaacggccacagatgagagctaccagactgggagttag

SEQ ID NO: 1015101 - DNA, 120 bp, Artificial Sequence
  ENSG00000236469_2 (sequence is synthesized)
caaaccctcaacctatggacatggtccccttgattgtcagcatctgactctgactctgcacaagacctgggggaagctgcaccaggagggatggacatgctgcccaggaaacactggcga

SEQ ID NO: 1015102 - DNA, 120 bp, Artificial Sequence
  ENSG00000236469_3 (sequence is synthesized)
gagagggaggaggctggcaaagggactggcacttgtcttaaatgaagaatggctgtgaaaaggagaggagccagcttgtcagagagagctgcaccttttcttctcatcaggaattcctgt

SEQ ID NO: 1015103 - DNA, 120 bp, Artificial Sequence
  ENSG00000258985_0 (sequence is synthesized)
ttgcttttgtgttttttaataaaaaatatttcaacttttcatttagaaacagtgggtaaatgtgcaagtttgttacaagggtatattgtgtgatgctgaggtttgaggtacagatcccat

SEQ ID NO: 1015104 - DNA, 120 bp, Artificial Sequence
  ENSG00000258985_1 (sequence is synthesized)
agtacccaataggtagtttttcaacctatccttctgccctcctcacccacagtgttccagtctgcagtgtctgttgttcccacctttgcatcctgaggtactcaatatttagctcccatt

SEQ ID NO: 1015105 - DNA, 120 bp, Artificial Sequence
  ENSG00000258985_2 (sequence is synthesized)
ttagctcccatttgttagaacatgcagtacttggttttctgttcttaatttgcttagattatggcttccagctgcatccaactgggaaaagaaatcaaactagctctcttcgctgatatg

SEQ ID NO: 1015106 - DNA, 120 bp, Artificial Sequence
  ENSG00000258987_0 (sequence is synthesized)
gctcagcagcgcctccagcacctcgtcgtggttgcgctcggccgccagccctgccacctgcaagaacaagctcctgcaccaatatgattccagaccctaatccatccaatccctgctgac

SEQ ID NO: 1015107 - DNA, 120 bp, Artificial Sequence
  ENSG00000258987_1 (sequence is synthesized)
aggcacaggaggcctgactttgctctgcagaggtgctggtcaaaggcaggcctgggcctcaccctggatggcggccacggccaacaaatgctctgctaacagctgtaacgtgcccaagaa

SEQ ID NO: 1015108 - DNA, 120 bp, Artificial Sequence
  ENSG00000258987_2 (sequence is synthesized)
aagaatttcaagtggcttgcaaagattgataaaatacagcaaaagtgttatatgttggaactaaaagagaaggaatatttaaaaacgagggaggcagaagtaaggcccagaatgcaagtc

SEQ ID NO: 1015109 - DNA, 120 bp, Artificial Sequence
  ENSG00000258987_3 (sequence is synthesized)
tgtgttttctgttggccacagaagaggctctaagatcctgattctctacccaggctgcacagtaaaatctcccgggcagctcttagacaccttgaagcctcagccacggcccagaccagc

SEQ ID NO: 1015110 - DNA, 120 bp, Artificial Sequence
  ENSG00000258982_0 (sequence is synthesized)
gcaacagccacaaaacccgccgcctcgggccggggccgcactcgggaacggggcgtcgccgctacagccgctgccttgggagccggtccacactgccgttatgagctgtcgcactcacgt

SEQ ID NO: 1015111 - DNA, 67 bp, Artificial Sequence
  ENSG00000258982_1 (sequence is synthesized)
cgtgaagaacaagcaactccagacgcgtggcatcaagagctggaacactcaccgcgaaggtctgcca

SEQ ID NO: 1015112 - DNA, 120 bp, Artificial Sequence
  ENSG00000258983_0 (sequence is synthesized)
atgtcagtttagagaaaaagctcttcaaaggccaaactagttctcaagaagaaatgataccttcaagacacgctccaatggatatgtcacttccttggctatcctacaaggagaaagcag

SEQ ID NO: 1015113 - DNA, 120 bp, Artificial Sequence
  ENSG00000258983_1 (sequence is synthesized)
aagaagaaacacccaggaagcagatgcagaggaactgctgctagagttccctggactggtttcccagatgtagaaagttccgaagacctacagagtaactattcaggaagacaaaagtct

SEQ ID NO: 1015114 - DNA, 120 bp, Artificial Sequence
  ENSG00000258983_2 (sequence is synthesized)
gaatgagatctatgatcttataggcaacacagagattcatcatgaaagaacgtcaatatgtacaagtatacaaagttttagtctggatgcccaatttctggtgactttgcagaatgtgtt

SEQ ID NO: 1015115 - DNA, 120 bp, Artificial Sequence
  ENSG00000258983_3 (sequence is synthesized)
atagacagaactctggatatcttggaccaagaggtaacctagtgcatgggaaggatgcgctgaggatgctggagcactaagagaaagtgcgagcatccttgaagactctgtggagctgtc

SEQ ID NO: 1015116 - DNA, 120 bp, Artificial Sequence
  ENSG00000258983_4 (sequence is synthesized)
agacaagctctgcaaggctgacttctgaactctcacagaagtcaatgatatttagggtttttgttatatatagctatacttaatccttaccgatacaacttctctatcaggtgctcctat

SEQ ID NO: 1015117 - DNA, 120 bp, Artificial Sequence
  ENSG00000258983_5 (sequence is synthesized)
acctaatcgatgagcaatcctattgattgactctaataggcccattctctctcaatccagctaatgcctttctgttcagttctatattgtaaacctatgcctagattatggcacaggtat

SEQ ID NO: 1015118 - DNA, 120 bp, Artificial Sequence
  ENSG00000258983_6 (sequence is synthesized)
tcctaaactggtgtcctgcctatagtcttgccatctctgatctaccttctatgatgggtgatctttgtgaaatgtaaatttaatgattccattaaatttgaaaatctcttcctcattgta

SEQ ID NO: 1015119 - DNA, 120 bp, Artificial Sequence
  ENSG00000253356_0 (sequence is synthesized)
ctgttgcctcagccctgcagaagggaataacccttgtctaggagctggaaagccccttagagatggaccactcccaccccctcatcttgtctcaaatgagtaactcaaacttggaaataa

SEQ ID NO: 1015120 - DNA, 120 bp, Artificial Sequence
  ENSG00000253356_1 (sequence is synthesized)
catgacacttttgagattcatattttatttacaagtaaatgaagactgtccctgtaaactctaatttgggatatgaagaacaatataaagaagtagttgctggtgccacagtgatgtgtg

SEQ ID NO: 1015121 - DNA, 120 bp, Artificial Sequence
  ENSG00000253356_2 (sequence is synthesized)
tatgtaaaataattaaaaataaaagtgacttttcaaaactctacagtctgtgatcaaatgcgtgaggtggccaggatgtcactttcactcagtgacagcccctactcttcaagagccaac

SEQ ID NO: 1015122 - DNA, 120 bp, Artificial Sequence
  ENSG00000253356_3 (sequence is synthesized)
agcctctgggcaaaagattagtactcatcaagagtatctgctcgaggaatggaaagacctcggtccttcagggcctgcactttcaacttctctgcttccagcttggtctgctgttccacc

SEQ ID NO: 1015123 - DNA, 120 bp, Artificial Sequence
  ENSG00000235703_0 (sequence is synthesized)
gctgaaaggcaagagtccaaactttcccgcggcgacctaactgcacctccagtgtcttcccccagagggcacagaagcagcaagaagggcgggaacacttgactggggtccatgcagctc

SEQ ID NO: 1015124 - DNA, 120 bp, Artificial Sequence
  ENSG00000235703_1 (sequence is synthesized)
taggctgagtcttgcagggctgagccccccaggcctgctctcctgtgtcctggccgctccgtcagtgcctgccagtggggtccagagggaccgtttttttaacgcctcttttgcagtgag

SEQ ID NO: 1015125 - DNA, 120 bp, Artificial Sequence
  ENSG00000235703_2 (sequence is synthesized)
atgcgcctacttctccctggagaagcttgaggaagcagaaatgctggagatgagctgctcctcactctcactcctgggtgtgctgggcagtggggtgcaatgtgcacgtaggtgcacact

SEQ ID NO: 1015126 - DNA, 120 bp, Artificial Sequence
  ENSG00000235703_3 (sequence is synthesized)
ctccctgggcggcagcgagcagcagaggtctgatctgtggtcggatgacgagaggaagtgcaagtaaagcagctgcagcgagacctcgtccgcacaggggcttgttcttctgtgtctttg

SEQ ID NO: 1015127 - DNA, 120 bp, Artificial Sequence
  ENSG00000235703_4 (sequence is synthesized)
cagggctgttttggactcagtattcacctaagcactccaaattacccagcacaccctgcctgcatggcgctgcgctgcaccttcactctggtcacgggtctggcagtcagctcaccaatt

SEQ ID NO: 1015128 - DNA, 120 bp, Artificial Sequence
  ENSG00000235703_5 (sequence is synthesized)
cctcctgcttccctgggacttgccggcttttagcactgcaattcactcagcaaactgggactgttggtcaccctacctggcagccagtgataaggtgagggccactcctgggagggagga

SEQ ID NO: 1015129 - DNA, 120 bp, Artificial Sequence
  ENSG00000235703_6 (sequence is synthesized)
cacctgtggggaaaattcttgtgttatttatttctccttcgggatagggtgcctgcagcgcttcatgggagggggtgggctgatgctgcgggctcagaagtttcaagggcatctggggag

SEQ ID NO: 1015130 - DNA, 120 bp, Artificial Sequence
  ENSG00000235703_7 (sequence is synthesized)
accagatattcagagaccttctagatgtgcctgttccatgtatcagggacgcaggttttcccaacagggctggtgtcattggcatgacagacctgccttggctgagcgttcacctgtctt

SEQ ID NO: 1015131 - DNA, 120 bp, Artificial Sequence
  ENSG00000235703_8 (sequence is synthesized)
tggagttcagccaccttagcaagtcctgggtttgttcttcagactttgctgctcgcccattgcctggatcgggggctactttgtaaaccaccaggaagactccagtgtttctggttaatt

SEQ ID NO: 1015132 - DNA, 120 bp, Artificial Sequence
  ENSG00000235703_9 (sequence is synthesized)
tttagatgtttgttaattgctcttggtctctcattaatcccctgtgggtcatccaggaaacatactcaccactgtctgttctctgagttttcatttccaggcatccgccctgcctggatc

SEQ ID NO: 1015133 - DNA, 120 bp, Artificial Sequence
  ENSG00000235703_10 (sequence is synthesized)
tcctcacctgccaggaacttcctctccacaagccggccatcccagcaaaagttctaacaccaaaggtctggcaactagcctgccatcttgtgcctggagccgcctgcgtgccacctactc

SEQ ID NO: 1015134 - DNA, 120 bp, Artificial Sequence
  ENSG00000235703_11 (sequence is synthesized)
ccgaagatgggaaccttgttgccagttgggcagatgcggggcaatcctgtaccaagaccccattttaccacctgctttctcagaccactctggaacccactgtctcagattgtgtcctcc

SEQ ID NO: 1015135 - DNA, 120 bp, Artificial Sequence
  ENSG00000235703_12 (sequence is synthesized)
ataggaaggaaacagggctggagagcaggttgagcccgacctgacagtctcgagcagcccaacagggaggtgtggagcaagggttgcccactagaggggcctgcattgggtacgggtgat

SEQ ID NO: 1015136 - DNA, 120 bp, Artificial Sequence
  ENSG00000235703_13 (sequence is synthesized)
ggggtccacatggtacctggcatatagcaggctgtgcaatccatattaactgactggataaattaatgcccagaaaaggtgccctggagaatgggtgtgtgctgaacacaatagggaagg

SEQ ID NO: 1015137 - DNA, 120 bp, Artificial Sequence
  ENSG00000235703_14 (sequence is synthesized)
gcccagcatctgccttggcataggcagaactgtgctgtgccctgcaacaggccacctgagagctgctttgatcttgtgtgtacattagatgactgccaggggcatgaaggggatgtgctt

SEQ ID NO: 1015138 - DNA, 120 bp, Artificial Sequence
  ENSG00000235703_15 (sequence is synthesized)
ccagggcatttgctggcagggcgtctcgtgatctcttggtattggtgtgagcacagcctggcaggagagggcagatctccatgcaaagtatgtcagaaagcagatggaagccaggccccc

SEQ ID NO: 1015139 - DNA, 120 bp, Artificial Sequence
  ENSG00000235703_16 (sequence is synthesized)
tcctgaaagaggctccttgaaggctcctgggaccacattatcattctcttcactcgagagatgaggacactgaaattcagagaggggaagtgatttgcctcagcttgtactaaagaaaca

SEQ ID NO: 1015140 - DNA, 120 bp, Artificial Sequence
  ENSG00000235703_17 (sequence is synthesized)
tttcaacagagaacccagtggaaattatgacatgttatcttctcagagtcctgaactcccatccctacctcagaagagactcctctgttcacagaagctaaaggcagttccttcccaatg

SEQ ID NO: 1015141 - DNA, 120 bp, Artificial Sequence
  ENSG00000235703_18 (sequence is synthesized)
gcaactatgtttggatgttggatctacactttctcaagcactgtgatcttcaaatcaaaggagatttctcccattatatacttcttatgatcaacaaattccatcatctccccactaaga

SEQ ID NO: 1015142 - DNA, 120 bp, Artificial Sequence
  ENSG00000235703_19 (sequence is synthesized)
gaaagtactccaagatgatagaatgattttaaagttatgggactacaacagcagccacaggaaccttgaactgccatccagggccatgcagcaaacaagcaacagggaaatatcccacta

SEQ ID NO: 1015143 - DNA, 120 bp, Artificial Sequence
  ENSG00000235703_20 (sequence is synthesized)
tgcaatcctattttgagatgatatttaggatgagagaacatgcattagttacctaccagcttgacaggaatggatttccaaatctgacacaccatagcctgaattctcaccagtttgctc

SEQ ID NO: 1015144 - DNA, 120 bp, Artificial Sequence
  ENSG00000235703_21 (sequence is synthesized)
ctggaaaggcccgctcatgcatgagcccctgccactcttctaaataagcttccaggcattacctgcatgctgtgttcctgtggtgggatggcagtaatctctgctaagataaacgggagc

SEQ ID NO: 1015145 - DNA, 120 bp, Artificial Sequence
  ENSG00000235703_22 (sequence is synthesized)
ttctgtggataaagcataaacgcagtgaagtgtgtgtggctggaagatttaatgcctctacagtgcttagatacaagttgagcttggaattccagaggtagagcactgctgattggagac

SEQ ID NO: 1015146 - DNA, 120 bp, Artificial Sequence
  ENSG00000235703_23 (sequence is synthesized)
atattaagtaaaatgtactgtggaaatgagataaaacctttattcttgctaatgattgtcattgtatgtattcaggtgtccaacaaaggattttagaataaagtgtgcctttaaagtttc

SEQ ID NO: 1015147 - DNA, 120 bp, Artificial Sequence
  ENSG00000235703_24 (sequence is synthesized)
cgcacgtacgcacgcacttgccacaaggagacgctgttcagtttaccggatcctgtcccgcgccagccaaccaggacaaggccggggagctcgagacaggcagcctagaccaagaaccgg

SEQ ID NO: 1015148 - DNA, 120 bp, Artificial Sequence
  ENSG00000235703_25 (sequence is synthesized)
aagggcctgtttggaatggactgtattaaatctacttcaaatgaaaacctttacactgagtgaaatatggttcaacaattcttaacacaaggcctttacacttgtgtagcccattttggt

SEQ ID NO: 1015149 - DNA, 120 bp, Artificial Sequence
  ENSG00000235703_26 (sequence is synthesized)
ttggcctatcttgtcactagaatgctgtctgagcttggattatttatgccctaagatttacttaaaattgaagggagtatttccattcatcaacactagttttgatagatgcttaaaagg

SEQ ID NO: 1015150 - DNA, 120 bp, Artificial Sequence
  ENSG00000235703_27 (sequence is synthesized)
tgcagtgaggttgatgatcctgaatacacaaattattgatcaccacatcaagttggatttccctaaagatgtatggctttctgaccttgtgatttacactaatgattatgtcttaataaa

SEQ ID NO: 1015151 - DNA, 120 bp, Artificial Sequence
  ENSG00000235703_28 (sequence is synthesized)
actcttccataataaccaatgtgataaaaacattttttcagggaaacaaatttcagttttagccttccaaatgactattacgaaaattaacaactaataaaaaattgaaatactaaaaga

SEQ ID NO: 1015152 - DNA, 120 bp, Artificial Sequence
  ENSG00000235703_29 (sequence is synthesized)
catcatgtatcctctcaaactatttatttattgtactcatacatattcttaagtgcaataaaatctgcctagaaatcattaatccactagtatatagtccttacttggtgctggcaactg

SEQ ID NO: 1015153 - DNA, 120 bp, Artificial Sequence
  ENSG00000235703_30 (sequence is synthesized)
aaaatttggtctttttatatacaaattgttacacgcatgaaaagtagtccaataatggcactttttataggttatttcataagtactcttggttggacatatgctaaagtattgttacag

SEQ ID NO: 1015154 - DNA, 120 bp, Artificial Sequence
  ENSG00000235703_31 (sequence is synthesized)
gttgctgaggcaacccgcctgctacagttgtggttaactctaaaatttactgataatgctgacctgagacttgagtcttatcttcactgaatgcagtacaggtgtattgtaggtaggctg

SEQ ID NO: 1015155 - DNA, 120 bp, Artificial Sequence
  ENSG00000235703_32 (sequence is synthesized)
taggaggaccatagctacctctaaatctttacagaagattttgaatgtggcttttgttgcatagaaaataaataaaataaaataaatctctacagaagactggcaagagattggtgcata

SEQ ID NO: 1015156 - DNA, 120 bp, Artificial Sequence
  ENSG00000235703_33 (sequence is synthesized)
tttaatagcaaacagtgggatgctttgaaagggatggataacatagaacattgaacagcaagagctttagtggggtttaggttttagtagttgtccagccaagactctgcctgttactga

SEQ ID NO: 1015157 - DNA, 120 bp, Artificial Sequence
  ENSG00000235703_34 (sequence is synthesized)
tgatgctacagtccctattcttgatgttttattggaaagtggtaagacttctttttctctctgagctggtaccaccaatttgcagtggtatgttctagaagcaaatcatatttcagagct

SEQ ID NO: 1015158 - DNA, 120 bp, Artificial Sequence
  ENSG00000235703_35 (sequence is synthesized)
ctttggttgtgtaatttttttcaataggcatgatgagtattctggaagctgtatcatggtgccttttgcttggctgtgtgtcattactataatgcataggttttttacttgtttgtgtga

SEQ ID NO: 1015159 - DNA, 120 bp, Artificial Sequence
  ENSG00000235703_36 (sequence is synthesized)
gccttgagtttcaggagaacgtgtttggatggcattttaagaagccattccatttttggtagagtagaaaaagtctgcatctgagtctgtagtacagtctgttctctggatgaacacaat

SEQ ID NO: 1015160 - DNA, 120 bp, Artificial Sequence
  ENSG00000235703_37 (sequence is synthesized)
ctgatgagacaaaacggctcctcgtcctgcatccccgctgctacttccagaattcaggcctcgtggtctggagcctgcactgttccatgagcctcctgagcaacctggagtcctctgtct

SEQ ID NO: 1015161 - DNA, 120 bp, Artificial Sequence
  ENSG00000235703_38 (sequence is synthesized)
ttcttccctcagagacctcgtccgcacaggggcttgttcttctgtgtctttgcagggctgttttggactcagtattcacctaagcactccaaattggaccccctggccgctgcagatgca

SEQ ID NO: 1015162 - DNA, 120 bp, Artificial Sequence
  ENSG00000235703_39 (sequence is synthesized)
aagcttgaggaagcagaaatgctggagatgagagacctcgtccgcacaggggcttgttcttctgtgtctttgcagggctgttttggactcagtattcacctaagcactccaaattgttcc

SEQ ID NO: 1015163 - DNA, 120 bp, Artificial Sequence
  ENSG00000235703_40 (sequence is synthesized)
agttctcggtgcgccccgttctgcaagacactctcctgtggtcagccctggtctgcagaggattcccgcgctggatctctgaaggatgctggcgccctctctgcagcacattcctgatgc

SEQ ID NO: 1015164 - DNA, 120 bp, Artificial Sequence
  ENSG00000235703_41 (sequence is synthesized)
ccttgctgacacgtgtcctctgggccctctcctgaaacctgattctccggggtgtcttctggcctcacctcttctgtccagttccagcaagctcactttgcttagcctttgaatcccttc

SEQ ID NO: 1015165 - DNA, 120 bp, Artificial Sequence
  ENSG00000235703_42 (sequence is synthesized)
cttcactgtctgccatgacagttcaggcctttcaccgtcactcaggcctggaccatcactgttgcccatcccatgccatcaacagggaccccctggccgctgcagatgcatgctgatcct

SEQ ID NO: 1015166 - DNA, 120 bp, Artificial Sequence
  ENSG00000235703_43 (sequence is synthesized)
tgggcagggggctgggggacgcttcgtagaggagggggtgtttgagctgggccttgaaggtcaaaagggttttgttaggtgggaaatgggggaaggacagtctgaaagggttaggtacat

SEQ ID NO: 1015167 - DNA, 120 bp, Artificial Sequence
  ENSG00000235703_44 (sequence is synthesized)
tcaaggagcccagagaaggttcgtggctggagcagacgcattcgtagagtgaagtcatgggagagaagaggctgggaaactagattggttccaactcctaaaggaccactgaaggagtgt

SEQ ID NO: 1015168 - DNA, 120 bp, Artificial Sequence
  ENSG00000235703_45 (sequence is synthesized)
gggctgcacgctgggtgcagcaggtgagtttcctcacttgggtttcactgtcagcattttaaaaaggcaaactggttttcttcctgagaagaattcattgattcacttgtggccagtaag

SEQ ID NO: 1015169 - DNA, 120 bp, Artificial Sequence
  ENSG00000235703_46 (sequence is synthesized)
tcatctgggccagaggttggtggggagatgataggggtgcaagtgtcatcttcaatcacagcataactgcccttgctttcttacctctcgtttagatatttcaatgcttgctcaggtccc

SEQ ID NO: 1015170 - DNA, 120 bp, Artificial Sequence
  ENSG00000235703_47 (sequence is synthesized)
ctgcgccctccttccttctcccttcccagccatactacttatgggatgactttctctttgtaaaatgaccgttagtcttatcaaattaatcccaaagtaataccatcaatttccccctaa

SEQ ID NO: 1015171 - DNA, 120 bp, Artificial Sequence
  ENSG00000235703_48 (sequence is synthesized)
aataccaacaagacccctgcttgaaactgcttgtacattagagacagagaagagtccatgagaatcaacattttctgaggactccaactgtgtgccaagagagttcccctgctggtgcct

SEQ ID NO: 1015172 - DNA, 120 bp, Artificial Sequence
  ENSG00000235703_49 (sequence is synthesized)
tgcccctaattcaggatcaactcagatgaccaggtttcccctacctagagtgctacttattgcagtgaaaacttttcttctttccaaaaacctttaattaaacgtttaataactccctga

SEQ ID NO: 1015173 - DNA, 120 bp, Artificial Sequence
  ENSG00000235703_50 (sequence is synthesized)
gctcaagtgatcctcccacctccgcctccttagtagctaggaccacaggcatgcaccagcacacccagcaaattaaaaaaaaattttttttaaagatgagatctcactatgttgcccagg

SEQ ID NO: 1015174 - DNA, 79 bp, Artificial Sequence
  ENSG00000235703_51 (sequence is synthesized)
aaaacatttttaatggaagtataatttgcaaacagaaaacatgcccaaatattaagtgaatgcactgatgaacattcac

SEQ ID NO: 1015175 - DNA, 120 bp, Artificial Sequence
  ENSG00000235703_52 (sequence is synthesized)
catgcccaaatattaagtgaatgcactgatgaacattcacaacttaacaagatagccagcacttaaatcacaaaatagaacaccgctaggacctctttgtaataccctccaagtcactac

SEQ ID NO: 1015176 - DNA, 120 bp, Artificial Sequence
  ENSG00000235703_53 (sequence is synthesized)
ttctgcccaaaggtaatcgctattttgcaacattttttattactttatataaatgagatcgtacactgcgtaatcttattactgtctggatttttatattaaatattgcttgtgagattc

SEQ ID NO: 1015177 - DNA, 120 bp, Artificial Sequence
  ENSG00000235703_54 (sequence is synthesized)
agccacaggaaccttgaatggggatagtggcttgcttccagggctggccttgaccacaccgttatcagagcttctggactccaatgacatgactacctgactccctcacttggagaatct

SEQ ID NO: 1015178 - DNA, 120 bp, Artificial Sequence
  ENSG00000235703_55 (sequence is synthesized)
gggtcccatggcttctggcacaatgacttcactatggctgcagttctaccttttccctccaaccgtggctcagtgccaggatagaaggaaaatgcgaaagagtttgacaatatttcagag

SEQ ID NO: 1015179 - DNA, 120 bp, Artificial Sequence
  ENSG00000235703_56 (sequence is synthesized)
aggagacttttagcagaagttatagctttgctgtcctgggcagtgttatgaaggagctttcccacacattcctctggatcctaccttcatctgccacctttactcctggttctttcttct

SEQ ID NO: 1015180 - DNA, 120 bp, Artificial Sequence
  ENSG00000235703_57 (sequence is synthesized)
actgtgatcttcaaattttttcaggaagaaagagagaatcagcaacatggcattgaaggtacccgttgacagtgacgtgcatcacagcattaacaggagaaatgcttgtgtgtgcaaatg

SEQ ID NO: 1015181 - DNA, 120 bp, Artificial Sequence
  ENSG00000235703_58 (sequence is synthesized)
ggagacaaaggaaagggaccaccacatccatggagtgcaccgcgtgagagaaatgctcaggaagggaattgaccagattggctgtggagagaaaagagaaggaacatgggaggcagagct

SEQ ID NO: 1015182 - DNA, 120 bp, Artificial Sequence
  ENSG00000235703_59 (sequence is synthesized)
gagcaaccaggctttcactgctgaatgtctgagccagctccatcgtacaacaggagtgagggaagtacctgcttcacaaggttgtcatagccatcaaatgggatcacactctaaaggcag

SEQ ID NO: 1015183 - DNA, 120 bp, Artificial Sequence
  ENSG00000235703_60 (sequence is synthesized)
ttctggaggccagaaatcagaaatcaaggtgtcagcagttccaagctccctgcgaaggctctaggggataatccttccttgcttcttccagcttctggtggatccaggtgttcctttggc

SEQ ID NO: 1015184 - DNA, 120 bp, Artificial Sequence
  ENSG00000235703_61 (sequence is synthesized)
ttgtggccgtatcactccaacctctggctccatcttcacccttacctacttccctgtgtatcttgaatctcctgccactctcttataatgacacgtcattggatttagtgcctatttgga

SEQ ID NO: 1015185 - DNA, 120 bp, Artificial Sequence
  ENSG00000235703_62 (sequence is synthesized)
aagttatgggactacaacagcagccacaggaaccttgagtaagtaccatgaaccctgaccctcagcgttaatttgtaagcctttggcagtgagatggaatgtcttccttcagtttgaaac

SEQ ID NO: 1015186 - DNA, 120 bp, Artificial Sequence
  ENSG00000235703_63 (sequence is synthesized)
ggaggggcggggtagggccgggccgagagaaaccactggggagggtctggggtcggggctttgccatcagtggtgtgaggagcaggccggggcagtgggcaattgagcgaggaacagctg

SEQ ID NO: 1015187 - DNA, 120 bp, Artificial Sequence
  ENSG00000235703_64 (sequence is synthesized)
cgggaggactccgcggactcctgagaaccagcttaggggagcggcggcttggggaggtgtagggtggaatcacgagaaagctctgtgggagggcctggtgcacagctcagctgcagggtg

SEQ ID NO: 1015188 - DNA, 120 bp, Artificial Sequence
  ENSG00000235703_65 (sequence is synthesized)
ttcacctaagcactccaaattggtcgtgcggatgtgcgatgtaggaggaggagagaggtaaagtggaggaataggagctggaggggaggaggagagaagaaaagaggagaaggaggggga

SEQ ID NO: 1015189 - DNA, 120 bp, Artificial Sequence
  ENSG00000235703_66 (sequence is synthesized)
agagagggagcgggttcaaggagggaaggaggaggagaaggagaggaggaggagatgagaccaaggagaagaggtgaaggaggagaggaggacacagaaaagagaagaaagaggagagga

SEQ ID NO: 1015190 - DNA, 120 bp, Artificial Sequence
  ENSG00000235703_67 (sequence is synthesized)
atcactgttgcccatcccatgccatcaacaggtttgccccatcccttcggctccctaccagggcattcagttgtgttgagcagcagagtgtctccaagtccccactggttgagctgcatc

SEQ ID NO: 1015191 - DNA, 120 bp, Artificial Sequence
  ENSG00000235703_68 (sequence is synthesized)
ttattctcattgccatatactattccatttttatcagtataccatgatatatttacccattctgctatttgtacatactggaattgttcccaggtttttgtaatacaagcaaagctgcta

SEQ ID NO: 1015192 - DNA, 120 bp, Artificial Sequence
  ENSG00000203650_0 (sequence is synthesized)
ctccaccgcctgcttgtttcgccatgcccgggccggacggtggggctgcagcggcgaaagcgactgaagtccgggagcagtcgcatgagcttcccggtcaccaggaggccccgggaacag

SEQ ID NO: 1015193 - DNA, 120 bp, Artificial Sequence
  ENSG00000203650_1 (sequence is synthesized)
acacctcaccctgacattgtggcaggaacttctggattgctttccaaagtggctgcactgttttctatccccactgggcaggaaaacatctaagaaaggaggctccccccttcccttgca

SEQ ID NO: 1015194 - DNA, 120 bp, Artificial Sequence
  ENSG00000203650_2 (sequence is synthesized)
gggttaccagcaattaaaaagaagtactagagaggcaaatatcggcagtatacatctaagcgctggtcggaaaagaaggaactcagcccaagaacttgcccaatctgatactggaggtgc

SEQ ID NO: 1015195 - DNA, 120 bp, Artificial Sequence
  ENSG00000203650_3 (sequence is synthesized)
cactcaagaaccactccctccaagatgttttcctggatttcctcagcctaaagtaatccctctttttcctggctataccatctggaacagatgacttccaaggacaccgtagcaaagaaa

SEQ ID NO: 1015196 - DNA, 120 bp, Artificial Sequence
  ENSG00000203650_4 (sequence is synthesized)
aagagaactggaagcccatgtgccttaatcgcttcatcctagagggcgcagcagtctggaaatagaaacaatggtggtggatcaattcaattgatccagatttggaagttgcgtggcaag

SEQ ID NO: 1015197 - DNA, 120 bp, Artificial Sequence
  ENSG00000203650_5 (sequence is synthesized)
tgagaaggatttggatggtaatgatgaatgtgtttctcacaaacttgggggcccatctgggatctctgtgcctgcgtggagttggactccagccaagaggggagaggcgtcccacctgat

SEQ ID NO: 1015198 - DNA, 120 bp, Artificial Sequence
  ENSG00000203650_6 (sequence is synthesized)
ttaagtggcctgctctgtctgggaatcccggctccctgcagaggccatagacaaacctgagactgttattcaggaggcagtggaggtgacacagggagaaaagcaggcaccgtggcaacc

SEQ ID NO: 1015199 - DNA, 120 bp, Artificial Sequence
  ENSG00000203650_7 (sequence is synthesized)
aggcaacctcatgtacgagccaaggagaagaagcagcagacaccaatgcaggattggtcttccacttccagtctggacaagatagcatagactcatttctccctgcttctcccagatgga

SEQ ID NO: 1015200 - DNA, 86 bp, Artificial Sequence
  ENSG00000203650_8 (sequence is synthesized)
aggttcaagcgattctagaaacttgactgagaggaagagaaagctaaagaagtatcaaattcctctctaagacatcttcactagtc

SEQ ID NO: 1015201 - DNA, 120 bp, Artificial Sequence
  ENSG00000203650_9 (sequence is synthesized)
aagaagtatcaaattcctctctaagacatcttcactagtcttccagaacatctccgccttgggaagcagaactctgaggtccaggaagaccttccgaccaatccactgagacattgctac

SEQ ID NO: 1015202 - DNA, 120 bp, Artificial Sequence
  ENSG00000203650_10 (sequence is synthesized)
ggctgcctcctcttcactttctggcctcttgagccaacatccaacatgatcttcatgagaggttgccggttacctttctaaaaacgtatttgaccagatttcttcatgatatttcaaaat

SEQ ID NO: 1015203 - DNA, 120 bp, Artificial Sequence
  ENSG00000203650_11 (sequence is synthesized)
gtaaaggcagaaaacaagttaaactttaaacaaatttaaatttaaacaatctaaaagggaatttaagtaagcgtatgactttgttgcagaggttctaggcttccttttttacaaaaggat

SEQ ID NO: 1015204 - DNA, 120 bp, Artificial Sequence
  ENSG00000203650_12 (sequence is synthesized)
gggaaattttaaagcaactgctctgactaacccagaaaaatctttctttgtttatctcctttgtatttagccccaatatctgagaaaattttaaacatagtttttttttctaggattggt

SEQ ID NO: 1015205 - DNA, 120 bp, Artificial Sequence
  ENSG00000203650_13 (sequence is synthesized)
gcctaagggtcattcccttacgaaaaccctaactttttttacacctttgttgaatgaaggagctggtggaagttcaaatttgtgtgttaacatgtgacttcaattagagtctgaagatgg

SEQ ID NO: 1015206 - DNA, 120 bp, Artificial Sequence
  ENSG00000203650_14 (sequence is synthesized)
ccacttgttagtaatctcacactgcatcattttaaaaaaacacagcatttttgttctggtgaagagagaggcactggaattcatccccattgtccactccccacccagtgtattttacag

SEQ ID NO: 1015207 - DNA, 120 bp, Artificial Sequence
  ENSG00000203650_15 (sequence is synthesized)
aaattcttaacaagtttaatagtgtgctattataacataattgcagcattacaccagaagcattatcaacactaagtattctccaatttagaatgcatgaataaagtctctaaaactctt

SEQ ID NO: 1015208 - DNA, 120 bp, Artificial Sequence
  ENSG00000203650_16 (sequence is synthesized)
aatttatcaaacctggttcagatcaatcctggtgcataagtgactaacaaggagctggagtggatggcatagcatagtggctagaaccctaaaacaagggattttacatgaaagtggaaa

SEQ ID NO: 1015209 - DNA, 120 bp, Artificial Sequence
  ENSG00000203650_17 (sequence is synthesized)
acccatatctgcttttgatgagactggactttggatctttgagttgacactgaaacaagaattttctggctactgcaatggaatgaatgtatttcgcattgtgaggacatgaattttggg

SEQ ID NO: 1015210 - DNA, 120 bp, Artificial Sequence
  ENSG00000203650_18 (sequence is synthesized)
gaccagaatagaatgccatggtttgaatgtgtcccctaaagttcatgtgttggaaacttaattcccaatagaacagtgttgggaggtgggacataataagaagtgattaggtcatgaggg

SEQ ID NO: 1015211 - DNA, 120 bp, Artificial Sequence
  ENSG00000203650_19 (sequence is synthesized)
ctctacccttattaatagattaatgtcattatctcaggagtgggttagttattgtaagagtggctgcattataaaagcaagtttgactcttcctgttccctcgctcttaccctctcttgt

SEQ ID NO: 1015212 - DNA, 120 bp, Artificial Sequence
  ENSG00000203650_20 (sequence is synthesized)
acttctgcctttcattatggcatgacgcagcgtgaaggccctcatcagatgctggctccatgctcttggacttcccagcctccagtaccatgagccaaataaatttctgtttattataaa

SEQ ID NO: 1015213 - DNA, 120 bp, Artificial Sequence
  ENSG00000203650_21 (sequence is synthesized)
ccaaatttccagaaggaacctgagagataaaaagtggttggctgctcctgacctgactcatagtgtttaactgaaccataccactagtgtatactagtgtgtgtgtatgtacatgcatac

SEQ ID NO: 1015214 - DNA, 120 bp, Artificial Sequence
  ENSG00000203650_22 (sequence is synthesized)
acacatgcacacacacattcacacacaatcctatggtatttggtgactttggatgcccagctcttgcaacaatttcctgctgtcattcttttccctttgaatctcaggggtgagcaaact

SEQ ID NO: 1015215 - DNA, 120 bp, Artificial Sequence
  ENSG00000203650_23 (sequence is synthesized)
aaagaaatactatcatcttactgcttttagtatattccatagaaaaggagtggctggagtcagtgtagatcaacccaagcagtacaaatctgccagaattgcagctcagcttccttacct

SEQ ID NO: 1015216 - DNA, 120 bp, Artificial Sequence
  ENSG00000203650_24 (sequence is synthesized)
ccagcatgtgtacctttctgaagggtaggcccttaagccagacataagtaagttatccactctgtgcataactgtctgacttggcttagaagcatgaaaggggcagaaatgtaagatggg

SEQ ID NO: 1015217 - DNA, 120 bp, Artificial Sequence
  ENSG00000203650_25 (sequence is synthesized)
atgagatacccaaatagtcagtccctgaatataaatcatttccttgtacagaatcactgccaaactcagtatggttaaaagatttttaacacccagctgcagcattcactctggttagaa

SEQ ID NO: 1015218 - DNA, 120 bp, Artificial Sequence
  ENSG00000203650_26 (sequence is synthesized)
ttggccatttaaatttatttcacatatgtaagtatcatatcctttataatgcattcttaattgttgctcagttcttccagattgaattcctttaaaaaattccttatgtaatcttttaat

SEQ ID NO: 1015219 - DNA, 120 bp, Artificial Sequence
  ENSG00000203650_27 (sequence is synthesized)
tctagttggaaaacatcacttgacagttgctgtttatacaggcatgcctcgttttattgtgcctggctttattgtactttgcagatactgtgtttttcacaaatggaaggtttgtggcaa

SEQ ID NO: 1015220 - DNA, 120 bp, Artificial Sequence
  ENSG00000203650_28 (sequence is synthesized)
ccctgcgttaagcaagtctgttggcaccattttctcgacagcatgtgctaactttgtctctgtctcacattttggtaattctctcaatgtttcaaactttttcattatgattacatctgt

SEQ ID NO: 1015221 - DNA, 120 bp, Artificial Sequence
  ENSG00000203650_29 (sequence is synthesized)
tatgtggagctgtgatcagtgatctttgatgttaacattgtaattgttttggggtgccacaactgtgcccagataagacagtgaacttaattggtaaatgttttatgtgttcagactgtt

SEQ ID NO: 1015222 - DNA, 120 bp, Artificial Sequence
  ENSG00000203650_30 (sequence is synthesized)
ccactgactagcccttcttcaaactctctcactctccttgggcctccctattccctgaaatacaacaatattgatattaagccaattaataaccctacaatgatttccaagtgtttaagt

SEQ ID NO: 1015223 - DNA, 90 bp, Artificial Sequence
  ENSG00000203650_31 (sequence is synthesized)
gccaattaataaccctacaatgatttccaagtgtttaagtgaaaggaaagacatgtatgtttcaccttaaatcaaaagctagaaatggcc

SEQ ID NO: 1015224 - DNA, 66 bp, Artificial Sequence
  ENSG00000203650_32 (sequence is synthesized)
ctagattggatttcttatcttgcaaagccaaggtgaagtccagaccatgaaaaagcagaaaatgta

SEQ ID NO: 1015225 - DNA, 120 bp, Artificial Sequence
  ENSG00000203650_33 (sequence is synthesized)
gccaaggtgaagtccagaccatgaaaaagcagaaaatgtatcaagataaatactaccttgtgagccctatcaatagtcctaccaatagctttctgatattggaggctttcaaatgagatt

SEQ ID NO: 1015226 - DNA, 120 bp, Artificial Sequence
  ENSG00000203650_34 (sequence is synthesized)
aaggaagactgggatatgtagaggcatagctagtagatttcacgtctattaacagtctctgctataccccctcagtaccaactgaccactaacttcccaccccactcaccaggaatgtat

SEQ ID NO: 1015227 - DNA, 120 bp, Artificial Sequence
  ENSG00000203650_35 (sequence is synthesized)
agctgctgatgattttcgaattcggtaagagactggattgtgaatatcagaccacctcttcagtctaacagacagtgcttgttttacctaaggtgaggagacagcacaggcagtactcac

SEQ ID NO: 1015228 - DNA, 120 bp, Artificial Sequence
  ENSG00000203650_36 (sequence is synthesized)
ttgtttgtcagttacagtccttttcctctccctctctcattactcaccatgaaacacacattgtcccttctacttctgtcccaagcgtcacactcataagaacataagaagtgcccccag

SEQ ID NO: 1015229 - DNA, 120 bp, Artificial Sequence
  ENSG00000203650_37 (sequence is synthesized)
atcaaacaagagtgcttgaatagaaagtgagatatttcttctttataaggttgaccttacaaggctgaggcaggctatgcctaattatgtagggaccctaatgtctcatggttgtgtcag

SEQ ID NO: 1015230 - DNA, 120 bp, Artificial Sequence
  ENSG00000203650_38 (sequence is synthesized)
cataaattaattaatgattaaccctctaacaaggctaagtgaacagaattccccagtgtcctgagagaaggaaagttaatgtgttctttctcccaggaggaggataaccagtggagcctt

SEQ ID NO: 1015231 - DNA, 78 bp, Artificial Sequence
  ENSG00000203650_39 (sequence is synthesized)
tttctttatatattacccagtctcaggcatttctttatagcaatgcaagaatggactaatacaaagttcattccaacc

SEQ ID NO: 1015232 - DNA, 78 bp, Artificial Sequence
  ENSG00000203650_40 (sequence is synthesized)
aatctcatgataaaacttgaacagatgaggtattgcttcttatggatgagcaaagaaagtggatttttgagatggaat

SEQ ID NO: 1015233 - DNA, 61 bp, Artificial Sequence
  ENSG00000203650_41 (sequence is synthesized)
gatgagcaaagaaagtggatttttgagatggaatgacataaacttagttgataaagcagtg

SEQ ID NO: 1015234 - DNA, 80 bp, Artificial Sequence
  ENSG00000203650_42 (sequence is synthesized)
aggactgactccaattttgaaagaagtttcactgtgggtaaaatgctatcaaatagcatggcatgctataaagaaatctt

SEQ ID NO: 1015235 - DNA, 120 bp, Artificial Sequence
  ENSG00000203650_43 (sequence is synthesized)
ggaagcccatgtgccttaatcgcttcatcctagagcttcctgagacctccccggaggctgatgctgccgtgcttcctgtacagcctgcagtactgtgagccaaataaacctcttttcttt

SEQ ID NO: 1015236 - DNA, 90 bp, Artificial Sequence
  ENSG00000203650_44 (sequence is synthesized)
gagccaagattgtgccattgcactctaacttagtgacagagcaagactctgtctaaaaataaataaataaataaataatcttttaggcca

SEQ ID NO: 1015237 - DNA, 64 bp, Artificial Sequence
  ENSG00000203650_45 (sequence is synthesized)
ctgtctaaaaataaataaataaataaataatcttttaggccatgcctgagctcaggagttccag

SEQ ID NO: 1015238 - DNA, 120 bp, Artificial Sequence
  ENSG00000235706_0 (sequence is synthesized)
atgttatgaactttccaattatactttcagttatttttaaatatacaataaattattgtagtcatcctgttgtgctatcaaatactagatcctattcattctatctaactatatgtttgt

SEQ ID NO: 1015239 - DNA, 120 bp, Artificial Sequence
  ENSG00000235706_1 (sequence is synthesized)
ctatctaactatatgtttgtacccattaaccatcccccacccctccactactacccttcccagccttgggtagccatccttctactctctgtctccatgagttcaattgttttgattttt

SEQ ID NO: 1015240 - DNA, 86 bp, Artificial Sequence
  ENSG00000235706_2 (sequence is synthesized)
gttcaattgttttgatttttagcccccacaaataagtgagaacatgagaagtttttctgtgcctggattatttcacataatatcct

SEQ ID NO: 1015241 - DNA, 120 bp, Artificial Sequence
  ENSG00000235706_3 (sequence is synthesized)
atgtaccacatttcctttatccattcatttgttgatggacacttaggttgcctccaaatcttggctgttgtgaacagtgctgtaataaacatgggagtgcagagatgtcttcaatatact

SEQ ID NO: 1015242 - DNA, 120 bp, Artificial Sequence
  ENSG00000235706_4 (sequence is synthesized)
gatttccattcttttaggtatatacttggtagtaggattgctggatcatatggtagctctattgttaggtttattttttatttaaaaaaacatttttttgagacagtctcactctgttgc

SEQ ID NO: 1015243 - DNA, 72 bp, Artificial Sequence
  ENSG00000235706_5 (sequence is synthesized)
gcctgggattacaggtgtgtgccaccacacttggctaactttcgtatttttagtacagggtttcaccatgtt

SEQ ID NO: 1015244 - DNA, 60 bp, Artificial Sequence
  ENSG00000235706_6 (sequence is synthesized)
tcctgagtgcctgggattacaggtgtgtgccaccacacttggctaactttcgtattttta

SEQ ID NO: 1015245 - DNA, 89 bp, Artificial Sequence
  ENSG00000235706_7 (sequence is synthesized)
ccaaaccattcacaacagcatacaagggttcccttttctccacatcctcgcccccattccttattgcctgtcttttggatagaagccat

SEQ ID NO: 1015246 - DNA, 89 bp, Artificial Sequence
  ENSG00000235706_8 (sequence is synthesized)
caacaacagcatacaagggttcccttttctccacatcctcgcccccattccttattgcctgtcttttggatagaagccattttaactgg

SEQ ID NO: 1015247 - DNA, 120 bp, Artificial Sequence
  ENSG00000235706_9 (sequence is synthesized)
tattgagttctttttcctatggggactgttatgatttgcattcacagttgagggaactgagggctgggaatgttgagacttttcagaggtcctaaaagaatggacccctgagtcaatggc

SEQ ID NO: 1015248 - DNA, 120 bp, Artificial Sequence
  ENSG00000235706_10 (sequence is synthesized)
acacgaagctccctgtccagctttcttccacatggcaggacgtaggcctcagactggaaccctggcagtcatttttgccctgtgggtctctctgagccctgcccaccagaagcagctgca

SEQ ID NO: 1015249 - DNA, 120 bp, Artificial Sequence
  ENSG00000235706_11 (sequence is synthesized)
gatcccatggcccaggtcacattctcttgggggccacttctggggacacacaaggaagactgatgtgccagaaacattccagtggccccgggttcctattccaactctgcctgcactatc

SEQ ID NO: 1015250 - DNA, 120 bp, Artificial Sequence
  ENSG00000235706_12 (sequence is synthesized)
ttcattcaatcattccttccagcctcaaccttctcatgggaaggacgcaaccacccaccacaaaactcactgtgagagtcttgtgatagtatagtatgttcatagcctagcgcctgggag

SEQ ID NO: 1015251 - DNA, 72 bp, Artificial Sequence
  ENSG00000235706_13 (sequence is synthesized)
ttgtgatagtatagtatgttcatagcctagcgcctgggagagtgctcaagaatgggtagctgtgagcctggc

SEQ ID NO: 1015252 - DNA, 75 bp, Artificial Sequence
  ENSG00000235706_14 (sequence is synthesized)
tagttgctctgggtgaactccttcagaggatggatttgatttcattaccatctctaagccccagacaccctgcag

SEQ ID NO: 1015253 - DNA, 120 bp, Artificial Sequence
  ENSG00000235706_15 (sequence is synthesized)
ttgatttcattaccatctctaagccccagacaccctgcaggccttccatacagcacaggttggagctgaaggagtgcccaggctgcggatggaggaaggacgtgctcgggagaaggtgaa

SEQ ID NO: 1015254 - DNA, 120 bp, Artificial Sequence
  ENSG00000235706_16 (sequence is synthesized)
gatgggagagaagcaagatcttctgtgtttggaccaaggacacatttccttactccatagcagctgtggtcagtggcttagctcggacaaggagatgagagcccatgtgttgtgagggtt

SEQ ID NO: 1015255 - DNA, 120 bp, Artificial Sequence
  ENSG00000235706_17 (sequence is synthesized)
cttctgggaactctgagaaggcaggagccgcccccgcccttcactgcctctcttccattctgcagcatggaatatggatgtgtggtctggatgtacagacaccattttggaccataaaga

SEQ ID NO: 1015256 - DNA, 120 bp, Artificial Sequence
  ENSG00000235706_18 (sequence is synthesized)
caaggacgattgtctaaggatgacacagccagagcactgagagtggcgagaaggacaggggagctgctgtgccaagcaggactgtctctcttaagagaaaaataaaatttattggtgttt

SEQ ID NO: 1015257 - DNA, 120 bp, Artificial Sequence
  ENSG00000235706_19 (sequence is synthesized)
agggagacagcgggcgcgcgcgcggaggccggagaggcgtttgcggcccagcgcctggactggaccttggcgttgggccgcagttgcccggagtttttggggcccccgggaacccgcgcg

SEQ ID NO: 1015258 - DNA, 120 bp, Artificial Sequence
  ENSG00000235706_20 (sequence is synthesized)
ccgaggccggctaagtttggcagactctctgagctctcggaattcgactgcctccattgttgctccttctggcacccacagaccgtaacgtggccgtaattgtttcccggagagcttagc

SEQ ID NO: 1015259 - DNA, 120 bp, Artificial Sequence
  ENSG00000235706_21 (sequence is synthesized)
ttccctctgagcacctccctcccctttttaaagtaccttcccactcgcctgcgtttcctcgcgttagtggtgcaggggcctccgcatttggggaaataacaaacacccacttccgccccc

SEQ ID NO: 1015260 - DNA, 120 bp, Artificial Sequence
  ENSG00000235706_22 (sequence is synthesized)
caccccaaccgggatccccagataatgagaaatagatggtggccctctgtttgtaagctgttcatttgcataggtcggaaccgcgcaccacagcttgaagctaggaattaaaatatcggt

SEQ ID NO: 1015261 - DNA, 120 bp, Artificial Sequence
  ENSG00000235706_23 (sequence is synthesized)
gggaattaaataagtggctggcttaaagaacatcttcttaatttatccccaaatgtagacatctcttcagtggaccccctgataggccggtttgctccaggtgaggtgtgctcacagcaa

SEQ ID NO: 1015262 - DNA, 120 bp, Artificial Sequence
  ENSG00000235706_24 (sequence is synthesized)
ctgcaaccgtgtttctttcagaccatgggcgtgagcagaacctactatgcgcccctgctgcctgggctgtgctgttcagtttggggccaccagccccacatggctcctgagcacttaaag

SEQ ID NO: 1015263 - DNA, 120 bp, Artificial Sequence
  ENSG00000235706_25 (sequence is synthesized)
tatggctagtcggaatcgagatatatgcattctttaccaaataatgttcaaaaaattgttacatgttgaagtgataaactttttccatatattgggataaaagttttatttgtttatttt

SEQ ID NO: 1015264 - DNA, 120 bp, Artificial Sequence
  ENSG00000235706_26 (sequence is synthesized)
ttagtgtgggttctacagaattttaaatgtcacctgtggcctgcattatattgccattgggcaggctgatctagggcttgcatgcctgtgatccttaggtgcaccctgtgaggtaggtgc

SEQ ID NO: 1015265 - DNA, 120 bp, Artificial Sequence
  ENSG00000235706_27 (sequence is synthesized)
tgaggtaggtgctttaactgtgtgcaccctgtgaggtaggtgctttaactgtgtgcacattgtgaggtaggtgctgaaactgcttcctgttttttttttttttttcttttgagacggagt

SEQ ID NO: 1015266 - DNA, 67 bp, Artificial Sequence
  ENSG00000235706_28 (sequence is synthesized)
accatgttggccatgatggtctcgatttctgaccttgtcacccagcctgcttcctgttttaacagac

SEQ ID NO: 1015267 - DNA, 120 bp, Artificial Sequence
  ENSG00000235706_29 (sequence is synthesized)
accactctgtccaaagtaatataccaccaagttgaaacatgattatgctcagctgtttacaggctttggaaatttcagtacagggtttatcttcctgtcatacagcctgccattcccctt

SEQ ID NO: 1015268 - DNA, 120 bp, Artificial Sequence
  ENSG00000235706_30 (sequence is synthesized)
ttaatgtggccagatcgtttgatgtgttttctctttgtctccattcaagcagggagaaggctctgtgcatccaggaaggtttgtgaagggcctcctggtatctgtattcaaaagatttaa

SEQ ID NO: 1015269 - DNA, 120 bp, Artificial Sequence
  ENSG00000235706_31 (sequence is synthesized)
aattcaaatacagcagggagagtggtcggaagacccacttcggggtggcgtgtcagaatgggattggtgggggagagatcagtctgggggctccgcagatgccatgggaatggcctcatg

SEQ ID NO: 1015270 - DNA, 120 bp, Artificial Sequence
  ENSG00000235706_32 (sequence is synthesized)
gtacactggggacctgagattccaaaactggtcagagatgcccaagcccagtcaatcacggcacagcagcagagcagctaaggggccatgggggctgcgccctaccagtgcagacagagg

SEQ ID NO: 1015271 - DNA, 120 bp, Artificial Sequence
  ENSG00000235706_33 (sequence is synthesized)
cacagtcacctcagggcacttcagtgccacagcccgagtacccttggacagggagaggaaaaggagatgagcaacgggcgtctcaaacttaacatgctcagattcaggaactccgggtct

SEQ ID NO: 1015272 - DNA, 120 bp, Artificial Sequence
  ENSG00000235706_34 (sequence is synthesized)
tccccaccatctgcttcagccccatttccccatcagccaatggcatctttattcttccagatcctcaggccaaaaccttggagcatttttcaatcctttttctcttacactgtacaccca

SEQ ID NO: 1015273 - DNA, 120 bp, Artificial Sequence
  ENSG00000235706_35 (sequence is synthesized)
atccatttgcaaatccagagggtctactttcaaaatacatccagaataaaaccactgtggcccacttccgctgcacccacctgtgccattgtcatctctcccggactgttgaaatagact

SEQ ID NO: 1015274 - DNA, 120 bp, Artificial Sequence
  ENSG00000235706_36 (sequence is synthesized)
tctggctggcctctgcattctgccctcgttccctggagtttattctcattatggcagctgggtttagcctgctaaaatgtaagctgacgtgtgctcaaaattctccagtggatcccagtt

SEQ ID NO: 1015275 - DNA, 120 bp, Artificial Sequence
  ENSG00000235706_37 (sequence is synthesized)
cactctgggtaaaggccaaagcccttaacacatcctacaaggccctacctggcctctctcctctcactcaccatgcattcaccaaaccaggctctttgctgttccgtaaaaaccccagcc

SEQ ID NO: 1015276 - DNA, 120 bp, Artificial Sequence
  ENSG00000235706_38 (sequence is synthesized)
atgatcctgcctcagtgcctttgcactggctgctccctttgcttagaaaactctttccccaggcattcaaaggatctgtccctgcggctcttttaggtctttagtcaaatgtctcttgct

SEQ ID NO: 1015277 - DNA, 120 bp, Artificial Sequence
  ENSG00000235706_39 (sequence is synthesized)
caaagaggtctttcctggctgctgtatgaacctggtggcacctcgctgtccacccccaatctaccttccttccctgcgttttcttatagcactgacgacatactgtgcatcttaccatta

SEQ ID NO: 1015278 - DNA, 120 bp, Artificial Sequence
  ENSG00000235706_40 (sequence is synthesized)
ttttgtttctgtctgcctcttctcactagacggtcagctctgggaggataaaaaccttgttttggtttcctattatattcgcagcaaccagaacagtgctgatgccaagtaggtgtgtaa

SEQ ID NO: 1015279 - DNA, 120 bp, Artificial Sequence
  ENSG00000182824_0 (sequence is synthesized)
aggcattttactaaccaatactcattaagcatagcgtggattcatatgacatcaaggagctattttatttggtaaaacgaaaaagcacaagaatgaacgaacgcaagaactgaaacagtg

SEQ ID NO: 1015280 - DNA, 75 bp, Artificial Sequence
  ENSG00000182824_1 (sequence is synthesized)
aaaagcacaagaatgaacgaacgctaaatcattttgttgtcttcccagcgtacttattatcctgatcattgtcat

SEQ ID NO: 1015281 - DNA, 120 bp, Artificial Sequence
  ENSG00000182824_2 (sequence is synthesized)
gggtaactccataacagttggaagcttacgaattcatataatttgtaagaggtcaatttggaagtacctatctattttaaaattccaataacctgggaatttcatcccatgtctagagtc

SEQ ID NO: 1015282 - DNA, 120 bp, Artificial Sequence
  ENSG00000182824_3 (sequence is synthesized)
atatgtgcatggggattttctatgtagcggtgttttgatagaatagaaaattgggataaaccaaatttccatcacgaaggaaatagtaatatgctgaataataatacagcgaatattatg

SEQ ID NO: 1015283 - DNA, 120 bp, Artificial Sequence
  ENSG00000182824_4 (sequence is synthesized)
atatgctgaataataatacagcgaatattatgcaggctttaaacatcaaaaaagagttcaacttctgacttccgatgatggtgttgaagcaggtcactgctggtttacatttgattttca

SEQ ID NO: 1015284 - DNA, 120 bp, Artificial Sequence
  ENSG00000182824_5 (sequence is synthesized)
tgtgggaactctggaagtccgccttagtgattttacatgtggctaaattgagctaatgacaagctgttcgaagtatggcaaaatggaactttaaaacagtatcttgtcaacaaccaagag

SEQ ID NO: 1015285 - DNA, 120 bp, Artificial Sequence
  ENSG00000182824_6 (sequence is synthesized)
ccctgttcctagtcacacattaattcttcaacaagtcccttttgatagattgtgattaagcttagctactatttccaattgcttccccaaacgtacttctcactgttctcccatcacacc

SEQ ID NO: 1015286 - DNA, 120 bp, Artificial Sequence
  ENSG00000182824_7 (sequence is synthesized)
cttcagcccatccatgcggggttcctttgcttttcccaccttacaccaaactccctatttttactcccacttttacctcctctccaagacaaaacaaacaaaactagcattttaaaactt

SEQ ID NO: 1015287 - DNA, 120 bp, Artificial Sequence
  ENSG00000182824_8 (sequence is synthesized)
agttgtaatctttcttccttcatgaaaatttctccaacagccactcccacggtcctgtgtgttccggatattttaaaataatggctataaggctgagcacttcaggatatgctgttttgc

SEQ ID NO: 1015288 - DNA, 120 bp, Artificial Sequence
  ENSG00000182824_9 (sequence is synthesized)
tgtgtgcagatggaggcagtggctggagtgaatgaacggcaacacttgctggcaaccggcagaagctgagagacagggaacaggctctcctccagagcctccaggagccaggcctttgga

SEQ ID NO: 1015289 - DNA, 120 bp, Artificial Sequence
  ENSG00000182824_10 (sequence is synthesized)
caccttgaatgtgggcttctgggagaccatgcgtttctgttataagcagcccagtctctggcagtttttacggctgccccggaacactcatctatacctgtctgacaaggtcaagctcca

SEQ ID NO: 1015290 - DNA, 120 bp, Artificial Sequence
  ENSG00000182824_11 (sequence is synthesized)
aggaagggattctttacatatctacattgtttgcagattttacaataatcatttattcttgcatggctgatcattgttaaccaatacaaataaaataataaagaaatgacccacatttta

SEQ ID NO: 1015291 - DNA, 120 bp, Artificial Sequence
  ENSG00000182824_12 (sequence is synthesized)
aagccttccaaaaagcgtgtgaaaaggaagccctactctactaccaaggtgacttcagggagcacattcaatgagaatacaagaagatatgctgtgcacaccaaccagtgtaggagacct

SEQ ID NO: 1015292 - DNA, 120 bp, Artificial Sequence
  ENSG00000182824_13 (sequence is synthesized)
cattcaatgagaatacaagaagatatgctgtgcacaccaaccagtgtaggagacctcatggctcccgggtaaagaagaagaggtacccacaagaagatgacttccatcatacagtcttca

SEQ ID NO: 1015293 - DNA, 84 bp, Artificial Sequence
  ENSG00000182824_14 (sequence is synthesized)
gagggtggtgcaggtggcccctctgaggcgtgaatctagagccattgacactggagaatgatacctaccctgaaataactcact

SEQ ID NO: 1015294 - DNA, 120 bp, Artificial Sequence
  ENSG00000182824_15 (sequence is synthesized)
ttgacactggagaatgatacctaccctgaaataactcacttcctgagaaaaaagcgccatctctagggtacagaaacctgattctgggctccttttgggaaggaggatttggggtctggt

SEQ ID NO: 1015295 - DNA, 120 bp, Artificial Sequence; identical to SEQ ID NO: 985081
  ENSG00000182824_16 (sequence is synthesized)

SEQ ID NO: 1015296 - DNA, 120 bp, Artificial Sequence; identical to SEQ ID NO: 949266
  ENSG00000182824_17 (sequence is synthesized)

SEQ ID NO: 1015297 - DNA, 120 bp, Artificial Sequence
  ENSG00000182824_18 (sequence is synthesized)
gagggggcatgaaatcaaaacaaaacaggaaatatgtgtcatattggacttggtcttttccgggtttattggcataatagttagaactgtctctctgggctatgagggtgctgtgttatt

SEQ ID NO: 1015298 - DNA, 120 bp, Artificial Sequence
  ENSG00000182824_19 (sequence is synthesized)
tcgagtgtcacctgtggtgaacagaatctgagggacacaactctctcacaggcacttcctccaacctggagacagaattctcctggtgtgtgcccaggggtggaggagaaattgacagtc

SEQ ID NO: 1015299 - DNA, 120 bp, Artificial Sequence
  ENSG00000182824_20 (sequence is synthesized)
tgcctctgaactttcaggactttaaaaagcactcatgtttccatcctcactgttgactcctggcttaaagggatctcccggggtgagtgaggaggcgggatcggaccctagcagtctgac

SEQ ID NO: 1015300 - DNA, 120 bp, Artificial Sequence
  ENSG00000248799_0 (sequence is synthesized)
gcattgagatctctgtggcaaggcccaggactctctctctctctggctcagatatgttcaaaattttatcattaatgtggataaataaatagaaggcttgctgagccaatttacaggtga

SEQ ID NO: 1015301 - DNA, 120 bp, Artificial Sequence
  ENSG00000248799_1 (sequence is synthesized)
tacaaagatggagactgcaatgaatacgataatgagggagtcaggtaccaaggagatggtcaaactgaagagcatccagaatttttgataaggataagagataattcaaagcacctgaaa

SEQ ID NO: 1015302 - DNA, 120 bp, Artificial Sequence
  ENSG00000248799_2 (sequence is synthesized)
agtccagggaactgaattcaaaacccgaggtgccagctaactgatgcagagaggaaaaacaaaagcacaagtcatcaagccggactgaggtgctggaccatcacatttgaatgacagcga

SEQ ID NO: 1015303 - DNA, 120 bp, Artificial Sequence
  ENSG00000248799_3 (sequence is synthesized)
cagaattacttaagtgcattggacaccttgttctgtggagccacacacagggacttgattctacaggtcatcaactcaagagcccacccttttgcaatagggtgcaatgatctaattaat

SEQ ID NO: 1015304 - DNA, 120 bp, Artificial Sequence
  ENSG00000261584_0 (sequence is synthesized)
taaggaagaggtttggaattagatatttgttgtatgaatgagtgagctaaagtgcaaaagaacgggcagaataactgagctggtacagagggaaaaaatcacatttaaaatctaaaaata

SEQ ID NO: 1015305 - DNA, 120 bp, Artificial Sequence
  ENSG00000261584_1 (sequence is synthesized)
tctgcttcttagttcaggctttcccacttagcagctttggcaccttaggaacacttaacttatctgagcctctattacttctaaaaagtgcataaagtgcagactaagacagtttttttg

SEQ ID NO: 1015306 - DNA, 120 bp, Artificial Sequence
  ENSG00000261584_2 (sequence is synthesized)
gcaaaattcagtcagactacatcaagtaaactccctaagtctcctagtataattcatggcacaaaaaattggggaaaaaacagggaggatatgattataagttcagtttatgttttttgt

SEQ ID NO: 1015307 - DNA, 120 bp, Artificial Sequence
  ENSG00000261584_3 (sequence is synthesized)
tgagtgaatgtctccagtcatagagatgcaagtgtagatacacagtaagagtagtatgaatgggagacaccttggaaggctatttcttccttccttcattcagttggtcactcagtgaac

SEQ ID NO: 1015308 - DNA, 120 bp, Artificial Sequence
  ENSG00000261584_4 (sequence is synthesized)
tatcatgaattgagcaccgcctctgtttcttatcaacaaaggagactgcggaaaagaagagtgactaagatctctgaagaagggaaaagctagatgactgggccacaagaggaaaaaaag

SEQ ID NO: 1015309 - DNA, 74 bp, Artificial Sequence
  ENSG00000261584_5 (sequence is synthesized)
agggaaaagctagatgactgggccacaagaggaaaaaaagcagcaagacagttacaattgtttctggtcccact

SEQ ID NO: 1015310 - DNA, 120 bp, Artificial Sequence
  ENSG00000261584_6 (sequence is synthesized)
aaatctgtgatgctttacctgggcatgtctaggcaggtcctcctttgctaggacgtgcccttttctgtcccggaatactctaaacttggcattttggcagcgtgaagttttcccgttgtg

SEQ ID NO: 1015311 - DNA, 120 bp, Artificial Sequence
  ENSG00000261584_7 (sequence is synthesized)
agtagccactgctgtttgccctggcccatcaatgagaagatctgctcttagagccctgctttcctgctgaaggccctgaaatcacctgtgttccaggccacctgctaacaataaataatg

SEQ ID NO: 1015312 - DNA, 120 bp, Artificial Sequence
  ENSG00000261584_8 (sequence is synthesized)
ctgccctgatgtggggaattagctcaagtggtagagcgcttgcttagcacgcaagaggtagtgggatcgatgcccacattctccaagctttattatttagacatcgtgtctccaaacact

SEQ ID NO: 1015313 - DNA, 120 bp, Artificial Sequence
  ENSG00000261584_9 (sequence is synthesized)
caggtctccaaacccaagttagtgtctgagaacaggatgctgctttggttcaagacgtaggagcagcaataatagagggctggtgatggctccctcttggcattcagtatagtgtagatc

SEQ ID NO: 1015314 - DNA, 120 bp, Artificial Sequence
  ENSG00000261584_10 (sequence is synthesized)
taccatgtaattaattctctgtttctttgaggagctgtgaaaccaagggacatatacaactgctcttttctccctgtttctacctgcagctttgtcctaaatgtgagacaattatgaaaa

SEQ ID NO: 1015315 - DNA, 120 bp, Artificial Sequence
  ENSG00000261584_11 (sequence is synthesized)
gtgcagcgcagagccacttgggtaaatacagccccggctttctgctcaggggacagagtttgaggcactgcagaggaaccggccaaagtatgagacccatatattgagagtaacagagtg

SEQ ID NO: 1015316 - DNA, 120 bp, Artificial Sequence
  ENSG00000261584_12 (sequence is synthesized)
taaagttcaaaaaaatcaaaatatttaaagatttatcatgggtcttgatgacatgatggaatctctctactctctggacttattatgtgtggtaataaatttactttttaaaagccagtt

SEQ ID NO: 1015317 - DNA, 120 bp, Artificial Sequence
  ENSG00000261584_13 (sequence is synthesized)
gagtgtttttaatgttgtggagctattgctaagagtttcctgagttttttccagtaatgtagagatctttgtgctaaatatttcataaagaagtttggtgggttatgtgttctaaatcct

SEQ ID NO: 1015318 - DNA, 120 bp, Artificial Sequence
  ENSG00000261586_0 (sequence is synthesized)
cacatgtcatcgctttaatactgtgtaatactttcttttaaaatacagtctcttctgaggtagacagaccacaactgcagagcatcgtcagacaggagataaatacgtccatgtacaaca

SEQ ID NO: 1015319 - DNA, 120 bp, Artificial Sequence
  ENSG00000261586_1 (sequence is synthesized)
cgcagcaaaatgaggtagaaatggttacagcgggaggagaggatcccagccccagtctgggtagaggaaggggagaggccagctcggaagtcaccctccccactccctgcccctggattc

SEQ ID NO: 1015320 - DNA, 120 bp, Artificial Sequence
  ENSG00000261586_2 (sequence is synthesized)
tttggtatgcctccccccagcattaccagagctggactggcccttcccctacctgccccagagcccatgaggtaggtgccactaggctgggggcagtctccttgtgcaaagctccccaag

SEQ ID NO: 1015321 - DNA, 120 bp, Artificial Sequence
  ENSG00000261586_3 (sequence is synthesized)
cctggggaacaggaggagcctagtagagaaagcggtggggactccacctcccagagctccctgcctcttgaagggaaggctgggatcccaccccaacttccctgacaccctccacccacc

SEQ ID NO: 1015322 - DNA, 120 bp, Artificial Sequence
  ENSG00000261586_4 (sequence is synthesized)
cccaccccccaatacatacacacctgagagagaacccctcactccatgctccctccgagggtcttttgcagcctgcggctgtgacccggcagcccactgcttctgaggcaccaaagccct

SEQ ID NO: 1015323 - DNA, 120 bp, Artificial Sequence
  ENSG00000261586_5 (sequence is synthesized)
gtgggtggctggctccaaagagggggccagaaagcaacgggggtgggggggaacagagcagccttctggtcagcactcctaggccagcacaggccctgggtgccagggcccctgaaagat

SEQ ID NO: 1015324 - DNA, 120 bp, Artificial Sequence
  ENSG00000261586_6 (sequence is synthesized)
cccccccagacaccctcccagccaggggggaggcagtagactctaggaaatgcacgggcaggcaaggaactgcacaggaggctgagatgggagagagaaaaagtggtggtgggggggcgt

SEQ ID NO: 1015325 - DNA, 120 bp, Artificial Sequence
  ENSG00000261586_7 (sequence is synthesized)
gtcccctgctttggactaagatcagagttgtgaaatgggctgggggtggtgggagcaaactgctaaagcctcatcaagggaaaattggtgggaaggagagaaatatggttcttggaaggg

SEQ ID NO: 1015326 - DNA, 120 bp, Artificial Sequence
  ENSG00000261586_8 (sequence is synthesized)
agaaaacacccctgcccatctccctcaccctctcccagccctggagctccagacctaggactccgggggaatggggaaggcacatttcctcacagagcccccacaagtgagggatgctca

SEQ ID NO: 1015327 - DNA, 120 bp, Artificial Sequence
  ENSG00000261586_9 (sequence is synthesized)
ctcctcctcagagcctccagcagagatggctgaggtccagtagctgattttgtggccagactgtctacccagatggaatcctcctagcataagtcactggggacctctgccaaggcaggg

SEQ ID NO: 1015328 - DNA, 120 bp, Artificial Sequence
  ENSG00000261586_10 (sequence is synthesized)
ccaggggacatgacctttctggagactttctgcttaggtcaccttcccatttgggccctcccaccctaccttctgggtctcaggaaggaattgggcaagggcatcctaactctggatagc

SEQ ID NO: 1015329 - DNA, 120 bp, Artificial Sequence
  ENSG00000261586_11 (sequence is synthesized)
ccttcacagaaaacactcagcggaggggttgggtggggcagggggtggggagcagcaggagaggaataaggcctcccttctctcaaaccccacagcccactccccacattcatgcctagg

SEQ ID NO: 1015330 - DNA, 120 bp, Artificial Sequence
  ENSG00000261586_12 (sequence is synthesized)
cctcggccctggggaggaagcccttaggaatacattctgcttctgaccaggaatagctggggtttcactgaggcctctgggtcttcctctccccttccccgtaagtctcattttttgagt

SEQ ID NO: 1015331 - DNA, 120 bp, Artificial Sequence
  ENSG00000261586_13 (sequence is synthesized)
gtctgggagaatttggtcccctggatggagtgggggggagggggcaggtgtgaggggcacacaggagagcagccaaagtctaacattctttctgaggtcagtttcttcctgagttgtcaa

SEQ ID NO: 1015332 - DNA, 120 bp, Artificial Sequence
  ENSG00000261586_14 (sequence is synthesized)
aagaaaaagaaaaacagcaaattctacacattttacaaaaataagaagactaaaatatgaaacaagctacatttctgggatctcccctcaaaaacaaacaaaaaattccccttctttggg

SEQ ID NO: 1015333 - DNA, 120 bp, Artificial Sequence
  ENSG00000261586_15 (sequence is synthesized)
gactttttttccttgatccccctagaccctaggtttcagatgggtagagggggatggagagctggggagggaggggcaggagagaaacagggccagcatggggtgggcaggggtgtcagc

SEQ ID NO: 1015334 - DNA, 120 bp, Artificial Sequence
  ENSG00000261586_16 (sequence is synthesized)
gacaaagcaaaagggagagaaaaccaagagaatgcagagaatgggatggagagagtgagggagaaggagggtgccattcagatagcgaggagacaaaagcgttgtggcaagagagcagga

SEQ ID NO: 1015335 - DNA, 120 bp, Artificial Sequence
  ENSG00000261583_0 (sequence is synthesized)
actcacctgctccagtccctccttgagcaaacagggtgaggctgagctcccagcaggaggcctaacatccgggtggcccagccgcacccctacaaaggccacatcctgcttcaggaccct

SEQ ID NO: 1015336 - DNA, 120 bp, Artificial Sequence
  ENSG00000261583_1 (sequence is synthesized)
cagagacatccgatctggccacactgggcttgcattcttagctggcaaccatgaggtggacccatgaggtggaagccgggaatgagaggtgcctaactctacctgatcgcttttgcccca

SEQ ID NO: 1015337 - DNA, 120 bp, Artificial Sequence
  ENSG00000261583_2 (sequence is synthesized)
ggctgcatttctgtaagactctgctattcctggcaccgtgggagcagatactgacactcccagctcatttatcccataggttctgaacctggggtgcagccatgggtaaggggaccgtat

SEQ ID NO: 1015338 - DNA, 120 bp, Artificial Sequence
  ENSG00000261583_3 (sequence is synthesized)
tgtaaagcctctgaaattgcaaaactgggcgtgcaggctcatttctcagcagagggccctgaagtcaatcatattttcaaaggaagccaggattcccagaagttttaagaggcctggctt

SEQ ID NO: 1015339 - DNA, 120 bp, Artificial Sequence
  ENSG00000266126_0 (sequence is synthesized)
attgcaggcatgagccactgcacctggctgaatgtcttgtttttgattaggcacttaagaaaggcctaggtactaaccataaaatatatttttataccttttgttgatactatatatata

SEQ ID NO: 1015340 - DNA, 120 bp, Artificial Sequence
  ENSG00000266126_1 (sequence is synthesized)
tatatagaaaactgcacttatcataaccttagacaccttgaagaatgttcacaagcagaactaacccatgtgacccagcatccagatcaaaaacagcattatcagcccctctagaagccc

SEQ ID NO: 1015341 - DNA, 120 bp, Artificial Sequence
  ENSG00000266126_2 (sequence is synthesized)
tcttgggccccttccattcactgtccttcttgtcaccagggtagctactatcctgacttttgatggcatagattagcattacctgttcttgtcattttataaataaaaccatactgtgta

SEQ ID NO: 1015342 - DNA, 120 bp, Artificial Sequence
  ENSG00000266120_0 (sequence is synthesized)
cagatatgttgctcaagggcagaccctgcacactccctgaaagggccctagggaaccaaagatcacactttgagaactgctgctcttgaggcaagactggattaaatttaaaggcaacaa

SEQ ID NO: 1015343 - DNA, 120 bp, Artificial Sequence
  ENSG00000269350_0 (sequence is synthesized)
gagacggagtttcgctcttgttgcccagccccagccctgtgctccaacatgtcctcctacaaacacttgtgcaatgtcatgctcaacctcctcaaccccagaccccagcctctgcccagc

SEQ ID NO: 1015344 - DNA, 120 bp, Artificial Sequence
  ENSG00000269350_1 (sequence is synthesized)
tcccatcctaaacccaccctcagttccaatcccaacccaaacttcactccaatcctaaggccctatggagcccctgatgttaacccgaaacagtcctaagctggtcagttaccccaaatc

SEQ ID NO: 1015345 - DNA, 120 bp, Artificial Sequence
  ENSG00000269350_2 (sequence is synthesized)
cctgatcgtcactcaaccccaatgtccccagccataacccagggtcacccaatccttcaactcaactccaagcccactcaaccttccaccagtcaccctaaaccaaccgaacctcaactc

SEQ ID NO: 1015346 - DNA, 120 bp, Artificial Sequence
  ENSG00000269350_3 (sequence is synthesized)
ctaacccattgtcaataccaatccctatgtcaatgccagtgaaatccaaaattcacccttggctgcaacctctaagcatctctataccgaccagccacctccagctaccagagcctccaa

SEQ ID NO: 1015347 - DNA, 120 bp, Artificial Sequence
  ENSG00000269350_4 (sequence is synthesized)
tccagcttcagtgcttcaactcagtcccgaagcaactgagatcctagatcattcttcacccaacctcaccccctacaagcatccctgactcaatttgcaagcttttctcaccatccaaat

SEQ ID NO: 1015348 - DNA, 84 bp, Artificial Sequence
  ENSG00000269353_0 (sequence is synthesized)
aggtggcagaaggacagacagcaggtgaacatcaggcagtatacggagaggaagagagagagacacacacagagagagccacat

SEQ ID NO: 1015349 - DNA, 120 bp, Artificial Sequence
  ENSG00000269353_1 (sequence is synthesized)
gagagggaggaggaaaaggaaggcggaggggagaaggaaggagggaaaggagagaaacagaataagagataggaaaaagagagagtgacacaagaagagaggaagaaagaatgaaggaga

SEQ ID NO: 1015350 - DNA, 120 bp, Artificial Sequence
  ENSG00000269353_2 (sequence is synthesized)
caaataaggtatctttagagggagatgaaaagaaagaaggagagagagagagattggggagcaatcagattcaaatagatggagataggaggttaagcaagatggaagaaagccaaaaaa

SEQ ID NO: 1015351 - DNA, 120 bp, Artificial Sequence
  ENSG00000260983_0 (sequence is synthesized)
agaaacaattttggcctcaggcaggtccagggaaatcaaatccacctaccacctagatcttcagatccacaacacacagcaagtttcatgcctgtcaactgatgtgccttaagggagcaa

SEQ ID NO: 1015352 - DNA, 120 bp, Artificial Sequence
  ENSG00000260983_1 (sequence is synthesized)
ttctccaactctcaggattaacctctaccgtctccaccatctccaccatcatcaggactcaggtcatctgtttacagctctctctgtgtctgataactttgacccatgttagcttggagc

SEQ ID NO: 1015353 - DNA, 120 bp, Artificial Sequence
  ENSG00000260983_2 (sequence is synthesized)
tccaggatcagggatctttctgaggcacaaccatgcaacctttgtgtccagtgacatggccagtgaagatctacagtttgatcttccttgcttttcctgttctgccaagatgactcagga

SEQ ID NO: 1015354 - DNA, 120 bp, Artificial Sequence
  ENSG00000260983_3 (sequence is synthesized)
tacaagattgtggagtttccgtcagactggttatgtgaaccaggactggttatgtgaaccaggaccttcccccaactacttaattgaaacctgcactggacctccagcagcagtgagaaa

SEQ ID NO: 1015355 - DNA, 120 bp, Artificial Sequence
  ENSG00000260983_4 (sequence is synthesized)
taacttaccagctatcaagaaaagttttaatctttgtcatgatattttttccactcagcctccatggggttcaagcactcactcaatagacagcctatactgtaaatataattctgcccc

SEQ ID NO: 1015356 - DNA, 120 bp, Artificial Sequence
  ENSG00000260983_5 (sequence is synthesized)
tatagctcatgcttatttatgtaaattgtttctccttatttggaagaccaggaaaatttatgctcagagcttaaaagtctcccaagtaaaataaaattggtattgaaaatcttgtataaa

SEQ ID NO: 1015357 - DNA, 120 bp, Artificial Sequence
  ENSG00000260981_0 (sequence is synthesized)
gggatgctggctgcacagaaaaagtgttgttcaccaccaggaggaaggagggaaacaagaagacctgaggatcaggtggtacaccacttcagtgttcaggtggcacaaacaaacactaga

SEQ ID NO: 1015358 - DNA, 90 bp, Artificial Sequence
  ENSG00000260981_1 (sequence is synthesized)
tgagaggctgaggtgggaggattcattgaacccaggagattgaggttgcagtgaggtgtgattgcaccactgtgctcgagcctagacaac

SEQ ID NO: 1015359 - DNA, 120 bp, Artificial Sequence
  ENSG00000260981_2 (sequence is synthesized)
gtgaggtgtgattgcaccactgtgctcgagcctagacaacagagtgggacttagagagagagagagagagagagacaaaagaagaaagaaaagaaaaagaaaaggaaagaaagaaagaaa

SEQ ID NO: 1015360 - DNA, 120 bp, Artificial Sequence
  ENSG00000260989_0 (sequence is synthesized)
caggattgtaagtttcctgaggcctccgcagtcatgcttcctgtaaagcctgcagtaatgtggcacagcatgtgcagggctggaaggccgaggaaggctgtgcaaggctgtgtcagcatc

SEQ ID NO: 1015361 - DNA, 120 bp, Artificial Sequence
  ENSG00000260989_1 (sequence is synthesized)
aaggaaggcgtccagcgtctccagagcctctacaagtgcctccatcaaaccagcttttgggaaagaatctgttaagcccattcagctaagcggcacggggtcacagggctttgagtagcc

SEQ ID NO: 1015362 - DNA, 120 bp, Artificial Sequence
  ENSG00000260989_2 (sequence is synthesized)
cggtgacgctgagtagggaactccgggatggggctccacggtggactctcggggacaggcacccggggccaccctacaaagcctcgccctccaggccacagtccagagccttcggcctgc

SEQ ID NO: 1015363 - DNA, 120 bp, Artificial Sequence
  ENSG00000260989_3 (sequence is synthesized)
gcagggtcctcgctgcatccagcggacggtactgagaagccatgcgctggcggtttgatgcaacacgaccctcagggccgacccagcgagtgaccaaacatagcatgtttttgttttgca

SEQ ID NO: 1015364 - DNA, 120 bp, Artificial Sequence
  ENSG00000260988_0 (sequence is synthesized)
tcttaacatatgttcagttatccaggaatgcaaatcaagggaagactaaaatttactttgttcaaaactttaacaagactcgatcaccattttggaggtaacatcggagatggcaacgtg

SEQ ID NO: 1015365 - DNA, 120 bp, Artificial Sequence
  ENSG00000260988_1 (sequence is synthesized)
gatggcaacgtgacttgtgattgagaaagaagaaattaacccagatgcctgtggcaactaagaattttgcttgatgtggcctggtgcagcagctcatgcctgtaatcccaacactttagg

SEQ ID NO: 1015366 - DNA, 120 bp, Artificial Sequence
  ENSG00000260988_2 (sequence is synthesized)
attgcttgagcccaggagttccagactagcctgagcaacatagcaagaccctatctctacaaaaaattaaaaagttagctgggagtggtggctcatgactgcattcccagctacttggga

SEQ ID NO: 1015367 - DNA, 120 bp, Artificial Sequence
  ENSG00000260988_3 (sequence is synthesized)
gggaggctgaagtaggaggattgcttgaccctgtctcaaaaaaaagaaagaaaaagaattttgcttgaccccatacaacacacctgtattcatctgcatttgtgaacgtcaccatcactg

SEQ ID NO: 1015368 - DNA, 120 bp, Artificial Sequence
  ENSG00000260988_4 (sequence is synthesized)
tgattcatggtctattaacatctacttttttagctcttatttttaaatgtcaaagataaaaactgtggcctgaatattatcatacctctctcaaatccaaacttacttgttataagtagg

SEQ ID NO: 1015369 - DNA, 120 bp, Artificial Sequence
  ENSG00000260988_5 (sequence is synthesized)
tgcaagcatgtgactgcttcataatgtcttttagagtttaggcctgagcatttatgtattgaaacccattattttattacagtattccttttatttctctttcatattacagtagcagca

SEQ ID NO: 1015370 - DNA, 120 bp, Artificial Sequence
  ENSG00000260988_6 (sequence is synthesized)
ttatattgattttgttttttcattatgtgtataagtggtttagattatccatgaatttcgtttcagtatggtaaagaggatattcaaaatatttgttataaaaagggagcatctggcagc

SEQ ID NO: 1015371 - DNA, 120 bp, Artificial Sequence
  ENSG00000260988_7 (sequence is synthesized)
attgagaaccactctaaggttcaggaggcagggacttcgcctcccctgggttactccattcttctttgtgcctagcatagggcctggaatatcacagatgcacaaagaatcttttctgaa

SEQ ID NO: 1015372 - DNA, 120 bp, Artificial Sequence
  ENSG00000260988_8 (sequence is synthesized)
ggaattgaggctgatactctggtttggtaaccacctaggtatgtgatgaggccctctgctgagatgggaacacaggagagagggcaggttttggggagagtaatgagttcagttttcatt

SEQ ID NO: 1015373 - DNA, 120 bp, Artificial Sequence
  ENSG00000260988_9 (sequence is synthesized)
gtgaaagtttggagagccctggaatttctaggtggagaggcctgaggcccagggctgtgtgggccttgatttctctcaaggccacagaagagtggaaagtgcaaagtcgtagtaacagtt

SEQ ID NO: 1015374 - DNA, 120 bp, Artificial Sequence
  ENSG00000260988_10 (sequence is synthesized)
catctctttagtcagtaatcattgctgagtctctccatgcaggatgaatagaccagtgagagctgcccatgaggtgtctccctcctcctgtggtgatctgtgtacctgcccaggccctca

SEQ ID NO: 1015375 - DNA, 120 bp, Artificial Sequence
  ENSG00000260988_11 (sequence is synthesized)
gaggctaggagctcctccaaggtaggggatagaaatccttcatctctagcccctctgacttcctgccccatcctgacatagtaggtggctcggcaatgatagctggagggaccacgcagt

SEQ ID NO: 1015376 - DNA, 120 bp, Artificial Sequence
  ENSG00000260988_12 (sequence is synthesized)
aaaacccatctgtggaaacacatgtattcagagcaactttttttggcctgaagtcactgcagtggaacatttgggagcaagtttccccagggcccagctccttcccgctaggctctgcca

SEQ ID NO: 1015377 - DNA, 120 bp, Artificial Sequence
  ENSG00000260988_13 (sequence is synthesized)
tgcctcctgtttattaacagggaggcgtgacaaagggaaaaatctcctgattgaagactcatctcagacatcttttcactcctctagggaagggtgcaattctgggctttaatgacatat

SEQ ID NO: 1015378 - DNA, 120 bp, Artificial Sequence
  ENSG00000260988_14 (sequence is synthesized)
gacggggcaggcagtagaggtgttgcgcattttaggcaatacatgtgctgctagaaagttgaggtatagggactttttaggaacacaatttttattgacaagtaacctttcaagaacaat

SEQ ID NO: 1015379 - DNA, 120 bp, Artificial Sequence
  ENSG00000260988_15 (sequence is synthesized)
aaagaaaatcagaaagaaaacctatgttcatagcagcatcattcataatagcgaaaacaactcaaatggccatcaactgacgaacgtatgaataaaatgtggtctattcatgtgatggaa

SEQ ID NO: 1015380 - DNA, 120 bp, Artificial Sequence
  ENSG00000261636_0 (sequence is synthesized)
agggtccatgagccccaagcggagattccatctaaacccctgctttagatgcgggcactgcagagccactccaagtcatttgttccaagaccatgtgttaaaataagcctatttgttgag

SEQ ID NO: 1015381 - DNA, 120 bp, Artificial Sequence
  ENSG00000261636_1 (sequence is synthesized)
tggcatgaggttaaagttagtgtcttatttatgtttgtgtcactggtacccaactagcacatagcatatggtaggagcacagtgaacatagcagggatatacatgcagtgttcgagatgc

SEQ ID NO: 1015382 - DNA, 120 bp, Artificial Sequence
  ENSG00000261636_2 (sequence is synthesized)
tggcagggtgtgaacagggtaccagaacgtgggctttatgtaggattagagttagaagcattagcagctgaaaaatggcaggaaaatgatgaaatctgcatgatggaaaaagggggtcag

SEQ ID NO: 1015383 - DNA, 120 bp, Artificial Sequence
  ENSG00000261636_3 (sequence is synthesized)
agatctaaagtctagatgaatgcagaaaacagagcactcaggaataagcttctgctcaccactcctggagaagtgtgacatacatgcaaacttctgcacatctgggactgaagaagtaga

SEQ ID NO: 1015384 - DNA, 120 bp, Artificial Sequence
  ENSG00000261636_4 (sequence is synthesized)
tctttcaccttaaaattacccactgatatccactgggagagagaactctctctgatttgatgctcagcaagagtgactctcatctccaggattgctggtgggaggtcaagtcttcctccc

SEQ ID NO: 1015385 - DNA, 120 bp, Artificial Sequence
  ENSG00000261636_5 (sequence is synthesized)
caggatgctgcacttggatggacttgaaagagttctgtttgttccaagttgcgatctcatattcactctgggccagaccaactacacaactccttaattcttcagttggccgggagtgag

SEQ ID NO: 1015386 - DNA, 120 bp, Artificial Sequence
  ENSG00000261636_6 (sequence is synthesized)
cctgggcaatgaagacaacaagttcatcttgaatagatggatctgattcacctgaccttaggaggaatacactgaattatttttcatgctagagcatattcccagggcgctggggcagag

SEQ ID NO: 1015387 - DNA, 120 bp, Artificial Sequence
  ENSG00000261636_7 (sequence is synthesized)
accacgtcctaaacccaactcaaatgtgggctgtgctcttggctgaagaaaagcatggaaagcagttggggacctgcatccccaagactgtcagcccttctccagggctagcaacaagca

SEQ ID NO: 1015388 - DNA, 120 bp, Artificial Sequence
  ENSG00000261636_8 (sequence is synthesized)
gagtgtagcagtgagaagatgctcttggcaggctccagatagctgtgccctcagcccaggaggactcagccaatgaagactcagctaatgaaagctcagcatggaggtggcaaagggctg

SEQ ID NO: 1015389 - DNA, 120 bp, Artificial Sequence
  ENSG00000261636_9 (sequence is synthesized)
cagccccaccaaactctttgcctccaggcgctgtggtggtgaagaactgaaatacacaaaccttggggcttccccttgtccctgaaactgcagaagatgctggctcgggagagcccaggt

SEQ ID NO: 1015390 - DNA, 120 bp, Artificial Sequence
  ENSG00000261636_10 (sequence is synthesized)
gagaaagctgctgcaggagccagaaactttggcaaagactctttctttgcaagtaagaaagctagttgggaaagaggaccaactgttccttctaaattcccagggagtggagggtacgtg

SEQ ID NO: 1015391 - DNA, 120 bp, Artificial Sequence
  ENSG00000261636_11 (sequence is synthesized)
aggccctgtgattcattggccaggagtatctgctccagctgccaggccagagtgatcaatccaaaagtgcttctgaaaatgaggccagacccacattaatgaagcctgattgcctcagaa

SEQ ID NO: 1015392 - DNA, 120 bp, Artificial Sequence
  ENSG00000261637_0 (sequence is synthesized)
ggtgtgtcttatggggaggtgcttctggccctgacctgttttagctagtcttcaattaggtctggtgtccaagccccacctccagagttgagttctgcctcctgccacaataggagagta

SEQ ID NO: 1015393 - DNA, 120 bp, Artificial Sequence
  ENSG00000261637_1 (sequence is synthesized)
aatggagctctcctggaaaggctagatggggacgaccaggagagggtcccgagcagtggagtgagcaaatctaagccctgcagatggctgcggatgctgctgccccaatgcctgcacagg

SEQ ID NO: 1015394 - DNA, 120 bp, Artificial Sequence
  ENSG00000261637_2 (sequence is synthesized)
aaatggtgcattttcctgctgcaccttcccactcacccactttcttctcctcataatcaactgaacctccaaactaaaaaaacacctgcagaatagaccaagaagtccttttcccttctg

SEQ ID NO: 1015395 - DNA, 120 bp, Artificial Sequence
  ENSG00000261637_3 (sequence is synthesized)
atccctgaatggaaaggaatgctatgcacactttttggatacaggaagtgagattcagaggggttaaacagctttcctaaagccacacagcgagagagtcgatctgaactgaagattgtt

SEQ ID NO: 1015396 - DNA, 120 bp, Artificial Sequence
  ENSG00000261637_4 (sequence is synthesized)
tgacatcaaagctcatttctttccctaaatgtcagcattctttcctgacttattaatttgatttctgtcctcccctcatggaagttaattaaaggaatgcgagaaccttttagaaaatct

SEQ ID NO: 1015397 - DNA, 120 bp, Artificial Sequence
  ENSG00000261637_5 (sequence is synthesized)
actcttaaccattctatagaatcagcacccatctttgagtcagagtttgagatgcaaatcctttactgtatagccttgatcaaatgacttcacctcattgaattaatcttcttctgcata

SEQ ID NO: 1015398 - DNA, 120 bp, Artificial Sequence
  ENSG00000261637_6 (sequence is synthesized)
aaatggggtcaccatctgcttatctaaattgttacaaatgggacagtatatgtgccattccagatacctaatcacagctcaatcgatgctggtgtctttttcctttttccttctgcagaa

SEQ ID NO: 1015399 - DNA, 120 bp, Artificial Sequence
  ENSG00000261637_7 (sequence is synthesized)
aacatgctttacataggatctctgaacttaaagaatgggaagaagaaaaatcatgtttccagcttgggctgctgtttcatctgttggacttgcttaaagcgtatgggtttgtttaccctt

SEQ ID NO: 1015400 - DNA, 120 bp, Artificial Sequence
  ENSG00000261637_8 (sequence is synthesized)
ctcaagtaggacatgcagcctgctggggacccgtggctcaaatcctccaactgcaggactgccggccctgggactcatgaataatggaagtgcagtaaccactccttacagcccagacga

SEQ ID NO: 1015401 - DNA, 120 bp, Artificial Sequence
  ENSG00000261637_9 (sequence is synthesized)
aattattggtctcataactttttttgtttttccctttaaagagtcccatatggaaccaatattgtgataggattgtagctgcataaagtcattgggcattttgacccactctctgcttct

SEQ ID NO: 1015402 - DNA, 120 bp, Artificial Sequence
  ENSG00000261637_10 (sequence is synthesized)
tggtagattctaagtacagatctaattattttttccttcaagtattaagcgaatatctctgcaaacaaatccaaatttagaaagctagattgaagaaatggagaagcaaatctagtcaac

SEQ ID NO: 1015403 - DNA, 120 bp, Artificial Sequence
  ENSG00000261637_11 (sequence is synthesized)
tcatagaaatctttcttctcctctcttgctctgtctccaagagaacctctacaccttcttttaaggtgccagccatcttaagctcttgtctgattaagaaattctctggtagaaccagag

SEQ ID NO: 1015404 - DNA, 120 bp, Artificial Sequence
  ENSG00000261637_12 (sequence is synthesized)
ataaaatatgatcacagcctttgcacaagtattttaacaacccaaccttatgataggttatatttcattgacttggaagaaacactgcattatctgggaaaacagcacagatgttgccta

SEQ ID NO: 1015405 - DNA, 120 bp, Artificial Sequence
  ENSG00000261637_13 (sequence is synthesized)
ataaacgttttggtttatgcattgtattaacctcatgaaacatttatgcaaatctcacattaacaaaagaaagcgtatgggtttgtttacccttcctgcaggcatccaacctggcctttt

SEQ ID NO: 1015406 - DNA, 120 bp, Artificial Sequence
  ENSG00000261634_0 (sequence is synthesized)
tcctgatccacagatcctgtattgggaagctattggagagttttgaacagctgatgttattttccaaaacaatgactctgctggctacatggacacaggcttgcagggagggaggcaggg

SEQ ID NO: 1015407 - DNA, 74 bp, Artificial Sequence
  ENSG00000261634_1 (sequence is synthesized)
ctggctacatggacacaggcttgcagggagggaggcaggggcagaaatcccattggcaaacaaagtggcatccg

SEQ ID NO: 1015408 - DNA, 120 bp, Artificial Sequence
  ENSG00000261634_2 (sequence is synthesized)
tgccattggaagaagcactgctctcaggctcaggagaagacccagtctttcaaagactcctttgggaatgtccagacttcccacttcagacagtggcccttctgccatccacagctggac

SEQ ID NO: 1015409 - DNA, 120 bp, Artificial Sequence
  ENSG00000261634_3 (sequence is synthesized)
gctctgccatgtgtcctagtcaacccacctctctccaccccttctcagccctggccccccttccctctcaccacagctccagcatccatctccttaggaggcttcttgcttccactcctg

SEQ ID NO: 1015410 - DNA, 120 bp, Artificial Sequence
  ENSG00000261634_4 (sequence is synthesized)
cccctgcaatcctgtgtccacacagccacggagtcaccaagatgtgaagaggcaaagtcactggctccacacccacagctggccagcagggaacagtcgacccccgacacgaagcggctt

SEQ ID NO: 1015411 - DNA, 120 bp, Artificial Sequence
  ENSG00000261634_5 (sequence is synthesized)
ttctcacagctactcgagcgcgaatcgcagggtggcactcaggggtattccccaggaataaaacataactatcttaaagtttatgaagtaattggcaccttaagatggaatatttttggt

SEQ ID NO: 1015412 - DNA, 120 bp, Artificial Sequence
  ENSG00000261634_6 (sequence is synthesized)
attccacagcctgaggtgccaccaaagccataagcccaggggagtctctcacaccccattctcctagggcccatgtaccccacgcccacctccaccccaggagccgaaggccggcaggga

SEQ ID NO: 1015413 - DNA, 120 bp, Artificial Sequence
  ENSG00000261634_7 (sequence is synthesized)
gcctggagagcctccttgatgggagaactgcggagcttgcccctcggaaaagtgcatggggtggagaacagggaaggagaaaaaaacaacaactgggtactcgcagccccaccgcggtgt

SEQ ID NO: 1015414 - DNA, 120 bp, Artificial Sequence
  ENSG00000261634_8 (sequence is synthesized)
ccgcttcgccggtgggagaggatcctcgccgccctgaatccttgaagtgagttccacccctgtctcttggagtgctcagggtggcgggccctttgccagccctcaccctttccccaggga

SEQ ID NO: 1015415 - DNA, 120 bp, Artificial Sequence
  ENSG00000261634_9 (sequence is synthesized)
tcctgtcccaggtcacaggctcctagactggaaggcgctgggcctggacctctgccactcagtggacacagctataagagatgaagggacacagaggacaaagaagaaacatttggcttc

SEQ ID NO: 1015416 - DNA, 120 bp, Artificial Sequence
  ENSG00000261634_10 (sequence is synthesized)
agggaaccagactctgtgtctcctcccaggtgctgaaggaacaggttgcagctacctggtgcccccaccccgaccctgccagagaaaggttggaacatccacacctgtggaccgaagtcc

SEQ ID NO: 1015417 - DNA, 120 bp, Artificial Sequence
  ENSG00000261634_11 (sequence is synthesized)
cccaccaggctctttcctcccacccttcagccccaggctctctgagctcctgctcctccctgccttgccttgtttgctgagggcacacacagtggagagagcacaggactgggagtccag

SEQ ID NO: 1015418 - DNA, 120 bp, Artificial Sequence
  ENSG00000261634_12 (sequence is synthesized)
agacctgggctctagtctactctgtgactcgggtcaagtctctggccctttgtgggcccaagttgccccatttgcagtgaataggttgcagtcaattatctccggccatttttacggatc

SEQ ID NO: 1015419 - DNA, 120 bp, Artificial Sequence
  ENSG00000261634_13 (sequence is synthesized)
ctgaaccgtggtcttgggcaccttgctttattaggctttttggtggctgtgcatcttgtaagggtgtgtatgcatgtgcgtgtgtgtgtgcgtgcgacatgcgcttgtcctctcagaccc

SEQ ID NO: 1015420 - DNA, 120 bp, Artificial Sequence
  ENSG00000261634_14 (sequence is synthesized)
aagttcttaaagggaaagagactggggcctacacagaggcaggcatgtatattccacagaccagagtttgacaagaatgactggacacaagagtggagcccagtcccagctctatgctga

SEQ ID NO: 1015421 - DNA, 120 bp, Artificial Sequence
  ENSG00000261634_15 (sequence is synthesized)
attcagagtagccttggacaagaccctcaccatctacaaaatggagattaataatccctgctttgcctttccaaggctagtcgggggactcagtgagatattagatatgaagctctttga

SEQ ID NO: 1015422 - DNA, 120 bp, Artificial Sequence
  ENSG00000261634_16 (sequence is synthesized)
gtgtgcttttgatgtctgggccagtgatgggtttgggggaagaatagggtgtgaagcattctctgggaggcaaaggctggcactggactgattggccaccctgccaaagctgcagcatgc

SEQ ID NO: 1015423 - DNA, 120 bp, Artificial Sequence
  ENSG00000261634_17 (sequence is synthesized)
acagcacaggcaggcaccccaccaccagcagccaaggtgagcagagatgcctggtgccccacctggattcctgcctgctgtaggtatctgtgtgtgcaccttgaagaaactaaagaggga

SEQ ID NO: 1015424 - DNA, 120 bp, Artificial Sequence
  ENSG00000261634_18 (sequence is synthesized)
agataaagaggctcccaacctaaatggaggtggtcagtggattactgatgaatcgatctgcatatcttggccaaaatcaccctcctctgctcttagggagtttaaagtctaactgaatga

SEQ ID NO: 1015425 - DNA, 120 bp, Artificial Sequence
  ENSG00000261634_19 (sequence is synthesized)
ttgaacatgaaccctttggagaatgatgtggagccaggagaggggattgtggatggtgagcacacaggatgatcagaggagggggaagggcagggaggggccggggaggggggtacttag

SEQ ID NO: 1015426 - DNA, 120 bp, Artificial Sequence
  ENSG00000261634_20 (sequence is synthesized)
accacatggagatgcatttagagtattgtgttcaacactcctatttcatagtgatgaaatggaggcccagagagggaaagtgacctgcccaaggtcacacagtcacaagaagtcagtagc

SEQ ID NO: 1015427 - DNA, 120 bp, Artificial Sequence
  ENSG00000261634_21 (sequence is synthesized)
agagctagaacttggacccaggacttcaggaatctatgctggatttgagcctcctgtgcagccgagggagacctgaagtgtgggaaggactgggatacgtaccagtgggcaggaagaaag

SEQ ID NO: 1015428 - DNA, 120 bp, Artificial Sequence
  ENSG00000261634_22 (sequence is synthesized)
agtgaggcaaagtgcagaggtgggaactttgtacagcaagggaaaggagctggaatcacaggcaggatctggaaggagggagctgcccagacctggaaagccaggctgagcactgcagac

SEQ ID NO: 1015429 - DNA, 120 bp, Artificial Sequence
  ENSG00000261634_23 (sequence is synthesized)
cacagagggtttcgagctgacaccagttgggaagatacaggcgtgcgaggggcacacgcccaaatgacccagtgagacagcaggtgacatgacagcaaggcagcaaggagacggggaaga

SEQ ID NO: 1015430 - DNA, 120 bp, Artificial Sequence
  ENSG00000261634_24 (sequence is synthesized)
gcagctccaggagtcaggcaacctccaatcaaatggccttgagcaagttgtctctcttctctgaccctcagtttcttttttgtggagtgagagataatcatctttttttcctttcagggt

SEQ ID NO: 1015431 - DNA, 120 bp, Artificial Sequence
  ENSG00000261634_25 (sequence is synthesized)
tattgtagtgaccacagaatgcatttggaagtgctctgtaaactgcagagtgctaagtaaatttaatatttggagttgtgttttattttccaaagggctcagtaaacatttgtggaactg

SEQ ID NO: 1015432 - DNA, 120 bp, Artificial Sequence
  ENSG00000261634_26 (sequence is synthesized)
gctagagagatggtgtggggtagataatggcttccagagatgttcacgtcctgatccacagatcctatatgtgagtggaaaaaagccacaaattgaaaatgttttttatctgctctcaca

SEQ ID NO: 1015433 - DNA, 120 bp, Artificial Sequence
  ENSG00000261634_27 (sequence is synthesized)
tcacaacaatcaacacagaagacttctgtgcccacatatgtgaggatttctctcaccagcaaacaagcaatcagttctgcagtggacaccagctgggtgtcctccgattcagttctgaca

SEQ ID NO: 1015434 - DNA, 120 bp, Artificial Sequence
  ENSG00000261634_28 (sequence is synthesized)
ctctctacctaaagaccgcgtccgatcccagaggttgagggctctgggtgtcctccgattcagttctgacactctctacctaaagaccgcgtcagatcccagaggttgagggctcagtct

SEQ ID NO: 1015435 - DNA, 120 bp, Artificial Sequence
  ENSG00000261634_29 (sequence is synthesized)
cacaagactgccccccgacttccgccgccaaccgcaagcccctggttgttttacctgtgcttctgaccaagcaggacatcatgacctccagtgtgcattcaacctaacagagctgctaaa

SEQ ID NO: 1015436 - DNA, 120 bp, Artificial Sequence
  ENSG00000261634_30 (sequence is synthesized)
ctcattgcctttctgctctgcctctcctctctcctgcaacaccctctctgtctcataaatatagtcacaattttctcatggtttaagccaagaaacagttaaaaactctaaagtctttta

SEQ ID NO: 1015437 - DNA, 120 bp, Artificial Sequence
  ENSG00000261634_31 (sequence is synthesized)
agaactcacgaaagaatcaaatgttctcgacaaaatttagaacaaaatttgaccctggaaaatggaggtgatagaaataaagtccacaaaaggaaacttgccacggcagcagctatcatt

SEQ ID NO: 1015438 - DNA, 120 bp, Artificial Sequence
  ENSG00000261634_32 (sequence is synthesized)
ggtgaaagttgatattgacaaaaatcgatctatgaaccacagttctgatataaaattcaaatgaaaaagaattggtcccaatgaaaataatttcagtccattggaaatgaaaaagtggaa

SEQ ID NO: 1015439 - DNA, 120 bp, Artificial Sequence
  ENSG00000261634_33 (sequence is synthesized)
aaattggaaatagtttaaccgagctttttacagaattgatcaaggaattaaattgacttaatggagtccattctggaaaaccctttcccaagaaaaattcatcagtcagagaacttctga

SEQ ID NO: 1015440 - DNA, 74 bp, Artificial Sequence
  ENSG00000261634_34 (sequence is synthesized)
ccctttcccaagaaaaattcatcagtcagagaacttctgagttacatatttgtattaaaaatatctccataggc

SEQ ID NO: 1015441 - DNA, 64 bp, Artificial Sequence
  ENSG00000261634_35 (sequence is synthesized)
cagacgcctgtaatctcagctatttgcgaagcaggggaatcgcttgaacccagaaggtggaggt

SEQ ID NO: 1015442 - DNA, 120 bp, Artificial Sequence
  ENSG00000261634_36 (sequence is synthesized)
tgaaagagcgagactccgtgtcaacaacaacaaaaacaacaatatctccataggtatttggtagtaaaaatgaaaaaaagagagaaaaatgtctccagtggatcctccatgagattttca

SEQ ID NO: 1015443 - DNA, 120 bp, Artificial Sequence
  ENSG00000261634_37 (sequence is synthesized)
tgaagaacccaggagtgctggtctgtggtgggagcttcacccgggaggagtagagagggctgggagagggtgatgtctggtacctttgggcccctctccataaaaatgtagaaaaaatta

SEQ ID NO: 1015444 - DNA, 120 bp, Artificial Sequence
  ENSG00000261634_38 (sequence is synthesized)
gattatatgactgcatagatatacagatgaatgcaattcaggctggattccttattttagattcattgttattatgttcttttattcttctgattttaaaataaattaaaattaaacatt

SEQ ID NO: 1015445 - DNA, 120 bp, Artificial Sequence
  ENSG00000261632_0 (sequence is synthesized)
agagcttccagatagccgaacatatgggtgctcctggaaggtagagtgcccaggaaggacatggagactctctactccttcccccataccttgccctacacatctcttcattggcacggt

SEQ ID NO: 1015446 - DNA, 76 bp, Artificial Sequence
  ENSG00000261632_1 (sequence is synthesized)
agataaagaagctctcacagtggaagactataatatgacataagaagaaatgtggacttggagatacagaagctcc

SEQ ID NO: 1015447 - DNA, 120 bp, Artificial Sequence
  ENSG00000261632_2 (sequence is synthesized)
gacataagaagaaatgtggacttggagatacagaagctccacactgaagagaaaaaccaacatcctacaatgatggggttttttttaaagacacccaagaagccacctgaagaatcagaa

SEQ ID NO: 1015448 - DNA, 120 bp, Artificial Sequence
  ENSG00000261632_3 (sequence is synthesized)
ggcatttccctggaaaaactcacacaaagggtcctgggagatgcacagctaagaagccaggacatcctggaagctgggaaataaccctgaacctgcagcagcaatctggtctctccatca

SEQ ID NO: 1015449 - DNA, 120 bp, Artificial Sequence
  ENSG00000261632_4 (sequence is synthesized)
ccctaggcttgtggaccacaaatcacaacctcatccactgcatggacacaggaatatgtcagaacatagccctgcctgggccatcaagctccaaatagtcatccaactaggagcctcgga

SEQ ID NO: 1015450 - DNA, 120 bp, Artificial Sequence
  ENSG00000261632_5 (sequence is synthesized)
caacggccacttttgctgggagcccgtagataggcctctaggaagatctgactgctgtttttccaaaacagtgccccgtcagcaggaggcagttaaaattggtcttcatcctcatcctta

SEQ ID NO: 1015451 - DNA, 120 bp, Artificial Sequence
  ENSG00000261633_0 (sequence is synthesized)
gactgctgggtttgctcacatgatgtccccatctgctgaagtgtcacaccaggctgactggcccttgcccagtggcccaggccgggacacagcctgtccgtcacagatcacacctggagc

SEQ ID NO: 1015452 - DNA, 120 bp, Artificial Sequence
  ENSG00000261633_1 (sequence is synthesized)
ggcgttctccatcacccgacactctcggagccaagccccaggcctacgggagccagggcagctgtgatcacccctacacacccatttagcagctgagctcctgaggcgagaggagaggaa

SEQ ID NO: 1015453 - DNA, 120 bp, Artificial Sequence
  ENSG00000261633_2 (sequence is synthesized)
gccacgtggaggaagaatgaatggaacgtctcgggcagcctaggagccagggctgctgcaggtgaactgcactcctcacctacctgcttgaaatcaagctgcagaaaggaagggccacaa

SEQ ID NO: 1015454 - DNA, 80 bp, Artificial Sequence
  ENSG00000261633_3 (sequence is synthesized)
tacctgcttgaaatcaagctgcagaaaggaagggccacaaagccaccccgtggggtgcagggaggccataagagacggga

SEQ ID NO: 1015455 - DNA, 120 bp, Artificial Sequence
  ENSG00000261630_0 (sequence is synthesized)
aggcttcaggttttccttcattgtttactgacattacttagagggtaaatggctttgcttttttgttgcaatgatttggggaacaccagggaatatgggcctttacctttggatgccatt

SEQ ID NO: 1015456 - DNA, 120 bp, Artificial Sequence
  ENSG00000261630_1 (sequence is synthesized)
agaactctactcccatttgttttagagatggggtcttgctctgttgcctaggctggaatgcagtggcacaaccatggcttattgcagcttcaacctcctgggttcacgcgatcctcccgc

SEQ ID NO: 1015457 - DNA, 120 bp, Artificial Sequence
  ENSG00000287817_0 (sequence is synthesized)
agggcagagcggacggcacttgggacccgcgactcgcggcacgccactctcccggaggcggtggctagatggggctgggctggcggctagcacggcctgtggcgcgacgaccgctgtatt

SEQ ID NO: 1015458 - DNA, 120 bp, Artificial Sequence
  ENSG00000287817_1 (sequence is synthesized)
tgcatggttcgcataggcagagaaccgtggggcttcggcagtgggaatttgagataggagattggggtcttccgagccttcccagtgcgggttcgaacctcagctgttttgcgagtggcg

SEQ ID NO: 1015459 - DNA, 120 bp, Artificial Sequence
  ENSG00000287817_2 (sequence is synthesized)
tgatcttaggcaaagctgacttaacctaagtttcggtcgtgtttctaaaatggcctctgtaaatctatgaggcttatgcgcgagtactggttgctgcattaaaagacaaacttgtcacga

SEQ ID NO: 1015460 - DNA, 120 bp, Artificial Sequence
  ENSG00000287817_3 (sequence is synthesized)
ttcattgaaatgttgtttccctccggtaacctgaatctgtccttagcctgcacagaaaggggaagtgcgagtggagttggggaaatgagacggcgaatgtcaagtgcttaccacgtagtg

SEQ ID NO: 1015461 - DNA, 120 bp, Artificial Sequence
  ENSG00000287817_4 (sequence is synthesized)
cagactcaggctgacagggggccacagaaatgcaaatatgtgagcagtgtgggtaactgcatcctggggaggaagtcctatgtgctggaataccacaagcacccatttctgccctgtggt

SEQ ID NO: 1015462 - DNA, 120 bp, Artificial Sequence
  ENSG00000287817_5 (sequence is synthesized)
actgcgcagcgttggtgtgaagcgatacataggcgtgaagtcccgagaacgcaattttcctggttaaaggacagcaacgtctacatttcttccaagaggcctactttgttggaacttcac

SEQ ID NO: 1015463 - DNA, 120 bp, Artificial Sequence
  ENSG00000287817_6 (sequence is synthesized)
ttcacttgtgaaattagggtgttgggcagtgagtgaccactaactcagctcccttcttgtgaatcttggcaacagaaaacttttcgtttgtattactgaataaagtgtgtttcttacaaa

SEQ ID NO: 1015464 - DNA, 120 bp, Artificial Sequence
  ENSG00000261638_0 (sequence is synthesized)
gtacttcatggtggaagtgcagccattttgtaaccgttaagagaaagagctgcctgctagataggagatagtgagatgtaaagaagtttgggttcttgatgactttgtaaagctttccta

SEQ ID NO: 1015465 - DNA, 120 bp, Artificial Sequence
  ENSG00000261638_1 (sequence is synthesized)
acaagcagccctgcctctagacttcataccaaatgagaaaagcagaattcacactttgtttaagccacaaccagattgcaatcaacactgttgcacaatgaacttctctgcacacatcct

SEQ ID NO: 1015466 - DNA, 120 bp, Artificial Sequence
  ENSG00000261638_2 (sequence is synthesized)
ggcagccgaacaacagaacaggaattatgtcagcttttctgcttagcatgagctctgccccagaaccaatgacataaaatacgtatgtttgctttccctgccacaaagttgcgacacatt

SEQ ID NO: 1015467 - DNA, 120 bp, Artificial Sequence
  ENSG00000261638_3 (sequence is synthesized)
atcaaagctttacaaagtcactctatcttaggacacccctagacaacttgtttccatcttacttctgggacaaaaatatttactgtatcctgctttcattgtctttgtgaatattacatt

SEQ ID NO: 1015468 - DNA, 120 bp, Artificial Sequence
  ENSG00000261638_4 (sequence is synthesized)
aaatgttgacatgtgcttggcaattcaaattcattggttaaatgtttttctcctctcaaaattatttttaatataatagtctaataaatatgaatccaagattccttactaaacatgtga

SEQ ID NO: 1015469 - DNA, 120 bp, Artificial Sequence
  ENSG00000261638_5 (sequence is synthesized)
gaggattagagtttcaacatatcaatgctggggttaaacacacattccacccatagcatcctgcatcaagtcctcatctcagtgtcaactttaagtgcctggaagaaccagaatcctagg

SEQ ID NO: 1015470 - DNA, 120 bp, Artificial Sequence
  ENSG00000262580_0 (sequence is synthesized)
gtgaggcagctctcggcccagaagcacgtgctggagcctgtggaggagaggatcctgagggtgggtgaggctgcggcagcccccagccagcctaccctgccccgggagggactgggtctg

SEQ ID NO: 1015471 - DNA, 120 bp, Artificial Sequence
  ENSG00000262580_1 (sequence is synthesized)
ctttgctcactgcagcagccccagcacctagaattccaggggcacaggctcagcggtcacaggactcactcccagttccatagcccctggctgagcggctcctttgcacgggggttacac

SEQ ID NO: 1015472 - DNA, 120 bp, Artificial Sequence
  ENSG00000262580_2 (sequence is synthesized)
agctctgtggctctccagggactgctttgcagcctgcaacttaatcctgtttcctataggcccaagggaggatggcggaagccagggttttcttccttccaaaggatctgggagagtggc

SEQ ID NO: 1015473 - DNA, 120 bp, Artificial Sequence
  ENSG00000262580_3 (sequence is synthesized)
agagtggcacccttctcctcagccatcctccagggcacagggtcctagccctccctctgtcctgtactcctctcctgaaattttttttttttcctgagacagagttttgctcttattgcc

SEQ ID NO: 1015474 - DNA, 120 bp, Artificial Sequence
  ENSG00000262580_4 (sequence is synthesized)
attcttgaagaccagatcctggcctaaatgagtggcatccccctgccccagctgaccaactagcagcagctcccaaagcccctcacccacttggagccagtggcccctgtgccagctcac

SEQ ID NO: 1015475 - DNA, 120 bp, Artificial Sequence
  ENSG00000262580_5 (sequence is synthesized)
caggcctcaccctccatcctgctggggtccaactggcccctgtcaaaggacaaacgcagagggctggccttggctttgtccatactgacgatgcggaccagcttctgtggtcccccagaa

SEQ ID NO: 1015476 - DNA, 120 bp, Artificial Sequence
  ENSG00000262580_6 (sequence is synthesized)
gatggctaaaggagggacagagaaaggatgaggaggagctgttgaagccatcaacaggaatgggaattcaggggagatgattggcactagggcgacctgggagtgatgcagaggcgcaga

SEQ ID NO: 1015477 - DNA, 120 bp, Artificial Sequence
  ENSG00000262580_7 (sequence is synthesized)
tgctctgagaacagcctgaggtgtgtctgcacttgtgcaagagcctgcaggctgggcaggggctgcagaccctgccctggtttgaaggggtgcagaggagagacaggtggggttaccctc

SEQ ID NO: 1015478 - DNA, 120 bp, Artificial Sequence
  ENSG00000262580_8 (sequence is synthesized)
caatcagcagcccactctccacacagtgcctcctgccaccctgccagcaccgagcccctcttccagcccaccccagtggggtccaggcccctccctggagcctcaccttgcgggtcacgg

SEQ ID NO: 1015479 - DNA, 120 bp, Artificial Sequence
  ENSG00000262580_9 (sequence is synthesized)
tgcactgctgagtcatgtcctggatgagggctatgagctgctgctgagccctgcagagaccagcagaggccctgacccagctgcctcctgccaggtgagcagggcaggggagagccgagc

SEQ ID NO: 1015480 - DNA, 120 bp, Artificial Sequence
  ENSG00000262580_10 (sequence is synthesized)
aggggagagtgggggagatggccgggtgggagagaagggcctccacctagagctccacacatccctttgctgcaggctggagcgctccatcctggcggccatgccagtctccagagcttt

SEQ ID NO: 1015481 - DNA, 120 bp, Artificial Sequence
  ENSG00000262580_11 (sequence is synthesized)
caaaagactccagggcctcggcccacccctggagatgctgatttacttgtcctggggcgggacccagggggtgctgttgagcagccagcgtacagggccccactccaggacctcaatatt

SEQ ID NO: 1015482 - DNA, 120 bp, Artificial Sequence
  ENSG00000262580_12 (sequence is synthesized)
catggtgggtccctggcctgcagcctggagtcaccgagagagctgttagaaatgcagagtgccaggcctctccctggacctgctggctccgatccccaggggacttgagtttgcaatgag

SEQ ID NO: 1015483 - DNA, 120 bp, Artificial Sequence
  ENSG00000262580_13 (sequence is synthesized)
tgatgggggtgctgagctcaacactcctgctttctagcactgtgcgttccgtgcacttgaaacttggagcctcccataggctgatctagaacaatggtttccttttcttttttttttttt

SEQ ID NO: 1015484 - DNA, 120 bp, Artificial Sequence
  ENSG00000262580_14 (sequence is synthesized)
acaggtgtgagccaccatgctcggcctagagcagtggttttcaatggagcaaggcagggggcaatgtcactccccagggagggtgaccagctgtccctgcttgcccaggaccgaggggct

SEQ ID NO: 1015485 - DNA, 120 bp, Artificial Sequence
  ENSG00000262580_15 (sequence is synthesized)
ccttggcaacctatagagacatttctggttgtcacagctggggcatgggagtagtcccggcatcctgggtagggcggccagggatgctgctctatatcctgcagtgcccaggacggcccc

SEQ ID NO: 1015486 - DNA, 120 bp, Artificial Sequence
  ENSG00000262580_16 (sequence is synthesized)
accacagacggggatccagccccaaacgtccatggtaccaaagctaagaaacccagagctaagaaacccagatctagaatgttctagaatgaacatttcatttgcaatatataaagcatc

SEQ ID NO: 1015487 - DNA, 120 bp, Artificial Sequence
  ENSG00000262580_17 (sequence is synthesized)
catcacaaagaaacaacatcttcagcagtgatcttggcaggcttccctccttaggggggtctcaccacgcccaccctctattgctgggcaggaggaggaagccgaggcaggctgggtgcc

SEQ ID NO: 1015488 - DNA, 120 bp, Artificial Sequence
  ENSG00000262580_18 (sequence is synthesized)
atttccctgtgggcctctctggggacgcaccgagctcgaggcagctgctcacctggagtagttggggatggtgccgtgcgcggcagtatccttcatggtgtaagagttcacgcggtgggc

SEQ ID NO: 1015489 - DNA, 120 bp, Artificial Sequence
  ENSG00000262580_19 (sequence is synthesized)
atgccagcagccgcagccctggaacatggtgtcggtgacgtgcaggacctcgttgcaatgcacctgcagctcccctttggccctgccctccatggccaggttgacccggatgtagaatga

SEQ ID NO: 1015490 - DNA, 120 bp, Artificial Sequence
  ENSG00000262580_20 (sequence is synthesized)
gtcccccgaggtcgccactttggcctccaggtcctggagtagcctcttataacctgataaaaggggacatgagccacagatgagccacagatacgagcctctgcgaggaaggttgcagaa

SEQ ID NO: 1015491 - DNA, 120 bp, Artificial Sequence
  ENSG00000262580_21 (sequence is synthesized)
aattaaagtaggagagaaggaaggaccctcccagtctcagaagctgctctggcactggagtcagtgggtgggaggtttccagctggcttgggggcctcctggggacctggggcacagcct

SEQ ID NO: 1015492 - DNA, 120 bp, Artificial Sequence
  ENSG00000262580_22 (sequence is synthesized)
ggctgatcctctcttggctctgggggtccctggctgctgggcgtgcagaagaaccaccagggacttaagggtcatggagtctggccaggcagctgtgcacacgagaggagtggtatgtgt

SEQ ID NO: 1015493 - DNA, 120 bp, Artificial Sequence
  ENSG00000262580_23 (sequence is synthesized)
accgtccgtgttgaccttcacagacaggcagcagaagccgtccaccctcctgagaagccccacggcctcctccagggtcgtgtcctccaggactgccttgaacaagggctctgaggcttc

SEQ ID NO: 1015494 - DNA, 120 bp, Artificial Sequence
  ENSG00000262580_24 (sequence is synthesized)
gtaatcaacctgagggcaagtcgagaaggtcagtctctttcccccgggactctgaatccagccagaagacagaaggcgctgagggcactgaggcgaggcgcgggccagccctgccgtagg

SEQ ID NO: 1015495 - DNA, 120 bp, Artificial Sequence
  ENSG00000262580_25 (sequence is synthesized)
accactgcctgcacgccttggtcaaaacaaagccacacaccagagcctctgtggggccttcacacctctagtgatgcgtgctacacatagtgctggccagagagtcaactgccaaccctt

SEQ ID NO: 1015496 - DNA, 120 bp, Artificial Sequence
  ENSG00000262580_26 (sequence is synthesized)
ccccagtcgagatcgggggttctttgtgataagcactttcctgtcttgaaaaagaaaagaaaagaaaagaaagaacctcggttctagaacattcaagagcattctagatagaggtttctt

SEQ ID NO: 1015497 - DNA, 120 bp, Artificial Sequence
  ENSG00000262580_27 (sequence is synthesized)
agccttgggatcattctgtgctgctgcgggctataccgggccctacaggatgctgagtggcatccctggccttcacctacccgatgccctggctctccacccacagccttccccactgtg

SEQ ID NO: 1015498 - DNA, 120 bp, Artificial Sequence
  ENSG00000262580_28 (sequence is synthesized)
aaggcccaccccccagggcttccaccatccacttcatttcttctcaatattgttctaagcttaggagagtagatatttttacaataaaaattaagatgtgttttaacaccattagaatct

SEQ ID NO: 1015499 - DNA, 120 bp, Artificial Sequence
  ENSG00000262580_29 (sequence is synthesized)
aattggcccccttaggatatcgggactatctccctgaacatcgtcaaggggctctgttgcttgaactacctcagagctgataattgggaaccttaagagcagggttccccaacccctggg

SEQ ID NO: 1015500 - DNA, 120 bp, Artificial Sequence
  ENSG00000262580_30 (sequence is synthesized)
ccacatactggtactggtccatggtccatcaggacccgggtcacacagcaggaggggcgtggtgggcaagtgagcattacggcctcagctccacctcctgtcagctcagcacagcagtag

SEQ ID NO: 1015501 - DNA, 120 bp, Artificial Sequence
  ENSG00000262580_31 (sequence is synthesized)
attctcagaggagcatgagccctatcgtgaactgtgcaagtgagggatctaggtttcacgctccttatgagaatctaattcctgatgatctgttaccgtctcccatcacccccagatggg

SEQ ID NO: 1015502 - DNA, 120 bp, Artificial Sequence
  ENSG00000262580_32 (sequence is synthesized)
tggcgggtcacccagcagcggcccccggacacctctccctcctggatgatgtcccctctctggctccaggcctcatactcctcctggctcaagtactctacagcactgggagaagctctt

SEQ ID NO: 1015503 - DNA, 120 bp, Artificial Sequence
  ENSG00000262580_33 (sequence is synthesized)
cttaggatgtccactttacaaacctgaccctgcacaccccgctctgtgccctgcacctccatcctgaactatctggacacagcaggaggcacagtttctcgctcaggatcttcccaaccg

SEQ ID NO: 1015504 - DNA, 120 bp, Artificial Sequence
  ENSG00000262580_34 (sequence is synthesized)
ccctgggcacgaggagcacaggccggggccgggcgggtcgatggggccgcaccagggtatagggcaccagggtgaggcagctctcggcccagaagcacgtgctggagcctgtggaggaga

SEQ ID NO: 1015505 - DNA, 120 bp, Artificial Sequence
  ENSG00000262580_35 (sequence is synthesized)
gagtcccatggtaaacacccctgtccccgtgaaccctgccagcactgggagaagctcttcttaggatgtccactttacaaacctgaccctgcacaccccgctctgtgccctgcacctcca

SEQ ID NO: 1015506 - DNA, 69 bp, Artificial Sequence
  ENSG00000262580_36 (sequence is synthesized)
acctgaccctgcacaccccgctctgtgccctgcacctccatcctgaactatctggacacaggggttcag

SEQ ID NO: 1015507 - DNA, 120 bp, Artificial Sequence
  ENSG00000262580_37 (sequence is synthesized)
cgaggcaggctgggtgccatttccctgtgggcctctctggggacgcaccgagctcgaggcagctgctcacctggagtagttggggatggtgccgtgcgcggcagcagcagaagccgtcca

SEQ ID NO: 1015508 - DNA, 120 bp, Artificial Sequence
  ENSG00000262580_38 (sequence is synthesized)
aaacgtggagagtgttgttagctcggatttattcattctcgaacaaatatctattaaacatcccccaagctgaggaaactgagattcaaggagttgggagacctcacccacagtcacgtg

SEQ ID NO: 1015509 - DNA, 120 bp, Artificial Sequence
  ENSG00000262580_39 (sequence is synthesized)
gatcctaactggctgagatgagttttgggctcctgctgggctgttgggacccagaggtcggcgacaaggtcacccaggtctcaggtcggtccctgtacctttatctcatccccctcctct

SEQ ID NO: 1015510 - DNA, 120 bp, Artificial Sequence
  ENSG00000262580_40 (sequence is synthesized)
gcattcctgaaacccttcccaggacagctcccctgcccaccccgcccttgacctcaccttttccatgagggactccacagcatggcgggtcacccagcagcggcccccggacacctctcc

SEQ ID NO: 1015511 - DNA, 120 bp, Artificial Sequence
  ENSG00000228156_0 (sequence is synthesized)
gaagaggccaatggctgccccagaattcccagcaggatttgttcctcttggatcagtgaaaaggaaaatggaaatataaaaataataactgggccccaggaaagaacttggagatggggg

SEQ ID NO: 1015512 - DNA, 120 bp, Artificial Sequence
  ENSG00000228156_1 (sequence is synthesized)
tgcctggctccggctggctgggcgagtggcaggccatttcctccatgaagcctgccctgaccacaccagccctgagttacatgcctcagcctcagaaccgccgggggcctgggctgggaa

SEQ ID NO: 1015513 - DNA, 120 bp, Artificial Sequence
  ENSG00000228156_2 (sequence is synthesized)
agtgcccatcctcctctcaagtccgcggcactcgccatccaccaagatgggctgctgcttttacctgcatagcaactttcttctcctggtaacagcatcttgaaatccctttgagaaacc

SEQ ID NO: 1015514 - DNA, 120 bp, Artificial Sequence
  ENSG00000228157_0 (sequence is synthesized)
atgctgtgtccctgcatacaggagtcgacctttgagacctgcttgttcatggctgtttcacagatgtcgaagtggaggctcagcagggttggaggttcccggagtctcccagctgaaatg

SEQ ID NO: 1015515 - DNA, 120 bp, Artificial Sequence
  ENSG00000228157_1 (sequence is synthesized)
gaagtgcttggtgaggtttggtgtgtccgagccgaagagcagccaatgacaggcctggggatcgtctggcacagcccacttcttgacaaggccttggaaacttggtctctgcagcagcaa

SEQ ID NO: 1015516 - DNA, 120 bp, Artificial Sequence; identical to SEQ ID NO: 888844
  ENSG00000228157_2 (sequence is synthesized)

SEQ ID NO: 1015517 - DNA, 120 bp, Artificial Sequence; identical to SEQ ID NO: 888845
  ENSG00000228157_3 (sequence is synthesized)

SEQ ID NO: 1015518 - DNA, 120 bp, Artificial Sequence; identical to SEQ ID NO: 888835
  ENSG00000228157_4 (sequence is synthesized)

SEQ ID NO: 1015519 - DNA, 120 bp, Artificial Sequence
  ENSG00000228157_5 (sequence is synthesized)
ggctctaccccaatctgctgtgtgattttgggcccaggcagggacccctctgggctctgttactggagaaaaggcaaatggctgggacgggtgggtccccagccctccttgcctggaggt

SEQ ID NO: 1015520 - DNA, 120 bp, Artificial Sequence
  ENSG00000228157_6 (sequence is synthesized)
ctgcgagttggagggctctggggtaaagccagagccgggcccggggagagcctaggctcatctctggtgaacagggtaccctctagccaaagcaggggcaaggcgaggcacatgcccctc

SEQ ID NO: 1015521 - DNA, 120 bp, Artificial Sequence
  ENSG00000228157_7 (sequence is synthesized)
atatgggagctggggctgaccccctctcctagccctgcacaccttgagcacatggccttggcccatctgccctgtgggtggacactttccagccctgggtcctgaactctaccaatcagc

SEQ ID NO: 1015522 - DNA, 120 bp, Artificial Sequence; identical to SEQ ID NO: 888842
  ENSG00000228157_8 (sequence is synthesized)

SEQ ID NO: 1015523 - DNA, 120 bp, Artificial Sequence; identical to SEQ ID NO: 888843
  ENSG00000228157_9 (sequence is synthesized)

SEQ ID NO: 1015524 - DNA, 120 bp, Artificial Sequence
  ENSG00000228157_10 (sequence is synthesized)
ttttttttttttttttgagacagggtgttgctccattgcccaggctgaagtgcagtggtgggatgataactcactgcagcctcaacttcctgggcttaacagatcctcccacctcagcct

SEQ ID NO: 1015525 - DNA, 120 bp, Artificial Sequence
  ENSG00000228157_11 (sequence is synthesized)
gcctctcaagtagctgagattacaggtgcacaccaatacgcctggctaattaaaaaacaacaaacaaacaaacaaacaaacaaaaatatgttttttttgtagagatggggtctcactggg

SEQ ID NO: 1015526 - DNA, 120 bp, Artificial Sequence
  ENSG00000228157_12 (sequence is synthesized)
ttgcccaggctggtctgaaactcttgccctcaagtgatcctcccgtctcagactctccaagtgctaggattgagccaccacgcccatctgggatgccttgtcttttatacctttactcca

SEQ ID NO: 1015527 - DNA, 120 bp, Artificial Sequence
  ENSG00000228157_13 (sequence is synthesized)
caaatatgtgcttaggcattgcttgctgtggccagaaccttgcaggggtgagagacacaggtaaatgagagctggtcccagccctccctcagaaagctgctggaccacagggtgacaaaa

SEQ ID NO: 1015528 - DNA, 120 bp, Artificial Sequence
  ENSG00000228157_14 (sequence is synthesized)
ctgaagctgtctgtcacatccgggagcaggtgctatgaggataagcagccagagaagacccctaacttgatctgtggccatcaaagaaggcacccaaggcaggatgcctccctgaatcct

SEQ ID NO: 1015529 - DNA, 120 bp, Artificial Sequence
  ENSG00000228157_15 (sequence is synthesized)
aaagccaattagcagtcagccaggacagctgctagagggggtctaagggggagtggagaggatgttccaggcagagggaacagcagacaggaaggctcagaggtgagtgtgagcaggcag

SEQ ID NO: 1015530 - DNA, 120 bp, Artificial Sequence
  ENSG00000228157_16 (sequence is synthesized)
tctcagggaccccagacagttggtgaggctgcagtgctcaggggaggtgtgccaacaggtaagctggcagggccgggtccctgggggctggcttgtcctttctgccattgtctgagagag

SEQ ID NO: 1015531 - DNA, 120 bp, Artificial Sequence
  ENSG00000228157_17 (sequence is synthesized)
tgggtggctggtatctggtggcccagatgaagataatggagatgcaattgtgttcttctttctgctcagtgcctctcagttaaggacatttgcaaaaattaataacagcatatgctttta

SEQ ID NO: 1015532 - DNA, 120 bp, Artificial Sequence
  ENSG00000228157_18 (sequence is synthesized)
gtcctccacttaaatttcctttggattaaagaaagtaacggagggaaaggaagaaaagcaggaaggagcgagagagggaggggagaaagagacaaaagaaggaaaataatttggggaaaa

SEQ ID NO: 1015533 - DNA, 120 bp, Artificial Sequence
  ENSG00000228157_19 (sequence is synthesized)
aaaatttgtccttttctgggctaagatagccccagcctttgcattttctcacccactgagtcaccagcctcctgccctctttcaggactgtacatcttggcctcttacctactgtgtccg

SEQ ID NO: 1015534 - DNA, 120 bp, Artificial Sequence
  ENSG00000228157_20 (sequence is synthesized)
gctggaaagtggctgagtctggattcaaacccagacttccttgttgctaggacctgtattttcaaccactgcctatgcctctataacgagccagcttatggctgtgttcacgcaaagaga

SEQ ID NO: 1015535 - DNA, 120 bp, Artificial Sequence
  ENSG00000228157_21 (sequence is synthesized)
aaagcatccaaatgggaaggctggagaattcaagcaattttcccgcgtgtcagacagtcctgtttccctctcccttcaaaaaaagtcctggattatctctctctctctctctctctttct

SEQ ID NO: 1015536 - DNA, 85 bp, Artificial Sequence
  ENSG00000228157_22 (sequence is synthesized)
aaaagtcctggattatctctctctctctctctctctttctttttccttttcctttttgttttttttctttgaacagggtattact

SEQ ID NO: 1015537 - DNA, 120 bp, Artificial Sequence
  ENSG00000262585_0 (sequence is synthesized)
ggggtggacaggcagcgtctgtgggagaaccagcatcactaaagcagacaatgtgggaggccctcacccgggagtccctcggggaagggcagctgcttcaggaaggaggccggagggtcc

SEQ ID NO: 1015538 - DNA, 120 bp, Artificial Sequence
  ENSG00000262585_1 (sequence is synthesized)
cctcagtgcaggaagccagctcagccgccccaggcccagatggggagggggcgaggtgggggatatggagccgggcccccttgcaaggagccctgtgcagatgcatgcaaggacaggggc

SEQ ID NO: 1015539 - DNA, 120 bp, Artificial Sequence
  ENSG00000262585_2 (sequence is synthesized)
tggccagccccaaagcccagctgtgtggcctggggctgctctggaggggctgctagcttagctatctcggggccttgaactttctattctgttttgcaatcagttcagaaggcggcattg

SEQ ID NO: 1015540 - DNA, 120 bp, Artificial Sequence
  ENSG00000262585_3 (sequence is synthesized)
ctagattcccttcttatcacagagaaacttctagcacaacaatagctgattgtactgctctctggggtgcggctgcattcctggacaccccccacgtttttttttttttttcgtggtatc

SEQ ID NO: 1015541 - DNA, 120 bp, Artificial Sequence
  ENSG00000262585_4 (sequence is synthesized)
tttggaactataatggatctcattgtgattggtctgttcaggggacagtgtggcccttgaatttagaagcgtgaaagggtagtgggggctggggagagggtggcaaaggagagtgggggt

SEQ ID NO: 1015542 - DNA, 120 bp, Artificial Sequence
  ENSG00000262585_5 (sequence is synthesized)
gggagggaacccagagacaacccgtgagacagccaagggacatctcagagcatctcggcggcgtcctgttgcataacgcacctggaaactgcatcccctggactggctgggtttgaaaat

SEQ ID NO: 1015543 - DNA, 120 bp, Artificial Sequence
  ENSG00000262585_6 (sequence is synthesized)
atgtagttatttgtcaaaccaccaatgtttattttcattcagttattaagaaataaaaaggggtagataattttcactccctgcctgtgcctgtccggcaggactcggcagcaggtcgat

SEQ ID NO: 1015544 - DNA, 120 bp, Artificial Sequence
  ENSG00000262585_7 (sequence is synthesized)
ccggcgcagactcatctgagtgcgacgtagcggcagccagtcacatcgtgtcctccggaggccgcctgctgctgcgcggagccagcgtccaggacctggggccgggggaccagagctggg

SEQ ID NO: 1015545 - DNA, 120 bp, Artificial Sequence
  ENSG00000262585_8 (sequence is synthesized)
acaggcccagcccctgggcggcatagctatgtggccccgggaacactggctctccaaggcacaaggcgttttcaccggctgcgtcccattcagtcttcccagcatgatcccagctcggag

SEQ ID NO: 1015546 - DNA, 120 bp, Artificial Sequence
  ENSG00000262585_9 (sequence is synthesized)
aagctgaggcaataaaagtgaattgattcagagagaacgaggatgagatttgcgttgggcaaggagcagtgcataaacgccagtgatgtcagcacagccgcccccagccccaactcctgg

SEQ ID NO: 1015547 - DNA, 120 bp, Artificial Sequence
  ENSG00000262585_10 (sequence is synthesized)
gctacaggagggcaagccccggagaagccgggcaggagtgagaaagccgaggcccagagaggtcaaggaacctgctcaaggtcacgcagctgggacgtggtcaagccccactgagtccct

SEQ ID NO: 1015548 - DNA, 120 bp, Artificial Sequence
  ENSG00000262585_11 (sequence is synthesized)
ctgaagccaggctggggcctccagtgagtggggaaagcctagagggggtgccgcagagcacgcacaggatccaccagacgccctcggaggccctgcggaaaggccaagggttctgagagc

SEQ ID NO: 1015549 - DNA, 120 bp, Artificial Sequence
  ENSG00000262585_12 (sequence is synthesized)
tcaactcggaccttggcaggggcccaggaggacgacaggacaacccccaggctcctccctgcctcggtgaccctccccaccccaccccaccaacgtctgagcaagacttgctggagccaa

SEQ ID NO: 1015550 - DNA, 120 bp, Artificial Sequence
  ENSG00000262585_13 (sequence is synthesized)
tgcaggagagaaagctgctgttgctaccgccagcccagctcagctccaaccttcctggctgttggcctgcgagggccccgggaggatagaaagggacatatttcaagggagaagggacgt

SEQ ID NO: 1015551 - DNA, 120 bp, Artificial Sequence
  ENSG00000262585_14 (sequence is synthesized)
ttccttacagggaaacaagctgagtggtccgtaacatacctgaggcgttattgcgagggacaggcagagctggactggggacccaggctgcttgacatccggtgagggccgctcctccct

SEQ ID NO: 1015552 - DNA, 120 bp, Artificial Sequence
  ENSG00000262585_15 (sequence is synthesized)
ctgcccactcggtgactagcttgctgggtagcaccgggcaaggctgtctccctctctgactgctcactcccagctgtagagagaggtggttcctggatcacggagcagtgcctgcctagg

SEQ ID NO: 1015553 - DNA, 120 bp, Artificial Sequence
  ENSG00000262585_16 (sequence is synthesized)
gtgcaggcctgggctcggcacagggccgagaagctgctgctctgccccgcctccgggagaggtcctggcactgccagcccatgaataaggcctggcagggcgccgggcgagggtgtgcag

SEQ ID NO: 1015554 - DNA, 120 bp, Artificial Sequence
  ENSG00000262585_17 (sequence is synthesized)
aggtcagcggggagggccgagtggcagcgttcttgggactggctgccagctgcagctggacctgtttgcctgggctgggctgtctcacttcccctggagcggagagaacactggggagga

SEQ ID NO: 1015555 - DNA, 120 bp, Artificial Sequence
  ENSG00000262585_18 (sequence is synthesized)
agatcaggcgtgggcagtgcttcaggggcccttgaactccaggatggccagctcctgccacaggggacccagccagccgtggccagaagccagggagccacatgctggagccgaggacag

SEQ ID NO: 1015556 - DNA, 120 bp, Artificial Sequence
  ENSG00000262585_19 (sequence is synthesized)
gctgtcgtgagatcagttccagcccctagccccctttccctgcaggcctggcctggggggctagcacaggctgccaggggaggtctcttgccctgtgtgacagggggtcccagcctgtgg

SEQ ID NO: 1015557 - DNA, 120 bp, Artificial Sequence
  ENSG00000262585_20 (sequence is synthesized)
cctgcagccatcgacaccacaacaagatccttgctggggtgttctgcaaaacctcaggaaccctgtgcccacaaacactgcgtgaaagtcaccaagtaacccttctgtgattattcattc

SEQ ID NO: 1015558 - DNA, 120 bp, Artificial Sequence
  ENSG00000262585_21 (sequence is synthesized)
aaaagtgctactgttatctcaagcaggtgtgtgactttctatgactttaaaagggaccctcccaacttctgggaagccagccccctctgatctagccaatgtacccaccactacccatat

SEQ ID NO: 1015559 - DNA, 120 bp, Artificial Sequence
  ENSG00000262585_22 (sequence is synthesized)
ttgcctctctccctggcacccaagactggtggaagaggaaagccctcttgtagagacagccccacttgtcctgatggaggccatggctcatcccctcaccacatggcctcactgggctgg

SEQ ID NO: 1015560 - DNA, 120 bp, Artificial Sequence
  ENSG00000262585_23 (sequence is synthesized)
accctggtgcatggcttgggaagggaggggcagctcaggacctgagacagcacaggccgaccaccccgtaaggatgggaaggaagtcaggagtccatgcagtggcacaggccagggaggg

SEQ ID NO: 1015561 - DNA, 120 bp, Artificial Sequence
  ENSG00000262585_24 (sequence is synthesized)
tggacgttgggagggggaatggaggcttggcctgtgctgaaggagaggggtggaggcgggcattggggtggaccatgctctagtggggaggtctggccagagcaagcaggtagatgcagt

SEQ ID NO: 1015562 - DNA, 120 bp, Artificial Sequence
  ENSG00000262585_25 (sequence is synthesized)
cacggggagtccagtgaggcggacagcccttcgccctcatccggtgctcagtggtggggtgcagtgcgagcttccaccttcatctgtcccccacacaccaccacagccacagaccacatt

SEQ ID NO: 1015563 - DNA, 120 bp, Artificial Sequence
  ENSG00000262585_26 (sequence is synthesized)
gccctgccctggatgcaggaggacacctgcacctcacaagccagcttggacaaaaccaaactagaaaaacgaaatgccagggtcactactgtgccttccaccgaggaggtgacgcgatgt

SEQ ID NO: 1015564 - DNA, 120 bp, Artificial Sequence
  ENSG00000262585_27 (sequence is synthesized)
gtggatggcggcttgcctctgtgtctgtgcagggtgggtgtgtttgtgtgtacaccatccacaggcaggtgctcggtgtgcagtacatgcacacacacacacatgcacacacgcacacac

SEQ ID NO: 1015565 - DNA, 120 bp, Artificial Sequence
  ENSG00000262585_28 (sequence is synthesized)
atgcacacacacgcacacacagacatgtacacacacatgcacacacatatgcgcacacacacacgtacacacacagaggacaacatttgggtcaatgtcttgctggggtctattggtaac

SEQ ID NO: 1015566 - DNA, 120 bp, Artificial Sequence
  ENSG00000262585_29 (sequence is synthesized)
acactaagcactttgcaagggaaggaactttccagggaccctgagcagtgtccagtggagaggctgtcatctctgccccacagccggaagtggcacctccccacccttgtgcacaagagg

SEQ ID NO: 1015567 - DNA, 120 bp, Artificial Sequence
  ENSG00000262585_30 (sequence is synthesized)
caaatggacacaggctccctgaggccccacacttcccacagacaccccccttccctcacagtcctgggtagctggcattttgggccaatccacagtggctttagtggttgaccatggctg

SEQ ID NO: 1015568 - DNA, 120 bp, Artificial Sequence
  ENSG00000262585_31 (sequence is synthesized)
agaatattttgggaactgccttttagaatccgttgacaagacacacagacgctgctgtcccggtactttgcagccttatccaggttcacgttggttttctctggattgggcagtaactcc

SEQ ID NO: 1015569 - DNA, 120 bp, Artificial Sequence
  ENSG00000262585_32 (sequence is synthesized)
tccttcccaggggatggtcatctttgtgaccccacccgggtggctctttccgaccatcctctccatcatgggagaatcatggtttcccaccagaaaggccaccctggtcacatgtgctgg

SEQ ID NO: 1015570 - DNA, 120 bp, Artificial Sequence
  ENSG00000262585_33 (sequence is synthesized)
gatctgggagaggagttcctgatgcaaccctggtgtcggcggggccacggcaccacacaggaaggccaagccagctggagaggccacagtcctgaggtgtgtgtcaccccgatgtttgtg

SEQ ID NO: 1015571 - DNA, 120 bp, Artificial Sequence
  ENSG00000262585_34 (sequence is synthesized)
gagccccttacagccaatgctggcagtgctgggaacgcccatgtggaaaaaggagatgagttcctgtccttggggaagagctcatggctgtgttcttcttggggagcaccgtggccgggg

SEQ ID NO: 1015572 - DNA, 120 bp, Artificial Sequence
  ENSG00000262585_35 (sequence is synthesized)
agaggaatacaaattctctctcaccttttataacccctccttcaggccttacggtgaggacccatccaaagcagaaccatgcccaaaacaagataccaacaaggaagcatggtgtaagca

SEQ ID NO: 1015573 - DNA, 120 bp, Artificial Sequence
  ENSG00000262585_36 (sequence is synthesized)
cagctcaccgacagccgtttcatatggggcttcagaacacccaagagagctttgtgtgactccattgacttgaggtgtccagaatgggccaatccatagagataggaagccgatttgtgg

SEQ ID NO: 1015574 - DNA, 120 bp, Artificial Sequence
  ENSG00000262585_37 (sequence is synthesized)
tttgcccaggggcggcggcaggaggggaatgggaggcaatgtctcatgggtgcaggctttctttgagggtagatgaaagtgctccagaattagattatagtgatgcttgcacaactagaa

SEQ ID NO: 1015575 - DNA, 120 bp, Artificial Sequence
  ENSG00000262585_38 (sequence is synthesized)
atttactaaaaactatttaactgtatactttcaatgggagaatttatggtatgttaattatatgtcaatagagctgttaaatatttgaagtatcatggggaaatggcgctgaaggtattc

SEQ ID NO: 1015576 - DNA, 120 bp, Artificial Sequence
  ENSG00000262585_39 (sequence is synthesized)
atcggtatgtactttctgatttcattgtttaaaaaaatatgtgctcatatatagtagaaagactagaaggaaacacatcgaacgttaacggtggctttgtctgagtaaaggaacaagaga

SEQ ID NO: 1015577 - DNA, 120 bp, Artificial Sequence
  ENSG00000262585_40 (sequence is synthesized)
atgttttattctgcacgtgcaaacagccagggggcaggatccgtctaaagttggggtgatgctgccatcctacagcccagcctctggaccagcccctccctgcccaaggtgacctgtgac

SEQ ID NO: 1015578 - DNA, 120 bp, Artificial Sequence
  ENSG00000262585_41 (sequence is synthesized)
tcagctgcagcggcatccagcggccaggggtcagcccctccctgggaagggaatgctgtgggcctgcagggcgggcagctctgctctgtccactgtgttttgccacctggtcgttttgct

SEQ ID NO: 1015579 - DNA, 120 bp, Artificial Sequence
  ENSG00000262585_42 (sequence is synthesized)
ggctgcccagctctgctgttaggacagaagcgcacgagacagggagtcctacctacctgttcccagttgtgacccggagctttgcaaaggagctggctcaataaacgtatggtggatgaa

SEQ ID NO: 1015580 - DNA, 120 bp, Artificial Sequence
  ENSG00000228151_0 (sequence is synthesized)
acagacaaataagacattacagccttacaggctggcttttgaggggtgggagaggaagaaaacaaaatactcttgctggataaaaacgtaaaccataggagacacctggacttgaagcag

SEQ ID NO: 1015581 - DNA, 120 bp, Artificial Sequence
  ENSG00000228151_1 (sequence is synthesized)
gaacctcttggcgtgtaggcagaggctcttccaccaagctataccctctacagtggcaggctcctctcattagcgcctttcaaggctgcagtcccacgcctcttctgatctctggctgtt

SEQ ID NO: 1015582 - DNA, 120 bp, Artificial Sequence
  ENSG00000228151_2 (sequence is synthesized)
cccgggctctcactttcggggaactggtgctggcgccccaccgccacgactcactcacggattcactcctacacgtcaccagcatcaccctcctgcccaggcccgggacactggccaggg

SEQ ID NO: 1015583 - DNA, 120 bp, Artificial Sequence
  ENSG00000228151_3 (sequence is synthesized)
agctcaaggcctcgtcctgcctcctctgggatcgagtaggactgcaagaagaacctgtccgggacacccgttctcctcccttccctcaccggcctgaccgtcttctctctgcagttgctg

SEQ ID NO: 1015584 - DNA, 120 bp, Artificial Sequence
  ENSG00000228151_4 (sequence is synthesized)
ttgtcctgctattagcactccctgcccctcctctactcggattcttattccctgattcccatacggaaaatcgtgggacttgccagcctccataatttcatgaatcaactccttaaaatt

SEQ ID NO: 1015585 - DNA, 120 bp, Artificial Sequence
  ENSG00000228151_5 (sequence is synthesized)
aatctccatatagatagatgatagatagatagatgatagagctatatttctctgtctaccgatacagatctatctatctgtatcaatcaatctatgtctatctatctacccatatatcca

SEQ ID NO: 1015586 - DNA, 120 bp, Artificial Sequence
  ENSG00000228151_6 (sequence is synthesized)
cccacatccaattggtcctgtttctctgaagaaccctgactacgataccagctaaacccctgttcaataacaatgaaaagatgagaacctttcactgataaaaactgagagaatttgcca

SEQ ID NO: 1015587 - DNA, 120 bp, Artificial Sequence
  ENSG00000228151_7 (sequence is synthesized)
gataaaaactgagagaatttgccatcagcaaactctcactaaagtaaattttattgtcttttgagacaggatctcactctgttgctcaggctagagtgcagtggcatgatcgtggctcac

SEQ ID NO: 1015588 - DNA, 78 bp, Artificial Sequence
  ENSG00000228151_8 (sequence is synthesized)
catgatcgtggctcactgcagccttgacctcccagtggggaggtccttaagggtgtgtcatcatgcccagctaatttt

SEQ ID NO: 1015589 - DNA, 90 bp, Artificial Sequence
  ENSG00000228151_9 (sequence is synthesized)
aaccaaagtgctaggattatatgcgtgagccactgtgcccgatctaaagtaagttttaaaggatattttttcaggaagaagacaactgta

SEQ ID NO: 1015590 - DNA, 120 bp, Artificial Sequence
  ENSG00000228151_10 (sequence is synthesized)
aagttttaaaggatattttttcaggaagaagacaactgtatacagaaggaatgaatgataggaaataagagaattagaaaagaaatttaagaatctggctaatgtaacaaacattaattg

SEQ ID NO: 1015591 - DNA, 120 bp, Artificial Sequence
  ENSG00000228151_11 (sequence is synthesized)
agcagaagactaataatacaataattatttatttttaaattgataatcatgcaggtatttgggcattaacaaaacaaggtgaagccaaatacttgctttaacaataaattgaccaggtgc

SEQ ID NO: 1015592 - DNA, 73 bp, Artificial Sequence
  ENSG00000228151_12 (sequence is synthesized)
tatggcgaaaccctgtctctattaaaaatgcaaaattagatgggcgtggtggcgggcgcctgttatctcagct

SEQ ID NO: 1015593 - DNA, 84 bp, Artificial Sequence
  ENSG00000228151_13 (sequence is synthesized)
tggccactatggcgaaaccctgtctctattaaaaatgcaaaattagatgggcgtggtggcgggcgcctgttatctcagctactt

SEQ ID NO: 1015594 - DNA, 120 bp, Artificial Sequence
  ENSG00000228151_14 (sequence is synthesized)
cagcctagacaaaaaaagcaaaacttcgtctcaaaaaacaaaaacaaaaacaataatgaatgcacatttttcaagcacaaatagaacatttatagaaattgaccatattacaagtctaat

SEQ ID NO: 1015595 - DNA, 120 bp, Artificial Sequence
  ENSG00000228151_15 (sequence is synthesized)
tttagcacattataaagaattagtataatacaaacctcattctctgacaaaatgtagtaaaggcagaaatttgtaacaagtaacttctaaataatcatgtatgctttgacaacagttgaa

SEQ ID NO: 1015596 - DNA, 120 bp, Artificial Sequence
  ENSG00000228151_16 (sequence is synthesized)
agacttctgaattaaccatgggtcaaagaaaaaattgcaatgaaaaatgaaaatacctggaagcaaacaataataaatgttatcatcaaaacctgtgaaatggctccagagagggacgtc

SEQ ID NO: 1015597 - DNA, 120 bp, Artificial Sequence
  ENSG00000228151_17 (sequence is synthesized)
cccaggattgactcctaaaagtgaaaatggagctcagcagagtggctcacaacagtgactctcaacagtaactccatctccagtgcttccgataggctctctccctctccttccccaccg

SEQ ID NO: 1015598 - DNA, 120 bp, Artificial Sequence
  ENSG00000228151_18 (sequence is synthesized)
aggtacatgctgggttacagcagtcaatctcctccttactggagtgctaataattggcttcagaaaggcgtccagaaaccctggactggcagaacctcaatgcggttgaaggtatggagc

SEQ ID NO: 1015599 - DNA, 120 bp, Artificial Sequence
  ENSG00000228151_19 (sequence is synthesized)
ctgggcctcagatgtgcatcaccagacccctgaacttgtagatgcaacctaatttgaccaggttctcaaggtagccctaattagactctcaaagactgatacataataagccagaatgtt

SEQ ID NO: 1015600 - DNA, 120 bp, Artificial Sequence
  ENSG00000228151_20 (sequence is synthesized)
cttcaggttacctgggaaactaagagccatcagaaggttgcttagtgaggctgcaatcagagcaaatggaattgaaagctcttgaggggattttctcaggtcatagaaaattatcatgag

SEQ ID NO: 1015601 - DNA, 120 bp, Artificial Sequence
  ENSG00000228151_21 (sequence is synthesized)
tgattcttgttccgaagtattgtcccctctctagaggccaaaatctcacatccacggaactgagaccctcactgactccttgctcatccttggcaggtcactgagtcctgtcattcagtc

SEQ ID NO: 1015602 - DNA, 120 bp, Artificial Sequence
  ENSG00000228151_22 (sequence is synthesized)
ccctggacctggacacccgtcgtcactgctagtgtcttggctctgtgatctactatgtgtgtccaaatctcagtccacaaattgaggagtagaggactgtgactttactcttttacagaa

SEQ ID NO: 1015603 - DNA, 120 bp, Artificial Sequence
  ENSG00000228151_23 (sequence is synthesized)
cagcttgatttctattttgtgtcctgtcctgctgggcgacagaaatttaatgactcatctataaatcctcccaatatttcccccgtgttgcccctaaattcggcagtggctttaggagtg

SEQ ID NO: 1015604 - DNA, 120 bp, Artificial Sequence
  ENSG00000228151_24 (sequence is synthesized)
ccacagcactggaggtggggttaggggtttgcttcttcacatcatcttgaccacatgtgagtgtgggatattctggtttcctgctgcctcggggtccttgctgttccccactgtgccttc

SEQ ID NO: 1015605 - DNA, 120 bp, Artificial Sequence
  ENSG00000228151_25 (sequence is synthesized)
tcctgccagccttgcccatatggctctgccatgcggggacagtgctacttctgtgccaatctttattgcctgagtcccccagcacccagactgctgaaattaaaagatgagcaccgacaa

SEQ ID NO: 1015606 - DNA, 120 bp, Artificial Sequence
  ENSG00000228153_0 (sequence is synthesized)
agaaaaatgaaaacagtgcacagggaacaatggagggcaaatgggactcttttagaaccggatccactgatacgtcaggccaaggagaaatgaccacaagctctgaaaagtggagagctc

SEQ ID NO: 1015607 - DNA, 120 bp, Artificial Sequence
  ENSG00000228153_1 (sequence is synthesized)
cgtcctcagaacagattgccttgcctgacctcctgaggccgacggagatggtgatgtgacctcctttgccctccatcactgtgcctcccacacctctgcgcagctcgttcattctctctc

SEQ ID NO: 1015608 - DNA, 120 bp, Artificial Sequence
  ENSG00000228153_2 (sequence is synthesized)
cctccactctgacttaagggaagaggaattttaaaaccaacctcatcccttcccacctcctcaggaaactcactcctttgcttaccctctctccacttttaaaaataacgatataaatgc

SEQ ID NO: 1015609 - DNA, 120 bp, Artificial Sequence
  ENSG00000228159_0 (sequence is synthesized)
agactcgtgtgtggctgcttgcgcagctgctccgtgccaggcttggaggaccaggagaaggggtagtcacttgccacagctggaggctggagcgtgtggcaccacggctcgcctcgctgt

SEQ ID NO: 1015610 - DNA, 120 bp, Artificial Sequence
  ENSG00000228159_1 (sequence is synthesized)
ggtgggcgctggcggcagagacggcagctcggctggactgttaaacattatgtaaacgaaagtacagaaccctggcaaaattgaaaggccccaatattattggaactcttttatgattca

SEQ ID NO: 1015611 - DNA, 120 bp, Artificial Sequence
  ENSG00000228159_2 (sequence is synthesized)
gcttttcatggagttctactttatcatgaaatctagcacactggttcctttcaattaatccctgaaggttaatatttttggaccacagttgacctgaggtaactgaaactgctgaaaaca

SEQ ID NO: 1015612 - DNA, 120 bp, Artificial Sequence
  ENSG00000228159_3 (sequence is synthesized)
aaaccatggataagggagaactcttgtattatcacagattatatcaaaactatggctctaggctttttagaagagtttaacaagtggagcttgaagctctgtttttaccctttctccggg

SEQ ID NO: 1015613 - DNA, 120 bp, Artificial Sequence
  ENSG00000228159_4 (sequence is synthesized)
ttacatctttatacatgttgtgctgaacaacaagtggatttgtaggtgtttctttgtgaagttatcttctaaatcagactcatcttccttctttgatgacaagggctctaaagtgagtca

SEQ ID NO: 1015614 - DNA, 120 bp, Artificial Sequence
  ENSG00000228159_5 (sequence is synthesized)
cctaaactgcagtctgaggaggagtcaagggtactgcaaatgtgagagccagattcagatactggcatgtggaacaagttgaagaatggctaatctgacgttctgtatttatccagaaat

SEQ ID NO: 1015615 - DNA, 120 bp, Artificial Sequence
  ENSG00000228159_6 (sequence is synthesized)
tttaactaggctccatgagtaaggctttgagggcacagttcagggcttagctgattccccccaaatgagctctactaccagaaattccctggtagagattatttattctccagctttagg

SEQ ID NO: 1015616 - DNA, 120 bp, Artificial Sequence
  ENSG00000228159_7 (sequence is synthesized)
gcttttattagatgaaatgtcttacttcatgctttaattttatggttctatttttaacaatttcctgaacagtacattctaccatgtctcaaaataaacaatttgttatatttttataaa

SEQ ID NO: 1015617 - DNA, 120 bp, Artificial Sequence
  ENSG00000228159_8 (sequence is synthesized)
cctgaagacacttccatgtgctgatgaggagaatgcatactcttcagctgttgagtgggatgttctgtgtatatctgactcatcttccttctttgatgacaagggctctaaagtgagtca

SEQ ID NO: 1015618 - DNA, 120 bp, Artificial Sequence
  ENSG00000228159_9 (sequence is synthesized)
agactcctagaaatacaattatcagctcgtgagtacggacataatttgataaatacagcaaattgctttctaaaagttgttcagtaatttttgaccaaatagagcttccatgttttcaaa

SEQ ID NO: 1015619 - DNA, 120 bp, Artificial Sequence
  ENSG00000283503_0 (sequence is synthesized)
ccctggtctgccgcaggagaccctgccgatgccactcagggtcaagactctggcgcggtggaaactgcagagcaaaaggaaacacagacaaaaacagtgagaaggagagagagcatgtgg

SEQ ID NO: 1015620 - DNA, 120 bp, Artificial Sequence
  ENSG00000283503_1 (sequence is synthesized)
ggctttgccagagaggaacttggatggcaatcacctaagaactccaaactcagtgccagggcagactggtgtctattttgcaatgtcttccagtagttgataactttctacttttaaaat

SEQ ID NO: 1015621 - DNA, 120 bp, Artificial Sequence
  ENSG00000283503_2 (sequence is synthesized)
aattggaagaatgtaagctctcaactagtccactagtcccgaaacaatagataccagctggcagagataatagctgtctggaagagagagatacataccacatcaaaaaacaacaaaaaa

SEQ ID NO: 1015622 - DNA, 120 bp, Artificial Sequence
  ENSG00000283503_3 (sequence is synthesized)
aggatggctcaagtactcaaaaggcagcactaaaataaggctatgtctcttcctgagaatactctggacttcattctctgattaaagatcacaactgcttcttcgttgaggaaatcatgt

SEQ ID NO: 1015623 - DNA, 120 bp, Artificial Sequence
  ENSG00000283503_4 (sequence is synthesized)
atttcaaagccaccaatgaacaaggtaatgggatgtattggtccagcactgataacaggttatcctacaatcaagtatactctttccagaaagctgagttaggtatgcaactgcctttct

SEQ ID NO: 1015624 - DNA, 120 bp, Artificial Sequence
  ENSG00000283503_5 (sequence is synthesized)
aagccatgactacattgctaaatgaatcattgatttggaaaatctgaagtgaccttcagcttgttctccagctcttcctcaacagaaaagagaggcaaaatcagcaaaatattggaaaga

SEQ ID NO: 1015625 - DNA, 120 bp, Artificial Sequence
  ENSG00000283503_6 (sequence is synthesized)
gattttaacctgaatggaaaagacaatatgagggtgatgaaagactctagatggtccgtcttggagagaaggttttgccgtcttgccccagttggtctcgaactcccgggctcaagcaat

SEQ ID NO: 1015626 - DNA, 120 bp, Artificial Sequence
  ENSG00000283503_7 (sequence is synthesized)
ggattacagacgtgagccaccataccctgtccagtttggaaatttcttacaaagctaaacctagtcttagaatacattcctgcaattgttctcttagaccagtaatgaggtgtctcctgg

SEQ ID NO: 1015627 - DNA, 120 bp, Artificial Sequence
  ENSG00000283503_8 (sequence is synthesized)
cttagaccagtaatgaggtgtctcctggcacacaatcacaatgcactgacaaaccatcttggtgtgtgaaaaagactcagaaaaatccaagcaatgtgacactactagcaagcatagttc

SEQ ID NO: 1015628 - DNA, 120 bp, Artificial Sequence
  ENSG00000283503_9 (sequence is synthesized)
cacttcaccagagacttcaggtcatagttgggcctaaggcagagtcgcttggctggagaagtcattatttataggactatagaccaagtttcatgtctgagaggctcttacgttattaca

SEQ ID NO: 1015629 - DNA, 120 bp, Artificial Sequence
  ENSG00000283503_10 (sequence is synthesized)
tagaaacaaaattttgttatctataagaatgatttgcgtctttctccttacgttagtaatcctaagaaaatattgaaaatgaatcattctttaaaacaattaaacaatttactgattatt

SEQ ID NO: 1015630 - DNA, 120 bp, Artificial Sequence
  ENSG00000283503_11 (sequence is synthesized)
ttcaccactatatgatgcacatgtgcctaccaagaaatcagatattttcttgtgtgtagcttcattcaatagagtaaaatagaaaacttttattattaataaaaatgtgaaattccatgt

SEQ ID NO: 1015631 - DNA, 120 bp, Artificial Sequence
  ENSG00000283503_12 (sequence is synthesized)
catatactatgatgtataatcttctatgcttcattgtgtctatcctttagcatcaccattgactgacttcaagagtacactttccccttacatagctgtgctagttgctacaggtaatat

SEQ ID NO: 1015632 - DNA, 120 bp, Artificial Sequence
  ENSG00000283503_13 (sequence is synthesized)
ttaaaagcataaaatacagtctctgactctgtgctttaacttaatccagttggagaaacagaatatgtgtaaaaagatgaaaaattatggaatttaataaaatctaattccaaatggaaa

SEQ ID NO: 1015633 - DNA, 120 bp, Artificial Sequence
  ENSG00000283503_14 (sequence is synthesized)
atataggcaagaaatatgataagacatcaatacctgagaacaagattaccattggagagggtagaccaggtgcagtttttctatgactagtagactccgaaagaagggaattctaaacaa

SEQ ID NO: 1015634 - DNA, 120 bp, Artificial Sequence
  ENSG00000283503_15 (sequence is synthesized)
gaaggtatgtggaagaagcagtatattttaaaccctcaactcttgttagaaaaaacaaacatcctctgaggacttcctcataggtagcaatatgataagcaataatgctctgcatcagga

SEQ ID NO: 1015635 - DNA, 120 bp, Artificial Sequence
  ENSG00000283503_16 (sequence is synthesized)
atgaaattaggtattaaaggagggaagatctaacaagtagaagttataattacagaccttgaaactcatgttctagatcagcggtctccaccctttttggcactagggaccagttttgtg

SEQ ID NO: 1015636 - DNA, 88 bp, Artificial Sequence
  ENSG00000283503_17 (sequence is synthesized)
gcggtctccaccctttttggcactcggaccagggtaggagatgcttttgggatgattcaggcacattacatttattgtgcactttatt

SEQ ID NO: 1015637 - DNA, 88 bp, Artificial Sequence
  ENSG00000283503_18 (sequence is synthesized)
tgttttcctgcaactagatggtcccataagcattagatgctcataagaagcaaggaactgagatccttgcaacctagatccattgcat

SEQ ID NO: 1015638 - DNA, 120 bp, Artificial Sequence
  ENSG00000283503_19 (sequence is synthesized)
tcacaataggttttgcactcctgtgggaatctaatgccactgctgatctgacaagaggcggagcttaggtggtaatgtgtctggaaatacagatgacgctttgctcactcacctgctgct

SEQ ID NO: 1015639 - DNA, 120 bp, Artificial Sequence
  ENSG00000283503_20 (sequence is synthesized)
tacctcctgctgcgtagcctggttataaacaggccatgaactggtactggtctgtggcctaggggttgggggctcctgttctagattttttagagaagactaccatgtaaaatgatagtg

SEQ ID NO: 1015640 - DNA, 120 bp, Artificial Sequence
  ENSG00000283503_21 (sequence is synthesized)
ttaatattaataatataataggtctaattgctaaatcatatatcataaaatctagcctttatgataatttaccttttaaacagtcaataaaaactggaacaatctagtagggtatcacag

SEQ ID NO: 1015641 - DNA, 120 bp, Artificial Sequence
  ENSG00000283503_22 (sequence is synthesized)
tatcacagcggtgataggtcttaacttgcataatatttgaatttatagagagaataaataccacattgaagtaaagcacaaaataagccatgaagtcagtactcggtattgcatgttcgt

SEQ ID NO: 1015642 - DNA, 120 bp, Artificial Sequence
  ENSG00000283503_23 (sequence is synthesized)
gagacagtgaagaatttaattcaattacagacatgccatagggaataatgatttaccaaactttatcgagttaagtgataaaaagtgttatgttaggtagattaatcaagggtagtggtt

SEQ ID NO: 1015643 - DNA, 120 bp, Artificial Sequence
  ENSG00000283503_24 (sequence is synthesized)
ccattctttggtttttagatgctaggaaggctgtggaaataaagttgcatgtagctccacatacacactgaaacatgtatctaccaagcaataaacatactttcaacatgtttcctttaa

SEQ ID NO: 1015644 - DNA, 120 bp, Artificial Sequence
  ENSG00000283503_25 (sequence is synthesized)
cgtggtggctcacacctgtaatcccaataatttgggaggatgaggctggtgaatcacttgaattgaggagtttaagagcagtctgggcaacatggtgaaatcctgtttctacaaaaaaat

SEQ ID NO: 1015645 - DNA, 120 bp, Artificial Sequence
  ENSG00000283503_26 (sequence is synthesized)
tcctgtttctacaaaaaaataccccccaaaatgcttataaatatgactactacaataaaaataaatttaatgaatataatttattgtaataggccattctatattttttcagtcaacaga

SEQ ID NO: 1015646 - DNA, 120 bp, Artificial Sequence
  ENSG00000283503_27 (sequence is synthesized)
tgtgattattatcttacactgggagatgcctacctgtctcgtctcctctcctttcctctcctctcctctcctctcctttcccttttcccttcttttcttccctcctctcccctctccttc

SEQ ID NO: 1015647 - DNA, 90 bp, Artificial Sequence
  ENSG00000283503_28 (sequence is synthesized)
ccttttcccttcttttcttccctcctctcccctctccttccccttctccttcccttcccttccccttccctactccttcccttctttgcc

SEQ ID NO: 1015648 - DNA, 71 bp, Artificial Sequence
  ENSG00000283503_29 (sequence is synthesized)
tgttggccaggctggtcccgaactcctgatctcaggtgatctaccccactttaattttgtatttttagtag

SEQ ID NO: 1015649 - DNA, 120 bp, Artificial Sequence
  ENSG00000283503_30 (sequence is synthesized)
ctctaactcctgaccttgtgatctgcccatctatgcctcccaaagtgttgagatcacaggcgcgagccaccgcgcccagcctcctctcctctcctctcctttccttttcgcttttccctt

SEQ ID NO: 1015650 - DNA, 120 bp, Artificial Sequence
  ENSG00000283503_31 (sequence is synthesized)
tccttcttccttcccctctcctccctccccttcccctttccatccccctcctgttcccttctttcctttggccttgtgaagtatctatatattattttcattaaagtgctgtcagggctg

SEQ ID NO: 1015651 - DNA, 120 bp, Artificial Sequence
  ENSG00000283503_32 (sequence is synthesized)
ctatatattattttcattaaagtgctgtcagggctgggcgagatggatcatgcctataatcccagcactttgttaggcagaatcaggcagctcacctgaggtcaaaagttcgagaccagc

SEQ ID NO: 1015652 - DNA, 61 bp, Artificial Sequence
  ENSG00000283503_33 (sequence is synthesized)
cattgcaaaaccccgtctctactaaagaatacaaaaattagtggagtgtggtggcatgtga

SEQ ID NO: 1015653 - DNA, 70 bp, Artificial Sequence
  ENSG00000283503_34 (sequence is synthesized)
ttgctgctagccaggcatagtgacatgcacctgtagttgtagctatttggaggctgaggtcagaggaaag

SEQ ID NO: 1015654 - DNA, 120 bp, Artificial Sequence
  ENSG00000283503_35 (sequence is synthesized)
ctgtagttgtagctatttggaggctgaggtcagaggaaagcttgaggccagaagtttgagaccaatctgggcaacaaagcaagatcccatctctaaaatacaaaaacaaacaaacaaaca

SEQ ID NO: 1015655 - DNA, 120 bp, Artificial Sequence
  ENSG00000283503_36 (sequence is synthesized)
accatgctgccaacttacattgacatatgctttttaattatcaaatataaaatgtacagactaaatgctcaatatattttcatttgtgttgtttgttattggtttactgagttatgctaa

SEQ ID NO: 1015656 - DNA, 120 bp, Artificial Sequence
  ENSG00000283503_37 (sequence is synthesized)
gatatttccctattctgagtgcttggagctcttggagtctcttacatctaatgtgatcattaagaggtactaactgtctgattgcttcttgtgtgcagctaactcactggtgacccagca

SEQ ID NO: 1015657 - DNA, 120 bp, Artificial Sequence
  ENSG00000283503_38 (sequence is synthesized)
tctcaaaaataagtaaatgaataaataaaaataaaatagattgagcctccacattttgcatgcagctttcttggtgcttgtccttctcctgtgcttactcaaagatgggacattgtgcac

SEQ ID NO: 1015658 - DNA, 120 bp, Artificial Sequence
  ENSG00000283503_39 (sequence is synthesized)
aatgagaagagtattgggaccagtaaggaagaatgagtcagatattgtgggacctctttttttgttgtttttttttgctcccagaaatctttgaggtaagtaacatagtcaattgaggtc

SEQ ID NO: 1015659 - DNA, 120 bp, Artificial Sequence
  ENSG00000283503_40 (sequence is synthesized)
tggagttatgtactccatttattcattttttcttaacatagtccctccttactatgtgatattctctgtcctagaccttgaaaatacaagttaaatatggcatattctttacctctatga

SEQ ID NO: 1015660 - DNA, 120 bp, Artificial Sequence
  ENSG00000283503_41 (sequence is synthesized)
gcttaaaattgagtggggaaagtttcattttttctttgaaatgaaaacaaacttaagtaccgatatgcatgagaaaaataaattgttcatttctttacctacatctcatcaggagtaaac

SEQ ID NO: 1015661 - DNA, 120 bp, Artificial Sequence
  ENSG00000283503_42 (sequence is synthesized)
acattctctctctggctaagccaaatataccataaatccctcctaaaaaaataccctgaaattgagaatccaattttaatggctaaattatatttaccttgaactgagcattttctatta

SEQ ID NO: 1015662 - DNA, 120 bp, Artificial Sequence
  ENSG00000283503_43 (sequence is synthesized)
attcttcacacacctccggagtccattattgaatattttatagttcagggccttttagctcctaagcattcttcccactgggcatctgttcctgtaacgtggattcacactgcatattca

SEQ ID NO: 1015663 - DNA, 120 bp, Artificial Sequence
  ENSG00000283503_44 (sequence is synthesized)
gtcccgctcaaactgaccagcgttatgatgtgttcttctctgcaatgtgccctcaaacaaaacgaattgaatcctttcatgtttttacatttctttagttaattattaggaggtattgga

SEQ ID NO: 1015664 - DNA, 120 bp, Artificial Sequence
  ENSG00000283503_45 (sequence is synthesized)
gttggtgctaccctgtgaatagaaaatgtaagaggatatctccggatactcctgccccctctttgaaatgtgaccattttgatgtggaggaaattgtgctgctcttgctaagttagccaa

SEQ ID NO: 1015665 - DNA, 120 bp, Artificial Sequence
  ENSG00000283503_46 (sequence is synthesized)
aggaattgatctgcttgtagaaagtccacactgactatgaggcagacctgcaaaggctgatggggatactgtcttgcattgggttaggcaaagctgagtcttcctttatattaaaatatt

SEQ ID NO: 1015666 - DNA, 120 bp, Artificial Sequence
  ENSG00000283503_47 (sequence is synthesized)
atgaactggcacctaaagagccaacactcagaactgaccaaacccaatcaagatgttcccttgttgttactaaattatactaatttgaatttactaatactattccccaaaagggagcta

SEQ ID NO: 1015667 - DNA, 120 bp, Artificial Sequence
  ENSG00000283503_48 (sequence is synthesized)
tatttacattctcctattactgaagtaacatcaataggtcagagggaaatggaaacgttcttatttttctttatatataagatagctgagtgaataggtgttctcacgtctatctctagt

SEQ ID NO: 1015668 - DNA, 120 bp, Artificial Sequence
  ENSG00000283503_49 (sequence is synthesized)
tatgtgtgtaagtgtgtgcagggagaaattaggttctatattcagaagtgacattctttgtattttcagtgtggctctaaaaacagagcctttttcttatagttcagagtcagacactgc

SEQ ID NO: 1015669 - DNA, 120 bp, Artificial Sequence
  ENSG00000283503_50 (sequence is synthesized)
ccttggcttctcagccattctagtaaactatttgttactcagaaagcctcaaattcttcattgaatttatttggaccagtttttgtgcacttacctcgttggcatggtaatagtcttttg

SEQ ID NO: 1015670 - DNA, 120 bp, Artificial Sequence
  ENSG00000283503_51 (sequence is synthesized)
aataaccaatactgtgaacaattatacaattaaaaattctacttccattattattcttaacttctccctttatattttgttacagttatgaggtatgttttattaactattctagacata

SEQ ID NO: 1015671 - DNA, 120 bp, Artificial Sequence
  ENSG00000283503_52 (sequence is synthesized)
gatctagccctgcatttactcagcactgccttgctccttttcatgaggggtgatctagttagacatatcaatattcaatgaaatgtatagattaccctgataaaatggctcaatgaagtt

SEQ ID NO: 1015672 - DNA, 120 bp, Artificial Sequence
  ENSG00000283503_53 (sequence is synthesized)
catgtaaggtcaatggaagattgaggcatcatatgcactgagccactaattggtctcatactagtaggatatagctatccccaccccctatatcttgagtctccttcctcttaggtgctg

SEQ ID NO: 1015673 - DNA, 120 bp, Artificial Sequence
  ENSG00000283503_54 (sequence is synthesized)
agcatttccaaaggcttctctagctgaagcaggtataagaaaatgaagtgacataaagcatcaacccttaggtataaatgattggcaagtctcaaccttgctaaaactgagacttttcaa

SEQ ID NO: 1015674 - DNA, 120 bp, Artificial Sequence
  ENSG00000283503_55 (sequence is synthesized)
ttagctatgcttaaaagtttctactgaattactgaagccataattatgtatgtaattcaagtttcctttgagctgacctacaatgaaagaagttacctaaatgacctcttaggtcctttt

SEQ ID NO: 1015675 - DNA, 120 bp, Artificial Sequence
  ENSG00000283503_56 (sequence is synthesized)
ctctctccagcaatcatggatactttacgaatctcataaggagtacagctcatttattattaacaccattttagaatgaaggaagaagaggcttagaaaggtttagtagcagagaagaga

SEQ ID NO: 1015676 - DNA, 120 bp, Artificial Sequence
  ENSG00000283503_57 (sequence is synthesized)
gcagccttctgatttgtgggttccacattctggatgcagaaaactttcagtcattcttatctattgtgaggcttgtaccagtttctccataaacttacaaaaccaaaccattttgacaag

SEQ ID NO: 1015677 - DNA, 120 bp, Artificial Sequence
  ENSG00000283503_58 (sequence is synthesized)
ctttgttcctgcctctgacttctttcagatagtggctaaccatcttctcttgatgagtcatttttgctcttcctcattcccttcttgatgttcaagtaggtgaacgtgatgactataaaa

SEQ ID NO: 1015678 - DNA, 120 bp, Artificial Sequence
  ENSG00000283503_59 (sequence is synthesized)
ggcaagcaattaatatctggggttaggcagagctctgtaagccaatctccaagaatgtgcaagctcctttgtccttaactgtaaccttggcacatgaaaagcaacttccattccgtttta

SEQ ID NO: 1015679 - DNA, 120 bp, Artificial Sequence
  ENSG00000283503_60 (sequence is synthesized)
ccaacatttcggtcaaagatcaattgccattgtaattatatcatatatcacaggatggggaatcagtgagagggcaggccctttaaactaatacatatcattagcatttaaagaacatga

SEQ ID NO: 1015680 - DNA, 120 bp, Artificial Sequence
  ENSG00000283503_61 (sequence is synthesized)
aaaacaaattgaacattagtcctcatgtaagtcttttttctagagcaaataattttccaaattaaaatgaataaattaatgaaattgtcacatgtctgagaataaactaggttggtaatg

SEQ ID NO: 1015681 - DNA, 120 bp, Artificial Sequence
  ENSG00000283503_62 (sequence is synthesized)
ccgtcaagctcttagcaaagtttagctcattgtacttctctgtctgatcattataacatctaatcaaggggagcttaaatacttcaatgagctctcaaaataaatttgatctgagcagct

SEQ ID NO: 1015682 - DNA, 120 bp, Artificial Sequence
  ENSG00000283503_63 (sequence is synthesized)
caggtctcatggattcctagggttactgactgggtgaaacatgtttttgttttaatccctgtctcagctcaaagaggattaatgcccgtaattctgctatccccatttaattgagaaatg

SEQ ID NO: 1015683 - DNA, 120 bp, Artificial Sequence
  ENSG00000283503_64 (sequence is synthesized)
aaatttgaagaggcacctcctggaacactccactttgaaatatgacccatccactgtctatataataaatcttcctctgctctcacacacttatccacatccttcctatcccaaagaagg

SEQ ID NO: 1015684 - DNA, 120 bp, Artificial Sequence
  ENSG00000283503_65 (sequence is synthesized)
gtgtgtgtgtgtgtgtgtgtgtttctgtgcatctaatccaaaacacacaatgttgttgttttatttttcaattttggaattatcctaataaaggcattctctgggaagctcagactgcat

SEQ ID NO: 1015685 - DNA, 120 bp, Artificial Sequence
  ENSG00000283503_66 (sequence is synthesized)
ggcattctctgggaagctcagactgcatctcaaacctttctctgacactagcatcctcattggaacaaatagccctttcactaaaagcaatacagttattgcattcatgttatatgatgg

SEQ ID NO: 1015686 - DNA, 120 bp, Artificial Sequence
  ENSG00000283503_67 (sequence is synthesized)
taattttcacttttgctttcaatacaacattaaaagaaaaattgtctataggaaagaaagaggcaatatactatatcctggaactaattctttggcatctgtaaaaaagggggccataat

SEQ ID NO: 1015687 - DNA, 120 bp, Artificial Sequence
  ENSG00000283503_68 (sequence is synthesized)
tctgaatagaggctcctgtcctaaaacagacccaatgctaagatctaatagaaagggcacagagaagcataaggaaacttaatgtcactttcacgttttttgtacaagttgatgtgagga

SEQ ID NO: 1015688 - DNA, 120 bp, Artificial Sequence
  ENSG00000283503_69 (sequence is synthesized)
tctaaagaggcaatttctgtaaaatgcctagtagaggaccaggcatatagtaagccctcagcaaatgctggctgttatcattatgttttataaagaatttttacatcttcctcctaagcc

SEQ ID NO: 1015689 - DNA, 120 bp, Artificial Sequence
  ENSG00000283503_70 (sequence is synthesized)
ctgaggcttcataacgaagccttatatatgactctcaatggctcaatgtctttcctaacctaatgtagaaagtgacataccattgcttccaacataacctattggtcacatggaccaaca

SEQ ID NO: 1015690 - DNA, 120 bp, Artificial Sequence
  ENSG00000283503_71 (sequence is synthesized)
taagaccaatgtgggatgaccctgtacataagggtaagaagcaggcatcacttggggccatctcaaaggaaggtgaccacaactgcctaatggcagttgaatcctttatcaagctaccct

SEQ ID NO: 1015691 - DNA, 120 bp, Artificial Sequence
  ENSG00000283503_72 (sequence is synthesized)
cagtaacacttcagctttcaaggaccaggtttttgtgactattgtgaacaggattttagtgaatgaagatatatcccaaaataacatttcacttaaaagttgaatatctgttatcaattt

SEQ ID NO: 1015692 - DNA, 120 bp, Artificial Sequence
  ENSG00000283503_73 (sequence is synthesized)
acaaatgcttttatgttatatctcacttgagcttcaaaataaccttttaagacagacaagagtagaaactactccagtgatttcatagataaggaaactgaagatcagagagacttaatg

SEQ ID NO: 1015693 - DNA, 120 bp, Artificial Sequence
  ENSG00000283503_74 (sequence is synthesized)
gctggtcatggggtttgcagcaaatcacaagtgtgtaatttttttttcttaaaggcatttaatctactttctaaaaatcactagaattcagaaactgatactacttcttttgtttcatta

SEQ ID NO: 1015694 - DNA, 120 bp, Artificial Sequence
  ENSG00000283503_75 (sequence is synthesized)
tttgcctccctgcccccaacactcatacatatttagagacacccatggacactcatgaacacacatattcttctttctagtcccttatcaatggcaaactaaagttattttagaatatac

SEQ ID NO: 1015695 - DNA, 120 bp, Artificial Sequence
  ENSG00000283503_76 (sequence is synthesized)
tagctgtcattgtgccacagagaaacctctctttcatgcaaattgatatatgtatataatcatacatgtttatatataaactttgtagctttcctccctcttttctaaaataaattatga

SEQ ID NO: 1015696 - DNA, 120 bp, Artificial Sequence
  ENSG00000283503_77 (sequence is synthesized)
aaggttgtatgttcaggcttcacgcagaatttttcatttgagggagactttttcaaccctttctatttgagttggtagccatttatatgaagagaaaatgaatactaatggaaaatccta

SEQ ID NO: 1015697 - DNA, 120 bp, Artificial Sequence
  ENSG00000283503_78 (sequence is synthesized)
gagtggatttggaaaatcattataacagttctgctataggtttgggcctttgacaaaccacctattcaaggatgaaaaatccactatttctcttctgcatttctttttccgaatacagct

SEQ ID NO: 1015698 - DNA, 120 bp, Artificial Sequence
  ENSG00000283503_79 (sequence is synthesized)
agattgaataacaggccagataaaggattcagaacaattgctttactaagtaatagtgagcccatgttctaaccaatgggacagaaactgaccctctgtatctctgacacagttgccttt

SEQ ID NO: 1015699 - DNA, 120 bp, Artificial Sequence
  ENSG00000283503_80 (sequence is synthesized)
cattgacagatttacagtggaggggttgggagagcagatgaattaaaaaaaaacaaaagcaaatcaagatcccccataaatttcacgatccccacatcttccacctcagcacctattaga

SEQ ID NO: 1015700 - DNA, 120 bp, Artificial Sequence
  ENSG00000283503_81 (sequence is synthesized)
acaccttactcttaaattctgcacatgtggagatttatttgtatcccagaggtttgctcagatgtttcctctgtgctttcaatgcaggcccacccttttctttcttcatattaaaaccat

SEQ ID NO: 1015701 - DNA, 120 bp, Artificial Sequence
  ENSG00000283503_82 (sequence is synthesized)
atagattctccttgaagccttctcaactggtaataatcatttacatccttgctagtgcttatgattttcgaattacttttagataatctaactcagcgatctccacacaaccttagacac

SEQ ID NO: 1015702 - DNA, 120 bp, Artificial Sequence
  ENSG00000283503_83 (sequence is synthesized)
ttagcccggcaagtattgtgcttttgctttcatggatgagaaaaaggagacttggagtgctttgattagcaaacaaggttacagagctaaaaaaggagtgacactggagtagatcccagc

SEQ ID NO: 1015703 - DNA, 120 bp, Artificial Sequence
  ENSG00000283503_84 (sequence is synthesized)
aaagacaatatgagggtgatgaaagactctagatggtccgtcttggtctttgaaagatgctggaatatatgcctgcttggccaattagtccccaataactcttcagtgccatagtactgt

SEQ ID NO: 1015704 - DNA, 120 bp, Artificial Sequence
  ENSG00000283503_85 (sequence is synthesized)
gtgtagagaaaacctcaatgaaaagaaaatggacaatcaagctggataaaatacatcccttaaatgagaactacgctatgtgaaaaaaaaatagaagaacaagtcctcagcaagtcaatg

SEQ ID NO: 1015705 - DNA, 120 bp, Artificial Sequence
  ENSG00000283503_86 (sequence is synthesized)
atcataagaaaaacagttatattgactagttattttgtgtgtttgatgtacaatatggagaaatattagtagccaaatgaatgtgacacattgacacagatgcattgtaaatattatgct

SEQ ID NO: 1015706 - DNA, 120 bp, Artificial Sequence
  ENSG00000283503_87 (sequence is synthesized)
attgagaccatagattcagttacattcctctgatgaatgtggatgctttcatttcctgttttagaaggcaactaacctgattaatatcaaactgcaagctctgccttgtttgcagtaggt

SEQ ID NO: 1015707 - DNA, 120 bp, Artificial Sequence
  ENSG00000283503_88 (sequence is synthesized)
gactgctcaaattgtagttattttagcctcagctctgagataatttgtttctgtcctgtttttcccccaacaagtatggttcaaggttcacatacagacttggccagagttcatatgcag

SEQ ID NO: 1015708 - DNA, 120 bp, Artificial Sequence
  ENSG00000283503_89 (sequence is synthesized)
acttttaactgccttcttcccaggatttcctctccatttttggggtgggtgggcagtggggtgctgtggttgcactgggtcctgtcatctggttcttaccaacacaaaatatgaaggttt

SEQ ID NO: 1015709 - DNA, 120 bp, Artificial Sequence
  ENSG00000283503_90 (sequence is synthesized)
ttaaaggagtttcagttattctaattatcctgtaccttaagttgtctttctaatacctagtgctggtttcttctaaatgtcaaatctcttacaaaaactgttctgtctcaggaattgtgt

SEQ ID NO: 1015710 - DNA, 120 bp, Artificial Sequence
  ENSG00000283503_91 (sequence is synthesized)
gtgtgtgattgtgcatattcagactttatagttgttacctgcatgactgtcagtctagtaggaattcattccagcctactagaagaaaaagtttatatatcaattttgcagaaaaataat

SEQ ID NO: 1015711 - DNA, 120 bp, Artificial Sequence
  ENSG00000283503_92 (sequence is synthesized)
ccaaattgtataggatattactcaaaaagaaaacttcggaaaagttgtttaaatttataatcttttagttttaagcaaatatttgttaaacatgcttacttctcagttagtggaacagaa

SEQ ID NO: 1015712 - DNA, 120 bp, Artificial Sequence
  ENSG00000283503_93 (sequence is synthesized)
gaaaaaaaatgtaatgtcatccctgaactcagacacacaacacttaagaaattacattcaaaacataggtgctttaacttgataagtactttaaatgcaatgctatatccattgttttca

SEQ ID NO: 1015713 - DNA, 120 bp, Artificial Sequence
  ENSG00000283503_94 (sequence is synthesized)
atgaacatagcaacattttacatgcacaatataataatgtggtaattgccagaaatagtccctttttgcaaatatttaatgtaattctacaggaaaaaattttaaggcagtaaaataaaa

SEQ ID NO: 1015714 - DNA, 120 bp, Artificial Sequence
  ENSG00000283503_95 (sequence is synthesized)
aaaatgtatttcacgatctgcaatgatgtgtaccttactttagccttttactgcaactaacttcagcaaataaaatttggtgaataatctgtattttcttcttttctttctttttttttt

SEQ ID NO: 1015715 - DNA, 120 bp, Artificial Sequence
  ENSG00000283503_96 (sequence is synthesized)
taagcctctctcccttcctgtctccattctttcctacaaggaatattgggtatttattatgtgcacggcacattctaaagcagtgaagatgagacagtaaatattccagggacagtatca

SEQ ID NO: 1015716 - DNA, 120 bp, Artificial Sequence
  ENSG00000283503_97 (sequence is synthesized)
tatgtatgagaccgattcactgtcacaaacctggagaagaaaacccttttgaggtttaaagctgagagggagataaaaacttggttgtactacttctgggaaatgctgaagttatccacg

SEQ ID NO: 1015717 - DNA, 120 bp, Artificial Sequence
  ENSG00000283504_0 (sequence is synthesized)
gacgtcaactatgaggcctcggctcttgaagggccccgtggaggtgctgggcctgggtgctgtccgctggctcacgtaggcaggtctattgctccactgaaggtgctcctggcatctaga

SEQ ID NO: 1015718 - DNA, 120 bp, Artificial Sequence
  ENSG00000283504_1 (sequence is synthesized)
atattgggagtcagaatactgggagtacgtcgtagcatctgatatagccagagcctgtgatgggttacagcctccaaggttgtatctgtttgctcgggatgccataacaaaggaccacag

SEQ ID NO: 1015719 - DNA, 120 bp, Artificial Sequence
  ENSG00000283504_2 (sequence is synthesized)
actggggggtttaaacagcagaagtttactttctcacagtactggaggctggaagtctgaggtcaaggtgctggcggtgtcggtttctcctgagccctctctcttttgccgttggagtct

SEQ ID NO: 1015720 - DNA, 120 bp, Artificial Sequence
  ENSG00000283504_3 (sequence is synthesized)
gtggagacaaagagggaggtcttgctgtgcctgaccctctgggatgtgttaccacccacgccgacctgctctctgcggctttctgacagcacctcacagccctggaactggaaatgtggc

SEQ ID NO: 1015721 - DNA, 120 bp, Artificial Sequence
  ENSG00000283504_4 (sequence is synthesized)
tctcactgaagctgcccagagagagggtctctcagtgaagaccccctgttgtcagctggggcagccggaaagaaagactgggaattctcttcacacaggatttgatatgcttggtggctc

SEQ ID NO: 1015722 - DNA, 120 bp, Artificial Sequence
  ENSG00000283504_5 (sequence is synthesized)
cagaaaaatgcaagtgtgcacattcatccacttgacaaagggtgacttaactgtcagtgtcctgtggattcaaactgaaagggtttgggcgaaagaaagaagaaggtgggactgcgaata

SEQ ID NO: 1015723 - DNA, 120 bp, Artificial Sequence
  ENSG00000283504_6 (sequence is synthesized)
catatacatttcagtaggaatttataactttttatgaacattatcttaaagttagtctctagacataggtctaaaaataaaattatgctgaactgtgtacccagagaatggtaaatggga

SEQ ID NO: 1015724 - DNA, 120 bp, Artificial Sequence
  ENSG00000283504_7 (sequence is synthesized)
ataacgttcttgaaagggatgacgtaggtccagggaaaggtcacattgaataatcaaggtcggtgaaggtcaaaatcacaaagaaggaccctgcattcactcctgtcctgatggcagctt

SEQ ID NO: 1015725 - DNA, 120 bp, Artificial Sequence
  ENSG00000283504_8 (sequence is synthesized)
cagtggaaacccttggccatcgctttgcctctccaagcattcgagaaagaccgtctggtgccatattgtcttctggggacagctgatcacctggggagagctgcatcgtgctcctacccg

SEQ ID NO: 1015726 - DNA, 120 bp, Artificial Sequence
  ENSG00000283504_9 (sequence is synthesized)
tgtcagatctgggcagaggacagacaaaagtcctctggagttttccgcagtgagagtcacagaagttcatctaaggaattggagccaaggttagaaacttctctggagatgttctagttt

SEQ ID NO: 1015727 - DNA, 120 bp, Artificial Sequence
  ENSG00000283504_10 (sequence is synthesized)
tgtttgctagctcggcagctgcgtaatgacactccctccagcagggcacatagttcacttcaaatgacaaatggtgggaccttagtatttttcactgtcggttaattatcagaaatagat

SEQ ID NO: 1015728 - DNA, 120 bp, Artificial Sequence
  ENSG00000283504_11 (sequence is synthesized)
ttgttgctatctagataccagccatttgtccaaattactaggataagattcccaagaaagcctgaaatcagatagctttctcctccttattttaaaataaacagaaataaaattattctg

SEQ ID NO: 1015729 - DNA, 120 bp, Artificial Sequence
  ENSG00000228488_0 (sequence is synthesized)
cgactccattccagagcagctgggagcctacagcagcctaggaatctccatgcagccccaggtggcatgcagggccatgtctcctcttgaggacctgtcttcagcgtctcttttaggccc

SEQ ID NO: 1015730 - DNA, 120 bp, Artificial Sequence
  ENSG00000228487_0 (sequence is synthesized)
cggggaagggctctgggccccacctgaggaacagagcagatgttgcttgcaagtggcttcctgtttcatggagcatttccgcctgtaaaatggcatctgaaaagaccgagctgagcacag

SEQ ID NO: 1015731 - DNA, 120 bp, Artificial Sequence
  ENSG00000228487_1 (sequence is synthesized)
agccctaggacctgtcactgtcactagagacctcccttcagcttccagaaccacttggagggaccaggaagtctgtgactgtgccacgtggcaccatgaagtccccatcctcctggaccc

SEQ ID NO: 1015732 - DNA, 120 bp, Artificial Sequence
  ENSG00000228487_2 (sequence is synthesized)
ggccaccccttgtgtcacatttccttaagaaaccactgctaatccggtccagactgttgagggaggaagaaactcaaatggtatccaaactcaggacacactgccacatgtgtgcaacaa

SEQ ID NO: 1015733 - DNA, 120 bp, Artificial Sequence
  ENSG00000228487_3 (sequence is synthesized)
atgtggcttcagtcactcagacacggagcagagaacttggtaatttatctcttccccattccaggctcctggaggctccctttgtttctctgcttctcagctaagaacattagagcctga

SEQ ID NO: 1015734 - DNA, 120 bp, Artificial Sequence
  ENSG00000228487_4 (sequence is synthesized)
cactcaaggcatggtctccccaccagcactgccatctgcatcgcccgggagcttgctggaaatgcagaatcttggtctctacccccagatctgttgaatccaaatctgaattttaatcaa

SEQ ID NO: 1015735 - DNA, 120 bp, Artificial Sequence
  ENSG00000228485_0 (sequence is synthesized)
agaattatcaaaggatggctgtacagaccacctagaaaataattcagtatttcaggtttttcttttctgggagtgtgataactgaaattgttagattttggctcagttaagaaaagaaag

SEQ ID NO: 1015736 - DNA, 120 bp, Artificial Sequence
  ENSG00000228485_1 (sequence is synthesized)
attttgcaaggccccgcttttcctttcttcacaggccagcagtagccatatctgatcaaaaaagatacctgaaggaatattgatcacattttcctgaggccctagcaagcacaggaattg

SEQ ID NO: 1015737 - DNA, 120 bp, Artificial Sequence
  ENSG00000228485_2 (sequence is synthesized)
agaagttaggactggaacaactttgtcatttgtcacaattgccaaacattagaatacacaggaaccgttttttcaggtaactctgtgacttggctggatcttcctgatcatcaagattag

SEQ ID NO: 1015738 - DNA, 120 bp, Artificial Sequence
  ENSG00000228482_0 (sequence is synthesized)
gcttagatccaggcaagggaagacagaaccgtctttaaccagagaagcagaaacagttgtagcacagctcatagagaaagtgttggagcatggagtaaattcaactgcctgggtagcgcg

SEQ ID NO: 1015739 - DNA, 120 bp, Artificial Sequence
  ENSG00000228482_1 (sequence is synthesized)
ccagctggaggaaggcagcaattggataactggatttgtgtcaggaaaatgagagagaggaggaagggagtgagagagacagacagagggagggagagaaagagagattgagctttcttc

SEQ ID NO: 1015740 - DNA, 120 bp, Artificial Sequence
  ENSG00000228482_2 (sequence is synthesized)
ttcctcccttctatttggccttggaataccctgcagacaaagatggacttcctttagccgtgtcctctggcccaggctaccatcaccccccaaagccctgagcttgaaactggggtcaag

SEQ ID NO: 1015741 - DNA, 120 bp, Artificial Sequence
  ENSG00000228482_3 (sequence is synthesized)
caattgtcgccacaaatgaagaatgttcacgtttgttttacaacttcttaatgcaccgcattcagtcttcctgtaaacttgactgcttagtccttaaagtatattggtggagcaatgtct

SEQ ID NO: 1015742 - DNA, 120 bp, Artificial Sequence
  ENSG00000228482_4 (sequence is synthesized)
gcatgccttcgtcaacacatctattggcctgtttgtcccagcatcccagttggaatgggaacccttctaagaaaagcctttatcctttactcacctacaaactcactgggcacccccgga

SEQ ID NO: 1015743 - DNA, 120 bp, Artificial Sequence
  ENSG00000228482_5 (sequence is synthesized)
attgtggtcctgggcgtatagcaggtgtctagtcactcttttctggttgtgccagtaattggggcctgattacaattctgtttcatccagtgcacctcaatggagagaaaccagcaagaa

SEQ ID NO: 1015744 - DNA, 120 bp, Artificial Sequence
  ENSG00000228482_6 (sequence is synthesized)
actcatgctttctgccccatctccttcctttcttctgtgtgtaaagtggagaaaaggctggagagtgtggtaagataggaagaaaccaagcaaagcacacataaacaaacaaatgaataa

SEQ ID NO: 1015745 - DNA, 120 bp, Artificial Sequence
  ENSG00000228482_7 (sequence is synthesized)
ggagttccaaaagggagctctgcttttattcccatggctgggagcaactagctagcagattcttggggtccaaaaggaagtcagccctacagtataaaggaccaatctccaagtcattta

SEQ ID NO: 1015746 - DNA, 120 bp, Artificial Sequence
  ENSG00000228482_8 (sequence is synthesized)
gcttttattcccatggctgggagcaactagctagcagattcttggggtccaaaaggaagtcagccctacagtataaaggaagccttccacatgatcaatcagttacccaacctctttccc

SEQ ID NO: 1015747 - DNA, 120 bp, Artificial Sequence
  ENSG00000228482_9 (sequence is synthesized)
ttggcacagactcaaacctggaaacccagtgaggtttgcccatcactaatgatcacataataatatgttcccaggggaggggctgagagaggctattaaaataccgcagctctggtgctc

SEQ ID NO: 1015748 - DNA, 120 bp, Artificial Sequence
  ENSG00000228481_0 (sequence is synthesized)
tccaattctgaaatgataaatgacagtgcatttatgtataaatgacagtgtattcatctccccaaagctggtcacaagtgccctcactgctctggagtaaaacatgggctagaaacaagg

SEQ ID NO: 1015749 - DNA, 120 bp, Artificial Sequence
  ENSG00000228481_1 (sequence is synthesized)
aaacagcatcatgtttattcactggagaaaaagacaaacagttcaactgcctgcttcactttgccttcaagtttatcaagatgaggccgagaattctcataaactcctcaaggacaccaa

SEQ ID NO: 1015750 - DNA, 120 bp, Artificial Sequence
  ENSG00000228481_2 (sequence is synthesized)
aaggagttcctgtagactcactcagagtcctttccctcctctccctcaagcagtgcccacctcttttcaggaagcatcttctcttttccatttgactttcataaagaagctggagtttta

SEQ ID NO: 1015751 - DNA, 120 bp, Artificial Sequence
  ENSG00000267296_0 (sequence is synthesized)
cacggccgggagcccaggagtatcccgaggctgcacggggtaggggtggggggcggagggcgagtcttggtcttgagctgctggggcgcggattctctttcaaagccagaaccaggcctg

SEQ ID NO: 1015752 - DNA, 120 bp, Artificial Sequence
  ENSG00000267296_1 (sequence is synthesized)
tcccggacccgcgtcccggggaggctgcagcgcagagcagcggggctggggccggtggggggccgtttgggacgcgcggagaggtcctgagcgcggtggctctgcgtctcctagctctga

SEQ ID NO: 1015753 - DNA, 120 bp, Artificial Sequence
  ENSG00000267296_2 (sequence is synthesized)
tctccaggctacccctgtgattccgcgcagaggtacctctcggaggacgccggggtcccatgggcggcgccgcgcagggcgctaggaccccgcggggagcggaggcggcctcggcccggg

SEQ ID NO: 1015754 - DNA, 120 bp, Artificial Sequence
  ENSG00000267296_3 (sequence is synthesized)
agcctggaggacctggccggtcgatccgcccgggctggaaaactttctttataattacttctccaggtcggagcgcgcggcttgctaggcgcgcggggccggcgctgttacccggcgtgg

SEQ ID NO: 1015755 - DNA, 120 bp, Artificial Sequence
  ENSG00000267296_4 (sequence is synthesized)
agtcgccgattttttttcctgcgggaccgcggggccccccagactagcggagctggacgccggggcgagcacggggaggggcgcaccgagggaggagacaaacttaactctggggccggg

SEQ ID NO: 1015756 - DNA, 120 bp, Artificial Sequence
  ENSG00000267296_5 (sequence is synthesized)
attccgaggcgggggccgcagccctcgaggcccgaagccaccgcttcctcccccgcctccccattcaggtgggcgccaacggcgggagcgagggtgtccaggccgccgggctgccaggtc

SEQ ID NO: 1015757 - DNA, 120 bp, Artificial Sequence
  ENSG00000267296_6 (sequence is synthesized)
cgagcacgcacagggagaactctgcccagtggttcgccgggcgctgtagtccccgggatcctagggaccgaggcggccaggccctggggccccttgagtgcggcagctaatgctctcacc

SEQ ID NO: 1015758 - DNA, 120 bp, Artificial Sequence
  ENSG00000267296_7 (sequence is synthesized)
gcggcgggggaaggagcttgccaccgagacccccagccacgtgcgtccctcgcattctttaccggggccggggtggcggctacggaccgtcagctgggcccagatggagtcttgggagcc

SEQ ID NO: 1015759 - DNA, 120 bp, Artificial Sequence
  ENSG00000267296_8 (sequence is synthesized)
ctcaagtgtctcctgtccttgcccgcgccgcccctcgccactggcgctgaggcctgacgccgcctgcgtcccggctagaggcgcgcttgcctacaggtgagggaagacccccttcaccga

SEQ ID NO: 1015760 - DNA, 120 bp, Artificial Sequence
  ENSG00000267296_9 (sequence is synthesized)
aggagccccggagggggcacagctaaaaacaccgctggagagccccgagcttccacgacgatcgcagtaaagaagcagtttcatctgggcaacgcacactgcgctttaatcaagttccta

SEQ ID NO: 1015761 - DNA, 120 bp, Artificial Sequence
  ENSG00000267296_10 (sequence is synthesized)
ttcaacatagtcccagtgattaatagcccaactgcttcgttttcggtccagagctcataaacaagatatttttagcttgacgcttttggacgggagggagtaaaaaccagatacgttaaa

SEQ ID NO: 1015762 - DNA, 120 bp, Artificial Sequence
  ENSG00000267296_11 (sequence is synthesized)
taaatatcccgatgtgagccggagagctgcttgctgagccaaatgcaggacccattcatatagcattcacctgtggagggagacctggacggaaatcaaaaagcaccaagagcgatttgc

SEQ ID NO: 1015763 - DNA, 120 bp, Artificial Sequence
  ENSG00000267296_12 (sequence is synthesized)
gtttttttctgcggtgctaaaactaatggcttttcctacctaggaacaaagaaacgccactgtacatgcacggttcccggcctgtggagttgtgggaggaaggcgatgtctggccttttt

SEQ ID NO: 1015764 - DNA, 120 bp, Artificial Sequence
  ENSG00000267296_13 (sequence is synthesized)
tgcacagctgctgttgcctgcccagagatcgggaactctgccccgtaggactggaagaaacctcagtaatgggaataagactttgtccaatagggggctgatgaatgtgtgggggcgaca

SEQ ID NO: 1015765 - DNA, 120 bp, Artificial Sequence
  ENSG00000267296_14 (sequence is synthesized)
atggcaaggagtgggactcccggcccggggttcgccaaccccaggggccacaggtcctcctacaattgaaccagaattcacccacccgggcctgccctgtgcagggtgccgagagcccag

SEQ ID NO: 1015766 - DNA, 120 bp, Artificial Sequence
  ENSG00000267296_15 (sequence is synthesized)
ggatgcatgagagggtggctcctgcctctgggaactgggacagtgggagagacggataagttgtcacacagaggctgctgggaggaaggaggagacagaaggagtaggggatgggacttc

SEQ ID NO: 1015767 - DNA, 120 bp, Artificial Sequence
  ENSG00000267296_16 (sequence is synthesized)
attcattcatcaaatgcacacgaggcacaaatgggaatcaagggtggatgtgctgtgatgaagagaagtcctgccctgaacaaggtggcgctgtggaggaggcagagatcagatttgtct

SEQ ID NO: 1015768 - DNA, 120 bp, Artificial Sequence
  ENSG00000267296_17 (sequence is synthesized)
gcggaggtgttatggactgaactgtgtccctgccccaaattcctatgttgaaggcctaacccccatgtgactgtatttggagataaggcttttaggaagtcattaaagtgagatgatgtc

SEQ ID NO: 1015769 - DNA, 120 bp, Artificial Sequence
  ENSG00000239705_0 (sequence is synthesized)
tcccgccttcactcccggccctagggggtcggagtaggtccagcaggagtgaccccccggggctgtgggatctgaaactttttcttctctactgcttgttctcccttcctccatccctca

SEQ ID NO: 1015770 - DNA, 120 bp, Artificial Sequence
  ENSG00000239705_1 (sequence is synthesized)
ccccgaagcgggaagcagctttctcttcccagcttccatccagtctctgagtagaccagtcgcagcttagatgctgggatcgcctcagaacacatttctttgcccttcacggccactacc

SEQ ID NO: 1015771 - DNA, 120 bp, Artificial Sequence
  ENSG00000239705_2 (sequence is synthesized)
attggggtatgcgagtctcagggccgttcgttgctcacaggtcgagctggtctggactctgttcgaccacgaatcatgactccttcctgccagttatgtcccctccgcacccttgcccag

SEQ ID NO: 1015772 - DNA, 120 bp, Artificial Sequence
  ENSG00000239705_3 (sequence is synthesized)
ccattttaccaggcctctccacattgcgctgccccacggaccttatcaagcttgaagatctttaaaaagaaaagtaaaagtaatgcaagagaacaaaaagattgtcagtgaaagatatat

SEQ ID NO: 1015773 - DNA, 120 bp, Artificial Sequence
  ENSG00000239705_4 (sequence is synthesized)
aattgcattaagatgtggccctaatctttccacagtcaagcgtgtactactatttcacagcattttcctttccaaactgtgtgccaaataaatcggggtctccaaccccagagccgtgaa

SEQ ID NO: 1015774 - DNA, 120 bp, Artificial Sequence
  ENSG00000267291_0 (sequence is synthesized)
gccaaagcgcaccgtgtggaagagcaccgacttccccggccgcccggggctcacgccgatgcacacagcgggcagctcagagcctggcccggtggatgcagttcaagcccctcctctggc

SEQ ID NO: 1015775 - DNA, 120 bp, Artificial Sequence
  ENSG00000267291_1 (sequence is synthesized)
ctggccccgcccactctctgcacacccgtgaagctctctctcacccacacagcacgcccggcagcctttggtgtcctggatcttggtggaaaccatgttcttcctggagaataggatctc

SEQ ID NO: 1015776 - DNA, 120 bp, Artificial Sequence
  ENSG00000267291_2 (sequence is synthesized)
tgtgtccaggcggccgtgctgtggatccggagggggcagccattgaacaactttacgagaagggcacatccctgggcaggtcgccgcggggccaggcagcagatccggcaaagagagcag

SEQ ID NO: 1015777 - DNA, 120 bp, Artificial Sequence
  ENSG00000267291_3 (sequence is synthesized)
ggaacaggaaggggcagtggttacgactttggagcgagagtgccaaggttcaaatcctgcctcttaccttggtgcaatttcccataatctatccctgtaatacactttttcatacattga

SEQ ID NO: 1015778 - DNA, 120 bp, Artificial Sequence; identical to SEQ ID NO: 888835
  ENSG00000197665_0 (sequence is synthesized)

SEQ ID NO: 1015779 - DNA, 120 bp, Artificial Sequence; identical to SEQ ID NO: 888836
  ENSG00000197665_1 (sequence is synthesized)

SEQ ID NO: 1015780 - DNA, 120 bp, Artificial Sequence; identical to SEQ ID NO: 888837
  ENSG00000197665_2 (sequence is synthesized)

SEQ ID NO: 1015781 - DNA, 120 bp, Artificial Sequence; identical to SEQ ID NO: 888838
  ENSG00000197665_3 (sequence is synthesized)

SEQ ID NO: 1015782 - DNA, 120 bp, Artificial Sequence; identical to SEQ ID NO: 888839
  ENSG00000197665_4 (sequence is synthesized)

SEQ ID NO: 1015783 - DNA, 120 bp, Artificial Sequence; identical to SEQ ID NO: 888840
  ENSG00000197665_5 (sequence is synthesized)

SEQ ID NO: 1015784 - DNA, 120 bp, Artificial Sequence; identical to SEQ ID NO: 888841
  ENSG00000197665_6 (sequence is synthesized)

SEQ ID NO: 1015785 - DNA, 120 bp, Artificial Sequence; identical to SEQ ID NO: 888842
  ENSG00000197665_7 (sequence is synthesized)

SEQ ID NO: 1015786 - DNA, 120 bp, Artificial Sequence; identical to SEQ ID NO: 888843
  ENSG00000197665_8 (sequence is synthesized)

SEQ ID NO: 1015787 - DNA, 120 bp, Artificial Sequence; identical to SEQ ID NO: 888844
  ENSG00000197665_9 (sequence is synthesized)

SEQ ID NO: 1015788 - DNA, 120 bp, Artificial Sequence; identical to SEQ ID NO: 888845
  ENSG00000197665_10 (sequence is synthesized)

SEQ ID NO: 1015789 - DNA, 120 bp, Artificial Sequence
  ENSG00000267298_0 (sequence is synthesized)
cagtgtgtctgactctccttgtttttaatgattttgacagttttgaggtgtacggactaggtgttctgtaaaatgtccctccatttggaattgtatgatgcttgcttatgactagacttg

SEQ ID NO: 1015790 - DNA, 120 bp, Artificial Sequence
  ENSG00000267298_1 (sequence is synthesized)
gattatgggcaggaactgacttgtaaagtttttttaattttaatgaaaaattttaaattgatacttggttcagttatcagacaacctttaaccctgtttggaacaacttggatatgtgga

SEQ ID NO: 1015791 - DNA, 120 bp, Artificial Sequence
  ENSG00000267298_2 (sequence is synthesized)
aaaatacacaatggatttcaaagacttcatacaaaatgaaggatataactgatctcattaataattttttttattgactacatgttgaaatgtatcttggatatattgaattaaatcgta

SEQ ID NO: 1015792 - DNA, 120 bp, Artificial Sequence
  ENSG00000267298_3 (sequence is synthesized)
catattattcaaattgattttaccgggcttctgggctagtaggaagtgtgaaataagtgtggctcacagatttttattggataacactgccctagataataacaatacattaattgagaa

SEQ ID NO: 1015793 - DNA, 120 bp, Artificial Sequence
  ENSG00000267299_0 (sequence is synthesized)
cacagggagaaggggagggggtgtccgaggcgacctgaacgcgaggatttggggcaaaaaggcacttcaaatgataatgatgctctaatttgcatgcattgttggaggagtcatccagtt

SEQ ID NO: 1015794 - DNA, 120 bp, Artificial Sequence
  ENSG00000267299_1 (sequence is synthesized)
ttatctggagctgcagctaccaggagcccccttctggtcttctccaagaactgcaccttggcttcatggccttaccttggcacctggaacatggactccttcagtatcttccagtacctg

SEQ ID NO: 1015795 - DNA, 120 bp, Artificial Sequence
  ENSG00000263986_0 (sequence is synthesized)
tttttcttcatttttattttcaaacttacagtaaacaaaacaatcacttaaattgtcaaaagaacagcaattttacacaatgaagagcatacacaccaagccaaaatacaatagcactca

SEQ ID NO: 1015796 - DNA, 120 bp, Artificial Sequence
  ENSG00000263986_1 (sequence is synthesized)
ggtctatatgttgcagtggtgctggcgctggagggaatgcccagggaggctgcagtgctcaccacgaagcccaggtccacggagggagccaaggtccacagagggccccggggccagagg

SEQ ID NO: 1015797 - DNA, 120 bp, Artificial Sequence
  ENSG00000263986_2 (sequence is synthesized)
tcacctgcctcaaagcactcccttcaggccattttaacactgctgtgaatgtgctggggtcaccaagggggccccttagtggtcagatgcactttgtcacaatgtacacctacatggggt

SEQ ID NO: 1015798 - DNA, 120 bp, Artificial Sequence
  ENSG00000263986_3 (sequence is synthesized)
gattactaggcaacgggaggtttcctgaatttcacagccagatggggagctaaaagaaattcctgaacccaacgcgtaaatattttgttctgacaaagtaaattcacaagaacacatcaa

SEQ ID NO: 1015799 - DNA, 120 bp, Artificial Sequence
  ENSG00000263982_0 (sequence is synthesized)
gcacatcttgtcaaatttcttatatgacagatcattaacatgaatcagagaaattcaacaacttagccaccgactactcaatattcccattgccttacatacacaaaaggaataagaaga

SEQ ID NO: 1015800 - DNA, 120 bp, Artificial Sequence
  ENSG00000263982_1 (sequence is synthesized)
gcctgtaatcccagcactttgagagactctgttttgttttgatttttaacagaacttaggtttgtgttctggacgttaagtgagagtgaccttcaattatgttccagaacggggcaccgc

SEQ ID NO: 1015801 - DNA, 120 bp, Artificial Sequence
  ENSG00000263982_2 (sequence is synthesized)
acggggcaccgcatgcagtgcgcgtgccggaggagcaggaggaaagctagcaactgcttctcagtgttactatcagatagcaatactaaggcagagggagaagggaagataaccttttcc

SEQ ID NO: 1015802 - DNA, 120 bp, Artificial Sequence
  ENSG00000267743_0 (sequence is synthesized)
gcggagagagaggcaggtctagatgcagatggtctgtttcccctaacaacagcaacggcggcgaggagaaatcctggtctccgccagctcccggccagactcgtaatcaggccactaacg

SEQ ID NO: 1015803 - DNA, 120 bp, Artificial Sequence
  ENSG00000267743_1 (sequence is synthesized)
tcacaacacacatggagaaaaggaaaacaaccaatccttccccagaacggaacagctaagagccaacgctactgaaaaccatggggcaggcatctccaccgagtgcagggaagaggccag

SEQ ID NO: 1015804 - DNA, 120 bp, Artificial Sequence
  ENSG00000267743_2 (sequence is synthesized)
gagaagacccaggaaataaatttaaaaagggacagcctttgagctggtccctgaccgagaattccacataagagattccatttacctacttcaataacatggatcgtaaaactcttattc

SEQ ID NO: 1015805 - DNA, 120 bp, Artificial Sequence
  ENSG00000267743_3 (sequence is synthesized)
agatgcagatggtctgtttcccctaacaacagcaacggcggcgaggagaaatcctggtctccgccagctcccggccaggtaaccaacagcctggagtgggaggtgccgtgctggggaggc

SEQ ID NO: 1015806 - DNA, 120 bp, Artificial Sequence
  ENSG00000267743_4 (sequence is synthesized)
accgcgtggacagggctctgcagccgctcccgcccagactcgtaatcaggccactaacgacagcggggagcgtaaaagttctcttccctacccacctcgcgtgatgcggtgacacagaat

SEQ ID NO: 1015807 - DNA, 120 bp, Artificial Sequence
  ENSG00000267746_0 (sequence is synthesized)
taacagaggaaggcgagtcactcaccgtggtcttgacaggcacgtagagcacttgcttggcgccgccgcctcccccgcggacctcgtccggctggcccagctggaagcccttcgatttga

SEQ ID NO: 1015808 - DNA, 120 bp, Artificial Sequence
  ENSG00000267746_1 (sequence is synthesized)
cccagaatttaaatttggcgttgtccgtggagctcgactcggagccattgaggagctggacgatccgttcgtattttttacgggtcaccgtcttggtcttgcctgagtccccagctggaa

SEQ ID NO: 1015809 - DNA, 120 bp, Artificial Sequence
  ENSG00000267746_2 (sequence is synthesized)
ggcggctgcggccgctcctctttattctactctcacccgaggcccgcgcccgtcccggggagcggctctgccaggaaaacggcccgaccagtgcccggcgcctgggctgcgtccgagccc

SEQ ID NO: 1015810 - DNA, 120 bp, Artificial Sequence
  ENSG00000267746_3 (sequence is synthesized)
accttcttccctcgtcgtcgtctcccagactaaatcccggaaagggaaagcgggatgtttgcgcccaccgcgctgtagctggtcctgacacttgcaaaatggtcagtggctcctgctcgg

SEQ ID NO: 1015811 - DNA, 120 bp, Artificial Sequence
  ENSG00000267749_0 (sequence is synthesized)
gggcagctctgggagtcgatgacagcgtcccattgagattatgctgatggttgcatagctgtagaaatgaatggcaacccttagaaccatgtgcgcttgaagattagcgtgcccagtgtg

SEQ ID NO: 1015812 - DNA, 120 bp, Artificial Sequence
  ENSG00000267749_1 (sequence is synthesized)
catcgcagggtgtgtaactgcaccccagtgaagctgtgacaccaacagaaaagctcagcccgaaaaaggaggcgcagggctggaaggtgtgcagagcccggagaggtctcggactttgca

SEQ ID NO: 1015813 - DNA, 120 bp, Artificial Sequence
  ENSG00000267749_2 (sequence is synthesized)
tttccggtgccgacggagccgggccggaaggtgtgcagagtccggagaggtctcggactttgcatttccagtggacatggtgcagggccggaaggtgtgcagagcccggagaggctcaga

SEQ ID NO: 1015814 - DNA, 120 bp, Artificial Sequence
  ENSG00000267749_3 (sequence is synthesized)
ctttgcatttccggtgccgacggagccgggccggaaggtgtgcagagtccggagaggtctcggactttgcatttccagtggacatggtgcagggccggaaggtgtgcagagcccggagag

SEQ ID NO: 1015815 - DNA, 120 bp, Artificial Sequence
  ENSG00000267749_4 (sequence is synthesized)
gctcagactttgcatttccggtgccgacggagccgggccggaaggtgtgcagagtccggggaggtctcggactttgcatttccggtgcacatggtgcagggcgggaaggtgtgcagagcc

SEQ ID NO: 1015816 - DNA, 120 bp, Artificial Sequence
  ENSG00000267749_5 (sequence is synthesized)
cggagaggctcagactttgcatttccagtgcggacagtgcaaggccggaaggtgtgcagagcccggagaggtctccgactttgcatttctggtgcacatggtgcagggtgggaaggtgtg

SEQ ID NO: 1015817 - DNA, 120 bp, Artificial Sequence
  ENSG00000267749_6 (sequence is synthesized)
cagagcccggagagggctcagacttagcatttccggtgccaatggcgcaaggcggaaaggtgtgcagagcccggagagggctcagactttgcatttctggtgcacatggtgcagggcggg

SEQ ID NO: 1015818 - DNA, 120 bp, Artificial Sequence
  ENSG00000267749_7 (sequence is synthesized)
aaggtgtgtagagcccggagagggcgcagactttgcatttcgggtgccgacggcagggccagaaggtgtgcagagcccggagaggtctcctgcatttccggtgcacatggtgcagggcgg

SEQ ID NO: 1015819 - DNA, 76 bp, Artificial Sequence
  ENSG00000267749_8 (sequence is synthesized)
ctttgagaggccatcaacagagcgatatcctaaactctacagaaaattagacaggtatggtggcacgcacctgtag

SEQ ID NO: 1015820 - DNA, 120 bp, Artificial Sequence
  ENSG00000267749_9 (sequence is synthesized)
ctacagaaaattagacaggtatggtggcacgcacctgtagtccctgctagtggggggctgaagtggggaggatcgtttgagcctgagagtttgagaccagcccaggcaacatggtgaaac

SEQ ID NO: 1015821 - DNA, 89 bp, Artificial Sequence
  ENSG00000267749_10 (sequence is synthesized)
gccaggcgtggtggtgcacacctgaaatcccagctactgacggaggtcgaggctgcagtgggctatgattgcaccactgcactccaacc

SEQ ID NO: 1015822 - DNA, 120 bp, Artificial Sequence
  ENSG00000267749_11 (sequence is synthesized)
tgcactccaacctgggcaacagagccagaccctgtctaaaaaacagaaacaaataaccccattcatttcgacagggaaacgctagcagctgcggagctaatagtgtttgcaagctaggat

SEQ ID NO: 1015823 - DNA, 120 bp, Artificial Sequence
  ENSG00000267749_12 (sequence is synthesized)
gtttgcaagctaggatacggcaattctcagcaagaaacattgcgatttctgatctcccgtgggcccttttggaaagactgcccgtgatggggtcatcgttctccatgacctgtcccagaa

SEQ ID NO: 1015824 - DNA, 120 bp, Artificial Sequence
  ENSG00000267749_13 (sequence is synthesized)
acacgtgtcccatggtgggggtctgtgagaacagctccctggcaggcaggctgtgggctggtggggctgcccactaagccccgagggcctggatcggagctgctagatcctctttgggca

SEQ ID NO: 1015825 - DNA, 120 bp, Artificial Sequence
  ENSG00000267749_14 (sequence is synthesized)
ctggtggatgtaggcacctcctgccccagacgtaacaagtgactactgatgtagaacggcttctcccacacagttattatctgacagcgctgaagctcagaagtctaacgtagggccagg

SEQ ID NO: 1015826 - DNA, 120 bp, Artificial Sequence
  ENSG00000263674_0 (sequence is synthesized)
tttcaacccccaaccccacccccaggaagatgaaagcaaggcaaactcccgagccacaactacctcatctacaaagtgggctaccttcctctcgcagggcagcagctcaccagggcctgg

SEQ ID NO: 1015827 - DNA, 120 bp, Artificial Sequence
  ENSG00000263674_1 (sequence is synthesized)
atcctacccttcctcctccttcacagcctgcttaaggaggactgggatcattaggcagatccaaactgtggtttggagctttcgggaaaacaagccccatcaatgcaatttccttgttaa

SEQ ID NO: 1015828 - DNA, 120 bp, Artificial Sequence
  ENSG00000263677_0 (sequence is synthesized)
ttttgtatggaatgatcttctccaatcaattatttgaatctaagaggaagagaagatcatcagtggcaaatggcagtcacaggaaagcaacacccacagccggtttcacacgtgtggaga

SEQ ID NO: 1015829 - DNA, 120 bp, Artificial Sequence
  ENSG00000263677_1 (sequence is synthesized)
cagcatatcagagtgaaaaaggacccagagatgttggaatcagacaatcctggtttcaaatcggtttcattgttcatcctcatgtgatgtttggcaagaaataaaacatttctgcgttca

SEQ ID NO: 1015830 - DNA, 120 bp, Artificial Sequence
  ENSG00000263677_2 (sequence is synthesized)
cttgtgattgaaaacacaaagcttagaaaggtgcattctcttgcttctctgcctgcccggatatcaatgaacatcagctaaaggtggctgaagaaccaatttcatgcatctactgtacga

SEQ ID NO: 1015831 - DNA, 120 bp, Artificial Sequence
  ENSG00000263677_3 (sequence is synthesized)
ggaaatgaactgagccaagggcaaaaataaaattatacaaatgttattatagactagcctgcttctgtcctagtttaattcaaattttagtgctgcaggctttgcttctggcagtagcct

SEQ ID NO: 1015832 - DNA, 120 bp, Artificial Sequence
  ENSG00000263677_4 (sequence is synthesized)
tcctgaataaatcaacatttgcttacatctaaattattagggaagcatgtgactttgtttattgtataaattatacgcaaggttaaagcattaactgttgaactggctttgttcagtcac

SEQ ID NO: 1015833 - DNA, 120 bp, Artificial Sequence
  ENSG00000263677_5 (sequence is synthesized)
ctccccaactctcccccaaatcatctctcccctaaataggaaattaaaatctgaaactactaattgcttttagacaaaccaaataacaaagctgcattatgaacctgaggttacagatgg

SEQ ID NO: 1015834 - DNA, 120 bp, Artificial Sequence
  ENSG00000263677_6 (sequence is synthesized)
agagcactgttaaaggtgtggcaggagacagtcttggtgttgaggaaaaagaaaggcactctggcccaagaaattgttcacctgagctctgatggggtgtctgcacaaaggaaaatggtg

SEQ ID NO: 1015835 - DNA, 120 bp, Artificial Sequence
  ENSG00000263677_7 (sequence is synthesized)
atctggtaaataatcggttaagttgattaaggcagccaaccaaatgggataatttaatacaaaactaaagaaagccttttggctaggatttcagtaagcaaggaatttcaaattatattg

SEQ ID NO: 1015836 - DNA, 120 bp, Artificial Sequence
  ENSG00000263677_8 (sequence is synthesized)
aattatattgcaatgttggacccaaacatttttattgccattatctgctagaaagttagacataggctggaaaacacacttaggaacaatgatttgttttttgtttgtttgtttgtttgt

SEQ ID NO: 1015837 - DNA, 120 bp, Artificial Sequence
  ENSG00000263677_9 (sequence is synthesized)
tctgcacatcactgtgaaatgactcctgaaagaccatccatacttatttagaaaataagcctgggctttgataactagacaatttgactttctaagtgtttagacaagccaggtatcagg

SEQ ID NO: 1015838 - DNA, 120 bp, Artificial Sequence
  ENSG00000263677_10 (sequence is synthesized)
tgtgtcctgctatgagaacatccaatttaaataaacatcaagggttcagagtagacaaatcagaaggtaattgtttactttacaaaaggttctttttataagatcatccgcaatacgctt

SEQ ID NO: 1015839 - DNA, 120 bp, Artificial Sequence
  ENSG00000263677_11 (sequence is synthesized)
gtttttgttgacctttcccacagtataatttgcaaaattataattaaattcaatcttttccaaaaatatatgtttttctttttctttctcaagactttttgtagaaactctgcaggtcag

SEQ ID NO: 1015840 - DNA, 120 bp, Artificial Sequence
  ENSG00000263677_12 (sequence is synthesized)
ctggaagaagtgaggcataaatgcattattgcacataaagtgtaaataccaattctttaatttctaaatttttaggattttattttttcttaactccccttaaataaaacgtcagggaaa

SEQ ID NO: 1015841 - DNA, 120 bp, Artificial Sequence
  ENSG00000263677_13 (sequence is synthesized)
atttttagcataattgatttcctgaactaagggaataaattcatttcagaagttttgaccttctaaagtgctgttactttgcctaaaatggaagtatggaggaggcagaataaaaattgt

SEQ ID NO: 1015842 - DNA, 120 bp, Artificial Sequence
  ENSG00000263677_14 (sequence is synthesized)
aagacatttccaggtgattatgggggttgagaacgcttccatgtgtgtgctgtgtgtgttggcaatgtcattatttcaggaactgctatgaaaaaaccaagtttccctatgtttggatgt

SEQ ID NO: 1015843 - DNA, 120 bp, Artificial Sequence
  ENSG00000263677_15 (sequence is synthesized)
aaaacttcatctacttttcagaagctctccaaaattatttaccagcttgagcctgctccctcaaaaggagcctcagttcctaacaaaagtggtaagttgtaaaatgtaggtcctagtttt

SEQ ID NO: 1015844 - DNA, 120 bp, Artificial Sequence
  ENSG00000263677_16 (sequence is synthesized)
tacttaagtcaaaggttaatagtaaaaggggggttgattcctcactgtttcaagttaatgtttatttttcaccatcatttaaaggatttttcaggccgttatttcactgctgaaagcaga

SEQ ID NO: 1015845 - DNA, 120 bp, Artificial Sequence
  ENSG00000263677_17 (sequence is synthesized)
gtaagagaactcagatcatgccccagggcttgaataaaggaataaaaacagcacaacatttgcatctatttaactgtctcagttctaagagtcccctcacagtaagaggggggaaaccgt

SEQ ID NO: 1015846 - DNA, 120 bp, Artificial Sequence
  ENSG00000263677_18 (sequence is synthesized)
tggctgcctgcaacagccccagggcacaatcagacaaggatggagaaggcctgggagcagattttgttaccaagaataggacagaacaatgtttgcctccaaaacactagggctgctatt

SEQ ID NO: 1015847 - DNA, 120 bp, Artificial Sequence
  ENSG00000263677_19 (sequence is synthesized)
gagaatcagtttcccattcaaccacttaggattctttctctctgcgtcctaaatttggctttgagaccttggatgatgattctcctaatctggtcaatggaccacctgcaagaatcaccc

SEQ ID NO: 1015848 - DNA, 120 bp, Artificial Sequence
  ENSG00000229688_0 (sequence is synthesized)
atcatgaactgaggcctcagtgcaatagctcatgaggaaatgaattatttcaacagccagggttgctctgaagactaaagccctgggatcattcattttaaaagaaaagaacggtgactc

SEQ ID NO: 1015849 - DNA, 120 bp, Artificial Sequence
  ENSG00000229688_1 (sequence is synthesized)
atcatttcaagcttttcattctggaagttggaagtacaagatcagattgccagcatcatcagatttgatatcaaagtaatgtcaagtgcttctgacccactgcattaaacgtgtgctgag

SEQ ID NO: 1015850 - DNA, 120 bp, Artificial Sequence
  ENSG00000229688_2 (sequence is synthesized)
gctaactccagctcatctaatctctgcaacatctgctaccagcaccttctcttgcctccttttgtgaacatagttttttcttctggttagaaaatcagttcgaacttcttgagttttgtg

SEQ ID NO: 1015851 - DNA, 120 bp, Artificial Sequence
  ENSG00000229688_3 (sequence is synthesized)
ttttaaactcttctcaactgttccgatgattgatggatggcccagaggcgacctctttatctccagcaacatatttggctgttggcccggtagagaggtactccagaagcttgctggttc

SEQ ID NO: 1015852 - DNA, 120 bp, Artificial Sequence
  ENSG00000229688_4 (sequence is synthesized)
atcatgctctcatctttaaccacaactatttatctgactccttccatctccacagcactgtgtgagggatcagtgataagagacggtgaaagacatgcgcaaatggataaataataagca

SEQ ID NO: 1015853 - DNA, 120 bp, Artificial Sequence
  ENSG00000229688_5 (sequence is synthesized)
gatatgtagaatgacacaacaattgatgagtaatttaggagatccaataactaaaaaaaaaaagactggggacaagttcatggaaagagtaatcaactaagccttataacataaaattga

SEQ ID NO: 1015854 - DNA, 120 bp, Artificial Sequence
  ENSG00000229688_6 (sequence is synthesized)
tgttgagccacaacagcaataacattgtgacaaaaaacgtcggtgtagactgcagaagatcttcaatgacggatcaagctgtatagacttttttttaccctcatatactgaatagtcatt

SEQ ID NO: 1015855 - DNA, 120 bp, Artificial Sequence
  ENSG00000229688_7 (sequence is synthesized)
taaggtatacagtgccaacgtaagagagaaaggtggtctatcattttggagtttctttccacctctggagaattgctcaggaaatctggctaacataccaaataaatcaaatggatttaa

SEQ ID NO: 1015856 - DNA, 120 bp, Artificial Sequence
  ENSG00000229688_8 (sequence is synthesized)
aagaacagaggcaagcctccagccaggagctcatgaaatcatgaactgaggcctcagtgcaatagctcatgaggaaatgaattatttcaacagccagttatgcttcaagccatacttaag

SEQ ID NO: 1015857 - DNA, 64 bp, Artificial Sequence
  ENSG00000229688_9 (sequence is synthesized)
agtaaacactcagagaaaacgaggttgaaaaaccaaatgctggggaggagccaagatggccgag

SEQ ID NO: 1015858 - DNA, 120 bp, Artificial Sequence
  ENSG00000229688_10 (sequence is synthesized)
gagcgccagacagtgggcgcagttctggaagttggaagtacaagatcagattgccagcatcatcaggtactcatgagggccgtcttccagcttgcagactgccaacttctcattgtgtcc

SEQ ID NO: 1015859 - DNA, 120 bp, Artificial Sequence
  ENSG00000229688_11 (sequence is synthesized)
ctaaattcaaatatttacagaggcaataaaaaagcctaggattgagacacaatagcaatgaacagaagaactaacagttcaaaactgagggctaagcgcagtggctcatgaccgtaatcc

SEQ ID NO: 1015860 - DNA, 120 bp, Artificial Sequence
  ENSG00000229688_12 (sequence is synthesized)
tttccagacactctgtgcaaagaacagaggcaagcctccagccaggagctcatgaaatcatgaactgaggcctcagtgcaatagctcatgaggaaatgaattatttcaacagccagttct

SEQ ID NO: 1015861 - DNA, 120 bp, Artificial Sequence
  ENSG00000229688_13 (sequence is synthesized)
ggaagttggaagtacaagatcagattgccagcatcatcaggtactcatgagggccgtcttccagcttgcagactgccaacttctcattgtgtcctcaggtgagaaaaatttggctcgtgg

SEQ ID NO: 1015862 - DNA, 120 bp, Artificial Sequence
  ENSG00000229688_14 (sequence is synthesized)
tgatagtcttggatatcaccttcatcccctcggatgtttgtagataatcctccattatatttggaatgaatactgtagatatatgaggttggactatcctacgttttgcttgtttatggg

SEQ ID NO: 1015863 - DNA, 120 bp, Artificial Sequence
  ENSG00000229688_15 (sequence is synthesized)
ttttgcatcttgatgtcttcctgaagtattcttcatggggaatttccaaatcaaccacaatttgatatcaaagtaatgtcaagtgcttctgacccactgcattaaacgtgtgctgagcag

SEQ ID NO: 1015864 - DNA, 120 bp, Artificial Sequence
  ENSG00000229688_16 (sequence is synthesized)
agataacacgataatgtactgtggttataagctcaaagtggtatatttgattcagtgttcccagaaccaccaaaaccttggaaccattgtttagctaaagctactagaacaacagaataa

SEQ ID NO: 1015865 - DNA, 120 bp, Artificial Sequence
  ENSG00000229688_17 (sequence is synthesized)
cctactctgtggcattgtaaagtaaaattatactacacacaaatacttgacataaaatacatttccaaactcaattattagggataacataagcacaaaatgatgctttgcaaacatcat

SEQ ID NO: 1015866 - DNA, 120 bp, Artificial Sequence
  ENSG00000229688_18 (sequence is synthesized)
gtatcctataactggagaaaaaaaattaatgacatgaagtgaaatgactgagttctgaagctacatctcaatttaaatagcataagcaatttagtatacaacattcttcaaaatcaattg

SEQ ID NO: 1015867 - DNA, 120 bp, Artificial Sequence
  ENSG00000229688_19 (sequence is synthesized)
ttgaaggttaactataatctacatacaaaaacaactttgtcaactttttgtacggattttccttctaaacatatttactttatgtgtaaaatcaaaaaatttcctgagttaaaggctaag

SEQ ID NO: 1015868 - DNA, 120 bp, Artificial Sequence
  ENSG00000229688_20 (sequence is synthesized)
acttgactttatgaatacatgcccaaaaattggtggtggctggtttctgtttttattttgtaagcttagtataatggttgtccagaacttgtaagcaatgacctcatttctaagcggaca

SEQ ID NO: 1015869 - DNA, 120 bp, Artificial Sequence
  ENSG00000229688_21 (sequence is synthesized)
agatgcaaaagaccatttttacagattaaccatctggttcctttaggaagagtaatatttcaacaggttcctgtatttcaagaatataaataattaaaaagatgaagatatgtgaaatac

SEQ ID NO: 1015870 - DNA, 120 bp, Artificial Sequence
  ENSG00000229688_22 (sequence is synthesized)
acaaagaaaaaaatagagaaaatagcatttaaagcaaattatcctagctccctcaattaatattttaaaaccatgacaatcagttattaatataaattgttaattttatttaatacaaca

SEQ ID NO: 1015871 - DNA, 120 bp, Artificial Sequence
  ENSG00000229688_23 (sequence is synthesized)
tcaatataattcataccatcttcttcaactaggtggtctatcattttggagtttctttccacctctggagaattgctcaggaaatctggctaacataccaaataaatcaaatggatttaa

SEQ ID NO: 1015872 - DNA, 120 bp, Artificial Sequence
  ENSG00000229688_24 (sequence is synthesized)
gatgtttccagacactctgtgcaaagaacagaggcaagcctccagccaggagctcatgaaatcatgaactgaggcctcagtgcaatagctcatgaggaaatgaattatttcaacagccag

SEQ ID NO: 1015873 - DNA, 120 bp, Artificial Sequence
  ENSG00000259110_0 (sequence is synthesized)
gggtggcaggaggtggggctggaaggaagtggggcagatcacagggaagggggaagctggcccaggcatctggattttatcccaaagctcatgaatgttaaaaggcaggtccgagggtac

SEQ ID NO: 1015874 - DNA, 120 bp, Artificial Sequence
  ENSG00000259110_1 (sequence is synthesized)
tacaaatgcaaatccgagcaatgagcacactgcctgcaaccctcagggatcccgactcttacagtgaagacagagctcttcaatacaccctgtggaaaggctggccagtgccttgacccc

SEQ ID NO: 1015875 - DNA, 120 bp, Artificial Sequence
  ENSG00000259110_2 (sequence is synthesized)
attaaaaggctctgaaaaaagtataaagataggggaaagcagagcagaaggcttgggcagagctctgggactcggatggaaagcatccccacttggaggtgctcacaagcggaagcccct

SEQ ID NO: 1015876 - DNA, 120 bp, Artificial Sequence
  ENSG00000259111_0 (sequence is synthesized)
ctcccccaccaccttcggggaggcgttggctcgagacctccagaagtttcccaccggagacctaggctgcgcattgctccgctaggttgatgagcttttgctgggacaccccacagcagt

SEQ ID NO: 1015877 - DNA, 120 bp, Artificial Sequence
  ENSG00000259111_1 (sequence is synthesized)
acagcaggaaaacgttactgctaatgtcacagggcgtgtagaccctgttataaaattcctaatatcccagcgggagttcactactaattgcacaatgcgtgtagaccctttgatattatt

SEQ ID NO: 1015878 - DNA, 120 bp, Artificial Sequence
  ENSG00000259111_2 (sequence is synthesized)
cgtattgtcctgaagagatgttactactgacgtcccaatgcagcctttttcgacccacactgcaaaaggaatggaacagataagaaggtattgagattagaacgtgctgccgtgcggccg

SEQ ID NO: 1015879 - DNA, 120 bp, Artificial Sequence
  ENSG00000259113_0 (sequence is synthesized)
aggaggttcaaattgtaatttgtcaactgcaaaatatataacagattttcagcaatgggcatgattttgtccataactggaaaataaaaattattcagaaattacaaaccaagggaattc

SEQ ID NO: 1015880 - DNA, 120 bp, Artificial Sequence
  ENSG00000259113_1 (sequence is synthesized)
catcgaaaccagaaaagcaacccctattttaaaagtattctgatatgttgaagtatgtagccttagtctgaaattttattattctacaaaacatacaagaacacgcagcacaaccctcca

SEQ ID NO: 1015881 - DNA, 120 bp, Artificial Sequence
  ENSG00000259113_2 (sequence is synthesized)
accaaacacatacaatttatttctgaagctgtccgttcagctctggcattcctgtttgtagatctaatggtatgacgaatgattgcatggggctgtgaatataagcataatatatatact

SEQ ID NO: 1015882 - DNA, 120 bp, Artificial Sequence
  ENSG00000259113_3 (sequence is synthesized)
tactttaacaaatttcaatgagaaagttaaaaggtcaaactttcttatcatttattgataaatatgaatatctactagtaaattataggataaacataaaacaaatacaatgaacgctac

SEQ ID NO: 1015883 - DNA, 120 bp, Artificial Sequence
  ENSG00000259116_0 (sequence is synthesized)
gccgcgtgagggcggctggcgggacggcagacaggggtgtggcggcgacttgtcctccgaggagcctgcatttaaacccttcctgcctcactcttcctttttcctgtttgtcctgccgct

SEQ ID NO: 1015884 - DNA, 120 bp, Artificial Sequence
  ENSG00000259116_1 (sequence is synthesized)
ttaaactctggtttcgccttcctgttcattccattgcttattttaggtcgcaagtgctttatccactgctttgagtttttgactggaaaacccataatataatcagtcaaaacccacacg

SEQ ID NO: 1015885 - DNA, 120 bp, Artificial Sequence
  ENSG00000259116_2 (sequence is synthesized)
ttgaaacaccataaagtcacccagtctcggtcaccctggcacacacggggttgtgatcgtgacctagtcatgtttctgactccgctcaatggaatggaatgattttctttggctgtgctg

SEQ ID NO: 1015886 - DNA, 120 bp, Artificial Sequence
  ENSG00000259116_3 (sequence is synthesized)
aggttaatattggaggcataaaccctccgagaaggtagatgaaaaggagcgcgattcacttcctcctgtttaacaggaatgtgaggacaggtctggaaaataccctggcaccagttaaca

SEQ ID NO: 1015887 - DNA, 120 bp, Artificial Sequence
  ENSG00000259116_4 (sequence is synthesized)
ggtcatacgccccttttactacctatatgcccatcctgccacctctaagacataaagttccatagccagagatacaggactggtgaaatgaagatggcttatgatgaaacctgctgcctt

SEQ ID NO: 1015888 - DNA, 120 bp, Artificial Sequence
  ENSG00000259116_5 (sequence is synthesized)
cttaaaattgcaaccactgcaccttttctggaagccagatcaagtttcaaacttgcagcaccaatgaggcatttgaagatgattcgcttagcctcagtgaaagtctagagagcctagcat

SEQ ID NO: 1015889 - DNA, 120 bp, Artificial Sequence
  ENSG00000259116_6 (sequence is synthesized)
cacagtcccaattcagcaccccaatctctgacttacaattacctctggatctcaaggaagatttatgtatatatgtttccttttacctatttctatgtcttataggttgaatgtatgtat

SEQ ID NO: 1015890 - DNA, 120 bp, Artificial Sequence
  ENSG00000259116_7 (sequence is synthesized)
gcatatggatttgaggattacagagtattttaaaagtctaaaatgtaatgaaaggattcttacattttaacatcagaatatcagaatctattgaatactcataatgttcctaacactgga

SEQ ID NO: 1015891 - DNA, 120 bp, Artificial Sequence
  ENSG00000259116_8 (sequence is synthesized)
tagagcattgaaatggagggtggagaaggatggtgtacaatagagataactgtatatgagggattaaatttgaaaccaagaaacaatttgaggagtttaataaactatattgaggccggt

SEQ ID NO: 1015892 - DNA, 120 bp, Artificial Sequence
  ENSG00000259116_9 (sequence is synthesized)
agcagtgcggactgaggcgcggcacggggaggaggcgtggaaggggatcccgttaacaggtttaaaagggagtttcattcatataaatgatcaagattgtgactggcatatacagtggaa

SEQ ID NO: 1015893 - DNA, 120 bp, Artificial Sequence
  ENSG00000259118_0 (sequence is synthesized)
agttgagaaactgcaaggaacacaaaagactcaaacaacagagttcgagggtctacttgctaactctgggacctatggcaaaacccaaatgaaccaccaactggtctcactctgtcatcc

SEQ ID NO: 1015894 - DNA, 77 bp, Artificial Sequence
  ENSG00000259118_1 (sequence is synthesized)
aaacccaaatgaaccaccaactggtctcactctgtcatccaggctggagcggtgccatcacagctcactgcagcctg

SEQ ID NO: 1015895 - DNA, 120 bp, Artificial Sequence
  ENSG00000259118_2 (sequence is synthesized)
caagttccaagctagtagtggccagctactcagctttctcaggaaactcaccttctctccttggagtgatgggactgagtcccgcaaactgtgaaagctgtctttgatgtggtccctacg

SEQ ID NO: 1015896 - DNA, 120 bp, Artificial Sequence
  ENSG00000259118_3 (sequence is synthesized)
ctccttttgcttggtacaaggtgggtggggtacagcctggaagtacacgctgtcagcactgtccctggcgagtggactgggaaggatttctcgaggtgggcagttaggagtctccagaat

SEQ ID NO: 1015897 - DNA, 120 bp, Artificial Sequence
  ENSG00000259118_4 (sequence is synthesized)
taggctctgctaaagggggagaaaggggtgagcaacgcttgcgacaggaacatccaaagtagctcgatgcatccagctcatgcataagtaaaataaaagttattcagggggacaaagtgt

SEQ ID NO: 1015898 - DNA, 120 bp, Artificial Sequence
  ENSG00000259118_5 (sequence is synthesized)
gactctcctgtaacatcagtggtcccccccaacttgcttatgtgacagaagagccaccagtctgtggttaggaagtgactagagaaagctccagtggccccttcttaagatgtgatcacc

SEQ ID NO: 1015899 - DNA, 120 bp, Artificial Sequence
  ENSG00000259118_6 (sequence is synthesized)
acttactaagtgtcaggcatcctcacacaaccttctgatgttttccctattttataaatgaggaaaccgagacacagagctgtaatttacccaatgttatgtaaactaataggaagttga

SEQ ID NO: 1015900 - DNA, 120 bp, Artificial Sequence
  ENSG00000259118_7 (sequence is synthesized)
gtcaggatttgaatccaagcctccaggacactcatactttgggaacacaggggaagctatggaactaatttaaaaagatcaatagaattgcagggacactgttgtcatggaggggaaagt

SEQ ID NO: 1015901 - DNA, 120 bp, Artificial Sequence
  ENSG00000259118_8 (sequence is synthesized)
aggaaaaggactacgaaagtcacctgatttgcctacaaggacgtcaaatggaagaccctagtgaaggtggttttcttggaggagtgacagccgaagcccaatgacagggtctcactctgt

SEQ ID NO: 1015902 - DNA, 73 bp, Artificial Sequence
  ENSG00000259118_9 (sequence is synthesized)
gtctcactctgtcatccaggctggagcggtgccatcacagctcactgcagcctgcaggactacagagcaagag

SEQ ID NO: 1015903 - DNA, 120 bp, Artificial Sequence
  ENSG00000259118_10 (sequence is synthesized)
ctctgggacctatggcaaaacccaaatgaaccaccaactgtaatggtctattttcttgagctcagagcaactatgtgaactcagaaagaaattataggctttaaatgatccttaataccc

SEQ ID NO: 1015904 - DNA, 120 bp, Artificial Sequence
  ENSG00000259118_11 (sequence is synthesized)
tgcatttcagtgttacctacatacgccacctcagaggatagcatttctgtagtagccgtggtatgacacactgccaagattaataggcctatccaggggaagctcccaggacaatgacaa

SEQ ID NO: 1015905 - DNA, 120 bp, Artificial Sequence
  ENSG00000259119_0 (sequence is synthesized)
tttggaggttagcaagcctgggtccaatgccacctcaggcacccactatctgagggcaaaggctcctggcttttctggcctcagtttcctgagcaatagggagagttgtaatcactaccc

SEQ ID NO: 1015906 - DNA, 120 bp, Artificial Sequence
  ENSG00000259119_1 (sequence is synthesized)
ccttggcctttagggtgagtagagctgacacatacagagctccagcaaggtacccaggccctaggaagcactcagcaaacacaatcatcaccctgggaagatggcgagaagagagtgggc

SEQ ID NO: 1015907 - DNA, 120 bp, Artificial Sequence
  ENSG00000259119_2 (sequence is synthesized)
aatttgtgcaccgaaagaatagccagatctgtgggggcatttctccctgacatattgataccaagcccagccttgattttccaggggatgccccactccttattgcaaagtctctgttct

SEQ ID NO: 1015908 - DNA, 120 bp, Artificial Sequence
  ENSG00000259119_3 (sequence is synthesized)
gacctctggtatcccctcagggacccttcaggccatgagttcaaatgcctgggaagcccacctcacaggagcctcaagtcccatccgtcttgttcccaagtctggcaggatcctgacagc

SEQ ID NO: 1015909 - DNA, 120 bp, Artificial Sequence
  ENSG00000259119_4 (sequence is synthesized)
cccatgcatgtgcctgtcctcagacccctgcagagggctgggtgcagaccttggcaggagtaggctggcaggcagtctctttccttcccaggcagacgtgtgtgtagcaagtctgtttat

SEQ ID NO: 1015910 - DNA, 120 bp, Artificial Sequence
  ENSG00000259119_5 (sequence is synthesized)
caggcaacgccttgtagccagcggtggcggcttaacagtggcagaaacgcccgcattgcctcaccagctgctgggtactaagatgcgcccttggcctcagctggcagataagcacctgca

SEQ ID NO: 1015911 - DNA, 120 bp, Artificial Sequence
  ENSG00000259119_6 (sequence is synthesized)
ttggagagggaacccttgatcatgggctgataagtgcagggaagaaacaacaacaacaacaagaaaaagctgagcaacccgctgtggaaggctttttcatgtacgcatgggcgtgtttct

SEQ ID NO: 1015912 - DNA, 120 bp, Artificial Sequence
  ENSG00000259119_7 (sequence is synthesized)
ggtggtcacgcaatcatggaatgagagcatgtcagagctggaagggactctggggattgtctggttgaactctttaatcttccaggtgaggacagtgagggccacagagctgtaccgact

SEQ ID NO: 1015913 - DNA, 120 bp, Artificial Sequence
  ENSG00000259119_8 (sequence is synthesized)
tgttcaggatcatccagcaaagttttggtggagctggaactaaacccgagggtctcgagacccttgggcctgcgatctttccatcatatgggattgcttcacaggctgccacctgatcgc

SEQ ID NO: 1015914 - DNA, 120 bp, Artificial Sequence
  ENSG00000259119_9 (sequence is synthesized)
ttaggtgtagaccgcaggttgccctttggtgccttaacagtcctctttaatatcactaattggccctgtctgcctgcagagtcagatagatgccccctgtccctgcttctcccccaccac

SEQ ID NO: 1015915 - DNA, 120 bp, Artificial Sequence
  ENSG00000259119_10 (sequence is synthesized)
atgccagctattggggttgaccagttagctcaaggccacagggtctgatgctactgtttcaaacactgttatttcatattttgaaaaagcaaggttcagataagagaggcaacttgccta

SEQ ID NO: 1015916 - DNA, 120 bp, Artificial Sequence
  ENSG00000259119_11 (sequence is synthesized)
ggtgatacagctagagaaagtgaaagacctgggtctaaaattttcaggttcctcatttcagttctttccatacatagtgtatgaaacccaggtgtgggtgaaggtgggcagaagggcacc

SEQ ID NO: 1015917 - DNA, 120 bp, Artificial Sequence
  ENSG00000259119_12 (sequence is synthesized)
cggcctctgcaactttcccctgtgacctggttttggggaagagttgcacatgtttcctcaaggacagaaatggagtctggcaagactttgtattgaaaatcttgttctcagtaggggcct

SEQ ID NO: 1015918 - DNA, 120 bp, Artificial Sequence
  ENSG00000259119_13 (sequence is synthesized)
cctaagcaatgggtatagataaatgaatgaatcctttttttttgtttgtttttttgagacggagtcttactccattgcccaggctggggtgtgatgatccgatctcagctcactgcaacc

SEQ ID NO: 1015919 - DNA, 120 bp, Artificial Sequence
  ENSG00000280850_0 (sequence is synthesized)
aaagacaatttccttttcagcagcactggtatggactttggatgatcttgcctgcttcttcatttctctctttctcatgaaagcctttctcttctcggtcccagggagagagcacgagcg

SEQ ID NO: 1015920 - DNA, 120 bp, Artificial Sequence
  ENSG00000280850_1 (sequence is synthesized)
ttgaaacctgcaccagcagcccgggcgaggcggctccttgtgctagggcgccctctagagccggagagcggaagcggcgcgggcggcgggcggcaggcggcgcctctgcacccaagaagc

SEQ ID NO: 1015921 - DNA, 120 bp, Artificial Sequence
  ENSG00000280850_2 (sequence is synthesized)
tagattcatcctttgagttttaaaaccgagaaacttgatatccagagaagaaagacccttttgaggccaggattccatgggaggaagaccctctcctcagccccttaatacccaccctcc

SEQ ID NO: 1015922 - DNA, 120 bp, Artificial Sequence
  ENSG00000280850_3 (sequence is synthesized)
ccagccaacaggacccttggggaagaaaaccctctcccccacccctcatacctccccccagatcccccattccctcaggggaaggaagaccctctcccccaccccctcgcgagcccccct

SEQ ID NO: 1015923 - DNA, 120 bp, Artificial Sequence
  ENSG00000229356_0 (sequence is synthesized)
ccggtggtgcggctttagatggagctggtactaagacccaggacttctggggcttgaagaccctgggtctgcgggaagcccctgctgagcgtccctcgcctaccccgtggccagtggctt

SEQ ID NO: 1015924 - DNA, 120 bp, Artificial Sequence
  ENSG00000229356_1 (sequence is synthesized)
ttcagtgcagaaaccaccttatctatgtgacaaagctcgggccatcagtggcaaggtagattggcatcacgtacctttgatacaacaacctgagaaggacgtcacttctgcgatattcct

SEQ ID NO: 1015925 - DNA, 120 bp, Artificial Sequence
  ENSG00000229356_2 (sequence is synthesized)
gccaaaaatgcatctccgcattccgatcgtgagaacatcctgggcacacccaaactgagagacaccatacaaagtgactggtcagtgcactcaaaggcaaaaagctcatggaaggcaaca

SEQ ID NO: 1015926 - DNA, 120 bp, Artificial Sequence
  ENSG00000229356_3 (sequence is synthesized)
gagaaactgtagaagctgagtgagggcagcggtccagcttgcgctgttttgctgggcctcaggttttccttaggattccgtgtgtgttccccgcctggcccctccgcagcgactctgctg

SEQ ID NO: 1015927 - DNA, 120 bp, Artificial Sequence
  ENSG00000229356_4 (sequence is synthesized)
tcagtggctgccccagggtggagagtgacctacctccggcttctcctgtcccggcttctcctgtgccagccggtcaggcacactgtaagatccccacagcggggtgcccccaccctcacc

SEQ ID NO: 1015928 - DNA, 120 bp, Artificial Sequence
  ENSG00000229356_5 (sequence is synthesized)
tggaccctacaccatcaccatcacaccttctcgtgtgtcataaaccccacaacacattgttatgatttttgctttaaatcaattatcttttaaagggattaaaataatgtgagctgtgaa

SEQ ID NO: 1015929 - DNA, 120 bp, Artificial Sequence
  ENSG00000229352_0 (sequence is synthesized)
ggccagagaaactgttctcaagagtgtgaattaggtggcagctactattttatggtacctcgctatccactttgtaagagtctccgagagcagagggagcacatcccctgacacctcgca

SEQ ID NO: 1015930 - DNA, 120 bp, Artificial Sequence
  ENSG00000229352_1 (sequence is synthesized)
catgacagttgcttcatcagtgctggttgtgctcctgagaactcagcatggagagaggcctagtccccgctcccctgctcccaattgctctgtgactcattctcacggctcgcccttcag

SEQ ID NO: 1015931 - DNA, 120 bp, Artificial Sequence
  ENSG00000229352_2 (sequence is synthesized)
acctccaggactctgccactttcaagttgagtgttccaggtaggtcactgaacccctctgagtttcagtgtctttatctgtaaagataaaaactagacataacctttggctgactgggag

SEQ ID NO: 1015932 - DNA, 120 bp, Artificial Sequence
  ENSG00000229352_3 (sequence is synthesized)
agttgggattggataaggcaagtactgagtccaaggcctggctctgagtccctgccccagggacagcagctcctgtgattttggttcatcatggtaggtccctccttctctctctcttct

SEQ ID NO: 1015933 - DNA, 120 bp, Artificial Sequence
  ENSG00000229352_4 (sequence is synthesized)
tgggaactgccaccatcctttctgttctttaacctgcttctccgccaataaaggcagagtggaacactctcttcctggctcctatttcctcgctgcctccaaagacaagcctgtcacctc

SEQ ID NO: 1015934 - DNA, 120 bp, Artificial Sequence
  ENSG00000226798_0 (sequence is synthesized)
cagaaatgtcaattgcctacctgatggctgtgaaaaacagaaagaagaaacaaagacatatctgtatgtaaaggttgagcttgaaaaaagaaaactactcttgacgctgaagaacgcaat

SEQ ID NO: 1015935 - DNA, 120 bp, Artificial Sequence
  ENSG00000226798_1 (sequence is synthesized)
ccaacatgaaagaatgcttatttcaagttttacctgaatctacctagagctgaatttcttatctatactttactacagatattctgctttgtgcagatctacaatggatcattaaagtca

SEQ ID NO: 1015936 - DNA, 120 bp, Artificial Sequence
  ENSG00000226798_2 (sequence is synthesized)
agatctttcatgcaatgttacagctctttggaactcctcatgaagctcctcctctccatggtggaattttactctgaggagagataggctaaaatgtttcagtcccctatatgataagtc

SEQ ID NO: 1015937 - DNA, 120 bp, Artificial Sequence
  ENSG00000226798_3 (sequence is synthesized)
caaaatcaccgtttcacatatatgctgacctgatacattgagtcactgatacgtgtctttccaccttcagtatattttctttgactagctttattgcttccctgtgatgctgaattttga

SEQ ID NO: 1015938 - DNA, 120 bp, Artificial Sequence
  ENSG00000226798_4 (sequence is synthesized)
gcatggatgtgtgtgtccataacaaaaccatcctaggtaaactgaatttggttatttgaatttcataattactctttactccaagtgttgtggattcatgatgcaaatttacccattccc

SEQ ID NO: 1015939 - DNA, 120 bp, Artificial Sequence
  ENSG00000226791_0 (sequence is synthesized)
agagcaggagcatatggacagaggagaggcagaagccgggctctgcagggctgtggaagctggaggagtaggttgtcccagagtcccgtacccctggggatccaggaagttacactgagg

SEQ ID NO: 1015940 - DNA, 120 bp, Artificial Sequence
  ENSG00000226791_1 (sequence is synthesized)
tgaggccaactgctctgtgtgtggaagccagagaagaaagcagcacagaacagatgcaaaccaaggaggctggaagataagagcagagccatcaggacacgagcccctcgcggcatttca

SEQ ID NO: 1015941 - DNA, 120 bp, Artificial Sequence
  ENSG00000226791_2 (sequence is synthesized)
gagcttcctgtgtgcagcatggatctaaagctggtggatgcaggggggtgaacaagacaacatcttcacttcctgcatgctgatggcagaagtgagacatcagcgaagaaacatcacgat

SEQ ID NO: 1015942 - DNA, 120 bp, Artificial Sequence
  ENSG00000226791_3 (sequence is synthesized)
caccaaattacgatgaacaccatggaggaaacaaaggacactgtgacaccaaggaaggaagggaggttacttttcatagtggctgtaaatagaactgaaggctgaaaaacagctgttaaa

SEQ ID NO: 1015943 - DNA, 120 bp, Artificial Sequence
  ENSG00000226791_4 (sequence is synthesized)
gggagaggatagcagctacaggccagggcgagaggcctcagaggaaaccagtcctgctgactctttgaactcggacttccagcctccagaactgaaccactgtcttcctttatcccagga

SEQ ID NO: 1015944 - DNA, 120 bp, Artificial Sequence
  ENSG00000226791_5 (sequence is synthesized)
tgtctgcaaggaagaaaatgtcctttttctagcatttagaggccaccaacattgaataaccacactggggtagacacagcggcgaagagattcctgctgttcccatcacagcagccttgg

SEQ ID NO: 1015945 - DNA, 120 bp, Artificial Sequence
  ENSG00000226791_6 (sequence is synthesized)
agatgagaagacagatggatctgaccagaagtctggagaacttcgagaaaaaaggaggaggacacaaaaggaaataacaaaaaagatgcatccggagcaactatgaggatggtaaattgg

SEQ ID NO: 1015946 - DNA, 120 bp, Artificial Sequence
  ENSG00000226791_7 (sequence is synthesized)
tgtctaattctgaaaatcataattggtataaatgctatgtactgtggaaggagggatgaagggtagagggaataaaaaagaacatgaagttagaatccttggcatgaaagcctgccattt

SEQ ID NO: 1015947 - DNA, 120 bp, Artificial Sequence
  ENSG00000226791_8 (sequence is synthesized)
gtgttatctcactggtggcttgaaattggctgtgatgggagtatttacaccacagaaaccagcaaattcctcaaatcagacctttttattcccagagagtcagttgtgaaacgtttacca

SEQ ID NO: 1015948 - DNA, 120 bp, Artificial Sequence
  ENSG00000226791_9 (sequence is synthesized)
gcaccactggaggagtgagatcagagcactttcagtaagagagcagtggcacgttagcaaatggaagggagaaaaagacagcagcaaacgtggacaggtttgcgggctttgtggcaggga

SEQ ID NO: 1015949 - DNA, 120 bp, Artificial Sequence
  ENSG00000226791_10 (sequence is synthesized)
gtgggagggagatgaggcccaaggttcttagaattcacctggcctcatcaggaccttcaagatcttcctctcttctctgctaccaaaactgtgtgagggggaaaaaaagccagggtaaga

SEQ ID NO: 1015950 - DNA, 120 bp, Artificial Sequence
  ENSG00000226791_11 (sequence is synthesized)
gaaaaaaagccagggtaagattggaaattcagccacccacatccttgcagtgactaacagctgttaagagacattttatttgtgttttgttttgtgacagagtctccctctgtcacccag

SEQ ID NO: 1015951 - DNA, 79 bp, Artificial Sequence
  ENSG00000226791_12 (sequence is synthesized)
agctcactgcaacctctgcctcctggctttaagtggcccgccaccacaccctgttaatttttgtattttttagtagaga

SEQ ID NO: 1015952 - DNA, 120 bp, Artificial Sequence
  ENSG00000226791_13 (sequence is synthesized)
actgtgcccagctaagggacattttaataaaccccaaactgcaaacagccttaagctaaaaaatggtattctgagcatgtattctcagataggaaggtttagaagagcccagcgaagctg

SEQ ID NO: 1015953 - DNA, 120 bp, Artificial Sequence
  ENSG00000226791_14 (sequence is synthesized)
gcttagtgcccttcaagtcaccccaaaagagctagctgcctgactgaagccagagcctgccctccttttaatgtgtacagcatctcacggactgccctgtttacagcacctcttacggtt

SEQ ID NO: 1015954 - DNA, 120 bp, Artificial Sequence
  ENSG00000226791_15 (sequence is synthesized)
agatgtggccaccacaaggatgctctgctgtgttcatggacagcatagccatgggggggacacgggctctggggtcagatttgtttctgtttgtgtctcagatctgcgacttaatatgtg

SEQ ID NO: 1015955 - DNA, 120 bp, Artificial Sequence
  ENSG00000226791_16 (sequence is synthesized)
tgacctcagcgagttacttattcctcctgtgcctcagtttcctcatatgcaaagtgggataataatggcaactcccacatagggtttgctgaggattaaatgagtgagtacacgactgta

SEQ ID NO: 1015956 - DNA, 120 bp, Artificial Sequence
  ENSG00000226791_17 (sequence is synthesized)
gcacgatgtaggagtgtttaatggcattatcgtcatgattagctgtgtgggccttggcttcccatctgtagcatagagctaccaatacctacctatggcatattgttactttggggatta

SEQ ID NO: 1015957 - DNA, 120 bp, Artificial Sequence
  ENSG00000226791_18 (sequence is synthesized)
gttactttggggattaaacgagacgctgaatgacaagcacatggcatataggtgcaagtgtttgttcctttcctgcttctaccattttttttcccgagacagagtcttgctctgccgccc

SEQ ID NO: 1015958 - DNA, 60 bp, Artificial Sequence
  ENSG00000226791_19 (sequence is synthesized)
caaactatcgcgcccagcctgccccttctactattttaaggaacactggtgattcagtta

SEQ ID NO: 1015959 - DNA, 120 bp, Artificial Sequence
  ENSG00000226791_20 (sequence is synthesized)
gccccttctactattttaaggaacactggtgattcagttaacatctcatctggcaggaacattcattgataccaacatcctcaacatctaaccgagttgagtaaccagaataactacctc

SEQ ID NO: 1015960 - DNA, 120 bp, Artificial Sequence
  ENSG00000226791_21 (sequence is synthesized)
cagggtcatgctctgaggattccagctttatctgtagtgaaactttctctgacagcctgctgatttccccttcccagatacaaagtccttttgatcacttactatgagtcagacacgttc

SEQ ID NO: 1015961 - DNA, 120 bp, Artificial Sequence
  ENSG00000226791_22 (sequence is synthesized)
tgagctttatctcctttaatcctcaccataacaccatgaggtagatatcatcatccctgttttatagatgagaaaagttgagcgtaaaaaggttaaaaaaaactccaacactttgggagg

SEQ ID NO: 1015962 - DNA, 120 bp, Artificial Sequence
  ENSG00000226791_23 (sequence is synthesized)
gagaacacagtgcacagcatccgggagagactggccaggacttggtgttcagttacctccaacaccaaagacagttggacttgcattccctggggccagctcacaagcttcagagagctc

SEQ ID NO: 1015963 - DNA, 120 bp, Artificial Sequence
  ENSG00000226791_24 (sequence is synthesized)
acagcataatgtcttcttctgacacatgctcactgaacatccaccatgagccaggcactggacctctgttctgaacgccatgtgcctcccctggtctctggaagtccagtaggcacctgt

SEQ ID NO: 1015964 - DNA, 120 bp, Artificial Sequence
  ENSG00000226791_25 (sequence is synthesized)
acatctagacacctcccctgcacacaaatctgctcttcctatgacagtccctgtgtcattgtcataagagatacatttgattctccaccctggttctggcacgagaactctaaaagcctt

SEQ ID NO: 1015965 - DNA, 120 bp, Artificial Sequence
  ENSG00000226791_26 (sequence is synthesized)
cctcccatccccaatgccagcttccctgtttctctccccagaagcagccatggttcatcacatccatttccagaggtatcctaggagcaagctgtatgaggaaccggggaaagaggagca

SEQ ID NO: 1015966 - DNA, 120 bp, Artificial Sequence
  ENSG00000226791_27 (sequence is synthesized)
tgtgcaaaggccctggggtggaaagggcctgctgtgctctgagctgcagcagagcttctcaagccttaatttgcatttgaatcacccagggatcttgctgaaatcctgattcctgattca

SEQ ID NO: 1015967 - DNA, 120 bp, Artificial Sequence
  ENSG00000226791_28 (sequence is synthesized)
gtaggtctggagagggcttgagatttctaacaagctccaggtaatgctgaggtgcctgatccagatctcacttagagtattaaataaagtcctaggggatcgttagagatcaatccagcc

SEQ ID NO: 1015968 - DNA, 120 bp, Artificial Sequence
  ENSG00000226791_29 (sequence is synthesized)
cagccccacacttcaaaaattaggagatctccaaattaaaatctgggaatctgaccttttgtaacaaatcagaggatttgcaacaccaagagcatcatcacaggcaacgaccagcttgga

SEQ ID NO: 1015969 - DNA, 120 bp, Artificial Sequence
  ENSG00000226791_30 (sequence is synthesized)
tgggcagcggctgcccctgcaggtgggtcaggtgctcttccgttggacacagtctccaccactccctgtcgcttgctccttgctccccatcagcataactgtttgggccttatagcatat

SEQ ID NO: 1015970 - DNA, 120 bp, Artificial Sequence
  ENSG00000226791_31 (sequence is synthesized)
gcatttatcactccctactaggacgtccacaacatgaaatgagagaacgatttggtaagttcaacaaaaggcatattatgcagccaccatacattctttgtggaaagagaagtggcataa

SEQ ID NO: 1015971 - DNA, 120 bp, Artificial Sequence
  ENSG00000226791_32 (sequence is synthesized)
atcaattcataaattatctcaagttgtttcctctggagtcctgggctggctgttggatgaattcatctgtcttctagcagatggacaagaaaattgaattgtagtggcccatcaggtgtc

SEQ ID NO: 1015972 - DNA, 120 bp, Artificial Sequence
  ENSG00000226791_33 (sequence is synthesized)
gatcgcagcctctgggtccgtgtaggtgagccctcaccacagagagaatgagagctggctctaggacggggtgttgatctgtgcacagctgcccgggaaagggcctagagagaggagcta

SEQ ID NO: 1015973 - DNA, 120 bp, Artificial Sequence
  ENSG00000226791_34 (sequence is synthesized)
tgggtcctgcactgacatcagccttgaacatgaggctggcgtggcagcggcggcggggtggggggggacatgaataattcatatcgcaaccagattgatgctcagtgagcttcaatagga

SEQ ID NO: 1015974 - DNA, 120 bp, Artificial Sequence
  ENSG00000226791_35 (sequence is synthesized)
atgaattaccttgtgtgcatttcctgcctaaatgtcagtgtatcttttcacaagcgcctgggacgggtttatgaataggtgcattctctgatgcctctgctttaggcaaggcagtttcag

SEQ ID NO: 1015975 - DNA, 120 bp, Artificial Sequence
  ENSG00000226791_36 (sequence is synthesized)
aatcttggctgagtttccaacttctgacttgctatttacaaactgtaatcataagatttcaagtgacacatgactgaaaaaaaaaagcccttactcaggagaaatctggatggaaatgga

SEQ ID NO: 1015976 - DNA, 120 bp, Artificial Sequence
  ENSG00000226791_37 (sequence is synthesized)
acaatggttttgaatgtatctggatcatgaaatgaaagtcaggaggcttgagtgttctgctgagaaaaagtgatgggggaagaacataaacatgtataggacacttactgtcttgggaac

SEQ ID NO: 1015977 - DNA, 120 bp, Artificial Sequence
  ENSG00000226791_38 (sequence is synthesized)
tttatgggtgttctcattgttaacatcatttaacagatgagaaaaacagttctcagacattgctgctaacagaaattcaatgcaagccacatttgtaatttaagatttcctagtaaccac

SEQ ID NO: 1015978 - DNA, 120 bp, Artificial Sequence
  ENSG00000226791_39 (sequence is synthesized)
gaggatagcagctacaggccagggcgagaggcctcagaggaaaccagtcctgctgactctttgaactcggacttccagcctccagaactcatttagaggccaccaacattgaataaccac

SEQ ID NO: 1015979 - DNA, 120 bp, Artificial Sequence
  ENSG00000226797_0 (sequence is synthesized)
gtcttggggaagtgtcagtgatgactgctgccaaaaactgggttggatttgtatgaagcttcgggacagggtaatccagctgatccagtgcgatgactttgacatgtaatagaccaagga

SEQ ID NO: 1015980 - DNA, 120 bp, Artificial Sequence
  ENSG00000226797_1 (sequence is synthesized)
attcatttgtgtcagggtatggagccttcagcttggactgccagatgtagaagatccaatggagaattctgaggcccaaggtgattttagaactactacacggaaggagcctgcccagac

SEQ ID NO: 1015981 - DNA, 120 bp, Artificial Sequence
  ENSG00000226797_2 (sequence is synthesized)
gtttgggagaagttaaagcctctcaacagggaacactgcatttaaaggatcctgtaaactgcagcaccaggaaaaccatagtccaagtcttcattcttcagcttgcagtcacgtcaccac

SEQ ID NO: 1015982 - DNA, 120 bp, Artificial Sequence
  ENSG00000226797_3 (sequence is synthesized)
catatgctgtacactagagtatttatggcttgaatcacacatggagccagtcttatctcaggcaaccatgctgtctgcatcagtataagataaaactgtgctaatgacaggagggcatgt

SEQ ID NO: 1015983 - DNA, 120 bp, Artificial Sequence
  ENSG00000226797_4 (sequence is synthesized)
caagccatcagaccacgcctgatgctgacagcggtgaaatatacctcgtgggcgactcggtaacgtctgacaaccttcaaagaaaggagaaaacaaaaagttgtaggagaggaaaaaaaa

SEQ ID NO: 1015984 - DNA, 120 bp, Artificial Sequence
  ENSG00000259280_0 (sequence is synthesized)
ctcttgacttcggagtagatgcaggagacgggttgattctcgtggtctttttcctctcgaggaacctagcccaggaacatcccatggtttcatatcaaattgaagcaacaaagaagccct

SEQ ID NO: 1015985 - DNA, 120 bp, Artificial Sequence
  ENSG00000259280_1 (sequence is synthesized)
gtgtcaccccttctccaacccccattcccatctttggagacactcagggaggggacagggaccccggtgactccctagaaccagcgctcctagggcaaggcagaggtgggagacaacccg

SEQ ID NO: 1015986 - DNA, 120 bp, Artificial Sequence
  ENSG00000259280_2 (sequence is synthesized)
ggaaaacagaagcaaagaaaactgtttcaaaagtcttggaattgctactgttaaaaggctgcggttcatttctgatttcctcatcttttgctacaaaggaaaaagaaatccaatgatgtg

SEQ ID NO: 1015987 - DNA, 120 bp, Artificial Sequence
  ENSG00000259280_3 (sequence is synthesized)
tctacctttggtgagaagaaaacacgagcaacagcagtgtaggcagaaactgcaggctgttcagaatccaattctctggatattggcatgctacattcaatgtccagctacattaagtgt

SEQ ID NO: 1015988 - DNA, 120 bp, Artificial Sequence
  ENSG00000259280_4 (sequence is synthesized)
tgagaagaaaacacgagcaacagcagtgtaggtgtgtttgtttgtttttcttttttcctggaaaaatatttttaatattcaccaattagcgagttgaaagctgtggagatgtaaaagatg

SEQ ID NO: 1015989 - DNA, 120 bp, Artificial Sequence
  ENSG00000259280_5 (sequence is synthesized)
cgtcaatggagttttgtaggcatttgtaccagatagaaatggagagaaagagaattaaacacttgccaaggaacaatatatacactttcaggtaactccacctaatcctgtatttgagtg

SEQ ID NO: 1015990 - DNA, 120 bp, Artificial Sequence
  ENSG00000259280_6 (sequence is synthesized)
ctgatagggaggaggagggggtgctattttcccctcacaaaccccccaaagccgtattagacagaaagagggggtgagaactctatgactgagcattctgacaaaaatggaagcagcacc

SEQ ID NO: 1015991 - DNA, 120 bp, Artificial Sequence
  ENSG00000259280_7 (sequence is synthesized)
tctctgctcctagacccctaaggaaagacgcccccaaaatgtgcaaaagccgttatgtttcctttagagtcctgagttgggtggacctttcagagacatacacagtcattaatattttaa

SEQ ID NO: 1015992 - DNA, 120 bp, Artificial Sequence
  ENSG00000259280_8 (sequence is synthesized)
tcatcacactcaatctttacaccctgatctacggtatccaaaaagcagacattgattcgcggaaaaatcgagttctcgaaaatacagggatttgacgcggactcctgagacctgcgcagg

SEQ ID NO: 1015993 - DNA, 120 bp, Artificial Sequence
  ENSG00000259280_9 (sequence is synthesized)
cgttgcttaggttcaaaagttcgaaagtcattgtgcagagagggcaggagtgaattaaggccccggggaccgcggacgcctggccaggagaccgcctgaaatatgagccgaacctgtttt

SEQ ID NO: 1015994 - DNA, 120 bp, Artificial Sequence
  ENSG00000187229_0 (sequence is synthesized)
cccaaaccccaggatctgagggcaaaaacaagcctctatttaaaaaagacaagatgaagaaaaaaattcatactgaggagaaaggttcatctgtcaatgtgaacaaggagtttacatcac

SEQ ID NO: 1015995 - DNA, 120 bp, Artificial Sequence
  ENSG00000187229_1 (sequence is synthesized)
tagcattctactggttttcttggggaaagaagtctctgcagaaaagcccacaatccacatcccactcggagcaaaggcccttctcacccgaagagccctagtgattcatgtcatcgccat

SEQ ID NO: 1015996 - DNA, 120 bp, Artificial Sequence
  ENSG00000187229_2 (sequence is synthesized)
ctgtcccaccggacacccctgaaaactcacttctggctagcaaaacaaggcaccacttcttttgagatattttgactatgaaatgtttccgtgggacagctctaaaaaatctgcatttat

SEQ ID NO: 1015997 - DNA, 120 bp, Artificial Sequence
  ENSG00000187229_3 (sequence is synthesized)
tccacaatcacacaacaataaaatgaggacctgaccttctaggtatgaaggtaccacagcacaatcatcaacactgctaccaaatctcatctgctaatatgtaaaatgtctccttctcca

SEQ ID NO: 1015998 - DNA, 120 bp, Artificial Sequence
  ENSG00000187229_4 (sequence is synthesized)
gctgacaagcgatattctaccacaagccccactattgtgaaccacgataatataaaatgaaattaggaaaaagataagatgaccgggacgaagtaccttgcctacacacgccccctccct

SEQ ID NO: 1015999 - DNA, 120 bp, Artificial Sequence
  ENSG00000187229_5 (sequence is synthesized)
atcaccaccatcttctgcccttgactcttcaaccaacgaaggagagaaaagaaagaagagaatgaaacgtgcaatgcagactatagcatcacggacagcagcgttggttacaacatctta

SEQ ID NO: 1016000 - DNA, 120 bp, Artificial Sequence
  ENSG00000187229_6 (sequence is synthesized)
ttagggtcctttaaaaatacagaaagagaacaaatgaaggagaacctagaaccaccacttactgctttttcttatgacttttggctcaatgtatgttttacacaaaaagaaatgctacaa

SEQ ID NO: 1016001 - DNA, 120 bp, Artificial Sequence
  ENSG00000187229_7 (sequence is synthesized)
ggatttggtaccaggtaaacaatatataaattgttagggaaaaaaggaaaatctctttttttaaaaaatgagaggttctactttttagggtcataattgtataagttcaatgtttctagc

SEQ ID NO: 1016002 - DNA, 120 bp, Artificial Sequence
  ENSG00000187229_8 (sequence is synthesized)
gaaagactagaacagccacaggtgaaaaaggaaactgataaatggagggggtaatatagtagatcctgtgacgacatcctttatcctgcactaaaactgcaatgctgcagaatgccatcc

SEQ ID NO: 1016003 - DNA, 120 bp, Artificial Sequence
  ENSG00000187229_9 (sequence is synthesized)
ccctcttgaaatcctgactctttgagaatagcaaatggtggtattactcatgcatgacctttgccaaaaagtggctggcagatgggtttgcccagcaaagtggagatgtgatgagattat

SEQ ID NO: 1016004 - DNA, 120 bp, Artificial Sequence
  ENSG00000187229_10 (sequence is synthesized)
tctgagtccctatgcaagtagcccagttgagcctggacaagaatttcactggatcagaggctttttactttcacagaacgtagacaaatgtgccatgtcacaatggcttccactcacgtc

SEQ ID NO: 1016005 - DNA, 120 bp, Artificial Sequence
  ENSG00000187229_11 (sequence is synthesized)
ctggtttatcatcattcctccctccactcctcaacagaaaccaaaaaaaaggcaattatctttcttccagctacagatgttaatcctcaactaacatcccataccggcagtgtctgcaat

SEQ ID NO: 1016006 - DNA, 120 bp, Artificial Sequence
  ENSG00000187229_12 (sequence is synthesized)
gtagtagaaaggctttgaagcctgcaaatcatttaggaccaaaaggaggaaatccaagtccaattatgggaaaatgaaaaaaagaaaaagagcagaaaagcccttcaaatcagaccacac

SEQ ID NO: 1016007 - DNA, 120 bp, Artificial Sequence
  ENSG00000187229_13 (sequence is synthesized)
agaaggccaaaaccacagatgaaaggaactgagaagctatgggttttttttgctgccttttaaatacagacccctaggcaaaggcagcacttatttaacatatccacaggtattaaagtc

SEQ ID NO: 1016008 - DNA, 120 bp, Artificial Sequence
  ENSG00000187229_14 (sequence is synthesized)
tataacatataaggtgctagaaaaataatttcagtgattgttacttatgggtctagataattcttaatattgacaaacattggtatccatgtaaaagacaaaagtagaaaatatcactaa

SEQ ID NO: 1016009 - DNA, 120 bp, Artificial Sequence
  ENSG00000187229_15 (sequence is synthesized)
acttggaggtagaaaccagacttgaattctgcctctatgtatagcctttggaaaattactttttgtttcaaagcccaagtttcttcatctataaaaatatggattaaaaataccttcatt

SEQ ID NO: 1016010 - DNA, 120 bp, Artificial Sequence
  ENSG00000187229_16 (sequence is synthesized)
caaagagttgtactataacttttcaatgaaattcatgtatatgtctgaaaaacagtatctaataaatataaactgtgtatgattctgatctttaatacagattaagactcccaagtaaaa

SEQ ID NO: 1016011 - DNA, 120 bp, Artificial Sequence
  ENSG00000259283_0 (sequence is synthesized)
gcagtaagatgctgtctatgaaccgggaagcagaccctcaccagatgctgaacgtgctggcaccgtggacttctcagcctccagaaatgcagatgacaagacccaaggagatggaggagc

SEQ ID NO: 1016012 - DNA, 120 bp, Artificial Sequence
  ENSG00000259283_1 (sequence is synthesized)
cacacaactgaaagagatgaggttcctgaatcaccacatggagggaagcggccactgattagaaacatctgcctgtttcataaggataagtaaagagggaatggatgccacatggtgcag

SEQ ID NO: 1016013 - DNA, 120 bp, Artificial Sequence
  ENSG00000259283_2 (sequence is synthesized)
ctgcctaaaagctaagaaggggtcatggggtaacaggaaataccaaggaaaaataataattgatccagagaaaaggaaagaagaatggacttgaaaccctcctgaggctctaatgatggt

SEQ ID NO: 1016014 - DNA, 120 bp, Artificial Sequence
  ENSG00000259283_3 (sequence is synthesized)
aggtgaaggtaccacaacgtggatgccatctggcaggcacctgggtggctgacacgcaacatcaagtgcagtatcatgaaaattagccaagctgggccctggtacttcattgctacctgg

SEQ ID NO: 1016015 - DNA, 120 bp, Artificial Sequence
  ENSG00000259283_4 (sequence is synthesized)
tgtgacggtggacacccaacatccacaccctggctcccagtctccccacctttaaaatggatttgatctccagattgctacgtttgtgtccatatgtaatggacaaaagtggtgatggac

SEQ ID NO: 1016016 - DNA, 120 bp, Artificial Sequence
  ENSG00000259283_5 (sequence is synthesized)
taacaaattacgggatgaggatctgcaggctttatttactactaaaatgtttatttcatgtgttgattatctgcagcatcgccaccttgcagttagtcactggagtcctctcagaatagg

SEQ ID NO: 1016017 - DNA, 120 bp, Artificial Sequence
  ENSG00000282759_0 (sequence is synthesized)
caggcaagggtgtctcacttcaggtcatcttgtaaaaggcaaaggcagcctctttagccccgggctttcctctggacgtgcaaagtacttctaaccagccaccttctgaatcccggaggc

SEQ ID NO: 1016018 - DNA, 120 bp, Artificial Sequence
  ENSG00000282759_1 (sequence is synthesized)
gggaaggtgccacctggcatcacctgaaccccaagagaacagcttccgaccgcagggagagcgcatcccctcgtctgccatgtgtacacctcaccagggctgtaccactcacattctcca

SEQ ID NO: 1016019 - DNA, 120 bp, Artificial Sequence
  ENSG00000282759_2 (sequence is synthesized)
cagcctgaccttttgggcctctgctgtttctcagcccccacccctggcctttcttctgcttttctattgaaatcctgagcatttctcaaaattaagatgaaataaaatacccttcctgac

SEQ ID NO: 1016020 - DNA, 120 bp, Artificial Sequence
  ENSG00000260219_0 (sequence is synthesized)
tgggaggacaatggtgagaagagggaacctaagaattcctggactctgactgggcgtgagaaatggccggaagtagcttcgagtccgtcattcaagcagtagaggctctggagaaaaact

SEQ ID NO: 1016021 - DNA, 120 bp, Artificial Sequence
  ENSG00000260219_1 (sequence is synthesized)
ggagcgcatctgcttaaagggccgcccagggtcaggatggaggggcaaagtccgagcagggggtttcctcccatattggatcacgatgaaaactgcacagaaagtccgtgctcagtttct

SEQ ID NO: 1016022 - DNA, 120 bp, Artificial Sequence
  ENSG00000260219_2 (sequence is synthesized)
tccatggttacagaacacaggccccagaccaggaaggcattctgctaaagaaggggacccgaaacctcagctaccagcgccgatggttcatcctccgaggaaacctcctcttctacctag

SEQ ID NO: 1016023 - DNA, 120 bp, Artificial Sequence
  ENSG00000260219_3 (sequence is synthesized)
aacactagaccgaccatgcacccctgagcctcatcctgttagagaactgccaggtggaaccacaccttaaggctgcagaaccctatgcctttaccatcctgacccctggggtggagggca

SEQ ID NO: 1016024 - DNA, 120 bp, Artificial Sequence
  ENSG00000260219_4 (sequence is synthesized)
acccaggaagagctggagacttggctgtgggcactggctggcgcgagctggaggcggctggctgggctgctgtcccccctccccccccaccaaaacccaatactgggagctgtgccaggc

SEQ ID NO: 1016025 - DNA, 120 bp, Artificial Sequence
  ENSG00000260219_5 (sequence is synthesized)
aactggccaagaacccatctcatccccagaggacagtggctttctagccactgtgagtaccccctccagcttccaggagttgcatgagcactttgggaaggagatccgggtgctgcacgt

SEQ ID NO: 1016026 - DNA, 120 bp, Artificial Sequence
  ENSG00000260219_6 (sequence is synthesized)
ggtacatagagagctccaggcagccagtgacaatggagacagcagatcccaggcaaagatggagcaggagctcaaccagtgtctgatgagtgactgagagatggacccaaagctaagagg

SEQ ID NO: 1016027 - DNA, 120 bp, Artificial Sequence
  ENSG00000260219_7 (sequence is synthesized)
tacctacttgccaagacagcagactgcttcaacagagacccaggtcctggctctgtccctccctccctcgtccttaccccatccccccctcatcaaataacaaggcagaaaacaggccca

SEQ ID NO: 1016028 - DNA, 120 bp, Artificial Sequence
  ENSG00000260217_0 (sequence is synthesized)
gctgtgggacttccaggagtccgagtcccatgctctgcctctgaggctggtggctggggtaaagctgggcagggctgagccaggcagggctgtactcaggctccccaatggtaggtacaa

SEQ ID NO: 1016029 - DNA, 120 bp, Artificial Sequence
  ENSG00000260217_1 (sequence is synthesized)
gcaacggccataacatggatcagaaggcagtgctcaggccactggggcaatgcttcaaggaggagcataacaacttattttgtgccaaagagtcagcatgggaaaagagaagcagtttgt

SEQ ID NO: 1016030 - DNA, 120 bp, Artificial Sequence
  ENSG00000260217_2 (sequence is synthesized)
gttccacaacctagcagatggtagtgacacctgcctcactcccacacccttgacccagcaaggctccctcccataacccactcctggcagcaagctgaaacagtaagtcaagacacaagc

SEQ ID NO: 1016031 - DNA, 120 bp, Artificial Sequence
  ENSG00000260217_3 (sequence is synthesized)
aatctgtcttcagattacaaaactgtcctatgccacaaaactccctgccagggacaaaaacttggactcccaggccacacccctccgactccagtcctgcatcctgcagtgggactgccc

SEQ ID NO: 1016032 - DNA, 120 bp, Artificial Sequence
  ENSG00000260217_4 (sequence is synthesized)
aacgcttatgcccgtgtttcaaacccatgctacactcatctctcagatctggccatggggctcttcctcctcttaagactagattgcaaatctcattcttgagattctctaaaccgatga

SEQ ID NO: 1016033 - DNA, 120 bp, Artificial Sequence
  ENSG00000260217_5 (sequence is synthesized)
ctaatgcttgttctggatgacagatttccgcacagccccctatgagttaagatcaggaatgatctcctattagcatcaaggtctgggagcatgtgcaaagtacttcctgctgcctcttct

SEQ ID NO: 1016034 - DNA, 120 bp, Artificial Sequence
  ENSG00000260217_6 (sequence is synthesized)
cacagtctcttcactgatcccagaattgtatcagttggaagagtcaaggagctcctctgtggcctggattgcctgactcccaagtggaaatgtatactgtgaagatactcttcccctctc

SEQ ID NO: 1016035 - DNA, 120 bp, Artificial Sequence
  ENSG00000260217_7 (sequence is synthesized)
aggaacttggaactcacagttttccgtcagacccacagtgtggtctgctgcccaccatatttttcaaagtatccaaagtttgtttcatttttatgttgagcttcctattctttccttgat

SEQ ID NO: 1016036 - DNA, 120 bp, Artificial Sequence
  ENSG00000260217_8 (sequence is synthesized)
gcctccatcttggagaaaaaaaagctaagtatcgatatattttgttttcatttttatttacttcaaaattttaaatttttactgagacttctattttgacctctcacttatttagaaatg

SEQ ID NO: 1016037 - DNA, 120 bp, Artificial Sequence
  ENSG00000260217_9 (sequence is synthesized)
tgtcaattttcagatatttggagctatctcagttatctacatgttactgacttctatttgaacttcattgtagtatgagaacatactttgtattaattctattattttatatttttaaga

SEQ ID NO: 1016038 - DNA, 120 bp, Artificial Sequence
  ENSG00000260217_10 (sequence is synthesized)
tgtcttttatggcccaaatgtggtcaaccttgaagaacgttccatgtgatcatgaaaaaaatatatatatattctgccattgtggatgtactttgctaaacatgtcaactagataagtta

SEQ ID NO: 1016039 - DNA, 120 bp, Artificial Sequence
  ENSG00000260217_11 (sequence is synthesized)
gtgatagagatgttcagtttaaatatattttcattttctgcttgttgcatctgtcaattactaatgggtaagtgctgaaatctacaggtataatagtgcctctgttagcctatttctcct

SEQ ID NO: 1016040 - DNA, 120 bp, Artificial Sequence
  ENSG00000260217_12 (sequence is synthesized)
tcagttttatcaatattactgcatgtattttaatgttctcttgtatgaggcatacacatttaggattgttatgtctttttggaaaattaacccttttatcattagataaagctctgtagc

SEQ ID NO: 1016041 - DNA, 120 bp, Artificial Sequence
  ENSG00000260217_13 (sequence is synthesized)
cctaataatctctatctttcctgatgtctgctttgtctgaaattaatgtagctcctttgctttcttttgattagcactttgtgtgtttatctttttacttttaacccagatgtatcttta

SEQ ID NO: 1016042 - DNA, 120 bp, Artificial Sequence
  ENSG00000260217_14 (sequence is synthesized)
tatatttaaaatgggtttcttgtaagtgacatatagctaggtttggttttgttatcctcttcaacaatttctatctttaactggtatatttagaacattaacatctaaagagattattga

SEQ ID NO: 1016043 - DNA, 120 bp, Artificial Sequence
  ENSG00000260217_15 (sequence is synthesized)
gtgatatagttggataactatctactatgtttataactgtattctatttcttgtagttttttcctagtttattttttccttccaatttttctgaattctgtgattttaactgaccatgta

SEQ ID NO: 1016044 - DNA, 120 bp, Artificial Sequence
  ENSG00000260213_0 (sequence is synthesized)
gggcgcgccttggagggagaggactttaggtgacgccgccaggaggcgaaatttcacctgccagcagctctggaggtcaaaagaaatgagactgctgggctaagatcaaggtgtcagcag

SEQ ID NO: 1016045 - DNA, 120 bp, Artificial Sequence
  ENSG00000260213_1 (sequence is synthesized)
ggctgtattccttcccaaggctccaggggagaatctgttcacttgcctttcccagcttctagaggttgcctacattccttggcttgcggacccttcctccatctccagaatcagtaacga

SEQ ID NO: 1016046 - DNA, 120 bp, Artificial Sequence
  ENSG00000260213_2 (sequence is synthesized)
aagatccaaagccatatcctggctgagttggctgagttgagcaggacactgacaaggaggctgctgagcctgcaactcgactgttctgtttgaggagctctgtgctttatcatagaaatg

SEQ ID NO: 1016047 - DNA, 120 bp, Artificial Sequence
  ENSG00000260213_3 (sequence is synthesized)
aggagctctgtgctttatcatagaaatggatctgaggtggggtgttgctttgtcttgtgatcgcagctcacggcagccttggactcgtgggcacgagcaatcctcccacttcagcctccc

SEQ ID NO: 1016048 - DNA, 120 bp, Artificial Sequence
  ENSG00000260213_4 (sequence is synthesized)
ttgcgcctcagcatggaggaggacgtgaaggcgtacggagtctgggagtagtacaccacgtaggtaggtttgtactggtttggctttgtgtactgtgttccccaggcaattcgaatccag

SEQ ID NO: 1016049 - DNA, 120 bp, Artificial Sequence
  ENSG00000260213_5 (sequence is synthesized)
actgcattctcctcagtttctctgaagctgactgtcaccttattaaagaaaaaaaaaaaaggcttaatttcctaattaaaatttcactgtggcaccaactccaggtgcttattaggggtg

SEQ ID NO: 1016050 - DNA, 120 bp, Artificial Sequence
  ENSG00000260213_6 (sequence is synthesized)
aacaatgatgtccctatactcttgtatgcaggttgagacctggcagtcttttctgcttttcatgagtattttgagaatctttgggaaaacattttgtgattttaaaaaaaaaaaatcctt

SEQ ID NO: 1016051 - DNA, 120 bp, Artificial Sequence
  ENSG00000260213_7 (sequence is synthesized)
aaatccttttcagttctttttttttttttgagactaggtcttgctcagttgctcaggctggagtgctgtggcatgatcatagcctgctcacggcagcctcaacttcctgggctcaagcaa

SEQ ID NO: 1016052 - DNA, 120 bp, Artificial Sequence
  ENSG00000260213_8 (sequence is synthesized)
cagcctccctagtagctgagaccacaggcacgtgccatcatgcctggctaatttttttaaaaaagtttttttttgtagaggtgattgttttttcaataatttcttgggcttgtcctgaaa

SEQ ID NO: 1016053 - DNA, 120 bp, Artificial Sequence
  ENSG00000260213_9 (sequence is synthesized)
actgttcctccttacgtaagaatttatgaggtaaggcagccttacaaatgagatacttgttttataatgaagccttcttagcatctaacccagacctagcacacgctataaactttaaca

SEQ ID NO: 1016054 - DNA, 75 bp, Artificial Sequence
  ENSG00000260213_10 (sequence is synthesized)
tgagaccaacctggacaacatagtgaaactcagtatctaccggaaaaaaaaaaaaaagccaggcacggtgacatg

SEQ ID NO: 1016055 - DNA, 79 bp, Artificial Sequence
  ENSG00000260213_11 (sequence is synthesized)
agttttgagaccaacctggacaacatagtgaaactcagtatctaccggaaaaaaaaaaaaaagccaggcacggtgacat

SEQ ID NO: 1016056 - DNA, 87 bp, Artificial Sequence
  ENSG00000260213_12 (sequence is synthesized)
cacgtttcgaaaaagaagatttctatgtcataatgggcttaaagaagatttctatgtaataatgggcttgaaaatatactattccta

SEQ ID NO: 1016057 - DNA, 120 bp, Artificial Sequence
  ENSG00000260213_13 (sequence is synthesized)
atttctatgtaataatgggcttgaaaatatactattcctaatgctcttatgcatttagctcagaagctaaaaactcctctaaaagaatgttacatggcaagaccagaggtactaccttga

SEQ ID NO: 1016058 - DNA, 120 bp, Artificial Sequence
  ENSG00000260213_14 (sequence is synthesized)
atccacttcatggataaaatacaggcctttccaaacttttaaatatggttgccaattggtctggaatttaataggctgctcctggattatcagctcccctctgattcagcttccctttaa

SEQ ID NO: 1016059 - DNA, 120 bp, Artificial Sequence
  ENSG00000260213_15 (sequence is synthesized)
agctctgagcctagaaaggagggacttgagtgagatgcactcagcttgcccacgtctctgtttcctccctctgagatcttgttctaggaaaagtgggttgttacagtggcactagcaaat

SEQ ID NO: 1016060 - DNA, 120 bp, Artificial Sequence
  ENSG00000260213_16 (sequence is synthesized)
tctgctcattctttagcagcttttccaaattccctcagtgcaggagacaagaaagtctccccagtccagggtatggcggcacacagctgtctgactttcctgagtgagcatcatagagct

SEQ ID NO: 1016061 - DNA, 120 bp, Artificial Sequence
  ENSG00000260213_17 (sequence is synthesized)
tggacccagtcacatgctcagtgggcctctactgccttgaatggaagattgtcttattctgaatagcttctttgttttacattaaaaaagcaaaaacatctgtaaaatcaagggtgcttc

SEQ ID NO: 1016062 - DNA, 120 bp, Artificial Sequence
  ENSG00000260213_18 (sequence is synthesized)
ggtgcttcaggtttgcactgactattactggaactactagctacatgtggctatttaatgtaaaaaatcattgaagtttaaaaagattaaaaattcaggctgggtgcggtggctcacacc

SEQ ID NO: 1016063 - DNA, 87 bp, Artificial Sequence
  ENSG00000260213_19 (sequence is synthesized)
ctcaagcatcataggcgtgaaccactgtgcctggcctcatgatataacttcttaatgttagtttttccttaaagagggactgcttgc

SEQ ID NO: 1016064 - DNA, 120 bp, Artificial Sequence
  ENSG00000260213_20 (sequence is synthesized)
ccacattaatctggcacgacagggaatgctgtgccccacaggacccacatttgagccagctgttcctctgcctggagcctcttctcctagctccttacacaccctactccccacctcatt

SEQ ID NO: 1016065 - DNA, 120 bp, Artificial Sequence
  ENSG00000260213_21 (sequence is synthesized)
ctgctctctactcagagtagtccccgcccggatcaccctaccccaaacaccctgcgttagttcccagttcctgtcggaggactcatcactacctgatgtcacattatgtatgtatgtatg

SEQ ID NO: 1016066 - DNA, 120 bp, Artificial Sequence
  ENSG00000260213_22 (sequence is synthesized)
ctcaatcttcataaccctaaaaaacttactgagattggaaaaataactttcctactgtaagtctgaatctcttgaaccccttctcctaccttcacccactgaatccattgtttttatagt

SEQ ID NO: 1016067 - DNA, 120 bp, Artificial Sequence
  ENSG00000260213_23 (sequence is synthesized)
tctgtgcttgacaacgtggattttcgtaagaatgccactgtcttttttttttttttagacaatatctcagtctgttgctcgggctggagtgagtggcatgatcatggctcactgcagcct

SEQ ID NO: 1016068 - DNA, 120 bp, Artificial Sequence
  ENSG00000260213_24 (sequence is synthesized)
tgcagcctcagtctccctgggctttggagatcctcctaactcagcctcccaggtagctgggactataggcatgcggcaccacacctggctacttttttttttgagacagagtctcactct

SEQ ID NO: 1016069 - DNA, 120 bp, Artificial Sequence
  ENSG00000254531_0 (sequence is synthesized)
tcttccagctgccggaccagcgggcctgccgcctctacggaccagtccctgctcaggtgtcacttttgctggcaggccgagattagggcaggagagtgggcaaggcgtcgcggccaggag

SEQ ID NO: 1016070 - DNA, 120 bp, Artificial Sequence
  ENSG00000254531_1 (sequence is synthesized)
gagaagggctctaccacgccaccctcctttggcctccgaacgcggaccccgcacacacacacccgcgcctctttggcaagcgtgccttgtcggctgggttaagccgcagtgcgtgcacac

SEQ ID NO: 1016071 - DNA, 120 bp, Artificial Sequence
  ENSG00000254531_2 (sequence is synthesized)
cgagcggcggggcgctgtggaacgcgggagcggactagcggaggaggatgcggaccaagccccagcgacccagggcaactcggagctacctcgggcagccctgcgggtctccgaggagaa

SEQ ID NO: 1016072 - DNA, 120 bp, Artificial Sequence
  ENSG00000254531_3 (sequence is synthesized)
ggccgggacagttgacacccatcttccttccctgctccttccagtcattctacacccgcttggtgctgccagtgcgggcagggccttggagcccaaagcggatccccacacttgtcccta

SEQ ID NO: 1016073 - DNA, 120 bp, Artificial Sequence
  ENSG00000254531_4 (sequence is synthesized)
cggtcggaaggaaagtagaggagagaaagtcaggcgcggcagggctaagagcaatagtggcccaaatgttcctggcccgcctgctgcgccacagagtctgaaaagcgggtctccgtctac

SEQ ID NO: 1016074 - DNA, 120 bp, Artificial Sequence
  ENSG00000254531_5 (sequence is synthesized)
cagaaggtgacctccacacagcccctctccccgaccaactgcagcacccaaggactggcaacgtggttggagcttttggggggaattatgaagaaatctgaataaatttctcacccttca

SEQ ID NO: 1016075 - DNA, 120 bp, Artificial Sequence
  ENSG00000254530_0 (sequence is synthesized)
acaccaatatgttaacggtgtcttcaactgccatccttgattttggccatcttgacagtaattagcagaattcaagggtatcttgaattttccctctaagtttgattttcttgtggtttt

SEQ ID NO: 1016076 - DNA, 120 bp, Artificial Sequence
  ENSG00000254530_1 (sequence is synthesized)
attaaacagatacagatggaggcagtagcatggtaacacctcaaaatcaagcatccagcagctgaatccgaaaaacacaaggaacaagctgccggtgaagctgacttgactttcacttta

SEQ ID NO: 1016077 - DNA, 120 bp, Artificial Sequence
  ENSG00000254530_2 (sequence is synthesized)
ggctcagctcgggctacgagcatcttgcagtaagacaccaggcagggctggaatcatgcagttgcaacaaagaagataagctgtggaagctaggatttcagaaaatttagatttaaggac

SEQ ID NO: 1016078 - DNA, 120 bp, Artificial Sequence
  ENSG00000254530_3 (sequence is synthesized)
cttcagttcaagtgcacagaatttgtttaaaaaccctgaagatgctttcatgatctacacatctgtcattgctgttgcttatcaccgttcctgggaatctggcacttcatcagccgtctt

SEQ ID NO: 1016079 - DNA, 120 bp, Artificial Sequence
  ENSG00000254530_4 (sequence is synthesized)
tctttccatgtaatgaacactgttctccctgactcaggtgtcatcaccatgagaaggacataccaccccagaataaggagaggcaaatggattagacttgaaatgaacccagagcctgga

SEQ ID NO: 1016080 - DNA, 120 bp, Artificial Sequence
  ENSG00000254530_5 (sequence is synthesized)
ttcaagcacagccaaacccagcttggatctcataattcccagtcctgtgcagaagaaccgtgagacctacaatatatttccataccttctttcaagaaataaatgctcaattttgtaaga

SEQ ID NO: 1016081 - DNA, 120 bp, Artificial Sequence
  ENSG00000254530_6 (sequence is synthesized)
gtgcttctaaatacagactgggcccctggtgaacaagttggcttaagtgggtgtcccagactcaagctgcgctcagccttcatcacagttcacagagtcctaagccaagagtcagccttg

SEQ ID NO: 1016082 - DNA, 120 bp, Artificial Sequence
  ENSG00000254530_7 (sequence is synthesized)
agttgctgctagagaccacagatactctgaattccaactttaattggccttctgagaagacaaagagccacaggtccccaacaggtcctagctacttccttcagtcccaagacagataca

SEQ ID NO: 1016083 - DNA, 120 bp, Artificial Sequence
  ENSG00000254530_8 (sequence is synthesized)
gatggaggcagtagcatggtaacacctcaaaatcaagcatccagcagctgaatccgaaaaacacaaggaacaagttgcaacaaagaagataagctgtggaagctaggatttcagaaaatt

SEQ ID NO: 1016084 - DNA, 120 bp, Artificial Sequence
  ENSG00000254533_0 (sequence is synthesized)
ccctgcctcacagcgcccctcactgccccatctcccagggcttacagtccccaccccctgcatcgcccagcgcctgagaggctgggctccgggtacctcccaagagacaagaggtgtgtc

SEQ ID NO: 1016085 - DNA, 120 bp, Artificial Sequence
  ENSG00000254533_1 (sequence is synthesized)
ccacgccctgtgcagtgagaagccctggaactccaggaccctgcttttttaggcagaatgctatggatgggccactccaaagagaaacgcggctggggccttctcactggggttgcaggc

SEQ ID NO: 1016086 - DNA, 120 bp, Artificial Sequence
  ENSG00000254533_2 (sequence is synthesized)
ctgagtccttagaggtgaagctgtgtcctcattccactccccactgatacccaagccaacaaggagatgccctgacccactcatggccaaggacactcatggaaaaggccttcgtcctct

SEQ ID NO: 1016087 - DNA, 120 bp, Artificial Sequence
  ENSG00000254533_3 (sequence is synthesized)
cagtacagactgtgccaggcaggccaggaaaagccaagaaaatatggatggaacagataggttcctagcaaaatactaaagctgagccaaagtagaaaacttgaattaactaattgccaa

SEQ ID NO: 1016088 - DNA, 120 bp, Artificial Sequence
  ENSG00000254532_0 (sequence is synthesized)
actcagaaccccaaagcagtgttctaagattaaaaagaaaaaagaaaatcaggtggataaagagcctcaggtctaactgaattgtcaactaatgatggtctgagagtacctgtgctgaaa

SEQ ID NO: 1016089 - DNA, 120 bp, Artificial Sequence
  ENSG00000254532_1 (sequence is synthesized)
tggaattgtctttgagtggacacttcttagatgagacctattgtggccaatagctcctgaggaactgaagccttcagttcaaaacttgtgtgagaaaaatgaatcttgccaactactgga

SEQ ID NO: 1016090 - DNA, 120 bp, Artificial Sequence
  ENSG00000254532_2 (sequence is synthesized)
tccatccccagttgacccttgaatgtagccttgtcagagacccagagacaaagcatcctgctaatctgcactgggttctaggcccacagaaaccatgggataataactttgtgttgctat

SEQ ID NO: 1016091 - DNA, 120 bp, Artificial Sequence
  ENSG00000254532_3 (sequence is synthesized)
aagccactgaaaacaaacaaataaaatacttaagatgttcccctgtggaagggttccattgccagggatctgcacttcacaaccaaagggattaaagagaattgccttcttcagatttca

SEQ ID NO: 1016092 - DNA, 120 bp, Artificial Sequence
  ENSG00000254532_4 (sequence is synthesized)
tgtgaagtggcaaatgattcaaggcgaggcaagaggtgcttcagatgctgtcttttgcagtcctccgagagccttctccgctggtggtatacttacgaggaccagaggtgaggtgtcagc

SEQ ID NO: 1016093 - DNA, 120 bp, Artificial Sequence
  ENSG00000254532_5 (sequence is synthesized)
aaggaggcccacaggtggaaagtgctttgggccaatggtacacacctgctttattggatagacgcagagaagtatgcctggtcacagccagagcttactcggtcaagaaattatgagctc

SEQ ID NO: 1016094 - DNA, 120 bp, Artificial Sequence
  ENSG00000254539_0 (sequence is synthesized)
gatgggctcaaaccactgacttttcagtcaacatccgacagcactaacccagtgttccagagacactgcttgttaaacagtgaaagctgttgctcaattgtgtcatccgtaattgtcaaa

SEQ ID NO: 1016095 - DNA, 120 bp, Artificial Sequence
  ENSG00000254539_1 (sequence is synthesized)
tattgccatttagtagcacaaggaagtattctctgttgccaagctagagtacccataactcttctgttttgttgaacattcttccccaccacaaaccctctttagaagactgggggctcc

SEQ ID NO: 1016096 - DNA, 120 bp, Artificial Sequence
  ENSG00000254539_2 (sequence is synthesized)
taaagcattgaggccgagagtcccgtccttgtgcatgtttgggcattgacccagggccaagtcagtgggagactcctccacgcctacgccaggtccccaggtgacaactgcagtctctgg

SEQ ID NO: 1016097 - DNA, 120 bp, Artificial Sequence
  ENSG00000254539_3 (sequence is synthesized)
gctcacctcacccatcgtgaagcctggatttcctttttatcactggttttgatggatttgattaaggcgttccttggtgaagttttcttcatgtttcttgttcttagaataatcatattt

SEQ ID NO: 1016098 - DNA, 88 bp, Artificial Sequence
  ENSG00000254539_4 (sequence is synthesized)
tctctcttctccactacacgcccttcagggattccatttagccctatactggggggtttaaagttttgatgccgatggtgtttttatg

SEQ ID NO: 1016099 - DNA, 120 bp, Artificial Sequence
  ENSG00000254539_5 (sequence is synthesized)
ctggggggtttaaagttttgatgccgatggtgtttttatgttttcaagtcatttgttactgtgtgtttcatttatgttagtttcaacttctattccttctagttcaataatcttctcttc

SEQ ID NO: 1016100 - DNA, 120 bp, Artificial Sequence
  ENSG00000254539_6 (sequence is synthesized)
tgcaatgtttaatccactgccttcttccatttcagactgtaaatcatactttttatctacagaatttgatatttaaaaaatcttcaacctccccatttaattaaaatacaattatactaa

SEQ ID NO: 1016101 - DNA, 120 bp, Artificial Sequence
  ENSG00000254538_0 (sequence is synthesized)
gaccacaaagaaaagaggaactaaaggacaacacaagatgcctctacagagcaaagaagcctggcatactcctcaccgcatgacaaaagtcgtcactgatgggacaagtcaatctcaggc

SEQ ID NO: 1016102 - DNA, 120 bp, Artificial Sequence
  ENSG00000254538_1 (sequence is synthesized)
taacattcccaccagcaacatacgagggttccagtttctccacatcgtcctcaaaaccagttactgcccgtcttttgattctggccatcctagtaggtgagaagtggtatcttactgtgg

SEQ ID NO: 1016103 - DNA, 120 bp, Artificial Sequence
  ENSG00000254538_2 (sequence is synthesized)
ttttcatttgcatctccctgatcactaatgatgttgagtattaatgatgtgtttatcttctcagagtaactgtctattccaagtcctttgcccattttttagttgagcttttttttgctg

SEQ ID NO: 1016104 - DNA, 120 bp, Artificial Sequence
  ENSG00000254538_3 (sequence is synthesized)
agggttccagtttctccacatcgtcctcaaaaccagttactgcccgtcttttgattctggccatcctagtaggctatattctatggctacaagagacatgagcagattacagagctccac

SEQ ID NO: 1016105 - DNA, 120 bp, Artificial Sequence
  ENSG00000254538_4 (sequence is synthesized)
actactactaagtagcagcaacttttaagagaaaagaatagagttcctggtgcttgtggcaagaagcaggaggaccttgaagccaatctgggcttgagaaagtggttcattcccccaaat

SEQ ID NO: 1016106 - DNA, 120 bp, Artificial Sequence
  ENSG00000254538_5 (sequence is synthesized)
acttcactcaatgatctacctaaatgtctgccgtctgccctcctttcccaccaatttccagtcaggcagcaatagccaacagcaatattaatagtaaaattaatagcagtagtaccagca

SEQ ID NO: 1016107 - DNA, 83 bp, Artificial Sequence
  ENSG00000258649_0 (sequence is synthesized)
ctgacactgctcaatcaccttcaggagaagacaaggagatggagagactgtcaacctagaaccagtaatgaccagttccaact

SEQ ID NO: 1016108 - DNA, 120 bp, Artificial Sequence
  ENSG00000258649_1 (sequence is synthesized)
gagactgtcaacctagaaccagtaatgaccagttccaacttaattacagaaagggagaaaagatcaatcatttaagttgcttcatcgtctaaataaaagtgttttggctgttgaaacatg

SEQ ID NO: 1016109 - DNA, 120 bp, Artificial Sequence
  ENSG00000258647_0 (sequence is synthesized)
tcctttttttttttttttggactatgtctcagttgcatcaaagccccattaacattgccctttgggatcaaaaagtagtccacccgagaagaaagagtagagttttagagaactggggtg

SEQ ID NO: 1016110 - DNA, 120 bp, Artificial Sequence
  ENSG00000258647_1 (sequence is synthesized)
agaattctgggcagatggccaaggtgtgggctccaggctgagcttgctgacacatgacattgtatgtttcaggtactgggacaagttttcaatgtcaaaatctttgaagccaccagggcc

SEQ ID NO: 1016111 - DNA, 120 bp, Artificial Sequence
  ENSG00000258647_2 (sequence is synthesized)
ttttttgtttttgttttttggctaggtcttggcagtactccttcatatagtagtaggttcagaaactcaggctaaggaaagcatccagaaaacattgtctgcctctgcaacagtttgtgg

SEQ ID NO: 1016112 - DNA, 120 bp, Artificial Sequence
  ENSG00000258647_3 (sequence is synthesized)
atagcttgtaattgtagttctgatcttgtcaatctgtcttataactctaaatgtgtggtctcacctggctagatacagaaaatacctatcttcttatagaagcaggcaatcctcaacccc

SEQ ID NO: 1016113 - DNA, 120 bp, Artificial Sequence
  ENSG00000258647_4 (sequence is synthesized)
attaaaaaagtatggtttcttggacattccatctaataggaatgccagtttgcctcctgatatgttgccagtctggccatttcagcagtcactattcagcactagaggaggacttcagta

SEQ ID NO: 1016114 - DNA, 120 bp, Artificial Sequence
  ENSG00000258647_5 (sequence is synthesized)
actagaggaggacttcagtaaaagttcctttgtcagtaagtcttccacgcaacatatttgtttccaggtcctaatggcaattcctcaggatctggagaaaaaaaaaaaaaaaaaaaaaga

SEQ ID NO: 1016115 - DNA, 120 bp, Artificial Sequence
  ENSG00000258647_6 (sequence is synthesized)
tgagtttgtcccattcatctacataaagactatctatcagtttgaagtgtctttttgagaatcagaaaggggagaggatatagggggcaaaggatgtattctttgagatcctgctcttaa

SEQ ID NO: 1016116 - DNA, 120 bp, Artificial Sequence
  ENSG00000258647_7 (sequence is synthesized)
gcagtgattcttctctagcactccttatttctagaattttctagccatctctaacaaaagcaaagtgcaaagagcatttaatacaaaccaaaacatgaaatgatcttttgatagttcagt

SEQ ID NO: 1016117 - DNA, 120 bp, Artificial Sequence
  ENSG00000258647_8 (sequence is synthesized)
gttgtggctgtgacttggaatttttcactacatttaaaaaaaaaaaagccacatatgcccgggtagtctctgcatcaagtctgataccattgctccgacgttatgaggctgaagcagttg

SEQ ID NO: 1016118 - DNA, 120 bp, Artificial Sequence
  ENSG00000258647_9 (sequence is synthesized)
tggctgattgatgtcactcttctagccatctcctatttccacagagagaggccgggttaatccaactccagtctaacttcggaggcatcaaggattctaggcagcatctcccgtgtttct

SEQ ID NO: 1016119 - DNA, 120 bp, Artificial Sequence
  ENSG00000258647_10 (sequence is synthesized)
ttttccaagtgaattcctggaggaaaacaatgaggtccatgtgtctttgcatccccagggaccagctcagtaatgggcgtataagaacacgctgaaaaaaattgttttgtttttgaacga

SEQ ID NO: 1016120 - DNA, 120 bp, Artificial Sequence
  ENSG00000258647_11 (sequence is synthesized)
cagcgatttaagagtagtaaggtcctcgtaaatataggacattgtactcgtgtttttcttccgagcatacaaatatttgcaatgaggttgcaccgcagactccacagccattgtggcacc

SEQ ID NO: 1016121 - DNA, 120 bp, Artificial Sequence
  ENSG00000258647_12 (sequence is synthesized)
tggggctctgtgacttgggaggcagaggagatggaatgccggtgagaagaaggagattgtggtgtgaatgtgagggatgagggtgaattagcttcctacggcggctgttacaagtttacc

SEQ ID NO: 1016122 - DNA, 120 bp, Artificial Sequence
  ENSG00000258647_13 (sequence is synthesized)
acaagataaatgagttaaaacagtacagatttattatctcacagttctggaagacagaagttcaaactactggcaaagttcaaagtgttggcaaggctgtgctcctcaggaggctctaga

SEQ ID NO: 1016123 - DNA, 120 bp, Artificial Sequence
  ENSG00000258647_14 (sequence is synthesized)
ggagaacctttttcttgccttttcctgtttctaggggccaccggcatccttcggctcatggcctcttcctccatcttaaaagccagcttctgcaaattcgtctctaattctgacactact

SEQ ID NO: 1016124 - DNA, 120 bp, Artificial Sequence
  ENSG00000258647_15 (sequence is synthesized)
tctcttgcctccctctctcacttataggggtccctgtgatgacagtaagctcaccctgataatcgaggctaatctccccatcttagggttagcctattagcaacctaaattccaccggca

SEQ ID NO: 1016125 - DNA, 120 bp, Artificial Sequence
  ENSG00000258647_16 (sequence is synthesized)
tctggggaggagggcatgagcatctttgtcggggcattgttctgtccatcacagagaagcactcagagattccggactccagtatcctcattgtacacttgaggaagcttgggctcagag

SEQ ID NO: 1016126 - DNA, 120 bp, Artificial Sequence
  ENSG00000258647_17 (sequence is synthesized)
gctttatgttaattccaacagtttttgcaacaggaggaggagaatatctgtccaggagccctaatcaagactcagcaggaagctggtggcttcctttccttccttcttttgcttccttcc

SEQ ID NO: 1016127 - DNA, 120 bp, Artificial Sequence
  ENSG00000258647_18 (sequence is synthesized)
tgttcttcctgtgcttcctttcagttcttccttctacatatggggcccatcacattcccactgactcagatgctgaggggccagactgaagggacagtggccattgcatcaagtcagaga

SEQ ID NO: 1016128 - DNA, 120 bp, Artificial Sequence
  ENSG00000258647_19 (sequence is synthesized)
acggatctgacccatctagtagaagcttattgttttggcagaagcacaagctcttagaggtgcagctgcagggtgtgacctattggggacattgagctcagtgaccatgggccctgagag

SEQ ID NO: 1016129 - DNA, 120 bp, Artificial Sequence
  ENSG00000258647_20 (sequence is synthesized)
tctgaaatcctggaatttctcccaaaacgaagtccatgtagggaagccaaagtgtgagtcttacccggctggtttacaactgactgacatttgctgcctgggcagctgttgtgggtgcct

SEQ ID NO: 1016130 - DNA, 120 bp, Artificial Sequence
  ENSG00000258647_21 (sequence is synthesized)
ggaaaccctattggactaggactggccccggcaaaaaacaagtgttatagctgcccagtgtcctctgagtggatgctggtgattctggtatggagcccagatgtaaggcagcaggtggtc

SEQ ID NO: 1016131 - DNA, 120 bp, Artificial Sequence
  ENSG00000258647_22 (sequence is synthesized)
cagaaggcaccagaagaggtctcctgtcaaagtcagggccagagaagaaggcacagggaacctactgcacgagactttcacttgcaacgagcaacccatgatgaggagggaggattcctg

SEQ ID NO: 1016132 - DNA, 120 bp, Artificial Sequence
  ENSG00000258647_23 (sequence is synthesized)
ggggcattgagtcccccagacacaaggacccaagaccttcttgcttggaaagtgaattcctcagaattccgagatgatgccagtcttggaggaagatgacatgaggacccaaaaccttct

SEQ ID NO: 1016133 - DNA, 120 bp, Artificial Sequence
  ENSG00000258647_24 (sequence is synthesized)
tgcttggaaagtgaattcctgagaattccgagatgatgccagtcttggagaaagatgacatgaggacccaaaaccttcttgcttggaaagtgaattcctcaaaactccacaaagactcca

SEQ ID NO: 1016134 - DNA, 120 bp, Artificial Sequence
  ENSG00000258647_25 (sequence is synthesized)
gtcttggaggaagatgacatgaggacccaaaaccttcttgcttggaaagtgaattcctcagaactccacgaagactccagtcttggaggaagacgaggtgttgagagatagctgggatcc

SEQ ID NO: 1016135 - DNA, 120 bp, Artificial Sequence
  ENSG00000258647_26 (sequence is synthesized)
ctgaggaaggcagccccagtctccggtggagaattaagaggggcccaagcagatggttggtggtggaaacgtcacctcagtatagtactatggagtttcctttcacccccaacagccgac

SEQ ID NO: 1016136 - DNA, 120 bp, Artificial Sequence
  ENSG00000258647_27 (sequence is synthesized)
ggtttccaggggcgaagagtgaaaattgaagcaagcggtagacaaggaggcagtgcgcctgccacccccaaggaagagtcagttcagaagcacagcagctgctggaaacccaggaggttt

SEQ ID NO: 1016137 - DNA, 120 bp, Artificial Sequence
  ENSG00000258647_28 (sequence is synthesized)
ccagttcgttcctgctgggacctggcaagaactgcactgtcaaggctgcaagaggctcctgacggcttctgacatgtacagaatggaataagagaacctagcagaaatggaagcagaggc

SEQ ID NO: 1016138 - DNA, 120 bp, Artificial Sequence
  ENSG00000258647_29 (sequence is synthesized)
aagaggtctggaggccaggaaaatgtcaatggaaagcagctagcatgaagaccccacagtgttcctccctctagtagtctggtattatttggagctgagatgctcccaatatggttggga

SEQ ID NO: 1016139 - DNA, 120 bp, Artificial Sequence
  ENSG00000258647_30 (sequence is synthesized)
catttgtcccctccaaatctcatgtgagaatttgatcccccattttggggatggggtctaatgggaggagtttgggtcatgacgggggacccctcaagaatggctttgtgccctgctcac

SEQ ID NO: 1016140 - DNA, 120 bp, Artificial Sequence
  ENSG00000258647_31 (sequence is synthesized)
caggaatgaatgagctctcactctactagttcactggagagctggttttttaaagagcctggcgtctccccaactttctctcttgctcccccttctcactgtgtgatatacctgctcccc

SEQ ID NO: 1016141 - DNA, 120 bp, Artificial Sequence
  ENSG00000258647_32 (sequence is synthesized)
tttgccatccatcatgagtggaagcttcttgaagcctccacctaaagcagatgccgacactatgcttcctgcacagcctgccataccatgagccaataaacctgttttctttgtaaatta

SEQ ID NO: 1016142 - DNA, 120 bp, Artificial Sequence
  ENSG00000258647_33 (sequence is synthesized)
agaggctgtgagtctgagatcagggtgcctgcatgatcgggttctggtgagggctctcacagtttgcagactgctaacttcttgaagtgaagtcgtcattgttggacctattcttttgat

SEQ ID NO: 1016143 - DNA, 120 bp, Artificial Sequence
  ENSG00000258647_34 (sequence is synthesized)
aaattgaagcaaggtgtctactgtccaggtgagagccacatcctatggctgagggcctgggggcattggggaccaccaagaatgaatacttttccaattaagtgaagtcttttgcacaat

SEQ ID NO: 1016144 - DNA, 120 bp, Artificial Sequence
  ENSG00000258647_35 (sequence is synthesized)
attcctgaccaatagctaatgttctctgagagagtcagagcttcagcccgtgaaagggcgagggaacttgtaggaagatatatgtgagtacagatgtgaggagaacatgctgaagtagcc

SEQ ID NO: 1016145 - DNA, 120 bp, Artificial Sequence
  ENSG00000258647_36 (sequence is synthesized)
caggggctcagttgaagctgaggactggtggttctggtggctgtgctgggggtgggggtggcagtgtgagatggaagtgagtgagcaggttgggtgggaaagaggaagaaacctaggctg

SEQ ID NO: 1016146 - DNA, 120 bp, Artificial Sequence
  ENSG00000258647_37 (sequence is synthesized)
ttgtgtttccggagagaccccgtatcaaggaagaatggggggatttatcagccggggggatatttattttgtggaaatgacccctaagtgggtagggctaaaaccctgctggcccggggg

SEQ ID NO: 1016147 - DNA, 120 bp, Artificial Sequence
  ENSG00000258646_0 (sequence is synthesized)
ttatctttttcattcattgttttatcttcagtgcctagaagagtgctggatacattgtaggtgctcaataactatttcttgaagattgaatgtttatttaaataaagggatgaagtcaat

SEQ ID NO: 1016148 - DNA, 120 bp, Artificial Sequence
  ENSG00000258646_1 (sequence is synthesized)
caacttccaagaggaactaggaccccaaccaactactatgcgttgctctcagatggtgtgtaaggccacccttgctgatgaggctgcacgcgtaatgagctgagctgctgccttcagaag

SEQ ID NO: 1016149 - DNA, 120 bp, Artificial Sequence
  ENSG00000258646_2 (sequence is synthesized)
aaaagaaccccaagacatgagactatccaggctacagcaactccagcagtctccttacctggcagaaaggagcacactctgctacaatgacatggaatttcctctttcgggcagcctctt

SEQ ID NO: 1016150 - DNA, 120 bp, Artificial Sequence
  ENSG00000258646_3 (sequence is synthesized)
tgaggaaggcctctactgttcgggagaagccaatggtcatgatcacctcattggagtgaatgtgctccagagcctgggctgcaatgttctccattgtcccttctgtaagaacggttttgc

SEQ ID NO: 1016151 - DNA, 120 bp, Artificial Sequence
  ENSG00000258642_0 (sequence is synthesized)
agtaatacctggcaatctgtttaagatcattgacaggcctgagagttttccatacggcctgcaccctaacctctgggaagaaaatatccacaatgaaatttctacaagattagaggaagg

SEQ ID NO: 1016152 - DNA, 120 bp, Artificial Sequence
  ENSG00000258642_1 (sequence is synthesized)
agagaggcaacggggattccatttctactaggagtatcaacctctgagagggatatatccatctctgtggatgtcatctgctctgcagaaaaccctttcttggaactaccaggaaacatg

SEQ ID NO: 1016153 - DNA, 120 bp, Artificial Sequence
  ENSG00000258642_2 (sequence is synthesized)
aatctgatgtggaccctcctccttttcctccttttggacgtaactgtcttcattccagccctgcccttctcaacacgacatttagacaaccccaggtcgtgggtccctagaggacaccac

SEQ ID NO: 1016154 - DNA, 120 bp, Artificial Sequence
  ENSG00000258642_3 (sequence is synthesized)
gggtaaatgcgagcagatccacacattcattcatagaatctgaccaccatagcagatttctgcagaactccaccactgccctgtaccaacagcccctccatgtgcagctgccacaacagt

SEQ ID NO: 1016155 - DNA, 120 bp, Artificial Sequence
  ENSG00000258642_4 (sequence is synthesized)
actcatgatgtcaatgtcactgactgctttgccagcacagggacccgacctcttcactgccactaccaaaaataagaaggagtccaccaggcccatgcgagtgggctgcaagaagggggc

SEQ ID NO: 1016156 - DNA, 120 bp, Artificial Sequence
  ENSG00000258642_5 (sequence is synthesized)
atctgttcacctggatggctaggttcctcctgacaacggcacctgaatgacttgcaccctacgccttcaaatctgtgcagcactgtcaaggtcttctttgtaaatgcttcgtcctttgca

SEQ ID NO: 1016157 - DNA, 120 bp, Artificial Sequence
  ENSG00000256973_0 (sequence is synthesized)
gtttaaataggaaaataaaacataaattataatgactcccaactgcatatattttaatctgccagagaatcatttccaaatttgtaggaagttttttagttttagtaattcttaaaagac

SEQ ID NO: 1016158 - DNA, 120 bp, Artificial Sequence
  ENSG00000256973_1 (sequence is synthesized)
attcagataagattttctcaaatattttttaattatttagagcaaagatgatctgcaaattctaatgatataaagtgaatagatagtcaaaagaggtactgatcagtgtagaaatttatt

SEQ ID NO: 1016159 - DNA, 120 bp, Artificial Sequence
  ENSG00000256973_2 (sequence is synthesized)
cctgtatttatcttagtttgtttggtactactgtgacaaaacacttgagaccgtgtaatttataaagaacaggcatttattgactcagttctggaggttggaagtcccatatcaaggaac

SEQ ID NO: 1016160 - DNA, 120 bp, Artificial Sequence
  ENSG00000256973_3 (sequence is synthesized)
ttcttgctgtgttatcacagggcagaagggcaaaaagagagcaagaggagatcaaatctccctttttataatggcaccaatcccacccataagggtggagacctggcctaatcaggcctt

SEQ ID NO: 1016161 - DNA, 120 bp, Artificial Sequence
  ENSG00000256973_4 (sequence is synthesized)
aaatgtcctacttttttttttttttgagacaagagtctccctctgttgccaaggctggaatgctgaggcaggagaatcacttgaagctggcaggtggaggttgcagtgagctgataccgt

SEQ ID NO: 1016162 - DNA, 120 bp, Artificial Sequence
  ENSG00000256973_5 (sequence is synthesized)
gccactacactccagcctgggcaacaagacgaaaactccgtctcaaaaaaaaaaattgtgttggtggggtgtggtgagatacttgcattgtattttcaattagcagcaacattctatggt

SEQ ID NO: 1016163 - DNA, 120 bp, Artificial Sequence
  ENSG00000256972_0 (sequence is synthesized)
catgattcctcaaagacaatcttgaccaacaaccttacttagatcactaaagtacctcagatcagatttcaaatcagcctactcatcaggtccactctaccatgccagaccaggcatcca

SEQ ID NO: 1016164 - DNA, 120 bp, Artificial Sequence
  ENSG00000256972_1 (sequence is synthesized)
ccactgcaatcatgtgttccctcaatgactgaaaaacctgagcataatgactacctaagattcatatctgtacatacccaaaatgtttattaaatagaaataaagataaaataatgtgta

SEQ ID NO: 1016165 - DNA, 120 bp, Artificial Sequence
  ENSG00000256971_0 (sequence is synthesized)
agactcaggagcccagctggcctcacccagtggatcccgcaccagggccgcagataagaagtgactttcgccctctgccatgattgtgagacctcctcagccacgtggaacttctttgag

SEQ ID NO: 1016166 - DNA, 120 bp, Artificial Sequence
  ENSG00000256971_1 (sequence is synthesized)
tatgctcagcgcgtgccatcatggggccatgttcttcccctttgctcttggagaatagacaaagctacccagcccagccacagcctcataatcttgttctacctccctctccagcctcaa

SEQ ID NO: 1016167 - DNA, 120 bp, Artificial Sequence
  ENSG00000256971_2 (sequence is synthesized)
ctatttccaggctccagctcaagtcatacatcaggatggcttttctatgcagataacttgacacacagagcccaactttggtcctgaattctgagaaccacagttcagaatagacgctaa

SEQ ID NO: 1016168 - DNA, 120 bp, Artificial Sequence
  ENSG00000256971_3 (sequence is synthesized)
ccacatcttccatctgtcaccttctgactgttgatcctgtgagttcacaggccagggggatgctggtgaggacccttttcactgggactcccaggtgttcctgacagagacagacttgga

SEQ ID NO: 1016169 - DNA, 120 bp, Artificial Sequence
  ENSG00000256971_4 (sequence is synthesized)
gacaccagtagtctggtgagaaaggggcttaatgtcatgaagtattaaaaaatctaatatattcaaaaatttacgagagaatattttggaaggaaacttcaagaaatgtagaagagaggg

SEQ ID NO: 1016170 - DNA, 120 bp, Artificial Sequence
  ENSG00000256971_5 (sequence is synthesized)
agaagaaagaatctctgaaagtcacctctttgggtggaattttctcatttctatatttgtggtcaccattgtatactggtaacaagatttcttgccataaaaatttctcagatggtgaaa

SEQ ID NO: 1016171 - DNA, 120 bp, Artificial Sequence
  ENSG00000266916_0 (sequence is synthesized)
agtcggcagctcactatcctccactagtcccaggtttgaccgtttctcaaaccgtgccttcccatttatgctgcatccgcgccctgaatctgaaattggtcgtcctgccacgccgcctca

SEQ ID NO: 1016172 - DNA, 120 bp, Artificial Sequence
  ENSG00000266916_1 (sequence is synthesized)
ccgcggtataaggtcgtcccatcctgaatggccggtgcgcagactcaattgcgactttgaggctgtcagccgccacccggcaaccttccagtgaacaggattctgggtttctcaaagctg

SEQ ID NO: 1016173 - DNA, 120 bp, Artificial Sequence
  ENSG00000266916_2 (sequence is synthesized)
taattggagggccactccagaggtgttaaagctccagcacttcgagcctgcctcgtgggaaagtcttaggctgagtctgtaggtgtctgcagttaagaagccagcggtctgcatatgatt

SEQ ID NO: 1016174 - DNA, 120 bp, Artificial Sequence
  ENSG00000266916_3 (sequence is synthesized)
gctcaggggtggtggctgggtccaacagcattcactacaggcctgccttgaataccacctagcgcagtgctccgcatatcacaggtatgggaagctttggattcataagctcagtaaatt

SEQ ID NO: 1016175 - DNA, 120 bp, Artificial Sequence
  ENSG00000266916_4 (sequence is synthesized)
cactctggaggcactttacgcctgagggagcatccacaaataatttttcaggggctggaaacctaacaatttcacttcctagacaacttgctaaaagtcacctaaagacagtctggttac

SEQ ID NO: 1016176 - DNA, 120 bp, Artificial Sequence
  ENSG00000266916_5 (sequence is synthesized)
tgccaaagatatgctttcaaataagatttggataaagaagggaggtagatgccttttttcagcagtggagtgatgtctagaccagtagatgtacgcatctaagtgaattcatcaccagca

SEQ ID NO: 1016177 - DNA, 120 bp, Artificial Sequence
  ENSG00000266916_6 (sequence is synthesized)
acaatttccagaaacttcctgacctccagattgcagcttcattagtgtgagtttaaagccaactagatgccattctcagattccacgcatatggccaagggtccaggaaataagaagaaa

SEQ ID NO: 1016178 - DNA, 120 bp, Artificial Sequence
  ENSG00000266916_7 (sequence is synthesized)
caggttgaggggttggtgttatggggcatttacttgaattttctatgctataattgtctcatctttaaaacggtgataataataaaattgtcagttattaaataaattaacacagtgaaa

SEQ ID NO: 1016179 - DNA, 120 bp, Artificial Sequence
  ENSG00000266916_8 (sequence is synthesized)
cccagacatcaaagctgagctttctttgtctccggcagcctgggccactccagaggtgttaaagctccagcacttcgagcctgcctcgtgggaaagtcttaggctgagtctgggctggaa

SEQ ID NO: 1016180 - DNA, 120 bp, Artificial Sequence
  ENSG00000266916_9 (sequence is synthesized)
ccttgtcttatgaaaatggctttttaaaaaaatcctaattccaactggtcatcctagcaactgatacaataactgacctcaaaatgtttcccaatgattcctacctcctactattcacac

SEQ ID NO: 1016181 - DNA, 120 bp, Artificial Sequence
  ENSG00000266916_10 (sequence is synthesized)
tcttatgtagttccctcccacattgtaccagggttggactgtgagactaatagaatgcagtagcagtgatagatgtcactgctgagattaaatataataaatggcaccttgagttctgtc

SEQ ID NO: 1016182 - DNA, 120 bp, Artificial Sequence
  ENSG00000266913_0 (sequence is synthesized)
ggaaatggccctggtttccttttgtttccttttgtggtggtggcataaaagttccttcccaaataaattcatttaagttttttttttttttttaaaggaaaagcaagttgattgaaggaa

SEQ ID NO: 1016183 - DNA, 120 bp, Artificial Sequence
  ENSG00000266913_1 (sequence is synthesized)
aaatctgtggtccggggagatgttccaaatcctggaggtggagaggaatgaatgacgtttgtggcttgcagatcaactccccgcagcgggcgtgacgttgtcacagccaaaattgtcctc

SEQ ID NO: 1016184 - DNA, 120 bp, Artificial Sequence
  ENSG00000266913_2 (sequence is synthesized)
gggacactgctatgatcactgagcgattcaccaatattccagctctttctccctccaggtacaagagacgagaagtcttgccatgttgcccgggttggtctccaactcttgggctcaaga

SEQ ID NO: 1016185 - DNA, 120 bp, Artificial Sequence
  ENSG00000266913_3 (sequence is synthesized)
catcctcctgcttcaggctccctcagtgctgagatttcagcacacagaggaaaggccatgtgaggacacagcaagaaggcggccatctgcaagccaagaagagagtcctcaccaggaacc

SEQ ID NO: 1016186 - DNA, 120 bp, Artificial Sequence
  ENSG00000266913_4 (sequence is synthesized)
acgagcgggggtggggaagagaagagggcacagaggccagcggatgagagagacaccagggagcctgggatgcctgcccgaggctctggccacgcccatgccctgcctgtcccgctaagc

SEQ ID NO: 1016187 - DNA, 120 bp, Artificial Sequence
  ENSG00000266913_5 (sequence is synthesized)
acacagaggaaaggccatgtgaggacacagcaagaaggcggccatctgcaagccaagaagagagtcctcaccaggaaccaactctgctgacaccttgctgttggacttccagcctctata

SEQ ID NO: 1016188 - DNA, 120 bp, Artificial Sequence
  ENSG00000266913_6 (sequence is synthesized)
ctctgccttcaggtggggcaagactgctgatggctggaacaggagcttggcacctccaccctgacccagacacaagcctgtctgtcccactcaaatcgagctggccagagactacaactg

SEQ ID NO: 1016189 - DNA, 120 bp, Artificial Sequence
  ENSG00000266913_7 (sequence is synthesized)
actcaaatcgagctggccagagactacaactgtgttggttcccaagacatagaaaagccagaagaggtcgggcgcagtggctcacgcctgtcagcactttgggaagccgaggcaggcaga

SEQ ID NO: 1016190 - DNA, 120 bp, Artificial Sequence
  ENSG00000229043_0 (sequence is synthesized)
aggagcgcgaggccggcctgagggaggaggcctagcgacccatccggcgcctcccgccccgggcacccgcccgcggccgcgcatcctgcgggccccaggaggcctccatctcaaaacaac

SEQ ID NO: 1016191 - DNA, 120 bp, Artificial Sequence
  ENSG00000229043_1 (sequence is synthesized)
gtgtttttaggatctcatccactatcacagtttcagctttccccaaactggaatgtgtctttgcagacgcccatccttattaaagggcaaagacttctcatacacctaggatggatctta

SEQ ID NO: 1016192 - DNA, 120 bp, Artificial Sequence
  ENSG00000229043_2 (sequence is synthesized)
agccagttctacctgggttatgtttatctcaattccctggtggtattggtgtctgctgggttttgccagaatgaagacaccgtgttttcatttgtcagttgattcgtattttccaggaag

SEQ ID NO: 1016193 - DNA, 120 bp, Artificial Sequence
  ENSG00000229043_3 (sequence is synthesized)
acattctgagattacagcattgtcttagtcaaggtgctgcagaaggacagaactaataggatatatgtacatatgaaagaaagtttatgaagaactggctcacaccatcacaaggcaaag

SEQ ID NO: 1016194 - DNA, 120 bp, Artificial Sequence
  ENSG00000229043_4 (sequence is synthesized)
ggaggcctccatctcaaaacaacgtgtttttagagaactcaagggctgtgaaaagagcaggacctcaccagctgcacggcggtggtgactggctccatcttgctgtccctcccaatcaca

SEQ ID NO: 1016195 - DNA, 120 bp, Artificial Sequence
  ENSG00000229043_5 (sequence is synthesized)
caacatctccccttgaaggctctgcccaggcccggactcccacctttcaagatgtctggatcagtgcaggacctcctccttggccacatcgctctccttggactggttcaagtgattctc

SEQ ID NO: 1016196 - DNA, 120 bp, Artificial Sequence
  ENSG00000229043_6 (sequence is synthesized)
gtggccaccgagtgaacgggctgtgctaaggggaattgccaccttgggaaacctgtgtagttgcggcttttctgattaagtatcaataaaagtctgaccttgtgaaaaaagcaaacgtga

SEQ ID NO: 1016197 - DNA, 120 bp, Artificial Sequence
  ENSG00000229043_7 (sequence is synthesized)
gtggccctgcttatgtttcaccttgcgttgctcagtgatagttctgcaaagtcgcaggaaacctggaatcatctaattatcgtgagtgttggttccttatttaataatgtctagttgatt

SEQ ID NO: 1016198 - DNA, 120 bp, Artificial Sequence
  ENSG00000229043_8 (sequence is synthesized)
cattaacatggaattcatggccagtacctctgtcactcatgcctgactgaagttgatcagcacgtctttttctcccttaggcacatgacagccttcttgcaatcaagaaactacgtgtgg

SEQ ID NO: 1016199 - DNA, 120 bp, Artificial Sequence
  ENSG00000229043_9 (sequence is synthesized)
agccagcagtggctcagccggagtccaacagcctcaaacggaatccaacagttcaggcttcagtctgtggccaaatgcccagagaccccggaaagctactggtgttagtcccagagccgg

SEQ ID NO: 1016200 - DNA, 120 bp, Artificial Sequence
  ENSG00000229043_10 (sequence is synthesized)
aaggccaaagaacctggagtgtgatgtccaagggcaggaggaatggacagaagcatccagcatggggtaaagacgaaagccagaagactcagcaagctagcttacctactttcttctgcc

SEQ ID NO: 1016201 - DNA, 120 bp, Artificial Sequence
  ENSG00000229043_11 (sequence is synthesized)
tgccttgttctagccgcgctggcagccggttggagggtgcccacccccactgagggtggatcttcctctcctagtccactgactcaaatttcagtctctctgggagcaccatcacaccag

SEQ ID NO: 1016202 - DNA, 120 bp, Artificial Sequence
  ENSG00000229043_12 (sequence is synthesized)
aaacaataccagccatctagccacccttcagttcaccatcacaaccattgtcttattcatgaaacttctgcagacccaccttaacctccatcggtgacttctacctgaagccctctgatt

SEQ ID NO: 1016203 - DNA, 120 bp, Artificial Sequence
  ENSG00000229043_13 (sequence is synthesized)
gttgcccagtggtgctttttaaaataatttccatagtttcttctacacctttagttggcattctactgtaaaggagagattttattttcttactcatttatttgttagtttatagtcacc

SEQ ID NO: 1016204 - DNA, 120 bp, Artificial Sequence
  ENSG00000229043_14 (sequence is synthesized)
ggtcgcttctcgcaggcggcgcgcttgctgggtcacagtgaggcggctccgcgcaggcgcagccgggcgggcgaggagcggggaagctgactcagggctgcggccggggtcctgcggggt

SEQ ID NO: 1016205 - DNA, 120 bp, Artificial Sequence
  ENSG00000229043_15 (sequence is synthesized)
gatgcagagttctgtctcattcactgggaagtattctattgcagtcatgatttattttgatgttcacatcccagagttggtgagtgagcgccccttcacgctggctcccgagtgctgacg

SEQ ID NO: 1016206 - DNA, 120 bp, Artificial Sequence
  ENSG00000229043_16 (sequence is synthesized)
tgtccccgtccttctctgcacttttccttacctcctggcctcagatattccagggtcatttgttctctccctgctccaaccctgcagtcagccatctccctagggacgttggttccttta

SEQ ID NO: 1016207 - DNA, 120 bp, Artificial Sequence
  ENSG00000229043_17 (sequence is synthesized)
tggaaggtggcatttagaagccaggatttgggctgagcactgtggctcatgcttgtaatcccagcacttggggaggccgaagtgggcggatcgctggaggccaagagtctgagaccagcc

SEQ ID NO: 1016208 - DNA, 120 bp, Artificial Sequence
  ENSG00000229043_18 (sequence is synthesized)
agtgtccccagcacctagatcccccagttaaatccttttccatttcaccgcgctgccccccgccccctggacggttatgtggccgcgtggggttggctctgcccagggccgcggtcactg

SEQ ID NO: 1016209 - DNA, 120 bp, Artificial Sequence
  ENSG00000229043_19 (sequence is synthesized)
ggtcactgcacagaacgccctgcacgtaaggggctccgcctgggtaagaccccgcccagctgggcaggaggagggcgtgggcccaggacatggagaccagcctgggcaacatagcgagac

SEQ ID NO: 1016210 - DNA, 74 bp, Artificial Sequence
  ENSG00000229043_20 (sequence is synthesized)
cctgggcaacatagcgagaccccatctctgcagaaataaaatattagccggacggtgcacaggatggcctgagg

SEQ ID NO: 1016211 - DNA, 84 bp, Artificial Sequence
  ENSG00000229043_21 (sequence is synthesized)
tgagcaacaaggctgtttatttcacccgggtgcagcccggctgagtcggaaaagagagtcagcaaagggcgaacggtggagtta

SEQ ID NO: 1016212 - DNA, 73 bp, Artificial Sequence
  ENSG00000229043_22 (sequence is synthesized)
gttaggagcaatgttttgcaggcaggtggtggatctcataagagaggagattacaaagtacattgatcagtta

SEQ ID NO: 1016213 - DNA, 90 bp, Artificial Sequence
  ENSG00000229043_23 (sequence is synthesized)
ggcctgaacgaaaccctgtctctacaaaaataagaaatgaacgcagcatggtggcatgcacctgcagtcccagcctcttgggaggtggag

SEQ ID NO: 1016214 - DNA, 120 bp, Artificial Sequence
  ENSG00000229043_24 (sequence is synthesized)
gtggcatgcacctgcagtcccagcctcttgggaggtggaggcataagtcagctgtgaatgcgccctgcactagagcctgggcagcagagcagacccttcctcaaacccaaaaagcgtcgt

SEQ ID NO: 1016215 - DNA, 120 bp, Artificial Sequence
  ENSG00000229043_25 (sequence is synthesized)
gccaaccagaccagatggtcgcctaatcaatagagaccatgcccaatcaggtaaggacagacacaaccaggcatgctttttcttgttttgttttttgtttgttgttttgagatggagttt

SEQ ID NO: 1016216 - DNA, 85 bp, Artificial Sequence
  ENSG00000229043_26 (sequence is synthesized)
tacaggcgtgagccactgcgcccagcttgttgtttttctttagacagtgtcttcctctgtggctcaggctgaagggcactgggat

SEQ ID NO: 1016217 - DNA, 70 bp, Artificial Sequence
  ENSG00000229043_27 (sequence is synthesized)
ctccacctcccaggctcaagccatccttcttcctcaggctcctgagtagcgggagacggggttttgctat

SEQ ID NO: 1016218 - DNA, 120 bp, Artificial Sequence
  ENSG00000229043_28 (sequence is synthesized)
ttgaactcctgacctcaggtgatccctctgcctcagcttcccaaagcgctgggattacagaacatgagccactgtgcccggcttattgtacagtctttactctcggttttcaccagagaa

SEQ ID NO: 1016219 - DNA, 80 bp, Artificial Sequence
  ENSG00000229043_29 (sequence is synthesized)
gccttgattacaggtacacaccaccacgcacagctaattgttttgtattttaggaagagatggggtttcatcatgttagc

SEQ ID NO: 1016220 - DNA, 89 bp, Artificial Sequence
  ENSG00000229043_30 (sequence is synthesized)
agtaggattacaggtacacaccaccacgcacagctaattgttttgtattttaggaagagaggtgatccatccgccttggcctccccaag

SEQ ID NO: 1016221 - DNA, 120 bp, Artificial Sequence
  ENSG00000229043_31 (sequence is synthesized)
ccccttttctcttgatgtaagtggacattttaatccataatctgtaacatttatgtattaagtttactactatctttggtttgcagtgttgactcacctgtggagtggtctgagcctgaa

SEQ ID NO: 1016222 - DNA, 120 bp, Artificial Sequence
  ENSG00000229043_32 (sequence is synthesized)
cactggctcccggggaaatacagagtcaggttcctccgagccgctggccacagcatttttgttaagcagttcatcgttaaccttgttgtacatgtctctctctcaaggttccttatttaa

SEQ ID NO: 1016223 - DNA, 120 bp, Artificial Sequence
  ENSG00000228973_0 (sequence is synthesized)
ataagaggagctgttatgattcccatttggtcggcagaggacagtggagactcagggaggctcgttacctgccatggtcacagctggaaagcaggctgccgacaggtttgggcatcatta

SEQ ID NO: 1016224 - DNA, 120 bp, Artificial Sequence
  ENSG00000228973_1 (sequence is synthesized)
aacaaaatttttaactgaaagagatgaactgtcctcctaagtctcacatggctggggggagtaagatgatgctgacacccaccaactcatcctattagacataaacgcatgctttcatta

SEQ ID NO: 1016225 - DNA, 120 bp, Artificial Sequence
  ENSG00000228971_0 (sequence is synthesized)
tatggttcccataaaggttctgccaaaattcccgtggttctcacaagagctcctacctcctctgttcttttaatctcctgctgcgggtggcagacatgggagagacaggcaagctgcaaa

SEQ ID NO: 1016226 - DNA, 120 bp, Artificial Sequence
  ENSG00000228971_1 (sequence is synthesized)
gggaagtcgacgaaataaaattaaagccctacaatcgtgttcgtgtcaatgtagatggggtgcccccctcggtttgctcacagaggtgggtgtgagatcctacaggacggtctggaagac

SEQ ID NO: 1016227 - DNA, 120 bp, Artificial Sequence
  ENSG00000228971_2 (sequence is synthesized)
atcccatggaaggcactttattttgcccagaagctggaggaaaagcagaagggcgctgaacactgactaagaggagagagcgcacattacatggagaccatggtccccataccagaaaca

SEQ ID NO: 1016228 - DNA, 120 bp, Artificial Sequence
  ENSG00000228971_3 (sequence is synthesized)
tgagagtagagagaagcaaagccagcatcgtggagccagtccctttatccaggatcttggagggatacagtcttctgtagaaattaaataaagactgaattcttcaatgggtattttgag

SEQ ID NO: 1016229 - DNA, 120 bp, Artificial Sequence
  ENSG00000228971_4 (sequence is synthesized)
aagagagccactgtaagcttatacactgtgaattgcaaaatgttactgcctctgggtggacaggttttaaaaagacttttttttttcctcctggcatggctgacagagggaaggctgggt

SEQ ID NO: 1016230 - DNA, 120 bp, Artificial Sequence
  ENSG00000228971_5 (sequence is synthesized)
ttcaatcccatctttcccttcccttgcccagtgcttctttatgtgcacaacctgcacaactatatgtggtttgcaaacacgcataagcaaagactaacagcttctgaaacaaactctgaa

SEQ ID NO: 1016231 - DNA, 120 bp, Artificial Sequence
  ENSG00000228971_6 (sequence is synthesized)
taaaagagggagcatattaaggcagatggcagaggaggtgagcagcatgggcagatagaagcatcacagagactacaagaagaatgtgccagaccggctcatagtggccacactgattaa

SEQ ID NO: 1016232 - DNA, 120 bp, Artificial Sequence
  ENSG00000228971_7 (sequence is synthesized)
gaattaccatcagctctttaggatttggaaacttggaaacacattgtgtgttcttcctggtttgttatagagtatgtgtatgtacttctttctcttaaaaatatttatttttaaagaatt

SEQ ID NO: 1016233 - DNA, 120 bp, Artificial Sequence
  ENSG00000228971_8 (sequence is synthesized)
gacttataaaattatatgtatttgtcatgtataacacaatattttgaagtacagtcctgtgtcataaggatatgttctgagaaatccatcaattttgtcattgtataaacatgatagagt

SEQ ID NO: 1016234 - DNA, 120 bp, Artificial Sequence
  ENSG00000228971_9 (sequence is synthesized)
gtatttacacaaacctaggtggtataaactactacacacctaggctacataatgtagcctattgctcctaggctataaacctgtataacatgctactgtactaaatactatagacaatag

SEQ ID NO: 1016235 - DNA, 120 bp, Artificial Sequence
  ENSG00000228971_10 (sequence is synthesized)
tcacatactggtgagtatttgcgtatcaaaacatatctaaatatagaaaagatgcagtaaaaatatggtattacaatcttatgagaccactatagtatatgaggtccatcattgattaaa

SEQ ID NO: 1016236 - DNA, 120 bp, Artificial Sequence
  ENSG00000228971_11 (sequence is synthesized)
acatagttatatggtgcatgactgtatatatgcattgtggaatggttaaatctagctaactaacaaatgtgttatatcacatagttattatttttgaggtgagaatacaatattcactct

SEQ ID NO: 1016237 - DNA, 120 bp, Artificial Sequence
  ENSG00000228971_12 (sequence is synthesized)
cttagcattttttaagaatacagtatattaactatagtcaccatgctgaatggtagatctctggaactaatttctcctatctaagtgtgattatgtaccctttgaccaacatctttctaa

SEQ ID NO: 1016238 - DNA, 120 bp, Artificial Sequence
  ENSG00000228971_13 (sequence is synthesized)
ccccaccccacaaacaccccataataaagcctcttgtaaccaccattttactcctttttctatgagaatggccttctttgtctctccttttgtctgtccttacagttttttacttaatgt

SEQ ID NO: 1016239 - DNA, 120 bp, Artificial Sequence
  ENSG00000228971_14 (sequence is synthesized)
ctattttgcctgatattaatacaagtatacttcctcctgctctcttttagtttctacttgcatagaatatctttttctgttccttcattttcagtctgtgtgtccttataggtaaagtga

SEQ ID NO: 1016240 - DNA, 120 bp, Artificial Sequence
  ENSG00000228971_15 (sequence is synthesized)
gtctcctgtaggcagcagatagttgggttggctctttttttttttaatccatcccagccactttatgtattttgatcagagacctttatccttttacaaccaaggtaattattagtagat

SEQ ID NO: 1016241 - DNA, 120 bp, Artificial Sequence
  ENSG00000228971_16 (sequence is synthesized)
aaggacttactactgacattttgtttattgctttctcattgtttgatagattgttgtgtgtggtttttattacagggtgtatcttgagtcatctcaattaatcttgatgctcttggttcc

SEQ ID NO: 1016242 - DNA, 120 bp, Artificial Sequence
  ENSG00000228971_17 (sequence is synthesized)
tacatcgctgttagcattgaggatgttagagtgcagagtatcaaaaccagcattcatcagaaagaaaggatgtttacacaaacattaaggcatggaagagagtcagtggggtggggatgg

SEQ ID NO: 1016243 - DNA, 120 bp, Artificial Sequence
  ENSG00000228971_18 (sequence is synthesized)
aactatcttaacacctgatcaaatgtgggtgtttctgagaatgctgagctgattatggcacattctctgtcctggagaagctggaagcatttttacatctaccctatttgatcctcatac

SEQ ID NO: 1016244 - DNA, 120 bp, Artificial Sequence
  ENSG00000228971_19 (sequence is synthesized)
aaattttataaattagataagaaacatcttaataactaaaagtcactgaagagggaaccttaaaaaaagtactttaaaaaagtacacaagacttaagtttacacaactaactctaggaat

SEQ ID NO: 1016245 - DNA, 120 bp, Artificial Sequence
  ENSG00000228971_20 (sequence is synthesized)
gctgggactggaacccagctgcctggcaagtaccatggtgttttcaaccggatcagagaggggtgagctttttcctgcttcttccccagagcagtaaattaaaaaaaaaaaaaagcgtta

SEQ ID NO: 1016246 - DNA, 120 bp, Artificial Sequence
  ENSG00000228971_21 (sequence is synthesized)
ttgctgttattttattatgatgattattactattatcagatagtgaggggtgaaggaagagagtacagccagatttcttcatttctctctactagtggtaatgtgtgtgggggcataata

SEQ ID NO: 1016247 - DNA, 120 bp, Artificial Sequence
  ENSG00000228971_22 (sequence is synthesized)
aactcaattaaaggagttctgagtatttgcagagcaagtttgttcatctgtctcaactgctttaaagattttttattttaataagataaatagttaactcatcctgctaaatgaattttc

SEQ ID NO: 1016248 - DNA, 120 bp, Artificial Sequence
  ENSG00000228971_23 (sequence is synthesized)
tgctaataaccatatacctctcccacaacactaatcacaaagtatatttctaaagtgattccagccctgtttggggaatcagtattatttactctttttcctctagtccctagcacaatg

SEQ ID NO: 1016249 - DNA, 120 bp, Artificial Sequence
  ENSG00000228971_24 (sequence is synthesized)
tctgggctagaggattcatttgatcactcaggaaatattcattgagaacctactatgtggcagtcactattttaggtacttaggacatagcagtgaagaaagtagatatgattctttctc

SEQ ID NO: 1016250 - DNA, 120 bp, Artificial Sequence
  ENSG00000228971_25 (sequence is synthesized)
taatgcagcttatattttgatggaatattttagtatttctataaataaataaagatatgtgttacaaagaaaattaaagagatgtgataatgatgaaatgggataatttgcttgggtgcc

SEQ ID NO: 1016251 - DNA, 120 bp, Artificial Sequence
  ENSG00000228971_26 (sequence is synthesized)
caggaaggttactttgaggaagtgacattggaactgagactcaaatgtcaagttttaaatgtaggaaaaagctttgcatgcctgaaaaatggaaagatgaatattatggcttgaggctga

SEQ ID NO: 1016252 - DNA, 120 bp, Artificial Sequence
  ENSG00000228971_27 (sequence is synthesized)
aggggcaaaggaagtggtgtggaggtgagtggaaagattccaaggtggtcttttcacagaggagggtgagggagctaggtaatgtcaaaagctgacccatgttgctaggctgtcaaaagt

SEQ ID NO: 1016253 - DNA, 120 bp, Artificial Sequence
  ENSG00000228971_28 (sequence is synthesized)
accaggctacaaagattctccaaaacttaattaaatttaaaaatatttgtgctccaaaggacaccatcaagaaagtaaaaaaataacccaccaaatgggagaaaatattggcaaatcatg

SEQ ID NO: 1016254 - DNA, 120 bp, Artificial Sequence
  ENSG00000228971_29 (sequence is synthesized)
tatctgataagaggcttgtatccagaaatataaagaactcttacaattcaatggataaataaaccaatttaaaaaatgagcaaaagacttgaataaatgtttctttaaagaagagatata

SEQ ID NO: 1016255 - DNA, 120 bp, Artificial Sequence
  ENSG00000228971_30 (sequence is synthesized)
aatggccaattaacaaatgtaaagatcctcttcatctttagttatcagaaaaatgcaaatcaaatcatgaaatactctctcaaacccactagatggctagaatttaaaaagtcagtaaca

SEQ ID NO: 1016256 - DNA, 120 bp, Artificial Sequence
  ENSG00000228971_31 (sequence is synthesized)
agttgttggcaaggatatatggaaaacaatcctcatacccttctgggaatgtaaatgggaatgttaaatggtgcagctgctttaaatgtcaaatggtccagcaattctatttctacatat

SEQ ID NO: 1016257 - DNA, 120 bp, Artificial Sequence
  ENSG00000228971_32 (sequence is synthesized)
atatacccaagagaaatgaaagcatatgcctcaacaaaaacttgtacacaaatggcattattcataatagccaaagatgggaataactcaaatgaccatcgactgataaatgaacaaaca

SEQ ID NO: 1016258 - DNA, 120 bp, Artificial Sequence
  ENSG00000228971_33 (sequence is synthesized)
aaatgtggcatatccatacagtggaactggccataaaaggaataaaatgctaatacatgctataacatggatggaccttgaaaacatgatggtaagtgaaagaagccagtcacaaagggc

SEQ ID NO: 1016259 - DNA, 120 bp, Artificial Sequence
  ENSG00000228971_34 (sequence is synthesized)
cacatatatcattccattcacatcaagtttccagaacagagaattctatacagtcagaaagtaaattagtagttgcttggtggtgggggatgggaagacagggtagtagttaaagggtac

SEQ ID NO: 1016260 - DNA, 120 bp, Artificial Sequence
  ENSG00000228971_35 (sequence is synthesized)
aggatttctttttgaggtgatgaacatgttctaaaatttgctgtggagatggttgcataaatctgtaaacatattaaaagtcattaaattgtacacttgaaatgggtgaactgtatggtg

SEQ ID NO: 1016261 - DNA, 120 bp, Artificial Sequence
  ENSG00000228971_36 (sequence is synthesized)
cctctgccacatctggacctgattttgatgacaagatcctgtacctcaagcccgagactaatttcataatttgatgaatctttttggagagtcatgggaggaatgtaaacaatttgtggc

SEQ ID NO: 1016262 - DNA, 120 bp, Artificial Sequence
  ENSG00000228971_37 (sequence is synthesized)
caaaggagaattatggtagtttgaagatgtggatacaaattatttgacattcttctcatagaaaggtaactccatagctgggagccaagtctcgaagccccatgaggggaagtggataca

SEQ ID NO: 1016263 - DNA, 120 bp, Artificial Sequence
  ENSG00000228971_38 (sequence is synthesized)
tctcagaattgggtttcctgatacacacgactgcatccttcatctgccaggccctggcattgtttactggagaagatgtcataggaaattgggctatgtcattgagccactggagtcaca

SEQ ID NO: 1016264 - DNA, 120 bp, Artificial Sequence
  ENSG00000228971_39 (sequence is synthesized)
cctcctgattatgtgttctggcaggcagggcagaaacagtctcggtgcccatgtgaggactggaactggtttcttttctcctttacatgattgttctgagtcccttctgtttcttgggcg

SEQ ID NO: 1016265 - DNA, 120 bp, Artificial Sequence
  ENSG00000228971_40 (sequence is synthesized)
tctgacgtgatgcttgctaagttggatgtggattcatttagtaaaccttgtgtgtgcatttgtttttttatgtttagcaactgcttacatggatcacctgtttttgttttgctatgactt

SEQ ID NO: 1016266 - DNA, 120 bp, Artificial Sequence
  ENSG00000228971_41 (sequence is synthesized)
gtatggtgggagtgatgctgtggaactggaattactagcatcaggaaacctacttgctacagacccaacaacgtgcaatgatcagatcccaatttagactgtaaaaagaccaatatcaga

SEQ ID NO: 1016267 - DNA, 120 bp, Artificial Sequence
  ENSG00000228971_42 (sequence is synthesized)
tgagatcaaacataccttcttcctgtaccaaacagttctggggccaaatattgtctactgtctctatgctaactagtactgaaaccaggcaaaattaactacttagccgcttgttccagg

SEQ ID NO: 1016268 - DNA, 120 bp, Artificial Sequence
  ENSG00000228971_43 (sequence is synthesized)
aaatacctgctctcggaagaaataagttaacccacctgtattagtctgttttctgctgccataacagaacattacagactagataattactttgaaaagtttatttgacccacagttctg

SEQ ID NO: 1016269 - DNA, 120 bp, Artificial Sequence
  ENSG00000228971_44 (sequence is synthesized)
gaagctaggaaatccaagaggatggcactggtgtctggtgagggtcatgttatagtggaggagtggaggatggaagcaaacacatgagacagagagagaaatcaggccagacttacttct

SEQ ID NO: 1016270 - DNA, 120 bp, Artificial Sequence
  ENSG00000228971_45 (sequence is synthesized)
ctaacaaaccccatctcaataactaactcattcctatgataatagcattaattatctcatgaaagccctcataacctaattacctcttaaagaccccacatcaataaaatatcaacatga

SEQ ID NO: 1016271 - DNA, 120 bp, Artificial Sequence
  ENSG00000228971_46 (sequence is synthesized)
acttctctgctggtccctgcctgtgtaaacaccatgactctgggttctgctcagcagactgaagggaacacaactatgatgattctctatgctgtacttggagaaggctggttagtcata

SEQ ID NO: 1016272 - DNA, 120 bp, Artificial Sequence
  ENSG00000228971_47 (sequence is synthesized)
caagactttcatcgtgttgtttctatctaccccaaactattatttcataccctttgttccatcccaactaattttagatgctacggtctgaatgttgaaattcatgtattgaaacctagt

SEQ ID NO: 1016273 - DNA, 120 bp, Artificial Sequence
  ENSG00000228971_48 (sequence is synthesized)
caccaatttatggtattaggagattgtcctttgggaggtgattgggccacaagggcttcactctcattaatggaattagtgttcttctaaaagaggctgcagagagctgcgttttctcct

SEQ ID NO: 1016274 - DNA, 120 bp, Artificial Sequence
  ENSG00000228971_49 (sequence is synthesized)
ccattgtgtgtgaaggcagtgagaatttgtttgcaatgaatcaggaaatgggccctcaccagacaccagcactttgatcttagattttccaacctacagaactgtgagaaatgaatttct

SEQ ID NO: 1016275 - DNA, 120 bp, Artificial Sequence
  ENSG00000228971_50 (sequence is synthesized)
gtggtttataccaccaacttagggtattttgttatagcagccagaacagatgaaggaactccaccttgccttaaaatgactcatttcaggccccgaaatcccataaacactttcccttga

SEQ ID NO: 1016276 - DNA, 120 bp, Artificial Sequence
  ENSG00000228971_51 (sequence is synthesized)
agcagactgaagggaacacaactatgatgattctctatgctgtacttggagaaggctggttagtcataagttttaaagcaggtcagtatggtggatttccagtctgccagcctcctttgc

SEQ ID NO: 1016277 - DNA, 120 bp, Artificial Sequence
  ENSG00000228971_52 (sequence is synthesized)
agtgggttgggaccgagtgacggcttctggcaaatgaactcctactcaacatgaagatgacaagaaggaagacctttatgatgatccacttttgcttagtttttagatcaaaaagaattg

SEQ ID NO: 1016278 - DNA, 120 bp, Artificial Sequence
  ENSG00000283083_0 (sequence is synthesized)
gttctctgtgagtcagactttggtagcctccttacttgctccacttgcttcagagagagaagtgcgggtttgcggtttagtgaaggagcaaggctcatgtgaatagaagaatccaaggta

SEQ ID NO: 1016279 - DNA, 120 bp, Artificial Sequence
  ENSG00000283083_1 (sequence is synthesized)
gagcaggaagagaaatccagctagagaaagaggtggaagtcaaaataagtagactcttattttaaatttttaatggcttcttggtggcttcaagataaaagatagacaatgaggagcttt

SEQ ID NO: 1016280 - DNA, 120 bp, Artificial Sequence
  ENSG00000283083_2 (sequence is synthesized)
gtgtttgggaaaagaataaaagtcaactgtagcaaaacctctcagaagtaggatttataaacagttctcaaaggatgcacatgaaaatgtaatttcttgggaaagtggcaaacagaaaag

SEQ ID NO: 1016281 - DNA, 120 bp, Artificial Sequence
  ENSG00000283083_3 (sequence is synthesized)
aatcaaaccgcagttgtgtgtggcaaggataaatatgcaacgcaccatcaataggatttgttgggtgaataaaaaagccttttagccaacaatatgtaagcagaagaatggagcaggagt

SEQ ID NO: 1016282 - DNA, 120 bp, Artificial Sequence
  ENSG00000283083_4 (sequence is synthesized)
atttgtgctattagaatgtatttttcctttgtgttcctatctacttccttcacaagctatttttgattgatttttctgagaacaaaataaatatccacagtgagtcacaaatgtaaatgt

SEQ ID NO: 1016283 - DNA, 120 bp, Artificial Sequence
  ENSG00000283083_5 (sequence is synthesized)
attgagtgcccaatgtatggagccctttctccaagacctcactgccgtaaatacaaatataactgagaactggtgatttgaagatgattcttgggatagcgggctaggcggcacttcaca

SEQ ID NO: 1016284 - DNA, 120 bp, Artificial Sequence
  ENSG00000283083_6 (sequence is synthesized)
ctggcttttggggccacataggggtgtaatcatgttatcaccctgcacaaccccagagggtaccatacacaacccatttgaccaaacatggcagtcctgaaaggaatgatgattgaaagc

SEQ ID NO: 1016285 - DNA, 120 bp, Artificial Sequence
  ENSG00000283083_7 (sequence is synthesized)
caagactgagctttggcaaggaaaccacctctgaattaccaactcattgtctataatgtaatgatagcatctacctcttagtaattttgtgaacattaaatgaataaagcatgacaaaag

SEQ ID NO: 1016286 - DNA, 120 bp, Artificial Sequence
  ENSG00000231477_0 (sequence is synthesized)
ttacaataagaggtggtggagaccaaggttttaggcaggcgaagcctccacgtagcaggcttcagagagaatagagtgttaatgtttcttgtcagacttgagagtctgttctgtcaatct

SEQ ID NO: 1016287 - DNA, 120 bp, Artificial Sequence
  ENSG00000231477_1 (sequence is synthesized)
taaggcctctgtgttgatgttcatgctggtcagctgtgccagaattccaacagggagaagggtataatgaggcacacctgattcccccttctcatcatggcctgaactggttttgcagga

SEQ ID NO: 1016288 - DNA, 120 bp, Artificial Sequence
  ENSG00000231477_2 (sequence is synthesized)
cctggcaccctcctactgcaaccgtgctctacggacaggttttcatcattcatcctcatgttccacaaggtgttccagaaatcctctgccccattccacacacccaccgcagtagcctgg

SEQ ID NO: 1016289 - DNA, 120 bp, Artificial Sequence
  ENSG00000231477_3 (sequence is synthesized)
tcaagtgatttcaagtgggtcctcaccactaaaaagaggaagatggacaaacttttactcgcgtccttgtgaagagcccaccaaacaggctttatgtgagcaataaagcttttaatcacc

SEQ ID NO: 1016290 - DNA, 120 bp, Artificial Sequence
  ENSG00000231476_0 (sequence is synthesized)
cagtacccttctgaggttaatccgcgttgatagaagcaggtgtggttcatctggaatctgttggtgtgaactgcgcggcggcgtcccccaccaggcaccacagcgggcgcctcttggtag

SEQ ID NO: 1016291 - DNA, 120 bp, Artificial Sequence
  ENSG00000231476_1 (sequence is synthesized)
atctgtgggactccccgtccgtctcaggtatgacccctttgttggtgatctgggttgcagatatcccctctgtgtctgtggcttgtctcgctgcgttgtttatggtgcgcttttgtcatg

SEQ ID NO: 1016292 - DNA, 120 bp, Artificial Sequence
  ENSG00000231476_2 (sequence is synthesized)
cagacgtttctaattttgctctgtctggacttggcaatctttctgttcgtgatttgtgcttttggtgtttatgtacaaactctttcccggtccagaaagcataaaaaagtttgctttgtg

SEQ ID NO: 1016293 - DNA, 120 bp, Artificial Sequence
  ENSG00000246211_0 (sequence is synthesized)
agtgtatcccactgaggcccctcggtcgctcccactcgtcgtgccctcacctagtcaggtcccgcagccgcgcctcctccccgcgcagctcctcggaatgcgtgggggcttcctgcaaca

SEQ ID NO: 1016294 - DNA, 120 bp, Artificial Sequence
  ENSG00000246211_1 (sequence is synthesized)
tcagtctccgccgccctccactaaatcgcgaccctgggaaggtgtttccactgtgcccatcacactaggggaaattgaggcggaggcagggtgcgcaggcaaagagcggcaagaggacag

SEQ ID NO: 1016295 - DNA, 120 bp, Artificial Sequence
  ENSG00000246211_2 (sequence is synthesized)
ctgggaggaaaaccctcacagagagcgtgacatctgagccatctgaaggataagtaggactgtgtcaggattatcatgctggcttcagcaggtagagctgatgggaggaggtaagacagg

SEQ ID NO: 1016296 - DNA, 120 bp, Artificial Sequence
  ENSG00000246211_3 (sequence is synthesized)
aaggaactgcatagtccagtaaattgcaacagaaggaacagtgcatcagttctgagcctaggtgtccagaggccttgcatgctttggctctctcttttggggctctgcccaggcacccag

SEQ ID NO: 1016297 - DNA, 120 bp, Artificial Sequence
  ENSG00000246211_4 (sequence is synthesized)
ggaacaccctgggctagcctgctggagtgtgagagatcatgtgcagcagtgctcagccaacccagccgaggccatcagaaattagccagcacccagtcaacttggcagctgaccaccaac

SEQ ID NO: 1016298 - DNA, 120 bp, Artificial Sequence
  ENSG00000246211_5 (sequence is synthesized)
agagaagtggactcactcaagaccagaagaaatatccagctgacctcagtcaaaactgctaacccacacaatagtgagatatataaatagctgccgttttaagccactaagtgttggggt

SEQ ID NO: 1016299 - DNA, 120 bp, Artificial Sequence
  ENSG00000246211_6 (sequence is synthesized)
aatttgttttgcagcaaaagtagactgatacagaaattggtgtccgaaagtgagatgttaggccattaacaataccctaaaatttgtgacattagctttgagattgggagtggttggaaa

SEQ ID NO: 1016300 - DNA, 120 bp, Artificial Sequence
  ENSG00000246211_7 (sequence is synthesized)
ctgggaaaatggcaagagcaaacatattgaagtctggggaaatgatgggaaattattactagaggctggaaaaacagtaatctgtgtttcatagtggcactttgtaaagacctctgcaag

SEQ ID NO: 1016301 - DNA, 120 bp, Artificial Sequence
  ENSG00000246211_8 (sequence is synthesized)
acaaaacagttgtgtcatttggagtatggaatagactgaaattattcaaactaccaattattcagctaccaacatgggccacatcttcagaagtagccaaggaaggtgacagacaaggaa

SEQ ID NO: 1016302 - DNA, 120 bp, Artificial Sequence
  ENSG00000246211_9 (sequence is synthesized)
tatgttccaaagggtatagtcaagagccgcagagatcagtggagcaggaaccccctcccagggagtaaactctagacctgagcaagaaatacaccctctcctgggatagtgagacttgta

SEQ ID NO: 1016303 - DNA, 120 bp, Artificial Sequence
  ENSG00000246211_10 (sequence is synthesized)
ctgggatagtgagacttgtaaacctttgcccagctggagttcagaattgctatgtgtctctcattcttccctttttaattttgttttgttttgtttttgttttttgagacagagtcttgc

SEQ ID NO: 1016304 - DNA, 90 bp, Artificial Sequence
  ENSG00000246211_11 (sequence is synthesized)
gggctcaagtgattctcctgcctcagctgcccaagtagctgggactacaggtgtgctgcccagttggtcttgaactcctgtcctcaagtg

SEQ ID NO: 1016305 - DNA, 120 bp, Artificial Sequence
  ENSG00000246211_12 (sequence is synthesized)
taattttagtaggttggtcttgaactcctgtcctcaagtgatctgcctgcttcagcctcctaaagtgctgggattgtaggcgtgagccaccgtgaccggcgttcttcccttttttaaatg

SEQ ID NO: 1016306 - DNA, 120 bp, Artificial Sequence
  ENSG00000246211_13 (sequence is synthesized)
attaagaagaacaacatccataatgtcacatacaaacctgatgtgaaccacaagatcctggtcttcaagcctgatgacataattgcaagaggtgtttgggggtcttggaatggtgcatcc

SEQ ID NO: 1016307 - DNA, 120 bp, Artificial Sequence
  ENSG00000246211_14 (sequence is synthesized)
cccatcaagaggtggagggagactatttctcctccccttaaacctgaactgacatcatgacatttttggccaatggaatgcagcagagagatggtacaaattctctgtctaagcctcaac

SEQ ID NO: 1016308 - DNA, 120 bp, Artificial Sequence
  ENSG00000246211_15 (sequence is synthesized)
atgcatcgcacatctcagctcttttttttgaagtcctgtcccactactcatatgaaatgacctgagctagcctgctggaggacaagagatcacatggaatagagatgagccatcccagcg

SEQ ID NO: 1016309 - DNA, 120 bp, Artificial Sequence
  ENSG00000246211_16 (sequence is synthesized)
gaagttattctacattatccaggaaccagccaatttagcagctggcctcagacccatgaataaactcagccaagaccaggtgaacaactcacctgggcttagcacaaatgttgacttgca

SEQ ID NO: 1016310 - DNA, 120 bp, Artificial Sequence
  ENSG00000246214_0 (sequence is synthesized)
caggggaaggaaaaaacaaatcattcagggcccatctcaggtgactgatgaatgcggcaccgttttgaacgggtacctaatctggtccagatatgcctgctggggctgcaagaaccaaga

SEQ ID NO: 1016311 - DNA, 120 bp, Artificial Sequence
  ENSG00000246214_1 (sequence is synthesized)
cacgttcaagcacgtttgctccggcaagcttgggcgagcaggtcaagacctcagagttttagaaagcaggggcgaagttttcaagcacgatgggaacacctgtaggtgcaggtgcctgag

SEQ ID NO: 1016312 - DNA, 120 bp, Artificial Sequence
  ENSG00000246214_2 (sequence is synthesized)
ggtcggccgaccacctcgcatctgaggctggatccgcacacggagaacgacaactgctcacagggacgtgcgtccggaggaaagttgcgccccagctctgtcccttgccctgggaatctg

SEQ ID NO: 1016313 - DNA, 120 bp, Artificial Sequence
  ENSG00000246214_3 (sequence is synthesized)
cctgcaggactgcttggagggccagcagtctcccttgacttggttctgcacccgggactgaccggctacgtgggcagtgcaaccagaacatcccccgtcaccgttccatttccggaaagt

SEQ ID NO: 1016314 - DNA, 120 bp, Artificial Sequence
  ENSG00000246214_4 (sequence is synthesized)
gaggcctctcccttcagaagacagcacttggcctggcagtgtgtgagttcagaggcaagctgtccgaaccgtcacccaaacctgacgcgaatggaacaactgtgttacacagaagcacaa

SEQ ID NO: 1016315 - DNA, 120 bp, Artificial Sequence
  ENSG00000246214_5 (sequence is synthesized)
gatcacaaccagcaacaaaaatcaaaataagccatcttctggaaacactttcataatactacaaaaattacaagaaaccctctaagttacctgtgtactttctatgctactaggctaagt

SEQ ID NO: 1016316 - DNA, 120 bp, Artificial Sequence
  ENSG00000246214_6 (sequence is synthesized)
tcatggacagtcaggatttatcttttacaggttgcataggacgctcatcgtacaatgatggaaaacagcctggcccacatggcaaaacctggtctccaccaaaaagtataaaaattagcc

SEQ ID NO: 1016317 - DNA, 120 bp, Artificial Sequence
  ENSG00000246214_7 (sequence is synthesized)
ttgcaccattgcactccggcctgggcaacagtgtgagaccctgtctcaaaaatgagaagaatgaaaattaaaaggatgaaaacagtatatgaaaaccaagcttcccgtacgatgccctgc

SEQ ID NO: 1016318 - DNA, 120 bp, Artificial Sequence
  ENSG00000246214_8 (sequence is synthesized)
atctgttgacattttcttgtccttgcgagaatcttcctaccactccatgaatcgacctctagtacggcttaaacactaagtggtcacatagctaaccccagacaggcttagaagataaac

SEQ ID NO: 1016319 - DNA, 120 bp, Artificial Sequence
  ENSG00000246214_9 (sequence is synthesized)
caagaggacaacttctttggggggaaataaagtacacactaggaaggaatcttattcctttgcccggagcaagcccagactttaagatttgatgctcagggttcgggcagccagcctggt

SEQ ID NO: 1016320 - DNA, 120 bp, Artificial Sequence
  ENSG00000246214_10 (sequence is synthesized)
tacctgtctctttgaatatcttctcatctggggggacgacagagcagaggctgttgaggaccagggtccccagtttgagcgcgttcttctctgaactcttgtagtaatccagggaattgt

SEQ ID NO: 1016321 - DNA, 120 bp, Artificial Sequence
  ENSG00000246214_11 (sequence is synthesized)
gggtgagtacaaaccaccgtttcttcagtttcagtgaagacatctttggactgttcttcacctctttgtgcaaccatcctggaaaaaaagattaaagtgtaaattaaaatctgtgaggag

SEQ ID NO: 1016322 - DNA, 120 bp, Artificial Sequence
  ENSG00000246214_12 (sequence is synthesized)
aaaccccaaagaccacacaatcatctgcataatgctaacacatgggtggggtttctagctgtttgccagaaaaagaccacgaacaccccaacccgatgtaaatggaacgactacatgaaa

SEQ ID NO: 1016323 - DNA, 120 bp, Artificial Sequence
  ENSG00000246214_13 (sequence is synthesized)
gaaaagcccaaaatcacaactagcaacaaaaaacatgaccctctagaaacactttataatatcacaaattaaaaatcacttacaaaatctccaacagttaaaatgactgggaaaagcagc

SEQ ID NO: 1016324 - DNA, 120 bp, Artificial Sequence
  ENSG00000246214_14 (sequence is synthesized)
tcgaaatgaaaatgctgcagatgtctatatgcaaatggaaaggggagtctgttaagcagaccgaggaagcagggcaggcagtcacctctcacgatgaattcctggccctccactctggtg

SEQ ID NO: 1016325 - DNA, 120 bp, Artificial Sequence
  ENSG00000246214_15 (sequence is synthesized)
actttcaacgaaggagacagacatttccctggcctttctgaagagcgctttttggagagacaaacctgttgctcaggggctgagcattcccgtgtgttctccctgtacttcacctaaaaa

SEQ ID NO: 1016326 - DNA, 120 bp, Artificial Sequence
  ENSG00000246214_16 (sequence is synthesized)
acaagtttcatttttaaaaattgatctgcacttggatatctctggagatgccagtaaggttgttgggtacagaggtctgcagctcagagaccagcaggcatcctgaacaagacagatcca

SEQ ID NO: 1016327 - DNA, 120 bp, Artificial Sequence
  ENSG00000246214_17 (sequence is synthesized)
aaccagggtcccacaggctcaatgggtctccttccaaaatcagcttccaatgagccctcagattctccaaatactgggcagctggatttcccagacaccttctgcaatctgctgacatct

SEQ ID NO: 1016328 - DNA, 120 bp, Artificial Sequence
  ENSG00000246214_18 (sequence is synthesized)
aatatacctgtagactgttctcctgctgacaaggttgttcttgctcttatcctataaagaagagaggtggcagagagttggaggggagggcctccttccctggcatgtccatccgagggt

SEQ ID NO: 1016329 - DNA, 120 bp, Artificial Sequence
  ENSG00000246214_19 (sequence is synthesized)
ctccaagaacatcctggctgtggcccacacctttctgtgtggttaggaggagtatcggatgccttctctttccaaccttggcttgtgtgaagatggtgttatggtgatgtaagaggacgg

SEQ ID NO: 1016330 - DNA, 120 bp, Artificial Sequence
  ENSG00000246214_20 (sequence is synthesized)
tgatgtaagaggacggctctattctgagtgatgcaagatccaacatttaggcatgaaatgccatgatgacagccgcctactttagcaaaagggaagttgtgtgtgtgtgtgtgtgtgtgt

SEQ ID NO: 1016331 - DNA, 120 bp, Artificial Sequence
  ENSG00000246214_21 (sequence is synthesized)
gtgtgtgtttttacgcgtatgcatataaatagaggaagtcgctgcagctagatggtgaatctacgtgaggagtatctggctgttccttgtactgttctttcaactttctgtgggtttgaa

SEQ ID NO: 1016332 - DNA, 120 bp, Artificial Sequence
  ENSG00000246214_22 (sequence is synthesized)
aattttcaaaacaagacaaaaaatgtttttcaagcactgtttgagaggataggaaatagaaatggctcttattaaagagccattcagaagactgttttcttctatttccttttcccccac

SEQ ID NO: 1016333 - DNA, 120 bp, Artificial Sequence
  ENSG00000246214_23 (sequence is synthesized)
gactatgaccctcagtgccagcgatttctcctttccataaacttttgtttgaccttaaatcattgtgacaccactgagcagggaatctcaataatggctgacatatctggtagcaaaagg

SEQ ID NO: 1016334 - DNA, 120 bp, Artificial Sequence
  ENSG00000257378_0 (sequence is synthesized)
agaagtccccagccatgcacacttgcaccaacgtaggcaaacctgttcacactcaggggcatgcacaactctgcatgtgaggacaaaagagaacttggggatgaacacacttgcacacta

SEQ ID NO: 1016335 - DNA, 120 bp, Artificial Sequence
  ENSG00000257378_1 (sequence is synthesized)
gtaaaaccagttgcatcattcccggaacccccaaggcaggggtctgtacactccccactcagtacctgggtgcaggctctccagagtttccctcttaccacccacctgcctccctcccca

SEQ ID NO: 1016336 - DNA, 120 bp, Artificial Sequence
  ENSG00000257378_2 (sequence is synthesized)
cctgccaggctcagggctccctccggcagcctcctccccgcctgctcacagcactggcctgggcgcgcacgtccaggaagcagctactctgcgctggggggccaacttcagacctgcggg

SEQ ID NO: 1016337 - DNA, 120 bp, Artificial Sequence
  ENSG00000257378_3 (sequence is synthesized)
agaggagggacggggtgggcccttctgcctcgggcctcacaagcgtccgtcggggccgtagaggccgctggcggccctcaggccttggtaccccgtggcaggattcatagagcagccggt

SEQ ID NO: 1016338 - DNA, 120 bp, Artificial Sequence
  ENSG00000257373_0 (sequence is synthesized)
actccatctcaaaaaaaaagaaaaaagtctaggtctgtgtttccaaacttgcgactagaagccctcagggacactccactcaactaatgataagaacataacaagaaaaaagatcttctg

SEQ ID NO: 1016339 - DNA, 120 bp, Artificial Sequence
  ENSG00000257373_1 (sequence is synthesized)
ggtccctagatgaagaggagactttttgtcctgggccatttcccactagagccactgactgctccttctgaacgtttcactacactttttcagggtgcatgcaacaggaatccttgaagt

SEQ ID NO: 1016340 - DNA, 120 bp, Artificial Sequence
  ENSG00000257373_2 (sequence is synthesized)
ccatgctgacagcacctactatggaaaccattcagtgccattatcgtcactaccctccatactctggacccagcaaacaagcaagacctatgtgtacgctgtaagagttgggataacact

SEQ ID NO: 1016341 - DNA, 120 bp, Artificial Sequence
  ENSG00000256020_0 (sequence is synthesized)
tggtcctggcttttgagaaaagagccagcagcctctggtcttgttgacaccatcatctgagagtggcaggccaccagagggaagggctaaggacagagccagatctggctgggccatctc

SEQ ID NO: 1016342 - DNA, 120 bp, Artificial Sequence
  ENSG00000256020_1 (sequence is synthesized)
cgaacttgacccgggatggaaataatgaagcagccactggctttcccaaggcctgtgatcctcctggtcaccagaaatcccaagttcttatctcctgctcttccagtctcctctgttagg

SEQ ID NO: 1016343 - DNA, 120 bp, Artificial Sequence
  ENSG00000256020_2 (sequence is synthesized)
gtactggttcccagcgcagagcttctgtgattaccagaagaacactgaaggagtcttcttgtctgtctggagccagctgagatggccctgagatccacagagcctcctccacgcccctgg

SEQ ID NO: 1016344 - DNA, 120 bp, Artificial Sequence
  ENSG00000256022_0 (sequence is synthesized)
acagtgggtaagagaagaaaacatggagaattattttacagctgtgatgttgtcaattgtacaatatctactccaatttcctcccatctttgagatgactgataagaatgccttatgtgt

SEQ ID NO: 1016345 - DNA, 120 bp, Artificial Sequence
  ENSG00000256022_1 (sequence is synthesized)
cacacaggatcataacacaaactttcttctctttcctgatgcccctctcaaatttactcagtagggggaacttcaccttctcctatgtaaatgggcttttctgcttatgtttaaataata

SEQ ID NO: 1016346 - DNA, 120 bp, Artificial Sequence
  ENSG00000256022_2 (sequence is synthesized)
ggccattgtgtggcaaacaactctatcaaaagttgtgtcttttaccctagctcctgggaaataaccactaaagtcttgaaatgtcttgagtgattggaggacctttatttttcacgcctg

SEQ ID NO: 1016347 - DNA, 120 bp, Artificial Sequence
  ENSG00000256022_3 (sequence is synthesized)
atgccttatgctgatgagatgactcagcaggggatggccaggccagaaagaccaaaactgtatcctgaggtttgagtttctgagccaggtgatgtcatcctccagcttggccggcctctt

SEQ ID NO: 1016348 - DNA, 120 bp, Artificial Sequence
  ENSG00000256022_4 (sequence is synthesized)
cctctggtgtgaaagagagcagatttattaaaaatcatcaacttcaaattatttggatggaaacattgccaaatcatagagatgtttgctaccacccgcacaccaagcagctgggtaact

SEQ ID NO: 1016349 - DNA, 120 bp, Artificial Sequence
  ENSG00000256022_5 (sequence is synthesized)
agaagtgcaggatcagcttattcacctccgaaagcctgcatgcaaccactgaggccgcctctattttttacatagttctacttggtgtatgtaaccccacagagaaacctggaagaatgc

SEQ ID NO: 1016350 - DNA, 120 bp, Artificial Sequence
  ENSG00000256022_6 (sequence is synthesized)
atgaaacctagtaaggcaaccagcacatgcaacagaatgaaccgtttctttccatctgaatgcctaaatgtggactctgatcctttctaccaagtcctaagtttgggaaaagaggacaag

SEQ ID NO: 1016351 - DNA, 120 bp, Artificial Sequence
  ENSG00000256022_7 (sequence is synthesized)
gacaggggctctgtcccatatcataatgtgcttgtgaatggctaaaattacaatgctgagataagtgtgtgtaataaaataattgcaccccgaattgaagaatgtttcactgtttatttt

SEQ ID NO: 1016352 - DNA, 120 bp, Artificial Sequence
  ENSG00000256022_8 (sequence is synthesized)
aaatcttcaaagatatgtgaggcttgcctagaacatcatcatcaggaatgctggtccttcaatttgttttttgaattgaagtgtagtttacagtgatcaagttgaaaataaggctctgca

SEQ ID NO: 1016353 - DNA, 120 bp, Artificial Sequence
  ENSG00000256022_9 (sequence is synthesized)
tgaaagctaactattaaaagggtgtgggcacaggagcaaccaacacagaccccacagaatcccaaacctatgctaagagggagcacttccatccctccaaacctgtgctaagagggacac

SEQ ID NO: 1016354 - DNA, 120 bp, Artificial Sequence
  ENSG00000256022_10 (sequence is synthesized)
ctccatccttctaagcctgtgctaagagggaacacctccatccttccaaacctgtgataggagggagcatctccatccttctgaacctgtgctaagaggaaacacctccatccttccaaa

SEQ ID NO: 1016355 - DNA, 120 bp, Artificial Sequence
  ENSG00000256022_11 (sequence is synthesized)
cctgtgataggagggagcacctccatccttccgaacctgtgctaagagggacacctccatccttccaagcctgtgctaagagggagcacctccatccttccaaacctgtgataggaggga

SEQ ID NO: 1016356 - DNA, 120 bp, Artificial Sequence
  ENSG00000256022_12 (sequence is synthesized)
cttccgaacctgtgctaagagggacacctccatccttccaagcctgtgctaagaaggagcacctccatccttccatctggcaaccccacatctttctgtgcagcattggctcatggagtt

SEQ ID NO: 1016357 - DNA, 120 bp, Artificial Sequence
  ENSG00000256022_13 (sequence is synthesized)
ttgcacaatctgttgccttaatgcagctgtgaggtggtaaaccccatgccattgcacagctgtgctggtggagtcttcaacaacagagggatgaaacgagagtgctgagtgatgggtgga

SEQ ID NO: 1016358 - DNA, 120 bp, Artificial Sequence
  ENSG00000256022_14 (sequence is synthesized)
gtgtgctcacagaagccagctgtgcttgccccactcccacccaaaatgtttacccacgtgggaaatgcctgccctgcataggagtacccaaggaacccaggatataaagaaacttctaaa

SEQ ID NO: 1016359 - DNA, 120 bp, Artificial Sequence
  ENSG00000256022_15 (sequence is synthesized)
gtaggaagtaatgtcgatagggaagaaagggctcgtaagtatgggagagcattttgcctcctattctatcgactctttgaagcatgcaagcacgctgctccacaggcttagctgcacaga

SEQ ID NO: 1016360 - DNA, 120 bp, Artificial Sequence
  ENSG00000256022_16 (sequence is synthesized)
gacgcactactccatttactcatgggctgcccgtggggcttggcgaaagagcaggcttggcttaggggaactactgagacacatccaggtattcaaaccgtgggttgccaagacttctct

SEQ ID NO: 1016361 - DNA, 120 bp, Artificial Sequence
  ENSG00000256022_17 (sequence is synthesized)
tttcatcctgagagtatggaataacatttgctaaaatgtcaaaggtgatgctggcagttttgggagacgcagagatggctgagagtctgcgggggcttggcaagtgcacgcaccagtctc

SEQ ID NO: 1016362 - DNA, 120 bp, Artificial Sequence
  ENSG00000256022_18 (sequence is synthesized)
tgccttatacaggcagtgtctacacttgcacatttttgctatttaatttgttgggtcagatttcatcataaaagtaaggaggtatttaattctcaatttgcaataaaatataaaagttaa

SEQ ID NO: 1016363 - DNA, 120 bp, Artificial Sequence
  ENSG00000256022_19 (sequence is synthesized)
atctacccccaatcaattgtgaggtcagaccaggaagacagaggccaaacccagcatcacactttgacctgcccgggaacacagtggctcctgggaaataaccactaaagtcttgaaatg

SEQ ID NO: 1016364 - DNA, 120 bp, Artificial Sequence
  ENSG00000256025_0 (sequence is synthesized)
aggatcagaaggcactactgaccaccagcattctttccaaccaggcagttccatccaggaacaggtatccttgttggtaactggataaaatcctatggacttgctgaaccaaaagaaatg

SEQ ID NO: 1016365 - DNA, 120 bp, Artificial Sequence
  ENSG00000256025_1 (sequence is synthesized)
agcattttgaagcctttgaacattttgtcaaatgaccctccaagagaatgtaaactctcgctcagcgccaagcacagcatcatcagtgcctgtcaaagtgcctcgcatatagttcatcct

SEQ ID NO: 1016366 - DNA, 120 bp, Artificial Sequence
  ENSG00000256025_2 (sequence is synthesized)
cgataaatacatgttgaatagatgaatgcacaggaaaaaggaaataattttagtattgcgctaaccaagcataatactcaagctaaaactaatgtaaaacttaccaccagctgccttccg

SEQ ID NO: 1016367 - DNA, 120 bp, Artificial Sequence
  ENSG00000256025_3 (sequence is synthesized)
gaaacaagtgaaaaaagacaagagacaccacaaacaatggtgagtcaagactggtcagtaactacagatcccaaagctccagctgaagatggctctcctacatcagactgatctaggaga

SEQ ID NO: 1016368 - DNA, 120 bp, Artificial Sequence
  ENSG00000256025_4 (sequence is synthesized)
acccaacctagtatcagcaccccttcacacctagtatcagcaccccttcacacctagtatcagcaccccttcacatctagtgtcagcacctcttcacaccaaatatcagcaccccctgtc

SEQ ID NO: 1016369 - DNA, 120 bp, Artificial Sequence
  ENSG00000256025_5 (sequence is synthesized)
tcatgggagggcagaggtaatgcttgtaccagttccccatgcctgagccttaccagggagccagcactgtagctggtgtatcacatgcgttagcatgcacaggcctcacaactctgcagt

SEQ ID NO: 1016370 - DNA, 120 bp, Artificial Sequence
  ENSG00000256025_6 (sequence is synthesized)
ttgtgtcagtattccagcacatatctatctgactctatatacatgctttctgtacaattgcccagggaccccacagcactgccagttggagaacaggggagcccagatgctggtccctga

SEQ ID NO: 1016371 - DNA, 120 bp, Artificial Sequence
  ENSG00000256025_7 (sequence is synthesized)
ccacttccaccgtcttgtgctgattctggatgcaggatgcaaagaaccatttccctcagcatctgaggaggaggaaatcctttctatcatggaaagcagcttgggttctcatgacaaatt

SEQ ID NO: 1016372 - DNA, 120 bp, Artificial Sequence
  ENSG00000256025_8 (sequence is synthesized)
caatgtcagagagctgaaccaacatcatagagtgctcttcaaggaaagcctccctcctgggccctccactgcctaggtcaccaggcctccagactccaggcctccagatcccaggccaaa

SEQ ID NO: 1016373 - DNA, 120 bp, Artificial Sequence
  ENSG00000256025_9 (sequence is synthesized)
aggctgcttgtatttccttactctcccagggcctctcctgatacctggcctctgaaattctttccacatataagggtgcactcagtgttcgtgaaagcaagtgtttccagggtttcagat

SEQ ID NO: 1016374 - DNA, 120 bp, Artificial Sequence
  ENSG00000256025_10 (sequence is synthesized)
gctccacagagaaactttcatagtcattcaaaaagattagcttttctctctaattcacatcatcaccaaggaataaagcctcacaggttacgggctggagcttcttcctctgagggtcta

SEQ ID NO: 1016375 - DNA, 120 bp, Artificial Sequence
  ENSG00000256025_11 (sequence is synthesized)
acaggaaaagctggacaaggatatatttgttcttttctacttacagcccgaaagagtggcacagtccccaaaaatacttcattctgtagtttttttaaataaatggacaaaaaaataaaa

SEQ ID NO: 1016376 - DNA, 120 bp, Artificial Sequence
  ENSG00000256025_12 (sequence is synthesized)
attcaaaatggccaggttagggtcctcttcttaggatcagaaggcactactgaccaccagcattctttccaaccaggcagttccatccaggaacaggtatccttgttggtaactgcagcc

SEQ ID NO: 1016377 - DNA, 120 bp, Artificial Sequence
  ENSG00000256025_13 (sequence is synthesized)
aagagtctgtgcattagaggttaagcgtcgtgttcaagatcacaaagccagtgaatggctgagctgggactccaactccaagtcttctgactcaaatccagtgacttactcaacacaaac

SEQ ID NO: 1016378 - DNA, 120 bp, Artificial Sequence
  ENSG00000256025_14 (sequence is synthesized)
tttctgaatacaaatggttgtcctatgtatggcagtgtattaagaagggccaccagcccactgatttattcacttttcagtttatacttggacatggataaaatcctatggacttgctga

SEQ ID NO: 1016379 - DNA, 120 bp, Artificial Sequence
  ENSG00000255284_0 (sequence is synthesized)
cccgccgctccgcgcgcccgggcggtcgcaggtcgcgcctgctttggccccggcgggttcggcatccgagcctggcaggggccaatagacagggcctctggagtgcagtggcgtgatctc

SEQ ID NO: 1016380 - DNA, 120 bp, Artificial Sequence
  ENSG00000255284_1 (sequence is synthesized)
ggctcactacagcgtctgcctaccgtgttcaagcgatcctcccacctcagcctgttgagcaaccgggaccccagaaagtttcctacactactgaggtttaggggcactgtgaagcaaaag

SEQ ID NO: 1016381 - DNA, 120 bp, Artificial Sequence
  ENSG00000255284_2 (sequence is synthesized)
gaatcccaggcggagactccgacctcgtcccgggagggaagccagtagctgagcacctgcgggagattaaagagaggaataaggagaaacactggaaggcaagtggctgctgactggagg

SEQ ID NO: 1016382 - DNA, 120 bp, Artificial Sequence
  ENSG00000255284_3 (sequence is synthesized)
agataattggatgctgcaagcggcaaagggctcgggatgcaaaacaccgcaagaaatgcaacaagtgaggagcattcccgcaaagaaaaaacgcacaggccgagagcagtggctcacgcc

SEQ ID NO: 1016383 - DNA, 120 bp, Artificial Sequence
  ENSG00000255284_4 (sequence is synthesized)
gtacccggtccgggtcggctgggctgcccgccgctccgcgcgcccgggcggtcgcaggtcgcgcctgctttggccccggcgggttcggcatccgagcctggcaggggccaatagaaagtt

SEQ ID NO: 1016384 - DNA, 120 bp, Artificial Sequence
  ENSG00000255284_5 (sequence is synthesized)
agagaggaataaggaggtgagtacatgacaaagagccacagtcgcaggcggtggggcctggctcagaacaggctgtgctgggaagcgggagcaggagctggcgccgccttgcgggctggc

SEQ ID NO: 1016385 - DNA, 120 bp, Artificial Sequence
  ENSG00000255284_6 (sequence is synthesized)
gcaagaaacgtgagacccctggctcgctccacacacaacctaagtgccagatggatgagacgcctacgcgtgagtaaatgccaggaacatgagactcgaacgtggcaggatatccttctg

SEQ ID NO: 1016386 - DNA, 120 bp, Artificial Sequence
  ENSG00000255284_7 (sequence is synthesized)
aggcgtgagccaccgcgcctggcctgaagcagtttttccttagactgtagttggagggggtgagaccacgtggagtggttggcagacaggcaggcaccctttgaggccaaaagggcgctt

SEQ ID NO: 1016387 - DNA, 120 bp, Artificial Sequence
  ENSG00000255284_8 (sequence is synthesized)
gagacagagccagcaggcgagcgggccgcccaggtccctggccccctgctgccagtatgaaggtcccaccaagcctctgctccaaccaggggaaccgtcatggttgggaacagccaaggt

SEQ ID NO: 1016388 - DNA, 120 bp, Artificial Sequence
  ENSG00000255284_9 (sequence is synthesized)
gtcatggttgggaacagccaaggtgaggaattctgtgggtcacaccccctgaaaaccactggcctccgccgggcgcggtggctcacgcttgttatcccaacactttgggaggcccaggcg

SEQ ID NO: 1016389 - DNA, 120 bp, Artificial Sequence
  ENSG00000230516_0 (sequence is synthesized)
ttcagcagaaccagagctactcccctggaatccaaccagtaagctgttatcagaattctccagccactcctggataccattgccaacaagctggaaagaactgtgtaggaggaaatgcca

SEQ ID NO: 1016390 - DNA, 120 bp, Artificial Sequence
  ENSG00000230516_1 (sequence is synthesized)
gacttgctgagtcaggcaacttcttcaacccaaggttgactggaaatgagcgtgactgcatccatgggaacacaggagcacctactcaatgcttggccctataaaatcgtaatgatccca

SEQ ID NO: 1016391 - DNA, 80 bp, Artificial Sequence
  ENSG00000230516_2 (sequence is synthesized)
cctactcaatgcttggccctataaaatcgtaatgatcccatgaagcaagtattattttgcttcatggaaaatcaaccgaa

SEQ ID NO: 1016392 - DNA, 120 bp, Artificial Sequence
  ENSG00000230516_3 (sequence is synthesized)
cagtaagagaaactatccacagagtaaacacacaatctacagaatgggagaaagcatctgcaaactatgcatgtgacaaaagtctactattcatcatctataagaaacttaaacaaattt

SEQ ID NO: 1016393 - DNA, 120 bp, Artificial Sequence
  ENSG00000230516_4 (sequence is synthesized)
ttttcaaaagaagacatacatgcagccagcaagcatatgaaaaaagatcaatatcaccattcattagagaaatgctcattaaaaccacaatgaaatagcatctcacaccagtcagaatgg

SEQ ID NO: 1016394 - DNA, 120 bp, Artificial Sequence
  ENSG00000230516_5 (sequence is synthesized)
ccattcattagagaaatgctcattaaaaccacaatgaaatagcatctcacaccagtcagaatggctataataaaaagtcaaaaaataacatgccggcaaggttgcagagaaaagggaaca

SEQ ID NO: 1016395 - DNA, 120 bp, Artificial Sequence
  ENSG00000255289_0 (sequence is synthesized)
cttgggagccaggcctgcaccccatagagtcagctctggtttagagccagcccttccacccttgccaccttcagccgctagcccaaatctcaacgctcttctcgcccattcccaaacatc

SEQ ID NO: 1016396 - DNA, 120 bp, Artificial Sequence
  ENSG00000255289_1 (sequence is synthesized)
tctgcgcttctcccttccccatccgatcatttctgtttccattatttttctttcttcgcagttccttccacggtgtctttggaaatgctgattcctctcttggctttgtgctgtttttat

SEQ ID NO: 1016397 - DNA, 120 bp, Artificial Sequence
  ENSG00000255289_2 (sequence is synthesized)
accacaggaccagccctccttccctcttccttggctgagggtgcaccgctcctgcctcagcatctccttgggctctgctctaaatgtattacaactggctgtggcttatgcctgcaatct

SEQ ID NO: 1016398 - DNA, 69 bp, Artificial Sequence
  ENSG00000255289_3 (sequence is synthesized)
cagcactgtgggcaacaaagcaagaccctgtctctacaaaattaaattaaattaaaaagtattacattt

SEQ ID NO: 1016399 - DNA, 120 bp, Artificial Sequence
  ENSG00000253613_0 (sequence is synthesized)
aatggaggggaggtcgacgccttggagatggaaacgatttaaacatacttgtagcaaatccttcatggtggagcaggaataggaagcgtttgacttactttggccagtgcatatgagcaa

SEQ ID NO: 1016400 - DNA, 120 bp, Artificial Sequence
  ENSG00000253613_1 (sequence is synthesized)
aaagagaaaggacaaaagaaactgcctattcagctataccctgagcttctctggacaaaggctgagtcttacctacttttctatccccattgtttggctgaaggcttgttccacagtgtg

SEQ ID NO: 1016401 - DNA, 120 bp, Artificial Sequence
  ENSG00000253613_2 (sequence is synthesized)
aggaaagttcaagaggggaaaaaataaaagactagtgacataatttaagaaaaggatgattgcaatgcatcctgaagctgcctatctccaaatattctctcctataggcagggccaacag

SEQ ID NO: 1016402 - DNA, 120 bp, Artificial Sequence
  ENSG00000253614_0 (sequence is synthesized)
attaccttccgaggtgccagtgcgcgctggggcccaatggctctgctccgtatatttcttctccgagagtttggagacgtccctctcagagaagctggagggtccctgtctgagacccca

SEQ ID NO: 1016403 - DNA, 120 bp, Artificial Sequence
  ENSG00000253614_1 (sequence is synthesized)
gatgaggatctggaatatccacaaagctgcgtccaggggaacgcgtggaagctgcagcggagcctcctgctcaagagaaaaggccagtctgaaacctacaagaagaacatgtgtcgggaa

SEQ ID NO: 1016404 - DNA, 120 bp, Artificial Sequence
  ENSG00000253614_2 (sequence is synthesized)
ctgcgggctgtgggctgggggctactggaggaggtgggcaggtggggagaagcacccccttcagagctgggggcttggggagtgggggcgaggggaggcttggaaagaatggagtgtgtg

SEQ ID NO: 1016405 - DNA, 120 bp, Artificial Sequence
  ENSG00000253614_3 (sequence is synthesized)
gggcgggccgtcctggtccccagggcgctgggctttcttccctggcagactccgcagcgcctgagatgtggacgccttggaggcggagggcccaagtcatctttatgagcagcaaaagaa

SEQ ID NO: 1016406 - DNA, 120 bp, Artificial Sequence
  ENSG00000253614_4 (sequence is synthesized)
acccaaaactttagctggtttctccacccacagttcctcttacagagcacttcagagagaattttaaagcggtataacaaaattaagtatatactgtgttttatttttaatgtacacatt

SEQ ID NO: 1016407 - DNA, 120 bp, Artificial Sequence
  ENSG00000253614_5 (sequence is synthesized)
ttaaaagataatattagatacattatagaaaggaacgtaatgaaagaaataattcccataatatatcaccttctgggctaaaaattctttggctaaaatccaatatttattttatattaa

SEQ ID NO: 1016408 - DNA, 120 bp, Artificial Sequence
  ENSG00000253614_6 (sequence is synthesized)
tgaatgcctacataaatatgttctttactgagggagcttagaaggacactttgaagtgggaagatggttcatgttcttgaataagaagactcatttttctcaagatgtgagctctttatc

SEQ ID NO: 1016409 - DNA, 120 bp, Artificial Sequence
  ENSG00000253614_7 (sequence is synthesized)
aattttacataaaccaaataaagctatcaaaatttttaacgtttttgaattacacatgctttcactattgtgatgacattaagaaaatttttgtaacggttaaaaaagtcttacctttct

SEQ ID NO: 1016410 - DNA, 120 bp, Artificial Sequence
  ENSG00000253614_8 (sequence is synthesized)
agatatcaaatgtgctattgatttccacaaatagtttgctaacagctgaaaagatagataaatgaatacaagagaatagaaaatccagggacactcaaatatatgtaagaattcagaact

SEQ ID NO: 1016411 - DNA, 120 bp, Artificial Sequence
  ENSG00000253614_9 (sequence is synthesized)
tgataatggtgatactttgtactagtaggaaaagatgaattattttcattaatgaaaggcctgctttttggaggaaactagctagatttttatgccacaaaaataagttcctcatacaat

SEQ ID NO: 1016412 - DNA, 120 bp, Artificial Sequence
  ENSG00000253614_10 (sequence is synthesized)
atagactgaaaattttaaatatgtaagatgagagaaacatcagaagaaaacacaaatgccttatttatacagaagcatttttgtgttgacaaaaacctgtctaagaagctcacaagcaag

SEQ ID NO: 1016413 - DNA, 120 bp, Artificial Sequence
  ENSG00000253614_11 (sequence is synthesized)
ccttctgaaggttgatctagcaaaataaaattaaatcaccctataataacaaaaaataacaaaacataaggtaacataaaatatttaccatatgtgtatacatattagattaaatatgga

SEQ ID NO: 1016414 - DNA, 120 bp, Artificial Sequence
  ENSG00000253614_12 (sequence is synthesized)
gtgacctatgctcataggaaaaaatattttgtgttcttggtaagagaaggaatttaaaagaggtataaaatattgttttctgtccacaaattttgtgaagatgaaaaacagtgatattat

SEQ ID NO: 1016415 - DNA, 120 bp, Artificial Sequence
  ENSG00000253614_13 (sequence is synthesized)
actgctgcttaaagttgctgatggcctttcaaatggacaatttggtgctctgatggctgggaagtccaaggttacagggcttatctggtgaggatcttttccctggtggggactctacag

SEQ ID NO: 1016416 - DNA, 120 bp, Artificial Sequence
  ENSG00000253614_14 (sequence is synthesized)
agtctcagggtagtgctgggtattacttggtggtggcctcacaagagacaaccaggaatgaattaatccattcataagggcttggcctcccaaaggttctacctctcaaaagttctccct

SEQ ID NO: 1016417 - DNA, 120 bp, Artificial Sequence
  ENSG00000253614_15 (sequence is synthesized)
ctcaaagtttctactagtcacttcccaaaggttctaccagtcacttcgcaaaggttctacctctcaacactgctaccttgggggacaaagttttcaacacatgaacttttggggaacaca

SEQ ID NO: 1016418 - DNA, 120 bp, Artificial Sequence
  ENSG00000253614_16 (sequence is synthesized)
ttcaaaccatatcaccactttagctgtcttggctactatctgcaccttttatgttcaacccatgtatatctttgaatctattgtgtgtctcttataaataatatatatagttggatcaca

SEQ ID NO: 1016419 - DNA, 120 bp, Artificial Sequence
  ENSG00000253614_17 (sequence is synthesized)
tttttcttatcagtctgacaatctctgccttttgattgtattgtttaatccattcacatttaatgttactatgatatgcttggatttacttctattttcctttttatttttaacgtttca

SEQ ID NO: 1016420 - DNA, 120 bp, Artificial Sequence
  ENSG00000253614_18 (sequence is synthesized)
tgtattttttaattcttttattccttctttactgctttttcatcaagtgaatatttaaaaagttaacgaaactcaaagattcttgtacttaggagaatggatgtttttatacttttttgg

SEQ ID NO: 1016421 - DNA, 120 bp, Artificial Sequence
  ENSG00000253614_19 (sequence is synthesized)
taaacgtacatcacatataatactaccttcctggcctacttcacagaatgatgtggaaatcagtgagacagtatgagacagagactgagaaaccacaaagtattgtttctaattaagtac

SEQ ID NO: 1016422 - DNA, 79 bp, Artificial Sequence
  ENSG00000253614_20 (sequence is synthesized)
gagactgagaaaccacaaagtattgtttctaattaagtactggagcaatgtttaaaaatcagtgtgagatgggcatgag

SEQ ID NO: 1016423 - DNA, 90 bp, Artificial Sequence
  ENSG00000253614_21 (sequence is synthesized)
ttgggcattagggtgaaattaagtagtagtgttttacaaaaaatgaattttgaaagggtgtgtgtacgtgtttaggtcatgcttttttgg

SEQ ID NO: 1016424 - DNA, 120 bp, Artificial Sequence
  ENSG00000253614_22 (sequence is synthesized)
tgaaagggtgtgtgtacgtgtttaggtcatgcttttttgggctagttagtatgaaatctatttacctaaattctgtaagactacttaaaatgtttattaaattttgaaattcatgtaaca

SEQ ID NO: 1016425 - DNA, 120 bp, Artificial Sequence
  ENSG00000226409_0 (sequence is synthesized)
gcctttccacgttgcacaagcccagcgcacggtacccactggatatgcccgaggcctccagaggaaaggaaaggaggaaaagggacagaagaaatgttcacaggaactgcatatgggcct

SEQ ID NO: 1016426 - DNA, 120 bp, Artificial Sequence
  ENSG00000226409_1 (sequence is synthesized)
gctacttgtgtcaaaatgtgactgaactctcttccagcagtgtgaatccctggaaggcaagatcgccattctggtctcttgtggatatcaatgctgatctcagcttctgatgcacggcag

SEQ ID NO: 1016427 - DNA, 120 bp, Artificial Sequence
  ENSG00000226409_2 (sequence is synthesized)
tcaattaataaatgattgttgcctgaaaaactgagccccaaaacaatattacaagtttaatatcagtaaaggatttaatgctttctaacatgaagataccagaagttgctgatttttgta

SEQ ID NO: 1016428 - DNA, 120 bp, Artificial Sequence
  ENSG00000226409_3 (sequence is synthesized)
taacccagagatggatttaaatgcagagtgtatgaacttcttcattcctgagggaggacttatgatttcatgagaaatgccctaggaaaggggccggggagactgatggagaagaagagt

SEQ ID NO: 1016429 - DNA, 120 bp, Artificial Sequence
  ENSG00000226409_4 (sequence is synthesized)
tggcttcctgagctgctgaacgtgccagtcctgctgacccactctcagatatcacaggcacccgctgtgtctgacagagacctttctgcaagtacacgtgcaggtctgctctgcaaaggc

SEQ ID NO: 1016430 - DNA, 120 bp, Artificial Sequence
  ENSG00000226409_5 (sequence is synthesized)
gttatcatctgcagattattgcacagagtggctacgagctgtggtgtgatcctgtcacagagagagcctggtcacgttttcagaacagcaggaaacaggtacacctgtaagcttatactt

SEQ ID NO: 1016431 - DNA, 120 bp, Artificial Sequence
  ENSG00000226409_6 (sequence is synthesized)
atcagatttaaaaataaaacaaaaaatccatgctattccatgaaaatcggactcaaataaacttagtcactgatctgtgaagtaaataatctgatggtaatgcatcagttgacacttggg

SEQ ID NO: 1016432 - DNA, 120 bp, Artificial Sequence
  ENSG00000226409_7 (sequence is synthesized)
cctgggtttttaggcactaatgaaagccaggggcaaaataatttttaatctaccattatttcccttgatggttcgacaaaagttcttgtactagaaagttttataaaactactttctgag

SEQ ID NO: 1016433 - DNA, 120 bp, Artificial Sequence
  ENSG00000226409_8 (sequence is synthesized)
tttctgagtgtcctgtgacatttctctgatgatataaaaagtcaatatttgatagcttaaatatcaatattgacagaaatatgattatttaaataaaaacacaaatagtaaaataatttt

SEQ ID NO: 1016434 - DNA, 120 bp, Artificial Sequence
  ENSG00000226409_9 (sequence is synthesized)
tgtcaaaatgtgactgaactctcttccagcagcttactctgagggaggtctgaatgccatattgtgagcggccctgctgaaagacccatgtggcaaggatctgagatcattggccaacag

SEQ ID NO: 1016435 - DNA, 120 bp, Artificial Sequence
  ENSG00000226409_10 (sequence is synthesized)
gctgcaaagagtcctaccaacagccaggctggtgttcttggaagtggatcttctcctactctcctacttgagatgactgcagccccagctaacacttcgattgcagccttgttaagatat

SEQ ID NO: 1016436 - DNA, 120 bp, Artificial Sequence
  ENSG00000226409_11 (sequence is synthesized)
gccagacacacccagctaagttatgcctgagttactagcccacagaaatgataagataataaatatttgctgttttaagctgctaagttttgggttaatttgttatacaacaatggataa

SEQ ID NO: 1016437 - DNA, 120 bp, Artificial Sequence
  ENSG00000226409_12 (sequence is synthesized)
ctaatacaagtgcagtcattgatctcattgaacacacccgtaattctttggaaaaatgtctactttctcaccaaactaaaatccattaattccagtagttaggtgtttggcaatgccttt

SEQ ID NO: 1016438 - DNA, 120 bp, Artificial Sequence
  ENSG00000226409_13 (sequence is synthesized)
aaaacgatgcatagaagtacatggccaggtctttaaaattgcgttgctagactgaagaagagctgtctgacttactgggcttcccacgttcctgccttcagttcctgggttagtgtcaca

SEQ ID NO: 1016439 - DNA, 120 bp, Artificial Sequence
  ENSG00000226409_14 (sequence is synthesized)
ggttgcggattttccactccatctcccagtcatgtctctggcacttcccccgcttggctcctagtaatcaactttggctgacctctaactctccacctcctggaccacaaaataaaccca

SEQ ID NO: 1016440 - DNA, 120 bp, Artificial Sequence
  ENSG00000226409_15 (sequence is synthesized)
gtgtcaaaatgtgactgaactctcttccagcaggctatttcactgaactgaagcagtcaaaagagaatgctcatgagatcccatcaccaccactttaccgaactacttccatatcttact

SEQ ID NO: 1016441 - DNA, 120 bp, Artificial Sequence
  ENSG00000226409_16 (sequence is synthesized)
ctcttccagcaggtgtggggaaaagagtgacttcaccttaaatgttaacctgccatgtaacttctgactaatcccaggtccagaaatgcctccaaatgtctcgttgctgtattactcttt

SEQ ID NO: 1016442 - DNA, 120 bp, Artificial Sequence
  ENSG00000226409_17 (sequence is synthesized)
gaccaaatatctatggatacaaaaagttcagcatgacaagatctactgttctcccacataatttttcatgattcatagtcctaaaaggaccaagttccatgcagatctgcagaacaagag

SEQ ID NO: 1016443 - DNA, 120 bp, Artificial Sequence
  ENSG00000226409_18 (sequence is synthesized)
ctttaccgaactacttccatatgtgactatttactctttcttcttttctattattattgatgaactggccatgtacctagctaaggtggatcctgccacttagatattagatcttatcta

SEQ ID NO: 1016444 - DNA, 120 bp, Artificial Sequence
  ENSG00000226409_19 (sequence is synthesized)
ccctttctcactctgaaatattgttccaagaattcttttcttgtatcattacttttccctgtttactagtgtaataagtatagaaatatgctgttattttcccatattaaaaattctctt

SEQ ID NO: 1016445 - DNA, 120 bp, Artificial Sequence
  ENSG00000226409_20 (sequence is synthesized)
gagtaggaagctcaatatagtaaagatgttaattctttctcaaattgatataaatttatcaaatcaattatttattaatttaaattgatctacattcctcccaaattggtcagcattcta

SEQ ID NO: 1016446 - DNA, 120 bp, Artificial Sequence
  ENSG00000226409_21 (sequence is synthesized)
aaaatatcaacattatgtgtgtacgtaaagagataagatgtttctgaagtttaatgaaattgaatgggacttgaagaacagagttcaaggaattgcactattgaatatgaaaatctattc

SEQ ID NO: 1016447 - DNA, 120 bp, Artificial Sequence
  ENSG00000226409_22 (sequence is synthesized)
aagatgaagagtgttggaggaattacatgatggatgttaagatttgttataaagttgcaagactaataatgctataaaaagtagtcttcaaccaggtgcagtggatcacatctgtaatcc

SEQ ID NO: 1016448 - DNA, 87 bp, Artificial Sequence
  ENSG00000226409_23 (sequence is synthesized)
attgcgagctgagattgcaccactgtgctccagcttggaccacagggcaagactccatctcaaaaataagaaaaaaaaaaaaaagga

SEQ ID NO: 1016449 - DNA, 120 bp, Artificial Sequence
  ENSG00000226409_24 (sequence is synthesized)
aagaaaaaaaaaaaaaaggaaacaaaaagtaatcttccagattaacagagctgcaagaattgcattgccaaatattatgacttataatttacagaaattgagatggtcagatatttgtgt

SEQ ID NO: 1016450 - DNA, 120 bp, Artificial Sequence
  ENSG00000226409_25 (sequence is synthesized)
cagaacatgaaatacagacaaatattcacatgtatatggtcacttgatttttgacaaaagtatcactgcagtgtataaaggaggttctttttcataaatggcattgaatcaactatatgc

SEQ ID NO: 1016451 - DNA, 120 bp, Artificial Sequence
  ENSG00000226409_26 (sequence is synthesized)
tcatattgtaaaaatgactcctagctcacaccatatactaagtctcttccagatgaactgtactctttcccgtttcagttaatggacactatgtccttccaattgctcagaacaaaattt

SEQ ID NO: 1016452 - DNA, 120 bp, Artificial Sequence
  ENSG00000226409_27 (sequence is synthesized)
ttggagtcatcccaatccctctttttctcttttatttcacactgaatacattggcaaattatttcaggtcttccttatagtgtatccagcattaaatcaattatcaccattttaagacta

SEQ ID NO: 1016453 - DNA, 120 bp, Artificial Sequence
  ENSG00000226409_28 (sequence is synthesized)
tgtgttggtcctaggtattatttattctgtcttgcctagattattacaacaacctctgtgttagttgggttcctccaaaacctgactctaagagggtaatcccaggaagcatggtaggat

SEQ ID NO: 1016454 - DNA, 120 bp, Artificial Sequence
  ENSG00000226409_29 (sequence is synthesized)
agtgggagagtgtaataggaaaagccgatgaagcgtgcatggatgagtgagttaatgctgtttgacactgaaggctagttctacagggcaccctctaatagactatatagaaaacacgtc

SEQ ID NO: 1016455 - DNA, 120 bp, Artificial Sequence
  ENSG00000226409_30 (sequence is synthesized)
agaattgtctcactgaggaaaattggagtctttaggcaccaactctcttccgaacttggtaagggtcagttctaggcatacgtccctggcactttcgtgctcactgcttttcaggcagag

SEQ ID NO: 1016456 - DNA, 120 bp, Artificial Sequence
  ENSG00000226409_31 (sequence is synthesized)
aaaaaggaagcagttaatatacgtggggattgtctacatacaggtgtctcagggtgaaccaaggctataggaaggggtgactacaacttctactctactttccaactggtcttacttctg

SEQ ID NO: 1016457 - DNA, 120 bp, Artificial Sequence
  ENSG00000226409_32 (sequence is synthesized)
tccttttaaatctggtcttaacacagtcagaaccacagaatctatggcatctcatgccacttttatgctgaaaatcatccaacatctccccaaatcactccaagtaaaaactctaaatac

SEQ ID NO: 1016458 - DNA, 120 bp, Artificial Sequence
  ENSG00000226409_33 (sequence is synthesized)
catccataagaacctccaaaatctgatctttcattacattaaaaatattttatatatgactattctgtttcagatttgctctgagttccttagtcagaagttactcttttagtgaggccc

SEQ ID NO: 1016459 - DNA, 120 bp, Artificial Sequence
  ENSG00000226409_34 (sequence is synthesized)
tctactccaaaaatttcaacacccactcttgttattttatatgcctcttctctgctcaattgttcttcctttgctttaagcaccatttatcctagtttatacattatttttgtaaaattt

SEQ ID NO: 1016460 - DNA, 120 bp, Artificial Sequence
  ENSG00000226409_35 (sequence is synthesized)
ggtttattgctcttctctcctgctggaactataacctccataatctgttttgggtctttttgttgtttttcattttttgattgcttcagtactgtattctcagtgcttattaagtttggc

SEQ ID NO: 1016461 - DNA, 120 bp, Artificial Sequence
  ENSG00000226409_36 (sequence is synthesized)
tgacacatagtagatacttacttgtcattgaattaataatgtaatttgtatataatatgattttcttttgacaaaatccaagataagctaataattaataaaatatgcttgtaagaagca

SEQ ID NO: 1016462 - DNA, 120 bp, Artificial Sequence
  ENSG00000226409_37 (sequence is synthesized)
gaggcctccagaggaaaggaaaggaggaaaagggacagaagaaatgttcacaggaactgcatatgggcctgctacttgtgtcaaaatgtgactgaactctcttccagcagactctctctt

SEQ ID NO: 1016463 - DNA, 120 bp, Artificial Sequence
  ENSG00000226409_38 (sequence is synthesized)
agtggtgcgatctcagctcattgcaacctatgcctcccgggttcaaacgatgcgtagtatggcagcaattaagatggaagtaatgaggaaaaggaatacttatcaatggagattagagag

SEQ ID NO: 1016464 - DNA, 120 bp, Artificial Sequence
  ENSG00000253619_0 (sequence is synthesized)
tctttccagccgccctgtggggaaggtgtcttgcttccccttcaccttccaccatcagtgtaagtttcctgaggattccccagccgtgctgaactagatgtggtctcactgtgttgccta

SEQ ID NO: 1016465 - DNA, 120 bp, Artificial Sequence
  ENSG00000253619_1 (sequence is synthesized)
ggctagtctcaaactcctggcctcaaactatcatcccaccttagcctcccaaagtgccgggatcacaaatttgtcccatagcataagattcacactcaatactatcatcctttgggtctc

SEQ ID NO: 1016466 - DNA, 120 bp, Artificial Sequence
  ENSG00000253619_2 (sequence is synthesized)
taagacaccaacctaaaagcagaagaaggcttcaaaggtggaagaagatgtgagcctgggtgattgaaaaatagatgtgccattaccctgaaataggacttcttcaaggcaaaggctgat

SEQ ID NO: 1016467 - DNA, 120 bp, Artificial Sequence
  ENSG00000253619_3 (sequence is synthesized)
tcaaaccagtatccagaggtacagttgctgcataacttcctcattatccataggaccaaactaaatgtctctggtttgaaattttgactagaaattatatacatctgccagcaattattg

SEQ ID NO: 1016468 - DNA, 120 bp, Artificial Sequence
  ENSG00000253619_4 (sequence is synthesized)
tgggtgtaactgaagtgcacactgctcactgcccctcaataacatcattttcaaataataacattggaaagaggtactttcctaaaactttcaagtgatctacaatctcccagactactt

SEQ ID NO: 1016469 - DNA, 120 bp, Artificial Sequence
  ENSG00000253619_5 (sequence is synthesized)
ttacaatggattttttttttttttactagatgtgttatttcaattttggccgctaaccaaaaggcaggacattgctggtgaatttaagctgttcaattatacacaaaaaagaatctgagc

SEQ ID NO: 1016470 - DNA, 120 bp, Artificial Sequence
  ENSG00000253618_0 (sequence is synthesized)
cagacgaagaatcctgctccacctttctaggtggttgtaaccatcttatgagataagggaagccttttgcagtgtctgcaagtgctggaaattgctgaccaagcatgcggccagggtgtt

SEQ ID NO: 1016471 - DNA, 120 bp, Artificial Sequence
  ENSG00000253618_1 (sequence is synthesized)
ccaagctcatcaggagggtcctcagaacggcagtcctcaccagcagttctctgggtggcagtgctgaatggaagcggccatcccctaaaacaggaaggaggtggcacataatgaagaaat

SEQ ID NO: 1016472 - DNA, 120 bp, Artificial Sequence
  ENSG00000253618_2 (sequence is synthesized)
gccatcataagccaaaattacaaccaagtttagagaccagagatcttcccagatggaatctctggagaaagtgttttcagttatagtaacaaatgaacacttacgaagtccttaccatgt

SEQ ID NO: 1016473 - DNA, 120 bp, Artificial Sequence
  ENSG00000278970_0 (sequence is synthesized)
gctgggcctctctccgcagccgcgagacccgcgcttggcgcataggccggttctaatttacaagaacaccgcggcctgaggccggagagtcccttcaacccgggaggcggcggctgcagg

SEQ ID NO: 1016474 - DNA, 89 bp, Artificial Sequence
  ENSG00000278970_1 (sequence is synthesized)
atggccgaaaccaggaagctgcgcgatggcgccacggcccctcttctcccggcctgtgtccggaaggtttccctccgaggcgccccggc

SEQ ID NO: 1016475 - DNA, 120 bp, Artificial Sequence
  ENSG00000278970_2 (sequence is synthesized)
cggcctgtgtccggaaggtttccctccgaggcgccccggctcccgcaagcggaggagagggcgggacgtgccggggccggagctcagaggccctggggccgctctgctctcccgccatcg

SEQ ID NO: 1016476 - DNA, 120 bp, Artificial Sequence
  ENSG00000278970_3 (sequence is synthesized)
caagggcggcgctgacctgaggcctccccgcaaaggtccccgaggcggcggcggcggcgggctgtgagaaccgcagaagaacgctgggcgcgcagcgacccgtccacccccgcgaggaga

SEQ ID NO: 1016477 - DNA, 120 bp, Artificial Sequence
  ENSG00000278970_4 (sequence is synthesized)
gacttccacagaggcagcgtttccacagcccaaagccacgtttctagggtgatgcagccccagtaagttcctggcggggaagctcacggctgtcaaaagaactcttcgctccagccggcg

SEQ ID NO: 1016478 - DNA, 120 bp, Artificial Sequence
  ENSG00000278970_5 (sequence is synthesized)
cacgaaggggaggagggcaggaggctgccgcccgcacaggtcatctgatcacgtcgcccgccctagtctgcttttgtgaatctccactttgttcaacccccacccgccgtctctccctcc

SEQ ID NO: 1016479 - DNA, 120 bp, Artificial Sequence
  ENSG00000278970_6 (sequence is synthesized)
gaccctcttccctgtggcaagctgctgaaggagacctgctgttactgctttagctgctgttctgcttaatctcagacagctggaaggtagtattccgccctcgcccagccacccgagtaa

SEQ ID NO: 1016480 - DNA, 120 bp, Artificial Sequence
  ENSG00000278970_7 (sequence is synthesized)
atgagaatgatgactgactgagaccctgatggtggtggcttaggcttaatctcagacagctggaaggtagtattccgccctcacccagccacccgagtaaatgagaatgatgactgactg

SEQ ID NO: 1016481 - DNA, 120 bp, Artificial Sequence
  ENSG00000278970_8 (sequence is synthesized)
agaccctgatggtggtggcttaggcaagatgaacgtctgaaatggaggcccagggctgccacgatggctctgtagtcatcagggagggagctccttttatcttgttacctactcccctct

SEQ ID NO: 1016482 - DNA, 120 bp, Artificial Sequence
  ENSG00000278970_9 (sequence is synthesized)
tgtgcccctttcttcccttgatctaagaaggttgctccggatctcgccatctggcctgcgttcaatcagcagaagcttcctggaggagcaggaggaggcactgtgctcgcatcacatacc

SEQ ID NO: 1016483 - DNA, 120 bp, Artificial Sequence
  ENSG00000278970_10 (sequence is synthesized)
agtggccagaagttggcttcagggaagctcaggaaataggatgcgagaagccatgagacctccccaaactctgcagtaacagagtcaacaagacaatggcttaaagatggagagaccagt

SEQ ID NO: 1016484 - DNA, 120 bp, Artificial Sequence
  ENSG00000278970_11 (sequence is synthesized)
tgatcggtcacacaagctgttccacgataattcttgtgtcagaaggggaggctgactaccaggaccactggccccacttccagcccctccattctgagtacacttcagagggctctggca

SEQ ID NO: 1016485 - DNA, 120 bp, Artificial Sequence
  ENSG00000278970_12 (sequence is synthesized)
gggtgagggggtcttggtggtgccacagagagtaaaggtctagcacacccattgtggagatatttcatggggacaacccagtgacttcacttgaagtaaagtgggattttccaaccttga

SEQ ID NO: 1016486 - DNA, 120 bp, Artificial Sequence
  ENSG00000278970_13 (sequence is synthesized)
ttcttgggtagagactggaggattggggtgttgcccaccgggccttacggactctcctgagtgatctgagtcacctccaaagacacgtgcccagcttcctttcaagtctctggccaatgc

SEQ ID NO: 1016487 - DNA, 120 bp, Artificial Sequence
  ENSG00000278970_14 (sequence is synthesized)
aatgtgagcagaagtgaaggggcaactttcaggtgatgacttggaaaagaaagcttagtcctctgcttctcctgtcacccgaaagagaaacagaggcttgtcttgttgaagccagtgtgt

SEQ ID NO: 1016488 - DNA, 120 bp, Artificial Sequence
  ENSG00000278970_15 (sequence is synthesized)
ttggtgtctttttgtatagtggcttagacagtggcctaactagaagaccaaggctcaaaggaacacattttgagcttctccacagtttgagaacctctacattacctacaccaagccttc

SEQ ID NO: 1016489 - DNA, 120 bp, Artificial Sequence
  ENSG00000278970_16 (sequence is synthesized)
cccagcactcaatttatggaagaccatttctcttctcatgacacatgtcctcatgttgctttggcctgttttaaagctttctcaactccatctcaataaagaaatctgcagctttgttgg

SEQ ID NO: 1016490 - DNA, 77 bp, Artificial Sequence
  ENSG00000286540_0 (sequence is synthesized)
gacttgaggagaaaaggagagatgttggaatgaacaagcagtccatggagcagttacacacactcatcaattaagtt

SEQ ID NO: 1016491 - DNA, 120 bp, Artificial Sequence
  ENSG00000286540_1 (sequence is synthesized)
gcagtccatggagcagttacacacactcatcaattaagtttgctgtcttatatgagggaaattcatggtaccccaaaacaattaccatagtaacattaaataacactgatcagagaccac

SEQ ID NO: 1016492 - DNA, 120 bp, Artificial Sequence
  ENSG00000286540_2 (sequence is synthesized)
ataatgatataataatgatgaaagagtttgaaatacttcaagaattaccaaaatgtggcacaaagacccaaaagaagcacatgctgttgaaaaaatgacaatagacttgctcgatgcagg

SEQ ID NO: 1016493 - DNA, 120 bp, Artificial Sequence
  ENSG00000286540_3 (sequence is synthesized)
gttgcaacaaaccttcaatttgtaaaaaatgcattatctatgaagcacaataaagtgaagtaaaattaaatgaggtatgcctgtttgtatttacctatgtaattatcattttccatgctc

SEQ ID NO: 1016494 - DNA, 120 bp, Artificial Sequence
  ENSG00000230704_0 (sequence is synthesized)
ttattccttttttattttccgtctttattaacgaaagtgtttactgcctaagccagacactgagagccaccatgtattcctctctctctctcacctattcccatgtttaatccattattt

SEQ ID NO: 1016495 - DNA, 120 bp, Artificial Sequence
  ENSG00000230704_1 (sequence is synthesized)
ggattggtccattttatctccattttctcaaatacaggaaaagacagatcatcatcaaccagcaattgtgactatctacatattcacataaggatttcccaacttggggtatttttgtca

SEQ ID NO: 1016496 - DNA, 120 bp, Artificial Sequence
  ENSG00000230704_2 (sequence is synthesized)
tcacaagagtcagcctgggacatatgagaaagagatgccggtctcctacctcttgtttcctcacttgaagtgcaacccatttccaaccatcttttctttccaactactcagggtcctgct

SEQ ID NO: 1016497 - DNA, 120 bp, Artificial Sequence
  ENSG00000230704_3 (sequence is synthesized)
ttgatttttctatgcacacagctgacatatgctgggcctaagaaagggaggctgcaggactggacatgctggtttgctagggaaccagtgaatcctctgtgaagcttgtccagtgaagac

SEQ ID NO: 1016498 - DNA, 120 bp, Artificial Sequence
  ENSG00000230704_4 (sequence is synthesized)
ccaaatatttacaaattatcaggaaagaactcattctctttctctctgtatattctgtctgtattggctttccattgcttcagtaataaactaccgcaaatttagcagcatacaataaaa

SEQ ID NO: 1016499 - DNA, 120 bp, Artificial Sequence
  ENSG00000230703_0 (sequence is synthesized)
tggagccactaggatctcgttcaaggctggtccacctcacacgaatcctaccccatgggcgctgggaagacagggttttgaacatgttgcagactggtctcaaactcccaaactcctgag

SEQ ID NO: 1016500 - DNA, 120 bp, Artificial Sequence
  ENSG00000230703_1 (sequence is synthesized)
tcctgaccttgaaaattggactccaagttctttagcttttggactgggacttacaccagtggtttgccaggagctctcaggccttcggccacaaactgaaggctgcactgttggcttccc

SEQ ID NO: 1016501 - DNA, 88 bp, Artificial Sequence
  ENSG00000230703_2 (sequence is synthesized)
gctcctcagcttgcaaacagccggttgtacgactttactttgtgattgtgtgagtcaatagtccttaataaactccctttcctatata

SEQ ID NO: 1016502 - DNA, 120 bp, Artificial Sequence
  ENSG00000243485_0 (sequence is synthesized)
gtgcacacggctcccatgcgttgtcttccgagcgtcaggccgcccctacccgtgctttctgctctgcagaccctcttcctagacctccgtcctttgtcccatcgctgccttcccctcaag

SEQ ID NO: 1016503 - DNA, 120 bp, Artificial Sequence; identical to SEQ ID NO: 874322
  ENSG00000243485_1 (sequence is synthesized)

SEQ ID NO: 1016504 - DNA, 120 bp, Artificial Sequence; identical to SEQ ID NO: 874323
  ENSG00000243485_2 (sequence is synthesized)

SEQ ID NO: 1016505 - DNA, 120 bp, Artificial Sequence
  ENSG00000243485_3 (sequence is synthesized)
ctcgtgttcaatggttttgtccgccttccctgcctcctcttctgggggagttagatcgagttgtaacaagaacatgccactgtctcgctggctgcagcgtgtggtccccttaccagagtg

SEQ ID NO: 1016506 - DNA, 120 bp, Artificial Sequence
  ENSG00000243485_4 (sequence is synthesized)
aggatgcgaagagaaggtggctgtctgcaaaccaggaagagagccctcaccgggaacccgtccagctgccaccttgaacttggacttccaagcctccagaactgtgagggataaatgtat

SEQ ID NO: 1016507 - DNA, 120 bp, Artificial Sequence
  ENSG00000243485_5 (sequence is synthesized)
tcatcagtccaaagtccagcagttgtccctcctggaatccgttggcttgcctccggcatttttggcccttgccttttagggttgccagattaaaagacaggatgcccagctagtttgaat

SEQ ID NO: 1016508 - DNA, 120 bp, Artificial Sequence
  ENSG00000243485_6 (sequence is synthesized)
tttagataaacaacgaataatttcgtagcataaatatgtcccaagcttagtttgggacatacttatgctaaaaaacattattggttgtttatctgagattcagaattaagcattttatat

SEQ ID NO: 1016509 - DNA, 120 bp, Artificial Sequence
  ENSG00000243486_0 (sequence is synthesized)
gcgttctctaaagcttccaaaaggatccagtcccagatacgtattacatttagtcatcatggctccttcgtctcctctgcacaaggggaagcagcctgtggccctcaccagatgcagata

SEQ ID NO: 1016510 - DNA, 120 bp, Artificial Sequence
  ENSG00000243486_1 (sequence is synthesized)
tccaatcttccagcaaacagaatcggtctgcctatcctcacataagccaatccattctccatctcctttaagcagacatatactgcctcacgaggaaactgacatccagtaaaagatcaa

SEQ ID NO: 1016511 - DNA, 120 bp, Artificial Sequence
  ENSG00000243486_2 (sequence is synthesized)
caaccctaaaaatgcaagcaaacatcctgaagaagtcaggaatggatttttctaagactctgtataggcatacctcgaagatattgtgggttggatccagactactacaataaagagagt

SEQ ID NO: 1016512 - DNA, 120 bp, Artificial Sequence
  ENSG00000243486_3 (sequence is synthesized)
ggttggatccagactactacaataaagagagtataataataagttaagtcacataaattttttatttacttatatatacactatattgtagtctattaagtatgcaatagcattatgtct

SEQ ID NO: 1016513 - DNA, 120 bp, Artificial Sequence
  ENSG00000243486_4 (sequence is synthesized)
tttattgtgaaaaatgctaacaatcatcttgagccttcagtgagttataatcttttggctgatggagcatcttacctcaattgtggtgactgttggcagagtggtggttgctgaaggatg

SEQ ID NO: 1016514 - DNA, 89 bp, Artificial Sequence
  ENSG00000230709_0 (sequence is synthesized)
actttcggatgagggaagcagatagcccaccagcgagcacagggacgtgccagacggtatgatctcatgtcacggcaacctccgcctcc

SEQ ID NO: 1016515 - DNA, 71 bp, Artificial Sequence
  ENSG00000230709_1 (sequence is synthesized)
tcttgtccgtttatttattcattcaacaaatattcatgaaatgtatgttgtaagctgaatactttgccagg

SEQ ID NO: 1016516 - DNA, 120 bp, Artificial Sequence
  ENSG00000230709_2 (sequence is synthesized)
attcatgaaatgtatgttgtaagctgaatactttgccaggctccgaggaccagtcaggcactttgatgccttcaagcagcctaggacctagaggtttcaatgcctctgctttcctattta

SEQ ID NO: 1016517 - DNA, 120 bp, Artificial Sequence
  ENSG00000230709_3 (sequence is synthesized)
taaatgggcagactggacctgaagtcctgaaggctcacccgcctggaagccacctctcctctggagttctgatgacgctgcagaagcctgggaaaataacaagaaagctctatttacaga

SEQ ID NO: 1016518 - DNA, 120 bp, Artificial Sequence
  ENSG00000230709_4 (sequence is synthesized)
aaaacaccagctaaaaaatgtagaaggaatctaaaaggtatcgaaagttaccaccttgcaagtggaatattggttttggccaaagatgctaaaatgatcaacagaagggtcgtcctttct

SEQ ID NO: 1016519 - DNA, 120 bp, Artificial Sequence
  ENSG00000230709_5 (sequence is synthesized)
gttgggaaccaggatgctcacaaggcattgcccacaagggacactaattgcaaaagggacagtgtgcctccacaggggaacagctggtgtcaccatcttaacaagggatctgacagcatc

SEQ ID NO: 1016520 - DNA, 120 bp, Artificial Sequence
  ENSG00000230709_6 (sequence is synthesized)
accgtggggggagaaagccaacatcatgcacctccaggagctctcagaggttggaggaacacgtgaaccaacaccaggaggatacagcccgagagatcagccatgggacatttcacaaga

SEQ ID NO: 1016521 - DNA, 120 bp, Artificial Sequence
  ENSG00000230709_7 (sequence is synthesized)
ccacggccaagtctcttcacaaagtcaacgtcaaacacaccaaacaaaggaaaaaaagataaaagagaagaaaaagagcaaaagggaagggactgctctagccaaaaaaggactacacag

SEQ ID NO: 1016522 - DNA, 120 bp, Artificial Sequence
  ENSG00000230709_8 (sequence is synthesized)
cgattcaaaagatgcagccatggaaaatgtcttataagcaccagggccatttaaatgtggactagatgtcagatggtcttattgaactatgattgactttcttagatgtgatcatgacag

SEQ ID NO: 1016523 - DNA, 120 bp, Artificial Sequence
  ENSG00000230709_9 (sequence is synthesized)
tctatgtgagagaatgtccattttcttaggaggtgccttgtggacacacttaggactgcagtgtcgggatgtctgcaaattgccttcagggtctcagccagaaggcaggcaggaagagac

SEQ ID NO: 1016524 - DNA, 120 bp, Artificial Sequence
  ENSG00000230709_10 (sequence is synthesized)
agagatggatggagccatgcagacaccaaggtgaagagctactgaatcttggtggagggtccctgagtcttcattataattttaactttcttgaagttttgaagttttcataataaaaag

SEQ ID NO: 1016525 - DNA, 120 bp, Artificial Sequence
  ENSG00000230709_11 (sequence is synthesized)
ttaggagggaaacattttaaagtagagaaactagatcttcccacagaacactggggacccttattattattattttaaaccctgctctttgctttttcaaagtgagttttgctaaaataa

SEQ ID NO: 1016526 - DNA, 120 bp, Artificial Sequence
  ENSG00000230709_12 (sequence is synthesized)
tggtatctagcatttctgagaaattagcacaaatgtacagctacattagcaacaggaaattcagcacatctgagtcatctatgtaaatggcaataatgaaaatgagggctttcgctgcat

SEQ ID NO: 1016527 - DNA, 120 bp, Artificial Sequence
  ENSG00000230709_13 (sequence is synthesized)
gtctaagaaatgtcctcttttggagactcttccttttgttttacacccagaactgtctcagaggaggttcaacagcagggcctcaagggaccaggagtaggtggcagacatgagggagct

SEQ ID NO: 1016528 - DNA, 120 bp, Artificial Sequence
  ENSG00000230709_14 (sequence is synthesized)
caaagagaccacagcacctgcagggatgtgggtctttagggccaaaataccacggacatgctagtgcagagtggaaccatctccctgggaaatattgatcaacaggccagtgttgccttt

SEQ ID NO: 1016529 - DNA, 120 bp, Artificial Sequence
  ENSG00000230709_15 (sequence is synthesized)
cttcaaacaatttaacttaaggagctcatgcccctcaaggtgacaaagacggtaaaatgtgaattaaatgagcagatgttacgtgtttagaacagtgccctaagttttccctgttgttac

SEQ ID NO: 1016530 - DNA, 120 bp, Artificial Sequence
  ENSG00000230709_16 (sequence is synthesized)
tcccaatgatcactgtaggagttcatttcaaaagctaagaactgtccggcaggctatactaaatggaaaaggtggcatgctaaacagcaaccttgatctgtataagccagcagttgtgtt

SEQ ID NO: 1016531 - DNA, 120 bp, Artificial Sequence
  ENSG00000254880_0 (sequence is synthesized)
actcccggcccggccgctgccaagtcggaggagccgctggagtgtctccctctaccggaggctctcgggcggcgggcgcgggcctgctcctgcggcagggaggcgggcggcctggagaag

SEQ ID NO: 1016532 - DNA, 120 bp, Artificial Sequence
  ENSG00000254880_1 (sequence is synthesized)
cggctccgctcgcgaggagcctcggatggggagtgcggtggacccccaggaactctggagcaccctcccgcccccaagccaagtcctccttagcgaacaaccggggccgagttccaagat

SEQ ID NO: 1016533 - DNA, 120 bp, Artificial Sequence
  ENSG00000254880_2 (sequence is synthesized)
atggccagctatctgggacattactgtagcctcctcgccatcagaactgtcactcccgctgccatcatcctctccttcagcaccatctccattctcatcactcgcatcaccaccacctca

SEQ ID NO: 1016534 - DNA, 120 bp, Artificial Sequence
  ENSG00000254880_3 (sequence is synthesized)
cacagaaccatctgcatccttctgctcacccagtggaccctcttctccctgtacccagggaggaaccctatcagcatttgctgcctttgatgctgcatccaaactctaagccctcctgag

SEQ ID NO: 1016535 - DNA, 120 bp, Artificial Sequence
  ENSG00000238141_0 (sequence is synthesized)
acatctgttaattcagcaagcactaacaagtgatggagattaaaaaaaaaaaaggaatgagccacagctttgccatcaaagacttcagcgtctcttaggggaaacagatgaacaaagatt

SEQ ID NO: 1016536 - DNA, 120 bp, Artificial Sequence
  ENSG00000238141_1 (sequence is synthesized)
tctaacaagagagagaatatcttcccgattcgactcccatatgtcaagagactcagatgtgactcatatttgcctgccaggaggaggaaaaagaaatacactgtccaggagcaactcctt

SEQ ID NO: 1016537 - DNA, 120 bp, Artificial Sequence
  ENSG00000238141_2 (sequence is synthesized)
agacttcggatctgtggtgagggagggaaaaattccagcagacccaagaggaaggctacagaagaaaggacagaagcgtggagagaaattctaagcaggaggctggggaagaaggaagag

SEQ ID NO: 1016538 - DNA, 120 bp, Artificial Sequence
  ENSG00000238141_3 (sequence is synthesized)
cttcaggtcactgggtcaccccaccaggagatagtccccttgtggccttgagacttatgcaatgggcagatgcaatctgggtacctaaggcaaggattgcccttattctggccatgacat

SEQ ID NO: 1016539 - DNA, 120 bp, Artificial Sequence
  ENSG00000238141_4 (sequence is synthesized)
ttaacacctaattgcagcaataacccctcttttccacctggagaaagcttcctggcccctctttttcacttgtgggtaagtctggccaagagcagggtgaagaaacccatagtctaacac

SEQ ID NO: 1016540 - DNA, 85 bp, Artificial Sequence
  ENSG00000254885_0 (sequence is synthesized)
gtcccggccgcgaccccgtctgggagcctcccagcgcccaggacccctgcctgagcagtgagaggccctgattgatgcccaggac

SEQ ID NO: 1016541 - DNA, 120 bp, Artificial Sequence
  ENSG00000254885_1 (sequence is synthesized)
cctgcctgagcagtgagaggccctgattgatgcccaggacagcaagctttcccaccagcaccaacctcaccattttctttcagtatttgaggactgaaaagaaggcttcataatgatggg

SEQ ID NO: 1016542 - DNA, 120 bp, Artificial Sequence
  ENSG00000254887_0 (sequence is synthesized)
gaggatgggcctgcctgagagaggatagaggggcagagtttggaacacactggcagctggaacagggaggctcaaggcagggggagatggtggcctcgttgccacagaagaggcctcgag

SEQ ID NO: 1016543 - DNA, 120 bp, Artificial Sequence
  ENSG00000254887_1 (sequence is synthesized)
ccatgctgagggaggcagcttgatctctctgtactgagccatggagctccttcttggaggcgtgaaatgctccccatccttcaggagacaacagcaacagccagccactccttgtccagt

SEQ ID NO: 1016544 - DNA, 120 bp, Artificial Sequence
  ENSG00000254887_2 (sequence is synthesized)
aatgcactggactcctgatcccatcagctcctggctgaaggtgggccaacccttccccatttccttcaattcaaacatttcctcatgtccctcagtgccaagccctgtgctgggagctga

SEQ ID NO: 1016545 - DNA, 120 bp, Artificial Sequence
  ENSG00000254887_3 (sequence is synthesized)
ggacccagaggtgagctagatctaaaatctgacctcaaggagctaacagtctgagaggaagactggagtggataaaaataccttggtaatttatcacttaataaatatccaataaatgct

SEQ ID NO: 1016546 - DNA, 120 bp, Artificial Sequence
  ENSG00000254887_4 (sequence is synthesized)
acagacccgccccggcagcccggcccaccccaaatcatgtgtgtgtgctggggggtgggggctagtggggcagaggataagcaggctggaagagccgactcctacggctgcgatccaaga

SEQ ID NO: 1016547 - DNA, 120 bp, Artificial Sequence
  ENSG00000254887_5 (sequence is synthesized)
ggtgcctgcaacagttgccccccgacttctgtcgcccccatggaggcaaacaagtctggaacagggaatgggggtctgggagagaagatgaaaagactgaggatcagagaggtgagcagt

SEQ ID NO: 1016548 - DNA, 120 bp, Artificial Sequence
  ENSG00000285016_0 (sequence is synthesized)
attgggtgcaggagggatctgcaacctgggaccgacaacagacatagattaaaaacaaacaagagaagcctgatctccccggccagaagactagggaaaggaaagccaaccagagaccta

SEQ ID NO: 1016549 - DNA, 120 bp, Artificial Sequence
  ENSG00000285016_1 (sequence is synthesized)
gtggggacctccagcctcaggcattcagctctgtgaataaaagcattctgctgatttctgctgccctgtatccagacggaaggaatggctgcttggccacctgccttttgcttggattgg

SEQ ID NO: 1016550 - DNA, 120 bp, Artificial Sequence
  ENSG00000285016_2 (sequence is synthesized)
tgagacaactgtggcaggagacaggctaaggcgagtggggacaaatcaatgtgctggatgccctggtgtacctgtgacgaagaagcaggagctgggaagagagaggaaaaggaaatagac

SEQ ID NO: 1016551 - DNA, 120 bp, Artificial Sequence
  ENSG00000285016_3 (sequence is synthesized)
aactgaagaaatggaggtgctactggctcaaggaacctggattcatttagagagtgtgcccaggatgagacgtgtggagagcctggcctgaaccaacactaacagtctcctggacaggag

SEQ ID NO: 1016552 - DNA, 120 bp, Artificial Sequence
  ENSG00000285016_4 (sequence is synthesized)
gctgactcattcccatggacggggagaaggggaggaagctcctatagaaggtgcccagccctgggaaggcattcagctctgtgaataaaagcattctgctgatttctgctgccctgtatc

SEQ ID NO: 1016553 - DNA, 120 bp, Artificial Sequence
  ENSG00000285016_5 (sequence is synthesized)
cagacggaaggaatggatccatgttgcagctgggagcatggggaaatctggacacgcacttcaccaaaatgagacaactgtggcaggagacaggctaagctgaagaaatggaggtgctac

SEQ ID NO: 1016554 - DNA, 120 bp, Artificial Sequence
  ENSG00000285016_6 (sequence is synthesized)
tggctcaaggaacctggattcatttagagagtgtgcccaggatgagacgtgtggagagcctggcctgaaccaacactaacagtctcctggacaggaggtcctaaaaatcaggaaaagttt

SEQ ID NO: 1016555 - DNA, 120 bp, Artificial Sequence
  ENSG00000285016_7 (sequence is synthesized)
agtctcctggacaggaggtcctaaaaatcaggaaaagtttgagaaactgtcacaaccaagaggagcctgaggagatgtgatgactaaacacaacggacggagtcttgctctgtcacccag

SEQ ID NO: 1016556 - DNA, 120 bp, Artificial Sequence
  ENSG00000285016_8 (sequence is synthesized)
agcctcccgagtagctgggattacagataagaaaatggaggtcacgagctggagaactccttgctcaagttgcatagctaataagggacttagctgggattcctggccagcagtgtggct

SEQ ID NO: 1016557 - DNA, 120 bp, Artificial Sequence
  ENSG00000285016_9 (sequence is synthesized)
ggctccaggcctggtttctaacttccccttgttggcaaccaccttcacagaggaatgcaagagaataactgggagatgaaacaggaagctctatgacacacttgatcgaatatgacagac

SEQ ID NO: 1016558 - DNA, 120 bp, Artificial Sequence
  ENSG00000285016_10 (sequence is synthesized)
actgaaaatcacgactcatccccctccagcacctctacctgttgcccgccgatcacagccggaatgcagctgaaagattccctggggcctggttccaactgcccactgtggactctgagg

SEQ ID NO: 1016559 - DNA, 120 bp, Artificial Sequence
  ENSG00000285016_11 (sequence is synthesized)
cctctgcatttgcgggtggtctgcctgtgatattttggtcatgggctggtctggtcggtttcccatttgtctggccagtctctgtgtgtcttaatcccttgtccttcattaaaagcaaaa

SEQ ID NO: 1016560 - DNA, 120 bp, Artificial Sequence
  ENSG00000285012_0 (sequence is synthesized)
gcccttcccctttcgcctctgaagaagtgacagtggggtggtattcgttcctccgggactccgacatgagccactgctgggggctgggggccgcaggctgacccccagaactcactcagc

SEQ ID NO: 1016561 - DNA, 120 bp, Artificial Sequence
  ENSG00000285012_1 (sequence is synthesized)
atctccaaacctcagtgccagagaccgatgctccaacgcccagcctagtgctagggtctagtaccaactggctccaactgtctggcccctaccacagactttctgctccagactcactgg

SEQ ID NO: 1016562 - DNA, 120 bp, Artificial Sequence
  ENSG00000285012_2 (sequence is synthesized)
ctggacgtggtctcacatcgtctttttctgtctctgtacctacgcactcatctagcacccagcgggtccccttaaatgtctgtggagtaaaataaatagaccaggaacccatagcttcca

SEQ ID NO: 1016563 - DNA, 120 bp, Artificial Sequence
  ENSG00000285012_3 (sequence is synthesized)
tttgtgaaatcccgcacggaataaaacccaaacgtggctgtacctgcatgtgttctcaataagccaccagtagaaaccacatgataagaacttagtcccccaagacaaactggaactgac

SEQ ID NO: 1016564 - DNA, 120 bp, Artificial Sequence
  ENSG00000285012_4 (sequence is synthesized)
tcttcttaaaacgaatggccccgagcaaaactacaacggcagaatatcctctcagcctgagccagtatttcagtttgactcttggctttattagaatggatgcaacgtctccaaccaaaa

SEQ ID NO: 1016565 - DNA, 120 bp, Artificial Sequence
  ENSG00000285012_5 (sequence is synthesized)
ccagatgtacttcctgcttcctctagagcaggcttctgactcaggtccagtggagatgggatcaccatgttccaggactccagggtatgcccaccatacaactcagccctcactgagggg

SEQ ID NO: 1016566 - DNA, 120 bp, Artificial Sequence
  ENSG00000285012_6 (sequence is synthesized)
catcggatggttcccacactccccagcacacataacaccatcatccacgtccccagtggaccccagatgccgggccgctgctgtgtgctgggcagtgtttctcagctgggagggaccgag

SEQ ID NO: 1016567 - DNA, 120 bp, Artificial Sequence
  ENSG00000285012_7 (sequence is synthesized)
tgctaacaagaccagagcttcacacactagggcagggctgccccaactcacagagagtgtcagtgttggacttacggaggcatccacgcacacagtcactcaacactggaggaaggtgtc

SEQ ID NO: 1016568 - DNA, 120 bp, Artificial Sequence
  ENSG00000285012_8 (sequence is synthesized)
cacctgtgaatgctgaccttctgtttgtgtgtgcatctgtgttctggcatttctttatttaaaaaaaacaaaccagcagaatctatgaaactggaagtggcctatgtgtcttttgtcttc

SEQ ID NO: 1016569 - DNA, 120 bp, Artificial Sequence
  ENSG00000285018_0 (sequence is synthesized)
cgacgcgcctccacgcgaatgggccgccgccgcccgccttcttgttggccgcacccccgccccgcgcccgccccgcgcccggcccggcccggcgagaaagccttaattgaattggttgca

SEQ ID NO: 1016570 - DNA, 120 bp, Artificial Sequence
  ENSG00000285018_1 (sequence is synthesized)
aaagccttaattgaattggttgcatcccgatgtctcctctgcctgcacttcccaggaagaaccccctgaggccctcagattttcctgcacacgcccttcccagaccctctgatgactgca

SEQ ID NO: 1016571 - DNA, 120 bp, Artificial Sequence
  ENSG00000285018_2 (sequence is synthesized)
tgttccatgaattaattgctgtactcagggctcttggacaagtctcccctgatcgcagggtcctgactctccctgtataagatggaggctctgctgctcaggagcctgcctggcttccag

SEQ ID NO: 1016572 - DNA, 120 bp, Artificial Sequence
  ENSG00000285018_3 (sequence is synthesized)
tggtctggagtggagctgcactgcaatggggctggacttaggctccaggtacccacagggtgggtgcagggggaccatcacagttcagcttcctggtgccatctgtggtgggacctgatt

SEQ ID NO: 1016573 - DNA, 120 bp, Artificial Sequence
  ENSG00000285018_4 (sequence is synthesized)
gtggggcaaaggggtgggacataaaaggcagagtgtcgaggcaggtacagaacgggtggggggtgctccttagggagaaggcaaatctagaattccttgacctcataaggaaacagcttg

SEQ ID NO: 1016574 - DNA, 120 bp, Artificial Sequence
  ENSG00000272430_0 (sequence is synthesized)
agacagtaaaagaaaagggatgtaacaggtgaaacaagactgaccatgttttaataagctggctaatagattcgggtgtacatgtgcaggtctgttacctgggaatactgcgtgatactg

SEQ ID NO: 1016575 - DNA, 120 bp, Artificial Sequence
  ENSG00000272430_1 (sequence is synthesized)
aactttggggtacaagtgatcctgtcacccaggttaacagaagaaaaaagaagcatagtttatctccaaggagaacgggcagtttgcttcttcagctagaatatattcccagtgtcctcg

SEQ ID NO: 1016576 - DNA, 120 bp, Artificial Sequence
  ENSG00000272430_2 (sequence is synthesized)
cctccaaaatcatccttcgaaaaacatcaacagcagtctgattttctttagcagaagattccaaaaaagctgcattccaagattctgccaaagctttcccttcttcataactgatcaccc

SEQ ID NO: 1016577 - DNA, 120 bp, Artificial Sequence
  ENSG00000272430_3 (sequence is synthesized)
tttccatatgcaggagtccacaaattggccttcaacaaattgaatcgtcaatgaggatttccccacagaccggtagcccaggatcgcgatcttccgggactttgactgcggcatcttggc

SEQ ID NO: 1016578 - DNA, 70 bp, Artificial Sequence
  ENSG00000272431_0 (sequence is synthesized)
tgtttgagacacagtttcacttttgttgcccgggctggggtgcaatggcatgacctcggcttactgtagc

SEQ ID NO: 1016579 - DNA, 88 bp, Artificial Sequence
  ENSG00000272431_1 (sequence is synthesized)
cgcctggacccaggttggtcaggctgaactcctgacttcaggtgatccgcccgcatcggccccctaaagtgctgggattacaggcatg

SEQ ID NO: 1016580 - DNA, 120 bp, Artificial Sequence
  ENSG00000272431_2 (sequence is synthesized)
acattatctaatgcaaccaaaaactgaggtttgccctattaataaatgagaaaactgaggcactcatctgttaagtgccttgctcaggtcccatgtccttggaaccaggagtccttctcc

SEQ ID NO: 1016581 - DNA, 120 bp, Artificial Sequence
  ENSG00000272431_3 (sequence is synthesized)
tgttgatgttggaaggttcaaaagtgctcttattacttgtcacccagatggcaaagaactgacatacaaaggcccaagtcttccagaactgaaaacagtaataaaaccttcatttatctg

SEQ ID NO: 1016582 - DNA, 80 bp, Artificial Sequence
  ENSG00000248079_0 (sequence is synthesized)
gcgccgcagctcgcgtgacgcaccgcggggcctcgcccgggtgttcgctccgccgcctgtccgcggatcggcgctgcgag

SEQ ID NO: 1016583 - DNA, 120 bp, Artificial Sequence
  ENSG00000248079_1 (sequence is synthesized)
ccccgcggctgcctgcgggacacctgagcgcggagggtgcggcaccttggcaccttgaccctgtggcagggacatctcggcccaggaaagaatgaggtttaggcacggcctaaccaccta

SEQ ID NO: 1016584 - DNA, 120 bp, Artificial Sequence
  ENSG00000248079_2 (sequence is synthesized)
agtgagggcactgaagctgccgggggaagggcaaggtccgcgttgcagagcccaagcccagtggcgcaggatttgttttggtctcagtttgcttcatctctggaatggagatggtttcct

SEQ ID NO: 1016585 - DNA, 120 bp, Artificial Sequence
  ENSG00000248079_3 (sequence is synthesized)
atgtgatcatgaaaatttctcccagctctgaagaccttttattttgtaagaatcattgtgaaggtatgggcttggcaaatgaatggaaagatgagcaatgggagaggaaagaattgaaga

SEQ ID NO: 1016586 - DNA, 120 bp, Artificial Sequence
  ENSG00000248079_4 (sequence is synthesized)
gggctgtgaggtttgaagaatggcatcccccatgaagtggcgctgaaagatcacgatagcacagttccatgatgtgaaataccacaagtctgcaatttttcggtcttgagagtgtcgctg

SEQ ID NO: 1016587 - DNA, 120 bp, Artificial Sequence
  ENSG00000248079_5 (sequence is synthesized)
ggctgagaggatggaaatctttcagtaattataccagtttgtattcgtctcacatttgggaccaaatacaaatccgatccactctttctccctgtgaatattcataaaaaacaaagtgcc

SEQ ID NO: 1016588 - DNA, 120 bp, Artificial Sequence
  ENSG00000248079_6 (sequence is synthesized)
aattctggtctaatcatgtatggaaccaaatatgttgatgagtcctaagtatatactgtatgtatgtatacatatgaatatatatatttgtacacactaattttgcttgtgtcctcctct

SEQ ID NO: 1016589 - DNA, 120 bp, Artificial Sequence
  ENSG00000248079_7 (sequence is synthesized)
gtgcaatttgtttgtttagtataggggttgctgttataatgtgttaataagctgctgaaagcttggcacctattacttgaaatgacagctatgttagaagcctattaacactccatagca

SEQ ID NO: 1016590 - DNA, 120 bp, Artificial Sequence
  ENSG00000248079_8 (sequence is synthesized)
gcagctctgcagctactagaaatgaatttcaaagaaggtaaatgaacaaaagcgattcatatctctaaggaaagcaaataccatgcctagaaccatatatactttggaaatgtacagtgt

SEQ ID NO: 1016591 - DNA, 120 bp, Artificial Sequence
  ENSG00000248079_9 (sequence is synthesized)
ataaaatgaaaaacctcttccagttaaagaaacagcggaagggaatatttggggaaaggaagactgcctaaaagatttccaaacaaccttgaagatgtaaatgtaaaggataccaaacat

SEQ ID NO: 1016592 - DNA, 120 bp, Artificial Sequence
  ENSG00000248079_10 (sequence is synthesized)
aacttcctctctttgtttctattgtatttaaaccagatccatgtcaaacttataagaacagaatatagtacaggtagaggaaattcacttttcatgagcaaaagttaaatcatctggatt

SEQ ID NO: 1016593 - DNA, 120 bp, Artificial Sequence
  ENSG00000248079_11 (sequence is synthesized)
tatgagtcagcttgctctgcttttgaactactttacttacttttgactgtcattggaatttgcaagatggttgaaagtcctgggtaaaccttaaccatgataataaaaatgtggtaagtt

SEQ ID NO: 1016594 - DNA, 120 bp, Artificial Sequence
  ENSG00000248079_12 (sequence is synthesized)
aagttcagcgtaggtgtttttctttctctcttttgtgatacagtatgtgtgggggcgtgtatatggcaaggtggggggtgggttatatgctgagagtacagttccataattctaggttaa

SEQ ID NO: 1016595 - DNA, 120 bp, Artificial Sequence
  ENSG00000248079_13 (sequence is synthesized)
attaaaatttaactgtattaactttttaaggcccttacttttgaaatcagctgtaatgaaaaacaaacacttttgcatttcaacttatgcacagaaattaaaaattgctttcagagtttg

SEQ ID NO: 1016596 - DNA, 120 bp, Artificial Sequence
  ENSG00000248079_14 (sequence is synthesized)
tgtaaaactagcagtgaaaagttataataggcagtttcatctgtagaataatttatattaccgctttaatatcaggacagtaacacgtagtagcattatctttgcattcacagtaccata

SEQ ID NO: 1016597 - DNA, 120 bp, Artificial Sequence
  ENSG00000248079_15 (sequence is synthesized)
atatctattatatagaatgtgttttatataccatgctagtcatgatatttctgtgaatggctactatgacttctaaaaagaaaagcttgaaaggtcttggaagagaaagaaaacaggtgt

SEQ ID NO: 1016598 - DNA, 120 bp, Artificial Sequence
  ENSG00000248079_16 (sequence is synthesized)
agactctaaaaatctgtataaatataagccaaacactctttgtgtacatgcatgtgtgcatacactaataaggctttacaaattagattgggataggttgtcgtggaggaggaaagaggt

SEQ ID NO: 1016599 - DNA, 120 bp, Artificial Sequence
  ENSG00000248079_17 (sequence is synthesized)
gaaaataaaggcaatcctcttatcactgagactcaatacaaaatgtgttttgaacattgtttaaatgaaactccaatttcccaggtaagctgacactacccttgccctttgggacactaa

SEQ ID NO: 1016600 - DNA, 120 bp, Artificial Sequence
  ENSG00000248079_18 (sequence is synthesized)
ctagaaatgctcttaggtgaaatcctgtccaccaaaacttagcttccccagcccttctgtacactaatagtacattgacaattgatgctcattatgaatttaaaggtactcaaatgaggt

SEQ ID NO: 1016601 - DNA, 120 bp, Artificial Sequence
  ENSG00000248079_19 (sequence is synthesized)
aattttgtgtttgttgaatcactaacagtttaattatgctcagtattgtttgtacaaaatgatttttaaaaatggattctaacattttaaaaatggattctaacatcttaaaaatgtgta

SEQ ID NO: 1016602 - DNA, 120 bp, Artificial Sequence
  ENSG00000248079_20 (sequence is synthesized)
acccattgtatgtatgatatagatagtaactctattattcagagtagttgattaactcaaatgccctacttcatatctagcagagaacaggctaaatttaaattaagcagcattttatta

SEQ ID NO: 1016603 - DNA, 120 bp, Artificial Sequence
  ENSG00000248079_21 (sequence is synthesized)
gaatttttgaagacttgtattgagaaatgccaattaccagttgtttgtgagttgccaaaatattataatgttctgaatttacggaatggaatatgatcattcaaacaataaagcaacaaa

SEQ ID NO: 1016604 - DNA, 120 bp, Artificial Sequence
  ENSG00000248079_22 (sequence is synthesized)
tgtaagaatcattgtgaaggtatgggcttggcaaatgaatggaaagatgagcaatgggagaggaaagaattgaagagggctgtgaggtttgaagaatgggcttcaaaataattgctcttc

SEQ ID NO: 1016605 - DNA, 120 bp, Artificial Sequence
  ENSG00000272438_0 (sequence is synthesized)
cacgacggccgcgtgcccggagcgccggggtctttcctgggctccaaagtcaagagctcacgttccgggaggatctgtccgcggaaattcggttctgagcgtcgccggactccgccgcgg

SEQ ID NO: 1016606 - DNA, 120 bp, Artificial Sequence
  ENSG00000272438_1 (sequence is synthesized)
cccaccatcctcacaaattcaaggcaaggttctggaacccccagccctccagaaaggggaagctgagcccaggaagcacatctgagagttcgggtccgtgagtttaccctgcgctcacgc

SEQ ID NO: 1016607 - DNA, 120 bp, Artificial Sequence
  ENSG00000205866_0 (sequence is synthesized)
aggaggagggtggcctgtcccgggcagaccagcctctttgggctgtgtggccccagctccctgagcccagagggaggtgagggtgagaaggcctggaccaggcaggacgcagcccccagg

SEQ ID NO: 1016608 - DNA, 120 bp, Artificial Sequence
  ENSG00000205866_1 (sequence is synthesized)
gcccctgctgggaagaggtcagaacctcccaaggacccagaaggccagaacacactagagggtcccggcatcctgatgagtccactgtccccgcgatggttttcagggatggagaaggct

SEQ ID NO: 1016609 - DNA, 120 bp, Artificial Sequence
  ENSG00000205866_2 (sequence is synthesized)
ccctgtcctccgctggaaccctgcagccgggctgacgagaccccagcgagacctgcagaacattacagcagaatgaaggagagccagaggaagaggcagatgtgctggcctgtaaacagt

SEQ ID NO: 1016610 - DNA, 120 bp, Artificial Sequence
  ENSG00000205866_3 (sequence is synthesized)
taaaccagattcaggcccacgacatcaggtcagcatctcccactgtgggaatcctatgtggccccatcgtctggacagtgtgggtcaggtcactgtggctgttttgtgatgcgtgtgtgg

SEQ ID NO: 1016611 - DNA, 120 bp, Artificial Sequence
  ENSG00000205866_4 (sequence is synthesized)
gctcatccctcagtgctcagaagctgcagacactatggaaccgcttttcaggccccgtggccgtcacccccgctctagagacttgattgcagggaccatgcccggccggcctaactgcac

SEQ ID NO: 1016612 - DNA, 120 bp, Artificial Sequence
  ENSG00000205866_5 (sequence is synthesized)
ccctcactccaggtgggtggggggacccaggcctgctggcccctgtggtggtgcagcccagaaggtgtgaatcagtttacactgttcagtgcctgaataaaagtcacaggacaaagagga

SEQ ID NO: 1016613 - DNA, 120 bp, Artificial Sequence
  ENSG00000205866_6 (sequence is synthesized)
ctgatttccaatgtaaaccagattcaggcccacgacatcaggtaaacatctgcatcagagcccccggccccccaccgcccgggaggccccggggtccacacggccgactctgggacccgt

SEQ ID NO: 1016614 - DNA, 120 bp, Artificial Sequence
  ENSG00000205866_7 (sequence is synthesized)
cacagtgaccgccgagacatttcgtaattaggcaaaattgatccttgcattccttccctaaatcccaaatctctgcaattttacttcttctcaaaaatgaaaacatttggcaattagctg

SEQ ID NO: 1016615 - DNA, 120 bp, Artificial Sequence
  ENSG00000205866_8 (sequence is synthesized)
gaatctgctgggataagggggcttgggaaacaccgagggcagggctgcctcctcagcttcctctgagagcagattagccgtggccttgtgccagcagggcctgggtgccacacagggtgg

SEQ ID NO: 1016616 - DNA, 120 bp, Artificial Sequence
  ENSG00000205866_9 (sequence is synthesized)
caggggtggcagagccgggcccggctctggtactgggatttggggtggcgggacccagtggggcacccgcttgtgggcggcactgagggcggtgacgtaggcagcgggtgccggtgtctg

SEQ ID NO: 1016617 - DNA, 120 bp, Artificial Sequence
  ENSG00000205866_10 (sequence is synthesized)
cccctccatctggccgggctccccaccctgctcctgcagccctggacctcagggcccatttgcggtgcaaggcggctcttggccattttgcccgcagggccctaccttgggtcttgggag

SEQ ID NO: 1016618 - DNA, 120 bp, Artificial Sequence
  ENSG00000205866_11 (sequence is synthesized)
aagccgcagattcccatccagtatcctagaggaggagacccagggctgtgtcctaggaggcccaggaagcctggtcagcctggaggctgagggcgggcccgggagatctggtaaggacat

SEQ ID NO: 1016619 - DNA, 120 bp, Artificial Sequence
  ENSG00000205866_12 (sequence is synthesized)
cagtgtctccacgaagagcagcagggtctcagcccatggcagccgcaggccccatgactggggccgcagcctccagagccgccacagcagcccgttgttctggggggtcaaaggtggagg

SEQ ID NO: 1016620 - DNA, 120 bp, Artificial Sequence
  ENSG00000205866_13 (sequence is synthesized)
ctgtcagaggggcagtgcagggggctgctggggtgaagccccctgtagcagcagcacccagcctgctgtggctctgccctcctggaccccctgccctcctggaccccctgtcctcctgga

SEQ ID NO: 1016621 - DNA, 120 bp, Artificial Sequence
  ENSG00000205866_14 (sequence is synthesized)
ccctctgccctcctagaccccctgccctccaggaccccctgccctcctggaccccctgtctgtggcccctgctcctctcctccttccccgacacatgactggaccccccgatctgcagcc

SEQ ID NO: 1016622 - DNA, 120 bp, Artificial Sequence
  ENSG00000205866_15 (sequence is synthesized)
ggggtctgggcactgggggtcctgtggacctctcggtgtctggggacaatcacaggttcccgtgcccacacccagcctctgcttccagaacacactagagggtcccggcatcctgatgag

SEQ ID NO: 1016623 - DNA, 120 bp, Artificial Sequence
  ENSG00000205866_16 (sequence is synthesized)
tccactgtccccgcgatggttttcagggatggagaaggctccctgtcctccgctggaaccctgcagccgggctgacggtacccccaccacccacccaggggccccagaccctccccatct

SEQ ID NO: 1016624 - DNA, 120 bp, Artificial Sequence
  ENSG00000205866_17 (sequence is synthesized)
ccaccgccaacccaggccccggctgcgcacgcggggccaggccgtgagctgctgtccccggatggggccgccccgggctggcctggctcactccgtgtcacagatattcccacagagacc

SEQ ID NO: 1016625 - DNA, 120 bp, Artificial Sequence
  ENSG00000272209_0 (sequence is synthesized)
aggaagcaaataatactgtatatttcatacactatatcttaatttgagatatatatgtatgtatatttaaatttagaaccatatattaaaatttttgcagtggttatttctgaaaggtgg

SEQ ID NO: 1016626 - DNA, 120 bp, Artificial Sequence
  ENSG00000272209_1 (sequence is synthesized)
tggttatttctgaaaggtggtttatggatggattaaatttctttctttgtacttttctgtatttttcaaattttctacaaacgaccatagtagaaaataatagagaagctgcaaaaaagg

SEQ ID NO: 1016627 - DNA, 120 bp, Artificial Sequence
  ENSG00000272209_2 (sequence is synthesized)
gagaaaatttttataatagagaaaaagttgcaaaaaaggggagacacccaagtttatagtactatattttaggcaaattgccatgaaaaattgttaaacttaaaaaaaaaacttaaagag

SEQ ID NO: 1016628 - DNA, 120 bp, Artificial Sequence
  ENSG00000272209_3 (sequence is synthesized)
gtaaggtttggtgttattgagcacttcaaatgtggctagctcaaactgagatagctgtaagtataaattaccaaatggatttcaaagtcttagtgcaaaaagagaatatgaaatatctca

SEQ ID NO: 1016629 - DNA, 120 bp, Artificial Sequence
  ENSG00000272209_4 (sequence is synthesized)
tttcttagtccattttgtgctgctataacagaatgtctgacactggttagtttacaattctggaggctggagtccaaggtcaaggggtggcatctggtgatggccttcttgcttcatcat

SEQ ID NO: 1016630 - DNA, 120 bp, Artificial Sequence
  ENSG00000272209_5 (sequence is synthesized)
cccatggcagaaggcaggagagcaagagaatgtgtaggagagaaatagagggccaaactcatttttctaacaagccctctcttgagataactaacttactccctcaataacaacattaat

SEQ ID NO: 1016631 - DNA, 120 bp, Artificial Sequence
  ENSG00000272209_6 (sequence is synthesized)
ccactcacaagggcagagccttcatgacctaatcggcacttattaggctgtaccaccaacattgctgcattggggataaagtttctgatacataaactttggggaacatattcaaatcat

SEQ ID NO: 1016632 - DNA, 120 bp, Artificial Sequence
  ENSG00000272209_7 (sequence is synthesized)
aggaattgttaaaagtaattttatgtatttctttttactttttaaaatgtacctaccagaaagtttacaattaaacatatggctgatgtttgtggctatatatgtattggacagtgctgg

SEQ ID NO: 1016633 - DNA, 120 bp, Artificial Sequence
  ENSG00000272209_8 (sequence is synthesized)
tctagaatatcatccaatttttaataaacccctgaaacccaagtgactttaagtgctttacctttcccctaacatcctcttcagtattatccaataaaaaggctttatcctccatcctaa

SEQ ID NO: 1016634 - DNA, 120 bp, Artificial Sequence
  ENSG00000272203_0 (sequence is synthesized)
gcaataggatagcagacagtgtcatgaaaaagagaaccaggagactattccagctctgcatttactagctgtgaggcctagacaagtaacttatgacttctctaggcttcagtttcctca

SEQ ID NO: 1016635 - DNA, 120 bp, Artificial Sequence
  ENSG00000272203_1 (sequence is synthesized)
ctttaaaatcaagatacaaatagtacataccttataaacttgcgattaatacctgcaaagtgtttcgaattgtgcctggcacttaatcagcacaggttatacagtatatgcattaccctg

SEQ ID NO: 1016636 - DNA, 120 bp, Artificial Sequence
  ENSG00000272203_2 (sequence is synthesized)
gatctccattaggtaagggagacatgcttaagaataacctccaacctccattaaaggatatgtaaaactttacttaaaagcttgctatggatacgactcatacccatctacatcaacaat

SEQ ID NO: 1016637 - DNA, 120 bp, Artificial Sequence
  ENSG00000272203_3 (sequence is synthesized)
tgacaattcttgtcagctaaattgccttcacaattattttctgttagtgttgaaaatacccttctaacggtgtgcctcctgctaggtgatatatgattcttaaaaactttccctatgcgt

SEQ ID NO: 1016638 - DNA, 120 bp, Artificial Sequence
  ENSG00000272203_4 (sequence is synthesized)
atgaaactataatttcttatcggcttaccttatagttgcagaaagctttggcctgcaaggaaaagcagtgttttctaacacctgagctttaggtatattgatcctaaactcttgctaaat

SEQ ID NO: 1016639 - DNA, 120 bp, Artificial Sequence
  ENSG00000272203_5 (sequence is synthesized)
gttttacttcacttggaaggcttgcagcacactcttctgaaacacatagattcttctggcagttcaaatgaccctcctctgatttaagtgtgcaataaacattagttattgttattacta

SEQ ID NO: 1016640 - DNA, 120 bp, Artificial Sequence
  ENSG00000272202_0 (sequence is synthesized)
ggctggcggtggcactgcccacctgcgctgcgcccagtgcgcccccgtgcgctgggcataccccagaccagggagcgctcagggcccgccggggacgccgagacctagcagggtaactcg

SEQ ID NO: 1016641 - DNA, 120 bp, Artificial Sequence
  ENSG00000272202_1 (sequence is synthesized)
gaggtgggagtgggggtccagctcggggaccagggcaaaggagggactagaccggaagacggtctcactccgggagacctagcgggggtgtcccgccaaaggggtgtctagccggggagg

SEQ ID NO: 1016642 - DNA, 120 bp, Artificial Sequence
  ENSG00000272202_2 (sequence is synthesized)
gtctagcgcgggagcgggtttcccgactgcttcccgcactcacctcgacccccgcgctggttcggcctctccaggctggaaaactcaccgcggcggcggcggctgcggcggcggctcccc

SEQ ID NO: 1016643 - DNA, 80 bp, Artificial Sequence
  ENSG00000272202_3 (sequence is synthesized)
ggggacccccgcgggcgccggagccgggcgacgcaggacttggacgtggccacgcccggccaccgctcgacaccccagct

SEQ ID NO: 1016644 - DNA, 120 bp, Artificial Sequence
  ENSG00000272202_4 (sequence is synthesized)
catccctcccccgccgccacctaaatcagactcaggcggagagaattgaccgagtcggaggaggggtaaacagccctgcccctcgctcccactgtcccgccagagaacgcgccgcggaaa

SEQ ID NO: 1016645 - DNA, 120 bp, Artificial Sequence
  ENSG00000272202_5 (sequence is synthesized)
ccccgagggcgggtcaagggccaggtacccgagtgggagtggactctcgtgccggggtggtaggggctaccctagcggtccagggccagagcctgcacgcggcgcccccacccccaccgc

SEQ ID NO: 1016646 - DNA, 120 bp, Artificial Sequence
  ENSG00000272202_6 (sequence is synthesized)
tgggctgatcttgggtgtgtcagatcttgcccaagcctcactttcctccacggtggaggtgagaatgaggacgagcctggagctgcgtgaaccccggcgcccagcaagctctcaggaatc

SEQ ID NO: 1016647 - DNA, 120 bp, Artificial Sequence
  ENSG00000272202_7 (sequence is synthesized)
gccggcctgtaggtggacgcagagcctgaaagtgaggggcctgggtcgtgcatacggaaataaatatgggactctaaataaagcgagtttctgcaggcattcattcattcaacagatgaa

SEQ ID NO: 1016648 - DNA, 120 bp, Artificial Sequence
  ENSG00000272202_8 (sequence is synthesized)
cgcctacggtcttcaccacctcttaaaatcagaaataaagaatgccccagactgtagttactgggctcaagaaagtgtaaactctgatgctaaaaataaaaaattcatcggttcccccca

SEQ ID NO: 1016649 - DNA, 120 bp, Artificial Sequence
  ENSG00000272205_0 (sequence is synthesized)
ggcgcctgtgtcttcttacacttctcccttttcctcccgccttgcttccctcctggcttcgctccggtctcccccagtggcctgtggcattgtaaaagcacggcaaggagcgcagcggcc

SEQ ID NO: 1016650 - DNA, 120 bp, Artificial Sequence
  ENSG00000272205_1 (sequence is synthesized)
agaaacgtgggggcgcgtggaagggcagtgagcggcccgcgtgccctgtgctccgcactttcttcagggtttccgcgcagttgaaacattggcaacaatggataagccgctcctcgctag

SEQ ID NO: 1016651 - DNA, 120 bp, Artificial Sequence
  ENSG00000272205_2 (sequence is synthesized)
gggcctcccgctttaaatttgaatccgagctaatccccgcccccggctctgctagtgcaggagacccggccccggcaaacgcgagggggagtgtcgtgtgattgttttaattagccctaa

SEQ ID NO: 1016652 - DNA, 120 bp, Artificial Sequence
  ENSG00000272205_3 (sequence is synthesized)
atctcttctgctctacttgcttctaacgccaggctggcttcctcgggagctaggcgtcttattaagtcgctaatttccgccctacccttcctttctgccttcacgcccctctaacgccgc

SEQ ID NO: 1016653 - DNA, 120 bp, Artificial Sequence
  ENSG00000272205_4 (sequence is synthesized)
tccccccaatcgaaacagaccccatattctgaggcttccccccgcgccttcttcccgccttggaacaccttttaaaacctagcagtaagctgatgactaataaaaatgtcgaaatcgtaa

SEQ ID NO: 1016654 - DNA, 120 bp, Artificial Sequence
  ENSG00000227245_0 (sequence is synthesized)
gagaccagcaggtcaccagcaggcccagctgtgcagcttctgtgttcaggttctcatgaagttaggactccacttcgccatccacctgcctagctccacggcccagaccagtctgatatg

SEQ ID NO: 1016655 - DNA, 120 bp, Artificial Sequence
  ENSG00000227245_1 (sequence is synthesized)
gatgagctgcttgaaccctcctgaggggtggggaacttctatctaggacggtcagaacacctcagtctcgggaagccaactccatacattagtttgacttgtggattggctcttctggag

SEQ ID NO: 1016656 - DNA, 120 bp, Artificial Sequence
  ENSG00000227245_2 (sequence is synthesized)
atatgcactgtctggataagtttgaggataaaaagacagaaagacttgggttcaaaccccagctcctcgacctactgcatgtcctttctaaactcaggctcctcatcaatgaaaatgggg

SEQ ID NO: 1016657 - DNA, 120 bp, Artificial Sequence
  ENSG00000227245_3 (sequence is synthesized)
gtacagtacccacctcacaggaatgtggaggtaagaaatgatgtatagttgaattttgtgaatggtgatactcaaccacttttgacttataagaaccacaatttcattccatcaggttca

SEQ ID NO: 1016658 - DNA, 120 bp, Artificial Sequence
  ENSG00000274331_0 (sequence is synthesized)
gtggaaagttgattattcaaagcatctctgatggctactgcttgaatgtccttactgcaggggctccagtcttttgggggctgcatctgcactgcagagggctggctcggacatctgtgg

SEQ ID NO: 1016659 - DNA, 120 bp, Artificial Sequence
  ENSG00000274331_1 (sequence is synthesized)
atttcagtcaacagaggagagattggaaggagcatgtttctttcagagtagatagtggattcactgaatccccccgccactagtaaatctcttctagtaagccatttgcatccttttttg

SEQ ID NO: 1016660 - DNA, 120 bp, Artificial Sequence
  ENSG00000274331_2 (sequence is synthesized)
ttggtttttaatccttgcggagttctcagcgatgctacgagcaatgtgcttgcacttaaggtgatggactgtaaatgcctgaaaaaggaagaagcagttgtcaaagcaaattaattatta

SEQ ID NO: 1016661 - DNA, 120 bp, Artificial Sequence
  ENSG00000274331_3 (sequence is synthesized)
atgtttatagttttcctgtcttaagggttttcagaatctcagttgttcagtgtttgaagctgtaatgtctccaactgtaattactcagtgaatgggaggcagtgtgattgtcacccacaa

SEQ ID NO: 1016662 - DNA, 120 bp, Artificial Sequence
  ENSG00000274331_4 (sequence is synthesized)
gcatccccaccaggaatggatgagtcgtgaccctttggagaggcaagtggagcttttaccttgagagccattcgtcctgccagggtcaggcagtgggaggaggcaggaaaagggcttgtt

SEQ ID NO: 1016663 - DNA, 120 bp, Artificial Sequence
  ENSG00000274331_5 (sequence is synthesized)
gctctgaaaataagaccatctcccaaaccaccctacaccctacttcttccaggtgggaaagacccacagggtttcaggagagtccactgggaatgacttccttgaaatggaggttcagtc

SEQ ID NO: 1016664 - DNA, 120 bp, Artificial Sequence
  ENSG00000274331_6 (sequence is synthesized)
ctttcaagttctgagctgtgagtgggggtggctatgggaggaaatcactttgcacagggtttgatgcgacacttctgggaagcttatgaattccgtaggagtgggcatgaagttgtaagc

SEQ ID NO: 1016665 - DNA, 120 bp, Artificial Sequence
  ENSG00000274331_7 (sequence is synthesized)
atgaaggaaggagtctggccatgttggagccatagagggaatctggggtttatataatgaatatttctgggtttttgtttttatctgcttttgtttgattttgcttttactttgggagct

SEQ ID NO: 1016666 - DNA, 120 bp, Artificial Sequence
  ENSG00000274331_8 (sequence is synthesized)
aagtattttttttatcttgacagatatgttttttcccccttagagtaatatatattcatggattaaaactaaagacaaaaaaaatctctgcagataaacagaaatgcccaccatggcttt

SEQ ID NO: 1016667 - DNA, 120 bp, Artificial Sequence
  ENSG00000274331_9 (sequence is synthesized)
gaccccagtacctggagataaacatggctgccccatttcctctctctattcatatagctgaagatattaacatacattgcaatcaacattactgtttgctttttgcgttgaacaatataa

SEQ ID NO: 1016668 - DNA, 120 bp, Artificial Sequence
  ENSG00000274331_10 (sequence is synthesized)
actcagaattcgttcagagacttcatgtgctccagcatgtaattttcaggggctctagagtagtctacagtgcaaatatcaataatgtgcttaattaggccaccactgctggactttcag

SEQ ID NO: 1016669 - DNA, 120 bp, Artificial Sequence
  ENSG00000274331_11 (sequence is synthesized)
gcttactccaacttttctctattataaacagcatgtaaatggacatatttaaagccttgtgaacattaatctccattcacatctttcagtaaaattctgtgataaagaagaactactgag

SEQ ID NO: 1016670 - DNA, 120 bp, Artificial Sequence
  ENSG00000274331_12 (sequence is synthesized)
tttttaatatggctacttttattgttttcctgtgtgttgccaaatcactctcctgaatgttagaaaatcaggtttcattccttgtttacataacgtgttctttctaaataaacatttgca

SEQ ID NO: 1016671 - DNA, 120 bp, Artificial Sequence
  ENSG00000274331_13 (sequence is synthesized)
gttgattttcagtcaacaaattgcttttattactttaatgtctatgaaataagaccattccagtatccttaccttacagaaatgacagcaacaacagcaaatatgagtaaagaaaaaaaa

SEQ ID NO: 1016672 - DNA, 120 bp, Artificial Sequence
  ENSG00000274333_0 (sequence is synthesized)
gtctcctctttcgcctcctccgctttgggagccccgggctactctttcacagcccctgttgccctgtgatctgtaggtccttggggacgcacagttaagatgacaggacatcctggaagc

SEQ ID NO: 1016673 - DNA, 120 bp, Artificial Sequence
  ENSG00000274333_1 (sequence is synthesized)
tgggaaatgatatgtattcatttcctaccaccgtagtggaagagagattttccctatctttacaactgatagcatttccaacagtaagctgtgagattctgcttgaaatcacctctcaaa

SEQ ID NO: 1016674 - DNA, 120 bp, Artificial Sequence
  ENSG00000274333_2 (sequence is synthesized)
caaataaaaaacagacctgggagacatgctacactcattctgctgaggaaatagggcaagaatattttctaagaccccgaactccagatatgcgatggggcaaatcctgaagcgtacatg

SEQ ID NO: 1016675 - DNA, 120 bp, Artificial Sequence
  ENSG00000274333_3 (sequence is synthesized)
ccaagttgtaaccgcacaactaaatcagaatccttggagctggatctgaaaaaaatacggttgaaagttgtgcaggtgattacaatgtgtaggcaagccagaaaaccatggctttaacga

SEQ ID NO: 1016676 - DNA, 120 bp, Artificial Sequence
  ENSG00000274333_4 (sequence is synthesized)
gcagcttttgttagaaatgatttctcaaatgaatgtaaaaacgtttgctgctgaattgtgacctttcaattttacctgcttttcctgcaaagtatattttgcagacccaggctggcttgt

SEQ ID NO: 1016677 - DNA, 120 bp, Artificial Sequence
  ENSG00000274333_5 (sequence is synthesized)
ccttctgttcatggttcacccagtgccgtgtgtgctcagtgcatcctgtgcacgggtcactgtgctgtgtgcgctggccggggtgagcatcattcttcggggagaacctttctgaaaaca

SEQ ID NO: 1016678 - DNA, 120 bp, Artificial Sequence
  ENSG00000274333_6 (sequence is synthesized)
aagctgcaatccaaaaagttaaaaccatgctacttactgtactgaggtaaaaattaaaagacctaggggactcttccaaaagttaaaacgtaaataaatatcttggaacattaatataca

SEQ ID NO: 1016679 - DNA, 120 bp, Artificial Sequence
  ENSG00000274333_7 (sequence is synthesized)
tgaaatacattactacttaattttattcaaaattcaccaacttaatgtgctttataaatattctcatacctttgaagctctactgataaaacataatttacagttaatgaaaaagtgaag

SEQ ID NO: 1016680 - DNA, 120 bp, Artificial Sequence
  ENSG00000274333_8 (sequence is synthesized)
ttaaaataaatacaatcatattttcaaggtgacaaaattagaaggtgacaatggtgattgaaacacagacatatctgacccaagggtcaagtcaagccgttctattacttgggatatttt

SEQ ID NO: 1016681 - DNA, 120 bp, Artificial Sequence
  ENSG00000274333_9 (sequence is synthesized)
ccctgcttctatctggttcagtgatgtgggtcatgagcgtcctaccaggagctgctacgctctgctccactgtgtctgtgaggtgcattttactttgcaggtttttgcactgcctcacta

SEQ ID NO: 1016682 - DNA, 120 bp, Artificial Sequence
  ENSG00000274333_10 (sequence is synthesized)
cgacatcagttcatcagtcaatcaagccatgtgagagtggaggccttgtattccctattattcttgggcactctactccaagtaggaaaaggccaggaggtcctgttaaaggatgcactc

SEQ ID NO: 1016683 - DNA, 120 bp, Artificial Sequence
  ENSG00000274333_11 (sequence is synthesized)
tgggagacatgctacactcattctgctgaggaaatagcatccagttgcctggcatgcaatgtgtctctaaggaatggaaactaagcgttggggcatcatagctgggaaacggattcacaa

SEQ ID NO: 1016684 - DNA, 120 bp, Artificial Sequence; identical to SEQ ID NO: 918666
  ENSG00000274333_12 (sequence is synthesized)

SEQ ID NO: 1016685 - DNA, 120 bp, Artificial Sequence; identical to SEQ ID NO: 918667
  ENSG00000274333_13 (sequence is synthesized)

SEQ ID NO: 1016686 - DNA, 120 bp, Artificial Sequence; identical to SEQ ID NO: 918668
  ENSG00000274333_14 (sequence is synthesized)

SEQ ID NO: 1016687 - DNA, 120 bp, Artificial Sequence; identical to SEQ ID NO: 918669
  ENSG00000274333_15 (sequence is synthesized)

SEQ ID NO: 1016688 - DNA, 120 bp, Artificial Sequence; identical to SEQ ID NO: 918670
  ENSG00000274333_16 (sequence is synthesized)

SEQ ID NO: 1016689 - DNA, 120 bp, Artificial Sequence; identical to SEQ ID NO: 918671
  ENSG00000274333_17 (sequence is synthesized)

SEQ ID NO: 1016690 - DNA, 120 bp, Artificial Sequence; identical to SEQ ID NO: 918672
  ENSG00000274333_18 (sequence is synthesized)

SEQ ID NO: 1016691 - DNA, 120 bp, Artificial Sequence; identical to SEQ ID NO: 918673
  ENSG00000274333_19 (sequence is synthesized)

SEQ ID NO: 1016692 - DNA, 120 bp, Artificial Sequence; identical to SEQ ID NO: 918674
  ENSG00000274333_20 (sequence is synthesized)

SEQ ID NO: 1016693 - DNA, 120 bp, Artificial Sequence; identical to SEQ ID NO: 918675
  ENSG00000274333_21 (sequence is synthesized)

SEQ ID NO: 1016694 - DNA, 120 bp, Artificial Sequence
  ENSG00000274333_22 (sequence is synthesized)
ccctatgaaataaggcccttttccacctaaccttagagatactcaaagatctaatcatttgtactttttctttgttgcaatacttcttaggtaacttcttagaccaagtctagaaacagt

SEQ ID NO: 1016695 - DNA, 120 bp, Artificial Sequence
  ENSG00000274333_23 (sequence is synthesized)
ctgaggacaataacaattccattctaaaaagaatctcccaacatttcttctatctcaacctcaactgcatctgcctgtgaacttccagcttaccaaggctctatatcttctggcagtgac

SEQ ID NO: 1016696 - DNA, 120 bp, Artificial Sequence; identical to SEQ ID NO: 918676
  ENSG00000274333_24 (sequence is synthesized)

SEQ ID NO: 1016697 - DNA, 120 bp, Artificial Sequence; identical to SEQ ID NO: 918677
  ENSG00000274333_25 (sequence is synthesized)

SEQ ID NO: 1016698 - DNA, 120 bp, Artificial Sequence; identical to SEQ ID NO: 918678
  ENSG00000274333_26 (sequence is synthesized)

SEQ ID NO: 1016699 - DNA, 120 bp, Artificial Sequence; identical to SEQ ID NO: 918679
  ENSG00000274333_27 (sequence is synthesized)

SEQ ID NO: 1016700 - DNA, 120 bp, Artificial Sequence; identical to SEQ ID NO: 918691
  ENSG00000274333_28 (sequence is synthesized)

SEQ ID NO: 1016701 - DNA, 120 bp, Artificial Sequence; identical to SEQ ID NO: 918692
  ENSG00000274333_29 (sequence is synthesized)

SEQ ID NO: 1016702 - DNA, 120 bp, Artificial Sequence; identical to SEQ ID NO: 918693
  ENSG00000274333_30 (sequence is synthesized)

SEQ ID NO: 1016703 - DNA, 120 bp, Artificial Sequence; identical to SEQ ID NO: 918694
  ENSG00000274333_31 (sequence is synthesized)

SEQ ID NO: 1016704 - DNA, 120 bp, Artificial Sequence; identical to SEQ ID NO: 918695
  ENSG00000274333_32 (sequence is synthesized)

SEQ ID NO: 1016705 - DNA, 84 bp, Artificial Sequence; identical to SEQ ID NO: 918696
  ENSG00000274333_33 (sequence is synthesized)

SEQ ID NO: 1016706 - DNA, 120 bp, Artificial Sequence
  ENSG00000274333_34 (sequence is synthesized)
tatagtcctaggtaattaagaggttgaggcaggaggactgctcaaacccaagaagttaaggttatagtgagctatgattatgccattgcacttcagactaagcaaaagagtaagattcca

SEQ ID NO: 1016707 - DNA, 120 bp, Artificial Sequence
  ENSG00000274333_35 (sequence is synthesized)
tttcaaaaaattactaaaaaaagttctctaaattacattgtttaagaaaagggaaaagaaaaaatatcttttttaattttcaaatgggagaatagagcctctcatttctaatatgtattt

SEQ ID NO: 1016708 - DNA, 120 bp, Artificial Sequence
  ENSG00000274333_36 (sequence is synthesized)
ccttctgcaaaaacatggtctaggcccatggtcttgaactactggacatctgaattttagtaggtgctggattcaggcaactgaggggtggcttggacacactaagtgcacgtaaataaa

SEQ ID NO: 1016709 - DNA, 120 bp, Artificial Sequence
  ENSG00000274333_37 (sequence is synthesized)
aggtttgaggtgaactaaaaggtaaaagaggggaaggtgctattaagaacccacagttgggagacagtacagggttggtggaaggactggttcatgctacagatactgacccaggtgaaa

SEQ ID NO: 1016710 - DNA, 80 bp, Artificial Sequence
  ENSG00000274333_38 (sequence is synthesized)
ataaaagagaggaaattacagccgggcatggtgactcatgcctgtaatccctacattttgggaggcctaggcgggcagat

SEQ ID NO: 1016711 - DNA, 120 bp, Artificial Sequence
  ENSG00000274333_39 (sequence is synthesized)
agaagagtgaaactacatctaaaaaataacagaataaaataaaataaaaacattataaggggcttatatcttataattcatcaagaaaagccaaagtatctatccctttcagaaaataaa

SEQ ID NO: 1016712 - DNA, 120 bp, Artificial Sequence
  ENSG00000274333_40 (sequence is synthesized)
catgtaatttaattatgttcaaaacaaatcatttagtaaacaattaatcatatgtgaacacttccaggaggtgcaaagtcccagctcctaaaacttaacattaccctcaaacacccagat

SEQ ID NO: 1016713 - DNA, 120 bp, Artificial Sequence
  ENSG00000274333_41 (sequence is synthesized)
ggcagcatatggaatagagttattcactttcacaagttctctcttttgaaaaaaagaataacttatgtgataaatttatgtaatttgacaattaatctacctcatgtgcttgcagatatg

SEQ ID NO: 1016714 - DNA, 120 bp, Artificial Sequence; identical to SEQ ID NO: 918705
  ENSG00000274333_42 (sequence is synthesized)

SEQ ID NO: 1016715 - DNA, 120 bp, Artificial Sequence; identical to SEQ ID NO: 918706
  ENSG00000274333_43 (sequence is synthesized)

SEQ ID NO: 1016716 - DNA, 120 bp, Artificial Sequence; identical to SEQ ID NO: 918707
  ENSG00000274333_44 (sequence is synthesized)

SEQ ID NO: 1016717 - DNA, 120 bp, Artificial Sequence; identical to SEQ ID NO: 918708
  ENSG00000274333_45 (sequence is synthesized)

SEQ ID NO: 1016718 - DNA, 120 bp, Artificial Sequence; identical to SEQ ID NO: 918709
  ENSG00000274333_46 (sequence is synthesized)

SEQ ID NO: 1016719 - DNA, 120 bp, Artificial Sequence; identical to SEQ ID NO: 918710
  ENSG00000274333_47 (sequence is synthesized)

SEQ ID NO: 1016720 - DNA, 120 bp, Artificial Sequence; identical to SEQ ID NO: 918711
  ENSG00000274333_48 (sequence is synthesized)

SEQ ID NO: 1016721 - DNA, 120 bp, Artificial Sequence
  ENSG00000274333_49 (sequence is synthesized)
cccgggctccctaacatatgagagtgctaaccagcaggtgtagacttttcaggagtgaagaatgaggcaggcattccaaacctggaccttcatcaccttttgtttcatctcaagacaatt

SEQ ID NO: 1016722 - DNA, 120 bp, Artificial Sequence
  ENSG00000274333_50 (sequence is synthesized)
ctgagggactgttttggagcgtgtctggaaggtgaaccttgaagaagagtgtgggctttgatgtgactcagttgagatctttcatggggaggcaggaattcaatgcccagaatctgggct

SEQ ID NO: 1016723 - DNA, 120 bp, Artificial Sequence
  ENSG00000274333_51 (sequence is synthesized)
ggtgtctttgaggtcagtaggttgcgtctttgtatccaagtccattgttactaggttggaggctggagattctaaatggcttccagaccatctctctgattctctttgggagatggggtc

SEQ ID NO: 1016724 - DNA, 120 bp, Artificial Sequence
  ENSG00000274333_52 (sequence is synthesized)
tgaaagacaatgtcagtagttttgggaaattctagaaagtgtgcttggaaacgtgggaagagctcttgcctagtgcctaaatgctccatttgcagctctagccaagtagatacttggtag

SEQ ID NO: 1016725 - DNA, 120 bp, Artificial Sequence
  ENSG00000274333_53 (sequence is synthesized)
gtatagagccgggtttgcgtttatatcagcaaaacctatgtcagagttgaagaagtagtcaggaaaaagcgtcttggtcgcaggccggggaacatcttaaaagcaaacttctagcctgct

SEQ ID NO: 1016726 - DNA, 120 bp, Artificial Sequence; identical to SEQ ID NO: 868084
  ENSG00000274333_54 (sequence is synthesized)

SEQ ID NO: 1016727 - DNA, 120 bp, Artificial Sequence; identical to SEQ ID NO: 868085
  ENSG00000274333_55 (sequence is synthesized)

SEQ ID NO: 1016728 - DNA, 120 bp, Artificial Sequence; identical to SEQ ID NO: 868086
  ENSG00000274333_56 (sequence is synthesized)

SEQ ID NO: 1016729 - DNA, 120 bp, Artificial Sequence; identical to SEQ ID NO: 868087
  ENSG00000274333_57 (sequence is synthesized)

SEQ ID NO: 1016730 - DNA, 120 bp, Artificial Sequence; identical to SEQ ID NO: 868088
  ENSG00000274333_58 (sequence is synthesized)

SEQ ID NO: 1016731 - DNA, 120 bp, Artificial Sequence; identical to SEQ ID NO: 868089
  ENSG00000274333_59 (sequence is synthesized)

SEQ ID NO: 1016732 - DNA, 120 bp, Artificial Sequence; identical to SEQ ID NO: 868090
  ENSG00000274333_60 (sequence is synthesized)

SEQ ID NO: 1016733 - DNA, 120 bp, Artificial Sequence; identical to SEQ ID NO: 868091
  ENSG00000274333_61 (sequence is synthesized)

SEQ ID NO: 1016734 - DNA, 120 bp, Artificial Sequence; identical to SEQ ID NO: 868092
  ENSG00000274333_62 (sequence is synthesized)

SEQ ID NO: 1016735 - DNA, 120 bp, Artificial Sequence; identical to SEQ ID NO: 868093
  ENSG00000274333_63 (sequence is synthesized)

SEQ ID NO: 1016736 - DNA, 120 bp, Artificial Sequence
  ENSG00000274333_64 (sequence is synthesized)
gcactgctgagactacaacacttggtttctttgagtttgactaaatattttacataggtgtaattatacagttttcctttttgactgtcttgttttacttaacagaatgttttcgagatt

SEQ ID NO: 1016737 - DNA, 120 bp, Artificial Sequence
  ENSG00000274333_65 (sequence is synthesized)
tgacatacatctctgcccagctcctgagtgttttagctctgtttcctgtgtccagctcacagatgggattctgatatatcactgaagccagcacctaaatgatgtgactcttatctcctg

SEQ ID NO: 1016738 - DNA, 120 bp, Artificial Sequence
  ENSG00000279529_0 (sequence is synthesized)
gagacgtgggcggtcccagtgaccgggagccggagctcgaacgggacgggcgaacagaagcgcggagggcttcgcagcgtcggcgtctgtgcgtgggccaaacatcagggcctcgaccag

SEQ ID NO: 1016739 - DNA, 120 bp, Artificial Sequence
  ENSG00000279529_1 (sequence is synthesized)
ggatacaagggcaaccgctaactagattcctgattcctgatggctggcggcggctgacaccaaaggtaaaaggccttttagggaaagaaaccatttgtgaaaagctcttgggctaaactc

SEQ ID NO: 1016740 - DNA, 120 bp, Artificial Sequence
  ENSG00000279529_2 (sequence is synthesized)
gctctgcaaactgggggcgcacgctcgtggccaaactctggcagtgggactatcccggagcacccgatccctggaatcatgttctggaaaccaccgcgacgtgcgcagttctcgggcgtg

SEQ ID NO: 1016741 - DNA, 120 bp, Artificial Sequence
  ENSG00000279529_3 (sequence is synthesized)
gccctggtatcatcccactgaatcctaggaacgcggtgcggtaggtatcactgtccgcatttcacagaccgaagtccagaatggggaagcgacttgtcttaggcttcctggccacactgg

SEQ ID NO: 1016742 - DNA, 120 bp, Artificial Sequence
  ENSG00000279529_4 (sequence is synthesized)
ggaccgtggtcatggtagcgtccttggacacctgtctccaaggctctgcagaagggggaggtgccgggccctgacggctgatgtccaaggaccagccgggatggaccagccccaggaggc

SEQ ID NO: 1016743 - DNA, 120 bp, Artificial Sequence
  ENSG00000279529_5 (sequence is synthesized)
cccagtggaggaaaacaggacgaggttttcagtaagatgatcttatactaattcaagggctataatttgttctccacatcgtgtgcctccaactttttcggggaaagggtgttaaaattc

SEQ ID NO: 1016744 - DNA, 120 bp, Artificial Sequence
  ENSG00000279529_6 (sequence is synthesized)
ctttttcggggaaagggtgttaaaattccgttacagtgtttttacttgtcaaattagaagcagcaaccggctgggtgcagtgagtcaagcttggaatcccagcactttgggaggccaagg

SEQ ID NO: 1016745 - DNA, 77 bp, Artificial Sequence
  ENSG00000279529_7 (sequence is synthesized)
ggtacccactactagggagactgaggtgggtggatcggcttgagcccaggtcaaggttccagtgagctatgatggcg

SEQ ID NO: 1016746 - DNA, 85 bp, Artificial Sequence
  ENSG00000279529_8 (sequence is synthesized)
cagtctcaaagaaaagtagaaagcagcaacccaacttggctccccaaatgttggaaggtatcttagcttatccttgcattctcaa

SEQ ID NO: 1016747 - DNA, 120 bp, Artificial Sequence
  ENSG00000279529_9 (sequence is synthesized)
aaatgttggaaggtatcttagcttatccttgcattctcaaaggccctaggcccttctggatacatggacacaggcatggtagtccctgcaggcaggggtagtggggagctgcaacctatc

SEQ ID NO: 1016748 - DNA, 120 bp, Artificial Sequence
  ENSG00000279529_10 (sequence is synthesized)
ccaaaactctagagatgctgataggaggccaagctctgcaccctaatatcctccagctgtaccctctgtggatcagagtaaagtcacatccttgggacaccatgtctcagcagagctgtt

SEQ ID NO: 1016749 - DNA, 120 bp, Artificial Sequence
  ENSG00000279529_11 (sequence is synthesized)
gacacactgacatgctttgtgttttagttctcacaactctggggtattctcaccccccaaatggggacatgtgcacaggagtgaagagatgagctcagagccacacagctggtgggtggt

SEQ ID NO: 1016750 - DNA, 120 bp, Artificial Sequence
  ENSG00000279529_12 (sequence is synthesized)
aggcctgggttcaacctcatcctgccttcaaagccactttgcccatggccttttgttggggaggggagtgtgttctgcaccaagcttttgccaggaatccctgctagctctcaaactggc

SEQ ID NO: 1016751 - DNA, 120 bp, Artificial Sequence
  ENSG00000279529_13 (sequence is synthesized)
tctggactgactgtagtcttacaggctggaaggaacctttggtttgccctgtgagactgcatgtcttaaggtgtagctgtttcttcatttgtgaaattaagcagatatgggtaagatgac

SEQ ID NO: 1016752 - DNA, 120 bp, Artificial Sequence
  ENSG00000279529_14 (sequence is synthesized)
ctattccaaagtgaaaaactggaaaaccaaagtcttagcctacagtttcagggacgagggggaactaaaagatgagcactttatagtcaagggagaaaaatttttttggagtcagcacca

SEQ ID NO: 1016753 - DNA, 120 bp, Artificial Sequence
  ENSG00000279529_15 (sequence is synthesized)
accagctaataaggcagctgggggccagggccatggggtggcctttcagacacacacacacagctctgagcctctgggccataccttgtaagaactaggtattttgttgaggtgggggta

SEQ ID NO: 1016754 - DNA, 120 bp, Artificial Sequence
  ENSG00000279529_16 (sequence is synthesized)
gtcactgagacctgtgctatgggagcctcctacagagggctgctctctaggccaggtaaagtctgggtgagacaagaaaacattccttaatgtggccctgaatgaataaaatgtggaggt

SEQ ID NO: 1016755 - DNA, 120 bp, Artificial Sequence
  ENSG00000279529_17 (sequence is synthesized)
cctcccaaatgcagcagcaggctaacaggtggactgcaaggctgtgccctgccctgtctccctgcattgcagctgttggggtctgggtgttcctggctaataatccacaatccaggaaag

SEQ ID NO: 1016756 - DNA, 120 bp, Artificial Sequence
  ENSG00000279529_18 (sequence is synthesized)
ggctgatttggttgtgaaggtccaaatgagaaaagattctcagactggtttgtgcaaatggttttttttttttttttatttccacatttatatcacaaggtgtccacttactggaccaaa

SEQ ID NO: 1016757 - DNA, 120 bp, Artificial Sequence
  ENSG00000279529_19 (sequence is synthesized)
tagcaaagttgctcccttctgcgtcctgagaacacagaagtctaggtactgtacattcactaaggctccttgtttttgcaaatcgcgtttatgacaaataaccataaggcaaacgaatct

SEQ ID NO: 1016758 - DNA, 120 bp, Artificial Sequence
  ENSG00000279529_20 (sequence is synthesized)
aaaggaatggttatgagtgtttccagcgtacagacaggtcttccccctcgccccacagtacagcataaaaccagtagcacccacaataacttttgtgttgttttggggggactctagaaa

SEQ ID NO: 1016759 - DNA, 120 bp, Artificial Sequence
  ENSG00000279529_21 (sequence is synthesized)
ggtgaagttttctagatgtgtacaggaagggaaaaaagaaaagggaggaagaaaggaaaggtttttttgtctggtggtctgatggaagaggaattgtttaaaataaacatgagaaaactt

SEQ ID NO: 1016760 - DNA, 120 bp, Artificial Sequence
  ENSG00000227244_0 (sequence is synthesized)
aaagggagaacactgaagacagtgtttgctagtgggatttagtccatttttattggcaggattgcacgtcctgatgtcagctgaagagagaaatggtgcctcatagagtgtcctcggctt

SEQ ID NO: 1016761 - DNA, 120 bp, Artificial Sequence
  ENSG00000227244_1 (sequence is synthesized)
acctttctgtctggagggtgtctactcaattcaagcgtaaaacgtttttgagagaagacccaattttcctattttgccattccagtggtttttggcaagccaggacacccgttcatcctt

SEQ ID NO: 1016762 - DNA, 120 bp, Artificial Sequence
  ENSG00000227244_2 (sequence is synthesized)
ctaggaaacttctctttctcctcgagttttcctagagaaagatatttatacatgtatttgtacatggatttctcctataaaatgatgacagtgtggattttgatttgacttttctccaag

SEQ ID NO: 1016763 - DNA, 120 bp, Artificial Sequence
  ENSG00000227244_3 (sequence is synthesized)
atgatgcctcttaagtcacccttcttattttattgttattatttctatgaaatcatttaactggaacctttctaactacacaaatcatctacatctgcagagtcttcactgctccttcac

SEQ ID NO: 1016764 - DNA, 120 bp, Artificial Sequence
  ENSG00000227244_4 (sequence is synthesized)
caagaaaccttacaccacaacagatcatagtgattatactatgtaattttgaaacttatagcatttaaaaatatatctgtggctcaaaaaataaattcaaggtccttttctgatatgaaa

SEQ ID NO: 1016765 - DNA, 120 bp, Artificial Sequence
  ENSG00000237167_0 (sequence is synthesized)
accctaaggctgagattctgcacaaaagctttgtctctcctgcacacgggcaccctaaggctgagcagcactctctgccgggtgactgcgccagcgcccagaccacctgctggagaaaga

SEQ ID NO: 1016766 - DNA, 120 bp, Artificial Sequence
  ENSG00000237167_1 (sequence is synthesized)
aagcatggcacgttgaaggtgagaaaatggaggctcaggaaacagggtcatccagccagtgaccagttcagattagcaagcaggtctcctgtcctccctgccacagccacagttggaatc

SEQ ID NO: 1016767 - DNA, 120 bp, Artificial Sequence
  ENSG00000237167_2 (sequence is synthesized)
cccaagcacgtgggcagctggtcatggggtgaaatgggaaatgccctaacctccccttacaagagtctgtggaagcagagtcccagcctcaggaacagaatcattaaatcctgctcattt

SEQ ID NO: 1016768 - DNA, 120 bp, Artificial Sequence
  ENSG00000237167_3 (sequence is synthesized)
taagggcagaggcagagagggaaggaaggctctgtccctcctcatccacccaagactgggattctgggtagcactgactcagaagaggcttggagacccccaagagcaggcccccgcact

SEQ ID NO: 1016769 - DNA, 120 bp, Artificial Sequence
  ENSG00000237167_4 (sequence is synthesized)
tgctggtggctgattcccagcctgtgggcatggatttgggaggaattacactgtgcaaatgaacacggtttttgcagacttgtgggacctgccagctctctcagtttaactagatctctg

SEQ ID NO: 1016770 - DNA, 120 bp, Artificial Sequence
  ENSG00000277587_0 (sequence is synthesized)
acaaacaaggtattcttctccatgaggtcttcacttccttgtactgtctctcctgaagtcttattccctggtctaaataattcttgcctgccaatctatcaacccctcctgccctgctgt

SEQ ID NO: 1016771 - DNA, 120 bp, Artificial Sequence
  ENSG00000277587_1 (sequence is synthesized)
gctcagacatgcccgccaggaaaccaccccctccctgctgtaacagctttacccgcagaaactgttcttccctgcgctcttctaattagctaattacatttagcttagactgtgcggccg

SEQ ID NO: 1016772 - DNA, 120 bp, Artificial Sequence
  ENSG00000277587_2 (sequence is synthesized)
aactaaggccaacagggttagggattaaaaaccctctccattaaaaatgctctccattgtgtgatgtgctctcgccattgctccacccacaagatacactcttctatacaagtaaatttg

SEQ ID NO: 1016773 - DNA, 120 bp, Artificial Sequence
  ENSG00000277587_3 (sequence is synthesized)
cctagctgagaaaacttatattcaaatgctatttcttttgtggcactaaaaatttgttccaacaatagatttctgtggttttaacctcacttatttaaaattaaatggatttgtaagcca

SEQ ID NO: 1016774 - DNA, 120 bp, Artificial Sequence
  ENSG00000277581_0 (sequence is synthesized)
ggcgccctggggccagcagacctgctcgcaggcctgacctcggcgagctgggcgctgccgcctctgtgcggggggagctctggctcaggctccccagtggtcccgagggatttgggggtg

SEQ ID NO: 1016775 - DNA, 120 bp, Artificial Sequence
  ENSG00000277581_1 (sequence is synthesized)
ctcccctagcgtgagcagaaactctttgtgaccttgttaaagtggtccagcctcctcaggcctcgtcttcctcgttactgatgcttgtcctgcccaccccgcgagatggggaatcctaaa

SEQ ID NO: 1016776 - DNA, 120 bp, Artificial Sequence
  ENSG00000277581_2 (sequence is synthesized)
gcccgacagacaatgctgctcgctgctggaggcttgcaagcccaagttatggagtcagactgtccgggttcgaattttcgtctctgccttgtagtagggtgaccttgggcgagtcactta

SEQ ID NO: 1016777 - DNA, 120 bp, Artificial Sequence
  ENSG00000277581_3 (sequence is synthesized)
atgcctctgagccatgacttctttacctgtaaagtgggcagaacaatagcttctatgctgtgggcttaaatgacaagcagaacgcgttgtcagacttagaataaatgctcaaaaaaaggg

SEQ ID NO: 1016778 - DNA, 120 bp, Artificial Sequence
  ENSG00000277589_0 (sequence is synthesized)
atttattagtctgggcacagtggctcacatctatggtcccagctctttgggaggccaaggcaggaggattgcctgagtccaggagttcaaggccagcctggacaatatagtgagaccctg

SEQ ID NO: 1016779 - DNA, 120 bp, Artificial Sequence
  ENSG00000277589_1 (sequence is synthesized)
tctctaagaacaacaacaaaaacatttattatgccagatgctagttttataaaggctagtaagaccaaaatccctgcccaaagaatttgtgttacctaagaagagtgaatatctatgcag

SEQ ID NO: 1016780 - DNA, 120 bp, Artificial Sequence
  ENSG00000277589_2 (sequence is synthesized)
cacaaacatgcctcaagcattcattagcctactggtttacccctcaacatacacctgatctaattctacagtaatttctctataacttgtaaaaggccttacgaggcactatttgacata

SEQ ID NO: 1016781 - DNA, 120 bp, Artificial Sequence
  ENSG00000277589_3 (sequence is synthesized)
aacattggataatacaaattccatattttccaagaatgtaatcattgttggaagccgtatggagttgctggtatccactgttacttatttcagggtagaagaatcttcagattggtgata

SEQ ID NO: 1016782 - DNA, 120 bp, Artificial Sequence
  ENSG00000277589_4 (sequence is synthesized)
ggtagaagagggatggtaggagaggaagtcaagaggtaatgggaggccaggtcctgtgggaccttgtaggccactgtagcactttgatgtggctgagatgggaaactaccagaggatttt

SEQ ID NO: 1016783 - DNA, 120 bp, Artificial Sequence
  ENSG00000249304_0 (sequence is synthesized)
cctactcctacattatctgccacagccctgtgcaggaatccttgccacacttcttgctctcctgcgacacaggggcctaggatcatgactgccctgagtaccattctgtgatgttccatc

SEQ ID NO: 1016784 - DNA, 120 bp, Artificial Sequence
  ENSG00000249304_1 (sequence is synthesized)
ctctcctttcttttaaaaaatattcagtgaacactactttgtgccaggaaactctgagaagtgatctttaggaaacgatttgcaggtagaagtgacagggccagataagggatgcatgtg

SEQ ID NO: 1016785 - DNA, 120 bp, Artificial Sequence
  ENSG00000249304_2 (sequence is synthesized)
tatatgtgtgtgtttatttatgaatctgtatggatctatgtgtttgggctgcggaagatgaatgtacaagaggcaggatgacatgtaggactcctgtttaaacaactcagccaatgatgg

SEQ ID NO: 1016786 - DNA, 120 bp, Artificial Sequence
  ENSG00000249307_0 (sequence is synthesized)
ggcaaagggagcagacagctggcaagctctgtcccaatatgcttccctgaaagaggcgaggaaatttcagaagatgcaatgcctgaatggctcactttgcaggaaaacagaagaaccaag

SEQ ID NO: 1016787 - DNA, 64 bp, Artificial Sequence
  ENSG00000249307_1 (sequence is synthesized)
cagctaaatcttgacttctattgaagaagtgaaggatggattttgtaagcctaccagcagccaa

SEQ ID NO: 1016788 - DNA, 120 bp, Artificial Sequence
  ENSG00000249307_2 (sequence is synthesized)
ttatgaagacagtggtgtcccagaaaccaaggagaagaggatgttgcatgaagaaggagatgatggtttcactttggttacatttatccaaatgccccgtccaactcttcagtgtcccta

SEQ ID NO: 1016789 - DNA, 120 bp, Artificial Sequence
  ENSG00000249307_3 (sequence is synthesized)
gtaaaatctggtatagagatggacactgttttttaggtgaggcctgctgagtgtggagagttgtgaaaaatttttcccttaaattgagaatgttttaaataatgcagcctatgttttctt

SEQ ID NO: 1016790 - DNA, 120 bp, Artificial Sequence
  ENSG00000249307_4 (sequence is synthesized)
taagtaacaaggccatcccactgactcacactgatcttgttctcagcaaaaaactccctgctcttcctcatattaattgccataaaaacaagtcacttctatcatgcatttggctcattg

SEQ ID NO: 1016791 - DNA, 120 bp, Artificial Sequence
  ENSG00000249307_5 (sequence is synthesized)
agacagatttcttttaactcttctgccctgactccagtcttcactgggatgctgccttgcacttagggaaggttcacatgcctcaaggatctctctctctcagatttcttgactttccct

SEQ ID NO: 1016792 - DNA, 120 bp, Artificial Sequence
  ENSG00000249307_6 (sequence is synthesized)
cagtcttcagtatagtcctcctctgtgcctggtgaagacctgtggtaaagtgctggcagagaggaagctaaatcacgtaaaaattaagaaacagctcagcgtttcacagctaagctgccg

SEQ ID NO: 1016793 - DNA, 120 bp, Artificial Sequence
  ENSG00000249307_7 (sequence is synthesized)
gcttccccttgaaggaataggagtagacctgctgaactatcacatgagagaagaggcccaaaagcttgcacactacagtcaagctggcccttaaagagatggacctagaagatgctgagc

SEQ ID NO: 1016794 - DNA, 120 bp, Artificial Sequence
  ENSG00000249307_8 (sequence is synthesized)
cagatgtactcaattacttctccaaaattcatcaattaggaatacaacatgtttaagaccacagaacatctgcataggctgtaaatttcgttgaatgatggatgcaaagatggaagacag

SEQ ID NO: 1016795 - DNA, 120 bp, Artificial Sequence
  ENSG00000249307_9 (sequence is synthesized)
atggatagaggaaaagacagaatcagatactggatgagttagtactgctgcctgtgcttcagagctgtcttattaccacaaggccggcaagcatcaatgtccccacatccccctctgcct

SEQ ID NO: 1016796 - DNA, 120 bp, Artificial Sequence
  ENSG00000249307_10 (sequence is synthesized)
ccccctgaaatgtaccgatttatatgaaaattaagattacaaattaaagcctggctatcctggagttttccagttcatcagccatccaataaaaatgatgtcaagcctgtatgcataatt

SEQ ID NO: 1016797 - DNA, 120 bp, Artificial Sequence
  ENSG00000249307_11 (sequence is synthesized)
cccggaagattactttcgtccttacagctaagccctgtccctgatatgaaagatctctatccacttttattgaaataaagaactaacatcataatcccaatattgaggtataatcttcat

SEQ ID NO: 1016798 - DNA, 120 bp, Artificial Sequence
  ENSG00000249307_12 (sequence is synthesized)
acttcagatttggtttatgtgtaatccttatgtatttacttttattgagataggattaaaaactaaaaaaaaagcttcaaaaaatccttatgatctcatgattgagtttcatttcaccaa

SEQ ID NO: 1016799 - DNA, 120 bp, Artificial Sequence
  ENSG00000249307_13 (sequence is synthesized)
caatcaactaatgtgttagactgagtttttttttaagtgcttcttatagttatatagtccaagcttgaaaaggcattaattggtcccatgtgtttcctgtttcattacatgaattatttc

SEQ ID NO: 1016800 - DNA, 120 bp, Artificial Sequence
  ENSG00000249307_14 (sequence is synthesized)
caattcaacttggtttgtgaaataatggcatcatcttcttttcctattagaaaaggtgtgggagggggatgtatgaaaagataagcatacacataaaataatccaaagtaacttaaatct

SEQ ID NO: 1016801 - DNA, 120 bp, Artificial Sequence
  ENSG00000249307_15 (sequence is synthesized)
cttttcttaggaagttttgattcatacctatagttaattactggtaaaccacaatctaccaaccttttctttcccccagagccttaatagcctctggctatgcctcgggctgttaactac

SEQ ID NO: 1016802 - DNA, 120 bp, Artificial Sequence
  ENSG00000249307_16 (sequence is synthesized)
caaactagtcattaatgctggtcaagatgatttcttggagattattgctcatttatttttttaacagacaaaacagaatttgctttgcacatggactaaaataatacttcagccattttt

SEQ ID NO: 1016803 - DNA, 120 bp, Artificial Sequence
  ENSG00000249307_17 (sequence is synthesized)
ttcctttcaaaaacataaacactgatgaaaatcacattgtactgtggtattttcaaagcatttcatatgttattttagctgtattttccaactgaaaactggatttgcaatgctcaggat

SEQ ID NO: 1016804 - DNA, 120 bp, Artificial Sequence
  ENSG00000249307_18 (sequence is synthesized)
ttccctggtaatcatcatgtttgcttattgtttgctattatatttggtaaaacacatcttgattaagagatttgatgtgttctctatttacctgtgcctcttatttttaccttttgtcca

SEQ ID NO: 1016805 - DNA, 120 bp, Artificial Sequence
  ENSG00000249307_19 (sequence is synthesized)
aggatatgttaggaagatatttgtttttttagaattgaaaacagggtatggaaatagaaatacttcactattggcataaaacagcactggagtgttttcttcttaacgtagtatttattg

SEQ ID NO: 1016806 - DNA, 120 bp, Artificial Sequence
  ENSG00000249307_20 (sequence is synthesized)
gtaagtttcctgagacctcgccagccatgctgaactgccacccacggctacccatggaccaatcagcacatactttctctcctctgaggcccataaaagccctgcgctcagccagaacta

SEQ ID NO: 1016807 - DNA, 120 bp, Artificial Sequence
  ENSG00000249307_21 (sequence is synthesized)
cagaactaagcagatatctggatgaccagctgcagaaaggagctactcattccagggcctcctctctgctgagagcagcagacatcaggatgaccagctgcagagaggagctacccactc

SEQ ID NO: 1016808 - DNA, 120 bp, Artificial Sequence
  ENSG00000249307_22 (sequence is synthesized)
cctctttgatgagagctgcagagacagtgggacaacctgtctgcagagaaaaggagctgaacactcatctggacaccctggctgcagaaaggagctgccccctgcaggtctcccctgagc

SEQ ID NO: 1016809 - DNA, 120 bp, Artificial Sequence
  ENSG00000249307_23 (sequence is synthesized)
tgttctattgcccaataacgctcctcttcgtcttgctcacccttcacttgtctgcatatctcattcttcctggtcacatgacaagaagtcgggacccactgaatggtgaggctaaaagag

SEQ ID NO: 1016810 - DNA, 120 bp, Artificial Sequence
  ENSG00000249307_24 (sequence is synthesized)
cagtaacacgaacaggcctgaaacatgtcccttgcttgccaggttgcgggagaagaaaaggagagaagagttgtggccctttggggatcccagacctaggagttccccaagccagggctg

SEQ ID NO: 1016811 - DNA, 120 bp, Artificial Sequence
  ENSG00000249307_25 (sequence is synthesized)
cttgcagagagccagccccagtgccagcacctggagttcccaccccactgcagcagttggtgtgtctgactgtgcacagtggccagaccccacactcactcacacacccctcactgttcc

SEQ ID NO: 1016812 - DNA, 120 bp, Artificial Sequence
  ENSG00000249307_26 (sequence is synthesized)
atgcctgactcgcccttggcaggcatggatacacgcccttggcaagcatgagacccagaccagtggtatgagccgagtgcagcctactggccaagtgggcgaaatgagcccagtgggccc

SEQ ID NO: 1016813 - DNA, 120 bp, Artificial Sequence
  ENSG00000249307_27 (sequence is synthesized)
aagcaaaactgccaaaggtgtcatcggccacagaggtttccagccaggaaatggacatcccgaagatcccataacaaaatcaaatgttaacagtttaataacatgttctccactgatttt

SEQ ID NO: 1016814 - DNA, 120 bp, Artificial Sequence
  ENSG00000249307_28 (sequence is synthesized)
acttgactatattttatttctctttggattcaagtaatagttgattacattttgctttatgttaaatgcctttgtctttttctacttgttaggttataaacatcttgagagcaaggacta

SEQ ID NO: 1016815 - DNA, 120 bp, Artificial Sequence
  ENSG00000249307_29 (sequence is synthesized)
aatcttacttatctttattaagaactaacagtggaacacacagaaaatccatggatatactgtcagactgtcaccaaatatacattcaacatttttcttacttgtgagactgattttgag

SEQ ID NO: 1016816 - DNA, 120 bp, Artificial Sequence
  ENSG00000249307_30 (sequence is synthesized)
aaaatttgctatcacagaatcactaaactttagagcaggtaaagactcctgcaatgattttatttacttgctatattttaccaataagaaaaccgaggcatagagaagttgagactttct

SEQ ID NO: 1016817 - DNA, 120 bp, Artificial Sequence
  ENSG00000249307_31 (sequence is synthesized)
acacaccagtgcctagtcttcatgatgcttatgcccaaccctgagtcctttcctctatataatcctgcctcattacatttctgaaagacggagaagttttataacaacaagatgaaagac

SEQ ID NO: 1016818 - DNA, 120 bp, Artificial Sequence
  ENSG00000249307_32 (sequence is synthesized)
tttggaagtttacagaggctatcaggctatcttctcatagacccatcatttgtccagcagaaagagactaaaaaggcttataagaatatcaagaccccaatgttgtacttatggtttgac

SEQ ID NO: 1016819 - DNA, 120 bp, Artificial Sequence
  ENSG00000249307_33 (sequence is synthesized)
ggcatccagtgccttgtacttaatgaaagtttgcaacactctgagcaactgttctcagttcttctgccttatttctggcctccgttgcaactgttttgacctagtgaaggcctagacttt

SEQ ID NO: 1016820 - DNA, 120 bp, Artificial Sequence
  ENSG00000249307_34 (sequence is synthesized)
tgtcttttccatcttgtggtttatggtaaaattaataaaaggccttgcaaaccagtaacaacagctgccgtttactgtgtgcctattgctcaatgcctgttgatagagtccactggggtg

SEQ ID NO: 1016821 - DNA, 120 bp, Artificial Sequence
  ENSG00000249307_35 (sequence is synthesized)
ctggctggctgccctctcatttaatttttgaacattctcataaggtcattttgtttgtttgttttctggcctgagtattgtattaattacataaaagaaaactttggggaaatattgtta

SEQ ID NO: 1016822 - DNA, 120 bp, Artificial Sequence
  ENSG00000249307_36 (sequence is synthesized)
atttttgacaggattttccaacactaatactagtactgttattacagctaccatacaactctgaccactaaagaatttttgtttttaagaatttggaaattattttattatgatatcatt

SEQ ID NO: 1016823 - DNA, 120 bp, Artificial Sequence
  ENSG00000249307_37 (sequence is synthesized)
tatgtacattaaaattcattctcattggtgcacagttctatttgttttgacaagctcacacagtcatgtaaccatcaccacaatcaaaatatagaacagttttaataacaatttctttat

SEQ ID NO: 1016824 - DNA, 120 bp, Artificial Sequence
  ENSG00000249307_38 (sequence is synthesized)
gttctttatagtcataccttccctcacccactttatgtccctaacattttgccttttccaaaaatggaacataaattgaattatattgtatgtagctttttgtgtctggattgtttcatt

SEQ ID NO: 1016825 - DNA, 120 bp, Artificial Sequence
  ENSG00000249307_39 (sequence is synthesized)
cagggtaatgcattaagatttgcccatgtttctgtgtgccttagtagtctattcctttgcattgctgaggagtacccattgtatggaggtatcacaggtgttttatccactatttggaga

SEQ ID NO: 1016826 - DNA, 120 bp, Artificial Sequence
  ENSG00000249307_40 (sequence is synthesized)
atatttggtttgtatttagttttggacagttatgaatacagtttctataaacattcatgtaccattttttgtataaacatcagtttttatttctcttaggtaaatacttactagtagaat

SEQ ID NO: 1016827 - DNA, 120 bp, Artificial Sequence
  ENSG00000249307_41 (sequence is synthesized)
tactgaattatatggtatgtatgtttgttcaaacatgtgaaaaacgaccaaactgttttccaaagtaaccattctatttttcagtctcacagcaagtaggaacattctagttactttata

SEQ ID NO: 1016828 - DNA, 120 bp, Artificial Sequence
  ENSG00000249307_42 (sequence is synthesized)
gagccatgctattgctttagagaagcttctccttgtcatctgctccctagcctggataacacatggaacacttgaaacagaatatctagctgagccccagacctgaatacaacatgttta

SEQ ID NO: 1016829 - DNA, 76 bp, Artificial Sequence
  ENSG00000249307_43 (sequence is synthesized)
gtctcgcttactcagtgctcaaaacctccacctcccagccacctgccctggcctcccaaagtgctgagattgcagc

SEQ ID NO: 1016830 - DNA, 63 bp, Artificial Sequence
  ENSG00000249307_44 (sequence is synthesized)
atggccatcatcccgtctaggaagtgaggaacgtctctgcctggccacccatcatctgggatg

SEQ ID NO: 1016831 - DNA, 80 bp, Artificial Sequence
  ENSG00000249307_45 (sequence is synthesized)
cctggccacctgtctgggagatgaggagcatctctacccagccaccacccagtctgggaagtgaggagcgcctctgcccg

SEQ ID NO: 1016832 - DNA, 120 bp, Artificial Sequence
  ENSG00000249307_46 (sequence is synthesized)
gaacatctgcatagataaatcccagttgacagaactgtttaagagatgaatgtgctcccaactgggattacggtcacagtatttatctatatcaactttcatgttacttcactggcaaat

SEQ ID NO: 1016833 - DNA, 120 bp, Artificial Sequence
  ENSG00000249307_47 (sequence is synthesized)
caattaggtaagacactcttcccatgaaaggaggtagctgggggagaggctgaagtaatccttccatgctttgtttcctagggaatagagtggacatttcctgctcaaggtggaaaattg

SEQ ID NO: 1016834 - DNA, 120 bp, Artificial Sequence
  ENSG00000249307_48 (sequence is synthesized)
tgtagtaataaatgtcctcaatacataattatcatctattacccagtgggcaaattccaccactgcagagatccagactgcaatactagaggtagccaatatctacacaactctctgagg

SEQ ID NO: 1016835 - DNA, 120 bp, Artificial Sequence
  ENSG00000249307_49 (sequence is synthesized)
tctcctgtaacccctatggtactcatatagcagacccgaaagagtgccaatataagaaaatcatgaagttactcaaaaatcagtcttactcttttggtcaggcttttttcttctttcttc

SEQ ID NO: 1016836 - DNA, 120 bp, Artificial Sequence
  ENSG00000249307_50 (sequence is synthesized)
ttacattctgaaaaaccaagattattgatttcaaatggcagatgatcaggtactttcaatgtgttaacagatgtcagtagtaaattgttcaatcactgttgaaatggatgaagaataaca

SEQ ID NO: 1016837 - DNA, 120 bp, Artificial Sequence
  ENSG00000249307_51 (sequence is synthesized)
acattttttagtacatgatattttgtaaatgtcatcattttggccttgtgttacttttctaggtaacacttgggtagaaaaaacagctaattgaattttataaatctggttgaacatcta

SEQ ID NO: 1016838 - DNA, 120 bp, Artificial Sequence
  ENSG00000249307_52 (sequence is synthesized)
ttgtgttcaagccattatgccaagtgctgtgaaaaatgcaaaaagactaagacatacatagttcctacgtatatatatgaacaatttcatccataggcatttatattctggtagaaatat

SEQ ID NO: 1016839 - DNA, 120 bp, Artificial Sequence
  ENSG00000249307_53 (sequence is synthesized)
actgaagaaaattccaatacggggaaagcaaagatagaatacaaagtccaaagtaaaacagaacaaaccctgaactgcctagattaaaaataatggaaaggagatggaaaaaaaaaaaaa

SEQ ID NO: 1016840 - DNA, 120 bp, Artificial Sequence
  ENSG00000249307_54 (sequence is synthesized)
ggggcagggtgctggggcgcgcccgggtgtgctcgagcgtgcgctggcggcggcccgggctcccgggcgtctctcacgctgtgttttggcggcgcctggggtcttcgtttgcatatgaga

SEQ ID NO: 1016841 - DNA, 120 bp, Artificial Sequence
  ENSG00000249307_55 (sequence is synthesized)
agagccgaaagcacagagctacaggcgaatacaagtggattttttttctttttctgtttttttattagaagtaatagttgctgcattttgaaaaatcaagaggaaaagagttaacaggaa

SEQ ID NO: 1016842 - DNA, 68 bp, Artificial Sequence
  ENSG00000249307_56 (sequence is synthesized)
ctgcattttgaaaaatcaagaggaaaagagttaacaggaagaaaagttcgagaggacatacaacaaaa

SEQ ID NO: 1016843 - DNA, 120 bp, Artificial Sequence
  ENSG00000249307_57 (sequence is synthesized)
ccaaatccagcagcacatcaaaaagcttagccaccatgatagagttggcttcatccctgggatgcaagtttggttcagcatatgcaaatcaataaatgtaattcctcacataaacagaac

SEQ ID NO: 1016844 - DNA, 120 bp, Artificial Sequence
  ENSG00000249307_58 (sequence is synthesized)
tatgcaaatcaataaatgtaattcctcacataaacagaactgaagacaaaaaccatgtgattatctcaatagctgtagaaaaggtctttggtaaaattcaacatcccttcatgttaaaaa

SEQ ID NO: 1016845 - DNA, 89 bp, Artificial Sequence
  ENSG00000249307_59 (sequence is synthesized)
atatttcaaaagctggaatcattccccttgaaaactggcataagacaaagatttcttctctcaccactcctattcaatatagtattgaa

SEQ ID NO: 1016846 - DNA, 120 bp, Artificial Sequence
  ENSG00000249307_60 (sequence is synthesized)
gatttcttctctcaccactcctattcaatatagtattgaactttctggccaagaaaatcagtgaagagaaataaataaagagtattgaaataggaagtcaagccatccttttttgcagaa

SEQ ID NO: 1016847 - DNA, 120 bp, Artificial Sequence
  ENSG00000249307_61 (sequence is synthesized)
gacatgatcctatatctacaaaaaccccataatctcagcccaaatgcttcttaagctgataagcacattcagcaaagtctgatacaaaatcaatgtgaaaaattctctaccattcctata

SEQ ID NO: 1016848 - DNA, 120 bp, Artificial Sequence
  ENSG00000249307_62 (sequence is synthesized)
taccaacaacaggcaagcatagagccaaattatgaatgaatgaactattcacaattgctacaaaaagaataaaacacctaggaatacagctaacaaaggaagtgaaggacctcttcaagg

SEQ ID NO: 1016849 - DNA, 120 bp, Artificial Sequence
  ENSG00000249307_63 (sequence is synthesized)
agaactacaaaccactgctcaaagaaaccagagaggacacaaacaaatggaaaaatgttacatgctcatggatgggaagaaacaatattgtgaaaatgaccatactgcccaaagtaactt

SEQ ID NO: 1016850 - DNA, 120 bp, Artificial Sequence
  ENSG00000249307_64 (sequence is synthesized)
atagattcaatgctattcccatgaacctaccattgacattcttcacagaactagaaaaactatttcaaaattcttacacaaccaaaaaagagcctgaatagccaaaacagtcctaagcaa

SEQ ID NO: 1016851 - DNA, 120 bp, Artificial Sequence
  ENSG00000249307_65 (sequence is synthesized)
gcatggtactggtacaagaacagacacacagaccaatggaaaagaatagagaactcagaaataagactacacacctacaaccatctcatctttcacaaacctgataaaaacaaacaatgg

SEQ ID NO: 1016852 - DNA, 88 bp, Artificial Sequence
  ENSG00000249307_66 (sequence is synthesized)
ataagactacacacctacaaccatctcatctttcacaaacctgataaaaacaaacaatggggaaaagatttcgtatttaataaatagt

SEQ ID NO: 1016853 - DNA, 87 bp, Artificial Sequence
  ENSG00000249307_67 (sequence is synthesized)
atactctaagcaataccattcaggacataggcacaggtaaagatttcatgatgaaaatgacaaaagcaatggcaacaaaagccaaaa

SEQ ID NO: 1016854 - DNA, 90 bp, Artificial Sequence
  ENSG00000249307_68 (sequence is synthesized)
ggaaactatcatcagggtgaatagccaacttatagaatgggagaaaaattttgcaatctatccaatctgacaaaggcctaatatccagag

SEQ ID NO: 1016855 - DNA, 120 bp, Artificial Sequence
  ENSG00000249307_69 (sequence is synthesized)
gaaaaattttgcaatctatccaatctgacaaaggcctaatatccagagtttacaaggaacttaaataatacaacaaaaaaacagccacattaaagagtgggcaaaggacataaacagaca

SEQ ID NO: 1016856 - DNA, 79 bp, Artificial Sequence
  ENSG00000249307_70 (sequence is synthesized)
ctcagagatactatctcacttcaggcagaatggccattattaaaaagtcaaaaaacaacaaatgctggtgaatttgtag

SEQ ID NO: 1016857 - DNA, 89 bp, Artificial Sequence
  ENSG00000249307_71 (sequence is synthesized)
acaaggagatactatctcacttcaggcagaatggccattattaaaaagtcaaaaaacaacaaatgctggtgaatttgtagagaaaaaga

SEQ ID NO: 1016858 - DNA, 86 bp, Artificial Sequence
  ENSG00000249307_72 (sequence is synthesized)
ttagttcaacctttgtggaagacagtgtagcaattcctcaaagacctagaggcagaaacaccattttacccagcaatcctatttct

SEQ ID NO: 1016859 - DNA, 61 bp, Artificial Sequence
  ENSG00000249307_73 (sequence is synthesized)
aagatacatgcacacgtatgttcattgcaacactattcacaatagcaaagatgtggaatcc

SEQ ID NO: 1016860 - DNA, 89 bp, Artificial Sequence
  ENSG00000249307_74 (sequence is synthesized)
cagcaaactaacacaggaacagaaaacccaacactgcatgttctcacttataaatgggatgggaggggaacaacacacactggggcctg

SEQ ID NO: 1016861 - DNA, 120 bp, Artificial Sequence
  ENSG00000249307_75 (sequence is synthesized)
gggaacaacacacactggggcctgtcggagcaggggttgtggggagggagagcatcaggaagaatagctaaaggatgctgagcttaatacctagatgatgggatgatctgttcagcaaac

SEQ ID NO: 1016862 - DNA, 82 bp, Artificial Sequence
  ENSG00000249307_76 (sequence is synthesized)
tagctaaaggatgctgagcttaatacctagatgatgggatgatctgttcagcaaacctgtgtctccctgaacttaaaagttg

SEQ ID NO: 1016863 - DNA, 120 bp, Artificial Sequence
  ENSG00000249307_77 (sequence is synthesized)
aactgcttcttgctgccgccatatgaagaaggacgtgttcgcttccccttcctccatgattgtaagtttcctgagacctcgccagccatgctgaactagtgaacaggaaacctacagaat

SEQ ID NO: 1016864 - DNA, 120 bp, Artificial Sequence
  ENSG00000249307_78 (sequence is synthesized)
agaactgcttcttgctgccgccatatgaagaaggacgtgttcgcttccccttcctccatgattgtaagtttcctgagacctcgccagccatgctgaactgttataaacatcttgagagca

SEQ ID NO: 1016865 - DNA, 120 bp, Artificial Sequence
  ENSG00000287197_0 (sequence is synthesized)
gaaactgagggagcaaatggagagacaggacaccaactgtgtcacacattgttcctgggagactttagcactgtcctcagcttcatcaagagagaataactgcgatctctgcacatgcaa

SEQ ID NO: 1016866 - DNA, 120 bp, Artificial Sequence
  ENSG00000287197_1 (sequence is synthesized)
ctctcctggactctgcttgacctgtctcttcttttggctaattctaatctttcatgtgacctgattcttcctggacactggacaagaacccgggtgctgagagggcaggggctgccaccc

SEQ ID NO: 1016867 - DNA, 120 bp, Artificial Sequence
  ENSG00000287197_2 (sequence is synthesized)
tgaccttccactgagctgactgacacttggccatctctggacagcagagctgaaagagcatccattgcaacacacttggatgctgctgcagggcccacacagagcttgctcccaccagag

SEQ ID NO: 1016868 - DNA, 120 bp, Artificial Sequence
  ENSG00000287197_3 (sequence is synthesized)
aggagtgaccggctagttctagcattcgttcactctggttcccgcactcactcacacactcccttctgccaggagtggccatcagcaggctgagtgaaatgagccactccagttcctgcc

SEQ ID NO: 1016869 - DNA, 120 bp, Artificial Sequence
  ENSG00000287197_4 (sequence is synthesized)
cacaaagggggtcaagggaacaatcctgtgtcactatcatgaggaagaacaagagcagagtgatagtcatgctgagctctagcaaagcaggtggatgaggatgcagaaaagcaagcagag

SEQ ID NO: 1016870 - DNA, 120 bp, Artificial Sequence
  ENSG00000287197_5 (sequence is synthesized)
tagcatgttcagaaggaatgtagaggggcaaattttagaaagttccaggaatataggccccccccataatgcaggagggcaggaagacaggtgcagtgaaagccaatgggaaaaaccact

SEQ ID NO: 1016871 - DNA, 120 bp, Artificial Sequence
  ENSG00000287197_6 (sequence is synthesized)
aggaatttcccataggtcccccaagaagctactagactctttgatctcttatctcatctctccctcagcatcttctagtctctccctaggccaagggggaaagttgcatcccaatttgca

SEQ ID NO: 1016872 - DNA, 120 bp, Artificial Sequence
  ENSG00000287197_7 (sequence is synthesized)
cacagcattaagggaaggagggagggatccaggaacagggctctggtccttctcccatttggccagtgcacacatgctggtgatccaaagcagtggcagatgtggagaccccatgctgtc

SEQ ID NO: 1016873 - DNA, 120 bp, Artificial Sequence
  ENSG00000287197_8 (sequence is synthesized)
tgcaggtcctcatcaccccccaacacctgtcacattctcaagtgcctagaattttcttccccccatgctggggagtagccaaaggaaaggaagcactcagcccaactccaagctggagag

SEQ ID NO: 1016874 - DNA, 120 bp, Artificial Sequence
  ENSG00000287197_9 (sequence is synthesized)
catctttccatctgctctcttacttcccgctttgaaattaaaaaataaaaatctccttgggagttgcctcttgcccaccactgccaagggccagccatagagctcagtttatgaagtcac

SEQ ID NO: 1016875 - DNA, 120 bp, Artificial Sequence
  ENSG00000287197_10 (sequence is synthesized)
aattccattcctggaatggaatttgagagatggggcagtgaatggggaagttagagaggaggagagagaagctttggaatagccattaaccagccttgactctaggcctgggtatcagac

SEQ ID NO: 1016876 - DNA, 120 bp, Artificial Sequence
  ENSG00000287197_11 (sequence is synthesized)
ctgtccctgctccaagagtgagggaggcaaagggtggaactgccccaccgtctgcttttatacagagcatgtttccacctttaaagactacctttgaatttcacctgcataaatatatta

SEQ ID NO: 1016877 - DNA, 120 bp, Artificial Sequence
  ENSG00000287197_12 (sequence is synthesized)
tttgaatttcacctgcataaatatattagaaagagtaggatttttggagtctttctctaccatgatgaaaggccttgtattagtctgttctgtcattgctataaagaaatacctgagact

SEQ ID NO: 1016878 - DNA, 120 bp, Artificial Sequence
  ENSG00000287197_13 (sequence is synthesized)
ttggctcatggttcttcaggtggtataggaagcatggcagtatcagcttctggggaggcctcagggaattttactgatggcagaagggcaggcatcttcacatggccagagcaggaggaa

SEQ ID NO: 1016879 - DNA, 120 bp, Artificial Sequence
  ENSG00000287197_14 (sequence is synthesized)
gagaggtgaaggggaggtgccacatacttttaaataaccagatctcactatcgcgatgacagcaccaaggaggatgatgttaaaccatgagaaaccactctcatgatctaatcccctccc

SEQ ID NO: 1016880 - DNA, 120 bp, Artificial Sequence
  ENSG00000287197_15 (sequence is synthesized)
tacaatttgacatgagatttgggtgggaacacagatccaaaccatatcaggcctatacctgtttattaacaatagtagtaaaataagctatttctctctctcttacttctaatgagccaa

SEQ ID NO: 1016881 - DNA, 120 bp, Artificial Sequence
  ENSG00000287197_16 (sequence is synthesized)
tctctctctcttacttctaatgagccaaccagcaagaaaagcccaactgcaaactctctctataaacatatgaaaccttgtctttctggaggactttgaggactggtcttctaggtgggt

SEQ ID NO: 1016882 - DNA, 120 bp, Artificial Sequence
  ENSG00000287197_17 (sequence is synthesized)
tgcttcataatcctgtccctagacagggaaatatggtccctccccaggtgggaaccctggaatttagaaaacctttatcaaaagagcttttccttttgcagttgtcttgcaaacgtattt

SEQ ID NO: 1016883 - DNA, 120 bp, Artificial Sequence
  ENSG00000287197_18 (sequence is synthesized)
gtgttaatagtcttgagagtgattgtgcccagctaaccacaaaggcattcatttcatcttaatcaaatggttaaaacatattaaaagcctggtgcggtggcgcatgcctacagtcccagc

SEQ ID NO: 1016884 - DNA, 120 bp, Artificial Sequence
  ENSG00000287197_19 (sequence is synthesized)
gtcccagctacttgagagggtgaggtgggaggattgcttgaccccaggtattggaggcttcattgtgcaatgaccatttttgtgaatagctactgcactccagcctgggcaacacagtga

SEQ ID NO: 1016885 - DNA, 120 bp, Artificial Sequence
  ENSG00000249309_0 (sequence is synthesized)
gaaataagaatgtggcatatttccaaacagctggagtttggaaaatatttcctgttgatgcactcagtgccaactggacaaaggaattcttgagatagccttcaagtgcttcttaggact

SEQ ID NO: 1016886 - DNA, 120 bp, Artificial Sequence
  ENSG00000249309_1 (sequence is synthesized)
gcagtgcctagacaagctgactctgaccagtggtttcaggctcagctatacgtaggcctcagcagcttgtaacagtttccatctccaggccacaccccaggaagaaatggtgaaggcaga

SEQ ID NO: 1016887 - DNA, 120 bp, Artificial Sequence
  ENSG00000249309_2 (sequence is synthesized)
tattggttttccccagagaagactacgtgtggatatctactataaaacatgtgtgcatggaaaattgtagggccagatgcttctggattaagagaacatgaccagttttatcatgatgag

SEQ ID NO: 1016888 - DNA, 120 bp, Artificial Sequence
  ENSG00000249309_3 (sequence is synthesized)
gatatggattttatccacagaacagggagggcaaaagcaagcctgtgggcacagtatgtgatgataagcactttggaaggatttgtgaatgatacaacggagttatacaaatctttggaa

SEQ ID NO: 1016889 - DNA, 120 bp, Artificial Sequence
  ENSG00000236412_0 (sequence is synthesized)
atgccagggtcagctcttgtgagctggtacctgttggctcccgtacaccgctagccagcagtcagaacagacacaacgagaacacacttggaggagaggaggagttggaactcagatgag

SEQ ID NO: 1016890 - DNA, 120 bp, Artificial Sequence
  ENSG00000236412_1 (sequence is synthesized)
gaggttaggggtctacagtcctacagagctgtaatacagcctacggaaacgagtttgaaaatggaaaactatgctgaataaactgcttatgacccaacatcattccaaagcagagttgag

SEQ ID NO: 1016891 - DNA, 120 bp, Artificial Sequence
  ENSG00000236412_2 (sequence is synthesized)
actatggtatagccgtgcacagtgtaaggcatgaaggttggacgaggatccaggtgagttaggtaatggaagagggatgtgacaaagcgtgcagaaccgaaagcctcaggatgagatgaa

SEQ ID NO: 1016892 - DNA, 120 bp, Artificial Sequence
  ENSG00000236412_3 (sequence is synthesized)
gaaggagtgaaggaagcctgggaattatattaaagaaaactagaggaaaaccacctttcaggtagagggtcaagaaggcccaggactaagaagagcctgaaaggtctccagggaatgtga

SEQ ID NO: 1016893 - DNA, 120 bp, Artificial Sequence
  ENSG00000236412_4 (sequence is synthesized)
gattaaactttgctggtatttgctatctgtagatagcttatgttcctgaagttcctttcctgagtagcagagtttaatggtgtctcttaactgtcagtattctgtgtgagcattgagagt

SEQ ID NO: 1016894 - DNA, 120 bp, Artificial Sequence
  ENSG00000236412_5 (sequence is synthesized)
tgaaagatagaattacagtgacacaaggtggggaatttattattcaaagaaaaaccagattgaagtgggatgttgtggttgtagatgccctgtctatgaaggacaaatctcccttttcat

SEQ ID NO: 1016895 - DNA, 120 bp, Artificial Sequence
  ENSG00000236412_6 (sequence is synthesized)
tctggagtgcagtagccaaaatctgtgccattacatgagtgagccctttactacaacaaccttatgagataaggtctcctattcttcccattttaaattacagagaaggaaagtttaccc

SEQ ID NO: 1016896 - DNA, 120 bp, Artificial Sequence
  ENSG00000236412_7 (sequence is synthesized)
tgctaagaaatggcagaattaggatttgaacctcatataccctttagaacctgaacctatattattagggcaaaccatataaaattttctgggttttttagtattttatattggatgtcg

SEQ ID NO: 1016897 - DNA, 120 bp, Artificial Sequence
  ENSG00000233427_0 (sequence is synthesized)
cgggcagccttgcctaaatttctcccaagccaagctgtttgactgtgtgcacgtgtatgaacacaggtgtacggatgtgcatgtgtatgggtcaggtgtatgggtcacaggtgtacagat

SEQ ID NO: 1016898 - DNA, 120 bp, Artificial Sequence
  ENSG00000233427_1 (sequence is synthesized)
ggaggcctatttgtatgtggctgtgaggtgtgtgtgaacagctccccgccgcccccactccccaaagcagcagctcttaaattttgggtcttggagcatccaatgaagatttaggatcct

SEQ ID NO: 1016899 - DNA, 120 bp, Artificial Sequence
  ENSG00000233427_2 (sequence is synthesized)
gcagttaagtacgaagttcgtattccatttaaaaaggctctggaatcagctatggacccgttgaacattcttctggctgtccttcccagctttggtgggagttggctctgactagatctg

SEQ ID NO: 1016900 - DNA, 120 bp, Artificial Sequence
  ENSG00000233427_3 (sequence is synthesized)
tcaggcctctgtgaagtcttcctgactgagtctctctctatgagcagagtggggccaagaagccaccccaactcctacccccgggcagcctggtcgccctggccctgcccacacagcctg

SEQ ID NO: 1016901 - DNA, 120 bp, Artificial Sequence
  ENSG00000233427_4 (sequence is synthesized)
aggcatgctgagatcccagtctgcatcagggctgcccatctgccttggtgctcatcaccttgacatgaacaggcccgaagttcttttccaggatggcagagccttcagaaccatcaactc

SEQ ID NO: 1016902 - DNA, 120 bp, Artificial Sequence
  ENSG00000233427_5 (sequence is synthesized)
ctacccctccatcgtgcagaggcccagagagggacagagacctgcccaacaccacagcaatgaagtggacaatgaagattcaaaaccacatttgcggtctcctcattccgagaggagatt

SEQ ID NO: 1016903 - DNA, 120 bp, Artificial Sequence
  ENSG00000233427_6 (sequence is synthesized)
ctagatgagccccgttacaggagtgtatttgcaccggcacacgccaagggactccatccccatgacgcagatggcccgggaccttcttcctttccaggctgtcccttcctcttgggtccc

SEQ ID NO: 1016904 - DNA, 120 bp, Artificial Sequence
  ENSG00000233427_7 (sequence is synthesized)
tgagagggcagtcctggtgagggcaggagaggacagctaaggctaaggagcttgggaaaagatgtcctcttaagaactgctttccagcacatgttgtcccaccttctgaaattcaaggag

SEQ ID NO: 1016905 - DNA, 120 bp, Artificial Sequence
  ENSG00000233427_8 (sequence is synthesized)
cagcacatgttgtcccaccttctgaaattcaaggagatggttaaaagagaaaagcctttctccggacccacctgcagcattaagaaccatgggttgggctgggcacggtggctcatgcct

SEQ ID NO: 1016906 - DNA, 120 bp, Artificial Sequence
  ENSG00000233421_0 (sequence is synthesized)
gacgcacgaccgactggtcacttgctgccacctcgcaaaggcgcatctctagtccagtggtgagctgcggccgggtcgctgcaactcgctccaggccttcggactcgtggcctcggtgtc

SEQ ID NO: 1016907 - DNA, 120 bp, Artificial Sequence
  ENSG00000233421_1 (sequence is synthesized)
cctcgcggagccctcggtgtgtcgcttgcaggctctttttttgaagaaagcagggagggaatggccttgtgagagactccaggagcaaagagcgaccctcacaaggcccaagtcctccca

SEQ ID NO: 1016908 - DNA, 120 bp, Artificial Sequence
  ENSG00000233421_2 (sequence is synthesized)
gagctcagggaagctgtcgcttctgacagaagaagggagagaaagctccctcctgtgtgtccctggtggtctagtggctaggattcggcgctttcaccgccgcggcccgggttcgattcc

SEQ ID NO: 1016909 - DNA, 120 bp, Artificial Sequence
  ENSG00000233421_3 (sequence is synthesized)
cggtcagggaattgttttacactggccgccctcccgcaggaatcttccttcactacgctgtcagccggcctgctccaagggccagaagcagaacagtctccgcagcggggttaaagccgg

SEQ ID NO: 1016910 - DNA, 120 bp, Artificial Sequence
  ENSG00000233421_4 (sequence is synthesized)
gcgaaggagggcaagtgcttgtggaccacctctcacgacacaccgttcctatttgtctccgtgtccgtcatccgcgggagcagctttagagagcgactgagcttctcgctcaggtgtaca

SEQ ID NO: 1016911 - DNA, 120 bp, Artificial Sequence
  ENSG00000233421_5 (sequence is synthesized)
cagcccggcagagatgccagcccccgtggagctgcacccaataagcccaccttctttcccgtcgccaccccggagacgcccatcgggctgagctgcgaataactaagagagaggccaagc

SEQ ID NO: 1016912 - DNA, 120 bp, Artificial Sequence
  ENSG00000233421_6 (sequence is synthesized)
ccggaggcgatgcccgcgaatttgttaggggggtaagcggcgggtgaggtcctcgagggcggtcccgtttgctgattgagcggtagagggaggcgatgttcgctgacccaacaaggacag

SEQ ID NO: 1016913 - DNA, 120 bp, Artificial Sequence
  ENSG00000233421_7 (sequence is synthesized)
caggtggagtaggcacagacggaaaactgctgccggtgccctaagcagaaggcaggtggaaaaatcagcactaggacgtcgaagcgattgtaccacagtcaaatcccacgacgtctacac

SEQ ID NO: 1016914 - DNA, 120 bp, Artificial Sequence
  ENSG00000233421_8 (sequence is synthesized)
tctaccaagcacttgcgcacgctcccccttttccattcagtactcccaagaggggttcggaagaaccccgagtccactgtaagctcaggggagagcgggagccagggaggtgaagtgcgc

SEQ ID NO: 1016915 - DNA, 120 bp, Artificial Sequence
  ENSG00000233421_9 (sequence is synthesized)
agactcggcagaggcggcgggcagaaccgcgcgggggggagagaccgtggtcacgaagggggttctcccagagtgaagcttcttcatctcactctagagttgctgatccctgtgatttcc

SEQ ID NO: 1016916 - DNA, 120 bp, Artificial Sequence
  ENSG00000233421_10 (sequence is synthesized)
tccatgtgggaaatggtgtttgtggtagaagaggctgcgctctttacctgacataacggggttcaagactgacaacgcctcacgcccatccaaaaacgtttacatggcttccttgtctct

SEQ ID NO: 1016917 - DNA, 120 bp, Artificial Sequence
  ENSG00000233421_11 (sequence is synthesized)
ttttttttttctgtcctaaagtcgccttatcttcacatcccctcttttttttcttccacactcgagagtgtctctctcattaaaagctccaccaaatatttgaaatatctcaaccagaaa

SEQ ID NO: 1016918 - DNA, 120 bp, Artificial Sequence
  ENSG00000233421_12 (sequence is synthesized)
agaatgctaaccccctggcatgtatctagtcagcggaggcgacggctgctgctaaacaccttacaatccacgggagggcccctcccctaccccgaagtagccattccgcagaggtggaga

SEQ ID NO: 1016919 - DNA, 120 bp, Artificial Sequence
  ENSG00000233421_13 (sequence is synthesized)
gactcgcgtgtagctcaatgcccacgcacttagccgatgggaaattacgaattgatgaccagttggctcttggatctgaggaaaaaactccagagtcagagggaactctcgaagttttgc

SEQ ID NO: 1016920 - DNA, 120 bp, Artificial Sequence; identical to SEQ ID NO: 992073
  ENSG00000233421_14 (sequence is synthesized)

SEQ ID NO: 1016921 - DNA, 120 bp, Artificial Sequence
  ENSG00000236414_0 (sequence is synthesized)
agctatgatcttgaagaacaagaacaaagtaacagaaactgttaaaagatctgcttcactgaaggcaacaagacacaaatttcaggaagggcctatatcagaaagaaggaacggacgcac

SEQ ID NO: 1016922 - DNA, 120 bp, Artificial Sequence
  ENSG00000236414_1 (sequence is synthesized)
catccaacttgctgcagttaaccacccgtcagtcacccatcagggggcatgaagctctggtttgatcactttgctaagggctgcacaaggaagaaaaaaagtcataaaacactatattgt

SEQ ID NO: 1016923 - DNA, 120 bp, Artificial Sequence
  ENSG00000236414_2 (sequence is synthesized)
caagcagtactcactgcttctcctcttcactgtcctctaccttgagtccctcaaaatatttcacctgcatgacatttcttcacttgagatgctgtttgccctttaaatggcatcttagca

SEQ ID NO: 1016924 - DNA, 120 bp, Artificial Sequence
  ENSG00000233423_0 (sequence is synthesized)
gttctttcacacaggagcagatcatgcatgacaactccttttaccttcaaaactgtcatcgcttgtccatctcgtgccctattaaatgctgtgaaagacaagccaaggtcagtggagccc

SEQ ID NO: 1016925 - DNA, 120 bp, Artificial Sequence
  ENSG00000233423_1 (sequence is synthesized)
ccaaatggcatcaacaaaaggaatatataactgctccaaataaaagtgtacaagccagagcacaaaggctcccccgaaaaagaagtcattcctgaataatatgaatgtatggcacaaaac

SEQ ID NO: 1016926 - DNA, 120 bp, Artificial Sequence
  ENSG00000233423_2 (sequence is synthesized)
aagaaagaaaacgtgagatagatagatgtaaaattactgaagtgttaacagtttacaaagaaagcttgaagaagaacagatctatatgaaaaaggaagaggcagatttgaaaaggagcta

SEQ ID NO: 1016927 - DNA, 120 bp, Artificial Sequence
  ENSG00000233423_3 (sequence is synthesized)
ataggacttcctagaaatgcaagaaagaaaaaaaaccacaagcatctaaaactcagtggttagcttaaacatgggatcaaaaaaaaatgtttaactgtagcaagaattggtgaactggaa

SEQ ID NO: 1016928 - DNA, 120 bp, Artificial Sequence
  ENSG00000233429_0 (sequence is synthesized)
aaaagtttgccggcttccgcagtgatggatcaccgttttagtggcatttaaatccccggcgctccgccgtctaggtgacgcgcagtcgcccccccaggcagcctaggcggcggcagctgc

SEQ ID NO: 1016929 - DNA, 120 bp, Artificial Sequence
  ENSG00000233429_1 (sequence is synthesized)
tgcggcgactgcaaaggccgatttggagtgctggagcgaagaagagcaaaagctgcgttctgcgcgcgcccgactccgctgcccgccccgccaggcctccgggaggtgggggctgggagg

SEQ ID NO: 1016930 - DNA, 120 bp, Artificial Sequence
  ENSG00000233429_2 (sequence is synthesized)
cccatcaacagctgggagattaatcaaccacactgaaaatgtggagggatttatgggggagggggttgaaatgtgggtgtttgaaacaaaagtgtataaacaaatgaattgttgataact

SEQ ID NO: 1016931 - DNA, 120 bp, Artificial Sequence
  ENSG00000233429_3 (sequence is synthesized)
tagttattgacctggagactggtagcttattaaagaaactccgtgttactcattcctggagttgggggtttctgtaggcactttatttctccactttcaagagcttgggcttggcccaaa

SEQ ID NO: 1016932 - DNA, 120 bp, Artificial Sequence
  ENSG00000233429_4 (sequence is synthesized)
tcttagactgtccaattctgcctctattaccaatttaaatctatggcttgaacctgtgcactgaaaatcaaatcctttaaaaagaaagaggagaagaagaagcaaaaaagaaagaaaaaa

SEQ ID NO: 1016933 - DNA, 120 bp, Artificial Sequence
  ENSG00000233429_5 (sequence is synthesized)
ctccccaccgttcaatgaaagatgaactggcgagagaaagcgtttgatttatgagcgtaggacgaatcgcatccaggagctgcgcagccctggccgctgccgggacgccctgctccgcgc

SEQ ID NO: 1016934 - DNA, 120 bp, Artificial Sequence
  ENSG00000233429_6 (sequence is synthesized)
tccgccgccgcagctgagatttagcggaggaaggggcgagggaaggtagggagcaaacctatgaagaaacatcgcgttgtcattggaacttccaagcctttgctgttaagagccaggttc

SEQ ID NO: 1016935 - DNA, 120 bp, Artificial Sequence
  ENSG00000233429_7 (sequence is synthesized)
tgctagaaaggaaaggaataaggaggagataaaatgacgccgaggccctgaactgttcatggcatccgcggctcagccaagctgttgttttaaaagagcaataaaaatgaattatgacta

SEQ ID NO: 1016936 - DNA, 120 bp, Artificial Sequence
  ENSG00000233429_8 (sequence is synthesized)
aacgccttctaacttaatgctttcggacggggatccccggcaaataacgtaagaggatttttatttgtgcatgtgttcctgcaattgatctctttgatgacattctcattcatagaaagc

SEQ ID NO: 1016937 - DNA, 120 bp, Artificial Sequence
  ENSG00000233429_9 (sequence is synthesized)
aaacaggtttaagaatgaaatattgatttttctgaccctgaaaaaaaaaaaaaaatcctagagtgactgaaccagaggattggaaagaacattttctagggtgcattttccagatagtaa

SEQ ID NO: 1016938 - DNA, 120 bp, Artificial Sequence
  ENSG00000243089_0 (sequence is synthesized)
cctgaaaaggactaatatggaaatctcagctcatagagacccctccggaagttcttcacattactgagcggtatttataccccagcaggacttgcttgaatacaaggaacgccatctaat

SEQ ID NO: 1016939 - DNA, 120 bp, Artificial Sequence
  ENSG00000243089_1 (sequence is synthesized)
tatctggaaaaagcattggttacattttttgtaacccttggctaatgagtcccagtcagtggaggctgagctaaacaccacacaggcagcagaccatcagctcgcttctcatgaatgcaa

SEQ ID NO: 1016940 - DNA, 120 bp, Artificial Sequence
  ENSG00000243089_2 (sequence is synthesized)
agaagatgtcatggaatcaggtcttatcttttcatgtaacctggcagctaatttctcccttaattagttgtaacaccgtttatgcaaaacaaaggattttcttatttccttaaacaaaaa

SEQ ID NO: 1016941 - DNA, 120 bp, Artificial Sequence
  ENSG00000243089_3 (sequence is synthesized)
agggctgtgtctctttcctttgtagaattccatgctctgcctgaggtctgttaaggactaatatggaaatctcagctcatagagacccctccggaagttcttcacattactagaagtgag

SEQ ID NO: 1016942 - DNA, 120 bp, Artificial Sequence
  ENSG00000243089_4 (sequence is synthesized)
tgtgaaagaactggctattcaagagagtgttggagattctggcaagcagagattcttcggagcccaggtggaaagtgaagcgctgagttggggagaaatgctcatgccttctgcagactg

SEQ ID NO: 1016943 - DNA, 120 bp, Artificial Sequence
  ENSG00000243089_5 (sequence is synthesized)
taagttttgggagcttctggaggcaactcccttggcaggcgtgttggagttctccgggccagcagtgccagaaatgaggattctcaggcctgagtctgtgcatcataggatatcatgctg

SEQ ID NO: 1016944 - DNA, 120 bp, Artificial Sequence
  ENSG00000243089_6 (sequence is synthesized)
ctgctttaagcaactgagcttcttcaattttttgaggagtccttggccactccaggctcttgcttctccatgacaaggggcagagcagagatagcttctgacttagaacctcagatggat

SEQ ID NO: 1016945 - DNA, 120 bp, Artificial Sequence
  ENSG00000243089_7 (sequence is synthesized)
cagtcagccatggactattcccatctttgctatgagaagtggctttctggtggggattgtgttgagggttgggttgttctgattacaagaagagcagagactctgcagaggggtggagaa

SEQ ID NO: 1016946 - DNA, 120 bp, Artificial Sequence
  ENSG00000243089_8 (sequence is synthesized)
tgttttagccaatattgtccaaatccattccatttcgaggtaaatggggaagaaacaaaaagacccacatagtaatctccacagagaaccacactgaacctttgtaggcaggtaggaaga

SEQ ID NO: 1016947 - DNA, 120 bp, Artificial Sequence
  ENSG00000243089_9 (sequence is synthesized)
gagttatctcccctttcctttactcctcccctctcctctccaccctccctttttctcttccattctctcctctccttttttttcttcttcacctcttctctcctttctttttttactttc

SEQ ID NO: 1016948 - DNA, 120 bp, Artificial Sequence
  ENSG00000243089_10 (sequence is synthesized)
tctcacagtttatgtttctaagaagcaaatgttaaaagtaacagaaaacagtgaactataatccttgtcagctttgattgaaactatattagtcagtttccaaggaggaacacaggaaac

SEQ ID NO: 1016949 - DNA, 120 bp, Artificial Sequence
  ENSG00000243089_11 (sequence is synthesized)
tccctgagtatgtaaaatagtggaagcttaatagaaggacttgattatatgcatgatgagagatctgagaaatgaaacagaagatagagaggcaacccagagattagcaacaaagaaagc

SEQ ID NO: 1016950 - DNA, 120 bp, Artificial Sequence
  ENSG00000243089_12 (sequence is synthesized)
catgccaagagagactaagggagggacatttttatgggatcccagggattgagggtcatccagtggaatttggaactgtggcttggcctttcctgccatgaaggcatgctggagacacag

SEQ ID NO: 1016951 - DNA, 120 bp, Artificial Sequence
  ENSG00000243089_13 (sequence is synthesized)
ttggggaaggcagcctgcaggagtcagcacatccttgttacagagcaaaacatggtgccagggaagaatagatttgagaacaaacacacaaaggagcatcctgctctactttataggagg

SEQ ID NO: 1016952 - DNA, 84 bp, Artificial Sequence
  ENSG00000243089_14 (sequence is synthesized)
caaacacacaaaggagcatcctgctctactttataggaggaggcttctaggtaatgtgacagagggtgtgtgtgtgtgtgtgct

SEQ ID NO: 1016953 - DNA, 120 bp, Artificial Sequence
  ENSG00000243089_15 (sequence is synthesized)
agagaaatttataactttactgctagaagagtttatgctggcttgatactcaactttcagaccaagagatcatattcaaagtgaattcatttcacagacttcaataaacattacactctg

SEQ ID NO: 1016954 - DNA, 120 bp, Artificial Sequence
  ENSG00000243089_16 (sequence is synthesized)
ccaccagttcaactgagcttatctaagattgtattcaaaatgagtgatagaagatagaattttttttctaaaatgcggaaacagccaaacagttgaatcaaatgatgcttggtctttaca

SEQ ID NO: 1016955 - DNA, 120 bp, Artificial Sequence
  ENSG00000243089_17 (sequence is synthesized)
ctgaaatggtaatactcatttctctttatagtaattgtgcaagaattaaacttagaggaagcagatgtgtttaatgtattcatgatgttgtcaccaaggatagcaaattcatttggataa

SEQ ID NO: 1016956 - DNA, 120 bp, Artificial Sequence
  ENSG00000243089_18 (sequence is synthesized)
aatacaaatttgcataaaggttaacataaaaatcaactatttaagcattgaaaatatttaattaatctttttttcttttttatttttatgtgtctcttgctttttctgttttcagccaag

SEQ ID NO: 1016957 - DNA, 120 bp, Artificial Sequence
  ENSG00000243089_19 (sequence is synthesized)
agagacagtactgaaatgtcattttaaaaatgttgattttgcagtatttctctgcccttgggaacaggaaatacctagaattctgctagtaagatggttctcatgaaatgtctagtgtaa

SEQ ID NO: 1016958 - DNA, 120 bp, Artificial Sequence
  ENSG00000243089_20 (sequence is synthesized)
tttttataatgagggggattaaatatgtttggatgaatatccaactttgagaactttgtcaccctgatacttcagacccattgacgttttcccaaaatgttccctcttccatatgttagg

SEQ ID NO: 1016959 - DNA, 120 bp, Artificial Sequence
  ENSG00000243089_21 (sequence is synthesized)
gaattacatttaagagcgagtaatgaggataattgagtctgtgctggttttggatttcatactccttatgaatgtgaaatagattaaataaaggacacttgagaagtaatgaattccaaa

SEQ ID NO: 1016960 - DNA, 120 bp, Artificial Sequence
  ENSG00000243089_22 (sequence is synthesized)
aataatatcaattgttgtaccaaaagctgagcaagtgacttttctacagcattaaagtggtgttgaccttttctcttcagaaagagagaagttggggctaggtagtaagtaacagtcagc

SEQ ID NO: 1016961 - DNA, 120 bp, Artificial Sequence
  ENSG00000287198_0 (sequence is synthesized)
agagagttggaactttcagccccacttccccaacctttggggaggggagagagactggagattggcctaaacaccagtggtcaatgatttaatcaattatggctacataatgaagcttcc

SEQ ID NO: 1016962 - DNA, 89 bp, Artificial Sequence
  ENSG00000287198_1 (sequence is synthesized)
gttttgcctcacacctgttggaatggctattatgaaaaacataaaaggtgtgcggaaaaacacggcttctgctggagatggaaaaagga

SEQ ID NO: 1016963 - DNA, 120 bp, Artificial Sequence
  ENSG00000287198_2 (sequence is synthesized)
gtgcggaaaaacacggcttctgctggagatggaaaaaggactctggggaggacaagatgcctcatgtcaaagcaacaaggttccagtgaagagctgcaggcctcagaggcagtttatttc

SEQ ID NO: 1016964 - DNA, 120 bp, Artificial Sequence
  ENSG00000287198_3 (sequence is synthesized)
agcctaaaaacagcattgttagggaactggcagctcaagacaaagaagccgaaccagaagagggcactcttaccacagagatttacagctaatggtttttttttttttttttttttaatg

SEQ ID NO: 1016965 - DNA, 120 bp, Artificial Sequence
  ENSG00000287198_4 (sequence is synthesized)
cccctcagcagggccaacagagaaagcaggacattctttcctaaggagctcataactctcccagccaagcaagaaggaaaaggcaaaacaccaagggtgaaaacttagcagagaatgcca

SEQ ID NO: 1016966 - DNA, 120 bp, Artificial Sequence
  ENSG00000287198_5 (sequence is synthesized)
aaggcaatgaccgtgctctctgaccatcacacgctggaggcagagctttatatggttctcaaaggattgtttacctcctcctcactaaaccttaaaaaaaaatgtattccaaaaacgaat

SEQ ID NO: 1016967 - DNA, 120 bp, Artificial Sequence
  ENSG00000287198_6 (sequence is synthesized)
tacaccaagccaacccacattactcagtctacgaagccaacccacattctggcctgtactgcctttcaactcttcctatttccacttgctggaataaatcatttcactctagggccaaaa

SEQ ID NO: 1016968 - DNA, 120 bp, Artificial Sequence
  ENSG00000276188_0 (sequence is synthesized)
ctgcatctcttagtgcagtcagtgaatctagtttgtcttccagttcatactaacctaccttgtgaaaaggaagggtcacataatgaattgtgtactttacagtcttctctaacaaaagtg

SEQ ID NO: 1016969 - DNA, 120 bp, Artificial Sequence
  ENSG00000276188_1 (sequence is synthesized)
gcacctaccacgtgtcaggcattagctgaactgctgggaattcaggggtgaggcagacccaatccctgccctcactcttacatctcctgtagcctagcccaatgtctagcccagggcctg

SEQ ID NO: 1016970 - DNA, 120 bp, Artificial Sequence
  ENSG00000276188_2 (sequence is synthesized)
gcacagtagggcttacggatggcaatctcattggaaagtttgtcttgaaactgcctttgcaaaacaaacactgctttaacttaccttctatgctaaatatattaataaacattttctcaa

SEQ ID NO: 1016971 - DNA, 120 bp, Artificial Sequence
  ENSG00000278698_0 (sequence is synthesized)
aaataaatagattttataaaatttttttaaaaagtgagacaatagtcatgagtaacaagggggtaagtttcctagagccacaaatttcatggcttaaaacaacatcaatttattctctta

SEQ ID NO: 1016972 - DNA, 120 bp, Artificial Sequence
  ENSG00000278698_1 (sequence is synthesized)
cagttctggaggccagaaatttgaaatgagtcttatggagctgaaatcaagcacaaaccaaagctgggcttcatctggatgctctatgaaagattcctttgctcgcctcttccaattcct

SEQ ID NO: 1016973 - DNA, 120 bp, Artificial Sequence
  ENSG00000278698_2 (sequence is synthesized)
gccccattgccttctcctctcctgtgtgggcatcatcaactctccctttccctccctcttaaaaggatatgaatgtgactgctttaggacctacctggataattcagaataatctcccca

SEQ ID NO: 1016974 - DNA, 120 bp, Artificial Sequence
  ENSG00000278698_3 (sequence is synthesized)
tctcaagacccttaacataatcacatatgcaaagaacttctcttttctttaatcatatgagttaacatgtacaaatttcagagatgagaacatggatatctttagggtgccattttttca

SEQ ID NO: 1016975 - DNA, 120 bp, Artificial Sequence
  ENSG00000278698_4 (sequence is synthesized)
gtccattggaaatggtagatgtggaagaagaggagctaaaattcaatcagactaggggtctgcaatctgtagcctgcaagtcagtgcctgtttttgtaaataaagttttattggagcaca

SEQ ID NO: 1016976 - DNA, 120 bp, Artificial Sequence
  ENSG00000215386_0 (sequence is synthesized)
atagcacacttttactctacgcaactgttgctttttcatgatcttcaggaattttactgggataattatccaaataaattgcaagcattctatccaaatggagctctttctgagatgaag

SEQ ID NO: 1016977 - DNA, 120 bp, Artificial Sequence
  ENSG00000215386_1 (sequence is synthesized)
agaattctcaatgtcaagatttgaacaagaagagaatggaatacacaatatggacatccataaaaattcatcagagagcattttactactgagctgcaaagggaaaaacttaaaatggat

SEQ ID NO: 1016978 - DNA, 120 bp, Artificial Sequence
  ENSG00000215386_2 (sequence is synthesized)
atgaaaagtgaagaaagtgatcataggagaaaaccatttcagatatctgtggatatctctccagaacttcatgtatatttggataaaagaaagcttcgggctttgtatttcttgaaaacc

SEQ ID NO: 1016979 - DNA, 120 bp, Artificial Sequence
  ENSG00000215386_3 (sequence is synthesized)
aagaaaaatcaaccacctcagaagagccagattccacttctgtggccaggacttttacattatggctggtccgattgttttaccctgcgttctatgctactaaaccttggatcattccta

SEQ ID NO: 1016980 - DNA, 120 bp, Artificial Sequence
  ENSG00000215386_4 (sequence is synthesized)
aagtacaaattctgttctcgaaccacaaacaaggctaaaagatcggaggaaattcagtgaatatacaggattggggttgtgtatttttaaaagtattgagctttataatgtaattattca

SEQ ID NO: 1016981 - DNA, 120 bp, Artificial Sequence
  ENSG00000215386_5 (sequence is synthesized)
tgctcaaataactacagagtatgcgtggaaatatttgctgtctgaatagtttggagattcaaagagaaaaatcaagcttcagaggtattaaattatgacatgcagaaaagtttttgtttt

SEQ ID NO: 1016982 - DNA, 120 bp, Artificial Sequence
  ENSG00000215386_6 (sequence is synthesized)
gttcttaactgcaacggtatatatttaaatccgatttaaagtattatatgtcctgggcccaccttaccagttgtgctgtatagcagtgtaatgggaagcaaaatttcaattagggtccca

SEQ ID NO: 1016983 - DNA, 120 bp, Artificial Sequence
  ENSG00000215386_7 (sequence is synthesized)
ttaactggcatataatccttctttaatgtaatagaggctatggtgttgctgtacaaatctgctagaagcagattttaacccatgtttagtctctttctttggatctaatggaatgactct

SEQ ID NO: 1016984 - DNA, 120 bp, Artificial Sequence
  ENSG00000215386_8 (sequence is synthesized)
taactgttcattgtctgcattgtttctcatattcttcattattttaaggtctggaattagtctataaatggtcgtcgtgattactcagctcatcctaacttttatatatcatatatattt

SEQ ID NO: 1016985 - DNA, 120 bp, Artificial Sequence
  ENSG00000215386_9 (sequence is synthesized)
ctactgaagtattttaaatagtatttagaggtaaaagtctaagtgaacccaactgtaatttctaagctatccttatttctggaagaagaattctaccgcatcaaaccagacttttcctag

SEQ ID NO: 1016986 - DNA, 120 bp, Artificial Sequence
  ENSG00000215386_10 (sequence is synthesized)
agtatataaagggttagctaacgcccaaattttcttgccatttacacatgcaatgcagcctacatttctgtaggcagcaaatgcaggcatcattttgattgcttgaattcttttgtttaa

SEQ ID NO: 1016987 - DNA, 120 bp, Artificial Sequence
  ENSG00000215386_11 (sequence is synthesized)
ttttttactagacatttaacttagcactcaaatcccactgatcccttagagactgcatttggataaggaaaacaaagttcctaatatagagaagtttaaaaaaaaaaaaaatcctgggcc

SEQ ID NO: 1016988 - DNA, 120 bp, Artificial Sequence
  ENSG00000215386_12 (sequence is synthesized)
cttgtaaacatttgagaaatagacttttagtgtagcgctgcaaatacatatttagagtgcagaaacttaggtacctttattatctatcatcatcctggttttcttatctttcagtgacca

SEQ ID NO: 1016989 - DNA, 120 bp, Artificial Sequence
  ENSG00000215386_13 (sequence is synthesized)
actatagagtcggtcacatatttatttcctatatgtctttatttcttgaaaggtttagtaaaaacagtgtaaaaattgacatatcttcataaaatgattcacaccatttcttcaatgagc

SEQ ID NO: 1016990 - DNA, 120 bp, Artificial Sequence
  ENSG00000215386_14 (sequence is synthesized)
tagcttcaattttcattaaatgttgcttttctccacgtctctacatgttaaatgtaactttatgaagtacattagcagccaataatattaacttgtatgtaatagtttacttgtaggaat

SEQ ID NO: 1016991 - DNA, 120 bp, Artificial Sequence
  ENSG00000215386_15 (sequence is synthesized)
agattaaatagcttcattttatataaacagttaatttcatgcatattttatggacaacttaaaagtgaaaaattctgataaggtgaactaaatttttcattattgatataagtaacgtga

SEQ ID NO: 1016992 - DNA, 120 bp, Artificial Sequence
  ENSG00000215386_16 (sequence is synthesized)
ctttaaatctgttaccttaataattaatttctaaacaaacaaaacaggtataaaaataatcatggactatattcattaggtcaagtaaataagaataaaaacttcctaggttttgtcttg

SEQ ID NO: 1016993 - DNA, 120 bp, Artificial Sequence
  ENSG00000215386_17 (sequence is synthesized)
gccatataaggtctttgaggtgttttgggttcttttgtgttgattgatagatttaactttgcctctcttctgagaagtttctccctctttgtcaataggtgtctgatgatttgtgagcct

SEQ ID NO: 1016994 - DNA, 120 bp, Artificial Sequence
  ENSG00000215386_18 (sequence is synthesized)
caagtgactactctgtggaatcatctgtccttgcctttgaattagctttccctaggccatgagtcaacattagtagtttatacatccaaattgatgacaagagcacctcaaaggcagcag

SEQ ID NO: 1016995 - DNA, 120 bp, Artificial Sequence
  ENSG00000215386_19 (sequence is synthesized)
cctcaaggagcagccatggccccagacttgtcgcacggatgcagaaaacttaatggaggaggctgaggtcagaatgggaagagtttttaaaaaataaaaaggggagctaatatgtgagga

SEQ ID NO: 1016996 - DNA, 120 bp, Artificial Sequence
  ENSG00000215386_20 (sequence is synthesized)
acaggccatggtgggtgcagagctcagagccggaaagcaaacagctgctgtagcctgatttgagttaaaatagtgtgagtgtttagtctggcgcacggcttcaggggagattggcagctg

SEQ ID NO: 1016997 - DNA, 120 bp, Artificial Sequence
  ENSG00000215386_21 (sequence is synthesized)
ggtcaaacaaagtccttccattggctcccttcccaggcagcttctgctagtgtttaggtactagtgcagtgtagaacccttttctcaggcaaaacctaacatctgaccgcaccctttttg

SEQ ID NO: 1016998 - DNA, 120 bp, Artificial Sequence
  ENSG00000215386_22 (sequence is synthesized)
ctattaaaaaaaaaaaaaagcttctatttttttcctcctgtcgttaagataaattctccagtagacaacctctcccactaattgtgtattagcaacgtattttatcttgagagcttgtac

SEQ ID NO: 1016999 - DNA, 120 bp, Artificial Sequence
  ENSG00000215386_23 (sequence is synthesized)
ggtttgtgaaagaatatctgtgtgcttagggaggaaactttttgatctgcagaaaagccagaagacatctaggacatccataaaaattcatcagagagcattttactactgagctgcaaa

SEQ ID NO: 1017000 - DNA, 120 bp, Artificial Sequence
  ENSG00000215386_24 (sequence is synthesized)
tcttttaacttctaatctcaagcacatagcagctgttgttttcatattaaagatcagtaagtgtttgttgaatgaatgtataaattcttccccaatctctgttccatgtaataagaacta

SEQ ID NO: 1017001 - DNA, 120 bp, Artificial Sequence
  ENSG00000215386_25 (sequence is synthesized)
agttagcattcaattataaagaggacttagaaagtctgcagacatttttgatcaaaaatccttttaactgtcttcttatggttcccggtaacacctaagcccaaaaaactcaggtcattt

SEQ ID NO: 1017002 - DNA, 120 bp, Artificial Sequence
  ENSG00000215386_26 (sequence is synthesized)
cttgcctgtactgttgcaatagcctcataataactagtcttctcctttatcaaccacagtcgtctccgctacacaaagaagagagggtgctaatctaaagtgtaaattattttaaatcag

SEQ ID NO: 1017003 - DNA, 120 bp, Artificial Sequence
  ENSG00000215386_27 (sequence is synthesized)
cacccttcttgtaatttcccagtggtttttcctgtcataagaataacatgcaaaattccttgcttgcaaagccaggtatgaccttgccccgtctaccttactggcatcgtctctcatgac

SEQ ID NO: 1017004 - DNA, 120 bp, Artificial Sequence
  ENSG00000215386_28 (sequence is synthesized)
tcttcccctttttcactctccatcttgccttttcccaaccatgcctgctagtgagccttagcccttgtgttttctctgccagggatgcatgactggcttctttactttattctgatctct

SEQ ID NO: 1017005 - DNA, 120 bp, Artificial Sequence
  ENSG00000215386_29 (sequence is synthesized)
ttatgttagacaacaagcaaataagtatatgctgttcccactaaaatataagctccatttgaacaggagccttgattattcctgagtatacccctagtgcccagaacctagtagggcttt

SEQ ID NO: 1017006 - DNA, 120 bp, Artificial Sequence
  ENSG00000215386_30 (sequence is synthesized)
aataaatattagattcatttgttgaatgaaaaaatgaatgaataattgaataaagatatccaggtagagtgtccgggcagcccaacctatgtgaagccagtacaagaatgtttctgtgac

SEQ ID NO: 1017007 - DNA, 120 bp, Artificial Sequence
  ENSG00000215386_31 (sequence is synthesized)
atagtgagcgcaattattcctctaaatgatgaacttgcatgagtacacaaggataaaattaagcacgtagtttagatttctgcaagtctcttcctcagattgaggaaaaacaaagaaatt

SEQ ID NO: 1017008 - DNA, 120 bp, Artificial Sequence
  ENSG00000215386_32 (sequence is synthesized)
gagcttattctcacctcattcttacatgaactaaatccagaataaagcatcatttaaataccaagcacatccctacctcagccactcatggaatactttatctgtaaagggacagataga

SEQ ID NO: 1017009 - DNA, 120 bp, Artificial Sequence
  ENSG00000215386_33 (sequence is synthesized)
tagtaaatatttttggctttggggaccgtacagtctgtgtcgccactactcagcacttctgttgaggtgtggaatcagccctagacaacacataaacaaatgggtgtggctgtgttccaa

SEQ ID NO: 1017010 - DNA, 120 bp, Artificial Sequence
  ENSG00000215386_34 (sequence is synthesized)
taaaatgttatttataaaactaggaaatcagcagatttagtccacaggctgtagtttgctgacccttgaattagagagtcttccccaaatcctcttcccaagttattgaaagaatgccca

SEQ ID NO: 1017011 - DNA, 120 bp, Artificial Sequence
  ENSG00000215386_35 (sequence is synthesized)
taggaccatagctccctcacctggttctttcaagaaatgagacaaattcagggatggttggagggtggaacgcctacctgtgacatgactattgagcctgatttctttccttttatctct

SEQ ID NO: 1017012 - DNA, 120 bp, Artificial Sequence
  ENSG00000215386_36 (sequence is synthesized)
ttaaagtgagtcaggtcttaactttaaactgtctctaaagtggcaataactgggccatgtcaaatactcccaatgacaaaatttcttcttggagaatgaatgagggttgcatacagtggt

SEQ ID NO: 1017013 - DNA, 120 bp, Artificial Sequence
  ENSG00000215386_37 (sequence is synthesized)
gtgttggtaaatgtttagcaactggctctcttactgatttctgtagtgtaaattctcccatcctggccatctgaaactaccaatatgatgtcacttgatgtagagttgggaaaagacagt

SEQ ID NO: 1017014 - DNA, 120 bp, Artificial Sequence
  ENSG00000215386_38 (sequence is synthesized)
ctcttgaataagtatgagctggttccagcccactgctgaacacatatttaaaagctacaatagctctgctcactgccattgcagagtctggaggaaagagtagcaggcttgataggagca

SEQ ID NO: 1017015 - DNA, 120 bp, Artificial Sequence
  ENSG00000215386_39 (sequence is synthesized)
attggctgaataatcttttgcaatgccaataaataatgaaaaagtatataaatataacgctgtatagaaagctctcaagttcagtgtttggttaaaatacatactcagtaaatggtagct

SEQ ID NO: 1017016 - DNA, 120 bp, Artificial Sequence
  ENSG00000215386_40 (sequence is synthesized)
attattgtcttagtttaagttattgcaagcattaaaattaaatgtttagctacagactcaatccagttttaatgtcattgtgttaataaggcctcttaacattgaagcaacaaagataaa

SEQ ID NO: 1017017 - DNA, 120 bp, Artificial Sequence
  ENSG00000215386_41 (sequence is synthesized)
ataaaggacttgtctaggggagagcctatggatctgagaacgctgtctgggcttggtaccaagagctggtatttcacagcagcgaccgcctcacagacgagctgtgggaagcaggaggga

SEQ ID NO: 1017018 - DNA, 120 bp, Artificial Sequence
  ENSG00000215386_42 (sequence is synthesized)
gactctctcttagggtgccactactatggagacacagctgggctgaacaagatttgcttcaaacgacaacaagagagacagaaagtatctggttcaaccgctgcccgagcaggcaggcac

SEQ ID NO: 1017019 - DNA, 120 bp, Artificial Sequence
  ENSG00000215386_43 (sequence is synthesized)
cagaagagctagcagccaatccggccatgctcgaagccagctctgcagctcagccaatcagtgacatcattgctttctttagcttgcccatggtgatgtgaagatgagaagaaatagcaa

SEQ ID NO: 1017020 - DNA, 120 bp, Artificial Sequence
  ENSG00000215386_44 (sequence is synthesized)
tccacttgactgcagctcttcgcaacacttcacaagggtcaagctgtgttagtttccttcagtgttaaacagaatgcatcttaagagaatagttcaattattgattgaatagtaggttca

SEQ ID NO: 1017021 - DNA, 120 bp, Artificial Sequence
  ENSG00000215386_45 (sequence is synthesized)
agttgactataatcccaactaatacactctaagaccagggatgggccgacagaagggtaaagttttccactcaagtctcgaggcaaacactcagatagaagtagtaatatggatgccttc

SEQ ID NO: 1017022 - DNA, 120 bp, Artificial Sequence
  ENSG00000215386_46 (sequence is synthesized)
tattatttggtcacatacaatactgttccagcccagttgtgcaaaactggtgaaataaaaggcaaaaatattgacaacagtttgggtaactggattccaaaatgggcatccatctaagag

SEQ ID NO: 1017023 - DNA, 120 bp, Artificial Sequence
  ENSG00000215386_47 (sequence is synthesized)
agaagctacacatttgggaccttctcaggcttcaccctatgcacctctttttgctgatcctgatttgtattatttgtgctataataacactgtaattatatgtataggactttcctgaat

SEQ ID NO: 1017024 - DNA, 120 bp, Artificial Sequence
  ENSG00000215386_48 (sequence is synthesized)
tctctgtcactgtcagtctattaaatgattgagcatgaagagagagtaggaacccctgagtatttagcttgttggtcagaagtgctggtggccttggaactcataagcttgtggctagtt

SEQ ID NO: 1017025 - DNA, 120 bp, Artificial Sequence
  ENSG00000215386_49 (sequence is synthesized)
aaatatacttctttcatctgcgtttcaataatttattccccttgttagatatacatggaattgatattgcttattctgactaagtgaaaagtgttatttctacttactgctcaattagaa

SEQ ID NO: 1017026 - DNA, 120 bp, Artificial Sequence
  ENSG00000215386_50 (sequence is synthesized)
tactataggcagaatttcctctttatcctaaattttgatattctccataatttcatcgtgccttgacattgctgtatataatttctatacatcaggaaggcaattctgtgtgcatgtgtg

SEQ ID NO: 1017027 - DNA, 120 bp, Artificial Sequence
  ENSG00000215386_51 (sequence is synthesized)
tgtgtatatatatagttagaagttagaaactgaaactcttttttgtctaccatcatttcatatttttcttgctatttcaaacctataatttttaaagaaacgactaacgtaatcattcat

SEQ ID NO: 1017028 - DNA, 120 bp, Artificial Sequence
  ENSG00000215386_52 (sequence is synthesized)
agaatatgctgtcagtaacttaacaatataaatgttaacatggaggcatttagttcagcatttgctttacttaatagagtgcagaaaatgtggcccttttctcagttagggtgtatgtga

SEQ ID NO: 1017029 - DNA, 120 bp, Artificial Sequence
  ENSG00000215386_53 (sequence is synthesized)
agataaatttagaatttctagactagtaaatacttctctgataataacttaattatagctatttcaaaccaaattgtttaattgtggtgaatcatatgtaaattgttcagatgtaggtca

SEQ ID NO: 1017030 - DNA, 120 bp, Artificial Sequence
  ENSG00000215386_54 (sequence is synthesized)
gtcaacacccacgcccacattctagcacctctttcctaattcaagacaactttgcagtgcctaaaagagctgaacagtgcagattagagacataagacaaaaaaaaaaaaaaaacacaaa

SEQ ID NO: 1017031 - DNA, 120 bp, Artificial Sequence
  ENSG00000215386_55 (sequence is synthesized)
ctatgacacttagagaagatgtcttttgatttttcccatctaactagaaatttctggccttcttcaaccttcatgtaatagtgaatttattgatactgcatttgcaaggttgacgtttca

SEQ ID NO: 1017032 - DNA, 120 bp, Artificial Sequence
  ENSG00000215386_56 (sequence is synthesized)
tttctaagaaaagaatgtttactacaattagatgagaagagtctcttctggtcaaagaagatctcttaagagtagttcacatggggaaaagaaaaatggatctgagaacgctgtctgggc

SEQ ID NO: 1017033 - DNA, 120 bp, Artificial Sequence
  ENSG00000215386_57 (sequence is synthesized)
cggatgcagaaaacttaatggaggaggctgagtcaaatcaggagctttagaaaatactgatgcctggctctcaaccagagagaactgaactgaattggtctggtgaattcattaaaagag

SEQ ID NO: 1017034 - DNA, 120 bp, Artificial Sequence
  ENSG00000215386_58 (sequence is synthesized)
tgggaggccaaggcgggcggatcacccaagaatgggataactgcctggcactcaccaagctacacttgaagaggatcaatccatgtcatcatgtccccaatttcatagcaccaagtattt

SEQ ID NO: 1017035 - DNA, 120 bp, Artificial Sequence
  ENSG00000215386_59 (sequence is synthesized)
tgtttattcacaaatgccctattatggacatctagcaaacaatgatacatcagaaaaggagatgtgcataaattttcatggaataaggtataaagcccaactctcaatacatactaatca

SEQ ID NO: 1017036 - DNA, 83 bp, Artificial Sequence
  ENSG00000215386_60 (sequence is synthesized)
gaataaggtataaagcccaactctcaatacatactaatcataacaggagtctaagaaatattctgaaataaatgggaatgcag

SEQ ID NO: 1017037 - DNA, 76 bp, Artificial Sequence
  ENSG00000215386_61 (sequence is synthesized)
ctggctcatcctggctcaaaagctccccaactgagcatcttgtgacccccactcttgcctgccagagaacaacccc

SEQ ID NO: 1017038 - DNA, 86 bp, Artificial Sequence
  ENSG00000215386_62 (sequence is synthesized)
gggatgcgcatgaaagaatgtgccacagaaaatgagacacatcaatgagggtaggtttgaaataccaatttaaagcagactttcac

SEQ ID NO: 1017039 - DNA, 120 bp, Artificial Sequence
  ENSG00000215386_63 (sequence is synthesized)
gagggtaggtttgaaataccaatttaaagcagactttcaccgtttggccaggctataaacattaaaaatccataactaagatcttactatatattcaggcattttaagaactctgcatat

SEQ ID NO: 1017040 - DNA, 120 bp, Artificial Sequence
  ENSG00000215386_64 (sequence is synthesized)
ataattacatttgacccttctaatgcctttatcagataggttctattattgctcttttttaaataaagaagataaactttgaagagattaataaattaataaattggtcctccatgacac

SEQ ID NO: 1017041 - DNA, 120 bp, Artificial Sequence
  ENSG00000215386_65 (sequence is synthesized)
ggagacagttcaacgttctgcaaaccagatcttcaggaattttactgggataattatccaaataaattgcaagcattctatccaaatgataactatcacctgaatttccagtcaagtgag

SEQ ID NO: 1017042 - DNA, 120 bp, Artificial Sequence
  ENSG00000215386_66 (sequence is synthesized)
gaggaatcaggagtctccaacatggttggcgggaaactcctttcaaatggactctgccgtcttgtcccttttttatcctcatgcgaattatcattgcttatgagtaaaataagtcaacgg

SEQ ID NO: 1017043 - DNA, 120 bp, Artificial Sequence
  ENSG00000215386_67 (sequence is synthesized)
aatgcttggtatcgttcaaaacagataaaggaccgtggagacgtactcatggatggagaaaatggacccacagaagattgcctcaggacatcacaggggttatctagagcaaaaaaaaaa

SEQ ID NO: 1017044 - DNA, 120 bp, Artificial Sequence
  ENSG00000215386_68 (sequence is synthesized)
cggatatcatgtcttcagagaagtttctcctgccctcctctccctgtagaattaagtattcttccactgtgccaccctctaacttgtgctcatatcttcctctattgtagttatgtgttc

SEQ ID NO: 1017045 - DNA, 120 bp, Artificial Sequence
  ENSG00000215386_69 (sequence is synthesized)
acatccctgttgtttttgtaccggcttctcccaaagggagacatttagtcttattcttcttggtaactttagcacagacctggcagattgttgacactcaacaaatgtttattgactcaa

SEQ ID NO: 1017046 - DNA, 120 bp, Artificial Sequence
  ENSG00000215386_70 (sequence is synthesized)
atgcattcagttgaacattgacctttgatcaactctgggaaaagtctgcaaagctagttaggacattcagaaattcatttcatttcaatcctaactaaataaattattgaagtctcagaa

SEQ ID NO: 1017047 - DNA, 120 bp, Artificial Sequence
  ENSG00000215386_71 (sequence is synthesized)
agccaaaaatctgcaacctcccgcacagtatgaattatgatttcttggaattgggaacacttgacaaactgaagtagaaaaatggaaggtttaaaggaatggatcaacattttattgagt

SEQ ID NO: 1017048 - DNA, 120 bp, Artificial Sequence
  ENSG00000215386_72 (sequence is synthesized)
gtgccatgtggcgacagcgcaaactcccattcctttgaaatgatggagaatggtgaggaaagggggccaaaaatatacctacatgtgttcatttgatttttagacacagccgaaatgtaa

SEQ ID NO: 1017049 - DNA, 120 bp, Artificial Sequence
  ENSG00000215386_73 (sequence is synthesized)
tgtaaagggcgtagcaacgtggagaaataaatggggggcgaaggtggtcgtgaaagcagagaaattgtctcccctcgagaaggaagcaatgtaatgtagcaggaaccattttgaccccgg

SEQ ID NO: 1017050 - DNA, 120 bp, Artificial Sequence
  ENSG00000215386_74 (sequence is synthesized)
agttaaaaattatagtgtacctccgactctttctcttgttatcaccttgatcagatcacttaatttctttccattttctcctgcattcaaaaattcaagacaatgccagcatagagattt

SEQ ID NO: 1017051 - DNA, 120 bp, Artificial Sequence
  ENSG00000215386_75 (sequence is synthesized)
tctctttgtgtgaaatgccttcccattttttaagagtctagatccttttttgcttcaaggaccaagttaaatgtctcctcttctgtgaaatctctccaaatcatcacgaccagaatctct

SEQ ID NO: 1017052 - DNA, 120 bp, Artificial Sequence
  ENSG00000215386_76 (sequence is synthesized)
cacttctccaccccttttcatctcctttattgcctgtgtgccagtcagtattgctgtagggccacatgtgtgtacgtctttgccactagactgaaagccccttggggacagagaccacat

SEQ ID NO: 1017053 - DNA, 120 bp, Artificial Sequence
  ENSG00000215386_77 (sequence is synthesized)
tgaattcttccacccccagctctaagaataatgaatgatgctcctaaggttcaaatccatgttttaattaatgaattataagtacattataaattgcagagggagggtcatacaaattct

SEQ ID NO: 1017054 - DNA, 120 bp, Artificial Sequence
  ENSG00000215386_78 (sequence is synthesized)
ggggattacaattattgttgtcaactattaccactatgtaccagttgatgtcagctttacctcatcaatgttaagccttttatttcactggcccttcataataaatctcagattaaatgg

SEQ ID NO: 1017055 - DNA, 120 bp, Artificial Sequence
  ENSG00000215386_79 (sequence is synthesized)
ttgacttcattctcaggtaagctttctgaatgtggtggcaaagatggccacatacaacttcagacttgcatcatgcgtcatcctacagcctgtgaatccaggaaaaataaacaaacaaaa

SEQ ID NO: 1017056 - DNA, 120 bp, Artificial Sequence
  ENSG00000215386_80 (sequence is synthesized)
agattctctttatgccaacatcaatttcagttgtcagaaaatcttggattggctctgttttggtgacatgcccatatgtggatccacttatttgataaacaaggactactctgattggat

SEQ ID NO: 1017057 - DNA, 120 bp, Artificial Sequence
  ENSG00000215386_81 (sequence is synthesized)
ggtctgtcagtcgtagaaagtgaaaggaatttaaagcaggcgggaatgtaatggaacacacaaccaccactacacattttttaattactgagtataatgatgattgataggcttttgaaa

SEQ ID NO: 1017058 - DNA, 120 bp, Artificial Sequence
  ENSG00000215386_82 (sequence is synthesized)
atgtttgtcttggtaaactcactggtacctatcaatgtgtaggcaacattagtttattttgccaaatgtcctcttacagcatggaaactataaaacatctgctgcagcaaatctcaacct

SEQ ID NO: 1017059 - DNA, 120 bp, Artificial Sequence
  ENSG00000215386_83 (sequence is synthesized)
tgagtgtcatgagattaattacttttattaacactttccataagcatgtaatatatgacatataccaggaaagtcagcatttggtctcatttaggaatttgaaattttaaaaattattta

SEQ ID NO: 1017060 - DNA, 120 bp, Artificial Sequence
  ENSG00000215386_84 (sequence is synthesized)
agattactagaaattgtttggtaaagaagagatgattatttttttctgtagcctattgtgtctatccttaaccaccatatgatcagaccatttccttacagcaaattttatatcctcccc

SEQ ID NO: 1017061 - DNA, 120 bp, Artificial Sequence
  ENSG00000215386_85 (sequence is synthesized)
ccccacttttacctctaatgttagagataattagtgctgattcttggaaatttttatttttgtttatgaattaatttcttcctctactactattatacatatatatatgcattatatata

SEQ ID NO: 1017062 - DNA, 120 bp, Artificial Sequence
  ENSG00000215386_86 (sequence is synthesized)
cagtaatgaactttgtttaacatagacttccccctttcctgtcacccccccccctttccatattaggtccttccattaattattctgctggcataatttaaaccgctatgcaaaaatgtg

SEQ ID NO: 1017063 - DNA, 120 bp, Artificial Sequence
  ENSG00000215386_87 (sequence is synthesized)
acttacaaccaagttgaaaagacaagagccataaaataaaataatagcaaattaatataaaacctggataaagaatgtaataactagatgaccaatttgagagtgcttattgggacttat

SEQ ID NO: 1017064 - DNA, 120 bp, Artificial Sequence
  ENSG00000215386_88 (sequence is synthesized)
acccacttcttaccaagaactccttaacttgagggtgaacaacttaaagcttgatcctacagttacctgaaaagtgatttgagtattcattgaactgaaagaacaaatcgcctacttcag

SEQ ID NO: 1017065 - DNA, 120 bp, Artificial Sequence
  ENSG00000215386_89 (sequence is synthesized)
gcggtggcaagcgtatggaaattatattagaacttcagcaaagtgcacagctgcataatagagaagccggcactcagattgacaggcaaataagccagcttgtggaaggggcctctgggt

SEQ ID NO: 1017066 - DNA, 120 bp, Artificial Sequence
  ENSG00000215386_90 (sequence is synthesized)
ggggcagaaaatagcacacttttactctacgcaactgttgctttttcatggacatccataaaaattcatcagagagcattttactactgagctgcaaagatgacaagagcacctcaaagg

SEQ ID NO: 1017067 - DNA, 120 bp, Artificial Sequence
  ENSG00000215386_91 (sequence is synthesized)
gaaacgaccacaagccaggactgaagaagcctttgacggtatgaggctgaaaatgacctttgtgcactgaagcttatgtgagcaaaagggggctggcaaagctgtggagtcttattttca

SEQ ID NO: 1017068 - DNA, 120 bp, Artificial Sequence
  ENSG00000215386_92 (sequence is synthesized)
gatacagtcacagaagggaatggaaaaaaaaaagaaactgtcatagggtagagacagaagccacataccggtggggagcctttgctgcttgtgctccgcaggacttcaggatttaaatgg

SEQ ID NO: 1017069 - DNA, 120 bp, Artificial Sequence
  ENSG00000215386_93 (sequence is synthesized)
actgacaaatatacaagtgcatatgtatatatagactgtcagatgatgtaagtatgatgaagaaaatgaaagccatgtaatgggtgatggagcggggcatagaaaggtgccatttgctat

SEQ ID NO: 1017070 - DNA, 120 bp, Artificial Sequence
  ENSG00000215386_94 (sequence is synthesized)
tttatagaagtagatcagggaagaccatgtcatggtagatatctgagcagagaccattccaggtgtgggagcatgtcagagaggtatccaggggcaacagttccaggcagagaaagcatg

SEQ ID NO: 1017071 - DNA, 120 bp, Artificial Sequence
  ENSG00000215386_95 (sequence is synthesized)
ctgttgaagtctcatctgctggagaaaatttactccaagaaaataggatgaaagtgtcaaagacaatagttacaagccttggtggtgcaattgattatgatcttgtaatggtataattct

SEQ ID NO: 1017072 - DNA, 120 bp, Artificial Sequence
  ENSG00000215386_96 (sequence is synthesized)
gaaacgatgacacagatagtgtctttatatgatggagctggtccctagaagcagaaggcacagttttcaagttcagaaatttctaattaatatcatgtatatggtgaattacatatatat

SEQ ID NO: 1017073 - DNA, 120 bp, Artificial Sequence
  ENSG00000215386_97 (sequence is synthesized)
aaatagccagtcataaggaaatgcaaatcattttgtttattaaatataaaattgagccaacttagttggtgtttaaaaacttaaaaataggtgaaatttatgtagattcaagcaaccatg

SEQ ID NO: 1017074 - DNA, 120 bp, Artificial Sequence
  ENSG00000215386_98 (sequence is synthesized)
ataagcaaattacagtatccagctctactgttcatgatatgaaaaattacttggaaaaggtaagcagttaacatggaatgttgaaatgctttacaaagcataataaatcaggaaatatag

SEQ ID NO: 1017075 - DNA, 120 bp, Artificial Sequence
  ENSG00000215386_99 (sequence is synthesized)
aatcccatgtcagcgttataattaatgtatgtatttttaatctgtaaactagtacaataatcttgagtgatttctagatgtttttgatataatctgataacataatgccaaagcatgatt

SEQ ID NO: 1017076 - DNA, 120 bp, Artificial Sequence
  ENSG00000215386_100 (sequence is synthesized)
gattttatgttagttatctatttaagtttatacttttggttattatactactgctaagaggaaattaatgttttggcaaaaatgatatttttgttaatgtttgaaaatcgtctttagatt

SEQ ID NO: 1017077 - DNA, 120 bp, Artificial Sequence
  ENSG00000215386_101 (sequence is synthesized)
tattttaaactgtttttcactaccttttatgagaagagaatgaaataattagaaaatatatatatctttacttttatatctggaaaaatagaaatttcagagcttgaaatcagcttaagt

SEQ ID NO: 1017078 - DNA, 120 bp, Artificial Sequence
  ENSG00000215386_102 (sequence is synthesized)
gcttaagtctttattttgtaaaagtattagagaggaaaagtatctcgcccaaaatacgtactttcaagttcccgggacagctaagactggtgtcaagaattcggaaagactgggtcaata

SEQ ID NO: 1017079 - DNA, 120 bp, Artificial Sequence
  ENSG00000215386_103 (sequence is synthesized)
taggattatacaattttatagtactaacataaattacatttacttatgtaatccaatactgtatgtagaattcacatatcatagggaaaaatgggagactggaccttattgagctgtatt

SEQ ID NO: 1017080 - DNA, 120 bp, Artificial Sequence
  ENSG00000215386_104 (sequence is synthesized)
tttccactatcctacaataatgcaattgggtcctaataaataatcatttatattagtattctttaaaaataattatggttatgatgaagtaaaaatggaaatgatatctgggttcacttt

SEQ ID NO: 1017081 - DNA, 120 bp, Artificial Sequence
  ENSG00000215386_105 (sequence is synthesized)
gctagctctgaattcagttaacacagatattatatcttaatgacaagattggttaaatagatttgggtgggtcagtttgaactttttttaaccaatgaattatactgttattcttaatct

SEQ ID NO: 1017082 - DNA, 120 bp, Artificial Sequence
  ENSG00000215386_106 (sequence is synthesized)
tttttattctgcttaagtctccagttatcccaaagatgagatatttgcatctagccaattatttaaaaatataattctggaccttgtaaatactgagagatgaattgtgcccacttagaa

SEQ ID NO: 1017083 - DNA, 120 bp, Artificial Sequence
  ENSG00000215386_107 (sequence is synthesized)
acgaatgtttctcaaagacaataaaaatagtaggactgtccagcatcttctgtttagaaaattacagttaagagttcagagagtgactgagaaaatgtaaagcatcttaaagaaaatgtt

SEQ ID NO: 1017084 - DNA, 120 bp, Artificial Sequence
  ENSG00000215386_108 (sequence is synthesized)
actttacttcctaatttaagacgtggtaactgacagccgtgtgcatttgaatactattttgtttttctaaatttattaaagtaatgataaacaagatagaaataatgtaacaccccccca

SEQ ID NO: 1017085 - DNA, 120 bp, Artificial Sequence
  ENSG00000215386_109 (sequence is synthesized)
tactggtacttattgataccataattgtacggtccttattccaaaattaattattgaattaggaaagtggagtaaatattagggcataggcttacacagcaaaactagtaagtttgtgat

SEQ ID NO: 1017086 - DNA, 120 bp, Artificial Sequence
  ENSG00000215386_110 (sequence is synthesized)
tgagaattgcttatttgtaagatggcaaagaaatagataaaactgacctaaaacatttgcatattctggctttttttcctgcttaacccttacgacatgatttaaaagcagtatcaatat

SEQ ID NO: 1017087 - DNA, 120 bp, Artificial Sequence
  ENSG00000215386_111 (sequence is synthesized)
atttcggtgtttaccgagtatttccacgaactgaagataacacatcttgttattgatcagtgaggttgctctgtaactggttgctgaaccaagaggaggaacaaaaggctttgagttaat

SEQ ID NO: 1017088 - DNA, 120 bp, Artificial Sequence
  ENSG00000215386_112 (sequence is synthesized)
ggctaatatttgctggggcctaatatttccactatatgccatatgctacactatgtgctatgcacacattctttcatttaattctcaaatcaatcctttggtataattactatccttatt

SEQ ID NO: 1017089 - DNA, 120 bp, Artificial Sequence
  ENSG00000215386_113 (sequence is synthesized)
ttacaaaactgagaaaattgagtttcaaaaaggctaagccactcctcaaagtcacatgactaacaagcagcaaaagagggatttgaacgaaggattctgacttgagagaatgcattccta

SEQ ID NO: 1017090 - DNA, 120 bp, Artificial Sequence
  ENSG00000215386_114 (sequence is synthesized)
atcattccaaactgaataatcagtacatgtgattttgctgtttgctgtagaaacagattttttatatatattacattcattaatggtgtatctggttcagttttttaaatgttcacatat

SEQ ID NO: 1017091 - DNA, 120 bp, Artificial Sequence
  ENSG00000215386_115 (sequence is synthesized)
atttttaccttagcattttataggtcagtttgaaagctattgagttcgcaataatatctacattaatattttcttcatattttggtatttctgcacccaatcagatcatttaggtaatac

SEQ ID NO: 1017092 - DNA, 120 bp, Artificial Sequence
  ENSG00000215386_116 (sequence is synthesized)
ataccaaaacaatttctaaacagtgacataccagacaaatgtaaggtcatgttagtagtaaaatgtctttgtaagtctgaattactaaaaataagtattagactaaatgtttccatttcc

SEQ ID NO: 1017093 - DNA, 120 bp, Artificial Sequence
  ENSG00000215386_117 (sequence is synthesized)
tctttttcctagatattttacttattaaatataacacctattttatgacaaaattaattctcattaatttggcagttgcagaatgtcactttggcttatttagaccctgactatccagac

SEQ ID NO: 1017094 - DNA, 120 bp, Artificial Sequence
  ENSG00000215386_118 (sequence is synthesized)
atgtaaggtagttcaggttctcactcctgtttacacatcttgtgtctacaacccactgcaatccacaggatgttaaaagaatcttacaattactgaatatgtagtaatatattttatgcc

SEQ ID NO: 1017095 - DNA, 120 bp, Artificial Sequence
  ENSG00000215386_119 (sequence is synthesized)
taatgctagattttttagtttttatctacagtggtcaagactagagggcatagctgacaagttgttgactttcagggaatcagcttaatttggggaagggaaaggagaaaacagaattgt

SEQ ID NO: 1017096 - DNA, 120 bp, Artificial Sequence
  ENSG00000215386_120 (sequence is synthesized)
gtagtttcttagcttcctgatgaaatgttgtccagtttctttctcaattttctatttctttctagaacaatgttgtacacttaccatatgtcagaaactgtgcaggcaataaaatgatcc

SEQ ID NO: 1017097 - DNA, 120 bp, Artificial Sequence
  ENSG00000215386_121 (sequence is synthesized)
ggcagagcaatggaggatggatttggagctgcaaggcaataaactggtaactgaacaaacatgcaacctcaaagagaaaagtttgaggaaatcacttcaaggacaaaaaattgcaatgta

SEQ ID NO: 1017098 - DNA, 120 bp, Artificial Sequence
  ENSG00000215386_122 (sequence is synthesized)
aagagaattatttatctccaaattccagattacccccctgcccaacccctgccagcagcaccgtccacatggtttctcatttagttttgtgttagtttaacaaagtagactctgcaatct

SEQ ID NO: 1017099 - DNA, 120 bp, Artificial Sequence
  ENSG00000215386_123 (sequence is synthesized)
tacctttctgcttgtagaagaatccaagtagttgggtctttttttttttggtttataatgaacaggcatttgaactgggcaaacaggacgacagcagcagtgagcatgagatcattgcat

SEQ ID NO: 1017100 - DNA, 120 bp, Artificial Sequence
  ENSG00000215386_124 (sequence is synthesized)
tgcagcactgtagcaaactggcaccctgcctttgcacccctttggttcaggagacaaacgtgtgtaatcctcatttctaaagtcagcacagcctggaaggattcctggtctctcccacct

SEQ ID NO: 1017101 - DNA, 120 bp, Artificial Sequence
  ENSG00000215386_125 (sequence is synthesized)
tctaccattctgctgccagtgacggcaaggattggtgtagcttctgcgcagtgctttgtgcctggaataccgagaaggaagaaaaagaagacaagcaccctggtccttttctaagaaatt

SEQ ID NO: 1017102 - DNA, 120 bp, Artificial Sequence
  ENSG00000215386_126 (sequence is synthesized)
gaaaaagaagacaagcaccctggtccttttctaagaaattacaggcgcccttgaagaaaaaatctgagtgtgtcctactacatgcaagagtgctggaaaaaaaaaaaaaaaaaaaaaaaa

SEQ ID NO: 1017103 - DNA, 120 bp, Artificial Sequence
  ENSG00000215386_127 (sequence is synthesized)
aaacaaaaatccaaaccaaaacaaaccaaaaaaagcaaacattggctgtataactacagagacatcgggctttgtaaatcagctttttaaggcaacataaccaaatgagccttctttatt

SEQ ID NO: 1017104 - DNA, 120 bp, Artificial Sequence
  ENSG00000215386_128 (sequence is synthesized)
tttattatttcaaaccatatggcataattagcaatatattgcacttggtgaaatcgcacctttcatatcagggaaaaacttaaaatggatatgaaaagtgaagaaagtgatcataggaga

SEQ ID NO: 1017105 - DNA, 120 bp, Artificial Sequence
  ENSG00000215386_129 (sequence is synthesized)
aaattgctggatcatgtagtagctcaatttttgttttttgaggaaactccaaactgttctccatagtggttgtacaaatttacattccacccaacagtgtacaaggattctcttttgtcc

SEQ ID NO: 1017106 - DNA, 120 bp, Artificial Sequence
  ENSG00000215386_130 (sequence is synthesized)
acatcctcgcaagcatttgttactgcctgtattttggacataagccattttaactgaggacatccataaaaattcatcagagagcattttactactgagctgcaaaggtaggaaaaataa

SEQ ID NO: 1017107 - DNA, 120 bp, Artificial Sequence
  ENSG00000215386_131 (sequence is synthesized)
agatgctttgcctcgcctctcgctgtgtatctgtatgcctgtgtgcgcgcgcgtgctcgctcgggcatccgtgtctagccgaggggagggggtggcgtgtgagtgcgtggagggtaaaag

SEQ ID NO: 1017108 - DNA, 120 bp, Artificial Sequence
  ENSG00000215386_132 (sequence is synthesized)
attcccacgatccactcagatgctcctcctagacagcagttgtctgatatttctccttttgtggttgttttagggaaaaacttaaaatggatatgaaaagtgaagaaagtgatcatagga

SEQ ID NO: 1017109 - DNA, 120 bp, Artificial Sequence
  ENSG00000215386_133 (sequence is synthesized)
gacactcccaatcatctgcatgctggaaatgaggaaatggttattgaatgatacaagtgcttttcgatcatttagaaagttctgtttcccaagatctttttttttttttttttttttgag

SEQ ID NO: 1017110 - DNA, 120 bp, Artificial Sequence
  ENSG00000215386_134 (sequence is synthesized)
tctcagtacttgatttagacacatagaaacttgggtaaataacacctatattgttatattcctcaagaaaaagtttatcttttcatgaaatgaatctactgaggatatttatagaaactg

SEQ ID NO: 1017111 - DNA, 120 bp, Artificial Sequence
  ENSG00000215386_135 (sequence is synthesized)
gtgtgtgtgtgtgtgtgtgtatgtaatttgaagagtaggtgggagaaggttgtgataggatagcagatcttgtttatgatagtcaccagctataacagacactgcctgatgcctttccaa

SEQ ID NO: 1017112 - DNA, 120 bp, Artificial Sequence
  ENSG00000215386_136 (sequence is synthesized)
tagcagatcttgtttatgatagtcaccagctataacagacactgcctgatgcctttccaatatccacttcccttttcttttttttctttttggaacagagtctcactctgtcccccaggc

SEQ ID NO: 1017113 - DNA, 78 bp, Artificial Sequence
  ENSG00000215386_137 (sequence is synthesized)
ggtgatccacctgcctcagcctcttcttttcttacttaatgtctgtgtcaattaaatagaaatgtatcaagttaaaaa

SEQ ID NO: 1017114 - DNA, 120 bp, Artificial Sequence
  ENSG00000215386_138 (sequence is synthesized)
atgtctgtgtcaattaaatagaaatgtatcaagttaaaaaccttgcctcggtagcttccagtgcaaataaaggtacccatgccaccccattctggccagcagtaaaattgatggaagcct

SEQ ID NO: 1017115 - DNA, 120 bp, Artificial Sequence
  ENSG00000215386_139 (sequence is synthesized)
ctggttggggcttcaaggaaagctttatcaaaagataaactcactggctttgtcccttagttcagtggtccccaacctttttggcaccaagagaccagttttgtggaagacaattttttc

SEQ ID NO: 1017116 - DNA, 120 bp, Artificial Sequence
  ENSG00000215386_140 (sequence is synthesized)
catggaccaggagggttccgggggatggttttgggatgaaaatgtttcaccttagatatcatcgggcattcaattctcataaggagcctgcaacctagacctctcacatgtgcagttcac

SEQ ID NO: 1017117 - DNA, 120 bp, Artificial Sequence
  ENSG00000215386_141 (sequence is synthesized)
caggacacagaccagtactggttcgcaacccagggtttgggggcccctgtcttagttcctttgccttccttccagatggatgcctggaggaacaatcatcccgcaattgtgaaaattgaa

SEQ ID NO: 1017118 - DNA, 120 bp, Artificial Sequence
  ENSG00000215386_142 (sequence is synthesized)
gccatattttaaagttggtttcaattgtaatacagaagaaatctggaccttgatgacatttgagctagagtactaatcttgatcttcctattcatgagcttgttgcaagagacaagactt

SEQ ID NO: 1017119 - DNA, 120 bp, Artificial Sequence
  ENSG00000215386_143 (sequence is synthesized)
ttactgatttaactcattgttgggatttcttggaactaaacacagtcataatacattttttccttcccaggaaaatggtagagcatgacttttcaaatctaataaaactcatgtgtagct

SEQ ID NO: 1017120 - DNA, 120 bp, Artificial Sequence
  ENSG00000215386_144 (sequence is synthesized)
tgaaacttagggttaaagaatccaggaaagttgtcttagatagagttataatttccgtggacatcaactgataaatgcaattacagtttgtatgcctaggtttggcaaaaatcatataag

SEQ ID NO: 1017121 - DNA, 120 bp, Artificial Sequence
  ENSG00000215386_145 (sequence is synthesized)
caacatccctcacataatattgttttaattaaattttatttctttcttggtatgaaacatactgcagaagcacaatcaatgaacattggatagtttccttaaatcttgctctttgtccta

SEQ ID NO: 1017122 - DNA, 120 bp, Artificial Sequence
  ENSG00000215386_146 (sequence is synthesized)
tttatataatttattgtgtcagtggttctcaagtggtatgctcctgcaactcatcatctgaaaatccttcccagatgtgctgaaaaattttcattaatttgtatattctattttattttt

SEQ ID NO: 1017123 - DNA, 120 bp, Artificial Sequence
  ENSG00000215386_147 (sequence is synthesized)
ataactaagtacacatgcttgtgactggaagagaagacacccctcatttaatcccagaggaatatttggccttgattcatgccctgctcactccaccccattattaagatagagatcgct

SEQ ID NO: 1017124 - DNA, 120 bp, Artificial Sequence
  ENSG00000215386_148 (sequence is synthesized)
gaagaaatccctgctctataaatgtagctgatccaaaaacaaaatggaaattcattattttaaatatttctacaagatctttgtacaactctatttttttttcctattaagaattacatg

SEQ ID NO: 1017125 - DNA, 120 bp, Artificial Sequence
  ENSG00000215386_149 (sequence is synthesized)
attctagaataagttccaaccctaagtatcaacactggaacacaattttaaaacaggaggcgattatctctatagtgagatttaactacagaggtgatagctctggttagtgaatttcag

SEQ ID NO: 1017126 - DNA, 120 bp, Artificial Sequence
  ENSG00000215386_150 (sequence is synthesized)
gactagaaatcaggcctgctgtctcttagcttagaggaggtataataagaagaggattagaactactgtgtatattaacaagaagaactctattatgttcagctatcattatatatgata

SEQ ID NO: 1017127 - DNA, 120 bp, Artificial Sequence
  ENSG00000215386_151 (sequence is synthesized)
ttatgtttctttttatgaactatagttcactgtctttaagcataatgtttgcccaaggtgggggtgttggtgtgtgtctgtgtgtatatgcatgtgtgcacatgtgtgtatgtatagttg

SEQ ID NO: 1017128 - DNA, 120 bp, Artificial Sequence
  ENSG00000215386_152 (sequence is synthesized)
attcattcattctgacctactgaatttactgaaggaataagaagaaataccttgaactgagggacctggcttagctcaacatctgtaccatctacctttgagtatccattcctttactat

SEQ ID NO: 1017129 - DNA, 120 bp, Artificial Sequence
  ENSG00000215386_153 (sequence is synthesized)
gaagcatggatgctaaaactaaaattgcatttgctaaactactttgtagctagattcctgggtgagattagatttggtcaattagatgttcttgtgtaacatttagaaggtgatagtaag

SEQ ID NO: 1017130 - DNA, 120 bp, Artificial Sequence
  ENSG00000215386_154 (sequence is synthesized)
gcaaaggtcatgtgactggctgattttatttatgttcaatgatctttattggggtacactttatatataataataaataatgcacacattttaagtgtacaatttgatgagttctgacaa

SEQ ID NO: 1017131 - DNA, 120 bp, Artificial Sequence
  ENSG00000215386_155 (sequence is synthesized)
atttatatgcatgtataaccagcatcaatatcaagatatataatgatcccctcattccagaatagtctcttgtgttctttccagccaatgccccacccctggattctggcaacaattgat

SEQ ID NO: 1017132 - DNA, 120 bp, Artificial Sequence
  ENSG00000215386_156 (sequence is synthesized)
ctgctttttattaccatggattatatttgtctttcctagagatacaaataaatgaaataatgtagtgtgtcctctttaactttggcttatttctctcggcacactatttctgaaatttgt

SEQ ID NO: 1017133 - DNA, 120 bp, Artificial Sequence
  ENSG00000215386_157 (sequence is synthesized)
ccatactgttgatatggcagacagaattttaagatggttcctaaaattcttgcctcctggtatgtataattttctctcggttttccgctgaacactaacctaggtgctattgtaaaggga

SEQ ID NO: 1017134 - DNA, 120 bp, Artificial Sequence
  ENSG00000215386_158 (sequence is synthesized)
tttctcaagtgtaattaaagtccctaataagtttattttaagttagaaaaattttcccaggtgagcttgagctaagtgagtgacctaagcaggtgagttgttagaaaaaaattaagagat

SEQ ID NO: 1017135 - DNA, 120 bp, Artificial Sequence
  ENSG00000215386_159 (sequence is synthesized)
atttgaagcgtagacaaaattctgttggcttttaaaagaaaacttccatgtgatagagaaagccagatgatagggaacacaaggttacctctaaattgacaaccagcaaaaaagctgaga

SEQ ID NO: 1017136 - DNA, 120 bp, Artificial Sequence
  ENSG00000215386_160 (sequence is synthesized)
cttcagtcttatcatcataaggaattgaattctgtcaacagccacgtgaccttagaggaggcccctgagccgcagatgagatcatggccctggccaataccttaaattcatcctggtgag

SEQ ID NO: 1017137 - DNA, 120 bp, Artificial Sequence
  ENSG00000215386_161 (sequence is synthesized)
atatgagcagagaactcagctatgccatgctcagatttctcacctgtagagcagtaaattaataagtgagcattatttgaagctgctaagtttgtggtgatttgttacacatcaagagaa

SEQ ID NO: 1017138 - DNA, 120 bp, Artificial Sequence
  ENSG00000215386_162 (sequence is synthesized)
aacatatgctgtatatattattagatttttcctttatattggtgggtgtatttgttatctattacttcctaacaaatcgacaataattaagtgtcttaagacaacacatatttattacct

SEQ ID NO: 1017139 - DNA, 120 bp, Artificial Sequence
  ENSG00000215386_163 (sequence is synthesized)
catagtttctgtgggtcagaaatctgggcatggtttatgtgagttctttgatttaaagttgttggcaaatctgtaaacaaggaagcagtcaggaccgaggtctcatctgaaagtcaactt

SEQ ID NO: 1017140 - DNA, 120 bp, Artificial Sequence
  ENSG00000215386_164 (sequence is synthesized)
gggatgggtctgcttccagcctcacttaacataacagctggcaggattcagttgctcttgggtagttggattgatggcctcagataactaggtagctattagctagatttcaccctcagt

SEQ ID NO: 1017141 - DNA, 120 bp, Artificial Sequence
  ENSG00000215386_165 (sequence is synthesized)
ttgttgccgtgtgggcctccctaaggtggcaatttacttcatcaaaaccagcaagggagagagttggctacaatctctagtaatgtagctacagaaatgacatccccttagcaatgagat

SEQ ID NO: 1017142 - DNA, 120 bp, Artificial Sequence
  ENSG00000215386_166 (sequence is synthesized)
attttattaattagaaagaaattactcaacaggaggggattacacaatgtagtgaataccaggaggctgagatcagaaggagctagtgtagaagctgcctaccacagtgagtagtattct

SEQ ID NO: 1017143 - DNA, 120 bp, Artificial Sequence
  ENSG00000215386_167 (sequence is synthesized)
attacatgaatataccagaatgtctgaatccacccaactgggcatagacgtttgtgttcattcaagatacagactattattattttaaaaataaaagttactatgaacatttaagtataa

SEQ ID NO: 1017144 - DNA, 120 bp, Artificial Sequence
  ENSG00000215386_168 (sequence is synthesized)
gatatcaaatctacttttttgggggaaagttgggcagtgagactgcttaatcgcaaccaatgtgagtttagagggtgcatgttcacttttgtagaagttcaaaatgtactgacgattgtt

SEQ ID NO: 1017145 - DNA, 120 bp, Artificial Sequence
  ENSG00000215386_169 (sequence is synthesized)
tgcttattttttgtttgtttgtttaaatcttaaaggaatactgtcgtctgcgtttttacgattttgttttcttctattgaacccattacagtggatatagagttttattatatagcgaaa

SEQ ID NO: 1017146 - DNA, 120 bp, Artificial Sequence
  ENSG00000215386_170 (sequence is synthesized)
tctttgtaaactgccacagaaagaaagtgttatttagaagggaaattgacaagttttaaagagtaattgtacaatcatttgaggacagaggaacactgcattatactaataagggtttaa

SEQ ID NO: 1017147 - DNA, 120 bp, Artificial Sequence
  ENSG00000215386_171 (sequence is synthesized)
ttaccaaaaaaagtttaatgttgctttggaaggaatattaagtaagttgtctttgtctcttactttttaattttagtcgctgatttagcctgttgggtcacattttttgttagtgctgaa

SEQ ID NO: 1017148 - DNA, 120 bp, Artificial Sequence
  ENSG00000215386_172 (sequence is synthesized)
ggctgccatgaatccgtaatgaggcccctttgcacatgattttggcacttggccaaaatcaacttcccagcggcaagctttctctaaagaacctggagcaatttctttcttttttttttt

SEQ ID NO: 1017149 - DNA, 120 bp, Artificial Sequence
  ENSG00000215386_173 (sequence is synthesized)
ttttttaaatcaggaatcatgtctgaaagctgccacaaccagttgtataggcatgtcaaaatgactttatacagtcaatatgaaacaagcattaaatattttttctcatgttgttgcttt

SEQ ID NO: 1017150 - DNA, 120 bp, Artificial Sequence
  ENSG00000215386_174 (sequence is synthesized)
tatcattatgaattccttgcttgttgccacctaagatacgatggagcaagcacagtcttaaagaagatttgctgattttttgtttttctcagcagaccagagtaggtatgatcatcttat

SEQ ID NO: 1017151 - DNA, 120 bp, Artificial Sequence
  ENSG00000215386_175 (sequence is synthesized)
tgagaagtatacagtgcaaaaaaggtttttcaaaacactacaggataaataacaaatgaattcttaaaactgttaatctctgtaagtaatactcagtgaacagtaagtaatggagttttc

SEQ ID NO: 1017152 - DNA, 120 bp, Artificial Sequence
  ENSG00000215386_176 (sequence is synthesized)
tagaagtttcatcgtgcgcgcaattaagcttaacatttttatagtgtttttgtctatgttaaaaggtagcatttgggatttttaaaaatgtcagcatttgctatataattttaaaaacgt

SEQ ID NO: 1017153 - DNA, 120 bp, Artificial Sequence
  ENSG00000215386_177 (sequence is synthesized)
attaacaccttgatattatttctaacaaatgttttaatagaaatgcttggtatataaacatggctgaataacttttaagtaattgtgtttaattgctgttttgcaataaaaggataattt

SEQ ID NO: 1017154 - DNA, 120 bp, Artificial Sequence
  ENSG00000215386_178 (sequence is synthesized)
ttcatgaaataaattttgaagctcaaaggtacttaacatccaatttctggaactgttattaattttgatattactataactgaattttgttctgtaagccaattttatactctagtgttt

SEQ ID NO: 1017155 - DNA, 120 bp, Artificial Sequence
  ENSG00000215386_179 (sequence is synthesized)
taagagttaaattcacgagtggcaatgaaatactatagcaatcaaatattaacacctcaaattttctatagccattttcaataatatctttagacattaaacataggtactctacagaat

SEQ ID NO: 1017156 - DNA, 120 bp, Artificial Sequence
  ENSG00000215386_180 (sequence is synthesized)
cttgtgtgttaatctgtagtaatccagagtgcaactttattttactagaaacagtcatatttctctttaaaatattgatgagaatcagatacattattttttaagagtgacctaattaag

SEQ ID NO: 1017157 - DNA, 120 bp, Artificial Sequence
  ENSG00000215386_181 (sequence is synthesized)
agatttcttaataggcatgtttattctgtatttgtcttccctttacagtatagaatattgcaaattttggtgatagaaaaaatcatattaattttaggtaaattttaggattagaaattg

SEQ ID NO: 1017158 - DNA, 120 bp, Artificial Sequence
  ENSG00000215386_182 (sequence is synthesized)
cctcctgatttccttcaggtcattttttgtaaatatacaatttatatttgttttgctgtggaccaaattatgatactgtaaaaaccttgctattagtttaaccgaggaatggagtgtttg

SEQ ID NO: 1017159 - DNA, 120 bp, Artificial Sequence
  ENSG00000215386_183 (sequence is synthesized)
gaattttcatactagtcaacattaaaagccatagaagttataaattgttattaatagaaatttacctagataaggtctctttgtatgtgagtttacagctgaattcttatttaatgtaat

SEQ ID NO: 1017160 - DNA, 120 bp, Artificial Sequence
  ENSG00000215386_184 (sequence is synthesized)
ctttgtaatttatataaaagcagttaataaaggtaaatatttcaaaacttggattaaaaaccaaacattttcacatttattatcatgaaacaggtgcaggaaaaataagatagcttctct

SEQ ID NO: 1017161 - DNA, 120 bp, Artificial Sequence
  ENSG00000215386_185 (sequence is synthesized)
tgttgagcatgattctcacttaaaaattaattttgaattcaattttaattttaattttagctcttacacacatcttctgtttttattttttgattattttgaatcagttgttgtacttag

SEQ ID NO: 1017162 - DNA, 120 bp, Artificial Sequence
  ENSG00000215386_186 (sequence is synthesized)
catttgaaattgatagattatttttctaatatttactaagaaatgttttaactgaaaattatagggtattctttgttaatcagagcccatagcaaagtaaatgccatcaaatatagaact

SEQ ID NO: 1017163 - DNA, 120 bp, Artificial Sequence
  ENSG00000215386_187 (sequence is synthesized)
tttggagtacacagaagtgttagtttgcgagttcagaagaaacttacttgtacacgattactgacaaatgttttttagttgaggtagaaacaagtaagtattaaggacaatttaaattat

SEQ ID NO: 1017164 - DNA, 120 bp, Artificial Sequence
  ENSG00000215386_188 (sequence is synthesized)
cttccttactgaaatagctaaaaaaattgctttcttttgctatggcaatgcgttgtaattatttccataatctaggctttttagcagaattattagctagttttccttaggaccaaaaat

SEQ ID NO: 1017165 - DNA, 120 bp, Artificial Sequence
  ENSG00000215386_189 (sequence is synthesized)
ccaaaaatgcaaaacactgattacatttccttcattgagttaacattttaaaaatactatatggaaatgtaattacttttaaaaagaaaaatattttaatatttttgttgaatttcttca

SEQ ID NO: 1017166 - DNA, 120 bp, Artificial Sequence
  ENSG00000215386_190 (sequence is synthesized)
agaatagctcgaacaagtttttcgttcatcttttcccccatacttatattggaaatattaaaatctatgaaattttacaatgtggaatctcttttactcttcagaaaaagttaaattcat

SEQ ID NO: 1017167 - DNA, 120 bp, Artificial Sequence
  ENSG00000215386_191 (sequence is synthesized)
ttatagttgtcaattcaaattatggacttttaccattttaaatgtgacagggttttttgtttgtttattttaattatgcaacaggcacttaaaatactttctttccctccaattaaaaga

SEQ ID NO: 1017168 - DNA, 120 bp, Artificial Sequence
  ENSG00000215386_192 (sequence is synthesized)
gacattaaataattaaacatcaacttttattctgtattgaaaagaaagctttaccattgcagtattttatccacaattgtttaaatgtgagaaatgtttacaacagggtattttaggtga

SEQ ID NO: 1017169 - DNA, 120 bp, Artificial Sequence
  ENSG00000215386_193 (sequence is synthesized)
gcatttatcatttaaatgaagtgctttgttctgaggagtctaaaattcagcaataagataaatgcattgctacattagattgaacatcattgttgaatttttggcacaacttcagtgacc

SEQ ID NO: 1017170 - DNA, 120 bp, Artificial Sequence
  ENSG00000215386_194 (sequence is synthesized)
tcggccataaaaactagtatagtcaggatgatttggaatttgcagtaacaaaactagatatagaagcacgtgaagacaccaacctttgttgttttggagaaagtatgcactaaaataaaa

SEQ ID NO: 1017171 - DNA, 120 bp, Artificial Sequence
  ENSG00000215386_195 (sequence is synthesized)
ggggtgtcagctcaactgtaaaagctgcacagattttttttctttctctctctctgcctctccatagattgtttctgtttcatgccctgtctcatttcgcatagctaaaaaagaatgcta

SEQ ID NO: 1017172 - DNA, 120 bp, Artificial Sequence
  ENSG00000215386_196 (sequence is synthesized)
attaagatcccttgtcttaacctgaaaaataatgactcggctgtaattagaaatctggtgagagtttaaaaattctggtaggggaccaaaaacatcagttacggtgcttaggaagaaaat

SEQ ID NO: 1017173 - DNA, 120 bp, Artificial Sequence
  ENSG00000215386_197 (sequence is synthesized)
gaagaattatttttctgaaatcaaggtaaacatgggagaggggggttccccccatctttttaaccaattttaaccaatggtgttctactgcagatgagaagatactgtatttcaaaaact

SEQ ID NO: 1017174 - DNA, 120 bp, Artificial Sequence
  ENSG00000215386_198 (sequence is synthesized)
attttaaccatcaaattgaaggaacacaaatcagtagcaatagaagccttcttaatcctccttaggatgcaattcagatgaaagaactgctttttctatttttctttttgtgtgtgtgtg

SEQ ID NO: 1017175 - DNA, 120 bp, Artificial Sequence
  ENSG00000215386_199 (sequence is synthesized)
aaacaaagagcaaataagatttactgtttttaaagaaaaacaacattcttttgactgtgttttgttataagaattaatttcatattctttatgagtgtaactgttgaaattttattgatg

SEQ ID NO: 1017176 - DNA, 120 bp, Artificial Sequence
  ENSG00000215386_200 (sequence is synthesized)
gttttcatttgaaaatgtgtgctatgacctacctttgtgaaaaatttcttgtggtcaattgggcagtttgtgtcccattgaatatatgtctgtgtatccatacgcttaagataggtgcaa

SEQ ID NO: 1017177 - DNA, 120 bp, Artificial Sequence
  ENSG00000215386_201 (sequence is synthesized)
tacggtttactagaaagctttataggaaaagaaaaaaattatattttcttatttgttgtaccatataaaaggaagtgaaatcaggaggaggggaataaggtcatgctttttcatcttttt

SEQ ID NO: 1017178 - DNA, 120 bp, Artificial Sequence
  ENSG00000215386_202 (sequence is synthesized)
tacatgacctgataagacaatgaaaccaaaacatgctttcttatagttatggtaaaactaaacccaatgctgcctcttatttcacatttgcatttataaatatatgttgaaatattttta

SEQ ID NO: 1017179 - DNA, 120 bp, Artificial Sequence
  ENSG00000215386_203 (sequence is synthesized)
gcagtggcaccgtctcaggtcacttcaacctccgcctcctgggctcaagcgagtctcccgcctcagcctcctgagtacctggaattgcaggtgcccatcaccatgctcagctaatttttg

SEQ ID NO: 1017180 - DNA, 120 bp, Artificial Sequence
  ENSG00000215386_204 (sequence is synthesized)
ttttattaatctattttttcccaacttcttggtctaaataaatctgaatttttcaactagtttgcctcatgcaattttctcctctattgattctcaaggcatgaatcatcaaagcggtct

SEQ ID NO: 1017181 - DNA, 120 bp, Artificial Sequence
  ENSG00000215386_205 (sequence is synthesized)
tgtcaaaaggaaacattatttttttactaaaattatgaagaaattgaagcaaatgtgatttcaaagacctaactttatccaattttctacttttttccaagctctacattttcacagtaa

SEQ ID NO: 1017182 - DNA, 120 bp, Artificial Sequence
  ENSG00000215386_206 (sequence is synthesized)
aacttctgttttatcttttaacaacatgataaagaaaaacacagatggaagaacattgagggggaattcctaaatgggagcagttagcagctatgaaaatgtagatattcaagaagaaaa

SEQ ID NO: 1017183 - DNA, 120 bp, Artificial Sequence
  ENSG00000215386_207 (sequence is synthesized)
gaaaaagtaagcaaaactgaatcatgagaccatagaagagtcaaaaaaatgtcaatttatctcagctttctgcaaactacaacccatgggccaaattcaaggtctgtttttgtacaatct

SEQ ID NO: 1017184 - DNA, 120 bp, Artificial Sequence
  ENSG00000215386_208 (sequence is synthesized)
acacattaagaatggtttttacaatgatacgtgttagaaaaatgtttagaaagtcatattttatgatgtgaaaattgataaaatgttgttgtccataaataaagttttattggaacacca

SEQ ID NO: 1017185 - DNA, 120 bp, Artificial Sequence
  ENSG00000215386_209 (sequence is synthesized)
atatgtaagtgacttgctcccaattctttcacattttatcaatatcagctgtgttttgcttaaaaaatgagccttacctaactaaaatttctactgtaataaagcaagttaattgtagtg

SEQ ID NO: 1017186 - DNA, 120 bp, Artificial Sequence
  ENSG00000215386_210 (sequence is synthesized)
ctgtggtaagatatattgatcacagtttcatcagataggcatactgcttcaatattgtttgaaaaaaatctttatctttcagcttcatattctaggaggaaccaaatgtaacatttactt

SEQ ID NO: 1017187 - DNA, 120 bp, Artificial Sequence
  ENSG00000215386_211 (sequence is synthesized)
ttcattttgattgcatattaacttgaggtcataatcttgctttaacaatccatctcttctaattatagatataggaggtatggaagtatgtgtttgccacagaacaaaccctggatatat

SEQ ID NO: 1017188 - DNA, 120 bp, Artificial Sequence
  ENSG00000215386_212 (sequence is synthesized)
ccctggatatatttccatcttgcttataaaacttgtctttatgtaaatgtttaaataagatattttaggataaatggtttttatcattgcctattatgtcattttctattaaaagtgaat

SEQ ID NO: 1017189 - DNA, 120 bp, Artificial Sequence
  ENSG00000215386_213 (sequence is synthesized)
tgactctgattcttaaggcattaaattctagtccattcttcttatgagatagggttagtaaaataagttagttttatgggatcaaaagctacaaacaggctgggcatgctggctcatacc

SEQ ID NO: 1017190 - DNA, 120 bp, Artificial Sequence
  ENSG00000215386_214 (sequence is synthesized)
tgtaatgcctgcactttgggagactaaggcaggaggatcgcttgaggctagaagtttgagaccagccagtgcaatatagcaagacccctgtctctataaagaaaaaaaatcaagtaaaaa

SEQ ID NO: 1017191 - DNA, 120 bp, Artificial Sequence
  ENSG00000215386_215 (sequence is synthesized)
tctatccaaatggtaagcagaacatcttattatgtaatcatatttgtttatccataattaatataactttctgagtattgaaatgagaaacttgatttactcttcttcactcatgtttta

SEQ ID NO: 1017192 - DNA, 120 bp, Artificial Sequence
  ENSG00000215386_216 (sequence is synthesized)
atttttttataagaaaaactagaatcactaaagaatttctttttattttatttaaaaattataatcctgagatgcaaatatatgccatgtaagcctgggaactatttaatcactttactc

SEQ ID NO: 1017193 - DNA, 120 bp, Artificial Sequence
  ENSG00000215386_217 (sequence is synthesized)
aaggtaaaatttctgaaaataggtgactggcaaacattttgtaaacaatatataagaagaattgtatatcaaaatatacacataaaactatcttttcagataattatgtatcatttattt

SEQ ID NO: 1017194 - DNA, 120 bp, Artificial Sequence
  ENSG00000215386_218 (sequence is synthesized)
atagcgaaattataaaaatacaacctatagccttccatagatacataattaactatgttttgaaatgatatccaattcagtaccctcatacatttgaaactttgataagctggtctatct

SEQ ID NO: 1017195 - DNA, 120 bp, Artificial Sequence
  ENSG00000215386_219 (sequence is synthesized)
tcactttggggatcttcttcattaagagtttgttttctcaagttttgaggtaggatacatgaagtcattcttcttctttataattatgtggcaggaactatctccctgaaaactttatgc

SEQ ID NO: 1017196 - DNA, 120 bp, Artificial Sequence
  ENSG00000215386_220 (sequence is synthesized)
ttaagtttttgacaatcacactgtcagtcagatggtgcaaagtcttttaatactttttaatataagagagttgtctaaaatacagatagttctccatctgagctcatgacccaagcaatg

SEQ ID NO: 1017197 - DNA, 120 bp, Artificial Sequence
  ENSG00000215386_221 (sequence is synthesized)
tgcttcaaaattgcatttattgtatttttcttattacaaatgatactatgttcataatggatagataaattagatacacataaatacaattaaaaagcatattctcaccacctaatgtaa

SEQ ID NO: 1017198 - DNA, 120 bp, Artificial Sequence
  ENSG00000215386_222 (sequence is synthesized)
cctgttaaccttttgtataaattggtgaatggtttcagtatatgaacacacaacctactgtaaaaattcaagaaatgagtgtgatgatgatgtaaaatgcaggttcaccttctctgtccc

SEQ ID NO: 1017199 - DNA, 120 bp, Artificial Sequence
  ENSG00000215386_223 (sequence is synthesized)
atttacattgtggttgtttttacagcttctggacatctttgagaaaatacttgggtggcattgaaacactagccaatggaagcatttgattttgtagaattttgaaatgtagtgccttac

SEQ ID NO: 1017200 - DNA, 120 bp, Artificial Sequence
  ENSG00000215386_224 (sequence is synthesized)
tgctaaagcccagcctgggcatttgtaaacctcggggaggtttctactttagacaacagtttttgttgagggattacaccacagtcagttccctccatttctccctctcttcctggcccc

SEQ ID NO: 1017201 - DNA, 120 bp, Artificial Sequence
  ENSG00000215386_225 (sequence is synthesized)
cctcccacccaacatggagccttttcaactcttcaaagaagtgggaaaaaaaagtagactctttattaatggcagaaaacaaactggctgctgtacttccgaggcagctctctaataata

SEQ ID NO: 1017202 - DNA, 120 bp, Artificial Sequence
  ENSG00000215386_226 (sequence is synthesized)
aagcagagtaggcactgcaacaaagaattcttgaatgtactaaatatatagggaagcctatttaaattcaccagaggggcttagaggacaagcagcagaaagtttagaattcaattcaag

SEQ ID NO: 1017203 - DNA, 120 bp, Artificial Sequence
  ENSG00000215386_227 (sequence is synthesized)
ccatgccagaaaatgaaaatgtacttaaaaaaggatttctgaaacaattgttcaaagaaatgtcaacttttaaggttctttctagaagaatgaaatttgtactctaatttatgtggtgac

SEQ ID NO: 1017204 - DNA, 120 bp, Artificial Sequence
  ENSG00000215386_228 (sequence is synthesized)
tttttcaattagagaggaaaagtgattaacagaatctcaaaggaattgtatcttatgtttaaagaaaacgtgttttctttccataggatgttctctagtgagggccacctagtgcactga

SEQ ID NO: 1017205 - DNA, 120 bp, Artificial Sequence
  ENSG00000215386_229 (sequence is synthesized)
ctaaaaacaaccaaatatatttatgggacaaacagataatgtatttttttttttttttagcaattagacataacaaatgctcatcttactttgacagaaaaatattcaactttatattct

SEQ ID NO: 1017206 - DNA, 120 bp, Artificial Sequence
  ENSG00000215386_230 (sequence is synthesized)
ttctagttcattttctcacattcagctctacgatttaaaatattttaattgtaactctgaaagagcaatttgctgataaataataggactatgtgtttctaaatttaagagataaaaaag

SEQ ID NO: 1017207 - DNA, 120 bp, Artificial Sequence
  ENSG00000215386_231 (sequence is synthesized)
tgatccctaccttatctcttagtgattgagtcaagaaattatcgttgcccattatttacctatctataagacatgtgtttctataaggaatacccacatctataagaatatatattttat

SEQ ID NO: 1017208 - DNA, 120 bp, Artificial Sequence
  ENSG00000215386_232 (sequence is synthesized)
cctactgcattttccgtgccctgctatatgctgtgtaccacaggagcaagcagagaaaaacactggaaacaagccctgttttccttcagtgtttcctagagccatctgctgacaacacga

SEQ ID NO: 1017209 - DNA, 120 bp, Artificial Sequence
  ENSG00000215386_233 (sequence is synthesized)
acattgggcatctgacagaggagaaatatttataaggtttagctccagtatcacaggcagagcaatggaggatggatttggagctgcaaggcaataaactggtaactgaacaaaatggat

SEQ ID NO: 1017210 - DNA, 120 bp, Artificial Sequence
  ENSG00000215386_234 (sequence is synthesized)
agttgtgagccactgtgcccggcctagcaagatcactttttaagtatccagaaagctctttcttatgttgaattatgtccagaggcataactagactgaaggtttagactccattcattc

SEQ ID NO: 1017211 - DNA, 120 bp, Artificial Sequence
  ENSG00000215386_235 (sequence is synthesized)
tggcattttccaggagcagcaaggaatttagtgtggctgaaggagaatgagcaagggagaaagcagcaggagagtgcacatgaagccctgtgtgccattacgaagactctgctttttttt

SEQ ID NO: 1017212 - DNA, 66 bp, Artificial Sequence
  ENSG00000215386_236 (sequence is synthesized)
tgaagccctgtgtgccattacgaagactctgctttttttttttttttgagtcggagtcttgctctt

SEQ ID NO: 1017213 - DNA, 120 bp, Artificial Sequence
  ENSG00000215386_237 (sequence is synthesized)
ctcggcctcccaaagtgctcaccctccctacctttagcgtctgcctcacctcttgtctctgtgttcctctatacctgtgctgtcttgtatggtcaccactagccacatgtgtctactgag

SEQ ID NO: 1017214 - DNA, 120 bp, Artificial Sequence
  ENSG00000215386_238 (sequence is synthesized)
aacttggaatggggctagcccaaatggacaatatgagaaaaatgtaaaatatctcaatacttttcgtattgtttcatacgttgaaatacaaatagtttgaatatatttgattaagaaaaa

SEQ ID NO: 1017215 - DNA, 120 bp, Artificial Sequence
  ENSG00000215386_239 (sequence is synthesized)
gaagaaataacagaaaaaggacagaaattgttaaaatttttttatgaaaacagatagtaaataacattgtaataaatcccaacagaacatagagaacctgactttattgacgttagtggg

SEQ ID NO: 1017216 - DNA, 120 bp, Artificial Sequence
  ENSG00000215386_240 (sequence is synthesized)
tgggaggaggtttgtgattttaaaactatatattatggttatgtcatctaaaaatcaaatattcaagcacatatattaaaattagtcatcattacatttttccaaaataaaaaataaaac

SEQ ID NO: 1017217 - DNA, 120 bp, Artificial Sequence
  ENSG00000215386_241 (sequence is synthesized)
accatttcagaatgaatgtgcagcctccccagtccaactgaccagcttcctgtgctttcagagaccttttctagaccagtattacaatttggagatccacacaataaaagttcaaggagc

SEQ ID NO: 1017218 - DNA, 120 bp, Artificial Sequence
  ENSG00000215386_242 (sequence is synthesized)
ctctagtgaagaagtcctcggctgctgctactcaggacaaaatcatcatggtgcatggaagaaaccagtaaaaggacccgtaaatattagatttttctgacttgttcacttgcctcttcc

SEQ ID NO: 1017219 - DNA, 120 bp, Artificial Sequence
  ENSG00000215386_243 (sequence is synthesized)
tccttcccataagtgtactcttttttttagggtctatgtgcaagcagttttttttaaatataatcataaaagttgctttttcaaaggagtctaaaatgcatttcatatttgtcattgttt

SEQ ID NO: 1017220 - DNA, 120 bp, Artificial Sequence
  ENSG00000215386_244 (sequence is synthesized)
tctttaaatctagaactcttttggaagggatatgtaacttgagatggcattgttatagtttggaaactgtattcatctgcttcttcaactcaaaataacagtgccttcagatcctgaaaa

SEQ ID NO: 1017221 - DNA, 120 bp, Artificial Sequence
  ENSG00000215386_245 (sequence is synthesized)
gtgtgagaattcctggccagttgaagggtcagggcctgtgcgttatctgactgccagcaagatcactggtgtgtcctcttatttttaacttaaaataggaaaaaaaaaagtgcatcttta

SEQ ID NO: 1017222 - DNA, 120 bp, Artificial Sequence
  ENSG00000215386_246 (sequence is synthesized)
atttagactttgcttgattatttcttaggctttatatgtttgtagataacagtttcctcactgctcacgagatttgtggcaagcaaactcatggtgcttctaggatattaaattttctca

SEQ ID NO: 1017223 - DNA, 120 bp, Artificial Sequence
  ENSG00000215386_247 (sequence is synthesized)
tctgtaaagtacatgcaatagcatcattattgtctactcattgaactgaaataaggattaaacaaatcaaggactgtaaaatgaacgtgtgactcctcaaatcccatacgggaagaacat

SEQ ID NO: 1017224 - DNA, 120 bp, Artificial Sequence
  ENSG00000215386_248 (sequence is synthesized)
gctgtttttcttgatctggttgagtcaaagatcactgatggcaagaatgccttctgtagctgcaggtgaggacaactgagatacggtgcaattgcagaaagtaaataaactttttatttt

SEQ ID NO: 1017225 - DNA, 120 bp, Artificial Sequence
  ENSG00000215386_249 (sequence is synthesized)
ttgagctgttacattatagttctaatctatggatgcctttgtgatgcagcattgtatcattttctgatgaatggctaaggttttatgattctattttatctttatatattgtctgctgta

SEQ ID NO: 1017226 - DNA, 120 bp, Artificial Sequence
  ENSG00000215386_250 (sequence is synthesized)
gcattgaaaaatcataaagcacattgcataaatgtgttacatttgtttttgcttatttgtttatttgagacggagtcttgctctgtcactcaagctggattgcagtggcgcaatctcagc

SEQ ID NO: 1017227 - DNA, 120 bp, Artificial Sequence
  ENSG00000215386_251 (sequence is synthesized)
tccttaccttgtgatttgggaggcctacctcagcctcccaagtactgggattacaggcgtgagccagcatgcccagcctgttgttgcttatctttaggtgattattgctgatgtttttgg

SEQ ID NO: 1017228 - DNA, 120 bp, Artificial Sequence
  ENSG00000215386_252 (sequence is synthesized)
tatattgacagaaaatagtcttgctgcttgttgatgtatactactttttggctttaatgataataaaattataattttgccttaatataaacttaatttttattgtcacttatcacgaga

SEQ ID NO: 1017229 - DNA, 120 bp, Artificial Sequence
  ENSG00000215386_253 (sequence is synthesized)
atttgttcaaggatttgaacttatatctgcatataatttatgatttttgacattttctaaaaattaattatcgaaaaaagtggcaattgtttattttaattcttagaggggtaaaataaa

SEQ ID NO: 1017230 - DNA, 120 bp, Artificial Sequence
  ENSG00000215386_254 (sequence is synthesized)
tggtgtatcctttgcgcttctttcaatatgagtatctttgttgttttaattatttaagataaaaaaataagaattacactaaacataaaatgatatatccctcaaagttagctactacaa

SEQ ID NO: 1017231 - DNA, 120 bp, Artificial Sequence
  ENSG00000215386_255 (sequence is synthesized)
aagttttcgtatttattctttcagattctttctttatatacagaaacatcaatatcaatatgagcatataatgtttccatatcatatatatgatcctctggatttttttttggtgtttac

SEQ ID NO: 1017232 - DNA, 120 bp, Artificial Sequence
  ENSG00000215386_256 (sequence is synthesized)
cattttaattatgggcattcttctaagtctatgtatgttctctatttcatcgtttgtaatggctgcacattagtcaatattttggatgtatcatgatttatttaataggtcctctaagct

SEQ ID NO: 1017233 - DNA, 120 bp, Artificial Sequence
  ENSG00000215386_257 (sequence is synthesized)
tttgtttaaaaaatagaactttaaaatagaataaaaagaggcctctcttaattacaggtttggcaggcatacaaaagaataattctcacttgtatactgaatcaagaaattaaggagtaa

SEQ ID NO: 1017234 - DNA, 120 bp, Artificial Sequence
  ENSG00000215386_258 (sequence is synthesized)
agaaaaagtgttacagtaaagagtcattgaaaatagtattgagtaagtgtgtattagtgggctgggtaaaggaaagctaataatatagatattcatgcaagtgtgttgtaggtgtgtaaa

SEQ ID NO: 1017235 - DNA, 120 bp, Artificial Sequence
  ENSG00000215386_259 (sequence is synthesized)
atggaacagctacccatttcttcagagtttatctcaaatggcacctccttccataagcactcagagacttttcccttcattcccactctcaccagttgtcttacatcgctataaaaattc

SEQ ID NO: 1017236 - DNA, 120 bp, Artificial Sequence
  ENSG00000215386_260 (sequence is synthesized)
agggaaaaatagaccttttcatgttatgtcccatgtacaaattcattttgtatgcatctttttttttcctcactaggctgttaacccctagagggtaatgactgtgtgttattcatcttt

SEQ ID NO: 1017237 - DNA, 120 bp, Artificial Sequence
  ENSG00000215386_261 (sequence is synthesized)
actgtgtgttattcatctttgaacctaatagatgcagaaaaaaatattcattcaattaaattggaacaaagtgtaagaaaagaaagtaatcggcagggcacagtggctcacacctgtaat

SEQ ID NO: 1017238 - DNA, 66 bp, Artificial Sequence
  ENSG00000215386_262 (sequence is synthesized)
tcagagcaagactctgtttcaaaaaaaaagaaaagtaatcaagtagaactgttaaatcttacacag

SEQ ID NO: 1017239 - DNA, 120 bp, Artificial Sequence
  ENSG00000215386_263 (sequence is synthesized)
aaagaaaagtaatcaagtagaactgttaaatcttacacagattttataagatgccactatatgccttgctattatgcctggagtaaattataatcaattctcctgatggatgagacacaa

SEQ ID NO: 1017240 - DNA, 120 bp, Artificial Sequence
  ENSG00000215386_264 (sequence is synthesized)
ataatataaacacatgggtttgatatataatggaaattattttaaattgaattttagtgattttttgtggtatttatgttcaaaaagcataccgacaagtcaagcatttcagaaaaatgt

SEQ ID NO: 1017241 - DNA, 120 bp, Artificial Sequence
  ENSG00000215386_265 (sequence is synthesized)
ttataaatgtatgaaaaagttgtttgtgtggtgctgaacttggatatatattactgcatatcaatgtgaaaacattgtgtcagcttcaaagcattgtgcatatggaagacattattgcta

SEQ ID NO: 1017242 - DNA, 120 bp, Artificial Sequence
  ENSG00000215386_266 (sequence is synthesized)
acatggccctgttcagcttctggtccggtactccctccaataaccctagtttgtctttttctcttcatttttactgatttctatcccacccgtgcatttgttttgagatttcagctcttg

SEQ ID NO: 1017243 - DNA, 120 bp, Artificial Sequence
  ENSG00000215386_267 (sequence is synthesized)
tgacatcatctctgcaaattatgcattgagatttttgagagatttcttgaaatttctgtttaatgagtggtgttaatgtaacatatagattttaatatctggaaaacttcattttttatc

SEQ ID NO: 1017244 - DNA, 120 bp, Artificial Sequence
  ENSG00000215386_268 (sequence is synthesized)
atccactactttctcttaattaatttaacatcatttgcctttcttactggtcatagtataattctgaggtaataaggtggcatttttaatttaactattcatagaacttctgggagaaat

SEQ ID NO: 1017245 - DNA, 120 bp, Artificial Sequence
  ENSG00000215386_269 (sequence is synthesized)
tttatgtctagttcagaaggcatggcagcattttaaatttgattgtggagtattctaaccaaatcttcaagagccgtaactcgaggtgaaacctgccaacactttctttagcttgcccat

SEQ ID NO: 1017246 - DNA, 120 bp, Artificial Sequence
  ENSG00000215386_270 (sequence is synthesized)
acatctaggattggtccctggtgccttatttagttcacctggtgacatcatgttttcctggatggtactgaagctagtagatgttcttcagtgcctgggcgttgaagagtcaggacatcc

SEQ ID NO: 1017247 - DNA, 120 bp, Artificial Sequence
  ENSG00000215386_271 (sequence is synthesized)
ataggcaaaactgaaatggaacaggggcagaaaatagcacacttttactctacgcaactgttgctttttcatgcatgtttttaagcgtcacactgagcctggaagttaacacagaatcag

SEQ ID NO: 1017248 - DNA, 120 bp, Artificial Sequence
  ENSG00000215386_272 (sequence is synthesized)
agaggaaagaagaggcccagctagactgtagcaaggttagaagatacacgcaagattgcctgccacacacatcgggtcttgttcctgtccagtatttgcatggagatatcaagttaatta

SEQ ID NO: 1017249 - DNA, 120 bp, Artificial Sequence
  ENSG00000215386_273 (sequence is synthesized)
actgcactccggcctgggcagcagagcgagactctgtttcaaaaaaataaaaaagaatcagtgcttccacatttctcactgtgtcatgtaaaggtaatccccactaagagtcgtgagctc

SEQ ID NO: 1017250 - DNA, 120 bp, Artificial Sequence
  ENSG00000215386_274 (sequence is synthesized)
agatgacaagagcacctcaaaggcagcagcctcaaggagcagccatggccccagacttgtcgcacggatgcagaaaacttaatggaggaggctgaggctggagtgcaatgacgcaatctc

SEQ ID NO: 1017251 - DNA, 120 bp, Artificial Sequence
  ENSG00000215386_275 (sequence is synthesized)
gaaagccacagtttgtgtgaatcgcagagagcaaaatggcaaactgaagacacaatctcatgacaatagagacataatagacatctattcaccgaataagttaaagaggagctctttctg

SEQ ID NO: 1017252 - DNA, 120 bp, Artificial Sequence
  ENSG00000215386_276 (sequence is synthesized)
caggctcttgggacctaggcggaggggaaccagcagctttggaccttattgattgtctgcagttaccaccagaacaaaagaacatacatagattctgcctaggagaaaagaacaatgctt

SEQ ID NO: 1017253 - DNA, 120 bp, Artificial Sequence
  ENSG00000215386_277 (sequence is synthesized)
ttctttatcatcagcaacgttttcaccatgacccatccccaaaaatactattgtcagaaactgtactctaaagtgattacacagttgcactgaaatagcgtttgtattataacgatcata

SEQ ID NO: 1017254 - DNA, 120 bp, Artificial Sequence
  ENSG00000215386_278 (sequence is synthesized)
caaaagcaatataagaaacctgtgtaagaagcaaaattaaaatataagtgttttaaaatgcttcttttggtgcattttaaggtggctagtataagaggatatctcttcagttaatgaaga

SEQ ID NO: 1017255 - DNA, 120 bp, Artificial Sequence
  ENSG00000215386_279 (sequence is synthesized)
ttagctacttaaataaatcctgtatgcctccatataactatggctcagactatgtcatatacagctataagcatgcttgaggcctagaaataacatgatttacaatcttctttattgacc

SEQ ID NO: 1017256 - DNA, 120 bp, Artificial Sequence
  ENSG00000215386_280 (sequence is synthesized)
ctattagattttactaccgatttaagaagaatgctgttttatactttgtatttattgccagggcttttctgagtcttctatccaaccaacatactttatatgtcttaacaattctaacaa

SEQ ID NO: 1017257 - DNA, 120 bp, Artificial Sequence
  ENSG00000215386_281 (sequence is synthesized)
ttattttgttacgagagtccaagagtgaaagtttcaccaataatctgggaaaatatgtctttttaaaattttttacagtttactgtgtacatatcatgggcctacgtgagataaaacagt

SEQ ID NO: 1017258 - DNA, 120 bp, Artificial Sequence
  ENSG00000215386_282 (sequence is synthesized)
aaacgccacctatgaagtcaaactgctttgactagcaactgcatatgaactgcatagttttagttttataagaattttagctttatcggaggtaactattccaaccataagtaatatgtc

SEQ ID NO: 1017259 - DNA, 120 bp, Artificial Sequence
  ENSG00000215386_283 (sequence is synthesized)
atatttgaaagtttaatagccattgccacatcagatatgtctttcttggagatagaatcagtatgctaaatctatttaaaaattttacaataatgttacaaatatcaagattcaaaatgg

SEQ ID NO: 1017260 - DNA, 120 bp, Artificial Sequence
  ENSG00000215386_284 (sequence is synthesized)
agatgacagactttccttaatagaagcaacaaagtggcttcattcttttaactattgccttagatgggtgccataaattatgtgtcttctgcattgttaaaataaatttatgaatgtatt

SEQ ID NO: 1017261 - DNA, 120 bp, Artificial Sequence
  ENSG00000215386_285 (sequence is synthesized)
ctgcattgttaaaataaatttatgaatgtattttagaatactgtacggagtctttgttcatctttttaaaaatttcttataatacctacttgaaatattacagaatacaaatcatctatt

SEQ ID NO: 1017262 - DNA, 120 bp, Artificial Sequence
  ENSG00000215386_286 (sequence is synthesized)
tcataaacatacacatctatataaagcatgcagaatatgtttaagcatgtatgcacactgtacctattcagattctttatttatatcatctacttcatttatctagaagttctgaaattt

SEQ ID NO: 1017263 - DNA, 120 bp, Artificial Sequence
  ENSG00000215386_287 (sequence is synthesized)
taggtgtgtgtatgtatatgtataaatataagttttaaagctccaaatgaaaggaggtaatataaacagtaaagagctttggtagtatttatcttttatttcttttgacctcattctcat

SEQ ID NO: 1017264 - DNA, 120 bp, Artificial Sequence
  ENSG00000215386_288 (sequence is synthesized)
tggaattgagtattttttaaaaccataagtttcttaatacaaagaaatctatgtatgtgtgtctacatgtacacagaagcttgattacatttaatagcaatgttcacacaatggatctga

SEQ ID NO: 1017265 - DNA, 120 bp, Artificial Sequence
  ENSG00000215386_289 (sequence is synthesized)
aagtacttcttgtaaaaaagaatatcacatacaagtatgtgtttactaacatctgttttaacatgatcataaataatatctgtgaaaggttccatcaagttagttccaaaacaatgtaag

SEQ ID NO: 1017266 - DNA, 120 bp, Artificial Sequence
  ENSG00000215386_290 (sequence is synthesized)
gggtagatgtttattggctatagtgatatcagatataggttattcaaacgtgaaaattttttaatgttatcatattcatgaaccacactatatattaacttctgtctcataaaagaaata

SEQ ID NO: 1017267 - DNA, 120 bp, Artificial Sequence
  ENSG00000215386_291 (sequence is synthesized)
ggagtgtgttctcattattcccggacagatgcacagacttctacagcacagtgagtggttaaaaaaagaatctaaaactaagcaacctgggtttggatgctgggtctgtcccttactggc

SEQ ID NO: 1017268 - DNA, 120 bp, Artificial Sequence
  ENSG00000215386_292 (sequence is synthesized)
tctgtgatttgttaaggtatttaatgcctttgttcctcagttttcttatctgtgaacagggtgactgtagcagtactgatgtcattaggttggtttgagggttgagtgagttagtacatg

SEQ ID NO: 1017269 - DNA, 120 bp, Artificial Sequence
  ENSG00000215386_293 (sequence is synthesized)
taaaattgggtcccattgaaacccttctaaccctttacccaagagtaggtttaaatcctcatatagacttccattgcagtcaatgtccttgttaaaattgtaattacatgattgtattag

SEQ ID NO: 1017270 - DNA, 75 bp, Artificial Sequence
  ENSG00000215386_294 (sequence is synthesized)
caatgtccttgttaaaattgtaattacattactgggcaatttacagaagaaagaggtttaatggatttacagttc

SEQ ID NO: 1017271 - DNA, 82 bp, Artificial Sequence
  ENSG00000215386_295 (sequence is synthesized)
gagcaagtcacgtcttacatggatggcaacaggcaaagagagagcttgtccaggtcattcaccatcatgagaacaatgcagg

SEQ ID NO: 1017272 - DNA, 78 bp, Artificial Sequence
  ENSG00000215386_296 (sequence is synthesized)
tcaccatcatgagaacaaggttcctcccacaacacgtgggaattgtgggagctgcaattcaagatgagatttgggtgg

SEQ ID NO: 1017273 - DNA, 120 bp, Artificial Sequence
  ENSG00000215386_297 (sequence is synthesized)
aatgattgtttcatatttttctccactactggaatctaaatacctatgaggccagtgacctcatctatctgatttagtgctgtatcctcattgctagcacagaactagttaagagaaggc

SEQ ID NO: 1017274 - DNA, 120 bp, Artificial Sequence
  ENSG00000215386_298 (sequence is synthesized)
acttatcacttaagaatgaatgaatgaatgaatgaatttccttcaatgtaaacatttactcactatttacttaaagtactattttgtttaatttatcctttcttaatgtttaaaagatca

SEQ ID NO: 1017275 - DNA, 120 bp, Artificial Sequence
  ENSG00000215386_299 (sequence is synthesized)
tgtaccctttatccagttttcccaatagcaatatcctgcaaatcttagtcacaatattgctactagaatattgacaatgatactaccttattcatattttcctaattttaattgtactcc

SEQ ID NO: 1017276 - DNA, 120 bp, Artificial Sequence
  ENSG00000215386_300 (sequence is synthesized)
tttgtgtgtttgtgagtgtgtgtaggtgtttagttctgtgcaactttatcacatgtgtaggttgtatctaccaccacatcaaaatacagaactgttccttcatcacagattccttatagt

SEQ ID NO: 1017277 - DNA, 120 bp, Artificial Sequence
  ENSG00000215386_301 (sequence is synthesized)
tccctgcccagccctgacccctagcaactactggtcttttctccatttctaaatttttgtcctttaaagaattttgtgtaaatgaaatcatacagtatgtaaacttttgggattgccttt

SEQ ID NO: 1017278 - DNA, 120 bp, Artificial Sequence
  ENSG00000215386_302 (sequence is synthesized)
tttttccttagcataattctctgaagattaatccaagtcattttaacagttcattcttctttttttgctgagtaatatcccctggtagggatgtaccacaaattttatttaactacttgc

SEQ ID NO: 1017279 - DNA, 120 bp, Artificial Sequence
  ENSG00000215386_303 (sequence is synthesized)
ccattgaagtaccaagttggttcctgtttttgctataatcatttctgtacaggtttttgtataatcatgaattatatttgtctagtttaaaggctcaagagtccaattgctaaatcacat

SEQ ID NO: 1017280 - DNA, 120 bp, Artificial Sequence
  ENSG00000215386_304 (sequence is synthesized)
ggtaacggcatgtttattttataagattgcctgattgttttccatggtgtctgtacccatctgttgcattttgctctttttcactgtggctattagacaatttaaaattacatacataat

SEQ ID NO: 1017281 - DNA, 120 bp, Artificial Sequence
  ENSG00000215386_305 (sequence is synthesized)
ttttcacatttgtaataatttttcacatttcaaaagaacagcacccagacagttcttgttctcaagaacaggacttgagacagtcctgttctccagtaccaagctcttaccacctcaggc

SEQ ID NO: 1017282 - DNA, 120 bp, Artificial Sequence
  ENSG00000215386_306 (sequence is synthesized)
ttttgcattaaattagttttaaagttaagggatatatataagacctttttattaacaagttgatgagatgagcattagtatacctataggaagtttttgaatgagtgccaattctgaatt

SEQ ID NO: 1017283 - DNA, 120 bp, Artificial Sequence
  ENSG00000215386_307 (sequence is synthesized)
agagcaatggaggatggatttggagctgcaaggcaataaactggtaactgaacaaaaccagtccaagaagattgtatataagagacacctgataatttcaaaatcctaggcccacttcct

SEQ ID NO: 1017284 - DNA, 120 bp, Artificial Sequence
  ENSG00000215386_308 (sequence is synthesized)
agtagtagcaaaactcaagtgcaagaagctgagagtcacatggccctgttcagcttctgctttctttagcttgcccatggtgatgtgaagatgagaagaaatagcaaggcccaaccagtt

SEQ ID NO: 1017285 - DNA, 120 bp, Artificial Sequence
  ENSG00000215386_309 (sequence is synthesized)
gagcgttttgttttttgttatgttggtgtcactggaaacagttgtgcttcctgatgtcttactgagatggcctttttggtcattttgggccactttcccaaggatactgcatgttgcctg

SEQ ID NO: 1017286 - DNA, 120 bp, Artificial Sequence
  ENSG00000215386_310 (sequence is synthesized)
acctgtattcctgaggaaataaggaggacttagattgatctgttttggacagcgtactttctctaagaatggcgaaaggaaaaacatcagactaggatgctctccagaaataataactga

SEQ ID NO: 1017287 - DNA, 120 bp, Artificial Sequence
  ENSG00000215386_311 (sequence is synthesized)
gtagaacacatgatctatataaaggctataaaacgtatttatttcaaaatatgcaaaatcactaagcaattagtatgtagtattattttacacaataaagatataattaggaaatgctaa

SEQ ID NO: 1017288 - DNA, 120 bp, Artificial Sequence
  ENSG00000215386_312 (sequence is synthesized)
agaacaagtagaatggaaagaaattaggaatgggagtagtgcagagcagcttgaactaatgcactgggaatggaaatgagagaacaggcaaaacatttgagaaagtcgatttgaaaaggc

SEQ ID NO: 1017289 - DNA, 120 bp, Artificial Sequence
  ENSG00000215386_313 (sequence is synthesized)
tgtgccctcagcctgtgaagtctgcctaactctggctagtccatcgcaagtcactgcacacgtattaattcaatcagctctatggtctaacccaggcacaacaggaatacaaccttttac

SEQ ID NO: 1017290 - DNA, 120 bp, Artificial Sequence
  ENSG00000215386_314 (sequence is synthesized)
tgttgctttttcatggacagtactacagaaggactaagtatataggaaacttgacttatttaaataaggcagtgaaaaaaatagaatatggggagtaaaacaacctctgaagctaagtct

SEQ ID NO: 1017291 - DNA, 120 bp, Artificial Sequence
  ENSG00000215386_315 (sequence is synthesized)
tttgtttatcatagtatgacctgggtggtttttaacattttaccatcaagaactactatttaggaatctttctcaatgaaaaagagattaatttactatgaataatggttctaatgcaaa

SEQ ID NO: 1017292 - DNA, 120 bp, Artificial Sequence
  ENSG00000215386_316 (sequence is synthesized)
acattttgggcttttgttgtgatgcagatgagcaaagccataaatataatttagagagtttgaaaatgtattttaacattcacaattcttcttactaattaatcaaattacaaaattatg

SEQ ID NO: 1017293 - DNA, 120 bp, Artificial Sequence
  ENSG00000215386_317 (sequence is synthesized)
ctgtggcttccagtatattaaaataagttgtcatatttggaacatctgtttatggtcctattatgaatatgtatttctaaagggctgaaatatagattgccataaataatgtttgcaatt

SEQ ID NO: 1017294 - DNA, 120 bp, Artificial Sequence
  ENSG00000215386_318 (sequence is synthesized)
ctttacattcctaagttctgtgaaagaggcactagtagctcaggctagcaaggaaggaaaaaagaggaagtttctctctgcgttctgattacactctgaattcccttgtagtgagcttac

SEQ ID NO: 1017295 - DNA, 120 bp, Artificial Sequence
  ENSG00000215386_319 (sequence is synthesized)
agggtcgcatagaaaatgcatatttaatcttataagaagctgcttaaaatgctttgcaatgtgattttaccattttacactcccaacaatgtatagcaatatatcatagatctagtggtt

SEQ ID NO: 1017296 - DNA, 120 bp, Artificial Sequence
  ENSG00000215386_320 (sequence is synthesized)
tcatatctccacaaacacttgatattgtcactcagtttaattgtagctacttaaataggcttataatggtactcgttatgattttaatatgcatttccctaatgcctattagggactaat

SEQ ID NO: 1017297 - DNA, 120 bp, Artificial Sequence
  ENSG00000215386_321 (sequence is synthesized)
tatgttaagcatcttttcatgtatttggaggccatttgtgtaccttcatttgtaaaatatctgtttaagtagcttgcccatttggattgctttacattttattatagagtcataagcatc

SEQ ID NO: 1017298 - DNA, 120 bp, Artificial Sequence
  ENSG00000215386_322 (sequence is synthesized)
ggtatgatcatcttattgagaagtatacagtgcaaaaaaggtttttcaaaacactacaggataaataacaaatgaattcttaaaactgttaatctctgacatccataaaaattcatcaga

SEQ ID NO: 1017299 - DNA, 120 bp, Artificial Sequence
  ENSG00000215386_323 (sequence is synthesized)
ctttcatttatgtattttctatgactgtttttatgctgtaacagcagaattaagcagttgcgacagagatcatatgacatgcagcatgtaaaacatgtattatctagcccttcatagaga

SEQ ID NO: 1017300 - DNA, 120 bp, Artificial Sequence
  ENSG00000215386_324 (sequence is synthesized)
agtttgctgtctccagatttagaacattcccctaagttaattttcccagctgattacatcactgtttattgagtatcagctctggaatttcaagttcaaataaaccaaggagtaccttca

SEQ ID NO: 1017301 - DNA, 120 bp, Artificial Sequence
  ENSG00000276232_0 (sequence is synthesized)
ggacctttggcctgttaaaggtctgtaatcttggtgggcgatacagagttatgtgtgttcactgtaagggcagaccaacaagaactttttcctacttttgagctacctctttttaatagg

SEQ ID NO: 1017302 - DNA, 120 bp, Artificial Sequence
  ENSG00000276232_1 (sequence is synthesized)
ttccagttgctggagagaaattgtggtaactggagtgagagagtaggaacagggcatgttcagggtatcagggccaagggtcctaaaggacttagcttgtgttatggccactgagagatg

SEQ ID NO: 1017303 - DNA, 120 bp, Artificial Sequence
  ENSG00000270171_0 (sequence is synthesized)
attgcaaggtccgatccattcccatcagtgttgaggagaggaagagaggtcttgttggagaagagtagccatcgaggaggggacagtggtgctagggcttccttcagcctcccagccccc

SEQ ID NO: 1017304 - DNA, 120 bp, Artificial Sequence
  ENSG00000270171_1 (sequence is synthesized)
agcacaggagagggagacagcagagagggccggagggagggagctggtggcttaaaatggagccgtttacaaccccgcacagcaaatggagccattgggaggacacttgaccgagaggag

SEQ ID NO: 1017305 - DNA, 120 bp, Artificial Sequence
  ENSG00000270171_2 (sequence is synthesized)
agcattgcttgagccaggggtgccgtctgcaggacagagacaggaggcagtgttgtttccagggcatcgtggaccatggcacaggtgagcaatttaaaaaggtgattggaatcatatgtt

SEQ ID NO: 1017306 - DNA, 120 bp, Artificial Sequence
  ENSG00000270171_3 (sequence is synthesized)
agaataatgaccttagcagtcaaaggctcctggaatttgtcatttaatttcatattttaggtggactgatctgtaatttagttaatttcacatctccatctaggaaaactggagctctgc

SEQ ID NO: 1017307 - DNA, 120 bp, Artificial Sequence
  ENSG00000270171_4 (sequence is synthesized)
acaatattttctgcagacgacaaagtattcacccaaactatttctcatagtaaaatgtgctctttgtccccagagaactgctgaatactacataagatctgtgtaggagccatgctttaa

SEQ ID NO: 1017308 - DNA, 120 bp, Artificial Sequence
  ENSG00000270171_5 (sequence is synthesized)
caacaacaaacacctcagacacacaacaaccctttcctccctcgataaagatactgaaaagaatctggtctctggggtgaggagtaggggaagcaggtgcaagcaagtgggtgcagagga

SEQ ID NO: 1017309 - DNA, 120 bp, Artificial Sequence
  ENSG00000270171_6 (sequence is synthesized)
gtgggaagatggcattttgtgtaggaaagaatttaacgttgcccaaagagaggtctggcttttgtcctcaccttctgggaggtgaactctaagcccttggaatatcatgcctgattggag

SEQ ID NO: 1017310 - DNA, 120 bp, Artificial Sequence
  ENSG00000270171_7 (sequence is synthesized)
atatgatttagggtagatgctggccacactggataggtttagggtaggggttggctgtgccagaaagaccaacaatgtgacttagggtggggtctttgggtcacgtggtatcagctgact

SEQ ID NO: 1017311 - DNA, 120 bp, Artificial Sequence
  ENSG00000270171_8 (sequence is synthesized)
ctggaggagctggagagggagggcagtcacctgtgtgatggagccgcaataaaaactctgaacactggggctatggtgagctgccctggttggcagtactccatgggtactgtcacacat

SEQ ID NO: 1017312 - DNA, 120 bp, Artificial Sequence
  ENSG00000270171_9 (sequence is synthesized)
caatgccaggaaagtcatgcttttcatgattccatggggaagaggacagtggaagctccatgtctggtaccttcctggactatgccctatgcccttcctcccttggctgattttaatctg

SEQ ID NO: 1017313 - DNA, 120 bp, Artificial Sequence
  ENSG00000270171_10 (sequence is synthesized)
tatccttttgatgtaataatgtgcaactgtgagtatgagagcttttgatgagttctgcgtccttccagtgaatgatcaaacctgagggtggtctagggtaccccttgcagttggtgcagc

SEQ ID NO: 1017314 - DNA, 120 bp, Artificial Sequence
  ENSG00000270171_11 (sequence is synthesized)
tggtctagggtaccccttgcagttggtgcagcaataaaggtggtcttatgtggatggtgctccctttaacttgacaggtggctaactgatatggttggctgtgtccccacccaaatctca

SEQ ID NO: 1017315 - DNA, 120 bp, Artificial Sequence
  ENSG00000270171_12 (sequence is synthesized)
agtcgaagataattgaatcatggaggcaagtctttcctgtgttgttctcacgatagtgaatacatctcacgagatctgatggttttaaaaacaggagttgccctgtaagagctctttctc

SEQ ID NO: 1017316 - DNA, 60 bp, Artificial Sequence
  ENSG00000270171_13 (sequence is synthesized)
ggttttaaaaacaggagttgccctgtaagagctctttctccctttaacttccccagccac

SEQ ID NO: 1017317 - DNA, 120 bp, Artificial Sequence
  ENSG00000270177_0 (sequence is synthesized)
gcagaccggatggaagccggggccactggcagcctgtaactggttcccctgggaaggccgctctggtgatgaactcagctcctcacctggggcctggcagtccgatcacggaaacgagaa

SEQ ID NO: 1017318 - DNA, 120 bp, Artificial Sequence
  ENSG00000270177_1 (sequence is synthesized)
ttgcgaccccgtggctcatctggggtgctgcggctctgtaatcgtgtgggtttccgtcatctttgggggcaggaacgggcagcgagtggccgcttggattaaccacccccacctctgggc

SEQ ID NO: 1017319 - DNA, 120 bp, Artificial Sequence
  ENSG00000270177_2 (sequence is synthesized)
gcggctggcaccttgtaattaggtcactcgtaggtggaggagcgtgtacctaccgggggagtgctgcgcagtgcacctgacttccgcggcacacacccgtccccggacctaggtgtctcg

SEQ ID NO: 1017320 - DNA, 120 bp, Artificial Sequence
  ENSG00000270177_3 (sequence is synthesized)
tcgggcgcgatggcgggggcgaggcttgggcttttctttgggcctcggaccgcggctcgcttccacgcgccccgctcctcgccggtggttgctttcctccaagtttaattctctctggga

SEQ ID NO: 1017321 - DNA, 120 bp, Artificial Sequence
  ENSG00000270177_4 (sequence is synthesized)
atgagagaccctcaacccctgcgcgccctggcctactttcaagaggggaagcccagagaagatggatgcacctgtcctgaccgcgtctcggtggcgtgagaagcagctgtgatacgtgct

SEQ ID NO: 1017322 - DNA, 120 bp, Artificial Sequence
  ENSG00000270177_5 (sequence is synthesized)
ttacataaatatctggttccatagagcgccagctatatgccagatccggaggggtcatccagacggaccagggaccatgccctggagcttgtattctcccaacagtactggctgaagatg

SEQ ID NO: 1017323 - DNA, 120 bp, Artificial Sequence
  ENSG00000270177_6 (sequence is synthesized)
gtttgggataggcagaagagagatcataatgcccccaggatttgaaagatatagaagctttccaaagaacatttaaccataaagggcaaggcaagagctgaacctgatcgcctgtcttcc

SEQ ID NO: 1017324 - DNA, 120 bp, Artificial Sequence
  ENSG00000270177_7 (sequence is synthesized)
aggaaccccaccctcagtatcaggcaacccttccacacccaagtgctcagcgatgcttgggaggagactgctcactctgcggctctgagggcatcatccccaccaacaggctgaagaagg

SEQ ID NO: 1017325 - DNA, 120 bp, Artificial Sequence
  ENSG00000270177_8 (sequence is synthesized)
cactggaggccccatcagccaatagcaggactgaaaatcctcctttatccaagacaacgtgtttggcaaggccgactggcttggcctccctaggctggaaattgcaattctgctttccct

SEQ ID NO: 1017326 - DNA, 120 bp, Artificial Sequence
  ENSG00000270177_9 (sequence is synthesized)
tcacacctcccattagtgtgcacaaaagaaagtaccttaaatctactcttctagaagtcttatcacatacttaatttaccagactgggaaaaagaccctttagcccaaattctgtccctg

SEQ ID NO: 1017327 - DNA, 120 bp, Artificial Sequence
  ENSG00000270177_10 (sequence is synthesized)
ttttgcagttaacatccccaaacaatagaagggtaagagttaagaccaagtggaatgaataaggaaaaaatcatcacttagtgcccgtgattataaagccatacccagtgtgctgtctaa

SEQ ID NO: 1017328 - DNA, 120 bp, Artificial Sequence
  ENSG00000270175_0 (sequence is synthesized)
tcgcagctggagaggcagggtcaagcacgcacgagaagcttcatggcgtcattggttactcccattgcgattacttcccctaggtgcactgagattggttacttcgactaaaggggcgga

SEQ ID NO: 1017329 - DNA, 120 bp, Artificial Sequence
  ENSG00000270175_1 (sequence is synthesized)
gacaaggaaaagtcagccccccccgaccccgcctccttgatgaaggaaggttgtgattggtccggagaggctgccgtcggatcctggctctttgcggtctgggagggtgggccttaccta

SEQ ID NO: 1017330 - DNA, 120 bp, Artificial Sequence
  ENSG00000270175_2 (sequence is synthesized)
gacgccggaggggaccgatctctgtttccgcagggctctggagctggtgcaggtttaagtccgtctcagacagtcccctcaacccacagcctaagccccttgcccttgggcctccgtgac

SEQ ID NO: 1017331 - DNA, 120 bp, Artificial Sequence
  ENSG00000270175_3 (sequence is synthesized)
cttttgtgaaacctttttagaaccgctctagtgaacctctctttaactggcgaggaaacctctggggcctgataatcaggctgtaatgtgggacgacaggattagaaggactaggcacct

SEQ ID NO: 1017332 - DNA, 120 bp, Artificial Sequence
  ENSG00000270175_4 (sequence is synthesized)
tggtggtcttgttccctcttccatgagtcttgggtctctcagctgaagagagcaaaagtgaattttggccgcctaagattaatcaactgatctgggtgttgagcagacgcgcattgttta

SEQ ID NO: 1017333 - DNA, 120 bp, Artificial Sequence
  ENSG00000270175_5 (sequence is synthesized)
gtcctagagccccattgcctcctcccccaaagttgcacaaccactgggctgagggaaatcttgtgaccttggagagagaaagggagagaccacattaaaaaaaaaaaaggttctaatgag

SEQ ID NO: 1017334 - DNA, 120 bp, Artificial Sequence
  ENSG00000270174_0 (sequence is synthesized)
ttaattcctagcatggatcttaagtcactctgggatctaagagatgtttcgatcattctgggatttatgcttcttgaaaaggctcaggacaaatggcagtgaaggctacgtggatacaca

SEQ ID NO: 1017335 - DNA, 120 bp, Artificial Sequence
  ENSG00000270174_1 (sequence is synthesized)
gtttgtggagatggggtcttgctctatcacccaggctgtagtgcaatagtgtgagcatagctcactgcggcctcgaactcttccagggctcaaacgatcctcacaccttagcctccccaa

SEQ ID NO: 1017336 - DNA, 120 bp, Artificial Sequence
  ENSG00000270174_2 (sequence is synthesized)
tggccaggactacagacctaccatttattgtcggtgtacacagacttctgaaggagctgagcagaggaatggtaaagagaacctctctgacgagtctgtgagactacagctccgagaaat

SEQ ID NO: 1017337 - DNA, 120 bp, Artificial Sequence
  ENSG00000270174_3 (sequence is synthesized)
atgtgcttagcagcactgtggagtgccagcctcagccacccctggagagagcccgcagaaccatggcccctattcacctgccagcggaccatgctgcttgtcagcggaggctccagatgt

SEQ ID NO: 1017338 - DNA, 120 bp, Artificial Sequence
  ENSG00000270174_4 (sequence is synthesized)
caactctccagggtgagccatcagtcaacatcctggccatcggggtttttgggtgagcttcctcaggacaatggtctcatgtgaccgcccagctctacttaaacacatttagtcccttca

SEQ ID NO: 1017339 - DNA, 120 bp, Artificial Sequence
  ENSG00000270174_5 (sequence is synthesized)
caaatagcctgtccttagaaagctctttgtgaggagctgaaatcaacctttgataactttcttcccactggtctttgttttgccctgaagcaacaagtatactcccttttctctttaaaa

SEQ ID NO: 1017340 - DNA, 120 bp, Artificial Sequence
  ENSG00000270179_0 (sequence is synthesized)
ctggttcaacaagcagaggagctgggattttccatcctaaagaggatgtggccgggatggaactccatcaccatcctgaagccacagcagaggtggcaggtaacagacagtccagagctg

SEQ ID NO: 1017341 - DNA, 120 bp, Artificial Sequence
  ENSG00000270179_1 (sequence is synthesized)
ctcactgtcttcatacatgacgtgaggacggtggttccagtgcgccgcaaggtgggactgaggttcagagttgagaggaaacaataggaaggggctgagatgctgcaacaggtcacgggc

SEQ ID NO: 1017342 - DNA, 120 bp, Artificial Sequence
  ENSG00000270179_2 (sequence is synthesized)
agcttcttggcttggagaactgaggggaagtatgactaagaagtattaggttggtgcaaaactaattgcagtttttgccattaaaagtaatgacaaaaactgcaatttcttttgcactaa

SEQ ID NO: 1017343 - DNA, 120 bp, Artificial Sequence
  ENSG00000270179_3 (sequence is synthesized)
cctaatattctgaggacaagaagacatttaataccacatgactttttttaagtaagaggtctcattttctaaataacttgaaaatagaggctctccaagggttccgttacaggagagaat

SEQ ID NO: 1017344 - DNA, 120 bp, Artificial Sequence
  ENSG00000270179_4 (sequence is synthesized)
aatcagaggtgaagaaaacccatttagagctgactccctttcccagggaatgagcttttggtcctcatagactggcatcctgcagacacgcagagagaaagaataaagcctgcctgtgca

SEQ ID NO: 1017345 - DNA, 120 bp, Artificial Sequence
  ENSG00000270178_0 (sequence is synthesized)
ttgaaagcctctcattcactgggtgcttccagctccaagtgtgtggtaatggtttcagagggatttggagagaaacagaatagtcgaacttacctcatcaaacgactccagtttttattg

SEQ ID NO: 1017346 - DNA, 120 bp, Artificial Sequence
  ENSG00000270178_1 (sequence is synthesized)
tcagaaggttgtacatatatatgtgtgaatagttttcaaatgtttcacacatgtatgtataaataattttaaatgtttgtgtatattgtcatgattaataaaaagcccattcatttaaaa

SEQ ID NO: 1017347 - DNA, 120 bp, Artificial Sequence
  ENSG00000224247_0 (sequence is synthesized)
aatgatggcaggaatgaaaagttctgtaggattaagtggctccaaagttctgaaagactctgcttagagtggtgctcactctggccaaagaaaatcactgatgaacgctacagtctacag

SEQ ID NO: 1017348 - DNA, 120 bp, Artificial Sequence
  ENSG00000224247_1 (sequence is synthesized)
cccagcccagtcagcaggcttggtcaggcttccagaataaatgcctgggcaaagtagtctgtggctctgttgggctaggcccagcatgactggaaggacagaggtgaagtgggatcacag

SEQ ID NO: 1017349 - DNA, 120 bp, Artificial Sequence
  ENSG00000224247_2 (sequence is synthesized)
gcccgatggaagccaatgggaagtgaaagttccactgagtctcatggatacacagctatgaggaggcatctagagagacattcccataaggactctggcaggccacatcatcgcgagcca

SEQ ID NO: 1017350 - DNA, 120 bp, Artificial Sequence
  ENSG00000224247_3 (sequence is synthesized)
gggatcctcacttccctgtggagtccagttctcatccaaaataaaaaaggtaatacacctagtgaccaaaaatgaactcgaatcctgactcatggggcatctctggacactgtcttctgg

SEQ ID NO: 1017351 - DNA, 120 bp, Artificial Sequence
  ENSG00000224247_4 (sequence is synthesized)
tggaaaactcatccactggcccttgattgcactggcatttgtcattatccttgtttacagtctttgagcctgttttcaatccatgcaacagcatttctgtccaaatccatttgtacgact

SEQ ID NO: 1017352 - DNA, 120 bp, Artificial Sequence
  ENSG00000224247_5 (sequence is synthesized)
tttacacattcccttcctccagtcattttgtaattagattcttttaaaagtaggggtggcatgagtgagggaatatcaagttccaccggcgcaacctgcctgtgctgtcgcaccacctgg

SEQ ID NO: 1017353 - DNA, 120 bp, Artificial Sequence
  ENSG00000224247_6 (sequence is synthesized)
agaaaactcccctgtggaagtatcgacgccggcacaagttgaatacccacggtaagctggaggggtttttaatggaactgaaataccagctgctcctcacattcctcatgccatattgtc

SEQ ID NO: 1017354 - DNA, 120 bp, Artificial Sequence
  ENSG00000224247_7 (sequence is synthesized)
caatgaagcagcccctttttcatcagctctagccaggaatcgttgagtcatttttgatccacttttatcgtttgatcaacgtttgatctatgggatgaagtcaaattgtgagtccatcag

SEQ ID NO: 1017355 - DNA, 120 bp, Artificial Sequence
  ENSG00000224247_8 (sequence is synthesized)
cttccctcacttgtgctgtttccctctctcttttatgcactcagttattaacactcacttctaaccagctgtacctctgtaaagctttattctttggcttaaggtagtcacttagctgtt

SEQ ID NO: 1017356 - DNA, 120 bp, Artificial Sequence
  ENSG00000224247_9 (sequence is synthesized)
gcaggctgttttagtcagctggtcaagttgaccctggtaccatgggcacagtccgtcttattactcaggcacttcatgttcttaaatgaagtcgccctaaaacgttcgcttatattgtct

SEQ ID NO: 1017357 - DNA, 120 bp, Artificial Sequence
  ENSG00000224247_10 (sequence is synthesized)
ctcatcttcagtgggctgagagcaagcacagctatctggatttcattgcatttttttttcttttttaagtctggagacatttaatccccaataaaagtcagcagagcttgtgtggttgag

SEQ ID NO: 1017358 - DNA, 120 bp, Artificial Sequence
  ENSG00000235140_0 (sequence is synthesized)
gtattatgggagataggctgggacagagaaggaaagccaggaagaagagacagcatgagcaaaagcatgaagatcagaattcaaagaggatgctgctaagagtctcactctgttgccaga

SEQ ID NO: 1017359 - DNA, 76 bp, Artificial Sequence
  ENSG00000235140_1 (sequence is synthesized)
aatgtgcatttcttgacatcttggatctccattctgcgtcaggggacccccagctcacttgtcagatgaggaacgg

SEQ ID NO: 1017360 - DNA, 120 bp, Artificial Sequence
  ENSG00000235140_2 (sequence is synthesized)
cgtcaggggacccccagctcacttgtcagatgaggaacggattgaaggtctcacataacccttacaacaggcctcgggaaggaggccagtggaagaagagctgttcaccagcgaggaccg

SEQ ID NO: 1017361 - DNA, 120 bp, Artificial Sequence
  ENSG00000235140_3 (sequence is synthesized)
ccccttgtccgtttgaaaggagaaggcactggattactctgtgccctgggggagacctaatgtgtcagcaaaccacagactcaagtggctgccttgggggctgctttgctgagaataata

SEQ ID NO: 1017362 - DNA, 120 bp, Artificial Sequence
  ENSG00000235140_4 (sequence is synthesized)
gctgtcaatcaattatgtgcaagaaggacaccgctgtgatcacctactgttgataggcagcctggagaaagtcatgccaacaagccagaacttagcattcctttctgttaaccccaagtt

SEQ ID NO: 1017363 - DNA, 120 bp, Artificial Sequence
  ENSG00000235140_5 (sequence is synthesized)
tttagatgaaacttcacttccttcaccaatcgcaaatcggaggatttttgaatccacctattatctgagaaagaataaaagtaaatgactcattaggacaaggaatgcatgcagcaaaaa

SEQ ID NO: 1017364 - DNA, 120 bp, Artificial Sequence
  ENSG00000235140_6 (sequence is synthesized)
aacaactaatgcggctgagctccactaggaatagaatcccaggagacctggcaagaaattgcactccctcaagagtaagtctcaaaggctggaaagcagtgaggtaagggccctgagccg

SEQ ID NO: 1017365 - DNA, 120 bp, Artificial Sequence
  ENSG00000235140_7 (sequence is synthesized)
aagccaattagtactcggtaaacaaatcggatcattttgctttctgcctaatttcaggcccaccttcggagcagctcagatgagagttcttaagagaagaaaaagttcaaattcccatag

SEQ ID NO: 1017366 - DNA, 120 bp, Artificial Sequence
  ENSG00000235140_8 (sequence is synthesized)
caattcaatttacaaagtggcttctatttgatttgtggaggaacggcctgtgttttgttttgtgtgaaagcttctgaatggcaattccaaaaaaatgtgctgagtcatgaatccctaggg

SEQ ID NO: 1017367 - DNA, 120 bp, Artificial Sequence
  ENSG00000235140_9 (sequence is synthesized)
gctcattattcttccaaatgaagccctttaatgcaaacattaaccctacacctgttcccggaacacttgatgcctccctcaggtacagagaagcaatacatttaagaatgacaacgacaa

SEQ ID NO: 1017368 - DNA, 120 bp, Artificial Sequence
  ENSG00000235140_10 (sequence is synthesized)
aaataatagctaatattttattggacatctactacatatcaggtatatatattgggaatcttatttaattcccacaatagccctatgatgtgttttataaatgaggaaactgaggctctg

SEQ ID NO: 1017369 - DNA, 120 bp, Artificial Sequence
  ENSG00000235140_11 (sequence is synthesized)
agaggctaaataattcgctcacagtcacctggccacagggactgagataggcaatctggttgtggaatcacaaccttaacaagtatgtacactgcagtcccaagtattatccatgtattc

SEQ ID NO: 1017370 - DNA, 120 bp, Artificial Sequence
  ENSG00000235140_12 (sequence is synthesized)
atagagctctgatcattttaactgagtgcgattaaactccttcctcaaagagggattttactgacatccttcatatacaattgactatatagcagacggtcccaagatatttttttcttt

SEQ ID NO: 1017371 - DNA, 83 bp, Artificial Sequence
  ENSG00000235140_13 (sequence is synthesized)
ttgactatatagcagacggtcccaagatatttttttctttttgagatggggtctcattctgtcaccaagactgaactcctggg

SEQ ID NO: 1017372 - DNA, 90 bp, Artificial Sequence
  ENSG00000235140_14 (sequence is synthesized)
accgggctggtctccaaattctggcctcgagtgatccacccactcagtctctcaaattgctggaattacagatataagccactgtacccc

SEQ ID NO: 1017373 - DNA, 120 bp, Artificial Sequence
  ENSG00000235140_15 (sequence is synthesized)
ctcaaattgctggaattacagatataagccactgtaccccgcccaagattgttactaatgaaggagaaagtgcatggcactgctaatgtaaatcatgtattttatgtgttcaatataata

SEQ ID NO: 1017374 - DNA, 120 bp, Artificial Sequence
  ENSG00000235140_16 (sequence is synthesized)
ttccttctaagtaaaagagaaaatgagatgtcctttgtttcaaaatggagctcccctttatgtcctggaacatcctgagttaggataattctataccaactgctaagcaccgaggctacc

SEQ ID NO: 1017375 - DNA, 120 bp, Artificial Sequence
  ENSG00000235140_17 (sequence is synthesized)
taaggtcactggactggttggctggcgtaaatgtttggtcatgacctcccagtactggaactcctggttcttgggaactgttcctcatgagccctttaaaggtcggtggctgaaccttct

SEQ ID NO: 1017376 - DNA, 120 bp, Artificial Sequence
  ENSG00000235140_18 (sequence is synthesized)
tccctgctgacatgattaccctacagaaaattttctctgttcactaaaggattggctttagagcaaccctcctggccagggctaatttctgaaccatgttagaaattaaagggtttactt

SEQ ID NO: 1017377 - DNA, 120 bp, Artificial Sequence
  ENSG00000235140_19 (sequence is synthesized)
agcctcatcttgaaatgaaattttagctcatcctcttatatcctgaagtgttatcattagttgttgattcgttatttacatacaacaacagcaacaaaaaattttgatgtgtcctatttc

SEQ ID NO: 1017378 - DNA, 120 bp, Artificial Sequence
  ENSG00000235140_20 (sequence is synthesized)
tctagtaagcccagtaaaattataagggcttaaagagcagacaaaatagaagatagagaaatagacagaagaaaaatgaaaggaagaaaggagaaaatacaggtattatgggagataggc

SEQ ID NO: 1017379 - DNA, 90 bp, Artificial Sequence
  ENSG00000235140_21 (sequence is synthesized)
gccaggaagaagagacagcatgagcaaaagcatgaagatcagaattcaaagaggatgctgctaagaaactacagacagagtcttgctcct

SEQ ID NO: 1017380 - DNA, 120 bp, Artificial Sequence
  ENSG00000235140_22 (sequence is synthesized)
aggacacagcaagaaggcagccatctgcaggccaggaagagagcttgcccatgctggcaccctgatctgggacttttcctgtcactggaactgaaaaataaatacatgttgcataagcca

SEQ ID NO: 1017381 - DNA, 120 bp, Artificial Sequence
  ENSG00000235140_23 (sequence is synthesized)
atggtgatcttcacatgttccatgatgggcacaaacatcgcctgaacagtttgtttccatttgtttcagagatgtttacaaatgctcattaaaacatttttaagacatcttctttaaaat

SEQ ID NO: 1017382 - DNA, 120 bp, Artificial Sequence
  ENSG00000235140_24 (sequence is synthesized)
acttatcagattattccaacatctgtgttgtctcagtagtgtcatctgttgatttccttctctcattccagttgagagtttcctggctcttggtatgatgggtggttttttatcctattc

SEQ ID NO: 1017383 - DNA, 120 bp, Artificial Sequence
  ENSG00000235140_25 (sequence is synthesized)
tgaacatttggggtgttacattatgaggctctagatcttatgtaaattttttgttttagctggcctgtgctgaaactggactggtggtggaagccgggcactaactctttatcactggaa

SEQ ID NO: 1017384 - DNA, 120 bp, Artificial Sequence
  ENSG00000235140_26 (sequence is synthesized)
ctccattggtaccaccatggcagggagcggggagctattcattaccagcagatgagggttagaagttcatgctccctggatagtctccactaaactgaaggaaggcattcaaggaagggc

SEQ ID NO: 1017385 - DNA, 120 bp, Artificial Sequence
  ENSG00000235140_27 (sequence is synthesized)
agctcatcgccacagggcggaggtagaaatccaggctgcctacttgacttcctgggagaccacctcagcatggatggaaaagagcacctcatcacctccaggtattatgggagataggct

SEQ ID NO: 1017386 - DNA, 120 bp, Artificial Sequence
  ENSG00000235143_0 (sequence is synthesized)
gaccgccagagcgcttggtgggtgactcggcggacaaagggctctgtgcacccgcctctgctgtcctggctgggcctcacacacaatggaaggacctttcgaagctgcacccagcctgcc

SEQ ID NO: 1017387 - DNA, 120 bp, Artificial Sequence
  ENSG00000235143_1 (sequence is synthesized)
ccctccctcagcaagagacacccagagatgcagctgagctcagtctcagagcaggccccctccctgctcaaaaggtccacagagaggagatgcagactcagaagtgtggtatgcaaaact

SEQ ID NO: 1017388 - DNA, 120 bp, Artificial Sequence
  ENSG00000235143_2 (sequence is synthesized)
tcccaactcaggccccattctttgtgtctggcttcaatttctgcctcaaatccatgcgctaaagcttggccagatgaagtggggatctgccctccagacacatggtcacgtgggcagccc

SEQ ID NO: 1017389 - DNA, 120 bp, Artificial Sequence
  ENSG00000235143_3 (sequence is synthesized)
catggtcacgtgggcagcccttctgagactggaacagctgagaccctgccttgatcgcaagacacaggcactgagggtctccttccccacccaacttcacacacacacacacacacacac

SEQ ID NO: 1017390 - DNA, 120 bp, Artificial Sequence
  ENSG00000235143_4 (sequence is synthesized)
ttaggccgccaccagggagcccactgggcttgcaatggtgtgtgttagtaccatggacagtgctgggagagggcaggctctgaaggctgtgaaatccactgactcaggggcatgcatgtg

SEQ ID NO: 1017391 - DNA, 120 bp, Artificial Sequence
  ENSG00000235143_5 (sequence is synthesized)
tttcatacagcaggcatttgttgagcaccagctgcatgccccacccctgctgggtgttatggaaaattccagaggaaaagacatgtcactgcccccaggggccttaacagcctggctggg

SEQ ID NO: 1017392 - DNA, 120 bp, Artificial Sequence
  ENSG00000235143_6 (sequence is synthesized)
gaacagatagccctgccaccaacctcccacctacctccctgcagactgccacagccatttgtacaaaccacaaatttgaccatatctctcccccctttttttctcttgagatggagtctt

SEQ ID NO: 1017393 - DNA, 77 bp, Artificial Sequence
  ENSG00000235143_7 (sequence is synthesized)
ggattatatgaacagggtttcaccttgttggcccggctgatctcaaactcgtgactgcaggtgatccaccgcttcgg

SEQ ID NO: 1017394 - DNA, 73 bp, Artificial Sequence
  ENSG00000235143_8 (sequence is synthesized)
attttttggtagaaacagggtttcaccttgttggcccggctgatctcaaactcgtgactgcaggtgatccacc

SEQ ID NO: 1017395 - DNA, 120 bp, Artificial Sequence
  ENSG00000235143_9 (sequence is synthesized)
cacacacacacacacactcatacacacacacatacatgcacatcaattgcttataagatgataaactccaaaccattaagcatgttagtcaaggccctttctgacccagcaggcccagcc

SEQ ID NO: 1017396 - DNA, 120 bp, Artificial Sequence
  ENSG00000235143_10 (sequence is synthesized)
cccagcaggcccagccaccctcctgccctcaccaccatccccaccctcatgagcccaatactccagccctacttgacttccttcattccccagacatgcaagggcgcttttctcattttt

SEQ ID NO: 1017397 - DNA, 120 bp, Artificial Sequence
  ENSG00000235143_11 (sequence is synthesized)
gtcccctaatctagagagtatttgcccttcttctttttcacagagaactcccacatagacttcaaaactcaaaccaaatatttcctcctccaggaagccgcaaagttagttgttccctcc

SEQ ID NO: 1017398 - DNA, 120 bp, Artificial Sequence
  ENSG00000235143_12 (sequence is synthesized)
tctgcatgccaagaggccttgtacctgtctctatgtcacttggcatattgaattctgaattaccatgcatccctcatgtcaaacagaagttagctatatttgtctaggcctcttaggaaa

SEQ ID NO: 1017399 - DNA, 120 bp, Artificial Sequence
  ENSG00000235143_13 (sequence is synthesized)
ggcgtggtggttgccagaagtggaggggctttctaagaactgtaactcattaatcactatgtcagtaatagttgtatttgacaacttcagattttctggaagcctaaaaataatgtcaaa

SEQ ID NO: 1017400 - DNA, 120 bp, Artificial Sequence
  ENSG00000235142_0 (sequence is synthesized)
gtacaatagagcttataggctaatgagaagacaggaagaaacaacaggaacacatatagctggaatgcagatgggatctgtgctacttacgctagccatgggatgattagaacaagataa

SEQ ID NO: 1017401 - DNA, 120 bp, Artificial Sequence
  ENSG00000235142_1 (sequence is synthesized)
gagacatgaggaagacttcttcaaggaggtgctcaagccatgttttggaaaagagaactcaaggtctggcagggagaaaggagcaagaggaaatagatgcgctctggtagcaattacctc

SEQ ID NO: 1017402 - DNA, 120 bp, Artificial Sequence
  ENSG00000235142_2 (sequence is synthesized)
acttcctgccaccggctcctataaaccaacctgcacctctgcgcccatcctttgctcttcccatctggcaaaatggaactgatgtctctcctcctacaaaggtcaagtctcttcttatgc

SEQ ID NO: 1017403 - DNA, 120 bp, Artificial Sequence
  ENSG00000235142_3 (sequence is synthesized)
catggattccagccttcttaggaaagggcaagtagagctgcagctgtctggcgccactgtaatgctgtctcctcctctgagtgagttcatcctggaaacattttctcccataagacatgc

SEQ ID NO: 1017404 - DNA, 120 bp, Artificial Sequence
  ENSG00000235142_4 (sequence is synthesized)
acaggtcttacgtttacatgtttcactgaaagaaatttgattccactgctgggatgacaaggaagactgaagaaacctaatcctaggtgctgccactgggacaaacaagaagcaccagac

SEQ ID NO: 1017405 - DNA, 120 bp, Artificial Sequence
  ENSG00000235142_5 (sequence is synthesized)
acagtgctgttttagggtggggcagaattatgctgagggaaaagttattatcactctttaaggccaaggaaaccacaatttttaaagaagcttctagaaattctacccagtagaaaataa

SEQ ID NO: 1017406 - DNA, 120 bp, Artificial Sequence
  ENSG00000235142_6 (sequence is synthesized)
atctgaaatgtagaagcccattccttcatggttctcatagatatttagtgtgactgaggggtcagtggactcatagcactcaggccaggcttctcctgagtccctttctttggcacagag

SEQ ID NO: 1017407 - DNA, 120 bp, Artificial Sequence
  ENSG00000235142_7 (sequence is synthesized)
ggagtgattcacagatcctctacccccaaaggcattgtttcctcatctcaacaagaatccagcacccgtcattttatcagcacacgtcactagcttctcaagtgagactactctgaagtg

SEQ ID NO: 1017408 - DNA, 120 bp, Artificial Sequence
  ENSG00000235142_8 (sequence is synthesized)
atctgtgtttgaagaatgcctttccctttcccttacgtaactaagaggatgaaaaaggacactcactccctatatgaaagctgtgtattgtaagcagtcatcttgcctggctgagaactc

SEQ ID NO: 1017409 - DNA, 120 bp, Artificial Sequence
  ENSG00000235142_9 (sequence is synthesized)
taggatctttttctctgctctcctttaggctgacactcatagccagaccttctgtttattagccccctgaatctatttgaaaatatttttgctttcattataatataagtcacattcttc

SEQ ID NO: 1017410 - DNA, 120 bp, Artificial Sequence
  ENSG00000235142_10 (sequence is synthesized)
ttgcatctgccgctgcattttccaaaagggttatgtcaagggaaattcaacactcacttttctcattatttgcttaccagcttgctcactcatcaaaataccagagttatttgatacttc

SEQ ID NO: 1017411 - DNA, 120 bp, Artificial Sequence
  ENSG00000235142_11 (sequence is synthesized)
agaagattatttccccctttagatgatgtgtcaagggaaggggagctggccccagtatcaggtgacagaattttcttcgcatttctactgttgactcaataaatgcccttgggcaagtca

SEQ ID NO: 1017412 - DNA, 120 bp, Artificial Sequence
  ENSG00000235142_12 (sequence is synthesized)
gaccataggacttcaaaatgtccttgagctgtaaattctgtaatagggtcaggcccaccagtggccttcaggcatttgtccagtggtgtatggataagttctagcacttgagttttttca

SEQ ID NO: 1017413 - DNA, 120 bp, Artificial Sequence
  ENSG00000235142_13 (sequence is synthesized)
gcacaaaggaggcactatgtcaacctcccacccatgggtattctgtttgctctgtgtccccgcttctctgcatttccctgccatattactcaccactggtcgtaattacttgcttgatca

SEQ ID NO: 1017414 - DNA, 120 bp, Artificial Sequence
  ENSG00000235142_14 (sequence is synthesized)
cttgtctcctggtctgtaagctgtttgagggaggggagcacatctgccctatgcaacactgtaccctcagtgtggtacacaggagcacatgcctgacatatggaagttatgtgagaaaca

SEQ ID NO: 1017415 - DNA, 120 bp, Artificial Sequence
  ENSG00000235142_15 (sequence is synthesized)
tttgtgaagtggacaaattaataatgctgcctggactctatagaaatcccttttctgcatcattaaggttcccaagcctggccaagaagtagtgggatctgattagcctcatctcctcat

SEQ ID NO: 1017416 - DNA, 120 bp, Artificial Sequence
  ENSG00000235142_16 (sequence is synthesized)
aaccctacttcctataatattataatgaaagcagatctcagcccaaatgctggcacacatacatatttatcagtaagaagatccaaaatcgttcatgcagctggttctgtaagcttggca

SEQ ID NO: 1017417 - DNA, 120 bp, Artificial Sequence
  ENSG00000235142_17 (sequence is synthesized)
aatttccagccctctgaacttttcagtgctttgtccacactctacatgaaagggcctcttaagagtgacagggcagtattctaaagaccagattttaattgcaccaggtaactgaattgt

SEQ ID NO: 1017418 - DNA, 120 bp, Artificial Sequence
  ENSG00000235142_18 (sequence is synthesized)
ctgaattcacagctgaacacaggacaaggtcagaatcatatttcttatgccatttagaaaggtgacaagtgaagggctggccaaaatcttacacccagcttacgtaagagtagagactgt

SEQ ID NO: 1017419 - DNA, 120 bp, Artificial Sequence
  ENSG00000235142_19 (sequence is synthesized)
ccctaatgctttccccagtccacttgtctcgaacaccattaggttcaatagtaaaagcccatttctcacttgcttcatgttaattgactgatcactaattttaccaataagaagccattt

SEQ ID NO: 1017420 - DNA, 120 bp, Artificial Sequence
  ENSG00000235142_20 (sequence is synthesized)
ttattatttatcattatgatttttatcattttgttaattagccaagcttctgctgttgactccagataaagagagttaaagcacttggggtgaccacctaagtagattttttcatggtga

SEQ ID NO: 1017421 - DNA, 120 bp, Artificial Sequence
  ENSG00000235142_21 (sequence is synthesized)
acaaatggaagcaacagaaacagctcagacttttgaaaagtgatgaaaaaggcccatgatgccctgctccttgaaaatgaagaagaggatgacttagccctgcagggctcttttctttgc

SEQ ID NO: 1017422 - DNA, 120 bp, Artificial Sequence
  ENSG00000235142_22 (sequence is synthesized)
atgttcttaccaaccctcaggggagattcagtctactagctggcttccccacgtggacctcactctgtggcaagtaactgggagtaatttaccttctgggttctcttacaacccccttag

SEQ ID NO: 1017423 - DNA, 120 bp, Artificial Sequence
  ENSG00000235142_23 (sequence is synthesized)
ctatgtaggtgatttcaggcccaagggggaagatatcagataagccagaacattttgattctactgaccgagtttcctcacctccctccctttgtttctgataaatacatacgttaaggt

SEQ ID NO: 1017424 - DNA, 120 bp, Artificial Sequence
  ENSG00000235142_24 (sequence is synthesized)
tgaaccagttcttccctatatgagagtgtaccgtacatcgcaggctgtccagcatcgaccccactgatggatgctagtagtcctccccgccagcactcaacattgtgacagtcaaaaaca

SEQ ID NO: 1017425 - DNA, 120 bp, Artificial Sequence
  ENSG00000235142_25 (sequence is synthesized)
tcctctctacattttcaatgcccctgttggggtagcaggactcccactgagagaccccagtagagatggtccccaagcatgctaaccatgaagcagtgatatcgcacagcacctgcttcc

SEQ ID NO: 1017426 - DNA, 120 bp, Artificial Sequence
  ENSG00000235142_26 (sequence is synthesized)
agcagcccggagccaaggggcaaaatggaaagagtcagcatttctcttttaggttctctgcctctctagtgtgtaagcttttaacccccactacgcgtcttcgttccattctcctccagt

SEQ ID NO: 1017427 - DNA, 120 bp, Artificial Sequence
  ENSG00000235142_27 (sequence is synthesized)
acccattttagtgagcttctgttgtttctgccccaggatatctctaacaaagaaccaagatatttatcaggagaacttctcccactctcctctcagtccttggggatctgatgaaatgac

SEQ ID NO: 1017428 - DNA, 120 bp, Artificial Sequence
  ENSG00000235142_28 (sequence is synthesized)
acttcttggactgtggggtggagcatgtgagtcacacctgggccaatcattttatcctatttcgtgaccacatgaccaattcagggatgggaacatgacccaggtggaacctatgagagg

SEQ ID NO: 1017429 - DNA, 120 bp, Artificial Sequence
  ENSG00000235142_29 (sequence is synthesized)
cagtgagatctttccaggtacttccaggaaagagggtctcacttttccctctataatgtacaccagagaaggtgtgtggctgaagctgctaccatcctcttgtggctacaggaagctggg

SEQ ID NO: 1017430 - DNA, 120 bp, Artificial Sequence
  ENSG00000235142_30 (sequence is synthesized)
attaattgtaacaacgcaattggcagatctgaaagctgagaacaaaaaagcaaaaaacctgtgttctaataacactatatatgagccctaaatccagctatgcctggagccagtcttact

SEQ ID NO: 1017431 - DNA, 120 bp, Artificial Sequence
  ENSG00000235142_31 (sequence is synthesized)
atcttttcatttaagacaaagtcatggcagattttttgccacttgtgagaagaagacagatacacccaagaagctcctgttctttctcattaacccatattaaaacccactttcgggaaa

SEQ ID NO: 1017432 - DNA, 120 bp, Artificial Sequence
  ENSG00000235142_32 (sequence is synthesized)
ggattctccattctaaattattaataactgataatgcttcaaagtcaaagtatgactccttcaagaaagttttcagctttcaggatttgttcagcaaatactgagccccttctgatgcaa

SEQ ID NO: 1017433 - DNA, 120 bp, Artificial Sequence
  ENSG00000235142_33 (sequence is synthesized)
atagacatggcagtgtatgctaggaggagagtgtagccaagttttcccatcaaactcggtatttcagtgcctaattttggccattcagataagtttcaacttctagtaatggccaagtaa

SEQ ID NO: 1017434 - DNA, 120 bp, Artificial Sequence
  ENSG00000235142_34 (sequence is synthesized)
attatatctaactaaaccttctgccaaagacagtggtaaattctggacccaaaacacaatgataacaacaaaacctgtttgaaggttcttgaaactggccaacatggtttggttctgcag

SEQ ID NO: 1017435 - DNA, 120 bp, Artificial Sequence
  ENSG00000235142_35 (sequence is synthesized)
acaaaaactgaagacatgacccttgaaaaaaggaaatcacatatggtgagatacacatttatcaggttttccttcagcagcgctatccatttcctgcagtggacggaggtagagctcagc

SEQ ID NO: 1017436 - DNA, 120 bp, Artificial Sequence
  ENSG00000235142_36 (sequence is synthesized)
agaaagtggctgttctactgagttaaaaagttagaggttagaatttggggcttccacagtagcaggagattgggaaggagggaatctcgcaaaggagggagtctcagatggggagctccc

SEQ ID NO: 1017437 - DNA, 120 bp, Artificial Sequence
  ENSG00000235142_37 (sequence is synthesized)
aaatctgtgtacaaacttctctgattcctaaactgtgcatctgggtgaggttcaaggagctgagggaaaaataacagctggaaggctaaaaaggtgttgtcttgtgttgagcagatggtg

SEQ ID NO: 1017438 - DNA, 120 bp, Artificial Sequence
  ENSG00000235142_38 (sequence is synthesized)
cttagggtttagttctcaccaagttagaggactctggagaacacctaaagctttctactgagactacagaaggagtaatgactactccccaggactaaagcctatgtcctaggaataaag

SEQ ID NO: 1017439 - DNA, 120 bp, Artificial Sequence
  ENSG00000235142_39 (sequence is synthesized)
gcaaaaccaagataggcccaccctgacaaagcctaaaaccaactcttcatagccgcattatgcaatatagtaacttctaggcacacatggcatttcaaatttaattaaaactaagtaaaa

SEQ ID NO: 1017440 - DNA, 120 bp, Artificial Sequence
  ENSG00000235142_40 (sequence is synthesized)
tggaggcagagcagcacctctcacacttccatgtgcccttgaatgcccccacggatcttgctaacatgcagatttaggatgtctggggtggagcctgagaatctgcatttctaccagctg

SEQ ID NO: 1017441 - DNA, 120 bp, Artificial Sequence
  ENSG00000235142_41 (sequence is synthesized)
ttcttggacccaggctggcgagatcagaggaagaagaaatgaccttgggtttaggtagcaaagacttcacagaaaagaagggaacataaacaaggttttgaagaatacatggaggtggag

SEQ ID NO: 1017442 - DNA, 120 bp, Artificial Sequence
  ENSG00000235142_42 (sequence is synthesized)
ctgatgacatcccacgaggtgcaggctgctgggaggcaggcacactggaccagcggagagggatccgtacgtagcaaactgtgcccatagtgagcaaacagccttgagccaacagcaaca

SEQ ID NO: 1017443 - DNA, 120 bp, Artificial Sequence
  ENSG00000235142_43 (sequence is synthesized)
gcactgctgggcacagagggtaaaaataacaactccctactggggttgagtctgccagaccctggcaaagttcatttctttcaataaatccagcagcgtcccctttgataaatactgtca

SEQ ID NO: 1017444 - DNA, 120 bp, Artificial Sequence
  ENSG00000235142_44 (sequence is synthesized)
aagctggaacatgtgatgctaacaaaatatggttttaatttggggcccactgcgctcatggttaaatactgcatgtgtgtatacacaagcagactcacagcgggccaagttaatatgcct

SEQ ID NO: 1017445 - DNA, 120 bp, Artificial Sequence
  ENSG00000235142_45 (sequence is synthesized)
gggctgagaatggctaaacccataaggattcagttatacagattttgctgctctgaaaagcaacctaatcaccaccatcaattctaatgctctaagacttgttaggaacatggaagcttt

SEQ ID NO: 1017446 - DNA, 120 bp, Artificial Sequence
  ENSG00000235142_46 (sequence is synthesized)
taaagttcagccatttgtgcatttgcatccagtgcagacgcaggggcacatttgttttcctgatattttatgcctactttattgtcatatgttgtctgacattctgaagataacatgctg

SEQ ID NO: 1017447 - DNA, 120 bp, Artificial Sequence
  ENSG00000235142_47 (sequence is synthesized)
aatgagaatcagagtttagcaacagaccgaggcttgttctggtgggattaattcctgggaacacagaaactctcagagtttttgttagtctgtgtgtgtcagttttggaacagcccaggg

SEQ ID NO: 1017448 - DNA, 120 bp, Artificial Sequence
  ENSG00000235142_48 (sequence is synthesized)
aaagaaggaaactggctaaacaagtttcagtctggcctctgcggtggatgctgctggtaactggacctccaggccatcatgaataatgaagaagtctgcttcttcaagagtgcaggtcac

SEQ ID NO: 1017449 - DNA, 120 bp, Artificial Sequence
  ENSG00000235142_49 (sequence is synthesized)
agcaactgcaccgaggcaactgcccagcaaaccaaagattacagcacctgtccagtaatcttatgggggaaacaaacaaagctggggaatgcagtgagcagcaggtgtcctcagggcggt

SEQ ID NO: 1017450 - DNA, 120 bp, Artificial Sequence
  ENSG00000235142_50 (sequence is synthesized)
aggagggcagagaaagtgaagaagccaggtgggtagtgggagtgggaacctacccgaagttccccagtgcaggacgcagaacagttggcccttccagagaccagctcctcaggaaggcga

SEQ ID NO: 1017451 - DNA, 120 bp, Artificial Sequence
  ENSG00000235142_51 (sequence is synthesized)
aactcagggaagggagctggttgtttcatgaaacaagcaaggatcagaataatttcctgaaaggactagaggtttatcacatgcggaataccagtatgaagggagctgcaggaattcttc

SEQ ID NO: 1017452 - DNA, 120 bp, Artificial Sequence
  ENSG00000235142_52 (sequence is synthesized)
attccaggaggcacctgccctgttgcattttgaaattggctaaaaatgtatttctattttattattatttattcgtagtgacagaaaaagcctgagatcctgtgagcagcgacttcccag

SEQ ID NO: 1017453 - DNA, 120 bp, Artificial Sequence
  ENSG00000235142_53 (sequence is synthesized)
ttagtcactggtcagctagagactaaggtagaaaagcttgatgggaatacttaaattttgcatacccatgtttattttttgtggcaaaagtgaagcctgtttactggagaaaaatataag

SEQ ID NO: 1017454 - DNA, 120 bp, Artificial Sequence
  ENSG00000235142_54 (sequence is synthesized)
tccctaaacagtgcagacattgtttaaaaatcagggagagtcctcctagtcatgaggggaagtccttctttaggctactcaaaacttcaaagtagaaggtgcttaggagcaaccaatgag

SEQ ID NO: 1017455 - DNA, 120 bp, Artificial Sequence
  ENSG00000235142_55 (sequence is synthesized)
gattgagtgaattagggattcccaaggtattttccactggtctctagggtcctctatgttttccctggtgttccggaaggagagagaaaaggcaattctccctaccctaaaagctgttag

SEQ ID NO: 1017456 - DNA, 120 bp, Artificial Sequence
  ENSG00000235142_56 (sequence is synthesized)
ttggtttgtagccttgggggatgctggtcagatgctgcctaagccgagtgaacattcagggcatggctgcacttggcactggcttcttttttccttggattgcttcctcactaatggaaa

SEQ ID NO: 1017457 - DNA, 120 bp, Artificial Sequence
  ENSG00000235142_57 (sequence is synthesized)
ggattgagaggagggcctggcaattttatctggaaaaataattcagatttctaatggtatagagattatgtaccattagaaagggcaggggaaaggaggatttgttcctgcgtattcatt

SEQ ID NO: 1017458 - DNA, 120 bp, Artificial Sequence
  ENSG00000235142_58 (sequence is synthesized)
acggtgttgaaatgctctagggacaagaggtcagtgggcattgaacccaaaccaaatttagcaatggaataagcctctaattggggcctggattccacattaaaagctattctccacctg

SEQ ID NO: 1017459 - DNA, 120 bp, Artificial Sequence
  ENSG00000235142_59 (sequence is synthesized)
tctggcagggagaaaggagcaaggtcctcttctccctgaaggctgtcacagttcctgtgcagagagagagggcactgcagcacccaggcgctgactgccttttgtcagtctcatttgcag

SEQ ID NO: 1017460 - DNA, 120 bp, Artificial Sequence
  ENSG00000235142_60 (sequence is synthesized)
gcccccagctggagaacccaggaggaagaggaaaaaagttttttcctcctctacactccccatgcatgactaaagagtaggaggagtcagcaaggcagacatatatagtacccaggaggt

SEQ ID NO: 1017461 - DNA, 120 bp, Artificial Sequence
  ENSG00000235142_61 (sequence is synthesized)
tcctggtgccactgagactgtgcagcaagccatgtatctggctcccctcccaccttctcaccttggaacaccaccagctgtaggcatctacatgcagcaggaagcatcactgagtcccac

SEQ ID NO: 1017462 - DNA, 120 bp, Artificial Sequence
  ENSG00000235142_62 (sequence is synthesized)
acttacagggaaagcatcacccgaaagtgagaatgcctagaggcaggaatcatggaggcttccttaaccgtctgtctgcaacagcaggttgctcatcactggtgcattggaaagaacact

SEQ ID NO: 1017463 - DNA, 120 bp, Artificial Sequence
  ENSG00000235142_63 (sequence is synthesized)
gggctaatgccttcgggcaagccacttcaccaccctggctccagtctcctcatatgcaagaagggcttaaaattgtgatggacaccagccatcaggcctcccagatagagtcaaggaatg

SEQ ID NO: 1017464 - DNA, 120 bp, Artificial Sequence
  ENSG00000235142_64 (sequence is synthesized)
gaaacttacccagtcaccacatctgggaaacaccagaccccttgcccatcatgattgcctaactgctgcctgtggatcagctcttcttccttatcccctccctcattcctgttttcccac

SEQ ID NO: 1017465 - DNA, 120 bp, Artificial Sequence
  ENSG00000235142_65 (sequence is synthesized)
acttagttgcatttcttccctgctatatagactccgaattttagtcagctgaggagacaaatttgaaactgatcttccattctccatcgctgcagcacctgaataaagccttcttccctg

SEQ ID NO: 1017466 - DNA, 120 bp, Artificial Sequence
  ENSG00000235142_66 (sequence is synthesized)
tatagtacccaggaggtggacaaacaactgccttggtggaaactctgtcctttctggacttatcctggtgccactgagactgtgcaggtcccacacttacagggaaagcatcacccgaaa

SEQ ID NO: 1017467 - DNA, 120 bp, Artificial Sequence
  ENSG00000235142_67 (sequence is synthesized)
aactggtattgagaaaaatacacagcttatccaaggttgcactgctggttggtagctgagatgaatttagaacccacatctgatgactacaccatattgctcccagttttcctgtctgtt

SEQ ID NO: 1017468 - DNA, 120 bp, Artificial Sequence
  ENSG00000235142_68 (sequence is synthesized)
ccacatgtaaaagtctgactcttcacttctcctttgagtatatagacttttaacatttttgtatgtcaagatggacttttcctcatacccagcccctgccttttctcctcccttcatacc

SEQ ID NO: 1017469 - DNA, 120 bp, Artificial Sequence
  ENSG00000235142_69 (sequence is synthesized)
ttgcaggatctttaacagaatttaaaaggagttttttgttttgttttgatgtatctaataaaagtcaagggagggagagggccagtataagcaagagtacagtttcctagtttgtagatg

SEQ ID NO: 1017470 - DNA, 120 bp, Artificial Sequence
  ENSG00000235142_70 (sequence is synthesized)
cggtagtctgaggaatcagaaacacacaaaggtttggagaactggtacatgctcccaggtgggaagccaggactcttggtaggatcttgaggacaaggcaaaggacaataagagagcgag

SEQ ID NO: 1017471 - DNA, 120 bp, Artificial Sequence
  ENSG00000235142_71 (sequence is synthesized)
gggatcctagaggtggaatcaaggaagagaaactagagagagaaaaaggaactggctatccatccatgatggatcctgtgtggactgatgggtggcttggcatcatcctttagtagactt

SEQ ID NO: 1017472 - DNA, 120 bp, Artificial Sequence
  ENSG00000235142_72 (sequence is synthesized)
catgtggttgaataattggccaatggaaggaatttcttttttggtaacagactctgtgtgtacagttatgggtcttaatttataataaaaggttacattgaaaattgagcatattggcaa

SEQ ID NO: 1017473 - DNA, 120 bp, Artificial Sequence
  ENSG00000235142_73 (sequence is synthesized)
ttcagatgcagatcaagatgtggcaacctgttgtggagaactgggtcccttgagcctgtgctgtctctttttttctggtggctttgtcatttggaacaatgcataatgggctggaggctg

SEQ ID NO: 1017474 - DNA, 120 bp, Artificial Sequence
  ENSG00000235142_74 (sequence is synthesized)
agaaactctgagctgaggtgacacaaggatgacaggaacagttatcagggaagcacactgatcgactgagctgcctgctcctggccttctggatcctcctcagttcctgcttatctctag

SEQ ID NO: 1017475 - DNA, 120 bp, Artificial Sequence
  ENSG00000235142_75 (sequence is synthesized)
ggcttcttttgctcaatatgggactcatgagagtcatcggtgttgtgtgaggcagctgtttgttgattttctggaccaaataatgttccaccgtgtgactggacataccttagtctatcc

SEQ ID NO: 1017476 - DNA, 120 bp, Artificial Sequence
  ENSG00000235142_76 (sequence is synthesized)
actgcaagcagaaacagcaatgaaaggactgatgatcaaacagggaccaagctacatttctgcagctatggtcagtgtgtatctggcttgtttgatgcccagaatgaattgatttttgtc

SEQ ID NO: 1017477 - DNA, 120 bp, Artificial Sequence
  ENSG00000235142_77 (sequence is synthesized)
gatcttcatctatacaacaaaattatcttcagtaataatcataaaaatggaatagataataacaatgtccaggaaaaaaagagtcagtaaattttaaaaattgaacttcatatatactgt

SEQ ID NO: 1017478 - DNA, 120 bp, Artificial Sequence
  ENSG00000235142_78 (sequence is synthesized)
tctcagctcactgcaatttccgcctcctgggttcaagccattttcttgcctcagcctcccaaagttctgggatcacaagtgtgagccactgtgcccggcctatgcctcaatttcttcctg

SEQ ID NO: 1017479 - DNA, 120 bp, Artificial Sequence
  ENSG00000235142_79 (sequence is synthesized)
ccttactataggtacatcatatttatttaattccctaagtccctcctcaacagattttattctactactgaaatccagtctgcagaaactaaaagttgtatagtggatatgaaatttata

SEQ ID NO: 1017480 - DNA, 120 bp, Artificial Sequence
  ENSG00000235142_80 (sequence is synthesized)
taaccaccatagttcagtatctcaggggtaaaaataaaatgtgactatttatttccacaaaactgaacctatcaattcaagataacttttgctttaaaactcacgactccttgaatcaat

SEQ ID NO: 1017481 - DNA, 120 bp, Artificial Sequence
  ENSG00000235142_81 (sequence is synthesized)
gaacaatgataaaagccacagtccctactctggcagctgctgggctggtggcagaagttgtctcatctgcttttccccaccattctgggagcactagtagctttgactatacacagctat

SEQ ID NO: 1017482 - DNA, 120 bp, Artificial Sequence
  ENSG00000235142_82 (sequence is synthesized)
cagaagagggagagttcagcctagaccaggggttggtccacaaacctttatggcaaagggccgaacagtaaatattttaggttttgtgggccccatagtctccactgcaagtactccact

SEQ ID NO: 1017483 - DNA, 120 bp, Artificial Sequence
  ENSG00000235142_83 (sequence is synthesized)
gtgctatggtcacacaaaagcagtcatagacaatatgtgaaggaatgagtatgactatgttccaataaaagtttacaggtgcagaaatttgaattttatataattttcatgtgtcccaaa

SEQ ID NO: 1017484 - DNA, 120 bp, Artificial Sequence
  ENSG00000235142_84 (sequence is synthesized)
ctattattcttcttttcagccatttaaaaacataaaaaccatccttgcattgtgagctgtatcaaatcagaggatgagaacatggacgcaggtttggggtccctgcttcctaccctagct

SEQ ID NO: 1017485 - DNA, 120 bp, Artificial Sequence
  ENSG00000235142_85 (sequence is synthesized)
gagtgctgggggaacaggctgtagaatagatgcctcaggtcaacatggggggctcccagggtggaaagactagggtctcccttcccaaggtgagttctggagtgactgtgagccctagtg

SEQ ID NO: 1017486 - DNA, 120 bp, Artificial Sequence
  ENSG00000235142_86 (sequence is synthesized)
aagcttcatgtcccccatggtaccagagcagcagagcaacggtggccaaggggcctggacagaataccctggagccagctttgtgacaggcccctacaaatgataaggacaaagagtcaa

SEQ ID NO: 1017487 - DNA, 120 bp, Artificial Sequence
  ENSG00000235142_87 (sequence is synthesized)
agttcctgagcctccatttcaaaggagagaagaagatgatgatggctggccagcaaattcagagaagactgggttggaaggcgagatctgcctggactctacaaccagaggccattacaa

SEQ ID NO: 1017488 - DNA, 120 bp, Artificial Sequence
  ENSG00000235142_88 (sequence is synthesized)
gatggtgtccccttggccaatacagcaggggaaacagctgatgcccaaagaccgcatggtttggaggaggctctcctcagagaagaagtggcctgcctccactcctctgggttccctaga

SEQ ID NO: 1017489 - DNA, 120 bp, Artificial Sequence
  ENSG00000235142_89 (sequence is synthesized)
aagaagtgaaataaatattatagtaaaataaaaagaaatagattaaatattttataacattaatacgacttttgaaaacagggaagacttaaacctacatgtttgttgtagtatgagatg

SEQ ID NO: 1017490 - DNA, 70 bp, Artificial Sequence
  ENSG00000235142_90 (sequence is synthesized)
acagtttataacaaataataataaagaaaatttcaaactaaaaatatagtgaggtgggcagatcacctga

SEQ ID NO: 1017491 - DNA, 120 bp, Artificial Sequence
  ENSG00000235142_91 (sequence is synthesized)
ggcaggaaggcaccaggcagagggagcagcacgtgcaaaggcacggaggcccaggagagcatggggcctttgacttgcaagagatttcctgtgtgtgattgctatatggggtcccacact

SEQ ID NO: 1017492 - DNA, 120 bp, Artificial Sequence
  ENSG00000235142_92 (sequence is synthesized)
caacggaggccagaggcaagactctcctggctgccccacaggcttagagctgggaggcaggtgctgcgtgccagcaggaagagcagccactagaagagagagaagtagccctggcacctg

SEQ ID NO: 1017493 - DNA, 120 bp, Artificial Sequence
  ENSG00000235142_93 (sequence is synthesized)
gggaacaagccagaaatagtcctatgaccagggaaagtctccaggatctacttctccacttacacaattgttggcagcatccagttccttgtagttatgggactgagagcttcagatttt

SEQ ID NO: 1017494 - DNA, 120 bp, Artificial Sequence
  ENSG00000235142_94 (sequence is synthesized)
tgttgattgttggccagagaccaccctcagctcgcagaggacacccccagttctttgccatttaggactgcccaacatggctacttgcttccgcgtagtcagcaagagaaagactagcat

SEQ ID NO: 1017495 - DNA, 120 bp, Artificial Sequence
  ENSG00000235142_95 (sequence is synthesized)
atttctatcatcatggaagttctattgaatggcattgctctataggatcaagactatgctagtaatttaactgcttgatagaacaaatgtcaaatttcttctaaggaagatagtagactc

SEQ ID NO: 1017496 - DNA, 120 bp, Artificial Sequence
  ENSG00000235142_96 (sequence is synthesized)
caaagtctttttaatatcatccaaaatgctcagcatacaatttttaaaaattactaattgtgcaaagaatcaggaaaatgtaacctacagtgaagagaaacaacaggtgataaacataga

SEQ ID NO: 1017497 - DNA, 120 bp, Artificial Sequence
  ENSG00000235142_97 (sequence is synthesized)
ctcacaagtgacccagatgttagaattacaaaagacttaataactataataagttaaagagtctataggaaaatatatctgtagtagctgaagagatggaaaattttaagagagctatgg

SEQ ID NO: 1017498 - DNA, 120 bp, Artificial Sequence
  ENSG00000235142_98 (sequence is synthesized)
aaactttaaaaaagaaccgaatggaaatcctgaaactgaaagatacaatatctgacattgaaaatgcattagtttggaattaacagcataatgaacacaacataaaaaatcagtgaggct

SEQ ID NO: 1017499 - DNA, 120 bp, Artificial Sequence
  ENSG00000235142_99 (sequence is synthesized)
gtatatggagtgaggtagaggtcaagttttgctttttcccgtttgactgtcttattaacttaacatcattgatgtaaatgaccactcttttcctactatgcttcagtgccacctttgtca

SEQ ID NO: 1017500 - DNA, 120 bp, Artificial Sequence
  ENSG00000235142_100 (sequence is synthesized)
taatcaagtgttccttcaagtatgcatctgcttctgactctctcccttctgttcctttgagctatttgtcctgggcctttactgcacatctcagatttgtcccaacaaggattgaagaag

SEQ ID NO: 1017501 - DNA, 120 bp, Artificial Sequence
  ENSG00000235142_101 (sequence is synthesized)
cgtaatcatgtatacataatcacatgtatcttacccacatgtatccacatgtacccacatcttatcacatgtatcttattccatttgtgtcacaggtcccacacttacagggaaagcatc

SEQ ID NO: 1017502 - DNA, 120 bp, Artificial Sequence
  ENSG00000235142_102 (sequence is synthesized)
gctgtccttaagtgtggctgtcatgagacgcacaagtttgcagggaagactgagtgcctagattgcgggaagaaagataaaattcctcagccttgtttacgtcctaaattggtagtctga

SEQ ID NO: 1017503 - DNA, 120 bp, Artificial Sequence
  ENSG00000235142_103 (sequence is synthesized)
atggagtcttgctttgttgcccaggctgcagtgcagtggcaccatcatggctcaccgcagccttggcctcgtgggctcaagctattctatttcagcctcccaagtagctgggaatacagg

SEQ ID NO: 1017504 - DNA, 120 bp, Artificial Sequence
  ENSG00000264666_0 (sequence is synthesized)
ggcggccccgccccgcagcgtttgaggcgccgcaagccttcacgcccctcgggccttgcagatccctctcccagtttccgcggcggtccggtgcggtcagtacctgtctaaaatcaatat

SEQ ID NO: 1017505 - DNA, 120 bp, Artificial Sequence
  ENSG00000264666_1 (sequence is synthesized)
ccagatctcttcatccgggggccgcctcaggaggcaccacgcgggccccgctgcagccacgcgcccccggaaccggacctatagagccggagatgggagtctcgctatgatgcccaggct

SEQ ID NO: 1017506 - DNA, 74 bp, Artificial Sequence
  ENSG00000264666_2 (sequence is synthesized)
atagagccggagatgggagtctcgctatgatgcccaggctggtctcgaactcccgagctcaagtgattgtcttc

SEQ ID NO: 1017507 - DNA, 120 bp, Artificial Sequence
  ENSG00000235146_0 (sequence is synthesized)
gactcgactttaacagacacagacgaccctgaaggtgagactgtctgctggtgggatgctggatggaaatgttttcttccaaattgtgctgcacgtttttggcgagagcatggggctgtg

SEQ ID NO: 1017508 - DNA, 120 bp, Artificial Sequence
  ENSG00000235146_1 (sequence is synthesized)
cctgcactgtggtgatctcgcttggcccccacctgattcctgacatacagcagaggaagcttaggctcaggtggaacagcctcaactgattcagtccctgaacttccgtacacagccctg

SEQ ID NO: 1017509 - DNA, 120 bp, Artificial Sequence
  ENSG00000235146_2 (sequence is synthesized)
gagtcgtcttagagccatgatttatttaactgttctttcattttacagaacataaaatgtattgtttccaacttttttcctatggtaaataatactaaagtaaatatctctgtgcatgaa

SEQ ID NO: 1017510 - DNA, 120 bp, Artificial Sequence
  ENSG00000235146_3 (sequence is synthesized)
tacggaagctttagggaggtgctctgagacccgaaactagactcgactttaacagacacagacgaccctgaagatggaaatgttttcttccaaattgtgctgcacgtttttggcgagagc

SEQ ID NO: 1017511 - DNA, 120 bp, Artificial Sequence
  ENSG00000235146_4 (sequence is synthesized)
tccggttcccctgctgtgctttgctgcgttgttctcccctgctgcaacgttctcactccacaatcctggggcaggtaggggaggcccagctgagtttggatcataatcctgaaagacaca

SEQ ID NO: 1017512 - DNA, 120 bp, Artificial Sequence
  ENSG00000235149_0 (sequence is synthesized)
aaaaagacaatacctaagatgttttcacagattcactaatcaccaacatttctttgaatgtaaaaaatcttataaaggttgtttgcagaaattaaattagtaatttcccaaatttgacat

SEQ ID NO: 1017513 - DNA, 120 bp, Artificial Sequence
  ENSG00000235149_1 (sequence is synthesized)
gctatttgattctgttagcagataatacaactaacttttttttgttcgtacgttttcatggttacagagctggagaaagaaacgttatgtatgagaaaatactttggtttaaattgttta

SEQ ID NO: 1017514 - DNA, 120 bp, Artificial Sequence
  ENSG00000235149_2 (sequence is synthesized)
tccgccagtgcccaactgactgatctttacagatggtgtcaacagatgcatctaccctctggcttcaagttgagttggccaatgaagggaggcgctgcggaaagtacatgacatttgcag

SEQ ID NO: 1017515 - DNA, 120 bp, Artificial Sequence
  ENSG00000235149_3 (sequence is synthesized)
ttgtgggcgactgtgctgtgggatgaaaccaggctcctcatcaagatgaacatagattcaagtctccatcttagccatttcctagttctgtgattataaataaactccttgacttttctg

SEQ ID NO: 1017516 - DNA, 120 bp, Artificial Sequence
  ENSG00000259485_0 (sequence is synthesized)
ggtgagtcagtccatttcagcctggaggagtgctcactcagctacaccaacctttgcaatggccttcagctcctggccactcctcaggcatgtgcttttgcaggaaggacgctggactct

SEQ ID NO: 1017517 - DNA, 120 bp, Artificial Sequence
  ENSG00000259485_1 (sequence is synthesized)
tgcactataagttgaaaacatcgcttataaacaatacatcacagcacacttgcagagagagcactgaggtaattaacgtctgggagaaaggatggagaaacatagaggatccccatgctc

SEQ ID NO: 1017518 - DNA, 120 bp, Artificial Sequence
  ENSG00000259485_2 (sequence is synthesized)
aacgaatagagttcatcaaaataagatatgatcaaggtacaaaagagttaaagaagctatttattttaatgtttccttggagagcacacttgttattatgcctgccccagctttgccttc

SEQ ID NO: 1017519 - DNA, 120 bp, Artificial Sequence
  ENSG00000259485_3 (sequence is synthesized)
gaagcagatgctggcgctatgcttctggtacagcctgaaaaaccttgagccaattaaacctcagtgagctcaagatgtctttgttgaaacagaacctcccgaagttacagtattggtttt

SEQ ID NO: 1017520 - DNA, 120 bp, Artificial Sequence
  ENSG00000259485_4 (sequence is synthesized)
ggggctccacacagagaacacatcacggaagctataattgaggaagacaaagctgtcaggacgacaccaagagagttagaaagcccaagagtggagcattcttcaccatgattccacctg

SEQ ID NO: 1017521 - DNA, 120 bp, Artificial Sequence
  ENSG00000259485_5 (sequence is synthesized)
acacttggctgaaagcattttgcactaatttgctttgtgcccgttcagacaatctaaaaagaaaggatggggggacaacaagtgtctattacacagaataaacagcctctggcaaatgaa

SEQ ID NO: 1017522 - DNA, 88 bp, Artificial Sequence
  ENSG00000259485_6 (sequence is synthesized)
ggcaaacagcgcaggtccgcttcccgtctgtggaagctttgttctttcgctcttgacaataaatcttaatgctgctctgacacttaca

SEQ ID NO: 1017523 - DNA, 76 bp, Artificial Sequence
  ENSG00000259485_7 (sequence is synthesized)
atctcagactgctgtgctagcaatttataatctactggtgcgccgtgttttaagcccgtggaaaagcacagtatta

SEQ ID NO: 1017524 - DNA, 68 bp, Artificial Sequence
  ENSG00000259485_8 (sequence is synthesized)
gcgtaggaccctccgagccaggtgcgggttataatctactggtgcgccgtgttttaagcccggtcacc

SEQ ID NO: 1017525 - DNA, 87 bp, Artificial Sequence
  ENSG00000259485_9 (sequence is synthesized)
agaccccgcatgggcttccgcgtggccccagcctccccaacgggcgccaccccgtgctctgcggccccggcgtgcaccgcgctggag

SEQ ID NO: 1017526 - DNA, 89 bp, Artificial Sequence
  ENSG00000259485_10 (sequence is synthesized)
catgtgcttttgcaggaaggacgctggactcttgcactataagttgaaaacatcgcttataaacaatacatcacagcacacttgcagag

SEQ ID NO: 1017527 - DNA, 120 bp, Artificial Sequence
  ENSG00000259485_11 (sequence is synthesized)
gaaaagtaataatttcacctttgagtcagcttccctggactcttgcctcatacatcttcagccaagatgcctgccccagctttgccttccaccatgagtaaaagcttcccaagtcctccc

SEQ ID NO: 1017528 - DNA, 72 bp, Artificial Sequence
  ENSG00000259485_12 (sequence is synthesized)
cgagctgttcctgttcgtccatcttggctgtaatcccaggttcatcaaaataagatatgatcaaggtacaaa

SEQ ID NO: 1017529 - DNA, 120 bp, Artificial Sequence
  ENSG00000275527_0 (sequence is synthesized)
aattcgtacccagctgcgttcgtgctgagttcttcatgacccactccttccagcgtcagctggtggatccagggctgggtactgagccgtactggaccagtgggccccctcccgggatcg

SEQ ID NO: 1017530 - DNA, 120 bp, Artificial Sequence
  ENSG00000275527_1 (sequence is synthesized)
ggaggtgacaattcccagaaactggaattgggatggtgagattttagttcagccgccggcggtctcatgcgtggaggtgataaagttgagctttgaggtggtcttcagagggagaggaat

SEQ ID NO: 1017531 - DNA, 120 bp, Artificial Sequence
  ENSG00000275527_2 (sequence is synthesized)
accctctgcgggcagagcttcctgggttccgggcccttccggacgtcaacacaggtccaaatgcccttgggctcctccgcacaccctgggtgcaagaataaatccttctctctgccgcca

SEQ ID NO: 1017532 - DNA, 120 bp, Artificial Sequence
  ENSG00000275765_0 (sequence is synthesized)
cagcctgtggccaatcgcaacgccggaaggagctgatagacacggaggttgctctgctcggaagagaccgagccccagggccgccgtgccctctgggcggttgtgaggctgtgcagcctg

SEQ ID NO: 1017533 - DNA, 120 bp, Artificial Sequence
  ENSG00000275765_1 (sequence is synthesized)
cggcttctgccctctttctttccctgactggttgggtccggcctccgaggcctgtaccccgccttttccgcataggcatgtgaccagggtctcccgcggagttttgctgagaattttgga

SEQ ID NO: 1017534 - DNA, 120 bp, Artificial Sequence
  ENSG00000275765_2 (sequence is synthesized)
aatgaagcatgtggagcgcctatgtcgggggagagaggccgagctgaaggagcacgggcgccggcctcggcctctggggagccgggcccgctcgcctccctgcgcggggctagcccgagc

SEQ ID NO: 1017535 - DNA, 120 bp, Artificial Sequence
  ENSG00000275765_3 (sequence is synthesized)
ctcgggaggcccaggagcgaagtgaaagccccttctggtcccccagggctccactcccgcagcagcccggctccgtcggcgtcagtggagccccaggcctgggtccgagatgagcgagac

SEQ ID NO: 1017536 - DNA, 120 bp, Artificial Sequence
  ENSG00000275765_4 (sequence is synthesized)
gctgctctggctcgcggtcgcccgagcgctcccaaaaccagggaacaggccccaggagagaagcccctagaagtttcctggagcagggagtctcctgtatcctgttagctctgcaaagga

SEQ ID NO: 1017537 - DNA, 120 bp, Artificial Sequence
  ENSG00000275765_5 (sequence is synthesized)
atctggactttattctgagggccttggagaacccctgcaaagttttttaaaaggtggactaagagattggcatttcacaacatgactctccgaattgaaacactaagaagattggcgaaa

SEQ ID NO: 1017538 - DNA, 120 bp, Artificial Sequence
  ENSG00000231868_0 (sequence is synthesized)
ggccccctctgcctcccagagatgaaaggggaagccactgtgggagcttggtctaaggtggcatgaagagggcagctactggagctggcctgcagctctagcgctggaaagccctgggga

SEQ ID NO: 1017539 - DNA, 120 bp, Artificial Sequence
  ENSG00000231867_0 (sequence is synthesized)
cccagagtggagctcagctacagaggaatgcttcactgaaagaaatgacagacaggtctgtcccacccacggtgactcagtcattgttgttcatggccgctgcccgttcttcacgatcaa

SEQ ID NO: 1017540 - DNA, 120 bp, Artificial Sequence
  ENSG00000231867_1 (sequence is synthesized)
gctttcatacgtgaatcgactgggaagcgagtcaaaagtactgcaactggaagtgtggcatggggagggggccgtggccagtctcctcactgggctcctgtaggactgggaacgcctact

SEQ ID NO: 1017541 - DNA, 120 bp, Artificial Sequence
  ENSG00000231867_2 (sequence is synthesized)
ccttcacacctaattatgtttgctggattgggttatagttcttcagtgtgtggactcttgtcagttttatatccgtaggccgagcacaatgcctggaatacagagcatgcttaataatca

SEQ ID NO: 1017542 - DNA, 120 bp, Artificial Sequence
  ENSG00000231867_3 (sequence is synthesized)
agctcagctacagaggaatgcttcactgaaagaaatcttttctatggacctctggttttagagacaacatctagttctcttacatcccttgccacttcccctgatgctgtaggacagaca

SEQ ID NO: 1017543 - DNA, 120 bp, Artificial Sequence
  ENSG00000231864_0 (sequence is synthesized)
cactgaccccgcatcgggggccctgggctgcagaacccatcgatgctgttgccgtgcccctggttctggtgacactgggaccctccaggttgggctgagcagggcccccccaccagtgcg

SEQ ID NO: 1017544 - DNA, 120 bp, Artificial Sequence
  ENSG00000231864_1 (sequence is synthesized)
tactccagcaccagcgggagtgggcctgggcaggggctgagggagtgacacccaaggggacctgccccagcctcctcctgtaccctgggggttctcgttttccttggctgagggaggtgg

SEQ ID NO: 1017545 - DNA, 120 bp, Artificial Sequence
  ENSG00000231864_2 (sequence is synthesized)
cctctcccagctgaaacctggggacaggctgggcgtgagagcaaaggggggtgagcaggaccccaggccttggaaatcctgagtcgggggaacaggctttgcctatgacgtgcctgggag

SEQ ID NO: 1017546 - DNA, 120 bp, Artificial Sequence
  ENSG00000231864_3 (sequence is synthesized)
gctcacaggatgttgtgtgggactcaacgtggggcaacgtcccggccaagagggggaaggccatcaccccagggtctgtgggaggcacatgcaggccaagctctcgcccacccggcgtgc

SEQ ID NO: 1017547 - DNA, 120 bp, Artificial Sequence
  ENSG00000231864_4 (sequence is synthesized)
cgatccgctgcagccagggtccctcagccttggccagaacctgaagtccgaccgctatccctggggctccccagccaggcaggcaccccccgcttacagcaccaggagccaaaacggagt

SEQ ID NO: 1017548 - DNA, 120 bp, Artificial Sequence
  ENSG00000231864_5 (sequence is synthesized)
caagcgctcggtgcggggaccagccgggggcaggcctggggagcccatctggcaagggcggcaggaaggcgcccactccgggactgtgcctgggcctgccgggggtctccagccagagag

SEQ ID NO: 1017549 - DNA, 120 bp, Artificial Sequence
  ENSG00000231863_0 (sequence is synthesized)
tgctatgtgaggatgcagcactttttccctctggaggaagcagctttcaccttggaagaatcttgaccttgccattcaaagtcaccagacagggaatctgccagtgccttgatcttagac

SEQ ID NO: 1017550 - DNA, 120 bp, Artificial Sequence
  ENSG00000231863_1 (sequence is synthesized)
ttcccagcttctgtaactgtgagcaataaatgtatgctgcttataaactatccagtctcatgcattttgttatagcaatataaacagatgaagacagacataaacatatctttttgagag

SEQ ID NO: 1017551 - DNA, 120 bp, Artificial Sequence
  ENSG00000231863_2 (sequence is synthesized)
atgcaatgcaacccataccaccaggattgccacatgtttgctgatttcacctggtagcaaggcttagctatcttggcttgaatgtaatacctccatcttttctcttggtcatcctcttta

SEQ ID NO: 1017552 - DNA, 120 bp, Artificial Sequence
  ENSG00000231863_3 (sequence is synthesized)
agcagaggacttttatctacccaagcagaatcctgtgttcttgctattcgaagtgcagcccagcctcctgcagccaccacatcacttgtgatgcttgacagaaatgcagactctctgttc

SEQ ID NO: 1017553 - DNA, 120 bp, Artificial Sequence
  ENSG00000231863_4 (sequence is synthesized)
ccacctcaaacctactgacttgggaatctgcagcttaccaagatctccaggtgatccacgtacacgtcaaactttgaaaagcagtggtttgcagaacaaaaaggattcagcttctgatat

SEQ ID NO: 1017554 - DNA, 120 bp, Artificial Sequence
  ENSG00000231863_5 (sequence is synthesized)
aattgtaatccccagtgttggaggaggagcctggtgaaagcaatgtaaaatgaacctgcttccccttcatcttccaccatgattataagtttcctgaggaatctccagccatgcttcctg

SEQ ID NO: 1017555 - DNA, 120 bp, Artificial Sequence
  ENSG00000231863_6 (sequence is synthesized)
gtaaaatgaacctgcttccccttcatcttccaccatgattataagtttcctgaggaatctccagccatgcttcctgtacagtctgcagaattgtatttggcagaagaaatttctaagcag

SEQ ID NO: 1017556 - DNA, 120 bp, Artificial Sequence
  ENSG00000231863_7 (sequence is synthesized)
aatctcatgtgtgagcaaagagacgatctgaaactggaacttatattttaaacgggagcagagcatgaaagtttagaaaatatgcagcctgacgatatggtagaaaagaaaaacccattt

SEQ ID NO: 1017557 - DNA, 120 bp, Artificial Sequence
  ENSG00000231863_8 (sequence is synthesized)
ttctggggaggaattcaagctggctgcataaatttgcataaataaagaggagccaaatgttaataaccaagacaacggggaaaatgcctcaaaggcattccagagacctttgtggcagcc

SEQ ID NO: 1017558 - DNA, 120 bp, Artificial Sequence
  ENSG00000231863_9 (sequence is synthesized)
cctcccattacaggcctgaaggcctaggagggaagaatggtttcatgggccaggccaaaggccccgctggatgggccctgggacactgctccttgtgtcctagtcattccagctccagcc

SEQ ID NO: 1017559 - DNA, 120 bp, Artificial Sequence
  ENSG00000231863_10 (sequence is synthesized)
atggctaaaaggtccccagatacatctgaggccactgctccagaagatgccagctataagccatggtgacttctatgtggtgttaagcctgtgcgtgcacagagggcaagagttgaggct

SEQ ID NO: 1017560 - DNA, 120 bp, Artificial Sequence
  ENSG00000231863_11 (sequence is synthesized)
tgggagcctccacttagatttcagcggatatatggaaatacctggatgtccaggcagaagtctgctgcagggttggagccctcatggagaacctctactaagggcagtgaggaggggaaa

SEQ ID NO: 1017561 - DNA, 80 bp, Artificial Sequence
  ENSG00000231863_12 (sequence is synthesized)
ctcatggagaacctctactaagggcagtgaggaggggaaatgtggggttggagccctcacacagagtcccctgtcctcca

SEQ ID NO: 1017562 - DNA, 120 bp, Artificial Sequence
  ENSG00000231863_13 (sequence is synthesized)
taccgtgtgtctggaaaagcctcaggcactcaacaccaacccttgagagtagccatggtagctgagccctgcagaaccacaggggtgcagatgcccaaggccttgggagcccaccccttg

SEQ ID NO: 1017563 - DNA, 120 bp, Artificial Sequence
  ENSG00000231863_14 (sequence is synthesized)
gctgggtttcagacttgcatggggcctatagcccctttgtttgggccaatttctcccttttggatcaggcatatttacctgatgcctgtaccccattgtatcttggaagtaactaacttg

SEQ ID NO: 1017564 - DNA, 84 bp, Artificial Sequence
  ENSG00000231863_15 (sequence is synthesized)
cctgtaccgttataggctcatagacaggagtgacttgccttgtcttaaatgagacttggactctggacttttgagttaatgctg

SEQ ID NO: 1017565 - DNA, 120 bp, Artificial Sequence
  ENSG00000231863_16 (sequence is synthesized)
ggacatgagatttgggaggggccaggggtgggatgatatggtttggattgtgtccccacccaaatctcatggtaaattataatctccaatgttggaggaggggcctggtggtggggggtg

SEQ ID NO: 1017566 - DNA, 120 bp, Artificial Sequence
  ENSG00000231863_17 (sequence is synthesized)
ggaggggcctggtggtggggggtgattggatcatgggggtggacatcccccttgctgttctcacaagatctggttttttaaatgtgtgtagcacagccaggcacggtggctcacgcctgt

SEQ ID NO: 1017567 - DNA, 80 bp, Artificial Sequence
  ENSG00000231863_18 (sequence is synthesized)
tatagcacctccccttcactctctcttcctttttctctggacgtgtaagacgtgtttgcttccccttcaccttccaccat

SEQ ID NO: 1017568 - DNA, 71 bp, Artificial Sequence
  ENSG00000231863_19 (sequence is synthesized)
gacgtgttcagccatgtttcctgttcagcctgcggaactctaagacaattaaacctcttttctttataaat

SEQ ID NO: 1017569 - DNA, 120 bp, Artificial Sequence
  ENSG00000231863_20 (sequence is synthesized)
ctcaggtagttctttatagcaatgcaggaatgtactaatacaccttccttttatactggtgaatgatcctggttgttggaaacacataatgcccttagtttaaattgaaaattaaccact

SEQ ID NO: 1017570 - DNA, 120 bp, Artificial Sequence
  ENSG00000231863_21 (sequence is synthesized)
ttgaaaattaaccactagacagtcttttctcaattatccttcaagtatgtatagtccttcaattatattttgaaatgaatttgaggtaaaagcattctgaagttaggatttcaaattctc

SEQ ID NO: 1017571 - DNA, 120 bp, Artificial Sequence
  ENSG00000231863_22 (sequence is synthesized)
ttagtttaagcaaaatgactttagtcaagtctgaattgtcaagtaaattatataagcaaaaccttctaatagaattgtctccagccagtactctccaagtctgaaaggagtcggggaagg

SEQ ID NO: 1017572 - DNA, 120 bp, Artificial Sequence
  ENSG00000231863_23 (sequence is synthesized)
gagtgattaatctggaaaaaaaaaaagatttttgtgttgtcattttaggggagaaccatgaaataattattctcaaatgtcaagtagatttattttatatagtcccagatagaccaccag

SEQ ID NO: 1017573 - DNA, 120 bp, Artificial Sequence
  ENSG00000231863_24 (sequence is synthesized)
ctagacataatagggagacagatttaggattgttacaagctttaatatcctatgaataagatttgtcaaaatatggaacagacttccttatagaattgagaaattcaaccattggacact

SEQ ID NO: 1017574 - DNA, 120 bp, Artificial Sequence
  ENSG00000231863_25 (sequence is synthesized)
tttgtgattgatggaaagtcttgttctgagaataagggtaaatcagatgcctttcagcatgtttccaactcaaggacttcatgatgtggcaaactactctgaaaatgtaaacttcagacg

SEQ ID NO: 1017575 - DNA, 120 bp, Artificial Sequence
  ENSG00000231863_26 (sequence is synthesized)
gcggccgcccggaggacactgatgcttctggagctcgcgaagggtcccccgcgggagaggaacaaggccgcttgcgctccgcagaggcgcaggcacggggctggggcccggggcgggggc

SEQ ID NO: 1017576 - DNA, 120 bp, Artificial Sequence
  ENSG00000231863_27 (sequence is synthesized)
gcgggtgggcggacccctcccgcaagcccatgatggccaggccaaggccgctgggaaaggcaggacgctcgcccatgcgctgccagctgggcttttctccttcgcccgccctgtgttcca

SEQ ID NO: 1017577 - DNA, 120 bp, Artificial Sequence
  ENSG00000231863_28 (sequence is synthesized)
gggcgcgaccccgttcggtccagccgctggctccggggctgaaccccaggtagaactggaagattttgctgaaagattggacatggcattcagagaaacagaggttttaatgacaaactc

SEQ ID NO: 1017578 - DNA, 120 bp, Artificial Sequence
  ENSG00000231863_29 (sequence is synthesized)
caagtttttggctggagcaactggaagaatgaggttgccatgaaccgaaaagagagattgcagaagtaaccaaatttactcacgtaggccaggaatttctatgacgtgttccaaattcag

SEQ ID NO: 1017579 - DNA, 120 bp, Artificial Sequence
  ENSG00000231863_30 (sequence is synthesized)
cctctcactgaacacttccagagcaaggcaacataaacatctgcaagaagaacattgtgtgagaaatatcaagtgagagtggaagagtctgcggagggcctccctggggctcacctgtgc

SEQ ID NO: 1017580 - DNA, 120 bp, Artificial Sequence
  ENSG00000251219_0 (sequence is synthesized)
agacaagattctcctgccaagcagggtgccatgaagaaaatctagcttacagtgtgagccaaaagaaatcaaagtggaaacagaaatgtcagaggactagagagtaaatgacaggagtct

SEQ ID NO: 1017581 - DNA, 120 bp, Artificial Sequence
  ENSG00000251219_1 (sequence is synthesized)
ccacagtcatcattagcatcaacgtttcacatgcagtggctttattcaagcccacgcaagatacaggagtcattgtcagtaacgtgaggactaaaacagagcaaatgtcaccttgtccct

SEQ ID NO: 1017582 - DNA, 120 bp, Artificial Sequence
  ENSG00000251219_2 (sequence is synthesized)
gcatcagctccagaaaggaagaaaagccaagtttggattaaaaaatggggacaattttctacgtgtaatatttttcagttttggaacagaatctaataaatgaagcagtggaaataaatt

SEQ ID NO: 1017583 - DNA, 120 bp, Artificial Sequence
  ENSG00000251219_3 (sequence is synthesized)
agaaaatggtaatatagcaacatttgaagcagaagctatcagtactccagcaattctcctcagattcttctgactctttctgtgtgcccatcctctggcttcaacatgcttggctcctag

SEQ ID NO: 1017584 - DNA, 120 bp, Artificial Sequence
  ENSG00000251219_4 (sequence is synthesized)
agactggcatctctaagtctctttgaaggactgcccttgggccactggcaccatggtgcctgcaatgcacagccagccagcatccatggtggtaacatgccctcaaggatagccctcacc

SEQ ID NO: 1017585 - DNA, 120 bp, Artificial Sequence
  ENSG00000251219_5 (sequence is synthesized)
aaggacagacaggcacagattataaaatctcagcaaccttgccccaaggaggaacaaatctgaggtttaatttaggttccagggctccccatcaggatgaacctgaggttgaaagtttac

SEQ ID NO: 1017586 - DNA, 120 bp, Artificial Sequence
  ENSG00000251219_6 (sequence is synthesized)
ctgaaattatacccttgctagtcttctccttccttccttgcttccctcatctattcacaggcatctcctatactgtactgtactgactccaactgtactgaatcacttgcacacaaactc

SEQ ID NO: 1017587 - DNA, 120 bp, Artificial Sequence
  ENSG00000251219_7 (sequence is synthesized)
ttgtcttattgtcttcttctgggaaacctaaaatcatatctagctgtcactgtggtaaaaatttcataggcacaaagaagtttattatgtcttggatgccctgctaattttaacatgttg

SEQ ID NO: 1017588 - DNA, 120 bp, Artificial Sequence
  ENSG00000251219_8 (sequence is synthesized)
caatgaagttactccctccctaccccctcagcaatgactgggaatcatggctaatgtctggtaaagcataaatcaagccaactttttcccctgctagaaccacaggaaatggtggtattg

SEQ ID NO: 1017589 - DNA, 120 bp, Artificial Sequence
  ENSG00000251219_9 (sequence is synthesized)
tttttgattatacacttcccagtacatcagggagaagattaatcctcagaggcttaaatgaccagaattatgaattgaggtaattctaggcataggagatcaaaagaaatagccatggac

SEQ ID NO: 1017590 - DNA, 120 bp, Artificial Sequence
  ENSG00000251219_10 (sequence is synthesized)
catggcaagtttgagacttgatttattcctgaaagcaactgaccggaggtaacatttggctctagccctggctcagctccttactgtggattcctgagcaagctagttctcctagacctt

SEQ ID NO: 1017591 - DNA, 120 bp, Artificial Sequence
  ENSG00000251219_11 (sequence is synthesized)
agttcactcacctgagtacttgcactgaatgatacataaacttccttctggattttagttttgtgattctgtttgcacaatcataaaacagccaacagaaaagccatacgtgaagcttca

SEQ ID NO: 1017592 - DNA, 120 bp, Artificial Sequence
  ENSG00000251219_12 (sequence is synthesized)
gaagctggaaagtttaagcacatatcagttactcgtgagttatacttttctgtgtctgagagcatatgaggagctttgcttgagtagcagcaaaggagcttgttaagaattcagaagcat

SEQ ID NO: 1017593 - DNA, 120 bp, Artificial Sequence
  ENSG00000251219_13 (sequence is synthesized)
aggagtagtagagtattaaatggctaagaaaaagacaccagctatctcactggtgacacaaagcagaatttcacaacttaatctcattcccaccaggagtctattacacattcaagacct

SEQ ID NO: 1017594 - DNA, 120 bp, Artificial Sequence
  ENSG00000251219_14 (sequence is synthesized)
tgaaagactacaaagtcaagaatggaaggaacagattaaaggtggaatattactttcagaaggaaagggaaagaaacaaaacgaacaaaatgcagatactgtttaattttagtgaaaact

SEQ ID NO: 1017595 - DNA, 120 bp, Artificial Sequence
  ENSG00000251219_15 (sequence is synthesized)
ctttcttaagccaaaggagtcttacttttctcagcccacaatatctgtgggaatgtcgatggaattttctgtttcctcatctttagtttgtgagaggcatgtgcctgccccattgcagct

SEQ ID NO: 1017596 - DNA, 120 bp, Artificial Sequence
  ENSG00000251219_16 (sequence is synthesized)
cttaagaacgcaccttcatactacttgtcaattccacaaatcctgaaatgcattatatgattgggctggacccatcaaaatgttgaatatatctttgaagtgccaatgacagtgctaact

SEQ ID NO: 1017597 - DNA, 120 bp, Artificial Sequence
  ENSG00000251219_17 (sequence is synthesized)
caagtcactacaagtgttcagcaaaggccttgtaaaacaattactcaaaacacccttatccctgccctttgaccgcattcttatggcttttggaatggggactaactacatcaagtcatt

SEQ ID NO: 1017598 - DNA, 120 bp, Artificial Sequence
  ENSG00000251219_18 (sequence is synthesized)
ctgcagaacaaacttgtagaagaagtgtgaataatttttttcatattattaagatatttataatcagaagtatttacccaaaaccgtaaaccattcatatattccaaagatgttacgtga

SEQ ID NO: 1017599 - DNA, 120 bp, Artificial Sequence
  ENSG00000251219_19 (sequence is synthesized)
tctgaaattaggacattagaagtatatggaaatttaaatttgtttttgtatcaatttgctttttaaaataaatacatttacatgatacaaaattttaaaagcataaaatgaaattttccc

SEQ ID NO: 1017600 - DNA, 120 bp, Artificial Sequence
  ENSG00000251219_20 (sequence is synthesized)
tccctcctgcccctgttcacccagtattcctctgtggagataaccaatgttatcagtttattagtttctttcggagatattttatataagcaaatagtcttgtgggtgtgcatttgtatg

SEQ ID NO: 1017601 - DNA, 120 bp, Artificial Sequence
  ENSG00000251219_21 (sequence is synthesized)
attgtcagtaacgtgaggactaaaacagagcaaatgtcaccttgtccctgcatcagctccagaaagggtggtggattagaggcttttagcatacctcagccactcggaaatagcataaaa

SEQ ID NO: 1017602 - DNA, 120 bp, Artificial Sequence
  ENSG00000251219_22 (sequence is synthesized)
attaactccatgagctttaattcaagaagaaaaacaggaatccaccagaatcatgaaggatgtcccaaatcccagggaggagaacatgggagaaaagcaccagtgatggtgtccagctga

SEQ ID NO: 1017603 - DNA, 120 bp, Artificial Sequence
  ENSG00000251219_23 (sequence is synthesized)
aggccaagggggaatactttgtttctctcaagacctagagctaaattgggaagatgcttggaaatgctcagagggaaaaacaccaggaaaagctgcaggcacttttctagaccaagagca

SEQ ID NO: 1017604 - DNA, 120 bp, Artificial Sequence
  ENSG00000251219_24 (sequence is synthesized)
ggatgacatttttaatctaactgcatagaaagtcagtcatttcttggcgacctggcagcatgccatgcaggcagtttaatctcgagtcagagattggagttgttcgctctggagtggagt

SEQ ID NO: 1017605 - DNA, 120 bp, Artificial Sequence
  ENSG00000288235_0 (sequence is synthesized)
ggccttcacagctcctgccttcatgttaccgtctactatgttcctcgtgcaccttccactcagcacaaacaggctgcactgcctccgaaacacatcacttgaatcctgcctctgctcctt

SEQ ID NO: 1017606 - DNA, 120 bp, Artificial Sequence
  ENSG00000288235_1 (sequence is synthesized)
tgtccatctgaatcaccctctccacatttctgaccctgtaatcctgatctcacttcatgaggcagttcgcttctcttttgcatttagctttccccggggtacactgtcaatagcctactg

SEQ ID NO: 1017607 - DNA, 120 bp, Artificial Sequence
  ENSG00000288235_2 (sequence is synthesized)
tctgatgtcatcagtcagcacttcatcagaggcaattatgtccacagagcttttggctaattactgtcactcctctttacatgtgtgcatatgcatatcatctttccctaatgagactgg

SEQ ID NO: 1017608 - DNA, 120 bp, Artificial Sequence
  ENSG00000288235_3 (sequence is synthesized)
aaatcatgattcattccctggagcagtggtttccataagtgaccaacccacagaccagtgcaaactggctgcaaaagagcttcctctgaggaacttattagaatgcagattctttgactg

SEQ ID NO: 1017609 - DNA, 120 bp, Artificial Sequence
  ENSG00000288235_4 (sequence is synthesized)
catgggagaggaggatctcataaatctgggtgtaataggcacagaacgttaggtgtaatatgggcgggactctggactcagcatatccaacaagctgctggctgattccgacgatgccga

SEQ ID NO: 1017610 - DNA, 120 bp, Artificial Sequence
  ENSG00000288235_5 (sequence is synthesized)
tgaattgccaggttgggaactgctgcccccagagaacctagcagagagctctgtacgtggtaggtgctcactgccctattgtttgggtgtatgcctcctgataatgaacttgatcataac

SEQ ID NO: 1017611 - DNA, 120 bp, Artificial Sequence
  ENSG00000288235_6 (sequence is synthesized)
ataggtggcaagctctgtgcctacttacatacatgaactattccttttaataacctttggagataaagtggcatttccattgggcattggaaatctgaagactttcgtttacagctgttg

SEQ ID NO: 1017612 - DNA, 120 bp, Artificial Sequence
  ENSG00000288235_7 (sequence is synthesized)
caacagcagaactagaattcgacctccgacatttctgctcaccagagggcatgaactgctggtttgtacctggcttgcagataccttctttgggcagcacaatgttcaaaattaaaaaaa

SEQ ID NO: 1017613 - DNA, 120 bp, Artificial Sequence
  ENSG00000288235_8 (sequence is synthesized)
ctaccaacacttctaaactggatactttgtatcaatatctgggtttctggcttctcttcatgggaaaaaaacaaacaaaaaaaaaggtttggtgaacactggggcccacattcctgcagg

SEQ ID NO: 1017614 - DNA, 120 bp, Artificial Sequence
  ENSG00000288235_9 (sequence is synthesized)
gcaacagtcacatggagactttagatgggcacgtgcccagaacacactagagtccccatcggtccccattctcttacattctattcccaactaggttcttataggcctgggtttgtgcct

SEQ ID NO: 1017615 - DNA, 120 bp, Artificial Sequence
  ENSG00000288235_10 (sequence is synthesized)
gttgcacacttatctactctcttgcttcccactggtcaggaagtctggcaaacttaaaaggcctctttttgttgctctctcctgtatggatctctcatcatagaggtgtgtgcatttctg

SEQ ID NO: 1017616 - DNA, 120 bp, Artificial Sequence
  ENSG00000288235_11 (sequence is synthesized)
actttgtgatttcaatactaaggaagctgtcggcacattatcaaggaaaacggggatcgctgctccccaacgtacacattctggtgtgccccagtaaaattctgtattcagcctccaaac

SEQ ID NO: 1017617 - DNA, 120 bp, Artificial Sequence
  ENSG00000288235_12 (sequence is synthesized)
tagctgggaaaaatgtggcaaatcatctacttgctccaattcaatggtgtttagaagtaggaagtcactgtgagcaatgccaccaagtggtggagagactccatgcagaatcgccacctt

SEQ ID NO: 1017618 - DNA, 120 bp, Artificial Sequence
  ENSG00000288234_0 (sequence is synthesized)
aggacgagcctgcaattccagcgccggcctcctctgctgcggctccatggctaagtaagtgacctgctgaacacagaagcactggaagaagcgtgtgcacaggcccctgaactcaggagg

SEQ ID NO: 1017619 - DNA, 120 bp, Artificial Sequence
  ENSG00000288234_1 (sequence is synthesized)
gagaccaggttcttgtggccactctcctttccaacggctgggcattcccgggctggcccagggcaagacttcccaaagcctgcttcagggagctggcccatctcccaggccgattctgca

SEQ ID NO: 1017620 - DNA, 120 bp, Artificial Sequence
  ENSG00000288234_2 (sequence is synthesized)
ggataggaaatgcgtaaccgacggaaaacgcgcctggaaaaccaagggatcaaaacaacaaggggtgtggggctgcatagaaaattggagccacagaaaccaggaagggcgcctttcagg

SEQ ID NO: 1017621 - DNA, 120 bp, Artificial Sequence
  ENSG00000248896_0 (sequence is synthesized)
gggtgtgtcctaacagcctcactctggacctcttggacctggtgagtccgtgtccccagtccctgcggggacagctcaggaagagagcgggttccaggacagcccaagcatccgaatcaa

SEQ ID NO: 1017622 - DNA, 120 bp, Artificial Sequence
  ENSG00000248896_1 (sequence is synthesized)
gttatctacaccttcgagactgagcaatagatgaacgaatcgagtctatttgggaaatacaagaccatttttgagtcacttgttgaattcagcgggtcttcgtaactccagaaagatcct

SEQ ID NO: 1017623 - DNA, 120 bp, Artificial Sequence
  ENSG00000248896_2 (sequence is synthesized)
ccatctggagactctgcagctacatgagtgagtatctgcgcaagatcctctgggctcatggaggactttgctcttgtgtcattcaaacatgtatactgagatggattattagtacaatgc

SEQ ID NO: 1017624 - DNA, 120 bp, Artificial Sequence
  ENSG00000248896_3 (sequence is synthesized)
ccaaatagagaggattctccattattctcaaaagaatcttttggggcaaggaaatgaagcagtttgcacagagaccttagtgaagtgccagaagcagatgcaccttactacagaatcccc

SEQ ID NO: 1017625 - DNA, 120 bp, Artificial Sequence
  ENSG00000248896_4 (sequence is synthesized)
ctacttatgatcaacatgccagtccaggaaatgggcttcaaaggcaagtctttcagctcgccagccttgctcatacatcactactgatcttaagtgacaggatgatggaagctttcttat

SEQ ID NO: 1017626 - DNA, 120 bp, Artificial Sequence
  ENSG00000248896_5 (sequence is synthesized)
ttccacattaagacacggaggtcatgctgcaacagtaatccttcaatgaactttgttaacaaagtagactcccagagatcaagggtaatgtatttagcaactggggttgtgagccctgat

SEQ ID NO: 1017627 - DNA, 120 bp, Artificial Sequence
  ENSG00000248896_6 (sequence is synthesized)
ggctattgcctgtgatgaacaaatgctcactgccaccacagcctgtctgtcatcagcctgtgctgggttagtctgtgaaaagttaagaaagcttggcaagtgagtggtttgacagaacat

SEQ ID NO: 1017628 - DNA, 120 bp, Artificial Sequence
  ENSG00000248896_7 (sequence is synthesized)
tctgtaccttttccaaacttttcagtggggcagttctgacaaacacaaattatgtcttcatgtatcccttcaggtatgaagtgactgtgtgtgactcctcaaaacaaagggattgtggag

SEQ ID NO: 1017629 - DNA, 120 bp, Artificial Sequence
  ENSG00000248896_8 (sequence is synthesized)
accccaccgtcagctgtgtgtgtactttaaactcctccaacagaaggggcaggatgaactgacccagtcactccctatgctggcctacgatgttcttccacatcccctgtacacagtccc

SEQ ID NO: 1017630 - DNA, 120 bp, Artificial Sequence
  ENSG00000248896_9 (sequence is synthesized)
gtgcatcactttcttgaagatcaagtgtgtgactgcttccttccacaagtccaatcccaagtgaacatcctttcttgtttattccccataatagcaacttgttgcttctattttctgtat

SEQ ID NO: 1017631 - DNA, 120 bp, Artificial Sequence
  ENSG00000248896_10 (sequence is synthesized)
acaaggtacagtaagtgctcaacaaaggcacaaagacaccaaacccagctggaccaaggctgtgaagagctcccaccaccacccactggccccaaatgctttgtgtttgtcagtacgaac

SEQ ID NO: 1017632 - DNA, 120 bp, Artificial Sequence
  ENSG00000248896_11 (sequence is synthesized)
ttgtctgcacatcaggcaggtctaatgtccagaaggggtgtgggagggtaagaagagaatcagcattttgagtgcagattcctcccatccacatgaaaccacccccttctcatcagatag

SEQ ID NO: 1017633 - DNA, 120 bp, Artificial Sequence
  ENSG00000248896_12 (sequence is synthesized)
caccttcccttgcctcgtgatgcaaactgcttctctaactactgcagagtacatctgagtgtcgtctgctgtcagccagttccttcctggcccttagcaataaatagaaactcagtccag

SEQ ID NO: 1017634 - DNA, 120 bp, Artificial Sequence
  ENSG00000248896_13 (sequence is synthesized)
tgatccatccatttctccttctgctctgtcattccacatgttaccacagttgccttggaggggacaagtcaattggaaaaaagcaaggtactgtgtggtatgggaactgccacgttcttt

SEQ ID NO: 1017635 - DNA, 120 bp, Artificial Sequence
  ENSG00000248896_14 (sequence is synthesized)
ttgtgggattagttgaacacaagcaatgccagtagagactgaactgttcttgctaaagaagagaactgttcttggtaaagagaagagagttctcgtgcataccacatacaaaggtaagca

SEQ ID NO: 1017636 - DNA, 120 bp, Artificial Sequence
  ENSG00000248896_15 (sequence is synthesized)
gctcatttggagaacagcagtgggatggaagttccaccagcagcctctggtagcaagctgtgaaggcacagcctacattatatcttagctgaaaacaacctgggcaagctgattctaggg

SEQ ID NO: 1017637 - DNA, 120 bp, Artificial Sequence
  ENSG00000248896_16 (sequence is synthesized)
agtcattgaaatgggtttgccactgaaggctgagctaggcagtgattcacggccgttcgttggaaagcctgccctgagccactatggcgggcggccctgctcttctctctatggaacctc

SEQ ID NO: 1017638 - DNA, 120 bp, Artificial Sequence
  ENSG00000248896_17 (sequence is synthesized)
tgtggtttcatgcttttccttcgtggtttccatgtaactgaaaacacccagtgttttattgatgaacagctatttttacactcacaaaaagcttttcaagtgtgaaatcttgtacatttt

SEQ ID NO: 1017639 - DNA, 120 bp, Artificial Sequence
  ENSG00000248896_18 (sequence is synthesized)
tcaagacattcatcgctcacatctggaattaggctaaacgcaccaagtctcggcaatgagcagcctcggggaatttgcctgggagacacaatcagttttagcattagcaagtatcacaag

SEQ ID NO: 1017640 - DNA, 120 bp, Artificial Sequence
  ENSG00000248896_19 (sequence is synthesized)
agtcaaaaacaaatataaaaccccattgactgaagagagttgtgatttgaagtggtattaaaaagcaaagatacaataacagaatgagaattatgcagcaactcaattggaaaacacaga

SEQ ID NO: 1017641 - DNA, 120 bp, Artificial Sequence
  ENSG00000248896_20 (sequence is synthesized)
aattgtgtgtgcgtgcacatgtgaaacaggtgtaagaacctgtggcatgtattagaagcccactctgcaggggttccagagggttctctctagaacagagactggtgaactatggccgtg

SEQ ID NO: 1017642 - DNA, 120 bp, Artificial Sequence
  ENSG00000248896_21 (sequence is synthesized)
ccgctgcgtgcaccaagtgctttgaaagtttttcgcggattaaaacgaataaaaacctcgtcgaaaggcaaagaaggcagggttgaaaagtactcagctcgacaccggagaaaaaagaaa

SEQ ID NO: 1017643 - DNA, 120 bp, Artificial Sequence
  ENSG00000248896_22 (sequence is synthesized)
cgagtgaacccaaagggagagtttggctggcacacggggagacgggccaaggcgcggcgggcgagggcggcacaagcatggcgctgcgacaccactgctgggagcagggctgaaaggtgt

SEQ ID NO: 1017644 - DNA, 120 bp, Artificial Sequence
  ENSG00000248896_23 (sequence is synthesized)
cttttgctgtaaggactttcataaggcagtcccaatccaaagactggctttaatttcacggccttagcctctcagtttcttaagccttctgaggacctcctgatcatgacaattaagtca

SEQ ID NO: 1017645 - DNA, 120 bp, Artificial Sequence
  ENSG00000248896_24 (sequence is synthesized)
ctatttacagccatgtgacagataaatcagtattaggtgatttgttctgaaggacccccaaaaggaaacatatgagagaacccacactcggcacaggaacggcaagagtcctcctgtgag

SEQ ID NO: 1017646 - DNA, 120 bp, Artificial Sequence; identical to SEQ ID NO: 992687
  ENSG00000248893_0 (sequence is synthesized)

SEQ ID NO: 1017647 - DNA, 120 bp, Artificial Sequence; identical to SEQ ID NO: 992688
  ENSG00000248893_1 (sequence is synthesized)

SEQ ID NO: 1017648 - DNA, 120 bp, Artificial Sequence; identical to SEQ ID NO: 992689
  ENSG00000248893_2 (sequence is synthesized)

SEQ ID NO: 1017649 - DNA, 120 bp, Artificial Sequence
  ENSG00000248893_3 (sequence is synthesized)
gagattatgtacgtaaaacacaaggtgcctaacccggcacagagcaggagggctaagcgtgacatccagcacgtggtcagtggaatccagtattcctacccacctctctagtctcccctc

SEQ ID NO: 1017650 - DNA, 120 bp, Artificial Sequence
  ENSG00000248893_4 (sequence is synthesized)
cacccctctccctttcagaggcaccaagctgcttgtggtcttgtctgttcccactccctgcctgactgaacattttctccacctcctgatcatcagcagcagaaactggctgctcttcct

SEQ ID NO: 1017651 - DNA, 120 bp, Artificial Sequence
  ENSG00000248893_5 (sequence is synthesized)
gctgggtagacagccagactgtatttcccagctgcccctgcagtgagatgtggccatcggagccagcattggccaatggactctgcatgggagtgacgcatgctgcctccaggcttgtcc

SEQ ID NO: 1017652 - DNA, 120 bp, Artificial Sequence; identical to SEQ ID NO: 992693
  ENSG00000248893_6 (sequence is synthesized)

SEQ ID NO: 1017653 - DNA, 120 bp, Artificial Sequence; identical to SEQ ID NO: 826009
  ENSG00000248893_7 (sequence is synthesized)

SEQ ID NO: 1017654 - DNA, 80 bp, Artificial Sequence
  ENSG00000248890_0 (sequence is synthesized)
gcggcggggaggggcggctagccgcgacggcggcggacggagggggagggccgcgagccttcggaaccagcctcgagggt

SEQ ID NO: 1017655 - DNA, 120 bp, Artificial Sequence
  ENSG00000248890_1 (sequence is synthesized)
ggggcgtccacggcccgggttcccggcgggcttggggcagggacgcagtccggagattccgggactgcccggctgctgcagcccgcaggctcctctctcctccccgcttcccctccgcac

SEQ ID NO: 1017656 - DNA, 120 bp, Artificial Sequence
  ENSG00000248890_2 (sequence is synthesized)
tgcctgggctaaaggcggccaagctgaggctccgaaagaaaagggaaaattgcaacccttgcctacaaccagactgacagcataatttcttaggaatcaagaatcaatacagggttattt

SEQ ID NO: 1017657 - DNA, 120 bp, Artificial Sequence
  ENSG00000248890_3 (sequence is synthesized)
ctttagattaaaccttaaaagcccccttggaggctgaagaagcagaggatagccatgcatacacttgaacgtgaaaaatggtcctctttcattggagaggtcttcctcttcagctaaacc

SEQ ID NO: 1017658 - DNA, 120 bp, Artificial Sequence
  ENSG00000248890_4 (sequence is synthesized)
aagaagaagggaccccttgttgaccaaaataatccagacaaatcaaatcggccctttccagcaaggagtggaacagcccaagggtggctagatcacatcttctgctcacaccaccactga

SEQ ID NO: 1017659 - DNA, 120 bp, Artificial Sequence
  ENSG00000248890_5 (sequence is synthesized)
gcaaccctctccaggactgccacctatgcataggtcatgccctgtgcaagagcacataaagtgggagctgaagtcctgcccaggctccattcaccaagcagagcttatgttgttgtgtgt

SEQ ID NO: 1017660 - DNA, 120 bp, Artificial Sequence
  ENSG00000248890_6 (sequence is synthesized)
ctgtgtctacccagaggatgtgggtcctttttaaaatgtgcaccaatgcatcttgtatgagctggcaccagctcggaccatcccaccctcataccctggtcctatccagggttatattcc

SEQ ID NO: 1017661 - DNA, 120 bp, Artificial Sequence
  ENSG00000248890_7 (sequence is synthesized)
ctactttagaagaattaattatttttatgaacgtatttagtttattgtaaaaaatgaaatatatgacacaaattgaaattaatttcagaggtaaaggtcagaatattaccatgtatgtga

SEQ ID NO: 1017662 - DNA, 120 bp, Artificial Sequence
  ENSG00000248890_8 (sequence is synthesized)
attatgtttgtatgtatatgtatatatcaagagagttatatgaatatacatttttgtgtatcagaagtgaggacaatttaactttgttaagtgtttgaaataaaattattttgagttttg

SEQ ID NO: 1017663 - DNA, 120 bp, Artificial Sequence
  ENSG00000248890_9 (sequence is synthesized)
ctgagatggtttggagactcatcctcgccggaggtcctgcaagccactgaagtggcacagacgcgtgtgcgcggagtggggcggtgtgtcgggccacaggccaagcccaagtcggcctcc

SEQ ID NO: 1017664 - DNA, 120 bp, Artificial Sequence
  ENSG00000248890_10 (sequence is synthesized)
aaattctgcaagttttcttgtaaatttggccaagtactgcagaattcctggaagactgcagaatacacatactcagaaccaagaatgaagagacgttgcgagccatccccactatgcagg

SEQ ID NO: 1017665 - DNA, 120 bp, Artificial Sequence
  ENSG00000248890_11 (sequence is synthesized)
gcaccaacgggctgccgcagcccactcacaacctcctgaatacagaagcagttgtgtttgtgctttctaaacaaattaaagaaaaccgtgtaaaagaattctttgcaatagtctttgcag

SEQ ID NO: 1017666 - DNA, 120 bp, Artificial Sequence
  ENSG00000248890_12 (sequence is synthesized)
tttataggtggctaattatagaaatatttgacttacctgtaaaaacattgtacaaggaagttgtagtataagtagtattttttatgagacagactcaaaaacagagatggtgaaagaatg

SEQ ID NO: 1017667 - DNA, 120 bp, Artificial Sequence
  ENSG00000248890_13 (sequence is synthesized)
atttgcaattgccaaaataaccaaaagacctctttgtttctactagcaaatgctgatgtacagtcctgtgttatgcccattaaacaatatttaaacaatactttataaagccaaagattc

SEQ ID NO: 1017668 - DNA, 120 bp, Artificial Sequence
  ENSG00000248890_14 (sequence is synthesized)
ctttaaatgtgtcaattacatggggaaagcatgtcaaatatcaattcgattgcagcgcacaatagtcaacaaataacagaaatttaatgtcactgtcctaattcaggtgccataattatt

SEQ ID NO: 1017669 - DNA, 120 bp, Artificial Sequence
  ENSG00000248890_15 (sequence is synthesized)
gtttcttatgttgcccccttattttctcctgcaagattctttcttttattacaaagaaataccttcagtgaggaaggtaacactaaaataaaattaacgtagccagcacaaaaataaata

SEQ ID NO: 1017670 - DNA, 120 bp, Artificial Sequence
  ENSG00000248890_16 (sequence is synthesized)
aaatttaaaaagccaacctttattccactttgaacaagtttgtgaatgtccaaataaggctccttgaaaatttctccttcaggggtaagtatcttcacataaccttctttttccagaatg

SEQ ID NO: 1017671 - DNA, 120 bp, Artificial Sequence
  ENSG00000272991_0 (sequence is synthesized)
tgcaatgaaaaaaccgtttcctagatttagttgtaccgaaatacatgacatcgcctgcattttgtgactttgtcagtagtcacgaaggtaagtactactttggggtcagagagagcctgt

SEQ ID NO: 1017672 - DNA, 120 bp, Artificial Sequence
  ENSG00000272991_1 (sequence is synthesized)
aaattagtacttagcagatgtacacatctgcaaaaataaagtgagtttggaagcaaaatttgaacatttagcaataaaattaagacgaaattgctagccagtaagagcttaggaaactgg

SEQ ID NO: 1017673 - DNA, 120 bp, Artificial Sequence
  ENSG00000272991_2 (sequence is synthesized)
atatccttagtgagatagaataaacaagatcaccacaatgatgttttaaaacattaggactcctgggttaactggtctattatgatgatggaactgcagaataaaaaggttgtttgggca

SEQ ID NO: 1017674 - DNA, 120 bp, Artificial Sequence
  ENSG00000272990_0 (sequence is synthesized)
aaatggatgtcactacacagttcacccctgacatctgtgatagtgtatgttatcactgacatgttctcatttaaactatgttataagagcaaggagaaagaagtaagaaaaatttgctat

SEQ ID NO: 1017675 - DNA, 120 bp, Artificial Sequence
  ENSG00000272990_1 (sequence is synthesized)
catgtagaaaattctggggaacctcaaataactcactttatatttagcaggagtttatgcttcagagatcatctgtccctgcaatagacattttatcatggtaagggtgtggtcagcaat

SEQ ID NO: 1017676 - DNA, 120 bp, Artificial Sequence
  ENSG00000272990_2 (sequence is synthesized)
tctaccaccccatagcttagtaattttcttaccaacagctagctgaggtagtgtgcatcccagacgctccgcaattggggaaaggtcttttagcttgttttgctgttttctcccttcttc

SEQ ID NO: 1017677 - DNA, 120 bp, Artificial Sequence
  ENSG00000272990_3 (sequence is synthesized)
acttacaattctttctttcaaccactggtagcactggggaaaagcataacattgaaatgttaatgtctggtaaagatctgatgtcaaagaatggtaattcaataaaatatgtgaacctca

SEQ ID NO: 1017678 - DNA, 120 bp, Artificial Sequence
  ENSG00000287579_0 (sequence is synthesized)
ctttcatgacgtgtgaaacattttgtaaaatctaggctctttgtttttcagagtgattcgcaatctagatacatctgattgctcccctgcctggactagatgagattaagcatttttgca

SEQ ID NO: 1017679 - DNA, 120 bp, Artificial Sequence
  ENSG00000287579_1 (sequence is synthesized)
agaatacagattaaacagtttcctaatgagtggattcagattaaacatgggcagcgtggtgtacttcttagtgcctcacaccaggagacgtttgagtctgtctgtcccataatttgtgat

SEQ ID NO: 1017680 - DNA, 120 bp, Artificial Sequence
  ENSG00000287579_2 (sequence is synthesized)
gctgtatttggtaattttggccaaggtggagtcagctaggcatctctttgtgaaggtagcctttcccctttgttattagtcagtcatctgtgggatgagacatgaaagccctgtgaacat

SEQ ID NO: 1017681 - DNA, 120 bp, Artificial Sequence
  ENSG00000287579_3 (sequence is synthesized)
tgactgcctgcgttattcagtgaagcagacatggcctattccctacatttgccccttgaaaatgttcaattttaatttaaaagattaatacagccaggatattctttcaacaggcaaata

SEQ ID NO: 1017682 - DNA, 120 bp, Artificial Sequence
  ENSG00000287579_4 (sequence is synthesized)
aaaaccgcagtttaaactctaagtttcaatcagaaactaacagctcttggatttcccagggctcacactcctctgaaacaactcacgaagagcctgaggaagcagttctcactggtaatt

SEQ ID NO: 1017683 - DNA, 120 bp, Artificial Sequence
  ENSG00000287579_5 (sequence is synthesized)
ctgtagttactggaggtagtagaaggcacacagatcatgccatttccctctagtgcttggataattgagaaagaaatggcagaaaaatgtgaatggtatttccagaccttagcagggtaa

SEQ ID NO: 1017684 - DNA, 120 bp, Artificial Sequence
  ENSG00000287579_6 (sequence is synthesized)
agtatgttccggtgaagaccctcagctctgttcattttcatgatgcaaatgcccacaaaggtggttttgacctgactgaccctgtgcaaggaggcacagtctcctcaccagcataagcac

SEQ ID NO: 1017685 - DNA, 120 bp, Artificial Sequence
  ENSG00000287579_7 (sequence is synthesized)
ctctgaagcctgttagtgaccatagaattaatttcactaatacctttcggtcaccgactcctgaaaagagaacacgtgaatatcatgagtccgttgaaaaaagacagtaagtgggcttga

SEQ ID NO: 1017686 - DNA, 120 bp, Artificial Sequence
  ENSG00000287579_8 (sequence is synthesized)
aaaaacagaataaaagaaacacaagttttcattttgatcaaggttaaaaggatgcagttaaggaacagctgccttccacctgaatgagccactagatgctaaaacacttttgcttgtctg

SEQ ID NO: 1017687 - DNA, 120 bp, Artificial Sequence
  ENSG00000287579_9 (sequence is synthesized)
taaacatgtgaatacaattaggtttatattactttgaagaaactattgtgttatctaaatttgtaacgtcacatttgagagactcagtgattaaaaacagctattttcactgtagttaaa

SEQ ID NO: 1017688 - DNA, 120 bp, Artificial Sequence
  ENSG00000287578_0 (sequence is synthesized)
gccagcagggagctcaatgccggcaaccatcgcctgccccttggagctgttgcctgggcaggggtggccttggttgtttaccgccggggttgaccagctaacgagggttggtcccgcttt

SEQ ID NO: 1017689 - DNA, 120 bp, Artificial Sequence
  ENSG00000287578_1 (sequence is synthesized)
cgtagtgtggattttcgtttcctctacttgactctaaatcaatcctgtatattcgcaaactacaaagaggcgcatgcaaatagatactgtactgagggcagatacacgcgcgagatccag

SEQ ID NO: 1017690 - DNA, 120 bp, Artificial Sequence
  ENSG00000287578_2 (sequence is synthesized)
agggtgagttaacacacattcagtaaatataaaaacaagtggaacattattaactgatttctgtgagccgtaattttattttataattttcacgtggtaattggggatagacagggagca

SEQ ID NO: 1017691 - DNA, 120 bp, Artificial Sequence
  ENSG00000287578_3 (sequence is synthesized)
agtagattatgtgtctaaaagatatgactagaaaaaaaagtctggtaaaactctcctcaaataacataacacataaagtgagctaattattcccagacattcccaggagggaaagagatt

SEQ ID NO: 1017692 - DNA, 120 bp, Artificial Sequence
  ENSG00000287578_4 (sequence is synthesized)
ctgattttgtttggctggctggttgtgttgctttaaaaaaaaatgaagtaatctttcagttggtggattcgtttttttaaaagcctaaaggatcatagtctctagaataaataaggtagg

SEQ ID NO: 1017693 - DNA, 120 bp, Artificial Sequence
  ENSG00000287578_5 (sequence is synthesized)
catttcattttacataagtgtgtcttatataacaaatgttctcatattttaaaaagtgctctcttgactgtaaatgcaatgtggaaaaacattttcaatgcaataggccatacctaaata

SEQ ID NO: 1017694 - DNA, 120 bp, Artificial Sequence
  ENSG00000287578_6 (sequence is synthesized)
ttgatgaaaaacctctagattttcctgtatacattcacatgaaggaaaaaacaatgttggagataaagtattacttgatgggctgggcggtatcaacttgctagactctgtcctgttgag

SEQ ID NO: 1017695 - DNA, 120 bp, Artificial Sequence
  ENSG00000287578_7 (sequence is synthesized)
tatatctgctaatgaaaatatttggttcaacatttacctaatgacctgactgagagaaccacctccttatttagggaaaaaatatctaattattcgaatacacctcccttttaaaaggca

SEQ ID NO: 1017696 - DNA, 120 bp, Artificial Sequence
  ENSG00000287578_8 (sequence is synthesized)
tgtgttactgtcttcagagatccagaggtgtaccatgcaaattcacccactgttattctttcaataaagaccatagaaataaaaggttggcaaagacttacaattcattcagctccctaa

SEQ ID NO: 1017697 - DNA, 120 bp, Artificial Sequence
  ENSG00000287578_9 (sequence is synthesized)
aattaattaaatctctgttttctcatttctgtttataatatttctcatcccttccttattaaagtaatttacctttgagaatttttactattttcctcctgtaattatgaaactataacg

SEQ ID NO: 1017698 - DNA, 120 bp, Artificial Sequence
  ENSG00000287578_10 (sequence is synthesized)
caatagcttatagtctcattttatggttctaaagtggcaaagacaaatacgcaagctataatgccttacagccaagcaaaggaaaggggtgatgtttggagtagagaaagcaagcttcta

SEQ ID NO: 1017699 - DNA, 120 bp, Artificial Sequence
  ENSG00000287578_11 (sequence is synthesized)
actcctccctccagcttacatccccagccgcttggcccaccagagacaagaacaggatgataagcaatggaatggcattgaactctcctgctgaaggacttgcatttcaatgtagattct

SEQ ID NO: 1017700 - DNA, 120 bp, Artificial Sequence
  ENSG00000287578_12 (sequence is synthesized)
gaggctgggtgaaaacttctctgtcacctttactacagcattctcacccatttatatttctttccccttctacatctctattactgttgcactatgttatgcattacaccatgggaaaat

SEQ ID NO: 1017701 - DNA, 120 bp, Artificial Sequence
  ENSG00000287578_13 (sequence is synthesized)
taatcaattaatacaataaaagcttaattttaaaaccctgactctttgaacttatttaattgaaaacaaattctcatgctgaaattttctaaaatcagaaagattcaaaaccctgtcttt

SEQ ID NO: 1017702 - DNA, 120 bp, Artificial Sequence
  ENSG00000287578_14 (sequence is synthesized)
gaactgatactgcatgagtgccagatattggttagcaaaggaaatatcattgctctatttattgaacacatattcaattagcactccctgtaggcagcaatatgttaggccccagggata

SEQ ID NO: 1017703 - DNA, 120 bp, Artificial Sequence
  ENSG00000287578_15 (sequence is synthesized)
tcacagttaagaaaattgctaactgtgcccttgtgaggcttaagagtccagtgatacaataaaaaaagttttatcactaagaaagacgttctagtaataatgatgatcatgataaatttc

SEQ ID NO: 1017704 - DNA, 120 bp, Artificial Sequence
  ENSG00000287578_16 (sequence is synthesized)
aagcttaaagaagaaatatttaataatttaattataggcattaaaaagattaggagtaaagaaagacagattatgagcctctgctataaccagtccttatgtgagctgctgaagaaaaga

SEQ ID NO: 1017705 - DNA, 120 bp, Artificial Sequence
  ENSG00000287578_17 (sequence is synthesized)
ggagaatgacgggttagttaagagagtcacatttgttgtagtaacagaatacagtgggtactttttaggcaagagaaaattttggtgagccttaactttaaaaaataagcatctgttttt

SEQ ID NO: 1017706 - DNA, 120 bp, Artificial Sequence
  ENSG00000287578_18 (sequence is synthesized)
attcaaagtgagaaaaatggagaataataaatgtttctgaggttgcagacacttctaaaaattacatatgtactatatcatacatatgattagcactgctgaatacatggactgaatcta

SEQ ID NO: 1017707 - DNA, 120 bp, Artificial Sequence
  ENSG00000287578_19 (sequence is synthesized)
gccagcagggagctcaatgccggcaaccatcgcctgccccttggagctgttgcctgggcaggggtggccttggttgtttaccgccggggttgaccagctaacgagctcccaggcagctgt

SEQ ID NO: 1017708 - DNA, 120 bp, Artificial Sequence
  ENSG00000287578_20 (sequence is synthesized)
gatggtggggaggcagctgcacagtgatggcagtggctgccaggcagtcccccacaaccctgagaaaggaaaattctgctctctgaatctgtagaaagaggaggatgagagcgaggggca

SEQ ID NO: 1017709 - DNA, 120 bp, Artificial Sequence
  ENSG00000287578_21 (sequence is synthesized)
ggaggaagatgtggagaaggagaaagatgaaagaagaagccttcataaatactgtatgtggcccataaaccctgaagtatttaacatctggtcctttacagaaaacctttgccaacccct

SEQ ID NO: 1017710 - DNA, 120 bp, Artificial Sequence
  ENSG00000287578_22 (sequence is synthesized)
ggtccaaagaaatggaaacaccttgataggaacaatttcatatgttttctgtttctttctagtgttttaaattcatgtcacaagggagcacctaataaggacctgactcacagtggacat

SEQ ID NO: 1017711 - DNA, 120 bp, Artificial Sequence
  ENSG00000287578_23 (sequence is synthesized)
taaaacagtgattatgtgaactaattggtggataaatcgttggctctctgcttcaagcacagcaaaacaagtcagcttcttggatatcttttatgggagataatatggctatccaaatgt

SEQ ID NO: 1017712 - DNA, 120 bp, Artificial Sequence
  ENSG00000287578_24 (sequence is synthesized)
tcaccaatccctcacttatgccttgtgcccactcatgggagacatataatctcatgccccagtgatgttgggctttgacatgtgacttgctttggccaagagaatgtaatcagagataac

SEQ ID NO: 1017713 - DNA, 120 bp, Artificial Sequence
  ENSG00000287578_25 (sequence is synthesized)
atatgccacattttattagaagctgtgagagatattttacatttctatcagtcacctttaatttctgccctctggaattttaaaagtatgttgtagttgtggctaatatttccacttgga

SEQ ID NO: 1017714 - DNA, 120 bp, Artificial Sequence
  ENSG00000287578_26 (sequence is synthesized)
tactgcaataagaaaacacaaagagacaggccaagcacaataagaccaaccaaccaaatccagaaatgctcagccaaactgaagctgaccctcggcattcatgtgatgggtgagaactac

SEQ ID NO: 1017715 - DNA, 120 bp, Artificial Sequence
  ENSG00000287578_27 (sequence is synthesized)
aaggtgtaagcctttgagattttgtggttctctggctgaaagaaaagttgattgatatccttctataaaacaaaagattcagaaggatctaatggattaggttttagtatattattgcaa

SEQ ID NO: 1017716 - DNA, 120 bp, Artificial Sequence
  ENSG00000287578_28 (sequence is synthesized)
atcataatgaattcttagatacatattttttaaccataataggaagaatagctatttatacaactcatatttacaagatgatttcatatttttagttcattttctgctgtgtagaaatgt

SEQ ID NO: 1017717 - DNA, 120 bp, Artificial Sequence
  ENSG00000287578_29 (sequence is synthesized)
aatggttataatatggtgccctttcatgctcatcaagcactcttttatctcactaatgaagggcaaaagtgatggacatatgttgttactagaataaaaggccaccttacactcaagaaa

SEQ ID NO: 1017718 - DNA, 120 bp, Artificial Sequence
  ENSG00000287578_30 (sequence is synthesized)
attaatgtattactgtgataactttgttctctattaaaaatgaatcattcttgaatcagaatttctttactttggaagttagtatttcacccttatatcaatttaactttgtagaaatat

SEQ ID NO: 1017719 - DNA, 120 bp, Artificial Sequence
  ENSG00000287578_31 (sequence is synthesized)
gactagaaattaaatggcataaaaactgagaaacaaatttatacagaaaagatttacaatttataatgagttgtgccaagtaggaaatattttaacctcataaggataagtgtgaaatca

SEQ ID NO: 1017720 - DNA, 120 bp, Artificial Sequence
  ENSG00000287578_32 (sequence is synthesized)
agaaatttgtagtcaaaggtggttcatcctataaaaataaaaatatataggagaatactgatgagaaaagaaaattaaaatatccagaaattttcatgtagcttatttgaagtcacaaaa

SEQ ID NO: 1017721 - DNA, 120 bp, Artificial Sequence
  ENSG00000287578_33 (sequence is synthesized)
tgtgacaaaaataccataaaataaaatgtgtaattcagggctccagaaatggccatggtgctgatagttgacagctgttgtttttgccttcccagcactctcccactttttaatgttaag

SEQ ID NO: 1017722 - DNA, 120 bp, Artificial Sequence
  ENSG00000287578_34 (sequence is synthesized)
agaattctaattctgttttgggaaacatcctctcctctttcacttcagtagccctagtgctatagtgtcattcctcttttaaatgtgggcaatgtgagcccaataaatcatagtctcata

SEQ ID NO: 1017723 - DNA, 120 bp, Artificial Sequence
  ENSG00000287578_35 (sequence is synthesized)
tgaccctcaccacaggcatttctttaggactggcatctgagccaagagaggatactcagagcagacaggaatctgaggagtgaaagaaactttcttcagctattaaagttgagagaagat

SEQ ID NO: 1017724 - DNA, 120 bp, Artificial Sequence
  ENSG00000287578_36 (sequence is synthesized)
agcagtaagatgggagcagccggtgtacatctagtcagcagaaatggcaagccagcctgagaactccactaacacaaaggaaagcaaagctcagagaaggcaagggacagaccaagttct

SEQ ID NO: 1017725 - DNA, 120 bp, Artificial Sequence
  ENSG00000287578_37 (sequence is synthesized)
gatgatgccatataatcccacaccctcccaaacaggatacacctgattttttaaccttgttttcctttctcttgcaatttcaatccctgatagatacagtgctcctgggggtggttgagg

SEQ ID NO: 1017726 - DNA, 120 bp, Artificial Sequence
  ENSG00000287578_38 (sequence is synthesized)
catttgaagatgaatattttacaattagactttcccttcacgtctgtatttcagtaaacccataaataacatatttcagaagtggttggattcttgtgatgtttctcaatttaagtttca

SEQ ID NO: 1017727 - DNA, 120 bp, Artificial Sequence
  ENSG00000287578_39 (sequence is synthesized)
tttttgcaaccatgtcctctagaggaattccagcaaatggctggcagtgaagtttggcatgcaaacatatgaggactgtatctgaaaatctcctttgaatattgattcatcagatgatta

SEQ ID NO: 1017728 - DNA, 120 bp, Artificial Sequence
  ENSG00000287578_40 (sequence is synthesized)
atctctaattttttaattaaaaaaagcaggctatattattagtacaaaaagagtttttttcattttgtaaatttttattttgggaaaaaagtcaaacctacagaaaagttggaggaattt

SEQ ID NO: 1017729 - DNA, 120 bp, Artificial Sequence
  ENSG00000287578_41 (sequence is synthesized)
tactacaggcacaatgcaacttgtacctagagaaatttagacattaaatttttcccaaaattattttctttctctaaatacatatgcttttttttcttttgctgaacaatttgaaaataa

SEQ ID NO: 1017730 - DNA, 120 bp, Artificial Sequence
  ENSG00000287578_42 (sequence is synthesized)
tttgtaggcatttcataacttacctgacaaatatgttagcaggactctcctaagaataaaaacattcttctctataacttctataccaatgttgcatctaagaaaattaactctaatttt

SEQ ID NO: 1017731 - DNA, 120 bp, Artificial Sequence
  ENSG00000287578_43 (sequence is synthesized)
tcttttaggatctttttgtaaaactccaggatccaattgtggtgtgtaaattgaatttggttatgtctctttagtttcttttaatgttgaactgtcccttatattttttctcgttatatt

SEQ ID NO: 1017732 - DNA, 120 bp, Artificial Sequence
  ENSG00000287578_44 (sequence is synthesized)
gaattgttgaccattctaggcctctggtcttttacaatgtgttcctttcttgttttttcttatgtaaattcagtttaataattttggcaagaatagtacacagttgctatgtatatttct

SEQ ID NO: 1017733 - DNA, 120 bp, Artificial Sequence
  ENSG00000287578_45 (sequence is synthesized)
tgttgtttcacattaagaacattatatcaagttgtcctaccattgatgattcaaagtttggctgctaaatctccgaattataaagaaaaattcttttctattagtaattaatattatact

SEQ ID NO: 1017734 - DNA, 120 bp, Artificial Sequence
  ENSG00000287578_46 (sequence is synthesized)
tgtgtgatatcttgaataggtaggaaagtccagttttccaacaatcccccacacaatggttttagcatttgttgataacgctcagagaaggcaagggactgaacaagttctgatgatgtg

SEQ ID NO: 1017735 - DNA, 120 bp, Artificial Sequence
  ENSG00000287578_47 (sequence is synthesized)
ttttcgttttcgtttgaataaagttcatttttagaattcaatcattttttccatatttgttagatgtcctttatctataaagataaagaagacgttacttccattcctgcatcttcatca

SEQ ID NO: 1017736 - DNA, 120 bp, Artificial Sequence
  ENSG00000287578_48 (sequence is synthesized)
cacacacataattaacctttttcattattttctgtttatcttttctgtgtgtgtgatgtattacatattatacattttaaataatatataatagagaacatttatttgtacacatacaca

SEQ ID NO: 1017737 - DNA, 120 bp, Artificial Sequence
  ENSG00000287578_49 (sequence is synthesized)
cacacacacacaaatttcttttatgctcattcacaaagataccacagtatgtacacttttttgaggcttttttttcacttaaccatgtatcttggaaatactccatataagttaatagct

SEQ ID NO: 1017738 - DNA, 120 bp, Artificial Sequence
  ENSG00000287578_50 (sequence is synthesized)
agttatctttttattgttctgtaaattatttaatctgtcttctatagatgggcatttcgtttttatccaatattttctattttaattaatgctgcagtgaataaacttttgcatatattg

SEQ ID NO: 1017739 - DNA, 120 bp, Artificial Sequence
  ENSG00000287578_51 (sequence is synthesized)
ttttgttatttgcaggaaggtatatacaagcaaagtcttagaaagaggatttctggatcaaagtgtaaatgcatcggcagctttgttagatattgccacattgtgttcaacaagggtttt

SEQ ID NO: 1017740 - DNA, 120 bp, Artificial Sequence
  ENSG00000287578_52 (sequence is synthesized)
accatcaacagttatgagtgtctgttttcccaaagcctagccaatagtatgtgttttcaaggcactgattttctgctaatctggtaggtaagaaatagcataatggtgtagttttaattt

SEQ ID NO: 1017741 - DNA, 120 bp, Artificial Sequence
  ENSG00000287578_53 (sequence is synthesized)
gcattcctattattgtcagtgagttagagtgccttttcatatgttcaaggaccatttttatatactttctctaaactcttcatttttcattttcccatgttattttcactttattttcaa

SEQ ID NO: 1017742 - DNA, 120 bp, Artificial Sequence
  ENSG00000287578_54 (sequence is synthesized)
taactctttttaaatgaaagatattagcattttattttctgtgatgtaagttgcaaatatttttgtccagcctgtctttcaatttttctgttttagcatgcattttaaaatttttaatga

SEQ ID NO: 1017743 - DNA, 120 bp, Artificial Sequence
  ENSG00000287578_55 (sequence is synthesized)
agttgaatttataatttttatatagctacttgatagtgaatcataattagaaatgtctccacacacattataaagaaagccaagcatgttcccgtttagactgttgatccaagtagagtg

SEQ ID NO: 1017744 - DNA, 120 bp, Artificial Sequence
  ENSG00000287578_56 (sequence is synthesized)
ttttcacgttctactagatcaataatggatccaatttttttcttttctaaatgtctatccagttttccaaacactatgttttaaaaagactatattttttccagtagcctaagataccat

SEQ ID NO: 1017745 - DNA, 120 bp, Artificial Sequence
  ENSG00000287578_57 (sequence is synthesized)
atataatatttactaaatcttcatttgtacttaggtctattctgagctttccatacaattttgttaatctattaatatattcttgaatctgtatcatgccattttgattatagagactct

SEQ ID NO: 1017746 - DNA, 120 bp, Artificial Sequence
  ENSG00000287578_58 (sequence is synthesized)
atagtatactttttaaaaatagactttattttttaggccagattaaggttcacagcagaagttacagagctttcccaaatactccctacaccgacagatgcacagcctccctcattatca

SEQ ID NO: 1017747 - DNA, 120 bp, Artificial Sequence
  ENSG00000287578_59 (sequence is synthesized)
acatcccccatcagaatgatacaattgctataattgatgaacctaaattgactactcattattactcagaatccatagtttacactggggttcactcttggtttcgtgcattctgtgggt

SEQ ID NO: 1017748 - DNA, 120 bp, Artificial Sequence
  ENSG00000287578_60 (sequence is synthesized)
ttggaaaagttcataatgctatatatccattcttataacatcatacaaagtagtttcagtgctctaaaaatcctctgtgctccagcgatttgcctctcccttctcctaacccttggtctt

SEQ ID NO: 1017749 - DNA, 120 bp, Artificial Sequence
  ENSG00000287578_61 (sequence is synthesized)
tttattatctccacagttttgccttttctggaatgtcatttagttagaatcatatggtatgtagcttttttagattggattgtttcatttagtcatttgcatttgaatttcctcgatgtc

SEQ ID NO: 1017750 - DNA, 120 bp, Artificial Sequence
  ENSG00000287578_62 (sequence is synthesized)
ttttcatggcttgatagctcattaaaaaaaatcaaataatattttattgtctagatgtacatattttatttatccgttcaccgactaaagttaatcttgattaatttcatgttctgaaaa

SEQ ID NO: 1017751 - DNA, 120 bp, Artificial Sequence
  ENSG00000287578_63 (sequence is synthesized)
ccgactaaagttaatcttgattaatttcatgttctgaaaattataaataattgtgtgcattttaatatctagcagtactacctaattgcacttatttttaaatgtttacttaaatattat

SEQ ID NO: 1017752 - DNA, 120 bp, Artificial Sequence
  ENSG00000287578_64 (sequence is synthesized)
acactaataaaaataaaagaatcagcatatgtatggatgttgagacatatccatgaacaaggaattattggatctatacattgttcaagattggtcttaaagagtggtttggagatttct

SEQ ID NO: 1017753 - DNA, 120 bp, Artificial Sequence
  ENSG00000287578_65 (sequence is synthesized)
atttctagaaaagatttaagttcatttaagcatgttactatttttattgttgttataaattgttttctgattattttttgtttatataaggattattgatttttgtgtgctaactcagaa

SEQ ID NO: 1017754 - DNA, 120 bp, Artificial Sequence
  ENSG00000287578_66 (sequence is synthesized)
gtgtgctaactcagaagttttgctcttatacaacagttattgcaatccctgtaatactccctttgttgaaaaaaatttacttctgctattgagttccctttcttttctaaaatgaactta

SEQ ID NO: 1017755 - DNA, 120 bp, Artificial Sequence
  ENSG00000287578_67 (sequence is synthesized)
ccaccggcacagtgactcatacctgtaatctcagctgaggcagggggattgcttaaggccaagagttgcagacaggcctgggcaacagagagagactccatctctaataagtaaataaat

SEQ ID NO: 1017756 - DNA, 120 bp, Artificial Sequence
  ENSG00000272995_0 (sequence is synthesized)
aatctagtgcagtgcttatattcttgggctctggagttaaatagaaggcctgggttgaacccctactctgccacttgggagctgtgtagcttcaggcaaactgtttaatctaagtctcat

SEQ ID NO: 1017757 - DNA, 120 bp, Artificial Sequence
  ENSG00000272995_1 (sequence is synthesized)
tgctctcctctgtgaaacggggacaggaattgacctcagagagctgctataagaatgaataagatacacatattatgctattatcctagccctctaccttacacatcatatttggtcatt

SEQ ID NO: 1017758 - DNA, 120 bp, Artificial Sequence
  ENSG00000272995_2 (sequence is synthesized)
ccgatagaccaaggataaatcatatttatcaacgtggttgaatctagaataacacaggtctgaaatgcaatcagcttatgaagtatatatgaattacgctttctattctagtgttataag

SEQ ID NO: 1017759 - DNA, 120 bp, Artificial Sequence
  ENSG00000272995_3 (sequence is synthesized)
ttgaatcactctatctaatatcatcagaatttaccctaaaagaaaggaatattgtaattgtaaatgatagcagaggagaataaaggccaccatcatggaaataaatgtcagtagaaaccc

SEQ ID NO: 1017760 - DNA, 120 bp, Artificial Sequence
  ENSG00000272994_0 (sequence is synthesized)
atgccgggctccttctctcgctgctggttcgggtgttggggcctggtcccgcttgcaaaagctcccacggaccagagaaaagaggaggatgtcagacgtagaaacaaatggcgtgtcaag

SEQ ID NO: 1017761 - DNA, 120 bp, Artificial Sequence
  ENSG00000272994_1 (sequence is synthesized)
tttcgcaggaagagagggaagagtgaagctccgggagccagccacgattagtcgcgccttctgtgacgtccaatggcagaggtcaaagggattcctggggcaacctcgagggaaagaatt

SEQ ID NO: 1017762 - DNA, 120 bp, Artificial Sequence
  ENSG00000272994_2 (sequence is synthesized)
ctggctccgagggccggtgtacagtgctttaaatatggcagtggttatgtgtgaaattatcgtgtttttctgtttaacctgtttcttgtctcttcatcgcctttctatataatgtaagac

SEQ ID NO: 1017763 - DNA, 120 bp, Artificial Sequence
  ENSG00000272994_3 (sequence is synthesized)
cagaggctttatgtagtgaattccctgtaaccccggctgcttggacagataggtattcaagtatttgtttcttgaagtaatcctctgaattaacttgctcacatgtaaaaaataataacg

SEQ ID NO: 1017764 - DNA, 120 bp, Artificial Sequence
  ENSG00000272994_4 (sequence is synthesized)
ggctgggaaacgccagtaatagccgccaaacgtttgttagacatttacagtgtgccagggactgcattttacgtgtattatcacattcctcagaacagcctaatgaggtatatattacta

SEQ ID NO: 1017765 - DNA, 120 bp, Artificial Sequence
  ENSG00000272994_5 (sequence is synthesized)
gaatgcctatttttcagatgaggaaactgatgcatagaaaggataatttactcaagagcgaggaagtagcaagcataaaatccaagtacatttttttctgcatgtattaataggtacaat

SEQ ID NO: 1017766 - DNA, 120 bp, Artificial Sequence
  ENSG00000272994_6 (sequence is synthesized)
gaagtaactttttaaattgctgtaggtatcaatcatagtcttaattcccagtaattcacttactaagaaatattttctgcttctctttcatcattcatgggagagatacatatccctaaa

SEQ ID NO: 1017767 - DNA, 120 bp, Artificial Sequence
  ENSG00000272994_7 (sequence is synthesized)
gagagatacatatccctaaatattttgcacatttaaaacttaaacttgggtatggtggcttatgcctgtaatcacggcgttttgggaggctcaggtgggaggattgcttgagtccaggag

SEQ ID NO: 1017768 - DNA, 120 bp, Artificial Sequence
  ENSG00000272994_8 (sequence is synthesized)
catagtaagaccccgtatctacaaaaaataaaaaaaaaattaaccgggcatggtagtgtctctgtagtactagctactcgggaggctgaggtggtaggatcactggcgcccagcaattcc

SEQ ID NO: 1017769 - DNA, 120 bp, Artificial Sequence
  ENSG00000272994_9 (sequence is synthesized)
agcctgcagttaggattaccacactgcacttcagcctgagcggcagaatgggaccatgtctgaaaaaataaataaaaaataaaacttgcaggtatgttctgaatgtttattgtatgcatc

SEQ ID NO: 1017770 - DNA, 120 bp, Artificial Sequence
  ENSG00000272994_10 (sequence is synthesized)
ctctatgaggtatcattttattggaaattattgcattgtctacaaaaatatgaagaactctgaagatgccaaaagataaaccgtgaaagagtactagaagtgagctcctcaaaaagataa

SEQ ID NO: 1017771 - DNA, 120 bp, Artificial Sequence
  ENSG00000272994_11 (sequence is synthesized)
agctgagaagtgtttcccaatttttcttactcatttatgtatgtaatactttatgtctagaaactgaatttcagagctgggagggaacttaaaagttagtccagttctttcatgttagtg

SEQ ID NO: 1017772 - DNA, 120 bp, Artificial Sequence
  ENSG00000272994_12 (sequence is synthesized)
ccaagaaagctgatcagaaagagattaaatgacttgcccaaaattgaatagtcttaaatctgagctgaggcaggcgtctgaatgtcttaaattggagttaaatgtattagcgtcatagta

SEQ ID NO: 1017773 - DNA, 120 bp, Artificial Sequence
  ENSG00000272994_13 (sequence is synthesized)
ttaacatcatcatattccatatctctcaaatctgatttgattttcattacaatagagaaataagtgtgattagtattatccccatttccttcaccgggaggcacattgttttagtatcaa

SEQ ID NO: 1017774 - DNA, 120 bp, Artificial Sequence
  ENSG00000272994_14 (sequence is synthesized)
ttctcagcctcagtcccctcatcaggaaaatgctgtgttagcactttctgtgaagaatgatcaaaggagtggagattatggagattataaacacacttgacacagtaagtgtttaagaac

SEQ ID NO: 1017775 - DNA, 120 bp, Artificial Sequence
  ENSG00000272994_15 (sequence is synthesized)
tggtagctgatttttacaaagttatgggtcatagaaggcagtttagagaaaagggcaggctttggagtagctcagttgtattataaccttggcttctttactcacctaggacatacattc

SEQ ID NO: 1017776 - DNA, 120 bp, Artificial Sequence
  ENSG00000272994_16 (sequence is synthesized)
tctctttagctgtagcttcctcccttctgagatggaaattataagccatctcacagtgttgtgaggattggagctcaagtgtgtaaaatgcctcctctgtgggctctccttggagagttc

SEQ ID NO: 1017777 - DNA, 120 bp, Artificial Sequence
  ENSG00000272994_17 (sequence is synthesized)
ttgtatcctattgattgtcatcaaaggaaaaaagtggcaggatgatggcataagtgggaagaaccttgagtttaatagtctgaaaaagtggttacaggttcttgctatgcttttcctctc

SEQ ID NO: 1017778 - DNA, 120 bp, Artificial Sequence
  ENSG00000272994_18 (sequence is synthesized)
tgtggttttctgaacccatcgcctaacctgaagccttaaacttcatctgcaaaaatgttttgtggcaggtaagatgtcttttttttcttccagtacttcccagtttaaaactaagagtac

SEQ ID NO: 1017779 - DNA, 120 bp, Artificial Sequence
  ENSG00000272994_19 (sequence is synthesized)
ttccttgcttataactaattctattaatattattctaggtgactctgaagcagaactcttgagatggaaggattgtcatctgaggaaaaaaaatcaagattaagagaggaggaactagaa

SEQ ID NO: 1017780 - DNA, 120 bp, Artificial Sequence
  ENSG00000272994_20 (sequence is synthesized)
tgagattcacataccgtctctcctccaagggaaggagagagtggtgatgcctgcccactccttcctgggcagaacatttgtagcatggaacattggagaatttgcagtctgctgactttc

SEQ ID NO: 1017781 - DNA, 120 bp, Artificial Sequence
  ENSG00000272994_21 (sequence is synthesized)
tgatttaggaggttgatggggaggccttataatttgcatttctaacaagttctgaggtgatgcttcaagtatgtccaggcagaagggctgcctcacagagaattctgccataccacatgg

SEQ ID NO: 1017782 - DNA, 120 bp, Artificial Sequence
  ENSG00000272994_22 (sequence is synthesized)
gaattgaagtcacagacatctctaaccctcaagcctgaaaccaaaagactgaaaaccaacactacagtggacaaagaacatctctgaacttgtgtggggaccagtgacacaaggacctaa

SEQ ID NO: 1017783 - DNA, 120 bp, Artificial Sequence
  ENSG00000272994_23 (sequence is synthesized)
ggtctctctcttctcatcttggcacttcagaagtctccccaatcttgacaaagccctggagaaagggccgggcctcccgttgataagaatatcactgcagataaatggaggtttcaaatt

SEQ ID NO: 1017784 - DNA, 120 bp, Artificial Sequence
  ENSG00000272994_24 (sequence is synthesized)
gaaagaaaggaggagggcctcctgttgataagattattgtcactgcaggtaaatggaggcttcaaatagaaatacatttcagttacagaaaaaaaaattatctttgttacacatttgagt

SEQ ID NO: 1017785 - DNA, 120 bp, Artificial Sequence
  ENSG00000272994_25 (sequence is synthesized)
ttgcaggcctaaggttactcccgctacactatcatctgtaaccataacgcactcaacattttaagctaactataaggattgttgcttcactcaaagatcctgaggttttattcactaaca

SEQ ID NO: 1017786 - DNA, 120 bp, Artificial Sequence
  ENSG00000272994_26 (sequence is synthesized)
tttttatttggtgactatagttgacaagaacaaagctgtggggaaccaacaaacactgcaatgcctggcattgtcacctcactagattgtgagttcctctgggacagggtccgtacattt

SEQ ID NO: 1017787 - DNA, 120 bp, Artificial Sequence
  ENSG00000272994_27 (sequence is synthesized)
tcttagaatccctcacttagccattagcctgcacagtgcttgtacttagtaagtgctcagtaaatgtttgtggaatgaatgcatgatgaacaaaatatatactgaggactcttggtgttg

SEQ ID NO: 1017788 - DNA, 120 bp, Artificial Sequence
  ENSG00000287575_0 (sequence is synthesized)
tctcagactttgcgggtgtctctagccctggctggattctgctcgcaccccccacacccatctgagggggcagttcagagctggcggagcaaggcacacccacagctttgtgggggcccg

SEQ ID NO: 1017789 - DNA, 120 bp, Artificial Sequence
  ENSG00000287575_1 (sequence is synthesized)
gggctgtgagctttgtctggggcctgtgggagagagcttggcttgagctctcctggctctctccacaaagagtcttctctggggaaagctatgaggaagaagaaacagagcgctcccggg

SEQ ID NO: 1017790 - DNA, 120 bp, Artificial Sequence
  ENSG00000287575_2 (sequence is synthesized)
aaatgttgaaaaagcagagccccattcatcacagcacaggttgaagagaccagctctccccgatattggcagaatttccatcacaggaataagcttttgaaaagcaaactgacagatgag

SEQ ID NO: 1017791 - DNA, 120 bp, Artificial Sequence
  ENSG00000287575_3 (sequence is synthesized)
aggaggagccatgaagacggcactgcctgtggggcccccgataaatgatggcactgagcaattggcaggactgtgggcatgggaggggtccctaggccccacccccctctgctcctgttt

SEQ ID NO: 1017792 - DNA, 120 bp, Artificial Sequence
  ENSG00000287575_4 (sequence is synthesized)
gtgtaattaacagcccgcttcctatcaggtgctctgccttcagtgctctctgctgcggctcttaccagcgaggactggaggggcggctcctttacctgccctgtcctggtttttgctccc

SEQ ID NO: 1017793 - DNA, 120 bp, Artificial Sequence
  ENSG00000287575_5 (sequence is synthesized)
gcctgccccgtgagccaggggatgcactcacagctgctctttttgatgtataaagtgtgtttgaacattatgccaaatatcaaaatgtgaaggactaatccaggatgcaaaaacgttatg

SEQ ID NO: 1017794 - DNA, 120 bp, Artificial Sequence
  ENSG00000287575_6 (sequence is synthesized)
gggggttgtaaatacgaactatacaacagtttaggatgcaattatgagtgtaaactgtgtgccttatttatacttcattgtctccagcttctcagataaagttttgatgtgttgtacagt

SEQ ID NO: 1017795 - DNA, 120 bp, Artificial Sequence
  ENSG00000287574_0 (sequence is synthesized)
ggccccagtcagcgatttgggtctcggagcaccaaggagacggtggacggaatctgaccaggcttggtggctacgatggcctgaagcgtgccttttgggttctcagctcgggctcacaag

SEQ ID NO: 1017796 - DNA, 120 bp, Artificial Sequence
  ENSG00000287574_1 (sequence is synthesized)
tgttttctgtgctaaatacaaaaagccctgtgatgttttgctttgcgtgtccacctatctgactcgtaagaaccgaggctgaatccagacccacactctgtcacgtcgggagagcctgcc

SEQ ID NO: 1017797 - DNA, 120 bp, Artificial Sequence
  ENSG00000287574_2 (sequence is synthesized)
gcggcgagcctctgcgagcgggcatttcttgggtggggaccaaaagcccagtgctgccatagtttcggatcattcttttaagaagctggggccgggcgcggtggctggcacctgtaatcc

SEQ ID NO: 1017798 - DNA, 90 bp, Artificial Sequence
  ENSG00000287574_3 (sequence is synthesized)
gcgggcggatcccttgagcccaggagttcgggtctctacaaaaaattaaccggtgtggtggtgtgcgcatgtagtcccagctacttggga

SEQ ID NO: 1017799 - DNA, 120 bp, Artificial Sequence
  ENSG00000287574_4 (sequence is synthesized)
gcgctccagcctgggcgaccgagggtgataccttgtcttaaaaaaaaggtgggagagtggaacgaaaacttggaataagtagggtcatggagcttgtttacatcccctagttacagcaca

SEQ ID NO: 1017800 - DNA, 120 bp, Artificial Sequence
  ENSG00000287574_5 (sequence is synthesized)
tccttttgaaagtgaaaaacaaactggaatgttacttagtgggcatggaatcgaagcaacggaaggttaaaactgtttttatcaaggccaggcgggcgcggtggctcacgcctgtaatgc

SEQ ID NO: 1017801 - DNA, 120 bp, Artificial Sequence
  ENSG00000287574_6 (sequence is synthesized)
cgcggtggctcacgcctgtaatgctaacactttgggcggccaaggctggtggatcatctgaggttagaaattcgagaccagttgggccaacaaggtgaaacccccgtctctactaaaaat

SEQ ID NO: 1017802 - DNA, 120 bp, Artificial Sequence
  ENSG00000287574_7 (sequence is synthesized)
acttttatataatagaataattacaatgaactttcataaagaacttgagcatacctggattttggtatccgtaggggtccaggaattatcccccttggataataacggagggctgtactc

SEQ ID NO: 1017803 - DNA, 120 bp, Artificial Sequence
  ENSG00000287574_8 (sequence is synthesized)
atcatccaacttcaacaacagtttgctgcctttctcatttcatgtatccctttctgcatttttttttgaagtgctgtatattaaagcaaatcctggacatcatgtcatttcacctataaa

SEQ ID NO: 1017804 - DNA, 120 bp, Artificial Sequence
  ENSG00000287577_0 (sequence is synthesized)
gtaactactgtggcctactcaactgcctggccttttgaaaagcacacttagaagctggtgatgtccatgggaccacataccgggaaatgacagaggtgtatatttacaaagtaactcttg

SEQ ID NO: 1017805 - DNA, 120 bp, Artificial Sequence
  ENSG00000287577_1 (sequence is synthesized)
acccaaagtacctctttaaaagaagacaagcatgttttgctcccatgatatcttatagtggcacctagattgctgagggcctgttgtccagtaagtaatgtcacctagagggggtatgat

SEQ ID NO: 1017806 - DNA, 120 bp, Artificial Sequence
  ENSG00000287577_2 (sequence is synthesized)
tggtttggagtctgggtctgagaactggggtaaaccacttcttcatgtcgtagtccccttatacataaaacagagggattggaccagatggatcactaaaggtccttccagtgttaagac

SEQ ID NO: 1017807 - DNA, 120 bp, Artificial Sequence
  ENSG00000287577_3 (sequence is synthesized)
ttaaagggtaaatggctctttgataaagagagatcataaaaaagtaagatccacacagcttaacctcccagggggcaattaagatgctttaatgtgaagtgaatgacgacgtggtagagt

SEQ ID NO: 1017808 - DNA, 120 bp, Artificial Sequence
  ENSG00000287577_4 (sequence is synthesized)
ctggagcatctcaagaggggctaagagattctgtcctcaccccagctctgaagatgcctccaccatgagaaagagacagggagcccctgactctctctgctccttcaccggttactccca

SEQ ID NO: 1017809 - DNA, 120 bp, Artificial Sequence
  ENSG00000287577_5 (sequence is synthesized)
cgttggaaggcaggagaggagcaaggccccagcatcttccatcactgctgcagacaccaaccaaccctccttcctccccacctctgcttcaactctcacctgagtccccgccccaaatag

SEQ ID NO: 1017810 - DNA, 120 bp, Artificial Sequence
  ENSG00000287577_6 (sequence is synthesized)
ccctctgctagccattaggtgttagctgcacttcacttgcaaaaggttttcctctgccaatttttttttaaatttaaaagtaaactttaatattgaaaatgcaaacttggggagggcaga

SEQ ID NO: 1017811 - DNA, 120 bp, Artificial Sequence
  ENSG00000287577_7 (sequence is synthesized)
aagatcacacacaaggctgtcgcttcacacttggagggttgcacagtggctgggcaaaggcgctcctcacttcccagacaatggggtggccaggcagaggtgctcctcacttccgaaaca

SEQ ID NO: 1017812 - DNA, 120 bp, Artificial Sequence
  ENSG00000287577_8 (sequence is synthesized)
gtgccttggccgggcagaggcgctggtcactttccggatggtgcggcggccagggagagacgcttctcacttcccagacggtggggcggccaggtagaggcgctcctcacttcccagaca

SEQ ID NO: 1017813 - DNA, 120 bp, Artificial Sequence
  ENSG00000287576_0 (sequence is synthesized)
ggtaacggctgggaagggactgcttgggctctgggaggccgcgcgggcccagcttgtgcagtccgggatcgcgtccccttgggagacttggcgaggggcgagacctggggcccacccagc

SEQ ID NO: 1017814 - DNA, 120 bp, Artificial Sequence
  ENSG00000287576_1 (sequence is synthesized)
ccataccgcagttccttcccacagtccctgcgtttcatttcgccccagttgagtgttgggggggggggggtctacgcggggacccatgggagaagggccagttaacaattactcttgacc

SEQ ID NO: 1017815 - DNA, 120 bp, Artificial Sequence
  ENSG00000287576_2 (sequence is synthesized)
caggagggtctgtgaaacctcttactgtggccagaggagaagacatcggagagcaaggttccctggatagacatgttgaacctctgaaaacatgaaagtttttagttcgtcattggaaac

SEQ ID NO: 1017816 - DNA, 120 bp, Artificial Sequence
  ENSG00000287576_3 (sequence is synthesized)
atgtacaagtgtaaacctctgtgcgctgttggtgggaatgtaaatggcgcagcaccgcagaaaactatggagattccacaaaaggttaaaagtagaactaccggatatgagggcgatctg

SEQ ID NO: 1017817 - DNA, 120 bp, Artificial Sequence
  ENSG00000287576_4 (sequence is synthesized)
gctgcgacacctgtcatcccattgatcgccagggttgattcggctgatctggctggctaggcgggtgtccccttccttcctcactgcttcatgtgcgtccctcccgaagctgcagctcag

SEQ ID NO: 1017818 - DNA, 120 bp, Artificial Sequence
  ENSG00000287576_5 (sequence is synthesized)
tcgaagagaacgaccatacccaatagaagagctgggcttccctggtagaacctccaaacaagctctcaaggtccatttgtaggagaaggtagggtagtcaagattccagacacatccaaa

SEQ ID NO: 1017819 - DNA, 120 bp, Artificial Sequence
  ENSG00000287576_6 (sequence is synthesized)
tgaggcgctgcatgtggcaatctgcctttctaggagaaaacaaaaatggaactacggtatgatccagcaaccctacttctggctatattcccaaaagaatggaaaccagagactcaaaca

SEQ ID NO: 1017820 - DNA, 120 bp, Artificial Sequence
  ENSG00000287576_7 (sequence is synthesized)
tatttgtgcccccatgttcactgcagcatttttcccaatagccaaaagacggaaacaacccaagtgtccacgggtggatggaaggataaacaaaatgtgatccatacaaacaatgaaata

SEQ ID NO: 1017821 - DNA, 66 bp, Artificial Sequence
  ENSG00000287576_8 (sequence is synthesized)
gaaggataaacaaaatgtgatccatacaaacaatgaaatatttttcagccttaaaatggaaggaaa

SEQ ID NO: 1017822 - DNA, 120 bp, Artificial Sequence
  ENSG00000287576_9 (sequence is synthesized)
actccagcctgggcgacagagctagactttgcctcaaaaaaaaaataaaaggaaaaaaagaaggaaattctaacacaggatacaccatggataaaccttgaaaacactgtgctttgtaaa

SEQ ID NO: 1017823 - DNA, 120 bp, Artificial Sequence
  ENSG00000287576_10 (sequence is synthesized)
ccatggataaaccttgaaaacactgtgctttgtaaaataagccagtcactaaaagacaaatcttgtgtgattccacttccatgaagtatctagaatacagattcctagagacagaaggta

SEQ ID NO: 1017824 - DNA, 120 bp, Artificial Sequence
  ENSG00000287576_11 (sequence is synthesized)
gttgcttaatgggtgtaggctttctgtttggagtgatgaaaaagttttggaagtagtggtgatggttacacaaaattatgacggtaataatgccactgaattgtacacgttaaaatggct

SEQ ID NO: 1017825 - DNA, 82 bp, Artificial Sequence
  ENSG00000287576_12 (sequence is synthesized)
ctggcggagcgagaccctttttttttttttttgagactgcaaagcccttcttaaggttctgtaccagcactttgggaggctg

SEQ ID NO: 1017826 - DNA, 120 bp, Artificial Sequence
  ENSG00000287576_13 (sequence is synthesized)
ataaataaataaataaataaataaatttcttcaggctgaagaggatacaatatggagactcagatctacaagaagaaagagtataggaaatgagaagtgtgttaggaaatgaaaatgttt

SEQ ID NO: 1017827 - DNA, 120 bp, Artificial Sequence
  ENSG00000287576_14 (sequence is synthesized)
aggaaatgagaagtgtgttaggaaatgaaaatgttttctcttttctctaaaacaagtagctgcagcaaaaataagataccaaggtttctaacatatgtagacgtgagacacatggcaaca

SEQ ID NO: 1017828 - DNA, 120 bp, Artificial Sequence
  ENSG00000287576_15 (sequence is synthesized)
gtgacgcagaggactcccgtgcatggtgcttctgaggagacacctgtgcacgcaggcagcctgcgagtggcctggagacaagcccatgggtgactctggagtgacctatgtgccaggaca

SEQ ID NO: 1017829 - DNA, 120 bp, Artificial Sequence
  ENSG00000287576_16 (sequence is synthesized)
tgggtgaccatgagaggactctgagaatgaatgggatgaaatttcccaccatggggcttgatgagcagttgtgcagtggactagccctgtctcgtttcccttgagactcttgtgaccact

SEQ ID NO: 1017830 - DNA, 120 bp, Artificial Sequence
  ENSG00000287576_17 (sequence is synthesized)
accttgtgacagccgggactggcctgccggaccatgagcagcacatgcagagcactgagaacagaatgtttgtgcccccacatgctaaattcatctgttgaaatccaaaccgtcaatctg

SEQ ID NO: 1017831 - DNA, 120 bp, Artificial Sequence
  ENSG00000287576_18 (sequence is synthesized)
atagaatcaggaagtggggcctctggaaggtggttaggtcatgagagtggagccctcgtgaatgggactagtgccctataagaagcagacaggacaggcgcgatggctcacgcctgtaat

SEQ ID NO: 1017832 - DNA, 120 bp, Artificial Sequence
  ENSG00000287571_0 (sequence is synthesized)
aaaggccagtgttggagaagcctgagtgggtaggaactgccggtgatgtctagggcctgagggcagcctccagcagactccagtgaaaagccgaaagtcttcaggcatactacctgaaga

SEQ ID NO: 1017833 - DNA, 120 bp, Artificial Sequence
  ENSG00000287571_1 (sequence is synthesized)
caatgaatcctgccaagtccctgaaggaacttgagagcagattcttctccagttaatcctccagatgatggtgaaacctgagaaaccccttgaaactctgagcaggtgacccagaccagc

SEQ ID NO: 1017834 - DNA, 120 bp, Artificial Sequence
  ENSG00000287571_2 (sequence is synthesized)
gatttttctcatcaagtaatacaaaaatattaaattctggttgttttagtcagaaagaagaatatttcttattgtgatggtaagcttaatatattacaaatttagtatccctaagccaag

SEQ ID NO: 1017835 - DNA, 120 bp, Artificial Sequence
  ENSG00000287571_3 (sequence is synthesized)
aaaaaagaaatagtctaagcaattacttgtcattgtcagactattacaattctatcttttcctggaataataacagagacattaaagattattaaactttctgacaaatataagataaca

SEQ ID NO: 1017836 - DNA, 120 bp, Artificial Sequence
  ENSG00000287571_4 (sequence is synthesized)
ctgacaaatataagataacacagatcaacttaattcaggaaatttcaatcataaaatatcacaaacagaaatgaaaaagtgtaataaaattgttaacaaagtttaaagtaaaagttttaa

SEQ ID NO: 1017837 - DNA, 120 bp, Artificial Sequence
  ENSG00000287570_0 (sequence is synthesized)
accttccccttcccatgcgagagctggagagcttatcctcagaccaaagagaaagcctagaggacagggaggggtcggcgagatgggaatgacagggctttgaagaagacgccaagtcaa

SEQ ID NO: 1017838 - DNA, 120 bp, Artificial Sequence
  ENSG00000287570_1 (sequence is synthesized)
gtcaccttagaacaatgagtgtcaaactttttggaccatgacttgcagtcgtgacccactgaattgacttcaccatccactaatgcgttgtcctctccagtttggaagactgctgtttcc

SEQ ID NO: 1017839 - DNA, 120 bp, Artificial Sequence
  ENSG00000287570_2 (sequence is synthesized)
tttgtagcatttgactgcaagaaaaggagggcagtgaagaagacttctgaacctttgaggataaaatgcaagtttcagctttatctcctagctggatggcaagttttggacctcccagct

SEQ ID NO: 1017840 - DNA, 120 bp, Artificial Sequence
  ENSG00000287570_3 (sequence is synthesized)
tttgcatgctctgtcctctcgtcctggagtctccctccgccctcgtcacctggctcactcctgcacatatgtcggggcttggcttgcagctgacttcaggaagcctccctgaatgcctgc

SEQ ID NO: 1017841 - DNA, 120 bp, Artificial Sequence
  ENSG00000287570_4 (sequence is synthesized)
gtctggtcagctgcccactctggctttgttactcccctgtctgtccctgcctagcacccaacacagaacagcaggacaatttcctgttagatttgctgtgaagacagggagcgtttccct

SEQ ID NO: 1017842 - DNA, 120 bp, Artificial Sequence
  ENSG00000287570_5 (sequence is synthesized)
attaataataggtaatagtaataagagcaaccaccatttactaagtactcattcatcccaggagaagtcttttgagagattaggataggtccattttatagacaaggaaattaaggtttg

SEQ ID NO: 1017843 - DNA, 120 bp, Artificial Sequence
  ENSG00000287570_6 (sequence is synthesized)
gtgagtttaaataatgtggcagggccaggagaatgacccagggctgcctgactcccagccgttcctaatcacaggatcttatttgtccacatccccctcagtgatacccacgtcggggca

SEQ ID NO: 1017844 - DNA, 120 bp, Artificial Sequence
  ENSG00000287570_7 (sequence is synthesized)
aagggtgagtgcagatccttaacaaaccctcaggggactgatgacaggttgattaaagagattttccgaagcagtggccacgtctaattttggagagttacacctcgtgtgtggcttggg

SEQ ID NO: 1017845 - DNA, 120 bp, Artificial Sequence
  ENSG00000287570_8 (sequence is synthesized)
aaagagaatctgtgaggtttccagggccgctggatgtggggtcatctcatctgggagaagtctggggctctgacaaaccaaggcagcagggcttctggtcacctggcctgaagagctcct

SEQ ID NO: 1017846 - DNA, 120 bp, Artificial Sequence
  ENSG00000287570_9 (sequence is synthesized)
gggcacacctgggataaaacccaggacctgcaaagcctgtgtgatccagcccaggccacgatgtctgcacccctcgctcactctggcattcttgctgttcttcaaacccgccaagcccag

SEQ ID NO: 1017847 - DNA, 120 bp, Artificial Sequence
  ENSG00000287570_10 (sequence is synthesized)
cactgcctcggggcctttgcaacaggattccctctgcctgagggacctacttcctctacaggctcctccatcctccttctgagacgactccatctaagaacaccttcctcttccgcctct

SEQ ID NO: 1017848 - DNA, 120 bp, Artificial Sequence
  ENSG00000249111_0 (sequence is synthesized)
ctcattcatttgtgtcagtgaggactgaggaatgatgagaattaaaatcatggccccattaaactaaagaaatcaaatcacctcattcttaaagtcttgagaagatgagataaacttaaa

SEQ ID NO: 1017849 - DNA, 120 bp, Artificial Sequence
  ENSG00000249111_1 (sequence is synthesized)
ttgggaacttctgcatgagcaagtgattcttggatattcctgtaaatccattctgaatatggtaagtaatactgaagaataactgttttcgagtgctttatctgcatgtatcaaaataaa

SEQ ID NO: 1017850 - DNA, 120 bp, Artificial Sequence
  ENSG00000197794_0 (sequence is synthesized)
gggacattgtgctgacccagtctccagcctccttggccgtgtctccaggacagagggccaccatcacctgcagagccagtgagagtgtcagtttcttgggaataaacttaattcactggt

SEQ ID NO: 1017851 - DNA, 120 bp, Artificial Sequence
  ENSG00000197794_1 (sequence is synthesized)
cactggggtcccagccaggttcagcggcagtgggtctgggaccgatttcaccctcacaattaatcctgtggaagctaatgatactgcaaattattactgtctgcagagtaagaattttcc

SEQ ID NO: 1017852 - DNA, 120 bp, Artificial Sequence
  ENSG00000269621_0 (sequence is synthesized)
ggttaattcccatcagataacatccaccacagaaaaggtaccaaccaagcagatggaatgacttagccaaataatgttaaccaggctttgttgctggcaccccaatgctggcaaagtgat

SEQ ID NO: 1017853 - DNA, 120 bp, Artificial Sequence
  ENSG00000269621_1 (sequence is synthesized)
caatgaacggaggagccatggtggagcaaatgcaagggttcaacgtcatggactcatcaagtctgatctaactactgcatcagtgaatgtccagcttgccagcaacagagaccaacactt

SEQ ID NO: 1017854 - DNA, 120 bp, Artificial Sequence
  ENSG00000269621_2 (sequence is synthesized)
cgtctagccacttggtgcagcaaacctctgtgactcaaggaaatctcagttggatgtcctgtctcatctactcaagaccagtaagcaacacttacttaaaaagaacatattctctttatt

SEQ ID NO: 1017855 - DNA, 120 bp, Artificial Sequence
  ENSG00000269621_3 (sequence is synthesized)
tctgcttgggatacaaatgttcagtttggatgatgagaatgaggcaagtactggagacaatggctggctctcctgtttgtcccaataaactccaatggaggaagaagctaaacaggtttt

SEQ ID NO: 1017856 - DNA, 120 bp, Artificial Sequence
  ENSG00000269621_4 (sequence is synthesized)
ggatggtttcggtctactgcatctagcttatcaaatctacagcctggtacttctggaacaggacttccctgccccagtgatgacagttaaagatggcaaaaatgaagaattcaacatgta

SEQ ID NO: 1017857 - DNA, 120 bp, Artificial Sequence
  ENSG00000259481_0 (sequence is synthesized)
ttagtgagttggtcttaacatgtttgagaatgaagggtagccattctaccattaaacagccactaaagagagccctttcctaaaaacattatctcctggaagaacattgagctcttttca

SEQ ID NO: 1017858 - DNA, 120 bp, Artificial Sequence
  ENSG00000259481_1 (sequence is synthesized)
aatgtggaatcctagaacagagaaaggacgctggcagaagaatgagtcaatccaataagcagggccaagactgataacgaatggcccgtgggaagcgcacgaagtccaacgtgaatcaac

SEQ ID NO: 1017859 - DNA, 120 bp, Artificial Sequence
  ENSG00000259481_2 (sequence is synthesized)
gatagcactaatgaaattgcttcaagttctagagcagaagatggtaagctcctgaggccacatcccacgagtgtcaaaagggacgaaatgtctgaccacttactgagcacctaatatgta

SEQ ID NO: 1017860 - DNA, 120 bp, Artificial Sequence
  ENSG00000274698_0 (sequence is synthesized)
gttcttcatgttccgctatttctagctgttggccctactcgtttctgtgcctaaatgccctacctcccactccttttctgagaaagatcttctgccctgtcagttatgaagtaaagatgt

SEQ ID NO: 1017861 - DNA, 120 bp, Artificial Sequence
  ENSG00000274698_1 (sequence is synthesized)
cctaagattcctgctctttcttttttctttctttctttctctctcttttttttttttttcgacggagtttcgctcttgttgcctggagtgcaatggctggagtgcaatggcgcgatctca

SEQ ID NO: 1017862 - DNA, 79 bp, Artificial Sequence
  ENSG00000274698_2 (sequence is synthesized)
cccctgctcttctttcaaccctctgctcagcatcttaggcctcattggtgatgtcccaccttgctaggtagcatctttc

SEQ ID NO: 1017863 - DNA, 120 bp, Artificial Sequence
  ENSG00000274698_3 (sequence is synthesized)
cctcattggtgatgtcccaccttgctaggtagcatctttcctgaatatttctccactaaacattctgatgttggctagatggcctagttaatctacacatttcattttatcaccttctcc

SEQ ID NO: 1017864 - DNA, 120 bp, Artificial Sequence
  ENSG00000274698_4 (sequence is synthesized)
agatgtttttttgtgtatgtcagctgatacactctggggagaatgccttaatatatgggaataattaactcatggccaagaaggaaataaccaaggggacttttactctggacctaattc

SEQ ID NO: 1017865 - DNA, 120 bp, Artificial Sequence
  ENSG00000274698_5 (sequence is synthesized)
aaaccaaagagacagagcctgagagaaagcagctctgtcatccttgagttagtaacatccaggaagggaaggctagggtgggggagtgagtaaaacagatggcatttagggaagaaccaa

SEQ ID NO: 1017866 - DNA, 120 bp, Artificial Sequence
  ENSG00000274698_6 (sequence is synthesized)
caggactttaagaggcatggcagaggggctttgatcctggctaaaccatcagggaaggcaattggagctgggtgaacagatggggtcttattactgaagagaaaacggtaaggaggcagg

SEQ ID NO: 1017867 - DNA, 120 bp, Artificial Sequence
  ENSG00000274698_7 (sequence is synthesized)
gggaaatgggacgtgtgctaaagcagagtgcctcattcagtggatgcagtgagagcagaggctgttggaaaagtggatcagggaggaccatgccaccaggtgggcatcagcagagtatca

SEQ ID NO: 1017868 - DNA, 120 bp, Artificial Sequence
  ENSG00000274698_8 (sequence is synthesized)
caatttcagttttggcaaattgttataaataggaaaaagtcagggttccacaattctggcagcacccagagactataacagcatctgcacagccaagtagagttaggaaacctggatcct

SEQ ID NO: 1017869 - DNA, 120 bp, Artificial Sequence
  ENSG00000274698_9 (sequence is synthesized)
aatcctgactttgcctctgattagatgtgtgatcctgggctggagctgttttttcagttgtaaaatgctgtttattggtgttaggtagcagctaataaggctggaggtggggctgggtgt

SEQ ID NO: 1017870 - DNA, 120 bp, Artificial Sequence
  ENSG00000274698_10 (sequence is synthesized)
agtggctcacacatgtaatctcagcagtttgacaggccaaggcaggaggattgctggaggccagggatttgagaccagcttgggctacatagtgagactctgcctgtactaaaaattaaa

SEQ ID NO: 1017871 - DNA, 81 bp, Artificial Sequence
  ENSG00000274698_11 (sequence is synthesized)
tgggctacatagtgagactctgcctgtactaaaaattaaaaaaaaaaaaaataactcagtgcgggtgggagggttgcttga

SEQ ID NO: 1017872 - DNA, 120 bp, Artificial Sequence
  ENSG00000274698_12 (sequence is synthesized)
accactgcattctagtagcctgagtgacagagcaagacctgtctctaaaaaaaaagaaattttttttaagggtggaggtagggaaattcaaagctacttactagctgtgtgaccttgcct

SEQ ID NO: 1017873 - DNA, 120 bp, Artificial Sequence
  ENSG00000274698_13 (sequence is synthesized)
aaactacctccttggatttgcagtctgtttatttgaaaatgtcataagggataaatgagattccttatgtaaagtactttataaatattaagcacttaccaaatgttagtctgttttcac

SEQ ID NO: 1017874 - DNA, 120 bp, Artificial Sequence
  ENSG00000274698_14 (sequence is synthesized)
attattcttcttggattaccagaaattggtttgaccatgaataaacaggagataatttcttgggtaatctgagtttgaatcccctttctctctcttactaattgtatgactttgattagg

SEQ ID NO: 1017875 - DNA, 120 bp, Artificial Sequence
  ENSG00000274698_15 (sequence is synthesized)
ttatttaatatttaattgttctgggtctcagttttctcatttgtgaaattaaaatgtgttcttcagaattgtgagggttaaatgtgataaaaggcctgactcatatgagaaaatgctcaa

SEQ ID NO: 1017876 - DNA, 120 bp, Artificial Sequence
  ENSG00000265139_0 (sequence is synthesized)
ttgatgagaagctaagttttattattataattacaaattaattacagagaaactgaagccattcttcatacatgacaaacatacatttcctctgtgtgtacagcacacaagtaatataca

SEQ ID NO: 1017877 - DNA, 63 bp, Artificial Sequence
  ENSG00000265139_1 (sequence is synthesized)
atacacaaatatattccatgtctgaacaaatcctttttaaaactttaaaatgagccaccacac

SEQ ID NO: 1017878 - DNA, 81 bp, Artificial Sequence
  ENSG00000274695_0 (sequence is synthesized)
aactgtctcaaaataaaaaataaaaaagaaagcaatagaactcagacttcaatgaaaggcttatatctaattatgagtcca

SEQ ID NO: 1017879 - DNA, 120 bp, Artificial Sequence
  ENSG00000274695_1 (sequence is synthesized)
tcagacttcaatgaaaggcttatatctaattatgagtccagtgctgcttccactttgcagttggtagaggagacagaatctttgagtattttttctaagactgataggtttgacgctcag

SEQ ID NO: 1017880 - DNA, 120 bp, Artificial Sequence
  ENSG00000274695_2 (sequence is synthesized)
gcaaagtctagagtaaaattaacattaaacatggaatgaaagcaaagcaaatgatttgaatcatgtgataacccagtgtccaaacagtgctcaatacactctgccatttttgaatgatag

SEQ ID NO: 1017881 - DNA, 120 bp, Artificial Sequence
  ENSG00000274695_3 (sequence is synthesized)
catttgagaaaactaaagctaagtttaaaaaaacaaaaaagtgagccaagaccacatctggcaagatcacatttatatgcaatggccagaataggcaataggcaaatccatacagacaat

SEQ ID NO: 1017882 - DNA, 120 bp, Artificial Sequence
  ENSG00000274695_4 (sequence is synthesized)
gcagattagtacagtttcctgatactgggggaggggaggggaagattggtgcacatctctgtgaatgtactaaaaaaccactgaattctacagtttatataagtgaattatatggtatgc

SEQ ID NO: 1017883 - DNA, 120 bp, Artificial Sequence
  ENSG00000274695_5 (sequence is synthesized)
gaatatgtctccataaagctggtaccaaaagaaagtgaactaatagttacagtttgaaaggtttcacatataaatttggatgccttgctatttggggaaaataaatgtgagctctggcaa

SEQ ID NO: 1017884 - DNA, 120 bp, Artificial Sequence
  ENSG00000262801_0 (sequence is synthesized)
atggttttataagaggaaaccccttttgcttggctccaattcttctccatgcttccccatgtaagatgtgcctttcaccttctgccatgattatgaggcctcccgagccacgtggaacta

SEQ ID NO: 1017885 - DNA, 120 bp, Artificial Sequence
  ENSG00000262801_1 (sequence is synthesized)
tctgccatgattatgaggcctcccgagccacgtggaactagctggaacacccttcttctcctgcctttggacatcagaacttcagattctctggccttcagacttcaagacttgcactag

SEQ ID NO: 1017886 - DNA, 120 bp, Artificial Sequence
  ENSG00000262801_2 (sequence is synthesized)
tggccccctgggttctcaaggttttggccgcctcggttgagagttacaccatcggcttctttggttctgaggccgttggagttggactgagccatgctaccagcttccctgggtctccag

SEQ ID NO: 1017887 - DNA, 120 bp, Artificial Sequence
  ENSG00000262801_3 (sequence is synthesized)
cctgcagattgcctactgtgagatttagcctccataatcacgtaacagaatattggcatgtagcactcctcaaaacatagaaagcagaaacaaatcaattctgcctggaggacctccccg

SEQ ID NO: 1017888 - DNA, 120 bp, Artificial Sequence
  ENSG00000262801_4 (sequence is synthesized)
atctcaacacccagtggttttgacagaattgatatagaaatagaagcttcaagcaaccttacgatggaggcagaagaaggattctatggttggaaacctgccagactcacaggctacgga

SEQ ID NO: 1017889 - DNA, 120 bp, Artificial Sequence
  ENSG00000262801_5 (sequence is synthesized)
ccaccagactgttggatgcacctaaaacaaattgccctccgtggcttggtttcttattaatatactcatagaaatgcacaagaactgaaagctcgatagggaaaccaaaaaataaaaatt

SEQ ID NO: 1017890 - DNA, 120 bp, Artificial Sequence
  ENSG00000262801_6 (sequence is synthesized)
aaaaaaaaaaagctgtaaaccaatgtttcttaaaacatgctctgcagaacactcgtttggtggaacgtaaagtgttctttcatattaaaggagttgcgtgttaatcgtgtttctctgtca

SEQ ID NO: 1017891 - DNA, 120 bp, Artificial Sequence
  ENSG00000262801_7 (sequence is synthesized)
taggactctcattgcattaatatgtcagtttccattgtgaatttctcaggagagagaggcgagtctgtgatattcctcaaatgcatgaggtcatggaatctaagagcagaagagcattag

SEQ ID NO: 1017892 - DNA, 120 bp, Artificial Sequence
  ENSG00000262801_8 (sequence is synthesized)
gatagcagaacagctttgatagcacaacagctccttgcatgtggtggaaatcacaagttcagggggacattttactggctgtattgtcagtaggatgaatactacacgctgcatcttctg

SEQ ID NO: 1017893 - DNA, 120 bp, Artificial Sequence
  ENSG00000262801_9 (sequence is synthesized)
aactataatacggtatccctgagaaacaaaattagaggaaatattgatcacatctcaccatttccagctaaaactaagatgcagagtctgcaatgccccaaaataaatgtgctcattccc

SEQ ID NO: 1017894 - DNA, 120 bp, Artificial Sequence
  ENSG00000262801_10 (sequence is synthesized)
tgcagattgcctactgtgagatttagcctccataatcacgtgagccaattctcttaacaaatcacttctcatatctttctccttctacatatcttattggctttgtctctgtggagaacc

SEQ ID NO: 1017895 - DNA, 120 bp, Artificial Sequence
  ENSG00000262801_11 (sequence is synthesized)
tatgaggcctcccgagccacgtggaactggtcttcattactccagccaaaaaaatagtaatgaaaatggaaacacttcaaggtttctttgaagactagaaataagttggtgaaggatatg

SEQ ID NO: 1017896 - DNA, 120 bp, Artificial Sequence
  ENSG00000262801_12 (sequence is synthesized)
gggaagtgggatcctgtaggacaatcatggaggtccgatctgcatttgtagattgaaggggcccgagaagaggaagattcacggaacaacttgtctttttaccaaaagctgcctgttaca

SEQ ID NO: 1017897 - DNA, 120 bp, Artificial Sequence
  ENSG00000262801_13 (sequence is synthesized)
gagttccctcatttgtatactttgtggcctcaccagcttgttttctctttgcactctccatttgcctcggactaacatccccctttgccagagtggagctggaacacccttcttctcctg

SEQ ID NO: 1017898 - DNA, 120 bp, Artificial Sequence
  ENSG00000262801_14 (sequence is synthesized)
agcatgaatgggttttatgtgatcataatcccctcacctttccccttgctcaggagaagaggagacataacatcatataacctaaagagtccatttccacacttctgactccctgcaacc

SEQ ID NO: 1017899 - DNA, 120 bp, Artificial Sequence
  ENSG00000262801_15 (sequence is synthesized)
caaagagcatcagagcagccaattaagatgttttattttaaaagttctcagtgaaggaaagtgcaaagaagaggtcacagaacttggagttcaaaaaaaaaaataagaaaaaaagtccac

SEQ ID NO: 1017900 - DNA, 120 bp, Artificial Sequence
  ENSG00000262801_16 (sequence is synthesized)
aaatagaagcttcaagcttccaccgaggtgggaagggcaggtgtcacgatgccatttcagaggcagcaaccaccaagacatggcagtggtcttcatgcaccttctatggtatcgggcttt

SEQ ID NO: 1017901 - DNA, 120 bp, Artificial Sequence
  ENSG00000262801_17 (sequence is synthesized)
cacttgcttgcttaatcatcatgctgtttaccctctccctggtcaactatttagcataagtgaatatggataaaattgcccagatgaactgttgctcactacatattgcatttgtaggtt

SEQ ID NO: 1017902 - DNA, 120 bp, Artificial Sequence
  ENSG00000262801_18 (sequence is synthesized)
agagtaaataacatctgatagaaagtgtcattacaattaaaaaaaaaaagagagagagcttcagatgcccagtgttgtacccaagctaaagatgaaggatggcatttggaaagggcatat

SEQ ID NO: 1017903 - DNA, 120 bp, Artificial Sequence
  ENSG00000262801_19 (sequence is synthesized)
tgactcaacactgagtccctggttgctacccacagtctggatggcttgctggtagcctgggaagcgagggtggaggggtcagtggctttgtgttggaaattgtggagcagagaagaaaca

SEQ ID NO: 1017904 - DNA, 120 bp, Artificial Sequence
  ENSG00000262801_20 (sequence is synthesized)
actattgcaaaagtttcctgcaaccacagagaacgtgtccagagtgatttattgcaactggagtttcattatttccttctgtctaggggattctgtgtgtaggtttctgctgacctcctt

SEQ ID NO: 1017905 - DNA, 120 bp, Artificial Sequence
  ENSG00000262801_21 (sequence is synthesized)
ccccaggaagcgagaacagaatgtgacctctccttgttctttattgagtccaagtgctcaaatgcaccttcaggtcagacgcaaacccatgagggatctactttgagcccacaatcatgg

SEQ ID NO: 1017906 - DNA, 120 bp, Artificial Sequence
  ENSG00000262801_22 (sequence is synthesized)
aattctgatgtgctacaaggtggcagtaaaaatggaaaccatcattcctgatattttaagccagtaccatgttccagtcatactatatcaccgaatctaaaatgacttcaataactttca

SEQ ID NO: 1017907 - DNA, 120 bp, Artificial Sequence
  ENSG00000262801_23 (sequence is synthesized)
cttttgtttcatgtaccactaagaaaaaaaaccctccatccaataacctaggatataccctcaattgtaagtcacattccaattccagagatgataaaatgtggtaaacatgtgtctgaa

SEQ ID NO: 1017908 - DNA, 120 bp, Artificial Sequence
  ENSG00000231138_0 (sequence is synthesized)
aaaatggctaatgatccaatattcgctgagaaacacagggccaagatgtaactatcctctcatcaaaaccgtaggaattctgtgaatacagaagttcaaacaccggatggaaatggggag

SEQ ID NO: 1017909 - DNA, 120 bp, Artificial Sequence
  ENSG00000231138_1 (sequence is synthesized)
aaaatgaaaactgccttttttttagagtagtgggttcgtggaggatttgtctttaggcttttggtttgcatttgatgctgacacaatattgtttatccagtgaatgcaagtttttgtttt

SEQ ID NO: 1017910 - DNA, 120 bp, Artificial Sequence
  ENSG00000231138_2 (sequence is synthesized)
gttttgtttgtttgtcttttaaagaggagagtggagaagaggaaagttctcttctgccatcgttcctcatttgtctgagaaacaggcaccgcacctggcccaatggaaaagaaattccag

SEQ ID NO: 1017911 - DNA, 120 bp, Artificial Sequence
  ENSG00000231138_3 (sequence is synthesized)
gcacaccaggcctctctctctccccaactcactccaacgggtgacctccactgggcagcctgcctcaggaatgcctctcctctcatccttcttcaggcacagaggcccgccctccataca

SEQ ID NO: 1017912 - DNA, 120 bp, Artificial Sequence
  ENSG00000231138_4 (sequence is synthesized)
acttccagaaagacagctctgcacacctaaagaacctcccagacccctgcatcaggacaacagcctctcctggcactcaggaccagcctcctcctagctgcctgcaaattgtcacagaac

SEQ ID NO: 1017913 - DNA, 120 bp, Artificial Sequence
  ENSG00000231138_5 (sequence is synthesized)
acacctgtcggctctgaccccatgccttcactcttgctgtcctctctgctcagagcaccctcccaccacccctgcctgccagtgccagccacgcacgttggatgacagctgaccccctct

SEQ ID NO: 1017914 - DNA, 120 bp, Artificial Sequence
  ENSG00000231134_0 (sequence is synthesized)
ggcagccatggtagccatagagcatatgggcccacactgcttgcatttaaattttcactcctgttgtttccatgatgagcattcctcaggttctatgccataaatttataatttgggaaa

SEQ ID NO: 1017915 - DNA, 120 bp, Artificial Sequence
  ENSG00000231134_1 (sequence is synthesized)
ggatttgattcgttgggagttggtgatgtgcctgatgtatctgtaacaggaatatcccattcttcaaccatgctgcacacagagttaggagtcccaaagaaggcatttgcctgaataatt

SEQ ID NO: 1017916 - DNA, 120 bp, Artificial Sequence
  ENSG00000231134_2 (sequence is synthesized)
ccataaaacgtgtatgtaaaagaagtcataaacggaggaaggaaaatactagatcctcctctcagctgtcagctaaagaagacctgatactctgattcaccccaagattcaaagctctca

SEQ ID NO: 1017917 - DNA, 120 bp, Artificial Sequence
  ENSG00000231131_0 (sequence is synthesized)
tgagctgaaatatgagttgtccaactcttgtaagtgcatgctccatcacatcatcctgagtcagtaatgaggatgccattgtacccttcaagcagccctggagagtttatctctgcatgc

SEQ ID NO: 1017918 - DNA, 120 bp, Artificial Sequence
  ENSG00000231131_1 (sequence is synthesized)
tggagctaataataatagaatctcaagagccttcaaacatccatattatgctgatgtcttttaaggtgattcaactcagcatatgttgtttgaagccgtgagactgagtgagatcatgga

SEQ ID NO: 1017919 - DNA, 120 bp, Artificial Sequence
  ENSG00000231131_2 (sequence is synthesized)
aaggagactgagaaggggcagccagtgaagatggagccagggctagagtaagagccccttctgggatgctgtgacccccaagtttgaagactgctgataaccccaatctacgaagactag

SEQ ID NO: 1017920 - DNA, 120 bp, Artificial Sequence
  ENSG00000231131_3 (sequence is synthesized)
ctatggaacttcctacactgagacaactccagtggaactctgataattatcctaaaataaggaggcttcttcagtagccctcgaaatatgttcaaatacatgattacatttatgtcctta

SEQ ID NO: 1017921 - DNA, 120 bp, Artificial Sequence
  ENSG00000231131_4 (sequence is synthesized)
agacagaagaggcgacgttgctttcttaaccactggatttgcagtgctgtggttctcagaagaggccaggacaggttaatccactcacttgggaggcaggcagccggtgcagagctgaga

SEQ ID NO: 1017922 - DNA, 120 bp, Artificial Sequence
  ENSG00000231131_5 (sequence is synthesized)
atttaccccaggctaccagccttccggctgagagagcaagctgacgcacggttcctcagctgtcccatggagcctgttgcggccatccacctccttcaaagggtatgtggattctctcag

SEQ ID NO: 1017923 - DNA, 120 bp, Artificial Sequence
  ENSG00000231131_6 (sequence is synthesized)
ctttcctggttgaatgtacagctggtataaaaatggtgctttgtcgtcatgaagaaggtgtattctgggatcaaaccacctggctggagatgcttactaacctcagtttcttcatctgct

SEQ ID NO: 1017924 - DNA, 120 bp, Artificial Sequence
  ENSG00000231131_7 (sequence is synthesized)
gatacacttggggggacataaagggaaacccacacacccaaggaggagggctctggccatgcaaggctgaaggcccagtgtactgatatgaaaactgaagctcagacagaagaggcgacg

SEQ ID NO: 1017925 - DNA, 120 bp, Artificial Sequence
  ENSG00000231131_8 (sequence is synthesized)
ttgctttcttaaccactggatttgcagtgctgtggttctcagaagaggccaggacaggttaatccactcacttgggaggcaggtacccacatttctctccagctgttacctccaaccttt

SEQ ID NO: 1017926 - DNA, 120 bp, Artificial Sequence
  ENSG00000231131_9 (sequence is synthesized)
agttccaccggtcaaagaagatattttgttttgccttgtcctttgctaaagtgatggtacttgtttgctttctctctgacagaaaatggcagctttggttgttccctcttcctgccaatt

SEQ ID NO: 1017927 - DNA, 120 bp, Artificial Sequence
  ENSG00000231131_10 (sequence is synthesized)
cctgttgttttcagtcattttaattttagccttcttctggaaggtgcgagtggtatctcagcatgatttcctatttccctcatgaaaaatgatatcaaatactttagagtttcttcatca

SEQ ID NO: 1017928 - DNA, 120 bp, Artificial Sequence
  ENSG00000231131_11 (sequence is synthesized)
aacttttgtgtttcttctcttgtgcattttctattcaagtcctatgcctacttttaaaaatttctttacatttttattgataaataaaatgtaagcattttaatgcttaatgaaatgctt

SEQ ID NO: 1017929 - DNA, 120 bp, Artificial Sequence
  ENSG00000231131_12 (sequence is synthesized)
aacagtctcctcattttatcactggtgtcttttgatgagcagagttttcatgtttaatgaaaagtaatctacactttttttcttttttcattagcattttaatttgctacccaaaacatt

SEQ ID NO: 1017930 - DNA, 120 bp, Artificial Sequence
  ENSG00000231131_13 (sequence is synthesized)
cttgactactcctatttcatgaagctattcttctgttttctcttaaatgactcagcttttcacattttgacttagcttttacatttcttgacttaacttttacattatgctcttatatta

SEQ ID NO: 1017931 - DNA, 120 bp, Artificial Sequence
  ENSG00000231131_14 (sequence is synthesized)
atactgagttaatttgcattgatggtgtgtgggagtattcaaggcagattatctcttttaataaatctacagtgatctaagcaatatttgtacaaaagtatttccagtctccattaaaga

SEQ ID NO: 1017932 - DNA, 120 bp, Artificial Sequence
  ENSG00000231131_15 (sequence is synthesized)
tcatttatatctatatggaagtttaaaagaccacttatatgtacaaatgtatgcatgaattatctattctattccactggtttattgatgcatcccatgccaattcaacactgttttaat

SEQ ID NO: 1017933 - DNA, 120 bp, Artificial Sequence
  ENSG00000231131_16 (sequence is synthesized)
tgctatgtcttatagtttaagtctgaaaatatgagtataattcctcagataatacatgctatatcaattgtagaataagctggttaatttctctggaattttgattaaaatggagttgac

SEQ ID NO: 1017934 - DNA, 120 bp, Artificial Sequence
  ENSG00000231131_17 (sequence is synthesized)
tcttgagatcacggtgttgagaactgacattgtacaatactgattcatctatgttccaatgaactgttgctaaaaatatagaaataaaaatgaatgtgtacattacccttaaatgtaaaa

SEQ ID NO: 1017935 - DNA, 120 bp, Artificial Sequence
  ENSG00000231131_18 (sequence is synthesized)
gaagctcagacagaagaggcgacgttgctttcttaaccactggatttgcagtgctgtggttctcagaagaggccaggacaggttaatccactcacttgggaggttgaatgtacagctggt

SEQ ID NO: 1017936 - DNA, 120 bp, Artificial Sequence
  ENSG00000231131_19 (sequence is synthesized)
ctttgtcgtcatgaagaaggtgtattctgggatcaaaccacctggctggagatgcttactaacctcagtttcttcatctgaccttacctttctaaaagaataagaagaagatgatacata

SEQ ID NO: 1017937 - DNA, 120 bp, Artificial Sequence
  ENSG00000231131_20 (sequence is synthesized)
ttcctctaaagtcccaacaggaaccttttcccctcactccctccccagagatgtgtatcatttccatgagtgtctgtacttttacaacatgtgcatattaataaacaaaatatgacaaat

SEQ ID NO: 1017938 - DNA, 120 bp, Artificial Sequence
  ENSG00000231131_21 (sequence is synthesized)
attcaagatgatgttagagagatgacagagtctaggttagggagggcctgagtccttgtagactctgagtacggtgctgagcagggaagagacaggctctggcttagggtttagaaggaa

SEQ ID NO: 1017939 - DNA, 120 bp, Artificial Sequence
  ENSG00000231131_22 (sequence is synthesized)
cacaggctactgcgatgaggattgtctgaaggggaacaaaggccaagatgttgtttgaagccgtgagactgagtgagatcatggaggaagtgaatgtaaatagaaaagggaagaagtctg

SEQ ID NO: 1017940 - DNA, 120 bp, Artificial Sequence
  ENSG00000231131_23 (sequence is synthesized)
ccagagtaacttctcagagggtgtatattcagtgtgaacaattttcaacagagaaatgtcaacttctggccacaacggcaaccagtaaaatgactatttttactgtcttatctattaatg

SEQ ID NO: 1017941 - DNA, 120 bp, Artificial Sequence
  ENSG00000231131_24 (sequence is synthesized)
aagaggagattgcataatatagatgaaggagcatagtatttgcaggtggaacgcctagcagggcttgagtctcaactctgctgcttttactctaattgaccgagacaagtcatttaaact

SEQ ID NO: 1017942 - DNA, 120 bp, Artificial Sequence
  ENSG00000231131_25 (sequence is synthesized)
aatagagcttcaattttctcatatctaatgtaacataacaattcacagccttttactttgtagttatcgtgaagatctaatcgcagtgaaatatatttatatatctgtctgctgatagaa

SEQ ID NO: 1017943 - DNA, 120 bp, Artificial Sequence
  ENSG00000231131_26 (sequence is synthesized)
caccacttttgcaactttcactattatatattttgaagattatccgtgtttatgcacataagtttatcattttaactgttgaatagtgtttcattatatgaattaaccataattcatcta

SEQ ID NO: 1017944 - DNA, 120 bp, Artificial Sequence
  ENSG00000231131_27 (sequence is synthesized)
tttccctgagtgacaattaggtttctttttgtttttatgctctgatgaacaatcttgcaattattatctttgtatatgtcttcatgtataagaaattctccagggtagacacttagaagt

SEQ ID NO: 1017945 - DNA, 120 bp, Artificial Sequence
  ENSG00000231132_0 (sequence is synthesized)
catgaagccttctcaaattccaacagttacagttaaggtcttcagtctcagtgttctcttagcacaatgagaacactttttactaggcagagactgcatctcattcatcttgctacatgc

SEQ ID NO: 1017946 - DNA, 120 bp, Artificial Sequence
  ENSG00000231132_1 (sequence is synthesized)
gagcaaaagagaaatctgttggcagtacagtgcttgccacattcctgttgctaagcaaagggaagctagggagaagaggaaaagcgaaggtctgtgaatcaggggcagtaaaattctaat

SEQ ID NO: 1017947 - DNA, 120 bp, Artificial Sequence
  ENSG00000231132_2 (sequence is synthesized)
caactcttggtgttatgcttggctgactttctagagaaggaaaggcagcagtctgcattggtatatccaaaggctcaggaatgtagtcccagtattcacaaaggaaaacgcttccactgt

SEQ ID NO: 1017948 - DNA, 120 bp, Artificial Sequence
  ENSG00000231133_0 (sequence is synthesized)
ggttaaaacccgcgcgctgcagcatcgcggaaaacgggattcgcctcatttgaaacttgaggaaaatctctaaacactttcattttgatagaaaccatttccgccgctgacgtgcgtcta

SEQ ID NO: 1017949 - DNA, 120 bp, Artificial Sequence
  ENSG00000231133_1 (sequence is synthesized)
aaagctggcaagactcagcagaaaaaaaatatcgaaagctgcttctgctgccccagcttcactcaggccctggctgctccttcactggtctacactgctgcctcctggaaccacccactc

SEQ ID NO: 1017950 - DNA, 120 bp, Artificial Sequence
  ENSG00000231133_2 (sequence is synthesized)
tgcaaccaggtaaagagtatggcctcctagataccgacctcatgccatacggatgcagtcaggctctggcggtcaggaaggtggctccggagctcggctctgcaccgcatcctctgcccc

SEQ ID NO: 1017951 - DNA, 120 bp, Artificial Sequence
  ENSG00000231133_3 (sequence is synthesized)
tccctgggaggccctgacagcgcttctctccctcccattttcgctctggcagccatcgtggcgcagaccgtggagcaggggcagctcttacccctgggtctggcatcaggagcgtgtccc

SEQ ID NO: 1017952 - DNA, 120 bp, Artificial Sequence
  ENSG00000231133_4 (sequence is synthesized)
accggctctgttgccgcagcctcaaagccccacgtggggcagcagccggatcggcactgggggagccggaatccatcaacctcggcctcagatcagcatccgcccagccctcctgcccca

SEQ ID NO: 1017953 - DNA, 120 bp, Artificial Sequence
  ENSG00000231133_5 (sequence is synthesized)
catccgagccatttcaagggctgcagggacattgggatgatggggaagtgggccgaggacagccccagggaaggctttgtctgaactcctcaaatcaccgggcgctgacatttgggattt

SEQ ID NO: 1017954 - DNA, 120 bp, Artificial Sequence
  ENSG00000231133_6 (sequence is synthesized)
ttgccttcctggcgcacccccaccccacatgcacactcacgtgcatggcgtcggcaggatgtgggtgctgcagaggtgcccccacttctgtgtctcccacgcagccccgggaacctgggc

SEQ ID NO: 1017955 - DNA, 120 bp, Artificial Sequence
  ENSG00000231133_7 (sequence is synthesized)
cccacaggagccaggagctgcagcacagggtgcggctctgcaattcgccttccggtctgtgagtgactccgagtcagcacccaccttgccttgctgcttaatcaaggagagtgctgctgc

SEQ ID NO: 1017956 - DNA, 120 bp, Artificial Sequence
  ENSG00000231133_8 (sequence is synthesized)
ccccgacccagcgtctctcgtggggtcaaggttacaaggaaggcgggccaggggcgaggcctgcctctgtccacaggcagacacggatgccgaggctggaaggaccttcctggccctctc

SEQ ID NO: 1017957 - DNA, 120 bp, Artificial Sequence
  ENSG00000231133_9 (sequence is synthesized)
ctaacggaggccccgagaggggaggaggctgcagggatcatccagcccctcagggcagcactcagaccagcctcagggccatcagccaggacggccggtatccttgactcttgcttcagg

SEQ ID NO: 1017958 - DNA, 120 bp, Artificial Sequence
  ENSG00000231133_10 (sequence is synthesized)
tcccaacactctatttcaaggggatgctgggccctccccaataactccccaccgtgtcccaggagagcctccagctggccaagaagcctcacctggctcacagctttgctgcccttaaac

SEQ ID NO: 1017959 - DNA, 120 bp, Artificial Sequence
  ENSG00000231133_11 (sequence is synthesized)
tgaggtcacaacaggccctggtgtcagtgcagccttggctcccaagggtgacacatccgcgcctttccgtggatcccaggctggtgtggggagggtgtcaggtgggcaggtgggctgcca

SEQ ID NO: 1017960 - DNA, 120 bp, Artificial Sequence
  ENSG00000231133_12 (sequence is synthesized)
ggatggctggcacaggggttcctggggcctgggacatccagggatgggaacgggcaggtgtcctggggaagggaaggctggcccgagtgtcgctgaggccttgagaatgccctgagcaga

SEQ ID NO: 1017961 - DNA, 120 bp, Artificial Sequence
  ENSG00000231133_13 (sequence is synthesized)
gcagaagctacgtccgggggtctctgggccacaaatcactttctgacctgcagccgtgaggcgtgaggctcactcggaagctcccggaacctggagactgccctcactcaacacttgaac

SEQ ID NO: 1017962 - DNA, 120 bp, Artificial Sequence
  ENSG00000231133_14 (sequence is synthesized)
aagcaaggggccaggttcaatgaaacacctgcccgcccggcacaccaggctcaaaagcaagcaagcaagcaaacaaacaaacaaaatcaaatcaggccttcacaactccccaaatcatgt

SEQ ID NO: 1017963 - DNA, 120 bp, Artificial Sequence
  ENSG00000231133_15 (sequence is synthesized)
gtgagtttctacagagcagaagccaaaaatatatgttatctaactaggtcctatttacatatatttttatggctgctctaaaaaattatcacaaacatagcggcttcaccccgtttcccc

SEQ ID NO: 1017964 - DNA, 120 bp, Artificial Sequence
  ENSG00000231133_16 (sequence is synthesized)
tgttgtgattattacacattggatgcctgtatcaaaatatctcatggaccccataaatagcaacaccctgtatgtactcatgacaattttttaaaaaagaacacttacactttccatttc

SEQ ID NO: 1017965 - DNA, 120 bp, Artificial Sequence
  ENSG00000231133_17 (sequence is synthesized)
cagatacaacaaacaaaaacgcagcaaacaaaaacacagggtgcccagctcaacaggaagtttggagaagcagtgactgattttttagtgtaaagagtatggcctcctagataccgacct

SEQ ID NO: 1017966 - DNA, 120 bp, Artificial Sequence
  ENSG00000231133_18 (sequence is synthesized)
aaggtggctccggagctcggctctgcaccgcatcctctgccccctgtttcccgagattgctcctggacacacctttctctcccgccctgtggggtacacagcacccatgacagcttctgt

SEQ ID NO: 1017967 - DNA, 120 bp, Artificial Sequence
  ENSG00000231133_19 (sequence is synthesized)
gggacaagaaacggtgcggggcgaggagggcgggaggcggaggaagcagatctgggtctgggttctgtttgtggagtggaaatgtaagaaccaggcgagctgaccgggtggctgggccgt

SEQ ID NO: 1017968 - DNA, 120 bp, Artificial Sequence
  ENSG00000231133_20 (sequence is synthesized)
gtggacccagatcagcactgtgccatggtgctctcgagagccaaagagccagcccaccttgcagggctgggcccgtctgttccagaaaccacatctgcagccatacggcagcagctgcct

SEQ ID NO: 1017969 - DNA, 120 bp, Artificial Sequence
  ENSG00000231133_21 (sequence is synthesized)
gttgacggcagcgttggatcctctgaccacagctgaagctttgaccaacaaaagtcccagggagctgctcagggcgggatcagaaaagagggtgcttagcaagccacacgccacacaccc

SEQ ID NO: 1017970 - DNA, 120 bp, Artificial Sequence
  ENSG00000231133_22 (sequence is synthesized)
ggggaggccggtctcctcgcgagggcctgggccgctctgggcgctcggcccgcgtgtcgggggctccccggggcgccctgggctcctgctgctgtttcttcctggccggccttgaggtgc

SEQ ID NO: 1017971 - DNA, 120 bp, Artificial Sequence
  ENSG00000231133_23 (sequence is synthesized)
ggagcccccgggctctgctgagggcctcccggccccgtggcctcggtgacctcggttcaggcgtccgtgaccgtctcgcctggtggctccgcgccgctgacctcggcacgccgcgggcct

SEQ ID NO: 1017972 - DNA, 120 bp, Artificial Sequence
  ENSG00000231133_24 (sequence is synthesized)
cctccgtcttcagagccagtggtgtctcgtcactgagacctgctctgccctccgcctctatgttgaagggcccgagattctactgggtccccccggataatccagggtcacccctccgtg

SEQ ID NO: 1017973 - DNA, 120 bp, Artificial Sequence
  ENSG00000231133_25 (sequence is synthesized)
tcaggcggctgactggcagcctcatgtgtccacagtttccgtgcaccgggaggtgggcatgtttaggggcccccattctgcctcccatgagtctgcagggcctgactttgtaatttggga

SEQ ID NO: 1017974 - DNA, 120 bp, Artificial Sequence
  ENSG00000231133_26 (sequence is synthesized)
aagcagtgactgattttttagtgtaagtctgtcccaaatattgtagaatccatccaaacgctgccggacaccctgtgtctcagccgcaggatggccacgctgcacacttagtgcgggccc

SEQ ID NO: 1017975 - DNA, 120 bp, Artificial Sequence
  ENSG00000231133_27 (sequence is synthesized)
ggagctgccggtgcagaagggggtttctgagttggagggatgcaggtgcggttcccccccagcttccttgggatgcccagtgtggacatacagggatgaggtcccctggggctaaacgaa

SEQ ID NO: 1017976 - DNA, 120 bp, Artificial Sequence
  ENSG00000231133_28 (sequence is synthesized)
tgaacagtttttgaaaagcagaagctacgtccagggggtttctgggcctcaaattgcgcagacttgcggtgctggggagacgttttgcctgcaggcagcaggctctgaattgccctttag

SEQ ID NO: 1017977 - DNA, 120 bp, Artificial Sequence
  ENSG00000231133_29 (sequence is synthesized)
ctcccgacctggggtacagcgagaaggaggagacggaggcagaccggcacggggtggtcagggacagcggtgctgacacacggctgctcaaagatgacttggaactcgaggcccagctcg

SEQ ID NO: 1017978 - DNA, 120 bp, Artificial Sequence
  ENSG00000231133_30 (sequence is synthesized)
ttattctgggggtgactggctcccagtgtctggacgggtctgagccccaccacagctggcctggactggactggaaaccgtgcccattaacgacccctgggccacccagagcccccagct

SEQ ID NO: 1017979 - DNA, 120 bp, Artificial Sequence
  ENSG00000231133_31 (sequence is synthesized)
ccggagaccccggggtctggtttgtggctgtttgtcgcccacgggcccctccaccagctcctttcggtgagtgttgattcagggagaaccggacggtcaggcactggtttactctctgga

SEQ ID NO: 1017980 - DNA, 120 bp, Artificial Sequence
  ENSG00000231133_32 (sequence is synthesized)
ggaaagcaggaagctgagaaaagcacttcactgctgccacactgagtgtggcttgtttcctagagaagcctctgtgtggtggtcccggccaggccgcggagcagcgcagccttgggggcg

SEQ ID NO: 1017981 - DNA, 120 bp, Artificial Sequence
  ENSG00000231133_33 (sequence is synthesized)
aggcaccctcccctccccatgcccatggggctctccttcgggacttcagcaccaggggaagttctttctccagagcagccgtcttggccttcaggctggagtgcggctcacagaggccgg

SEQ ID NO: 1017982 - DNA, 120 bp, Artificial Sequence
  ENSG00000231133_34 (sequence is synthesized)
gcagccaggagacagcggctctgggatattccaaacatactggagagctcacgtgtgtgcacagggaagggcggccggtgagcttgaactgagggtgcggtcaccagccaagttttccaa

SEQ ID NO: 1017983 - DNA, 120 bp, Artificial Sequence
  ENSG00000231133_35 (sequence is synthesized)
tgaactgagggtgcggtcaccagccaagttttccaaggaggcgccctccagattcacacctgggtgcagcttgcgatgtttacatttttttatttttttgagatgaagtcttgctctgtc

SEQ ID NO: 1017984 - DNA, 83 bp, Artificial Sequence
  ENSG00000231133_36 (sequence is synthesized)
atacgggggtgagccaccgtgcctggccagcttgcaatttttttagagccgtctctgagttctccagccaccagaaccctcgt

SEQ ID NO: 1017985 - DNA, 120 bp, Artificial Sequence
  ENSG00000231133_37 (sequence is synthesized)
tagagccgtctctgagttctccagccaccagaaccctcgtaaagagggggttgaagctcccttggccacaggacattggagggtaacgtgtaagaagaccttctcagggaaccccctagt

SEQ ID NO: 1017986 - DNA, 120 bp, Artificial Sequence
  ENSG00000231133_38 (sequence is synthesized)
cccgaattctctccctggattcagtaagaaattataattaatttctttttcagtaaaaggcaaagctatttttaaattgcaagcctgattgaattaacaaaatgttagacaattacccgt

SEQ ID NO: 1017987 - DNA, 120 bp, Artificial Sequence
  ENSG00000263477_0 (sequence is synthesized)
catacatcttaatactggtcttcaaggcttgaggacaagtctgctgtggcttgtgggaaaagttttccaccatgacaaaggagatttgagaaaacaaactgccctttctatgcctttgga

SEQ ID NO: 1017988 - DNA, 120 bp, Artificial Sequence
  ENSG00000263477_1 (sequence is synthesized)
tgcagttatgcagatttgatatctagagctgtgacagccattttgtgacctcaaaaagagaggcccaaggacaaaaggaagcaagttaaagatggtagagcagacagacagaactcagaa

SEQ ID NO: 1017989 - DNA, 120 bp, Artificial Sequence
  ENSG00000263477_2 (sequence is synthesized)
ccttgacaactgcattaatcactgtatcaagtctataattgccttgctcctggccttctcatcttaaacattatctcacttttaatatggtattctggtacttcaaaagaaagaatccta

SEQ ID NO: 1017990 - DNA, 120 bp, Artificial Sequence
  ENSG00000263477_3 (sequence is synthesized)
ctgcacttctacagatgcacaggggtgtaattgttgggatccaattattttacgagtaattactttggataaaatttatcacccttaaactttgaaaagattcctgagtgtacaaaagca

SEQ ID NO: 1017991 - DNA, 120 bp, Artificial Sequence
  ENSG00000263477_4 (sequence is synthesized)
caaaagcaactgaggatgccagcttctatgaaagtaactttgatggacagctaccataggtaaagcatttcagatttcttatctcattcaatactaggctgggcgcggtggctcacgcct

SEQ ID NO: 1017992 - DNA, 120 bp, Artificial Sequence
  ENSG00000254552_0 (sequence is synthesized)
agcaaactcccagctgccccttcttactgggccatgacttaactctggaatgtgttttgactcactgactgtaatagtgactaaaaggaacatgtgggagtcatcaaaaatctgcaggtg

SEQ ID NO: 1017993 - DNA, 120 bp, Artificial Sequence
  ENSG00000254552_1 (sequence is synthesized)
gatctgactgtaagaaagagaaacacttaattgggtacttactaaatgtttgtcaaatggatttgaatattttgtgaattttatattcacataaaggattcagaagaaagcgcaactgag

SEQ ID NO: 1017994 - DNA, 120 bp, Artificial Sequence
  ENSG00000254552_2 (sequence is synthesized)
aaatgtccaaatatggtgaagacacttcttctagagtgaaagacataaagaaaataggctaactcctctggggagaggaggaaaaacataatttatatctctatgtataatgaactaaaa

SEQ ID NO: 1017995 - DNA, 120 bp, Artificial Sequence
  ENSG00000254552_3 (sequence is synthesized)
ttctaaaaacccatgatacgtgagagaaacaaaatcagtcctaaaattacggtctgtaagcaaggagactttttttctagaatactatgaaacaatttttttaatggatcatctgttctc

SEQ ID NO: 1017996 - DNA, 120 bp, Artificial Sequence
  ENSG00000254552_4 (sequence is synthesized)
atgatatttctattactccttccagaatgggtttacatattaaataacaaagcagaagctaccatttccagggaagagaatgcatcaaattatttatgattttatcaatcctgattaact

SEQ ID NO: 1017997 - DNA, 120 bp, Artificial Sequence
  ENSG00000254552_5 (sequence is synthesized)
gcacagccacaaaatcaacaccatccttgtcactcctacaggcgcttgatgcctgagttctacatttcctgttttattcctgtgcactcagcacatccatccactttagtgaattgattt

SEQ ID NO: 1017998 - DNA, 120 bp, Artificial Sequence
  ENSG00000254551_0 (sequence is synthesized)
ctggcgttggggttggtgtgactccgatggacagctgggcagctctttccacgatggctttgcagttcttggaggaaacatctcagcacaattacaaaaacttcctctctaatcaaggct

SEQ ID NO: 1017999 - DNA, 120 bp, Artificial Sequence
  ENSG00000254551_1 (sequence is synthesized)
tttaacatgaacagatttcttgaataaaatggaaagtttccagtacactgaaacataaattctcaagttgccatacatacaacacccggcaggaaaaaacaaaaacagcaagtttacatg

SEQ ID NO: 1018000 - DNA, 120 bp, Artificial Sequence
  ENSG00000254551_2 (sequence is synthesized)
atccctgtaacagccacagtctcaaactcagatgcttcctccatctgccaagtgtattctggatacagacaacatcgtggcttctggggtcatattcagctgaggctgtgggtccacaga

SEQ ID NO: 1018001 - DNA, 120 bp, Artificial Sequence
  ENSG00000254551_3 (sequence is synthesized)
caaagcagttaccagcacattgaaacagtacattgaacatcttctaaatatgaaagtgagaaacaagaaggcaacaaaaaatgttgtcagaaagatgttaggaagtaaggacagctgtgt

SEQ ID NO: 1018002 - DNA, 120 bp, Artificial Sequence
  ENSG00000254551_4 (sequence is synthesized)
aaagcttgaggctgaaaagcagcttgccagcttcatttctttggcttcttgggtagtgggcaccggaacagcaatatgtgaggttctggttcatggatcatataatagacccatccctga

SEQ ID NO: 1018003 - DNA, 120 bp, Artificial Sequence
  ENSG00000254551_5 (sequence is synthesized)
ctctgctgaacgccaagattcctccattcagattcagacatcaaatgggttttacggaccagcttggctatgtccttgggcagcacgacatgtcgatactcaaactcctcgtcgtcgtat

SEQ ID NO: 1018004 - DNA, 120 bp, Artificial Sequence
  ENSG00000254557_0 (sequence is synthesized)
aaagcagaatgagtacctagaaaagaagaaagtaccatttattcactcattcattctctctctctctccctccctcctcccttttttgtgtgtgtgcaagtgcacacccacacacccaca

SEQ ID NO: 1018005 - DNA, 120 bp, Artificial Sequence
  ENSG00000254557_1 (sequence is synthesized)
aacaactgcatacacacacagatgttgattacatgccaggtactgtgataactgatctaaatacagtatctcatttaattctcaaatgttacagatttttatgctctgaacccaaagtgt

SEQ ID NO: 1018006 - DNA, 120 bp, Artificial Sequence
  ENSG00000254557_2 (sequence is synthesized)
aaatcatggtgcatcttgccagcaaaagtgtgacagattggaaggaatacagcattctctccacatcacagaggaagaaacacctaaagagttctagagcaaggaaactgactcaaggga

SEQ ID NO: 1018007 - DNA, 120 bp, Artificial Sequence
  ENSG00000254557_3 (sequence is synthesized)
gacactgtgcagtaggagagaaatatgagaaccccaatctcaggattcaaggtctggggatcactgaaggaaaggctctgtaaactcctgttcgtttcttccctgcacagctgcaagatc

SEQ ID NO: 1018008 - DNA, 120 bp, Artificial Sequence
  ENSG00000235872_0 (sequence is synthesized)
gaagaagaagaagaagaagaagaagatacaaaagcatctgtgctcttcatattatacagtgtgtgcccaatgggaaggatggagggaaacaggggagaggattctgctgccttctcaact

SEQ ID NO: 1018009 - DNA, 120 bp, Artificial Sequence
  ENSG00000235872_1 (sequence is synthesized)
gccttctcaactcagttctactcaccttgcagttagcagagagattgccagtgttaccttttgtctgggatacacagctgaaggaagaagacaaactaaatgcaagcaacagacgtgtgg

SEQ ID NO: 1018010 - DNA, 120 bp, Artificial Sequence
  ENSG00000235872_2 (sequence is synthesized)
tattaaaagaggaacagagaggagaaaagcagagaaaagggaggaacagttcatggaatacaattctaaatttaggtgcaaaagcaactctgtaatatgaggcttctttacaaaacagct

SEQ ID NO: 1018011 - DNA, 120 bp, Artificial Sequence
  ENSG00000235872_3 (sequence is synthesized)
ctaaaagctgctttgccggcttttagaatgtcagaatgctaactgggcagtttaaaccttggggatcttattttgtatttgtttgagcactagaggaaaatctctaaggtacagtttttc

SEQ ID NO: 1018012 - DNA, 120 bp, Artificial Sequence
  ENSG00000235872_4 (sequence is synthesized)
ttagaatgtcactttgattctgaccgttctcctcccactacccccaacacccagattaatttatgaaaaacggaagcaggacatgctacacctgtgcatggacctggagcatggagggaa

SEQ ID NO: 1018013 - DNA, 120 bp, Artificial Sequence
  ENSG00000235872_5 (sequence is synthesized)
aaggagggccttaaggggctgtcaccctggggaggatataacatgaaccataaaaacatagtgaatgtctttgacaccaatctgtaaatgcgtggcagtcatgaagtaatcagtggcctg

SEQ ID NO: 1018014 - DNA, 120 bp, Artificial Sequence
  ENSG00000227006_0 (sequence is synthesized)
gagccacaggggttttaggagcatctttcattctagtgtttggtctttgaccccggttcccaacaaacagctcctactcccttggaatttattgggtgatgggagtgtcttgttctaatg

SEQ ID NO: 1018015 - DNA, 120 bp, Artificial Sequence
  ENSG00000227006_1 (sequence is synthesized)
aagcaactctaatgggctcctggacggggctggtcaccagaaagaccaggttatgctgagaagcttgaaaccgtcagtcccccgccaccccatcctctgggaagggaagaggagctggag

SEQ ID NO: 1018016 - DNA, 120 bp, Artificial Sequence
  ENSG00000227006_2 (sequence is synthesized)
atcatgcccatgtgatgaggcctccgtcaaagtccttgcactccgggatgtggctgccggacatgcggaggcgctgggagagcggcacacctggagagggcgtggaagctccaacacccc

SEQ ID NO: 1018017 - DNA, 120 bp, Artificial Sequence
  ENSG00000227006_3 (sequence is synthesized)
acctccacaccgcgtgctatgcatctctcccgtccagctgctcctgggtttcagtctttcctaatgaacagcgtaaggtgtgtcgctttccagcagaggcgctgacacagaaaggagtga

SEQ ID NO: 1018018 - DNA, 120 bp, Artificial Sequence
  ENSG00000227006_4 (sequence is synthesized)
cctctccaaccttccataaatcatcagaacactgcagagtgacagtgggaactccagagattaaacacggaggtgaggctggccagggatcacaagaggcccaacacccagacagtacgg

SEQ ID NO: 1018019 - DNA, 120 bp, Artificial Sequence
  ENSG00000227006_5 (sequence is synthesized)
gggtgggcacctcgtccgttttgtcatccacagaccagaggcttctgcacttctgatgactccatccagatctccagcttgtcctgtggacccatccatgcagaagcagactcggcaggc

SEQ ID NO: 1018020 - DNA, 120 bp, Artificial Sequence
  ENSG00000227006_6 (sequence is synthesized)
acaaggaccattttccacacccctatgattgcacctcatccaatcagcagcacccactccctagtccccagctccctccagattatccttgaaaaaccctagcctctgaattttggggga

SEQ ID NO: 1018021 - DNA, 120 bp, Artificial Sequence
  ENSG00000227006_7 (sequence is synthesized)
gattgacttaagtaataaaattccagtctcccacttagccagctctgtgtgaactaaactctttctctattgcaattcccatcttgatgagtcaactgaggtaaagagcaacctggctga

SEQ ID NO: 1018022 - DNA, 120 bp, Artificial Sequence
  ENSG00000227006_8 (sequence is synthesized)
aggtcaacagcagggctttttaatcagatccatgctgccccaaaataatgaaaccctggatcagcttcttttccaaatcttgagaatacaggctcctgggctgtgaaatacaatttgaaa

SEQ ID NO: 1018023 - DNA, 120 bp, Artificial Sequence
  ENSG00000227006_9 (sequence is synthesized)
atgtttctcttctaacaaagagtgcaatgtcttgagtactttaacatactgttttctgaaatctcactgtttgctggtaggtatcaatggctttggtgtggggcgtctgatatgtctata

SEQ ID NO: 1018024 - DNA, 120 bp, Artificial Sequence
  ENSG00000227006_10 (sequence is synthesized)
taaagaatctcatgctgccccaggaaaaagcacatatatccatatttttgtttgattttgtaaagcttattgtacaagatcacatttttgttttaataaagaacaaaaatgaagtttcaa

SEQ ID NO: 1018025 - DNA, 120 bp, Artificial Sequence
  ENSG00000260237_0 (sequence is synthesized)
atgcatttgcacaatgccaaagaaagaatcaaggtgtgactttctcccaccactcatctaagggtctggggatcctttctacagaatgcctactacaactgcaatgagaagatgctttcc

SEQ ID NO: 1018026 - DNA, 120 bp, Artificial Sequence
  ENSG00000260237_1 (sequence is synthesized)
tctctctattttgttggcaaaaatgaggtgctgagaagtgaagtcccttgctcaaggtctctcagttacaagatggtcaggactcaaaggaaccacagagcctgtgccctgtgctgccat

SEQ ID NO: 1018027 - DNA, 120 bp, Artificial Sequence
  ENSG00000260237_2 (sequence is synthesized)
gagtgttgtgagtttgggagacttacttctgaacctcagtttccttgtctgtccagtggggataatgaaatctacctcgtgtctgcaatatccaaatgacatcaacactgagcaccttga

SEQ ID NO: 1018028 - DNA, 120 bp, Artificial Sequence
  ENSG00000260237_3 (sequence is synthesized)
ggattctaatgaatgttaattccccttccatttcaatttgccacatcaccttctaattgaaaaatatccttgagaaaacaaaagtctttgtgtccccagtgaagagggtggggaagaggg

SEQ ID NO: 1018029 - DNA, 120 bp, Artificial Sequence
  ENSG00000224789_0 (sequence is synthesized)
gcaggtgctaggcggggccagcagtgggcgtggtctttccgggcccgggattggtgaaggctccggggctgacgaggcgaggccggagccctccccagtttcctgctatccggagccggg

SEQ ID NO: 1018030 - DNA, 120 bp, Artificial Sequence
  ENSG00000224789_1 (sequence is synthesized)
cggctcgcccaggatacggagcccggcggtcacgggggagaaggtagctgtcgggcattcccctggcgctgaagggcagattgcttttgaaagctctaaatttattcagcttatactgaa

SEQ ID NO: 1018031 - DNA, 120 bp, Artificial Sequence
  ENSG00000224789_2 (sequence is synthesized)
gggctcggaggagtgcagatgcctgagctatgcagtgtgattcaacaattccagttggacggaaaatacagctgtcttttttacggagttgaagtcaaatctacgtgcagctttttttac

SEQ ID NO: 1018032 - DNA, 120 bp, Artificial Sequence
  ENSG00000224789_3 (sequence is synthesized)
ctacaaataatggacaagctcctgaatccaacatattctagctgaaacggatcccaggacggaatgctggagagatgcgtattccagctacaggccctcagagctcagtggtcagtaaac

SEQ ID NO: 1018033 - DNA, 61 bp, Artificial Sequence
  ENSG00000286681_0 (sequence is synthesized)
acagacgtgagccactgtgcccagcccagatgttccttggttctccacatatagtcaaaga

SEQ ID NO: 1018034 - DNA, 120 bp, Artificial Sequence
  ENSG00000286681_1 (sequence is synthesized)
agcaaccaaccagcttcatcatgttccttggttctccacatatagtcaaagatattatgtatagggtcactaaactccttgcctctcatgaatggtgaatcaggagtgtcaaatgcattt

SEQ ID NO: 1018035 - DNA, 120 bp, Artificial Sequence
  ENSG00000286681_2 (sequence is synthesized)
tccatactattagaagtagagtccttaacattttggggtctaatcatattaaccagccaaatccagaaaccccaaaaccaatgacagaactccatccttaatatcctcttcctccagaac

SEQ ID NO: 1018036 - DNA, 120 bp, Artificial Sequence
  ENSG00000286681_3 (sequence is synthesized)
cagaactccatccttaatatcctcttcctccagaaccactcctggtacaaaaatctgtattagtcagagttctctagagggatagaactaatggaatatatataaaaagggaagtattaa

SEQ ID NO: 1018037 - DNA, 83 bp, Artificial Sequence
  ENSG00000286681_4 (sequence is synthesized)
gatagaactaatggaatatatataaaaagggaagtattaaattacacaatcacgaggtcccactataggctgtctgcaagctt

SEQ ID NO: 1018038 - DNA, 120 bp, Artificial Sequence
  ENSG00000286681_5 (sequence is synthesized)
catgggagaaagatgtaggctgggagggtaggccagtctggccttttcacatttctccagtattaaccatcacacctataaatttccccagcctataagcagctatgggctctggagtta

SEQ ID NO: 1018039 - DNA, 120 bp, Artificial Sequence
  ENSG00000286681_6 (sequence is synthesized)
agctcgtcccccatctccacaggtttttgcaatatacctgtgttgttgctgttgagcaacaatctctctctctctctctgtctgtctcccccctctctctcctctctctctctctgtgtg

SEQ ID NO: 1018040 - DNA, 120 bp, Artificial Sequence
  ENSG00000286681_7 (sequence is synthesized)
tgtgtgtgtgtgtgtgtgtgtttctttagcccttgccctcccttcaaaacctaacattttagtgccaaaacccaggataggaattgggttctaaatgggtaaatgttttctagcaacctg

SEQ ID NO: 1018041 - DNA, 120 bp, Artificial Sequence
  ENSG00000286681_8 (sequence is synthesized)
gaaagcagcaagcagcaaaaaccagacccaggcctgcttccagatcctgaatggactccctattcccagctccgttcctttattctctcttcttctctggtcctgggctgacttccagat

SEQ ID NO: 1018042 - DNA, 120 bp, Artificial Sequence
  ENSG00000286681_9 (sequence is synthesized)
cctgatcaaactctccatcctctttttccttccttcccctttccaggcagctccagcaagtatcaatcccattgctggacatcacatccaacacccgtctccaattagtggggtcacccc

SEQ ID NO: 1018043 - DNA, 120 bp, Artificial Sequence
  ENSG00000286681_10 (sequence is synthesized)
tttcatgttccagagtggctgacagtgaggactggtgtccactggtgagttattttgtctgcttggttgttccgtgcctcatgtgtgctggatgccttggtgggcactgatatgtgcgaa

SEQ ID NO: 1018044 - DNA, 120 bp, Artificial Sequence
  ENSG00000286681_11 (sequence is synthesized)
cacctccccactctgtgcccctcctttgtgttcaccactgcctcagcccagacctggtctgcaggctccttttccttctggcccccccagaaggtggggacacaaggccactgcccagaa

SEQ ID NO: 1018045 - DNA, 120 bp, Artificial Sequence
  ENSG00000286681_12 (sequence is synthesized)
gtctgggcattctcacctcaggccacttctgcttgcagatggtggggtgaccgggcatgccgcctgcagttctgcccactgggaaggttttccttcccacccttgaaagtggcagtaaca

SEQ ID NO: 1018046 - DNA, 120 bp, Artificial Sequence
  ENSG00000286681_13 (sequence is synthesized)
cagctgctgtgtgccatgcagtgagcccatccatctgcaaatcacactccttcagccacacaggaaccctctgcagctgtaggcttgagctgcattttatgtgtgccatgcactgaaccc

SEQ ID NO: 1018047 - DNA, 120 bp, Artificial Sequence
  ENSG00000286681_14 (sequence is synthesized)
atccatctacaaatcaaactccttcagccacgcaggaaccctctgcagccataggcttgagctgagggaggcatgtgggctagactgcctgctccctcagctcactctggcactctggcc

SEQ ID NO: 1018048 - DNA, 120 bp, Artificial Sequence
  ENSG00000286681_15 (sequence is synthesized)
actgggaagtgtggatgcagggccatttgggggtcccatggacaagtgttctattctctgctgcaggtggtgcagacttgctctgggatcctggggcctgcgtggccatccttgcacctt

SEQ ID NO: 1018049 - DNA, 120 bp, Artificial Sequence
  ENSG00000286681_16 (sequence is synthesized)
tcaaatgcttgcatcattgtcccttgcacagactcccttctgctgagacattttgtcaggtcatgagggaaagcttagcagtgaagccaccaccttgtgccagggaccgtcagtgcccca

SEQ ID NO: 1018050 - DNA, 120 bp, Artificial Sequence
  ENSG00000286681_17 (sequence is synthesized)
cctcctaaccagaacagcaccctcttcacctgcagacagtgggtgggccaatcccaaatgtccatctgatcaccagttttctcaagctgcttctggcccatttgtgttggtctgggtcct

SEQ ID NO: 1018051 - DNA, 120 bp, Artificial Sequence
  ENSG00000286681_18 (sequence is synthesized)
ccaagaagaagacaccaagattaaggatacaaacgtcgtgttcagagaaatgtctggggtagaaaatagtgaggtaaccaggaagatggaggggccatcagatggcttcaagcttgacac

SEQ ID NO: 1018052 - DNA, 120 bp, Artificial Sequence
  ENSG00000286681_19 (sequence is synthesized)
caagtggagagaagtttgggtggaagtgtctcaggcagctctgcggtgatgccttcccaccgcagctgacagttggagaatgacattggtttgtgccattacttgtggttttgtcttaga

SEQ ID NO: 1018053 - DNA, 120 bp, Artificial Sequence
  ENSG00000286681_20 (sequence is synthesized)
tcatttgaccagggtgctgtttgcctggtttgtctcctgtgaagttaccttattcccctttgtaattaataataattacattgcatggtgatgttttgacactgtgtaaacatcctgagc

SEQ ID NO: 1018054 - DNA, 120 bp, Artificial Sequence
  ENSG00000286681_21 (sequence is synthesized)
ctcatgccctggagacacctggctttcacaggtattggtgcttcttgcctgagttaccaccatggtggctgctgtggctgactgaggatgccacaggttctttggcctccctccctttga

SEQ ID NO: 1018055 - DNA, 120 bp, Artificial Sequence
  ENSG00000286681_22 (sequence is synthesized)
gagcaggagcaatatcttcaatgtcttcttgaatctgggcaggctcagtcactgccttgaccaagagaatgatgataatttgagaaaaaatttccaaaaggactgcatataaacattaaa

SEQ ID NO: 1018056 - DNA, 120 bp, Artificial Sequence
  ENSG00000286681_23 (sequence is synthesized)
cttcagggtcctgaaagtccaggagatggagaggctgttctagactgaaggagacaagaaacaggacaagtgggtgcaacttgtgaccctcggccgattcctgatgctctgagggattgc

SEQ ID NO: 1018057 - DNA, 120 bp, Artificial Sequence
  ENSG00000286681_24 (sequence is synthesized)
tccgcagtaagcaggtcacacaaacctacccccaaaggccaagggagctgagaggctgaaaaaagaggctgacaaatggagtttctccaaaagaaacatttactagaaacttatgaacaa

SEQ ID NO: 1018058 - DNA, 120 bp, Artificial Sequence
  ENSG00000286681_25 (sequence is synthesized)
agtagtatctcgggcagccacaagacagtggatccctgcacctgccccccagaaagcatcctttatatagcaagctttttggtaaaaacatgtgcagctggtgatgtcttagactttctt

SEQ ID NO: 1018059 - DNA, 120 bp, Artificial Sequence
  ENSG00000286681_26 (sequence is synthesized)
gcaaaattcatgactgctggggaagttaggtagcatctttctgaggggttatcaatgctacaggccttgtgtgaagaccttggtatgcaggagtctaacatcggccaccacagtgatttt

SEQ ID NO: 1018060 - DNA, 120 bp, Artificial Sequence
  ENSG00000286681_27 (sequence is synthesized)
gcttcgagatgacaccactcttgccaggcaacaggctcctttccttcagagacattgcagggacacctggtgacccttgaatgggggtctctgggaaggtgcactattcatgcaaccttt

SEQ ID NO: 1018061 - DNA, 120 bp, Artificial Sequence
  ENSG00000286681_28 (sequence is synthesized)
tatctaagcttgaaattgtttcaagctaaattaacttacaaatgttgatcatagtaaggaaggagaccaccacttctcctactgccctcctctccccctgtcttgcctagtttataagac

SEQ ID NO: 1018062 - DNA, 120 bp, Artificial Sequence
  ENSG00000286681_29 (sequence is synthesized)
aggagaaatgggagaaaacaaaaagtgagaaagaaacagaagataaatagccagatgaccttggtgccatcacctggccctggtgttaataatatcaacccctaacctaaactacttgtg

SEQ ID NO: 1018063 - DNA, 120 bp, Artificial Sequence
  ENSG00000286681_30 (sequence is synthesized)
ttatctgtaaattccagacattgtataagaaagcattgtaaaactttctgttctgttagctgatgcttgtagcctccagtcatgttctccatgctttcccagtctatcataataaccctt

SEQ ID NO: 1018064 - DNA, 120 bp, Artificial Sequence
  ENSG00000286681_31 (sequence is synthesized)
tcacgtggaccctttagggttgtaagcccttaaaagggccagtaatttctttttcgaggagctcagctcttaagacacaagtctgccaaagctcccagccaaataaaaccccttccttct

SEQ ID NO: 1018065 - DNA, 120 bp, Artificial Sequence
  ENSG00000260236_0 (sequence is synthesized)
ctggtcacgggagggaatgaaaaatgccagcggcctgccgggagttgcagtgaacccagccacccgctcgcgtagtcttttgcgcaggcgctgtccctgttgcgcatgctcagtcttctt

SEQ ID NO: 1018066 - DNA, 120 bp, Artificial Sequence
  ENSG00000260236_1 (sequence is synthesized)
cgcgcggagggagtagggcggggaggagctcgccagcccgaggcgaaacggcttctgggatagtagtcttcatccactaaactgagaggcgcggagcgagcttattccccgctcccgggc

SEQ ID NO: 1018067 - DNA, 120 bp, Artificial Sequence
  ENSG00000260236_2 (sequence is synthesized)
caagcccagctgcgggtcccgcccgccgcgctcctccctcctaggaagagcatgagacctcacctatgaacttgccctcccacgtattgtcaagagccgtggaggactggtgctgtggta

SEQ ID NO: 1018068 - DNA, 120 bp, Artificial Sequence
  ENSG00000260236_3 (sequence is synthesized)
gagatgacgtggcgggcgggccgctggaaagagatgacgcgaaaacgggccttagagagggtgcggagggagcacctggcctgaaggagtcggggctgagagctgggggtttcagtccca

SEQ ID NO: 1018069 - DNA, 120 bp, Artificial Sequence
  ENSG00000260236_4 (sequence is synthesized)
gtgctgcgaaggctttcgagctttggaacagaatcactgaccggagactggcctactcagcccagcctgggaggccgggcagtgcccaagggagacggacgatagggagggagcgcctgg

SEQ ID NO: 1018070 - DNA, 120 bp, Artificial Sequence
  ENSG00000260236_5 (sequence is synthesized)
atggagggtctcaagcggagtgaggaggccccgggccctgtggggaagtgggtgggggaaggtatacggccaggtgagcacccagggacgcccacagtatctggaaggagaccacggaat

SEQ ID NO: 1018071 - DNA, 120 bp, Artificial Sequence
  ENSG00000260236_6 (sequence is synthesized)
ggagagcacctgttgcctctggagaggggacctatagagcaggaattgttaaatcatatggctgtatcacctacttttagaaataaataataggctactcgggaggctgaggctggaggt

SEQ ID NO: 1018072 - DNA, 120 bp, Artificial Sequence
  ENSG00000260236_7 (sequence is synthesized)
gaaataacagagaatggcctggagatagtgagtgcaaaagtgcgagctgggagatcagtgagccttttgtagtcttccaggagacaggtgattgtggcttggagcagagggaagtaaaaa

SEQ ID NO: 1018073 - DNA, 120 bp, Artificial Sequence
  ENSG00000260236_8 (sequence is synthesized)
gtgagcaaagaaatattttgcccactttgagaaatatttgaggaatattttggagacaaaagtatcagaacttggaatggatggatgtaagggcatgaggacgtcgaatatgatttccaa

SEQ ID NO: 1018074 - DNA, 120 bp, Artificial Sequence
  ENSG00000260236_9 (sequence is synthesized)
gcttctggcttgtgcaggtgggtggctgtggggctgtttactgataagggaaaacaagggaagagcaaaggttcaggtccgtgttaagctcgaggtcaaggcctttgactcgttctggat

SEQ ID NO: 1018075 - DNA, 80 bp, Artificial Sequence
  ENSG00000260236_10 (sequence is synthesized)
gtgttaagctcgaggtcaaggcctttgactcgttctggatgaaatgtggagaccacgatgccgggtgcggtggttcacgc

SEQ ID NO: 1018076 - DNA, 120 bp, Artificial Sequence
  ENSG00000260236_11 (sequence is synthesized)
gcttaagcccgggagttcaagaccagcctagcccacatggccaaaccccgtccctacaaaaaatataaaaattagcaggacatggtggctcatgtacgcctgtagtcccagctactcagg

SEQ ID NO: 1018077 - DNA, 84 bp, Artificial Sequence
  ENSG00000260236_12 (sequence is synthesized)
gcccgggaggcagaggttgcagtgagccgtgattgtgccattgtactccagcctgggcgacaaaagtgaaaccatgtgtggaga

SEQ ID NO: 1018078 - DNA, 120 bp, Artificial Sequence
  ENSG00000260236_13 (sequence is synthesized)
ggatctgggattctaagacaggcttcacccacaaggtagagcccaggtccctttgttgtgagacctcaaaccctttcaagacttagtcaagggcctagcttcattccagttggagttaga

SEQ ID NO: 1018079 - DNA, 120 bp, Artificial Sequence
  ENSG00000260236_14 (sequence is synthesized)
gcagaagaaaatgaaattacatgaatgttcatagcagtaccatttcacagtagccaaaagagaagcaatccatgcagtgatggatggatgcatgaataaagatgatgtgtgtacatacaa

SEQ ID NO: 1018080 - DNA, 120 bp, Artificial Sequence
  ENSG00000179082_0 (sequence is synthesized)
aggcaaagccgggagaaactgctgagacgaggtggcagcggggaccacgtgagatggcgtatgtggccttgagcgataaacctcacctgtcgggggaggtgggcgaggaagcctgcagct

SEQ ID NO: 1018081 - DNA, 120 bp, Artificial Sequence
  ENSG00000179082_1 (sequence is synthesized)
cctggaacccaccacttttctctcccaggcccttgcccaggctgtggcctctgcctggaaccccttttcttcccatccgagcccttcccttcagtgcctcttcctctgggaagtcctctc

SEQ ID NO: 1018082 - DNA, 120 bp, Artificial Sequence
  ENSG00000179082_2 (sequence is synthesized)
tggtgcccagcccgtcctcttctgcccactctgggtttcgcaccccatgcttaggccctgattgcctgctttgcacacagggctgtgagctccatgagggcaggaaccacatggctgttc

SEQ ID NO: 1018083 - DNA, 120 bp, Artificial Sequence
  ENSG00000179082_3 (sequence is synthesized)
acagctgtgttgccagggcctggcctggagaccctcaggaagtgagacatctgaatcctctgctctgtgaccctggcagccaggtagagccatcttggccatggcacccaggcttggagc

SEQ ID NO: 1018084 - DNA, 120 bp, Artificial Sequence
  ENSG00000179082_4 (sequence is synthesized)
aagcagcagcctcatgggtggggaaccacgtttccccagcacatcggcaggccctaaggggacattcgcttggctctgccctcagagcactgatgcccgggggacactgccctttgtgtg

SEQ ID NO: 1018085 - DNA, 120 bp, Artificial Sequence
  ENSG00000179082_5 (sequence is synthesized)
tcccatgtaagagaggatgcaaccttagagggggcaggggtaaacatggtcccaggccctgttgtcccctcctaagaaagttcccagttctgcctgtccatccctggccttttccctgtg

SEQ ID NO: 1018086 - DNA, 120 bp, Artificial Sequence
  ENSG00000179082_6 (sequence is synthesized)
ctgtctgggacagtgggtggagctgccgctgagcggtgggacctagaaaacacatactgacctataggaggcactgcccagagctcctaactggggtggggtgcaaaggaaaggtgggtg

SEQ ID NO: 1018087 - DNA, 120 bp, Artificial Sequence
  ENSG00000179082_7 (sequence is synthesized)
agggaagcagagagaaatcatattagtagctcacacgtcaacagtctagctgtgtgcctgcctctctcatgcacttcatggggattatttcctagaattcccacaagagccccttgcagg

SEQ ID NO: 1018088 - DNA, 120 bp, Artificial Sequence
  ENSG00000179082_8 (sequence is synthesized)
tggtgcgattgttagctataatttgaagatgaggaaactgaggcacagagtagttaagcaatgcacccaggagcccacagctagggaggacagaggctggatccagcccagtcccctgtc

SEQ ID NO: 1018089 - DNA, 120 bp, Artificial Sequence
  ENSG00000179082_9 (sequence is synthesized)
tcctggggccaggcccagcgctcccacctctctgataaggataaaaaggagggagcgggaagggagatattccagaggcaactaccatgagacctcccggcagagaggcttgaaaacatc

SEQ ID NO: 1018090 - DNA, 120 bp, Artificial Sequence
  ENSG00000179082_10 (sequence is synthesized)
ttttgtgtgtggtacgcaaaccatttcccctttggtgtctctttgaaagattttgggaagatttaaactttttttcaatgatttggggatgtcagactggtgtttttttgagggtgacac

SEQ ID NO: 1018091 - DNA, 120 bp, Artificial Sequence
  ENSG00000179082_11 (sequence is synthesized)
cgtgatgagactggcccccaaggcagccccgttttactcaggttatggtaatagaacttctgcagcctcaaaagcagcttccgccgactgagcgctcaccccggggtccgtgctggactc

SEQ ID NO: 1018092 - DNA, 120 bp, Artificial Sequence
  ENSG00000179082_12 (sequence is synthesized)
agccttgactcggatgcccaccctgagccccacccgagaaagggattatttcatccctgcattatttccttagagctgatggcagaatctgctcatctccaaattcgctgtctccccgtt

SEQ ID NO: 1018093 - DNA, 120 bp, Artificial Sequence
  ENSG00000179082_13 (sequence is synthesized)
atctggtctcccccgttcattgctgagtccctggcacccagcatcagccccgcatggagcagctagtcaataaagctttgctggacacatttcagatgaagagactgagggtcagagagg

SEQ ID NO: 1018094 - DNA, 120 bp, Artificial Sequence
  ENSG00000179082_14 (sequence is synthesized)
tcacatggcttgcttggaagaaacatcagatttgtctggctcaagagtccacttctggctcccccctcacacagttgcttaagagacccccagcccaagacagcctcagagcctgggtct

SEQ ID NO: 1018095 - DNA, 120 bp, Artificial Sequence
  ENSG00000179082_15 (sequence is synthesized)
tccccccctccgcccattctcaggcccttatactaaaaccagagaggcctctgaactgctgtctgcccccccaaccttttccttgcttatctgggaatcacgcaaaagttggccagagtt

SEQ ID NO: 1018096 - DNA, 120 bp, Artificial Sequence
  ENSG00000179082_16 (sequence is synthesized)
agctcagtctcagagaagctgcattcttctagagtcactcggttttgcgtgacctgattcaaattttccatctttgtcactttgattcccactctgagaagttttctcagtacatataac

SEQ ID NO: 1018097 - DNA, 120 bp, Artificial Sequence
  ENSG00000179082_17 (sequence is synthesized)
cttactatgtgatgactggcctgggtattcatatgtgcacttgttacctgttgcttatctcctgggggacccctggttcagaggggtttaagcaggtgtcctggtgagaccggggttata

SEQ ID NO: 1018098 - DNA, 120 bp, Artificial Sequence
  ENSG00000179082_18 (sequence is synthesized)
atcagagactctcagggttagagcttggccctgccactgagtggccttgggagtctcatttgacctctctgaaccttggattcctcacttgtgaaatggggacaggttgagttcctgcat

SEQ ID NO: 1018099 - DNA, 120 bp, Artificial Sequence
  ENSG00000179082_19 (sequence is synthesized)
ggaaagtgtcttgcttgatgtctcgccaaaagaccaaaactgccgtcactcactgccggagaggccctgcacgtggatattagagtttgctgggttttgtttgtcctgagcgaatgtccg

SEQ ID NO: 1018100 - DNA, 120 bp, Artificial Sequence
  ENSG00000179082_20 (sequence is synthesized)
tccatgtacaggctgatggattttgtaggtgcaaggtccctaacgcaatcaatctctctcctcaaaagaccatgagcatgcctggactcagagagcaccgtgtgtggggggctggcgtgg

SEQ ID NO: 1018101 - DNA, 120 bp, Artificial Sequence
  ENSG00000179082_21 (sequence is synthesized)
gcacgtgtccgcagctgggactggcttctagggttctgggctcaggcaggagggcggggtcccaggaggtcatctctctctccttaccctggagcctttggaatttggtttccaaatgtc

SEQ ID NO: 1018102 - DNA, 120 bp, Artificial Sequence
  ENSG00000179082_22 (sequence is synthesized)
ctgaattcctgttcattaatatgtggctcagtacagtgcttgtcccggcagcaggagcttggttggtgttagtctgctggggaatgggataaagcagagaaatgtcaagctttcccttaa

SEQ ID NO: 1018103 - DNA, 120 bp, Artificial Sequence
  ENSG00000179082_23 (sequence is synthesized)
aaacaaaaaacaaaagcaaaccctcacatctcccaccaataacacaccattgttatccctgtacttaagacatgttgttgccgggcatggtagctcacacttgtaatcccgacactttgg

SEQ ID NO: 1018104 - DNA, 120 bp, Artificial Sequence
  ENSG00000287297_0 (sequence is synthesized)
gcagcctcagcatacgattctttcctttgcttattgagaactgacaccttttcactttatggcttcttcttggcagaaccaaatggccagtctcttgcggccattactgagtgaaccagg

SEQ ID NO: 1018105 - DNA, 120 bp, Artificial Sequence
  ENSG00000287297_1 (sequence is synthesized)
agtgacttgaacaatgggagacttgaactgggagactctgacagttgatctgataaccaaggtgactacaaagtgactcacgggcagggaacgtgcacagtgtggatccgctggacaaag

SEQ ID NO: 1018106 - DNA, 120 bp, Artificial Sequence
  ENSG00000287297_2 (sequence is synthesized)
ggaggactcatctctggggaaggagatgagggacagtgagagtcctcatcacactactcagaacagtgtgcaatttaaaacttgtggattgctgatttctggaattttccatttaatatt

SEQ ID NO: 1018107 - DNA, 120 bp, Artificial Sequence
  ENSG00000287297_3 (sequence is synthesized)
ttgtggcctcagttaacaggaacactggaaattgaatctgtggtggggggactactgtagttgttaaccacaccttcacacacctctgaccacactcagtgtcttagtcaattcaagctg

SEQ ID NO: 1018108 - DNA, 120 bp, Artificial Sequence
  ENSG00000287297_4 (sequence is synthesized)
gaatcaggtggtccgtttctcctgcctgggattgcacatggcggccttcctgctgtgtcctcacctggcctttcctcaggaaggcggagagagagagacaagctccggactcttcctctt

SEQ ID NO: 1018109 - DNA, 120 bp, Artificial Sequence
  ENSG00000287297_5 (sequence is synthesized)
tgataaggaccctaatcacatcgtggggacccacctgcacgacctcatctaaacctagttccctcccaaaggcccgcctccaaacaccatcccactgcgagtagggcttgagctttggaa

SEQ ID NO: 1018110 - DNA, 120 bp, Artificial Sequence
  ENSG00000287297_6 (sequence is synthesized)
tttaggaagacccagttcagtccacagcccttagctgcagggaaggtgggatgccatgtgttcagctacgctatggaacctgagtattaaggaagaaggaagaacgaggctccacaggtg

SEQ ID NO: 1018111 - DNA, 120 bp, Artificial Sequence
  ENSG00000287297_7 (sequence is synthesized)
gcccctgggagctgtaatcctgctcggtgactaggaagagtggctgaaaggccccacctctgactcctccctgcttctgatagcctgagtcctgggggacagagggaagcgcctctgggt

SEQ ID NO: 1018112 - DNA, 120 bp, Artificial Sequence
  ENSG00000287297_8 (sequence is synthesized)
tcccctctccgtgtgaggcagacagcctccgcccaggctctgaggggccctaattcttcctaacagacagcagtttggagcttctcccagagtgacccaggagccagcccaggagtggtc

SEQ ID NO: 1018113 - DNA, 120 bp, Artificial Sequence
  ENSG00000203520_0 (sequence is synthesized)
atttttttagattccatatataagtgagatcacaaagtatgtgtctttctgtgcctggcttatttcactgaacgtaatgttctccaggaaaataactgttatctgggaaactgcatttaa

SEQ ID NO: 1018114 - DNA, 120 bp, Artificial Sequence
  ENSG00000203520_1 (sequence is synthesized)
agggaagctgtttgcaatgcttctttgcacacaaggaacagaatccacaaagttcacaacaaggaacagaaaccacaaatttcacaacatgacaacattcaaaatgggagtatgtctcaa

SEQ ID NO: 1018115 - DNA, 120 bp, Artificial Sequence
  ENSG00000203520_2 (sequence is synthesized)
gcttttatgaaagaaaccaaaagtgaagtataacttccttctgaatcccctttgaaacccaagtcctactgaagaggaaagagaacaaatccctattgaaatgccctgaagagcttccac

SEQ ID NO: 1018116 - DNA, 120 bp, Artificial Sequence
  ENSG00000203520_3 (sequence is synthesized)
gagaacaaatccctattgaaatgccctgaagagcttccactgcctaaatgtgcagcataaccatctctaccttctctttaaaaaaaacattctagaggctgggcacggtggctcacgcct

SEQ ID NO: 1018117 - DNA, 120 bp, Artificial Sequence
  ENSG00000227206_0 (sequence is synthesized)
gtgctatggaggacctgcttactgctatgaggtgttactttatagaggtcctggagaagctgattgaggccacgtcaatgttgcaaggagacatgagactcacatcagagttctatggct

SEQ ID NO: 1018118 - DNA, 120 bp, Artificial Sequence
  ENSG00000227206_1 (sequence is synthesized)
gagatccttggggaaatgtctgattctaagatatttctaaggctggtgaaaaaatatataagataagcctggaggagaaggaccagtaataccagaaatcaaggaggggccttgaagaga

SEQ ID NO: 1018119 - DNA, 120 bp, Artificial Sequence
  ENSG00000227206_2 (sequence is synthesized)
aaaggatagcaaaaggatgaagacctgtccaagacccagcagccagcatgaaagagctctcaatggggaaagctggaacaatttcaacaacaaaataaataacatatcactggattataa

SEQ ID NO: 1018120 - DNA, 120 bp, Artificial Sequence
  ENSG00000235931_0 (sequence is synthesized)
atgaagcataaatacaacacactgtcatggtacaaaaaagaaagatcaactcagcttagacggtttatagttcatcagccagaggttggcttattcttttttttaagggacgtagtctat

SEQ ID NO: 1018121 - DNA, 120 bp, Artificial Sequence
  ENSG00000235931_1 (sequence is synthesized)
aggtgtccccttactcaagaaaggccttgtgacactggaggtaagtttggaagaatatggatctgtcaacctgaggaattgggaaagatgcaaatatggatctgtcaacctgaggaattg

SEQ ID NO: 1018122 - DNA, 120 bp, Artificial Sequence
  ENSG00000235931_2 (sequence is synthesized)
ggaaagatgcaaatagataaaaacagaactatggtccaacagatgtggtatatttggtatggtggattagatacatccacaaattctttgctgcccatcctagtaagaggcatggcctaa

SEQ ID NO: 1018123 - DNA, 120 bp, Artificial Sequence
  ENSG00000235931_3 (sequence is synthesized)
agatgggagaatggagaaagattggtcaacagacgctgactgtgatttttctcactaatgacaaaaggaataacctctagtgagaatgaaatgatgaagggtctttgaaattctctactc

SEQ ID NO: 1018124 - DNA, 120 bp, Artificial Sequence
  ENSG00000235931_4 (sequence is synthesized)
tctgaacacagtgaatgtgaatgaaagatctcaggaagagttttcaaaaagcttattgctcaatcaccagcctttgcgaggagttgtggattgactgctgtctgcaataaagtcaccaga

SEQ ID NO: 1018125 - DNA, 120 bp, Artificial Sequence
  ENSG00000235931_5 (sequence is synthesized)
aactgccatagctctcaaggcaagcacatgctgataatgacaagctgctgagactcaaagctatgttttagccccaaccccagcacagactcaccacgaagctctttgatttccagacgg

SEQ ID NO: 1018126 - DNA, 120 bp, Artificial Sequence
  ENSG00000235931_6 (sequence is synthesized)
aactttcatgaggacacaccacacttaactaaacccttgacctaacagacctatagtgaagatgaaaccccaaaggaagctcctactgtttgccaataactcaacagagctctggagaaa

SEQ ID NO: 1018127 - DNA, 120 bp, Artificial Sequence
  ENSG00000235931_7 (sequence is synthesized)
cagatgaattcaatgtggccttttgactagggacgatcgcccaccacacttctgataacagacaagcccttcttcagcactacagggttagccaaccacagtattccatccccctggcct

SEQ ID NO: 1018128 - DNA, 120 bp, Artificial Sequence
  ENSG00000235931_8 (sequence is synthesized)
cagtcagaacctttgctccagaaattttcctctggaactatcaggaaggacttccagttacccctggggacgccattttggaaacctagtactgtcatggccaaattatctatctcggag

SEQ ID NO: 1018129 - DNA, 120 bp, Artificial Sequence
  ENSG00000235931_9 (sequence is synthesized)
gaacagcacctacaggagtgaagccaccacacagatggaaacaaaggaggaaggaagggaaagggagaggaaaaaaggaggaggaagaagaaagagagaagggggaagggaaaggaagat

SEQ ID NO: 1018130 - DNA, 120 bp, Artificial Sequence
  ENSG00000235931_10 (sequence is synthesized)
aagaaggataccactcggcattgtttgcctggatccagtcctgccacaagccaataccaccaccaccctttttttaaaatcaattttatgaccctgaggcaataattcttgccctcctcc

SEQ ID NO: 1018131 - DNA, 120 bp, Artificial Sequence
  ENSG00000235931_11 (sequence is synthesized)
catgcatacttttcactacactgatcttaactacctgaaactgagaacatttagataaaaatcagagaatttgaggtcaatttagtagcacagcaaccacatacataaataattgcaaaa

SEQ ID NO: 1018132 - DNA, 120 bp, Artificial Sequence
  ENSG00000235931_12 (sequence is synthesized)
atgaaaaaatacagcacttctgctgtctcagcacattttcaagatattctaagaaatgtcttgaaaaagtaaatatataaagacagaaagtaaatgagtggttgtctagggctaggggtt

SEQ ID NO: 1018133 - DNA, 120 bp, Artificial Sequence
  ENSG00000235931_13 (sequence is synthesized)
gggaatgggagtgattgcaaatggatatgagatttctgtttggggtgatggaaatgttctaaaattaggttgtgggaatggttgcacaactctgagaatatactaaaaaaacactgaatt

SEQ ID NO: 1018134 - DNA, 120 bp, Artificial Sequence
  ENSG00000235931_14 (sequence is synthesized)
gtatactttaaataggtgaattttatgacatgtgaattacatctcaataaagctgttaaaaaatagatgaaatggacaaattccttaaaaaacaaaatttaacaaaactaatacaggagg

SEQ ID NO: 1018135 - DNA, 120 bp, Artificial Sequence
  ENSG00000235931_15 (sequence is synthesized)
aaatagaaaatctgaatgaaattaaatatcaatgaaattgattccttcatttaaaaatccttcccgcaaagtaaacttcaaatcaaaatagcttcaatgatgaattctgaacatttaagc

SEQ ID NO: 1018136 - DNA, 120 bp, Artificial Sequence
  ENSG00000235931_16 (sequence is synthesized)
aaaaaataataccaatcttatagaaaactcagagacttgaaaagaggagggtatcatttccaactaattttataagatcagcataacctcgaagcttccttctattccgagattactaag

SEQ ID NO: 1018137 - DNA, 72 bp, Artificial Sequence
  ENSG00000235931_17 (sequence is synthesized)
cgaagcttccttctattccgagattactaagagttcataaagaagtattaaattttatgtacaaatttttct

SEQ ID NO: 1018138 - DNA, 120 bp, Artificial Sequence
  ENSG00000235931_18 (sequence is synthesized)
tatatatacatattttctcctttatataaaagggataatatgaccaagtgggatttatgccaggaatgcaatcttgggatcagcataaaaaggacaattgtaaaagattgtcaaattata

SEQ ID NO: 1018139 - DNA, 120 bp, Artificial Sequence
  ENSG00000235931_19 (sequence is synthesized)
cttcactaaaattaagaatttctgttcatcaaaagataccgttcagagaaggaaaagacaaaccactaactgagagaagatatttgccatcatccagtggtgtaccaagggcaaggtaat

SEQ ID NO: 1018140 - DNA, 120 bp, Artificial Sequence
  ENSG00000235931_20 (sequence is synthesized)
gggaaagtctgccttgtatgcagacagtaaaagggttcattgtctgaaaatgtaaaagcaatactaaaactcactgaaaatcactctgcactttattattatcatgcactggaattctaa

SEQ ID NO: 1018141 - DNA, 120 bp, Artificial Sequence
  ENSG00000235931_21 (sequence is synthesized)
acattatcataataaaatattcatctagaaaaaatatcttttattagtttaagttctaaatgaaagtatgatccacagatctggagtaatccaagatcttttcagagagtccatggagtc

SEQ ID NO: 1018142 - DNA, 120 bp, Artificial Sequence
  ENSG00000235931_22 (sequence is synthesized)
agaatattttcataactaaaacattgttttcctttttcattgtgttgactgtgtgcgctgatggttcaagacaatggtgactaaatctacttattccttagtaggaatcaaggcagtggc

SEQ ID NO: 1018143 - DNA, 120 bp, Artificial Sequence
  ENSG00000235931_23 (sequence is synthesized)
acagattatactagtatacattgtattcttcaccactacacacgaacagttaacaacaataagaaaaacctagttttacttaagaaatatatctaatgaggcagtaaacattttattatc

SEQ ID NO: 1018144 - DNA, 120 bp, Artificial Sequence
  ENSG00000235931_24 (sequence is synthesized)
tcacaccattgcactctagcctgggcaataagagtgaaactccatcacacacaaaaaaaaaaaaattattgtcatttaactttttaattaaaatttcaattacaatttaaaaatttacta

SEQ ID NO: 1018145 - DNA, 120 bp, Artificial Sequence
  ENSG00000235931_25 (sequence is synthesized)
atttaaaaatttactaaaacatttaactttattaaatcctaaatgttcttaccaccaaaaaattatgcctgtgtgaggtgatgaaaacattaattaggttgactgtggtaatcctttcac

SEQ ID NO: 1018146 - DNA, 120 bp, Artificial Sequence
  ENSG00000235931_26 (sequence is synthesized)
aaagtacacacatatacatatatatataaccttttaatcaactatacctcaagctaggaaaaaatgaattaattaactttaaaataaaacattttattaaatatggaccttagcataccc

SEQ ID NO: 1018147 - DNA, 120 bp, Artificial Sequence
  ENSG00000235931_27 (sequence is synthesized)
atcttttttatgtgatgacatggaaaataaagcagttctgttgtctcaaggaaaagcactttgtgattatttgactgtgagctaatccagccacttttttttttttatggaacaccagtt

SEQ ID NO: 1018148 - DNA, 120 bp, Artificial Sequence
  ENSG00000235931_28 (sequence is synthesized)
tgacttttaaaaaaacaactgataggctgtagttattcagacttagttattcagcagaaattttctttaaaatgaccaaagtaagcctggcacttcaaggaaaagaactaaaatatctgt

SEQ ID NO: 1018149 - DNA, 120 bp, Artificial Sequence
  ENSG00000235931_29 (sequence is synthesized)
tatctaaaagttgagcttttaaacctaaattgcatgttggaaacttgtatctgctactgtgagcttgaaagctgctgtgagcttgaaaactcttctgatgagattggtgatgatattaat

SEQ ID NO: 1018150 - DNA, 120 bp, Artificial Sequence
  ENSG00000235931_30 (sequence is synthesized)
aaatatagtgtttttgctactataaaatgaaatgtgtctatcaatagcattttagagaatctctcaattctatccaaaatgatgttattctgataataaagcccagatctgcaactttaa

SEQ ID NO: 1018151 - DNA, 120 bp, Artificial Sequence
  ENSG00000235931_31 (sequence is synthesized)
tggtattttagtcatgttctttcatgccttagtacctttaaggtaagctcacacagaggtggccatgaaatggttaatagcaaaatccctgacttctgtagtcagtgagaaacatccgag

SEQ ID NO: 1018152 - DNA, 120 bp, Artificial Sequence
  ENSG00000235931_32 (sequence is synthesized)
agtgtgtcatatggtcaaaagcctctttgcgaaaaggaaaacatttcaagtcatagattcattcttttatttctactcattcattcattttcttcaataaacatttaggaagctcctact

SEQ ID NO: 1018153 - DNA, 120 bp, Artificial Sequence
  ENSG00000235933_0 (sequence is synthesized)
cagacacagacagagcctgcaaaagaggcaggagagtaagcagcggtttggaacagacaggaacagaacaaactgtgggcaccatgggacttggcatccagaggtggggacactgtggag

SEQ ID NO: 1018154 - DNA, 120 bp, Artificial Sequence
  ENSG00000235933_1 (sequence is synthesized)
acaaggagcactgtggatctgcccagccacccagctgtgtgagatgagcccttgtggaagctccaggccatgcaaaggggacaaagaatcctttccccttgggacgtttccagagcttct

SEQ ID NO: 1018155 - DNA, 120 bp, Artificial Sequence
  ENSG00000235933_2 (sequence is synthesized)
tggataatcccatggtttgggtgtctgaaatccctatgggaagcccagcacttccagagtgactgctgggattctcagagcttcccagaaccagctttgatttgtgcggctaagctatgg

SEQ ID NO: 1018156 - DNA, 120 bp, Artificial Sequence
  ENSG00000235933_3 (sequence is synthesized)
tccaggaacactcagtccaaacgtgctggagtctgttactgtgcatctctgggcatgagcctgtgtgtgggtgtaaacggacaaatgagcgtctccccacggcgaacctcactgtgttgt

SEQ ID NO: 1018157 - DNA, 120 bp, Artificial Sequence
  ENSG00000235933_4 (sequence is synthesized)
catgttgtgtcttcacttttgtccactagcatgtgtgtgtgggaggggactcacgtctagatatgggtatataataatatgagcatacgacatgtcaaagctcatgtgaaagagggtagg

SEQ ID NO: 1018158 - DNA, 120 bp, Artificial Sequence
  ENSG00000235933_5 (sequence is synthesized)
ttggggtatgtagctgtgtagccatgtgtgtgcatatggatacaccctcctagtggttctccaccccgttgtggcttacagctgccttagaaatttccccttttgctgcctcaggatccc

SEQ ID NO: 1018159 - DNA, 120 bp, Artificial Sequence
  ENSG00000235933_6 (sequence is synthesized)
tggcatgttccaatgtaacctgggccctgccttgcagagaccggcagtttggtgctctgttggcctgcctttgttcctgcagggtgcagctcctgtctgctttccctcgcctcccattgg

SEQ ID NO: 1018160 - DNA, 120 bp, Artificial Sequence
  ENSG00000235934_0 (sequence is synthesized)
gtgtctggctaattccctggaaagaaagaggctaactgctccggggactagggactttggtgagacaaggtgagagggggaaaaaggcccatatctttacgttctccctcggacttggcc

SEQ ID NO: 1018161 - DNA, 120 bp, Artificial Sequence
  ENSG00000235934_1 (sequence is synthesized)
agagaagaaccacagtcaccttgcactccagacagccagaaagcagcgagtcggaatgttgcttgcctccctcttatcccagccggtttttagccatcgctaagcctagggcgaggtttc

SEQ ID NO: 1018162 - DNA, 120 bp, Artificial Sequence
  ENSG00000235934_2 (sequence is synthesized)
cagagagggtgggcgcccagcgatccgctcggctcggccctgacaggcgtaatctgcccggcgtcacctccagctgcttcctcgttctcgctagttccctctcgcacgcgagcgccagga

SEQ ID NO: 1018163 - DNA, 120 bp, Artificial Sequence
  ENSG00000235934_3 (sequence is synthesized)
gaagagagagattcggagaggcggctgcacggctccggggagacgagcggcggttttgcctcagtgcttttccccggggttcccccagatctgtgaccctgcgacgcttccttgagcgaa

SEQ ID NO: 1018164 - DNA, 120 bp, Artificial Sequence
  ENSG00000235934_4 (sequence is synthesized)
catttcgggaggttgggtggccggcgctgggatggggttggttgagaagccgcgggaggagaggacctggctgaaaagccacggttgggcgctgggaagtccaggtggtcgctagcttac

SEQ ID NO: 1018165 - DNA, 120 bp, Artificial Sequence
  ENSG00000235934_5 (sequence is synthesized)
aggaggcagaaatgaggggagacctcttagaccatggaggaattacagtttcctcatccagccctgggccccatcaaagtaccacacctggccacagctacccagtgccaccggcagaga

SEQ ID NO: 1018166 - DNA, 120 bp, Artificial Sequence
  ENSG00000235934_6 (sequence is synthesized)
aaaggaccccgcgtcccttttgctatgcgctcgctcctcgctttggcccccttggtgatgggaaaagaaggcctcctgattaatcacgtttgaaggttgatgacacgcacgagcgccgct

SEQ ID NO: 1018167 - DNA, 120 bp, Artificial Sequence
  ENSG00000235934_7 (sequence is synthesized)
gcacgcgcatggggcacccgagcacagaggtgcccggaaggggcggaccagccccccttgccctggcccgctcccccttcgatttcacgcgctttaaggattctccctttgcaatattta

SEQ ID NO: 1018168 - DNA, 120 bp, Artificial Sequence
  ENSG00000235934_8 (sequence is synthesized)
ggcgtagttaaaagaaccgctgcgttgggagaagcccctcgccgtaaaaatgcgttgaaagagaaattcccaccagagggcgccaagagcccagagacggagaggccctgcgctcccggg

SEQ ID NO: 1018169 - DNA, 120 bp, Artificial Sequence
  ENSG00000235934_9 (sequence is synthesized)
actagtttaagttctcccctttcttctcccccagtttttttctttagggcaaaaatgttgatgtctgtgcgtgtctgggtgacaccgtgtaggcagtgattcctttactggtatttaccg

SEQ ID NO: 1018170 - DNA, 120 bp, Artificial Sequence
  ENSG00000235934_10 (sequence is synthesized)
tggtcctccccctctccccaggtggtgcagcacgcaggggttatttatgcgcacgtctggggcctcactggttcagcggaggcccgtccgttttctttgaatgccttatcgcctttcacc

SEQ ID NO: 1018171 - DNA, 120 bp, Artificial Sequence
  ENSG00000235934_11 (sequence is synthesized)
acaacacaatggaaacacacacaaaaatattataaattaccgagagttccataagggagatcgaagggtccgccctgggcagacatggcctgatcagcaagagggatctcgctgtggggt

SEQ ID NO: 1018172 - DNA, 120 bp, Artificial Sequence
  ENSG00000235934_12 (sequence is synthesized)
ttgaaataatcgcgttgcctttggtactaaagaaactactgttttgtcgccttgtctccacctgacgatgaaatccccggcactttttaaggacacaaaaaacatcctaaacggcggggc

SEQ ID NO: 1018173 - DNA, 120 bp, Artificial Sequence
  ENSG00000235934_13 (sequence is synthesized)
gcgcggtgactgcagccccgggcactgaggcttggggctggacaggctgggggtgtctgctccacgtaggaaacgtccccccaaaccactcaaccggcagctgctctgcgctgcttgaag

SEQ ID NO: 1018174 - DNA, 120 bp, Artificial Sequence
  ENSG00000235934_14 (sequence is synthesized)
tgggcggcatacaaccaggtgaagctcggaattccatccaccggccctcctagagccttccctaaacgagacgctcgcaccaatcagggagccaggtgccagtgctaaatcattcaagac

SEQ ID NO: 1018175 - DNA, 120 bp, Artificial Sequence
  ENSG00000235934_15 (sequence is synthesized)
gcacggggcaggagacaggaaggaggaggcaacacatctcccggtgcccctcgttcttcattgtccagcatagacgcccgctcgcctcaaccttttcccaaaacccgtgattccctggaa

SEQ ID NO: 1018176 - DNA, 120 bp, Artificial Sequence
  ENSG00000235934_16 (sequence is synthesized)
aggaagattcgtttacttcacctgtggcacgagattgagacatttccaaccacttcctcctttgaccccagagttcaaaacacccctaacgttttagccaatgaaataatctcgttggag

SEQ ID NO: 1018177 - DNA, 120 bp, Artificial Sequence
  ENSG00000235934_17 (sequence is synthesized)
aaggaatctcctgcaaggctaggtaacgcaagctgaagctgagtccgtccagcttcgaggacatccctctctttctcctttatggtgagtaggggaggaatgaagacttttgtccgtcct

SEQ ID NO: 1018178 - DNA, 120 bp, Artificial Sequence
  ENSG00000248539_0 (sequence is synthesized)
atttctcctagcctgctcagagaagatgctcattttcagaatttttaagaaacaggaaaaaatatagacaagattatacagagaggggaagaatgagaagagaagagaaggataataaga

SEQ ID NO: 1018179 - DNA, 120 bp, Artificial Sequence
  ENSG00000248539_1 (sequence is synthesized)
attctgaggaacatcaacatttaaaacggaaatgaagaaaagcctgcgaagaagactgcaaaggtaggccaagacctaaaggtggttctggaattatttgatattgggtggcagatggag

SEQ ID NO: 1018180 - DNA, 90 bp, Artificial Sequence
  ENSG00000248539_2 (sequence is synthesized)
attttgtatttttagtagaggtagggtttctccacgctggtcaggctggtcttaaaattctgacctcaggtaatccacctgcctgaagcc

SEQ ID NO: 1018181 - DNA, 120 bp, Artificial Sequence
  ENSG00000259759_0 (sequence is synthesized)
gccagctgtcgggcactgactctctgggctacattctcccgtgggttctctttaacccgcttggtttcaccgcaggggaatgctgaagagacacaagtgtttttgttttctctcttaaaa

SEQ ID NO: 1018182 - DNA, 120 bp, Artificial Sequence
  ENSG00000259759_1 (sequence is synthesized)
aagaggtgcatacccctctgtagacagcacatctgtgcaggtgtctaacagccgcctcatggaaggagtcatggaagacgttaggcccctccagttgggatcaagcaactgatgcaagct

SEQ ID NO: 1018183 - DNA, 120 bp, Artificial Sequence
  ENSG00000259759_2 (sequence is synthesized)
ttggaccaaatgaaacatttcaagaactcagattgtaaaatcacaatcagctggaggaattcggatctgcatctggcccagaagaacatttttgaggatcttttgaaagtatcactaaga

SEQ ID NO: 1018184 - DNA, 76 bp, Artificial Sequence
  ENSG00000259756_0 (sequence is synthesized)
aaatcatccatgacttcctgcaatggaagatgaggacacagctaagtatgaacattcatcttttgagggccacaca

SEQ ID NO: 1018185 - DNA, 120 bp, Artificial Sequence
  ENSG00000259756_1 (sequence is synthesized)
agggaactcaaaaaatactgcaactggcaacagagaccaccatcaagggataaaattacttcagcacctacacacaaaacgcagagcagctggagaaaggggcatgggaaaaaaaggctg

SEQ ID NO: 1018186 - DNA, 120 bp, Artificial Sequence
  ENSG00000259756_2 (sequence is synthesized)
ctcaagagcaaacctgaagaccctgtttattagccatttctctccctgcaagtgactggcaatccattttgactgaacttgggattctgagatgctccgaatgccctctctggtgttttt

SEQ ID NO: 1018187 - DNA, 120 bp, Artificial Sequence
  ENSG00000259757_0 (sequence is synthesized)
cagcctcaggcggaatgtttgagggcagctgacctgaacagactgatccgtctgcctggaagattcttctaactcagctggagaatggctgctcaataatgcaggtatttttctgtattt

SEQ ID NO: 1018188 - DNA, 120 bp, Artificial Sequence
  ENSG00000259757_1 (sequence is synthesized)
acttgtcacttgctacccacgtggatgttaaagtgaccaggagccacacctgaggcctctcgtgaatgaacggagctacttctgtgtcaggttttggggttccacaggcatgagcaggcc

SEQ ID NO: 1018189 - DNA, 120 bp, Artificial Sequence
  ENSG00000259757_2 (sequence is synthesized)
cgcagtggggaccaggacaagaggacaaatgaggccctgtgtgtctgaacactgaccacttgtaaatcagctgctagatacaatgtgcttatacacaacatgcttatcctcctgccttgg

SEQ ID NO: 1018190 - DNA, 120 bp, Artificial Sequence
  ENSG00000259757_3 (sequence is synthesized)
aaaatacgttttcaaatgagagaaatcacaaaatatgtgcaaagcatgatttgcatggaagtcatcaacatatcaaaagaggaccagatttaatgattcttatgtacgtctggcattcta

SEQ ID NO: 1018191 - DNA, 120 bp, Artificial Sequence
  ENSG00000259757_4 (sequence is synthesized)
ttctgagggggtagcaatgttaggatttgcaaaaaaatacagacagaataattcataaagtacatatttatcctatgaaatattttgcctttaaaaaaatagaatcactccatatcctgt

SEQ ID NO: 1018192 - DNA, 120 bp, Artificial Sequence
  ENSG00000259754_0 (sequence is synthesized)
aagagaaaccctaaaagaaatgtgaagctgagaaggacacagctctctgaccatgaccacaggaagtgtgataggacagaaatacaatggctgtcaaagaagaaaactctacattactgt

SEQ ID NO: 1018193 - DNA, 120 bp, Artificial Sequence
  ENSG00000259754_1 (sequence is synthesized)
cacctagaaagaaactacctttcttgttccagacagtgggataaatgatgtatatattctgtggaattgtttccctgaatcctcagaacagacttatgagatgctgtgatgagccaccga

SEQ ID NO: 1018194 - DNA, 120 bp, Artificial Sequence
  ENSG00000259754_2 (sequence is synthesized)
gatcctccttcaggaaggaagacttattcctccagatgctaagagtgctactggaggatggctctcagctgtgagccctcagctgaagacagttgtctcaccttgatcaggcctccttcc

SEQ ID NO: 1018195 - DNA, 120 bp, Artificial Sequence
  ENSG00000259754_3 (sequence is synthesized)
agaagtagcctgcctttgatgacaaactgattgggctgaggggaacactataaaggccagttctcagtccctatttgatatgactctcaagattaaagctagtgcagtgctccccatggg

SEQ ID NO: 1018196 - DNA, 120 bp, Artificial Sequence
  ENSG00000259754_4 (sequence is synthesized)
gacaggggaaggcttctttgggactggtttgcagatcacattccccatctgcccagctctgcttctcccccaacccctccatggtccaggagctctcccaaataaatgatctgccgacta

SEQ ID NO: 1018197 - DNA, 120 bp, Artificial Sequence
  ENSG00000259754_5 (sequence is synthesized)
acctcagtccagttagctttctggaaagcccaacctgcaacatttacttataaaaaagtaaaattgttgggttttggatgagatccattacatctgattattaatttggcaggaatcaac

SEQ ID NO: 1018198 - DNA, 120 bp, Artificial Sequence
  ENSG00000259754_6 (sequence is synthesized)
atttttactataatatattgtcttcccactgtatatttttctatctgtttcattttttcttataatctcaaaaacagtttgaagtattcttcacataggatctggagtttctttttaaga

SEQ ID NO: 1018199 - DNA, 120 bp, Artificial Sequence
  ENSG00000259754_7 (sequence is synthesized)
agactatcttgtagaagaaattacattattttgtgtggcttcaaagtccagaagtgggatgatggaaacaaattacacaaagacaccttttagttcactatatgcacaacatttccaaga

SEQ ID NO: 1018200 - DNA, 120 bp, Artificial Sequence
  ENSG00000259754_8 (sequence is synthesized)
actagggtggtccacttactccatctctgaggaagacatgaaaaagactaccttcagggattgagagtcccatgaccatggaagcacataagaaggaatcaaataattatttcagagatg

SEQ ID NO: 1018201 - DNA, 120 bp, Artificial Sequence
  ENSG00000259754_9 (sequence is synthesized)
tgatagactagactcatgtgtatacttggactagataatctgaatccaagattcagcaaccaggctgcttgaggaagcctgactttacatcatccacatttctccctctctgttctactg

SEQ ID NO: 1018202 - DNA, 120 bp, Artificial Sequence
  ENSG00000259754_10 (sequence is synthesized)
gacagagccttacaaaccacccttcctgttcttctggctctgaatcatgtttttatctgaggtcttgctaaagcaagaagaatatgtttaagagttatcttatcacagaaacatatctaa

SEQ ID NO: 1018203 - DNA, 120 bp, Artificial Sequence
  ENSG00000259754_11 (sequence is synthesized)
gtagagaagtaggattgattcaagaaatctgtgactacttgaaatgtgaattaagcttcatcactagctatgaggacctggagtgaactcataaaacaaaaaccagagaaatatagtcta

SEQ ID NO: 1018204 - DNA, 120 bp, Artificial Sequence
  ENSG00000259754_12 (sequence is synthesized)
cagaaaacaggaactgaagaatatactcataatttaaagcaggaattggcagatggcagcccaaagacccaatccatttcaccacctgttttttaaataaagttttattggaacacagtt

SEQ ID NO: 1018205 - DNA, 120 bp, Artificial Sequence
  ENSG00000259754_13 (sequence is synthesized)
acactcattcatttacatgttatctacagctgcttttgtgttacaggtagagtggaatagttgtcagagacgccatatgtcctgcaaaatgttgccaactcattgcttggaagcaaagta

SEQ ID NO: 1018206 - DNA, 120 bp, Artificial Sequence
  ENSG00000259754_14 (sequence is synthesized)
acctaaataatccagtggttaagacatgaactttagagtcagactaagctttgaattttgattctattattttgtcattgtatgaccttaagcaataaacatgtcattttcaagccccaa

SEQ ID NO: 1018207 - DNA, 120 bp, Artificial Sequence
  ENSG00000259754_15 (sequence is synthesized)
gggagagttctggatgacttctctgaacagcatggggtcaaggatgactgccaagacatcagatgtcatcacacctgcctttctcctggatgtcttttcttatcattacagttgaaatgc

SEQ ID NO: 1018208 - DNA, 120 bp, Artificial Sequence
  ENSG00000259754_16 (sequence is synthesized)
attcagcaccatgaactggtagaaatgaagtaaacctatcagaagagtgacaggtgtagagtctcttgtgcccaggggctcccattcaatgtgaattgtattttataatataccaagagc

SEQ ID NO: 1018209 - DNA, 120 bp, Artificial Sequence
  ENSG00000259754_17 (sequence is synthesized)
ccccaaacacagaagtgacctggacctctctcagcatctgtagaggaagcattttagaaaagcggaaaataaaagtgataggacagaaatacaatggctgtcaaagaagaaaactctaca

SEQ ID NO: 1018210 - DNA, 120 bp, Artificial Sequence
  ENSG00000259754_18 (sequence is synthesized)
cacctagaaagacagtgggataaatgatgtatatattctgtggaattgtttccctgaatcctcagaacagacttatgagggcctatgaagataagcagggcctaagatgatgaagatcta

SEQ ID NO: 1018211 - DNA, 120 bp, Artificial Sequence
  ENSG00000259754_19 (sequence is synthesized)
atctttcattggaagacacttgggtgatgctataggataatgaagatttcatcttccgttggaggatacctcagatgtccagatctttaggtcttttcttttaggctttggctgtatcta

SEQ ID NO: 1018212 - DNA, 120 bp, Artificial Sequence
  ENSG00000259754_20 (sequence is synthesized)
gcatatctcaatccagaaactttctggtccacattctgcacagtacacttaactcaggtggcctgctgaggtcctcaaaggggtcctgtagctgaactggaaaatggaaaaggccgaagc

SEQ ID NO: 1018213 - DNA, 120 bp, Artificial Sequence
  ENSG00000259754_21 (sequence is synthesized)
acttcaattcaccatcttaattcagaagtataatgatttaagaaggctcagctgcagatatgtaaagagagatttgcaaaagcataatcaagtcaagtcatggcaaggtcataagaagca

SEQ ID NO: 1018214 - DNA, 120 bp, Artificial Sequence
  ENSG00000259754_22 (sequence is synthesized)
gtcacaaaagcagcagtaatttgagtgcgaatggcagttttcatcatgactatgcccgttcacagggactctttgaaacagaagtttggttggaagcatttcccattctgcttgtggcag

SEQ ID NO: 1018215 - DNA, 120 bp, Artificial Sequence
  ENSG00000259754_23 (sequence is synthesized)
ggcatgaaaggggcacagaggctatggatgcattgttccccaggcccaggctccttcctggctgtgtgatgatgggcaagttgctggcctctccagttgtgtctttggaaaatagatgta

SEQ ID NO: 1018216 - DNA, 120 bp, Artificial Sequence
  ENSG00000259754_24 (sequence is synthesized)
attgcacctacctcattgggttatgcagaagatgaatgagatcatgcatgagagtccctagcacagtgcctggcacacagtccctcccatcaacagtagttgaagctcattccctcacag

SEQ ID NO: 1018217 - DNA, 120 bp, Artificial Sequence
  ENSG00000259754_25 (sequence is synthesized)
ccgttagaatcaattgtgggcctagagggctttcattttgtctctgcttacagttctttgccccgctggaaaaggagttagaaagaaagaaaaataaaacaataaatcacataggctgta

SEQ ID NO: 1018218 - DNA, 120 bp, Artificial Sequence
  ENSG00000259755_0 (sequence is synthesized)
tctgagagctgtacagtagtggctgaggtggggtttgcagtgaaggatgtgacacaccccagatggagctgaatgggcgtgggacctcaggtcttggccacagtggcctgctgtgcattg

SEQ ID NO: 1018219 - DNA, 74 bp, Artificial Sequence
  ENSG00000259755_1 (sequence is synthesized)
agggcggatacctgaggtcgggagttcaagaccagcatgaccaacgcagagaaaccccgtctctactaaaaata

SEQ ID NO: 1018220 - DNA, 120 bp, Artificial Sequence
  ENSG00000259755_2 (sequence is synthesized)
aggttgagagctgcacacgactgacgtaaccatggagggggccatgtagggctccagccgcctgcagatctccagggaggcacagtcgatgacaaggaggcccggcccattgctgtacca

SEQ ID NO: 1018221 - DNA, 120 bp, Artificial Sequence
  ENSG00000259755_3 (sequence is synthesized)
gacctcagagccgctgttgaccacctccatggccttcactgggtaggggttctgccgtgcgtcttcatccgcgatgctgaacttggacctgttggctgtgtgtgagcacaggtaggagca

SEQ ID NO: 1018222 - DNA, 120 bp, Artificial Sequence
  ENSG00000259755_4 (sequence is synthesized)
gctgtcctttggggtgccccgcaccacgggaaacacagccacaagcccatcggcgaggcccgctaagaccaggtcacccttcctgccaacagtgtgaaggaccccaaccctgacagagac

SEQ ID NO: 1018223 - DNA, 120 bp, Artificial Sequence
  ENSG00000248533_0 (sequence is synthesized)
ctatagggaattcagttgatttgtcctggttagaaagcactttgttcacacctatacatatgactctaggttatgggttcttctggagtcttctgaacctgctgggcatttctgactgga

SEQ ID NO: 1018224 - DNA, 120 bp, Artificial Sequence
  ENSG00000248533_1 (sequence is synthesized)
tgaaaattaacaaaagtctatgttcatcctgatgaaaattagcagcagttcatcttagtttaattgccacaacgtgcagctatgagaaggctgataaagaaaagaaaactcaaatcttac

SEQ ID NO: 1018225 - DNA, 120 bp, Artificial Sequence
  ENSG00000248533_2 (sequence is synthesized)
tatcagcataaaaggacaagagctttacaagatagataagagaaaaaaatcatttgccaaacctcggggcaggttctgagggagaatgtacaactttattttgatggcaggaatatattt

SEQ ID NO: 1018226 - DNA, 120 bp, Artificial Sequence
  ENSG00000248533_3 (sequence is synthesized)
gctggatgaaaaaaaaaatcctgccttggcatcatgggtactgtttgtagcctacaacttgaggtttttgcactggggactgaaaaagttatcagtgttaataaaaagaagttttcctga

SEQ ID NO: 1018227 - DNA, 120 bp, Artificial Sequence
  ENSG00000242536_0 (sequence is synthesized)
gttcaccagagagctgctcatagaatcaagtggggttaggaatttctggataacatgataactcctgagattagtggcacagtgagatgggtttagccttgtctcactccctaatcccat

SEQ ID NO: 1018228 - DNA, 120 bp, Artificial Sequence
  ENSG00000242536_1 (sequence is synthesized)
cctctagccccacactaccccagccatcccatcatcccatgcttctcttcctacctaattgggtacagaatgagaaaaacagtcaggaacaagagatggtgacagtaaagagcaccaagt

SEQ ID NO: 1018229 - DNA, 120 bp, Artificial Sequence
  ENSG00000242536_2 (sequence is synthesized)
gttctgttcttattcttaatttaacatttttcatcttatgaattggatacaattgaagcttggaaatacctgaattttaaaaatttggcatatctttttagaactcagttattacttaaa

SEQ ID NO: 1018230 - DNA, 120 bp, Artificial Sequence
  ENSG00000242536_3 (sequence is synthesized)
tccatccatcatgatacgtggaagtgggataaagatcactttcagaaaggagtacatcaaaaaaattcccatccaaggtgtcaatgtcactaaaggaatattctctgctatttaagtgag

SEQ ID NO: 1018231 - DNA, 120 bp, Artificial Sequence
  ENSG00000242536_4 (sequence is synthesized)
aattcttccacttctttccatttcatcaggcagagattattatacattttgaagcacatgttggagcttggaagaagaatgaaggataaataagggtcttgtgctatggacaaagcaaat

SEQ ID NO: 1018232 - DNA, 120 bp, Artificial Sequence
  ENSG00000242536_5 (sequence is synthesized)
ctacccaagcgggactactgtgaaggagataacattcatttgaaaaggatacgtggaagtgggataaagatcactttcagaaaggagtacatcaaaaaaattcccatccaaggtgtcaat

SEQ ID NO: 1018233 - DNA, 120 bp, Artificial Sequence
  ENSG00000242536_6 (sequence is synthesized)
tgttcttattcttaatttaacatttttcatcttatgaattggatacaattgaagactggtatcaagatgatggttgcctcataaaatgaggtagggagaatgccctctttttccattgat

SEQ ID NO: 1018234 - DNA, 76 bp, Artificial Sequence
  ENSG00000242536_7 (sequence is synthesized)
acctcgaagttgaatagcaaacaatcatgatgggtgatcaatatggtgaagatccaactctccaagcaggacagaa

SEQ ID NO: 1018235 - DNA, 120 bp, Artificial Sequence
  ENSG00000242536_8 (sequence is synthesized)
gatgagagcctggaaactactttcctcagaatcatcgttagagttcatcaatggaggtatgaaatttggaaggcagaagaaatgcagaaaccaccactgcacctgtgacagaagtaggca

SEQ ID NO: 1018236 - DNA, 120 bp, Artificial Sequence
  ENSG00000242536_9 (sequence is synthesized)
ctgttgctgagaagcccctagatctggggttgaaagatgagagagtccatgaaagttcgagaagaacaaattgctacataattggaagggattaagttacaaatattgatttgttaagga

SEQ ID NO: 1018237 - DNA, 120 bp, Artificial Sequence
  ENSG00000242536_10 (sequence is synthesized)
cctctgcaggctagtctgtgaattgccctgaaagtcactgtgaaaaattagcttgcagtattaatcccatagaaagaaacccatttaagtgggaagaaggggccacattgaaaatggcat

SEQ ID NO: 1018238 - DNA, 120 bp, Artificial Sequence
  ENSG00000242536_11 (sequence is synthesized)
acattgaaaatggcattcaatggatcttgaaggaagagtaagaggtcaccaagggaaaaaaagatgggaaagctaactgaagcagagagaacatgagatggagtctcactctgtcgccca

SEQ ID NO: 1018239 - DNA, 120 bp, Artificial Sequence
  ENSG00000242536_12 (sequence is synthesized)
tcccaggttcaagggattctcctgcctcatcttcctgagtagctgggactacaggtcttctgctacatgccctgaagcagcacctattaaggtttgattagaaaaagggtggccttgggt

SEQ ID NO: 1018240 - DNA, 120 bp, Artificial Sequence
  ENSG00000242536_13 (sequence is synthesized)
attagaaaaagggtggccttgggtgcctgggagcttctgcaggagtggtaactctggccggctgaatggcttgctctagatatgtaactgcatataataaaacgtaattaatttttaaaa

SEQ ID NO: 1018241 - DNA, 120 bp, Artificial Sequence
  ENSG00000258088_0 (sequence is synthesized)
cctggcctccagcttctgtctgcttattcctgggatgttgttaagagcaccactcagcccctcagcccctaagcagcctcttccagtattagccagtgccccaggaaagatgtatcatct

SEQ ID NO: 1018242 - DNA, 120 bp, Artificial Sequence
  ENSG00000258088_1 (sequence is synthesized)
ttcttgctgcccttgaagagtggtgtccagtgaatctttcaaagaatgatactgagcttcattgttgatgaacaaaaatgcaaatctcacccagagcatgcaggaacatgctataatcac

SEQ ID NO: 1018243 - DNA, 120 bp, Artificial Sequence
  ENSG00000258088_2 (sequence is synthesized)
tacactcctagaatgtgatctctttcaatattgactgcatccatgccttccacacacttgcaccagttgggaggatggagatgtcatctgggcagagggagaagagcagtaccattcaga

SEQ ID NO: 1018244 - DNA, 120 bp, Artificial Sequence
  ENSG00000258088_3 (sequence is synthesized)
ttctctctgtcaacctagaccatagttgttcaacataatacttacacatttgaaaaaagaagattgttttattggagtgccttaagatgttttcaacatatggattttacagcagggcag

SEQ ID NO: 1018245 - DNA, 120 bp, Artificial Sequence
  ENSG00000258088_4 (sequence is synthesized)
ttcaagaggcatgaggaatgtttcttttctctatttgttggagcactggagtgtgagctgaagcagcctaatcctgacttgcagaaatggagaggacatgacttaccggaattgttcatg

SEQ ID NO: 1018246 - DNA, 120 bp, Artificial Sequence
  ENSG00000258088_5 (sequence is synthesized)
gaattggtttggctaattctcattgattctgccatttctccagaagccattactacagctgttgaaacaggggtagagaaaaatgacaggtgctaagtggtatctaggaggttaataatg

SEQ ID NO: 1018247 - DNA, 120 bp, Artificial Sequence
  ENSG00000258084_0 (sequence is synthesized)
aatagtccagtcagtcagagctggtgaagtagacttgctgtagaaggtgtgaaggcccagtcctccctccacgtttctccacccttgaaaggtcgtgtgcatgtctgttcacccatgaaa

SEQ ID NO: 1018248 - DNA, 120 bp, Artificial Sequence
  ENSG00000258084_1 (sequence is synthesized)
gaagaggaagacaccaaatggatggcattgatttcattttaagggctggagatcaagacctacccattgtgatgaataaatccaggctctcagcaatgcagggagaaaaagttttgtcta

SEQ ID NO: 1018249 - DNA, 120 bp, Artificial Sequence
  ENSG00000258084_2 (sequence is synthesized)
accagtctcttagcacaggcaccagccctggagttcatgtcctcatcaaaggatggaaagaagcaaagctcaaatcagcttgggaaggaccttacctagtgctcctgaccactgtaacca

SEQ ID NO: 1018250 - DNA, 120 bp, Artificial Sequence
  ENSG00000258084_3 (sequence is synthesized)
tcatccagacagcagagaaaggatggactcattatacccgagtcaaagtgttgccacctccacagtcatgggccattgttccaggggaaagccctaccaaattaaagctaagaaaaactt

SEQ ID NO: 1018251 - DNA, 120 bp, Artificial Sequence
  ENSG00000258084_4 (sequence is synthesized)
ggatgacagtgtctactagcagagaagtaagactttctgcttttcagctccactgagctggatatggacaaagtgctaatgagagcaaaatacccaagaagttactaatgagtaataagg

SEQ ID NO: 1018252 - DNA, 120 bp, Artificial Sequence
  ENSG00000258084_5 (sequence is synthesized)
ggaacaaaattgttattaaaaaatgtccttaaaaaatcctggagcaaaacatcaggcagtggaacacggcttgaaatgctgtgatggagaacaacagcgtatatgtccctagagttgaac

SEQ ID NO: 1018253 - DNA, 120 bp, Artificial Sequence
  ENSG00000258084_6 (sequence is synthesized)
agacacatttcaagccttatccaagtttaggacttttggaaagcattgcagttgcgaataagagaatgtgcttggaatcttactcttgtgcattgaagaaggataagaaacaggaagaag

SEQ ID NO: 1018254 - DNA, 120 bp, Artificial Sequence
  ENSG00000258084_7 (sequence is synthesized)
agaagaataagacctatcagctactgagaggaatgttttaaaatccatgtccacgtgcagaaactttcttcattttgaattagtgttgtcagctgcttcttgtaattctcttacttttgt

SEQ ID NO: 1018255 - DNA, 120 bp, Artificial Sequence
  ENSG00000258084_8 (sequence is synthesized)
ctgcttcttgtaattctcttacttttgtcatttaaaatctatattaagtgcaaactatttagaattatgtaatccttatgatttaaaattttaaattagctgtgtttcaatttatcttca

SEQ ID NO: 1018256 - DNA, 120 bp, Artificial Sequence
  ENSG00000258084_9 (sequence is synthesized)
agctatatctgattgttacaacccttaatttttaatatttctgattatttatgtttaaaaagtgtctcttataaattcaatatagtaaatctttttaatccaatgtgaaaatacctgttt

SEQ ID NO: 1018257 - DNA, 120 bp, Artificial Sequence
  ENSG00000258084_10 (sequence is synthesized)
aatccaatgtgaaaatacctgttttaactgataattttacttaatatttactgtttatcaatatacttgcatttagtattattagacctagctttcaatatatatgttgctttttctttt

SEQ ID NO: 1018258 - DNA, 120 bp, Artificial Sequence
  ENSG00000258084_11 (sequence is synthesized)
gagtacctcatttgaaatgcttgagatatttatatatgtgttgctctactggtttgtaagttataccttgatttttaatcaatggccataaacatttaacatgcatatttagctatgtct

SEQ ID NO: 1018259 - DNA, 120 bp, Artificial Sequence
  ENSG00000258084_12 (sequence is synthesized)
aaagtaaattaatatttctaagcttcttctgaacaatttagtaatttttttacacccaacaactttttcagtttacatattattgtttcccagtcttttaattgtagcagaacaattttg

SEQ ID NO: 1018260 - DNA, 120 bp, Artificial Sequence
  ENSG00000258084_13 (sequence is synthesized)
gttttagcccccaaattattattaccattgcattatacatttattgcttgtttagatgcatccacatatttatgattttcttaggtcatcaatctaggttgtcttctggattttattatt

SEQ ID NO: 1018261 - DNA, 120 bp, Artificial Sequence
  ENSG00000258084_14 (sequence is synthesized)
cttaaatttatttgtttctgtgatgggcctagagattgacagagcacactaattattgggtttctaagtcatcttatacttgagaagcttcagctcagtgcacaagcctctgtctattac

SEQ ID NO: 1018262 - DNA, 120 bp, Artificial Sequence
  ENSG00000258084_15 (sequence is synthesized)
agacaaatcactgccatgccatcctctgaaactctaagaatttaagaaactctaagaatttaaaagtgatttaaccccaaaagtagtggataattttgatactagctcttccctgccttc

SEQ ID NO: 1018263 - DNA, 120 bp, Artificial Sequence
  ENSG00000258084_16 (sequence is synthesized)
acctccacctccacctcttgcctcccattcatgatcccccccattcctttattgacaatgtcagatacaaaagaagttcctcttcaaaggtttggcttgttaagcacccttgttctttgt

SEQ ID NO: 1018264 - DNA, 120 bp, Artificial Sequence
  ENSG00000258084_17 (sequence is synthesized)
tctctacttccaagggcagacaaacttccttatcctttgtgcctgtcttagtttcagtaaacaaccttcccactggtccttatctacagagaccacatctgctacccactctataaatta

SEQ ID NO: 1018265 - DNA, 120 bp, Artificial Sequence
  ENSG00000258084_18 (sequence is synthesized)
ctcctactgtcacaatagctcttcccaccaaaaatgcccttcttgccagtgtaaccactttcctgcacctttcaagttagccaatcgagttcagcttagattgtgcggttcaacttcagc

SEQ ID NO: 1018266 - DNA, 120 bp, Artificial Sequence
  ENSG00000258084_19 (sequence is synthesized)
cagtggagggataaaaacccccttccctcctttgttcagtgcactctcgtcatgaccagacttgtaagcagcactcttctgcagaagtaaattttgcattgatgagaaatcctttaactg

SEQ ID NO: 1018267 - DNA, 120 bp, Artificial Sequence
  ENSG00000258084_20 (sequence is synthesized)
ctcattttctttgtgactccaagctctacttccaacagttctgggggcttgtgtgggatcccattctcctccagggaagggtctctggtcacctcctgggaggagacatgtcacactgcc

SEQ ID NO: 1018268 - DNA, 120 bp, Artificial Sequence
  ENSG00000258084_21 (sequence is synthesized)
actcacattctattgctggagcttaatcacagggtgatctaaacacaaggaaggctgagaaattaggtttcttcatgaatccaggaagaaagaaatagaatcatcttctccacagggacc

SEQ ID NO: 1018269 - DNA, 90 bp, Artificial Sequence
  ENSG00000258084_22 (sequence is synthesized)
cttctccacagggacccatcctgttgttcagcaggcaaattgacagagagcagtgttgcgtgctgggcagccacgtaagatgtgcctgct

SEQ ID NO: 1018270 - DNA, 120 bp, Artificial Sequence
  ENSG00000258084_23 (sequence is synthesized)
atgagttacctcagagttatccacaagtcatcaagtggcaaacttggaagagtgatggtagaatattggatgacagtgtctactagcagagaaatcaaaatgtctaacagtagatgtaaa

SEQ ID NO: 1018271 - DNA, 120 bp, Artificial Sequence
  ENSG00000258084_24 (sequence is synthesized)
gtggatgcaatgtctgtatccaacagacattatgtggctttgaatttaggcactgtaattataacctagaagactctgtaagagtcttcatgggaaaatcatcacaggaagaagagaaac

SEQ ID NO: 1018272 - DNA, 120 bp, Artificial Sequence
  ENSG00000242539_0 (sequence is synthesized)
aagatggtccaacctgtgggtatttttaaaaattctaacaggagaaatcatttaaaattttgctttttcacaatggcaaaaaggaaagaatttgaacataatatttaatttttaaaaaaa

SEQ ID NO: 1018273 - DNA, 120 bp, Artificial Sequence
  ENSG00000242539_1 (sequence is synthesized)
ttcagcctgactccgaccctgaagatttcagaaagaacatcgtcactattaaaatgatgacaggcccaaatgggggattgtttaaccagttttcctaagttaaaccaagaataagccaca

SEQ ID NO: 1018274 - DNA, 120 bp, Artificial Sequence
  ENSG00000242539_2 (sequence is synthesized)
agtattcaattgtgttacaacttagatctgagacatttacatcaaagcatacttccctgaacatgttcacatttaaaatgcttaaggtcttattattaaatccaaaataccaaaagtatt

SEQ ID NO: 1018275 - DNA, 120 bp, Artificial Sequence
  ENSG00000242539_3 (sequence is synthesized)
agaggagctagttatacaatattggcacagcatttttaagcaataataaaagtttcattttgtcaccttaagtcaagatccatttatctattaataggttaagtctgaaattctgtaaca

SEQ ID NO: 1018276 - DNA, 120 bp, Artificial Sequence
  ENSG00000242539_4 (sequence is synthesized)
tattctagaagcacctacatccattatttccaggagactagtttactactatcatgcaatcgctgaggtcatatgagtctaaaatgaagggaattgctgaacaggcccttttgctgttga

SEQ ID NO: 1018277 - DNA, 120 bp, Artificial Sequence
  ENSG00000242539_5 (sequence is synthesized)
gatatgaagcccaaatctttgcctctgaagacggaattcaatgtggtgtgtgtaatcacaagtaaaaacttgagctagggaggaaccttggatattcagtctacatctcaaacagcatag

SEQ ID NO: 1018278 - DNA, 120 bp, Artificial Sequence
  ENSG00000242539_6 (sequence is synthesized)
ctgccaaaaatgaggcctgtccattaaagtggaggagatatccttgctgatggcaaaaactgctttttctttttgggacggaatcttgctctgtcgctcgggttggagtgcagtggcgcc

SEQ ID NO: 1018279 - DNA, 120 bp, Artificial Sequence
  ENSG00000242539_7 (sequence is synthesized)
gagtgcagtggcgccatctcagctcaccaaaacctccacctcctgagttcaagtaattctctgcctcagcctcacgagtagctgacaggcgcccacctccacgcccggctaatttttgta

SEQ ID NO: 1018280 - DNA, 120 bp, Artificial Sequence
  ENSG00000242539_8 (sequence is synthesized)
gactctgtctttaaaaaaaaaaaaaaaggaacattaactgcaatattcttgatgatgcaaatttttaaaaactaaatccagccagatttttcagccttaaaaactaagatccaaactatt

SEQ ID NO: 1018281 - DNA, 120 bp, Artificial Sequence
  ENSG00000242539_9 (sequence is synthesized)
gccagatttttcagccttaaaaactaagatccaaactattcaacatctctacaaattatatactcattgaattcaggaacaataacagaattcaacaatcagctcaacttaaactgtaag

SEQ ID NO: 1018282 - DNA, 120 bp, Artificial Sequence
  ENSG00000242539_10 (sequence is synthesized)
taaacaaatatatttagcaactggagcccctattattagaaagcaaaggtgtaaccatgaagtaattgtggtagtgaggctactctgtcgccatttgtttatgtgtataattaaccacaa

SEQ ID NO: 1018283 - DNA, 120 bp, Artificial Sequence
  ENSG00000242539_11 (sequence is synthesized)
gtgttaaatagtttttagttgccgagtaaatatttaattatgggaattgctttaaactcctcttcataaactttaagaacattaaaataaatgtaattttaaaatatgttaagaccatag

SEQ ID NO: 1018284 - DNA, 120 bp, Artificial Sequence
  ENSG00000242539_12 (sequence is synthesized)
aattcctgtggtctgtatgcctgtgactactataataacttttaagtagaggagatactctcttacatatttaaggttatttttatgcataatagaattgctttcttctgactaacctac

SEQ ID NO: 1018285 - DNA, 120 bp, Artificial Sequence
  ENSG00000242539_13 (sequence is synthesized)
atggcaaactttccccaaccctctttttctggaaatgaatacattcctttattcttttctcaaagaactgttctttatgaagtgatataaatagcctacaaataaacattaatagcaaaa

SEQ ID NO: 1018286 - DNA, 120 bp, Artificial Sequence
  ENSG00000258081_0 (sequence is synthesized)
ggcgtgagccaccgcgcccggcccctcataaggccaaagacggctatgtttttaaaggaactacagtatcttatcgttctgatggtctggaagtttatattcacatccaagaattcttcc

SEQ ID NO: 1018287 - DNA, 120 bp, Artificial Sequence
  ENSG00000258081_1 (sequence is synthesized)
ggaagtttatattcacatccaagaattcttcctgcttctccgaaaactcatcctttgctttattactcttcatgggaataaggaaacagctgtgcagtataagttatgtgctctttcttt

SEQ ID NO: 1018288 - DNA, 120 bp, Artificial Sequence
  ENSG00000258081_2 (sequence is synthesized)
tcttcttgacaactattatcaactcattcttaccgaaaaatgacttaataaacttctctcttctagcctcttttaaaagatctatgtagtttccaaaactcttaaacactgtaggaactt

SEQ ID NO: 1018289 - DNA, 120 bp, Artificial Sequence
  ENSG00000258081_3 (sequence is synthesized)
tttcaaagcctatttcaaattggggtctgtatcagatgtaataatctttagaaaacctgatcaatattaattatttagacatgataccctcctcatttctaattagcaaatgttttattt

SEQ ID NO: 1018290 - DNA, 120 bp, Artificial Sequence
  ENSG00000258081_4 (sequence is synthesized)
ttttctttgtatttgatatgagcactttatgcaccctttaccccacaccccaacaaatctaagaaaataaattatgggcccagacattttattgattttaaaattaacttattaatccgt

SEQ ID NO: 1018291 - DNA, 120 bp, Artificial Sequence
  ENSG00000258081_5 (sequence is synthesized)
aaaatatcccatattttgttcaatggattcccatgtttctaatgaaaaagaaacaccaatttttccactcaatttcaatattaagaaaaaaggcaggggagaatactttctatgggaaaa

SEQ ID NO: 1018292 - DNA, 120 bp, Artificial Sequence
  ENSG00000258081_6 (sequence is synthesized)
agatgccaaattgcatgggtttgaaaacatttgattccagaagacattatgagatcagtctattctgagatgtcctcagagttatccctgagctgtctgcaacctgacctttcagttgtt

SEQ ID NO: 1018293 - DNA, 120 bp, Artificial Sequence
  ENSG00000258081_7 (sequence is synthesized)
gataccagttgtttgtgtccttgtttgattgttccttttcctccctatcacttatgacgaaagttacattgttcttaatcctaggatcttatctaaattatttgccgttccactaaacct

SEQ ID NO: 1018294 - DNA, 120 bp, Artificial Sequence
  ENSG00000258081_8 (sequence is synthesized)
caacatttttttgctcaggctttcgatagtttgaactcccaacttaaaaattctgtaatttttttccatctttcattgtttattgttatatgcttttatttagaaaccatagattctaac

SEQ ID NO: 1018295 - DNA, 120 bp, Artificial Sequence
  ENSG00000258081_9 (sequence is synthesized)
aagaaatcaggattaaaattgcgggtctgaaactaatgagctgtttgaacttgggcaagttccttaaccttgttgaacttcagtttcttcatctataaaatggaaaaatcaatatctatc

SEQ ID NO: 1018296 - DNA, 120 bp, Artificial Sequence
  ENSG00000258081_10 (sequence is synthesized)
tcataatattggtgtgagtagcaagtgaaataatgtgtataaaggaataagaatggtgctggcattgttaaatctaaaaatactagtttgccttctcattcctcattgatttcctttttc

SEQ ID NO: 1018297 - DNA, 120 bp, Artificial Sequence
  ENSG00000258081_11 (sequence is synthesized)
aagctaaaactggatttcactttgtcagaagcaactggaatataatgtgcagaagaatatggctaatgcagcttaaatttgttgttatcattgtattaaatgatctaaaactgtatcaaa

SEQ ID NO: 1018298 - DNA, 120 bp, Artificial Sequence
  ENSG00000258081_12 (sequence is synthesized)
ggtataaacatattcactagatttgtagaatgaagttattccttccctatactttccactacaacaattcagccaaaaagatggctttcatactaagcataagaaggaacttcactgtaa

SEQ ID NO: 1018299 - DNA, 120 bp, Artificial Sequence
  ENSG00000258081_13 (sequence is synthesized)
ttatgatattctaaccaagaatatatgcatatctaggcaataaccaaagtgaatagaataaaatttaattcctgatagattaaataggcaatagcaaggaatgctaacgctcctcatagc

SEQ ID NO: 1018300 - DNA, 120 bp, Artificial Sequence
  ENSG00000258081_14 (sequence is synthesized)
gttcttgttggaagaatcatctaggaggcattgggatttctggtgctttttaagcaatgagagatatcagtccactgaatgaggaagagaataacgtttagtttcggactaaaagttcat

SEQ ID NO: 1018301 - DNA, 120 bp, Artificial Sequence
  ENSG00000258081_15 (sequence is synthesized)
ctggactacggaaaacacgtttgcctcaatcagtgaagaaggtatgctgagagctgaaagaaaaggaaagcaggattgttttctgctggttgctttctgaaattctactggacctaatgc

SEQ ID NO: 1018302 - DNA, 120 bp, Artificial Sequence
  ENSG00000258081_16 (sequence is synthesized)
gtcagcttcccccaatatttttctactttggataggaggactacctctcagcatttcctgtaatggcattgcacacctgtatacccagtctttggcaatacacattacagatactggcca

SEQ ID NO: 1018303 - DNA, 120 bp, Artificial Sequence
  ENSG00000258081_17 (sequence is synthesized)
aaaaagaattagaaaatcagtgtcaaagttggattgtggtccctgaagacttagattaatggaattctgctggaaacataaaggttgtttccctgctgttcacatctgttgcatcctggg

SEQ ID NO: 1018304 - DNA, 120 bp, Artificial Sequence
  ENSG00000258081_18 (sequence is synthesized)
aaaaaaacaaaaaggaagatgttatgtgaagagctgatgtttgcatcgccgactctccctgatttgtgctgatgatagctgaagctgcagtcttggcatcttctactgcacattgtcatc

SEQ ID NO: 1018305 - DNA, 120 bp, Artificial Sequence
  ENSG00000258081_19 (sequence is synthesized)
ctcctgccatgattctgaggcctccctccccagccatgtggaaccgacatttgtcattggaatccagttaccatggtggaaggatgaccaattagcccatgacaagagactgcatgaaga

SEQ ID NO: 1018306 - DNA, 120 bp, Artificial Sequence
  ENSG00000258081_20 (sequence is synthesized)
ccatgacaagagactgcatgaagaaaccacagtggagagaaactgaggcctccaggaaatagctagtattaatcacaagactaatgagtgaatgagcttccaagcttccatctgcggcca

SEQ ID NO: 1018307 - DNA, 120 bp, Artificial Sequence
  ENSG00000258081_21 (sequence is synthesized)
gacacagtggagcagagaagccatatcttcctgccctgtccaaattccttgctcacagatttcataagcataataaataaatgttttgctatagtttgtatgttctcataataagcggag

SEQ ID NO: 1018308 - DNA, 120 bp, Artificial Sequence
  ENSG00000258081_22 (sequence is synthesized)
caggtgatcactttataaagacttgtgaaattgtacttacaggtgtatgtacttttctgaaaatatgatcttttttcgcaataattttttttaaatctatattttaatcgtgcctttttc

SEQ ID NO: 1018309 - DNA, 120 bp, Artificial Sequence
  ENSG00000258081_23 (sequence is synthesized)
cgatttgatcttacatgatatttgttttactggtttttctttaattttcacagctgatggacagcaaaacttgattcagaatcacactgctggtttatggattcaaaagattcaactcta

SEQ ID NO: 1018310 - DNA, 120 bp, Artificial Sequence
  ENSG00000258081_24 (sequence is synthesized)
aaaagctcttacttcccattttcactgctctcatccttattatttatttatttacaccttgaacagacacagccttaatatattttctatacccattccaatccattattatgttatttt

SEQ ID NO: 1018311 - DNA, 120 bp, Artificial Sequence
  ENSG00000258081_25 (sequence is synthesized)
tcttctacttcaggatacaataaaaatattataacggtaaactaacacactttacaaatatgtcaagcatttgcaagtaatttatttcagttaaaattataaaatgttttactttaaata

SEQ ID NO: 1018312 - DNA, 120 bp, Artificial Sequence
  ENSG00000258081_26 (sequence is synthesized)
ataagagtaaactagaaaagtatattttttccatcaataaaagatacataatgaaaaatatgcatgaataagaatttctaaaaattctcaggaagacaaaaaataaaatgaatgtactgg

SEQ ID NO: 1018313 - DNA, 120 bp, Artificial Sequence
  ENSG00000258081_27 (sequence is synthesized)
ctggtaaaataaaaacaaatttgaaaaaagcttaacaataacagaagatacaattgaatgctcctgaagaatacagagtgattctgaaccaggaatacagtgatagcagaggcagctacg

SEQ ID NO: 1018314 - DNA, 120 bp, Artificial Sequence
  ENSG00000258081_28 (sequence is synthesized)
tgaaatggaaggtggtaaatagaggcattgaacacatggaagtgtaatggttcactcacctttgccccaccatttctcgtccatttacaaaataataataataataataatgcagatttt

SEQ ID NO: 1018315 - DNA, 120 bp, Artificial Sequence
  ENSG00000258081_29 (sequence is synthesized)
tttaaaaaagtcatcacttaagaagttgagccaaaagtctttggagaaataggataatagaatatctgaatatctgtaccacacaaaggaatctccacataattttgatgatacaggttg

SEQ ID NO: 1018316 - DNA, 120 bp, Artificial Sequence
  ENSG00000258081_30 (sequence is synthesized)
ggggattccctacataataactaaatttctcacaggttactattaaccatgattgttaaatcataactattaactattaaccatattaagttaatagttaaactattaaccgtattaagt

SEQ ID NO: 1018317 - DNA, 120 bp, Artificial Sequence
  ENSG00000258081_31 (sequence is synthesized)
taatagttaaactattaactgtattaagttaatagttaaaaatcaaagttaatagtaatgatttaacaattaatgaagtattttggaatagaagatctaagcctaccacctttcagttca

SEQ ID NO: 1018318 - DNA, 120 bp, Artificial Sequence
  ENSG00000258081_32 (sequence is synthesized)
agcagtcattgatatgctgtggagaaggcacccgaaagttaaagttcttttttcacttataaagaaatccataaaagtgaaataaaatccctgccaccctcactcagtaggataccacaa

SEQ ID NO: 1018319 - DNA, 120 bp, Artificial Sequence
  ENSG00000258081_33 (sequence is synthesized)
agattaatgaggtaatgcaaaatagtgctttgagctattcatacgaatggtgctttacagaggtactttattgtaattattctctgcatttacctttaatgccgtatctaaagaattttg

SEQ ID NO: 1018320 - DNA, 120 bp, Artificial Sequence
  ENSG00000258081_34 (sequence is synthesized)
gactagaagggaatgtaactttccagtacacagaaggtgtttcaaagtcatctgttccaatcttaactgttagctatatttttcttaaattaattaaaatctgcattttataattccttt

SEQ ID NO: 1018321 - DNA, 120 bp, Artificial Sequence
  ENSG00000258081_35 (sequence is synthesized)
gtattttggattattgcaatgaattaaggaaggtaagggatttaaagtgtctggctcttggtaggaccttattaaatatttgttttgataatgttactgtttgcagtcaaaacagttaca

SEQ ID NO: 1018322 - DNA, 120 bp, Artificial Sequence
  ENSG00000258081_36 (sequence is synthesized)
gtaaaaatggttttagaagttgtaacaaatcaggctgcaggatctgggaaaaaaagggctaaactgcctttaatggggaaccctattaaagttggaaagctgacacttaatagactatcc

SEQ ID NO: 1018323 - DNA, 69 bp, Artificial Sequence
  ENSG00000258081_37 (sequence is synthesized)
agtttttcttcaggacgattacagcccagagcagctaagttcttttcaaaatttcaaaatgctggattg

SEQ ID NO: 1018324 - DNA, 120 bp, Artificial Sequence
  ENSG00000258081_38 (sequence is synthesized)
ctgggagaaaactcatggcatcataacgtcagcttcccccaatatttttctactttggataggaggactacctctcagcatttcctgtaatggcattacacagccattttgggagaacca

SEQ ID NO: 1018325 - DNA, 120 bp, Artificial Sequence
  ENSG00000258081_39 (sequence is synthesized)
gaaggcaaggaaccaagggacacttacaggagctgaaggcaacttccaaccaacctccagcaagaagtcaggctttcagtcatacaatcacaaggaaatgaattgttccatcaacctgag

SEQ ID NO: 1018326 - DNA, 120 bp, Artificial Sequence
  ENSG00000258082_0 (sequence is synthesized)
tgccagggggcacagtgtggctttagctagattctttgaacttggagtcaaacctgaggctctgaccccttgtagccgctggccctcccttgacccctttggatgagtgagggggctcag

SEQ ID NO: 1018327 - DNA, 120 bp, Artificial Sequence
  ENSG00000258082_1 (sequence is synthesized)
ctggaccctatgaccttgcttcacattggagcatggagttttccaaggatctgtcactagtgtgccgtctgaacagacatcgctgctgacacctaaaacctcttctaagaaacactccaa

SEQ ID NO: 1018328 - DNA, 120 bp, Artificial Sequence
  ENSG00000258082_2 (sequence is synthesized)
ttattcagataattgcttgtgcctaagactgtataacctaagagtcgggtgcaggcttgataaagaattggaagccctctgcaaaactgctacaggtgttctgtgttccgacgccctcca

SEQ ID NO: 1018329 - DNA, 120 bp, Artificial Sequence
  ENSG00000258082_3 (sequence is synthesized)
tggacaggggttcttcttccggcccagtctctcccatttcctcttttctccctccatctcctcccatttgcttggccagagcagaggctcggctggtctagttcaggtaggatggccagc

SEQ ID NO: 1018330 - DNA, 120 bp, Artificial Sequence
  ENSG00000258082_4 (sequence is synthesized)
atccagtcactgccatattcaacaaggacttgagagcttctagagagagaaatgcaagtcaaaccagcctgggcttttaaaagggggctttgtgtgaccctggacacctgcaactgggag

SEQ ID NO: 1018331 - DNA, 120 bp, Artificial Sequence
  ENSG00000258082_5 (sequence is synthesized)
ccaacactgccacgtgctctctcttttctcacgcctcaacttcctctgaatactgatctaaatctctttgctaagcttcctctctatggcaggtaatgtgcacgatggcagcttttgctt

SEQ ID NO: 1018332 - DNA, 120 bp, Artificial Sequence
  ENSG00000258082_6 (sequence is synthesized)
attgtacctcatgacttcactgccagaaagggacagagaggggccttcacggccttcactggggccaggtgaccatcattggctcaaacactgcggcttgggaagagctgaactgatgcc

SEQ ID NO: 1018333 - DNA, 88 bp, Artificial Sequence
  ENSG00000212930_0 (sequence is synthesized)
ccagctaatttttgtatttttagtaaagaaggcgtttcacgatgttggccaggaacttcgacctttcaaagtgctgggatttacaggc

SEQ ID NO: 1018334 - DNA, 120 bp, Artificial Sequence
  ENSG00000212930_1 (sequence is synthesized)
tgattctaatgtgcatccaagctggaaactactggcttagaagcagaagtcaagaggcctcagctgtttgcagaggaaacctatggtcgcttgtatatttcaatgggataggaaaaatac

SEQ ID NO: 1018335 - DNA, 120 bp, Artificial Sequence
  ENSG00000212930_2 (sequence is synthesized)
tagaagactcatgggcttgcattttttttttcttgaacaagtggaccatagccgactctttgtttttccagtttaaccttagaaaatatgcccaaagtcaacaggtatacaattaacctt

SEQ ID NO: 1018336 - DNA, 120 bp, Artificial Sequence
  ENSG00000212939_0 (sequence is synthesized)
ctcatcctggctgctctcaccgtggcctgtccagatgcaggagctcctctctgaatctggggctactggcagaaccagtaaacacggagttactcctgtactgagctgagtaaaataatc

SEQ ID NO: 1018337 - DNA, 120 bp, Artificial Sequence
  ENSG00000212939_1 (sequence is synthesized)
tgactgagaggatgcgctgacctcagtttcgacaactgcgtttggtaccaagccctgcaagggctccacggagcagctttgggggagacctgcctgcaggaacatgtaccccacggagca

SEQ ID NO: 1018338 - DNA, 120 bp, Artificial Sequence
  ENSG00000212939_2 (sequence is synthesized)
gctttgggggagacctgcctgcaggaacatgtaccccacggagcagctttgggggagacctgcctgcaggaacatgtaccccacggagcagctttgggggagacctgcctgcaggaacat

SEQ ID NO: 1018339 - DNA, 120 bp, Artificial Sequence
  ENSG00000212939_3 (sequence is synthesized)
gtaccccacggagcagctttgggggagacctgcctgcaggaacatgtacctcacggagcagctttgggggagacctgcctgcaggaacatgtaccccacggagcagctttgggggagacc

SEQ ID NO: 1018340 - DNA, 120 bp, Artificial Sequence
  ENSG00000212939_4 (sequence is synthesized)
tgcctgcaggaacatgtaccccacccgacacgtcctgggagcctcgtctgaggtacaaacaacaggaaagcactgatgcatttttcaaaatccagcaggagggaacggtgggctgtggat

SEQ ID NO: 1018341 - DNA, 120 bp, Artificial Sequence
  ENSG00000212939_5 (sequence is synthesized)
gctggctgggaaagctcctcgggcacagccctgtgggcagggaggggaggagggctcagcccccacacaggccgcctggcaccaggagtcacaggcctcagccgtgggatgtccccagag

SEQ ID NO: 1018342 - DNA, 120 bp, Artificial Sequence
  ENSG00000212939_6 (sequence is synthesized)
ttccaaccgccactcttgcagaagcagcccagcagggtgagggtggggccacatggggctcagctgcaggagggacgccaggtcctgcacttctcacccgcagtgaccttgggcagggca

SEQ ID NO: 1018343 - DNA, 120 bp, Artificial Sequence
  ENSG00000212939_7 (sequence is synthesized)
ttcattccttgggagaaatttcctcgttggtgaaatgaaatcactgcttggcttcagccacataatgttaggcacgctaactgcagcctaggcaacctcagaccctcaggaaatcaacag

SEQ ID NO: 1018344 - DNA, 120 bp, Artificial Sequence
  ENSG00000212939_8 (sequence is synthesized)
aggggtgccagctccctgcacaggtcccggcctaactcgggatgccactcagggccctcgtcttcccatcctgtggctctgtcttcacaaggccccagaggtgctcttgtcccttccctt

SEQ ID NO: 1018345 - DNA, 120 bp, Artificial Sequence
  ENSG00000212939_9 (sequence is synthesized)
tcagtccctcagccagtgggcagcacacggccacccaaacacaagaggccaggaccatggacagcagggagcacagagcccaggcctccgtgatcctaggaacacgcagcatccgggaac

SEQ ID NO: 1018346 - DNA, 120 bp, Artificial Sequence
  ENSG00000212939_10 (sequence is synthesized)
acggaaagtaaagatggagacatggggcgggaggaagctaagcagggacacagtacccccttgcatcacggaaatgcctggccagagcgacctgccgcaagaagccagcccagctgctcc

SEQ ID NO: 1018347 - DNA, 120 bp, Artificial Sequence
  ENSG00000212939_11 (sequence is synthesized)
tgtccctgaaatgtccggagagagggccagcagggaggctggcgcctgggccaagagaggggctactcagttcttccagaacattccagtgtggcccatggacaccggccttctgatgtc

SEQ ID NO: 1018348 - DNA, 120 bp, Artificial Sequence
  ENSG00000212939_12 (sequence is synthesized)
cagagaggggctactcagttcctccagaacattccagtgtggcccatggacgccggccttctggggtccattctgtcctgtgtcacttcagttgatgagctgcttgagaccagaactgcc

SEQ ID NO: 1018349 - DNA, 120 bp, Artificial Sequence
  ENSG00000212939_13 (sequence is synthesized)
caaatccagaaccgcccactaccttctgtgaggctgtggccagaaagcaagccagacttctgaagctgcctgggcctgtcgggacccaggagaatctggccgtgaaggagaataaaggag

SEQ ID NO: 1018350 - DNA, 120 bp, Artificial Sequence
  ENSG00000212939_14 (sequence is synthesized)
gaagccaggcctggcacagggacagggtggggacccagtgagatctccaaggaggaagccagggctcctacactggggctgctgttctcccggaggaactccacccaaggagagtctggg

SEQ ID NO: 1018351 - DNA, 120 bp, Artificial Sequence
  ENSG00000212939_15 (sequence is synthesized)
attatcatgagagacaggaccgcatctgtgcacagtgcagtacgtcaggtgctggccaggggccgggggcctcagggaggagagtcacccaccaggccaactaggacagacgaaacgtga

SEQ ID NO: 1018352 - DNA, 120 bp, Artificial Sequence
  ENSG00000212939_16 (sequence is synthesized)
ctgacagacggcagttcaccaaaacccaaaaactggtcattctctggcctttaacaaaccaaagtatatttctccctctgaaataagaaacacaggacaattattaagttccaaaagtac

SEQ ID NO: 1018353 - DNA, 120 bp, Artificial Sequence
  ENSG00000212939_17 (sequence is synthesized)
gtttcattttggaggcatgttgttggtcccctttggaatcatgaacccctgtgagcgaaacacctcccaccattgattctgacagggtacggcgggcagttcccggcccaggtagaggca

SEQ ID NO: 1018354 - DNA, 120 bp, Artificial Sequence
  ENSG00000212939_18 (sequence is synthesized)
gacaggtgcagagccacagggccaccactgcagagtctggccttctctccagccccgggtgcacccacggttatcagggacccagcactgcctccctgcacgcacatggctctccaggcc

SEQ ID NO: 1018355 - DNA, 120 bp, Artificial Sequence
  ENSG00000212939_19 (sequence is synthesized)
accactgcagagtccggccttctctccagccccgggtgcacccacggtgatcagggacccggtgctgcctccctgcacccacccggctctccacagcagcaaacggggtacattagggtg

SEQ ID NO: 1018356 - DNA, 120 bp, Artificial Sequence
  ENSG00000212939_20 (sequence is synthesized)
gacgggatgtggggccagggccctgctagggctggggtggactgcggagggccggcaccaagcagttccaggtgtggagggcggccctatgtcagctgttagacacgcaggggaggcacc

SEQ ID NO: 1018357 - DNA, 120 bp, Artificial Sequence
  ENSG00000212939_21 (sequence is synthesized)
tcagatggctacaggtttgattgtgtccccacaaaaatccatatgttgaagtcctaacccccaacactgccgaagatgaccttatttggaaatagagtcatcaaagacatcattggctac

SEQ ID NO: 1018358 - DNA, 120 bp, Artificial Sequence
  ENSG00000212939_22 (sequence is synthesized)
attaagataaggttatactagagtagggggacacctagcttattatgactggtgtccttataaaaagaaggaaactggacacataaagggagaatgccataggaggacggaggcggagat

SEQ ID NO: 1018359 - DNA, 120 bp, Artificial Sequence
  ENSG00000212939_23 (sequence is synthesized)
cggggtgaagcttctctaagccacggagagcggcctagaaccgacccttccctcacagccctcagaggacagcctggaaccgacccttccctcacagccctcggaggacggcctggaatc

SEQ ID NO: 1018360 - DNA, 120 bp, Artificial Sequence
  ENSG00000212939_24 (sequence is synthesized)
cactcttccctcacagccctcggagggcagcctggaaccgacccttccctcacagccctcggagggcggcctggaaccgacccttccctcacagccctcggagtgcgacctggaaccaac

SEQ ID NO: 1018361 - DNA, 120 bp, Artificial Sequence
  ENSG00000212939_25 (sequence is synthesized)
ccttccctcacagctcttggagggaacccaccctgcccacaccttgacctcggacaggtggcctctagagacctgtgcagtgagttcctgctcccagcctgtggtccttccatgtggaag

SEQ ID NO: 1018362 - DNA, 120 bp, Artificial Sequence
  ENSG00000212939_26 (sequence is synthesized)
caaagcaaactcctccaggcacattcaccgccattggcatgggcctccgacactgaccagggcctcccgtcacctctgcccctgcccaccactccccagcccaggtaccatgctgtaaaa

SEQ ID NO: 1018363 - DNA, 120 bp, Artificial Sequence
  ENSG00000212939_27 (sequence is synthesized)
acagcctcaaaaagaacatgaggtccacagctcctccaggagactgggccagccccaagcacatccagagaggtggctcctctgactggaggctcacgccaaagccacacagagacagct

SEQ ID NO: 1018364 - DNA, 120 bp, Artificial Sequence
  ENSG00000212939_28 (sequence is synthesized)
gccattctcgctcgctcatgcttcccccgagcctaaaccctgaccagccagctctatacatttacatctttttctggcctcacacactgtctagaatgtccagtcgaatgttgagaagtc

SEQ ID NO: 1018365 - DNA, 120 bp, Artificial Sequence
  ENSG00000212939_29 (sequence is synthesized)
gagaagtcgtggtcaaagcagaaagcccagctttatccccagtcttagtgggtacgtgtttgctgtttcacgttaagatactggctggcagtggggcacagtgactcacgcctgtaatcc

SEQ ID NO: 1018366 - DNA, 120 bp, Artificial Sequence
  ENSG00000267882_0 (sequence is synthesized)
gcatagaagtaagaaatcaggagcaaaggttgggggtggggaggaagcaaaattgtcctcgcagcagagaatgcctaagccaggaggaacttgtaaatgaaaaccgctcgcattagcaaa

SEQ ID NO: 1018367 - DNA, 120 bp, Artificial Sequence
  ENSG00000267882_1 (sequence is synthesized)
tgattatttcctccaacgctgaccgtctcttagacccacagaaactcgaggaccggtctgcaccctggctgacttgggcctgccagagctgccgggctgagccctctcctccagaggact

SEQ ID NO: 1018368 - DNA, 120 bp, Artificial Sequence
  ENSG00000267882_2 (sequence is synthesized)
gcactggcctgaactgtgcttataaagaatctctgcaaatcaacaggaacttctcatccagagccgggatagggagggctggaatggaaatgaggctgtggaatgaaaggtcactctcaa

SEQ ID NO: 1018369 - DNA, 120 bp, Artificial Sequence
  ENSG00000267882_3 (sequence is synthesized)
cttggggaaaatggcatttcaccaggaacatcaagtacctcggaggcagaacatgcgaggggcagggaacgccaagaggaggcacttacctgccattgagaaagtgcggctgctcagagg

SEQ ID NO: 1018370 - DNA, 120 bp, Artificial Sequence
  ENSG00000267882_4 (sequence is synthesized)
gcctagcctctcttgttcaaaagagaacagaggctcacccacagcagacattcctgcttccggatcctcagcggcctctcccagggggaggaggaagaagcaaagagaacaggctaagag

SEQ ID NO: 1018371 - DNA, 120 bp, Artificial Sequence
  ENSG00000267882_5 (sequence is synthesized)
tcaccacttaccaggccagccccggtcttgtacgcattaggtcgcccggcggggcaaggacactgtcacctctttgcaatcaggcagtctgaaacccagcgacttgccttcatgtccccg

SEQ ID NO: 1018372 - DNA, 120 bp, Artificial Sequence
  ENSG00000267882_6 (sequence is synthesized)
ggctttcgcctataatttatcaccctcaacagcagctcggctgagctgaaagtctccggtgcagtgcaccgaagagccattgatttcgtgggattgtgaataaatacgaggaactgcagt

SEQ ID NO: 1018373 - DNA, 120 bp, Artificial Sequence
  ENSG00000267882_7 (sequence is synthesized)
tgttctgctggccgaggtgacaatatcagaagggagcctggggggagggaaacagctgtggtttgcattttgaagttgtttttaacatttttagtaattgtttcagattctccagttctg

SEQ ID NO: 1018374 - DNA, 120 bp, Artificial Sequence
  ENSG00000267882_8 (sequence is synthesized)
atgcccctctcctagaaatgagaaaacccatcttttatacttgaggtataatcctttcccactagacacagcctcctccacccttctctcaataatgcagaagtggtgattaaagggcac

SEQ ID NO: 1018375 - DNA, 120 bp, Artificial Sequence
  ENSG00000267882_9 (sequence is synthesized)
tgtttagccctcaacaactagaggcaatagcaaccgcggccctttctcctccccagctgggatgaggccctctggaaaaacgacaacatcgcaacaggaatttcctggatcaagaatgcc

SEQ ID NO: 1018376 - DNA, 120 bp, Artificial Sequence
  ENSG00000267882_10 (sequence is synthesized)
aagttctttccaattttactgaggcaggatccgactccctgtgagaacgcactgcccaccacccacccaccccctcagcaggcccaggccccaaaggctccctccaacatgtgtacatga

SEQ ID NO: 1018377 - DNA, 120 bp, Artificial Sequence
  ENSG00000267882_11 (sequence is synthesized)
ggcccttcaaactcgaccggaacaccacaaagaatgtggagaaaccggttgcctctggcctttacattgtggctggctgaggagctggttctggtggctgacacccgttggcactattta

SEQ ID NO: 1018378 - DNA, 120 bp, Artificial Sequence
  ENSG00000267882_12 (sequence is synthesized)
tccagcccctgcctggcttgggttctggaaatctccggtggtagtggcttccaaactgcaatggggaatcgcggcgtcagagggcaattcagaaacaaaaagacagttctgtgctggcag

SEQ ID NO: 1018379 - DNA, 120 bp, Artificial Sequence
  ENSG00000267882_13 (sequence is synthesized)
catttgaagcacagaagtgggttgggagaagcaaagggaaattagcttcagaaagggggcagatgaaggaagaggcgccactgctaaccaaccaaggtccccatctgccctggatggtat

SEQ ID NO: 1018380 - DNA, 120 bp, Artificial Sequence
  ENSG00000267882_14 (sequence is synthesized)
ctctaaaagccacctaaagaaggcaaaattctctactgaaacgccaggtacgaagggacaggccctccacagtcaccttgtcacattcctttggggagcgaagagttcagacccaacatg

SEQ ID NO: 1018381 - DNA, 89 bp, Artificial Sequence
  ENSG00000267882_15 (sequence is synthesized)
tcacattcctttggggagcgaagagttcagacccaacatgtcacccaaattaccctggccagccaccacgtaaagatgctgcggctgtg

SEQ ID NO: 1018382 - DNA, 84 bp, Artificial Sequence
  ENSG00000267882_16 (sequence is synthesized)
gaatcgcttgaccccaggaggctggagggggtgacagagcaagatgccatctcaaaaataaataaataaagatgcttaacatca

SEQ ID NO: 1018383 - DNA, 120 bp, Artificial Sequence
  ENSG00000267886_0 (sequence is synthesized)
atttggcggggtctttgtctctcgctcccgccagagcttgggatcggtcttcactgttccgcgtcctctacctgggaaccaccgacccccgcccggcgactttgtcacagactctgttgc

SEQ ID NO: 1018384 - DNA, 120 bp, Artificial Sequence
  ENSG00000267886_1 (sequence is synthesized)
cctgtgatctgcaggtcctgggagacgcacagccaagatgccagggcaccctggaagctgtgaagtgttcagatgcataatctcatccctgaacatcctgctggtgcgattatgacatat

SEQ ID NO: 1018385 - DNA, 120 bp, Artificial Sequence
  ENSG00000267886_2 (sequence is synthesized)
taatatcgttgggcctcacacgtacgttatgtgactctcctgcgtgtgccctgtccatgtgggccattgtgacatattgctgggtccaacaactggttgatgtagctctactgcctaggt

SEQ ID NO: 1018386 - DNA, 120 bp, Artificial Sequence
  ENSG00000267886_3 (sequence is synthesized)
cctgcctatggaggactttgtgatgtatccctgaacccatcacacagattctgccctcagaggacattgtgacatgtcactgggcctaatactaagatgacatcattctttagttttggc

SEQ ID NO: 1018387 - DNA, 120 bp, Artificial Sequence
  ENSG00000267886_4 (sequence is synthesized)
tcattgcgatatatgtcttcaccaatcactgaggtcgaacgcccagtgatgtgactctccttcctggtccatgccctcagggaagattgtgacataccccggcccagcacacagttaatg

SEQ ID NO: 1018388 - DNA, 120 bp, Artificial Sequence
  ENSG00000267886_5 (sequence is synthesized)
tcactcttgtgcttgctgtctacccatgggtaggattgtgacatatatcgtggccaagcacaaagatgtaatgactgtcatacctcgaagaaagcaatagagttaatgttgctcctaggt

SEQ ID NO: 1018389 - DNA, 120 bp, Artificial Sequence
  ENSG00000258667_0 (sequence is synthesized)
catcatgtagcgccagccacaccaggaacagaagggtgccgggtaccttccgcatgcttggtattctccccgcggggctctgaccgctgccgctctcaggcacctgtctttcctctccgt

SEQ ID NO: 1018390 - DNA, 120 bp, Artificial Sequence
  ENSG00000258667_1 (sequence is synthesized)
cccagaatggagccaagacaagggaataaacgaaattcaatagtacacggagatcgggtgtctgggcagcgtcttggaaaaactatccactacagcaatcaacaacacagaagacaactt

SEQ ID NO: 1018391 - DNA, 120 bp, Artificial Sequence
  ENSG00000258667_2 (sequence is synthesized)
aacaacacagaagacaacttctgcaaccctatcgggagaggaggggttctctccaccaccagtcccctggaagaattctcaaaacacagaatgcttgccaagtcaatcctaagccaaaag

SEQ ID NO: 1018392 - DNA, 120 bp, Artificial Sequence
  ENSG00000258667_3 (sequence is synthesized)
gaactcctgggctaaagcgatccttctgccttggcctcccaaagtgcgaggattataggtgtgagccacccaacctggcctttgccagtatttttaaatccaaacacctatgcatggtgc

SEQ ID NO: 1018393 - DNA, 120 bp, Artificial Sequence
  ENSG00000258667_4 (sequence is synthesized)
ttactaataacacagtggtattctaaacatttttcacctattatttaatctttattattatcaccatgttacagataaggaccctggctaaatagcttacccaacattactccgttaata

SEQ ID NO: 1018394 - DNA, 120 bp, Artificial Sequence
  ENSG00000260352_0 (sequence is synthesized)
tggatatccaccttcccaacctccacctgaaatgtgcccatcgagtcctggcaccttttaccatttcttcacaatgaaaaaaactaaacgatggaagggaagggagtacccacgatcacc

SEQ ID NO: 1018395 - DNA, 120 bp, Artificial Sequence
  ENSG00000260352_1 (sequence is synthesized)
gcactttcggaggccgaggtgggcggatcgtctgagctctgcaacccagagagtgacctgcatggagcgtgccagctgaatcccttgtcctgtgtcttctggctgagttctaccatagga

SEQ ID NO: 1018396 - DNA, 120 bp, Artificial Sequence
  ENSG00000260352_2 (sequence is synthesized)
gagttctaccataggaaacaccgccacgtgggagaacaggaagacattgatgtctgggtgcttattcctaaagcttcctccctgaggtcacctggaggttgctgcatctctctactgaag

SEQ ID NO: 1018397 - DNA, 120 bp, Artificial Sequence
  ENSG00000260350_0 (sequence is synthesized)
aggcgaacgcctccaggaagccagccaggggcaaccagaaagtccttttggtgaagtctgacatcccgcgttggtttctctggacctggtttctggcactggaggtggaagtccagactg

SEQ ID NO: 1018398 - DNA, 120 bp, Artificial Sequence
  ENSG00000260350_1 (sequence is synthesized)
gctctggccaccgaatgccctatgctggcttgtcagccgggaccccgcccctcccgctcccacgttaggagaacagcagttcacagatcctgcgcgtgtcctcaggcgctgtcacggagt

SEQ ID NO: 1018399 - DNA, 120 bp, Artificial Sequence
  ENSG00000260350_2 (sequence is synthesized)
agcccatggttctggggtctgtgaagatctcatggtcattgccaccctggaaagacacgaagtacagatgaaggctccccctcgtctgtcccgggccattgctgatgtgaccctggagtc

SEQ ID NO: 1018400 - DNA, 120 bp, Artificial Sequence
  ENSG00000260351_0 (sequence is synthesized)
ggagattgacctgggtcaattcttttttctttttgtcccctttcctcagatgttctgaaggttggaaatatgacttactaccattacctaacagttatttcttcttctttcctagttaat

SEQ ID NO: 1018401 - DNA, 120 bp, Artificial Sequence
  ENSG00000260351_1 (sequence is synthesized)
gccacaacatgtacaaagaaggaatacctgtccccaggcctcagagaaaagtcatgattgattgaagcttagcccgttcccctgctagagattgcttctgaactcagcatgtggccaatt

SEQ ID NO: 1018402 - DNA, 120 bp, Artificial Sequence
  ENSG00000260351_2 (sequence is synthesized)
atggccaatgagatggaagagtctggaagcaggcttttggaaagattcttgtagcctagttaaagataaaatcccggaaagggaaaagccttgtgttgacaagcttaagagtgaaaaacc

SEQ ID NO: 1018403 - DNA, 120 bp, Artificial Sequence
  ENSG00000265489_0 (sequence is synthesized)
agagcaaacacctgtttccaggaagacaggcggccagagggagaagggagtcccggggaaaggcagggaggacgaagcgaaggggcagccggggacgcagtaaagtatgtatggctgtgt

SEQ ID NO: 1018404 - DNA, 120 bp, Artificial Sequence
  ENSG00000265489_1 (sequence is synthesized)
gctttcccccatggaactccattggtcttccatagcactggtgcattgggcattctaccactgctgcaagtgaaggtccatggaagaattcaaattgagatcagtgacatccaggaaatc

SEQ ID NO: 1018405 - DNA, 120 bp, Artificial Sequence
  ENSG00000265489_2 (sequence is synthesized)
gatgttgaagatgctggggctgctggtggtgagggcgctaaagcctggtgtggaatttggcggagtgaggtccagccactccatggtttcccagggagattcagtgaagcttaactgcag

SEQ ID NO: 1018406 - DNA, 120 bp, Artificial Sequence
  ENSG00000265489_3 (sequence is synthesized)
cccattgctgtccacagaagagggtgaaaactgtgtctgcattggagagagggggcctggcaagatctcatgtgcattgaagaggtcttctgcagccttcccagagaatccatccattat

SEQ ID NO: 1018407 - DNA, 120 bp, Artificial Sequence
  ENSG00000265489_4 (sequence is synthesized)
cccatcaaagtgaggctcttcgctcccaatttttagaagggtgacatcactcatctttcctagggggctctgggaatttaataagacttcaagatgctcatcactgtcggtggcataggg

SEQ ID NO: 1018408 - DNA, 120 bp, Artificial Sequence
  ENSG00000265489_5 (sequence is synthesized)
atcaaaggggatctggctgcctgaagaggcttgttcaaaggaagccgagggcttggtgaggacagcagttggacttcgggaagatctgggtatctttgggactttttgaagacatgagtg

SEQ ID NO: 1018409 - DNA, 120 bp, Artificial Sequence
  ENSG00000265489_6 (sequence is synthesized)
atcctctctagcgtctgctggcatttctgtgggcaatacacgatgtgacttgttaaatcacttcaaattgagcatgccacacaatatgagtgagttacacttagatacagaagatggcca

SEQ ID NO: 1018410 - DNA, 120 bp, Artificial Sequence
  ENSG00000265489_7 (sequence is synthesized)
cgcttccctggtcaccgctcaccacccagtctcatctctaagctgctctatcaatctccaattcatcttccctctggtttttcccaaaccctttcctcttgggaattccactctgtgatt

SEQ ID NO: 1018411 - DNA, 120 bp, Artificial Sequence
  ENSG00000265489_8 (sequence is synthesized)
attaaactctcttctctgaaggttcctggcctactcctctgacccctggtagtcccttgaggacactgagtccatcccaacaccatcagtgagggcctgaagatgagggaccaggcgcca

SEQ ID NO: 1018412 - DNA, 120 bp, Artificial Sequence
  ENSG00000265489_9 (sequence is synthesized)
tgccattgccactttctgattgctactccccccgcttctgatgacaactcagcagttttgggttttgagggtgacagcaatgcctcacccctagcctcctggtcactccccctcatctac

SEQ ID NO: 1018413 - DNA, 120 bp, Artificial Sequence
  ENSG00000265489_10 (sequence is synthesized)
tgaaaactctgcttcctactccattgccttttccccacttgaacccttctcattctgtaacctgagcatccttggaaatcacagtgttcatgctggcctctgagctcccgacttcctcct

SEQ ID NO: 1018414 - DNA, 120 bp, Artificial Sequence
  ENSG00000265489_11 (sequence is synthesized)
caactccagtgattcccccactgccactctgtcagacacaccttggattgtgtcatctccaaatactgcatccctctgaaagctcactttcaagctatattttctattctctgtccatcc

SEQ ID NO: 1018415 - DNA, 120 bp, Artificial Sequence
  ENSG00000265489_12 (sequence is synthesized)
tctcccaaccctccaagccacttattatgtaccttgtaacaataatttcccaaccatttacagtcacactaatccatagactctactatgttatcactgtccaccagcccctctggtctt

SEQ ID NO: 1018416 - DNA, 120 bp, Artificial Sequence
  ENSG00000265489_13 (sequence is synthesized)
cacttctttccttgtctagcctgtatttttggcagaaccccacacctggaggaacctgatcatctgccttcgctgagcatgctctggatcagcagaacattgcaagagaaaaattaaaca

SEQ ID NO: 1018417 - DNA, 120 bp, Artificial Sequence
  ENSG00000265489_14 (sequence is synthesized)
actaagctgacttggtttcactttagatttctgaggtcagacctacaactggcatttaagactgcaaaacaacccagctgtgtttctccagaaaactcagttcattcatgattaagtcat

SEQ ID NO: 1018418 - DNA, 60 bp, Artificial Sequence
  ENSG00000265489_15 (sequence is synthesized)
tgcatcctcacgcttttctggccttgccacatatttcattaaaaatatacaagggcaggc

SEQ ID NO: 1018419 - DNA, 61 bp, Artificial Sequence
  ENSG00000265489_16 (sequence is synthesized)
gagtgagactccgtccatctgatatgaactcttctcatctttccattacagaactcattta

SEQ ID NO: 1018420 - DNA, 120 bp, Artificial Sequence
  ENSG00000265489_17 (sequence is synthesized)
atatgaactcttctcatctttccattacagaactcatttacatacatatgtttgtacccatctcttccttcttccctcttgctacaatggaggaaaggtctgttcacttgcttgttgtct

SEQ ID NO: 1018421 - DNA, 120 bp, Artificial Sequence
  ENSG00000265489_18 (sequence is synthesized)
gtctcccttaccagactgtaaactccataggaatcaggatcttgtctgatcatagcacggagactatgacaacgcctggctaccccttctctgagtcctttgctacctccgtctctgaaa

SEQ ID NO: 1018422 - DNA, 120 bp, Artificial Sequence
  ENSG00000265489_19 (sequence is synthesized)
ttttaaatgtttttggcttaaggattcctccctgagtgcttttattttgatctacacatgctccttaggtcatcttattcatttgtgtggtttaaaattctaggtacacactccataatt

SEQ ID NO: 1018423 - DNA, 120 bp, Artificial Sequence
  ENSG00000265489_20 (sequence is synthesized)
ttttaagtaaataaatgaacaaattaaaaggtgacaaaaagaacatgctgattatgttttattgctagcatgtataacatttaagcatgaatgaaccatccagtggaaggttgctaattg

SEQ ID NO: 1018424 - DNA, 120 bp, Artificial Sequence
  ENSG00000265489_21 (sequence is synthesized)
aatttcactttgagtaggtagcacaaaatgttcattatctgcttttttcttttattataattgagaaggtaggggcattgagattagaacatagaaagaagaagtgcagcaagagaaaac

SEQ ID NO: 1018425 - DNA, 120 bp, Artificial Sequence
  ENSG00000265489_22 (sequence is synthesized)
acttaaggaaacaaggattaggctgaaacatgaaaactattaaaatgattgctgaaaaatgctcctaggacaaaggcagtgaggaatcatccactaagccttcttttatcagctctaaaa

SEQ ID NO: 1018426 - DNA, 120 bp, Artificial Sequence
  ENSG00000265489_23 (sequence is synthesized)
atgtgcgagaagctcaaaggaaatggctctccctgaggactacctggtacatccaactcacagtgtgcatctgatcttggtaccgagagttcattccttagagttcatgtgggctcagaa

SEQ ID NO: 1018427 - DNA, 120 bp, Artificial Sequence
  ENSG00000265489_24 (sequence is synthesized)
tgtcctaatggacaggacacaggcagtcttacctccgctttcaataagcacgtccaggagttcatccatctgctgactccgggtcatttgctattacaaattaaccaaaggaggacagac

SEQ ID NO: 1018428 - DNA, 120 bp, Artificial Sequence
  ENSG00000265489_25 (sequence is synthesized)
aatttagaaggtggttatctccgtaggaaatcattagaagcagcactgcaagattttgaactaggtttggtcaaggtatttttttttccaattgtggcaaaatacacataactttaaatt

SEQ ID NO: 1018429 - DNA, 120 bp, Artificial Sequence
  ENSG00000265489_26 (sequence is synthesized)
tactatcaaccatttttaagtgtacagttaaggggcattaagtacattcacacaattgtgtgaccatcaccaccatctgtcttcagaattcttttcatcctgcaagactaaaatcgtgta

SEQ ID NO: 1018430 - DNA, 120 bp, Artificial Sequence
  ENSG00000265489_27 (sequence is synthesized)
cccattcaaccataatttcccacaccccatcctttagcccctggcaaccgccattttcctttctgcctttacgaatttgactattctatctaagtccctcatagaagcgaatcgtacagt

SEQ ID NO: 1018431 - DNA, 120 bp, Artificial Sequence
  ENSG00000265489_28 (sequence is synthesized)
atttattcttttgcaactagcttatttccctaagcgtaatgtccttaaggttgatctatgttgtgacatgtgtcagaatttcttttttttaaagactgaataaaattccattgtatagat

SEQ ID NO: 1018432 - DNA, 78 bp, Artificial Sequence
  ENSG00000236352_0 (sequence is synthesized)
cttatttggtatacaggtgcatgccagtcccccggtaatgaaatgtaacaaaggaagcacttaagttcagtgagggaa

SEQ ID NO: 1018433 - DNA, 120 bp, Artificial Sequence
  ENSG00000236352_1 (sequence is synthesized)
tgaaatgtaacaaaggaagcacttaagttcagtgagggaaatacagctttaaattacagattgtacccagagcactttataaacggtaatgtgtgataatgtattatccttacttctgtg

SEQ ID NO: 1018434 - DNA, 120 bp, Artificial Sequence
  ENSG00000236352_2 (sequence is synthesized)
aaattgtggactgcaacttctgccggggccagttaaagggccaggagatggagagggttgcgtgaatgccattcaagaaaagggcaacagaggctaaggggttaaactccccagaaaacc

SEQ ID NO: 1018435 - DNA, 120 bp, Artificial Sequence
  ENSG00000236352_3 (sequence is synthesized)
gatctgaattacaaatttagagaatttgctgctcgacaacgaatgcaggaaggacctcactggctgctgggaacaactgcccttttgaatgaattcttttatggttaccagtcaaaaagt

SEQ ID NO: 1018436 - DNA, 120 bp, Artificial Sequence
  ENSG00000236352_4 (sequence is synthesized)
caccgtcagctggaactggaagggaggggcatttcttatctgggcaaaaagcccctgtacccagcgaggtgaaacttgcaaatgatactgtcaccttcctcaatggactgcagctcagga

SEQ ID NO: 1018437 - DNA, 120 bp, Artificial Sequence
  ENSG00000236352_5 (sequence is synthesized)
gctcaccaaaggttgcagcagacaacccccacggtgtttggagacaaaggaatagcagctgcctggtttccttgaatcaccccgtgctctgacgatggcagtgatgggcctcccaccaat

SEQ ID NO: 1018438 - DNA, 120 bp, Artificial Sequence
  ENSG00000236352_6 (sequence is synthesized)
ggcttccccaagtgctgttttcctgcttcatgccaagttaagcattctgatactaagcggcacgagatagttctcaactgggtgaggcacaggtgtgagtaatctcgaggtatggtcagg

SEQ ID NO: 1018439 - DNA, 120 bp, Artificial Sequence
  ENSG00000236355_0 (sequence is synthesized)
gcagcccccgcgctccccaataaaggatgcacccaccgagcccgaggactgaaacattgtttaggggaccccaggcactgaagggcgggttcctggagatggacatttggagtgcggtgc

SEQ ID NO: 1018440 - DNA, 120 bp, Artificial Sequence
  ENSG00000236355_1 (sequence is synthesized)
gtcagtctttgaatgtagagcagatcaatgtggaatgaggactgaaaggtctgtcaactgaaaaaaaaaacaagaatgaatataaaaaatcacaaattaaataaaccatggtccatccat

SEQ ID NO: 1018441 - DNA, 120 bp, Artificial Sequence
  ENSG00000236355_2 (sequence is synthesized)
attaatagacattactcagtgattatacaatataagcttatgggagcaagggagttcctgaatatccttgctgactgtgccgaaatgcaagacctacctaccctctaactctgagccact

SEQ ID NO: 1018442 - DNA, 120 bp, Artificial Sequence
  ENSG00000236354_0 (sequence is synthesized)
tttgtcttttgtttcagaaatccctgctatgtgcttgtcacaggagaggcactcaacaaatgtcagctgaatgtatcaatagaacccacacaagttcaaacatcacattcaagtaacaag

SEQ ID NO: 1018443 - DNA, 120 bp, Artificial Sequence
  ENSG00000236354_1 (sequence is synthesized)
atgtttagctgggcacatggccactcaaaatgaagacttcattcttggcctgccttgcaggaagatatggccacgtgactgagatctggcctatggaatgtgaatagaaatatattgcac

SEQ ID NO: 1018444 - DNA, 120 bp, Artificial Sequence
  ENSG00000236354_2 (sequence is synthesized)
ctccccctttcttcttcttctgatcattttatccagtttcttggaacttggatcggctgctgaaactccatctcatattatgaggggaaaggccatagtccactagagttactggtatag

SEQ ID NO: 1018445 - DNA, 120 bp, Artificial Sequence
  ENSG00000236354_3 (sequence is synthesized)
actgcctacaagacatttttaaatgtgagataaataaaccttcatatttttaatcaactatttttttcttcttttacttgaagcagtattttattctaactaaaacaaattaagaactaa

SEQ ID NO: 1018446 - DNA, 120 bp, Artificial Sequence
  ENSG00000236354_4 (sequence is synthesized)
tagtaaacctaaggtatttcattgcatcaaaaaacttatgaaataatttaacactgtaattatcgaacataaatagataagctaacaaaaggatatgtaggatgacaaaatgaactcatc

SEQ ID NO: 1018447 - DNA, 120 bp, Artificial Sequence
  ENSG00000236354_5 (sequence is synthesized)
cagcagtttcaaaaatcatgtcagtctttaattttttaaatttgaactatgctatacatagaatataatatacataattgcacatgtacaatttttaaaaattaggatgaaatgagcacc

SEQ ID NO: 1018448 - DNA, 120 bp, Artificial Sequence
  ENSG00000236356_0 (sequence is synthesized)
cagaaagatgttattggaaacgatcccaagatggaagacatcttgctctcaagaagtcttaagtacaactgagcttgctagcaaaactaacccaggttttcctcatttgtctttggaatg

SEQ ID NO: 1018449 - DNA, 120 bp, Artificial Sequence
  ENSG00000236356_1 (sequence is synthesized)
ttggcagaattgggactggaataaaataggatacaatttgtaaaatcatcttcatatatttgaataagatctccactgacaaggtgttgatatgtggaagtagttacctcgggtcaagtg

SEQ ID NO: 1018450 - DNA, 120 bp, Artificial Sequence
  ENSG00000236356_2 (sequence is synthesized)
ttcctgcagccaggctgcaagtactcacttcaatggaaagctctgaggtccctgccagcccctctggtctacagatgtcttgggatgcagccccaccctttcttagtcacagcagtggga

SEQ ID NO: 1018451 - DNA, 120 bp, Artificial Sequence
  ENSG00000226985_0 (sequence is synthesized)
gttcttggtagtaaccaggtcagtgataaattgggtcttaccacactacagaccacctgttcttcagatttttaggtaagcaagtatggtccctctaacacagtgttactgtgtttgtct

SEQ ID NO: 1018452 - DNA, 120 bp, Artificial Sequence
  ENSG00000226985_1 (sequence is synthesized)
ttttcaggcttcccaaaagttgtttgatagtatacaggcatgagatggtgtgactctaactcattagatgccttcgtcttttcagtcatcatgtgatggaaagaaagctatcaacttcat

SEQ ID NO: 1018453 - DNA, 120 bp, Artificial Sequence
  ENSG00000226985_2 (sequence is synthesized)
tcctgagacttcctgcaacacaggagcagcaggacatctggggatgagaagatggagagatcatccttatataatgttgcagtctggaagcatcactctcaaaaagccattgtagagaat

SEQ ID NO: 1018454 - DNA, 120 bp, Artificial Sequence
  ENSG00000226985_3 (sequence is synthesized)
accacgttttcacccagctgagtcgccttcgtatcacgcctttccagttttgatagactagaaaaatgacaagactccaagtccttgaagaggaggaaaagtgtgaagaaaacaaaaaag

SEQ ID NO: 1018455 - DNA, 120 bp, Artificial Sequence
  ENSG00000226985_4 (sequence is synthesized)
ggagatttatgtctgcttcaccattttgcccaagacttgacctgtcatacactgaagctcagagaggaagaaaggaccgtgtgagagaagaagggaacagcctttcatccataggagaag

SEQ ID NO: 1018456 - DNA, 120 bp, Artificial Sequence
  ENSG00000226985_5 (sequence is synthesized)
ttcgtctatgacaaagccactagctccatgtggccgctgagcactcaaaatgtggccagtctgaattgagatatgttgttagtataaagtccacatcggctttttgagcactttgtatga

SEQ ID NO: 1018457 - DNA, 120 bp, Artificial Sequence
  ENSG00000226985_6 (sequence is synthesized)
cggctttttgagcactttgtatgagaaaaaagaataccaaatatctccttaataattgttacattgattatatgttgaactgataacattatggatatattggattaaataaaataaatt

SEQ ID NO: 1018458 - DNA, 120 bp, Artificial Sequence
  ENSG00000226985_7 (sequence is synthesized)
caaagtgctggaattacaggcgtgcaccaccacgcccggccagatcttcatatatctaagatcctgtcaagaagacatggtaaacctcatcatgatcaagaatgagactttgcttgcatc

SEQ ID NO: 1018459 - DNA, 120 bp, Artificial Sequence
  ENSG00000226985_8 (sequence is synthesized)
gagacttcctgcaacacagatccatctaaacttttacttcattggagggtccttcctgacccatgcaactcaacaaaaaactctcacagtttttatatgctttgttggggattaacccat

SEQ ID NO: 1018460 - DNA, 120 bp, Artificial Sequence
  ENSG00000226985_9 (sequence is synthesized)
cttgcattgcattgctagcttagtatgtctagcatgggcatgcctgctgaagtttggaacttcccatcaaggaaacaggaaaatgccattggcaatgagctgaagactgatttactctac

SEQ ID NO: 1018461 - DNA, 120 bp, Artificial Sequence
  ENSG00000226985_10 (sequence is synthesized)
cagtttggaacatctgttattgctgctactacggtttctatcactgtttgatgctgggactcttaagctccaaccacgttttcaccgagctgagtcgccttcttatcacccctttctgga

SEQ ID NO: 1018462 - DNA, 65 bp, Artificial Sequence
  ENSG00000226985_11 (sequence is synthesized)
ttcagcctcacgagtagctgggactgcaggcccaccaagcctggctagtttttgtattattagta

SEQ ID NO: 1018463 - DNA, 70 bp, Artificial Sequence
  ENSG00000226985_12 (sequence is synthesized)
aggcgattctcctgcttcagcctcacgagtagctgggactgcaggcccaccaagcctggctagctcgaac

SEQ ID NO: 1018464 - DNA, 120 bp, Artificial Sequence
  ENSG00000226985_13 (sequence is synthesized)
cacccagtcctacagtttgatcatttttaaggtgcaaattctattcaacttcccatatacatggggtttcacactgggacggtgaggcaggggatcagaggtggggttaagtattgaaat

SEQ ID NO: 1018465 - DNA, 120 bp, Artificial Sequence
  ENSG00000226985_14 (sequence is synthesized)
cagcatataaggcaagaatagttgataatcaacactactctctaaaactccttaaatcagtggtgctacagagatagtacactgctagaggcaatttagaatattttgttgtgtgttttt

SEQ ID NO: 1018466 - DNA, 120 bp, Artificial Sequence
  ENSG00000226985_15 (sequence is synthesized)
ggttagcatagccaagggagggggtaccttagatattcatgagccacagctggggattttaagcaaccgtcattggtcataaagtccagagaaaagaaggatcctctccggtccttcagc

SEQ ID NO: 1018467 - DNA, 120 bp, Artificial Sequence
  ENSG00000226985_16 (sequence is synthesized)
acttctgaatgccctgctagacctgcattgtgtgtgaaaacctgctcaagattatctgaggatagatgctcacagcattttacaaataaacacaaaagtatttttagcaatcttaataaa

SEQ ID NO: 1018468 - DNA, 120 bp, Artificial Sequence
  ENSG00000226985_17 (sequence is synthesized)
catatatctaagtaagtgttatacatttacctaaacttttttactgtgtgatttttttccataggtactcaagtaagaaatgatagtctttactaactacagcaaccatgttatcctgct

SEQ ID NO: 1018469 - DNA, 120 bp, Artificial Sequence
  ENSG00000226985_18 (sequence is synthesized)
gttttatattttagagaaaatttatgtttaactttgtgattggcgagctatttgctatccaaggaattaaccatggagttgcatgtcatagtagcaattgtgggtttgtttgcaggtaag

SEQ ID NO: 1018470 - DNA, 120 bp, Artificial Sequence
  ENSG00000226985_19 (sequence is synthesized)
tagtagagagaaaatggtatctgtaacagtgctatagaccttgcagtactgcaagattccaggtatacttgatggttcttggaatgatggtagtgaataagcttaattgtggggttcaag

SEQ ID NO: 1018471 - DNA, 120 bp, Artificial Sequence
  ENSG00000226985_20 (sequence is synthesized)
ttccagttcaacaaagtgtggacagctgtgcagaaatatgattggacaaaaatgttgtgatctaaagctaatggactgagtgtggaaacccaacaaggcctgtctgtctagattcttctt

SEQ ID NO: 1018472 - DNA, 120 bp, Artificial Sequence
  ENSG00000226985_21 (sequence is synthesized)
tgtaaggcaagaccctctctggagtgggggtgttatgacctacagtcaaacaagagaaataaagttcatcacagtgagtcaagatgcctcattccaagctatggtgtaaatttcatagac

SEQ ID NO: 1018473 - DNA, 120 bp, Artificial Sequence
  ENSG00000226985_22 (sequence is synthesized)
taagaaatgtgcaagtttcctttttgctaagtatgacacatcacctctctctcacaaagggatatatgttgttactaatgtaaactcattagttttgatcaatgttttgtgaactcaaaa

SEQ ID NO: 1018474 - DNA, 120 bp, Artificial Sequence
  ENSG00000226985_23 (sequence is synthesized)
tcaccacttctgtgatcatgaacaaccagccacagtgggtctccctccagtattaacttccttgggttgataaagctttcaggaaagagagttatcatatcacaaataccacaatgattt

SEQ ID NO: 1018475 - DNA, 120 bp, Artificial Sequence
  ENSG00000226985_24 (sequence is synthesized)
cgccttcgtatcacgcctttccaggtttgaacagttgactgcccgtgactggctgaaactctgtgattggtacaaggaagtaactggatatttatgaagacagcctccaagacctttcat

SEQ ID NO: 1018476 - DNA, 120 bp, Artificial Sequence
  ENSG00000226985_25 (sequence is synthesized)
attcccccacatttgtgtgtatccctgacacataatacttcaattccctcagccttaaaatcaggcaagtgtgcctacatcacaggattgttgcaggattaaatgcaatgctttattaag

SEQ ID NO: 1018477 - DNA, 120 bp, Artificial Sequence
  ENSG00000226985_26 (sequence is synthesized)
ctgcatacatttcctgccaaatagcagctagaatgaaggtcccctcaactttgaggacagaacatttataacctccctatcaccaccacaagatgtagcatatactagctatttttttaa

SEQ ID NO: 1018478 - DNA, 120 bp, Artificial Sequence
  ENSG00000226985_27 (sequence is synthesized)
aaaaaatttcccaacaagattgcatgcattctgagaggaagtgttatgtcttaaaatttttgcatttcttataggggactgtacctagtaaatagtcttcggtaaatacaccatcagaat

SEQ ID NO: 1018479 - DNA, 120 bp, Artificial Sequence
  ENSG00000226985_28 (sequence is synthesized)
gcaaaaatcaaagtgggaataagcattctaacctctcattttatagatgaagaaacaggttcagagaattgaaaagatttgcccagataaaagtacgtagtcaaaattagatctcagact

SEQ ID NO: 1018480 - DNA, 120 bp, Artificial Sequence
  ENSG00000226985_29 (sequence is synthesized)
actctgttccccgggctgtttttgtttactccatgtatcctctgttaattgaccagattgattgattgacttcctagctctatcaccaggaagtcaaagtaaaactccaccactgaactc

SEQ ID NO: 1018481 - DNA, 120 bp, Artificial Sequence
  ENSG00000226985_30 (sequence is synthesized)
ttgaaaggcgtgtcttctgaagggtaggatttcccatcaaagaaacaggaaaatgccattggcaatgagctgaagactgactttgatttaccctaccaagcatgattttaatgactactt

SEQ ID NO: 1018482 - DNA, 120 bp, Artificial Sequence
  ENSG00000226985_31 (sequence is synthesized)
gtacaaacatgtaggtacatcaatattgggtagattcatagtgttaggataaattaggtaattgagtagaaaatacaggcacaagctagactaggtccaaacacctggcctcatatcagt

SEQ ID NO: 1018483 - DNA, 120 bp, Artificial Sequence
  ENSG00000226985_32 (sequence is synthesized)
aagacatgatcactttcattgacttcagctggaaacatttacaatccaatttcaatttagcaagatttcatcagaaggtatctcccacaaattgaggtccatcttactgttattatttga

SEQ ID NO: 1018484 - DNA, 120 bp, Artificial Sequence
  ENSG00000226985_33 (sequence is synthesized)
aaaaaatcttgaagtatctatgagaacagctattatatgaagcagagattataatagatatggagtttaagttgcagaaaaagaagactgaattattaaatgggacatcagaaaataaaa

SEQ ID NO: 1018485 - DNA, 120 bp, Artificial Sequence
  ENSG00000226985_34 (sequence is synthesized)
ggattacaggtgtgcaccaccacatcctgctgatttttgtattttgagagatggggttttggcacgttggccaagctggtctcgaactcctggcttcaagcagtccacccaccttggcct

SEQ ID NO: 1018486 - DNA, 120 bp, Artificial Sequence
  ENSG00000226985_35 (sequence is synthesized)
cgagctatttgctatccaaggaattaaccatggagttgcatgtcatagtagcaattgtgggtttgtttgcaggatcctgtcaagaagacatggtaaacctcatcatgatcaagaatgaga

SEQ ID NO: 1018487 - DNA, 120 bp, Artificial Sequence
  ENSG00000226985_36 (sequence is synthesized)
gtacccctccacaatccacgccaggaaattggatgtctactccctgcctttcttcccattgtttggggacttttccttagttcagctgaagacggggtccttgtcacacggccacgaaaa

SEQ ID NO: 1018488 - DNA, 120 bp, Artificial Sequence
  ENSG00000226985_37 (sequence is synthesized)
tttaggcttgcagattatttgaaggaaatccaaacaaaagctttagaagaaacacctggaaaaatagtatctccactttgaaaatgcagaaatacaggcataatacaatggtgaaattta

SEQ ID NO: 1018489 - DNA, 90 bp, Artificial Sequence
  ENSG00000226985_38 (sequence is synthesized)
gagtgcagtggtgcgatctccgctcactgtaacctccacctcccaggcccaagtgatcctcctaactcagcttcctgagtagctgtgacc

SEQ ID NO: 1018490 - DNA, 78 bp, Artificial Sequence
  ENSG00000226985_39 (sequence is synthesized)
gagtagctgtgaccggtaaagatggggttttgccacattccctaggctgatctcaaactcctgagctcaggcaatcca

SEQ ID NO: 1018491 - DNA, 120 bp, Artificial Sequence
  ENSG00000226985_40 (sequence is synthesized)
ttacaggcatgagccaccatgctcggccactctcattttttttaaaccaaagaaatcaatcttaaatcaattttgcacttgatttatgcacatcaattttgtttgcttcttaaagagtat

SEQ ID NO: 1018492 - DNA, 120 bp, Artificial Sequence
  ENSG00000226985_41 (sequence is synthesized)
gcttcttaaagagtatatgattagctgtacaagagactataggttaagaaaatccttagtcttgagaaaagcactgaagaggaagaaaaagacaccaggccccaagacatccaccaaaaa

SEQ ID NO: 1018493 - DNA, 120 bp, Artificial Sequence
  ENSG00000226985_42 (sequence is synthesized)
agtttattttgtgaaggttaaggacatgcccgtgacacagcctcaggaggtccagattacatgtgcacaaggtggtcagggtacagcttgcctttatacattttagggagacataataca

SEQ ID NO: 1018494 - DNA, 120 bp, Artificial Sequence
  ENSG00000226985_43 (sequence is synthesized)
tcagtcaatacatgtaaggtttacattgtttcgatctggaagggtggggcaactcgaagcaggagtcgggcttccaggtcataggtagatttaaacattttctgattggcaattggttga

SEQ ID NO: 1018495 - DNA, 75 bp, Artificial Sequence
  ENSG00000226985_44 (sequence is synthesized)
gtagatttaaacgaattgtttgggttatgataagtggttgtggaggccaaggttttatcatgcagatgaagcctc

SEQ ID NO: 1018496 - DNA, 120 bp, Artificial Sequence
  ENSG00000226985_45 (sequence is synthesized)
gtttttattggacttaaggtctgtgttgatattaatgctggaggggtataatgaggcttgtccaaccccctcctccatcatggcctgaactagtttttcaggttaactctggaatgccct

SEQ ID NO: 1018497 - DNA, 120 bp, Artificial Sequence
  ENSG00000226985_46 (sequence is synthesized)
tggccaaaaggaggggttcatttagatggttgaggggctttagaattttatttttggttcacaggatcatggttatataagatgttaacattaggagatgctgggtaaaaggtatatggg

SEQ ID NO: 1018498 - DNA, 120 bp, Artificial Sequence
  ENSG00000226985_47 (sequence is synthesized)
aaccttctgtactgcctttgcaactcttctataaatctaaaataatttcaaaatgttactattaactatactcgaggttatttatgtctattttatctgaataatgggaatatcatctaa

SEQ ID NO: 1018499 - DNA, 120 bp, Artificial Sequence
  ENSG00000226985_48 (sequence is synthesized)
atgctgagatttttgtaggtatcacttcaagagaggaaagtttctcttacgagtgttttcccttggcattatgcaagcatccagttacctttgataggccctgaaatgatgaaagagacg

SEQ ID NO: 1018500 - DNA, 120 bp, Artificial Sequence
  ENSG00000226985_49 (sequence is synthesized)
aagggaatttgcaggtgtacaggtagaatgagacatttaggaaacacattttcaacagtatattttttaggttcatttgaagaggtcacagtgagcctatcagtaatagttaacaggggt

SEQ ID NO: 1018501 - DNA, 120 bp, Artificial Sequence
  ENSG00000226985_50 (sequence is synthesized)
cattgctcgtatggatgtgcatgataatgtgggcctaaaacacagcccagcccatctgatcttcccttatataggtaagtggtggtgtccctaacacttctgttactatgattttgttgt

SEQ ID NO: 1018502 - DNA, 120 bp, Artificial Sequence
  ENSG00000226985_51 (sequence is synthesized)
agctgttcaagtaagaaatgatagagctcttaccaatttaaaaaaacattatttttctcactttttatattttagaataactttatgattaacctctgagttttgagtgatagtgcctat

SEQ ID NO: 1018503 - DNA, 120 bp, Artificial Sequence
  ENSG00000226985_52 (sequence is synthesized)
cctggttattggtgtttcttaccacagcagtaaccaggggatttttacaggtgtcctgtcaagaaatgaccgtcttacctgacagtggtattgatcttgcattattacaagtatccaggt

SEQ ID NO: 1018504 - DNA, 120 bp, Artificial Sequence
  ENSG00000226985_53 (sequence is synthesized)
agagtttatgtgttctgtaatgatggagtgacgaaggttattttcagatgtcttggtggaaatgtttgtgtcctttaacacatatttcacaatgtgtatttcaggtttctgtagtgagac

SEQ ID NO: 1018505 - DNA, 120 bp, Artificial Sequence
  ENSG00000226985_54 (sequence is synthesized)
cctgataaacctaacaatggttggtatggcagacatttctggtatgcaggcaagtgatgatgtgttctttaaccacatcatagaccatcagatcttcttatatctttttttttttttttt

SEQ ID NO: 1018506 - DNA, 120 bp, Artificial Sequence
  ENSG00000226983_0 (sequence is synthesized)
gaagggctcctggaacgcggccagagcggacgcagaggccaaggaggcgccgagagcccagagcgagcaagggctgctagcacgttttcacctctcaataggaggaagtaaaggaaattt

SEQ ID NO: 1018507 - DNA, 120 bp, Artificial Sequence
  ENSG00000226983_1 (sequence is synthesized)
tacctacaaaatagcaatactaagctttacagctgacattacaacagcaacaagaaaaggctagtgatatgcagtatgatgctctctccagatgctaggcagtcagccagcaaatcagta

SEQ ID NO: 1018508 - DNA, 120 bp, Artificial Sequence
  ENSG00000226983_2 (sequence is synthesized)
ggataaacaaccgacgttcttcagcgtaccgtgttgtcagatgattctgcccagctgcaggctaatgtaagtgtcctgaggatgttcaagtgctgaaatcaagacgtcaaccagctggtc

SEQ ID NO: 1018509 - DNA, 120 bp, Artificial Sequence
  ENSG00000226983_3 (sequence is synthesized)
ttttttcgggaggatctgagaaaaatctgctttcaagtccatttagattctttgtctttttctatggaccaattgtcatctttcctaacagaagactacgcatccctgtgatacctctca

SEQ ID NO: 1018510 - DNA, 120 bp, Artificial Sequence
  ENSG00000226983_4 (sequence is synthesized)
gatgacaacaaagttctgtaaggtttcttgtgtggaaatgacaggacacatcctcaaatcctgccagcatttgtttagtaagagtgctggatcatttgagggttacttttaaatttcctg

SEQ ID NO: 1018511 - DNA, 120 bp, Artificial Sequence
  ENSG00000226983_5 (sequence is synthesized)
agccaatggtcctcctaagccaactattcattctgtgtaatggctgatgaaattaacaagggacaaaccaaatcccaattgcctatagagcggtacatcaaagatatgcatatccaaaac

SEQ ID NO: 1018512 - DNA, 120 bp, Artificial Sequence
  ENSG00000226983_6 (sequence is synthesized)
atagataaaatcatatatactatcttgtagtgtggtttttgtctggagatgttttcattttttactctttctagaccaataagccacacagaatgatttacattagtgttgatgggccag

SEQ ID NO: 1018513 - DNA, 120 bp, Artificial Sequence
  ENSG00000226983_7 (sequence is synthesized)
atggttttgaacaacattgataccatttaataggcataagatatactttaggttttatttaatgtttatgtcatctttatgtaactatattagggtaaataaatgataaatgcttacaat

SEQ ID NO: 1018514 - DNA, 120 bp, Artificial Sequence
  ENSG00000226983_8 (sequence is synthesized)
tttcaagtaaatagtaaaatagtcaatagttcttggatatgcaattgcagtattccacagtcaacagaatcagtattaaaaccagcttaacttctatgacaagcaaatataagtacccta

SEQ ID NO: 1018515 - DNA, 120 bp, Artificial Sequence
  ENSG00000226983_9 (sequence is synthesized)
gaaatatgttggctttcataatgaagctatattaatatacaacattgaatgtatattctacaaattgaaatttttaaagaaataagctggctgcatttatagatctcctaggagacttcc

SEQ ID NO: 1018516 - DNA, 120 bp, Artificial Sequence
  ENSG00000226983_10 (sequence is synthesized)
actccatgtgaccttagagatcatcatttttatcattttacagtgtagcttaccatcacattttaaagcgcatttaccatcacatttaatttaataagaatagtgtctttaagttggatt

SEQ ID NO: 1018517 - DNA, 120 bp, Artificial Sequence
  ENSG00000226983_11 (sequence is synthesized)
tggcatgagccatgatttaaacacaagtgtgttgtaggagactgcatcgcacaaggcgctaaagtgacctgcataattttttttctttttttatatggagtctcgttctgtcacccaggc

SEQ ID NO: 1018518 - DNA, 64 bp, Artificial Sequence
  ENSG00000226983_12 (sequence is synthesized)
ttttctttttttatatggagtctcgttctgtcacccaggctggcgtgcaatagaagcctccaga

SEQ ID NO: 1018519 - DNA, 90 bp, Artificial Sequence
  ENSG00000226983_13 (sequence is synthesized)
acaggcacgcacaaccatgcccgagtaaagtagagacgaggttttcccacgttggtcagataggtctcaaactcctgacttcaggtgatc

SEQ ID NO: 1018520 - DNA, 120 bp, Artificial Sequence
  ENSG00000226983_14 (sequence is synthesized)
gattacgggggtgagccactgcgcccggcccctgcattaattttttaggcattcactccacaaagggctcactggcatttttcacaacactgatttgttttcttgcaaagatgtagacat

SEQ ID NO: 1018521 - DNA, 120 bp, Artificial Sequence
  ENSG00000226983_15 (sequence is synthesized)
tcctttctgccacacatctatggtctacaataagaacccagtgtttctccagcatggatagagtgaggcttgtaatttcctctgtgaagcaacttagctgatgtggaggaatggttctca

SEQ ID NO: 1018522 - DNA, 120 bp, Artificial Sequence
  ENSG00000226983_16 (sequence is synthesized)
gcatacacttgattatttttcttcattttcaaagtcaagcatatcttttgcaaaatgctgcaggctttttgtttgtttgtttgttgtttgttttgctttttactcttgccacaacacaaa

SEQ ID NO: 1018523 - DNA, 120 bp, Artificial Sequence
  ENSG00000226983_17 (sequence is synthesized)
tgttttactccttttctaacacaaattttcattacctacatccaatgtactgaaaggcttaaaaatgaaacactgtctaagcctttgagatataaaattgaattagatttacactacaca

SEQ ID NO: 1018524 - DNA, 120 bp, Artificial Sequence
  ENSG00000226983_18 (sequence is synthesized)
aagctgtctctctatagtccacataatctctcccatctcaaaaattacattgctaatatatatgaactgaaagagaagccaattcaggaaggagctgattcaagaagtgcaaagagataa

SEQ ID NO: 1018525 - DNA, 120 bp, Artificial Sequence
  ENSG00000226983_19 (sequence is synthesized)
tcccattacaatgagttttcaactcaattaaataaggctcaagagactgggcaaattattggggctattcatatcatttcattagagcaaaatttcactgtaatgaaaagagaagttatt

SEQ ID NO: 1018526 - DNA, 120 bp, Artificial Sequence
  ENSG00000226983_20 (sequence is synthesized)
agctagaccttgaaaaggcaattcaagattatttttctaatgtgatttgacttgtttataagtatttcttaaagctagttttatctgtcatagcttattataagaggtttcattattgtt

SEQ ID NO: 1018527 - DNA, 120 bp, Artificial Sequence
  ENSG00000226983_21 (sequence is synthesized)
tttcaagaaatgccaaattgctaaatctcaatggggagcttcatgtgtatatgtctgaagagcaaagactacatgcatttttatttgtatgtatgttaataaacaccattttctgaaaaa

SEQ ID NO: 1018528 - DNA, 120 bp, Artificial Sequence
  ENSG00000226983_22 (sequence is synthesized)
agcgtaccgtgttgtcagatgattctgcccagctgcaggctaatatgcagtttacagagatgcacaccaactctggacagaaaaagaagtaatttacaactactctgtgcagaaaacagg

SEQ ID NO: 1018529 - DNA, 120 bp, Artificial Sequence
  ENSG00000226983_23 (sequence is synthesized)
caaattattaaatttccactggttctctttggaaaagtaaagggtgtaatgcttataaaggaaaaatggcaatagctgggacatcttagggcttagaccttcctacacttcttagagttg

SEQ ID NO: 1018530 - DNA, 120 bp, Artificial Sequence
  ENSG00000226983_24 (sequence is synthesized)
ttgggatgagacagtaaaagatctcagactgcctgtacagtaggtcttaactgtaataatggatctttggctctctaggagatagttccttcaaagagatgaattcccatgggaaaaaaa

SEQ ID NO: 1018531 - DNA, 120 bp, Artificial Sequence
  ENSG00000226983_25 (sequence is synthesized)
ggtttttatagccttagattgggtttacgtagctgtgacttcatcccgctgcagaatgtgaaacaaacaatctaggtatatttttttgtgtttatccttgtgtgccatggaaaacttcac

SEQ ID NO: 1018532 - DNA, 120 bp, Artificial Sequence
  ENSG00000226983_26 (sequence is synthesized)
tagatactatgtagagaactgggaagaattatagagatgttatcttagtaatggtgcaggagatgctgtggatttaggtgtactccttaaaggagtcatggttgtgtgagtcaaacttga

SEQ ID NO: 1018533 - DNA, 120 bp, Artificial Sequence
  ENSG00000226983_27 (sequence is synthesized)
atcattcagagggagaacatccactggccccaacccagaaagcagtgtgactggcactgttgagagaagggattctcaaaactgccatagatagtgtcagtcatgatattctcacagcct

SEQ ID NO: 1018534 - DNA, 120 bp, Artificial Sequence
  ENSG00000226983_28 (sequence is synthesized)
gatggaccagacacatttaaagtctgtttgattgaggcattggaaactgaaagcaaatgtaccttgcctgttagctgcaagccactctctactgatgtgatcatcttctaccctagcctc

SEQ ID NO: 1018535 - DNA, 120 bp, Artificial Sequence
  ENSG00000226983_29 (sequence is synthesized)
agatgctttaagaaagatgaatagaactgggaccaagatgcctctgtctccaaagaaaaattaaaatgacatgcacacattcaagtttgcagggaaactttgaccctggaatctagaacc

SEQ ID NO: 1018536 - DNA, 120 bp, Artificial Sequence
  ENSG00000226983_30 (sequence is synthesized)
ctgtaggtaagctacagcagaccactgaatgtgctacactgtgaaacatttcagtgaattatgtatgagtatttatgcaaatgcatgtctggggcaatatataatatagcccattttcca

SEQ ID NO: 1018537 - DNA, 120 bp, Artificial Sequence
  ENSG00000260827_0 (sequence is synthesized)
ccccacacatcgcagcagtaaacaggtactttgtattctcaaattgcacctgcttaccctggccccctcaaaatggaagagtgatgactatttgtcttcgtagcactgtggggacacaga

SEQ ID NO: 1018538 - DNA, 120 bp, Artificial Sequence; identical to SEQ ID NO: 900179
  ENSG00000260827_1 (sequence is synthesized)

SEQ ID NO: 1018539 - DNA, 120 bp, Artificial Sequence; identical to SEQ ID NO: 900180
  ENSG00000260827_2 (sequence is synthesized)

SEQ ID NO: 1018540 - DNA, 120 bp, Artificial Sequence; identical to SEQ ID NO: 900161
  ENSG00000260827_3 (sequence is synthesized)

SEQ ID NO: 1018541 - DNA, 120 bp, Artificial Sequence; identical to SEQ ID NO: 900162
  ENSG00000260827_4 (sequence is synthesized)

SEQ ID NO: 1018542 - DNA, 120 bp, Artificial Sequence; identical to SEQ ID NO: 900163
  ENSG00000260827_5 (sequence is synthesized)

SEQ ID NO: 1018543 - DNA, 120 bp, Artificial Sequence; identical to SEQ ID NO: 830810
  ENSG00000260827_6 (sequence is synthesized)

SEQ ID NO: 1018544 - DNA, 120 bp, Artificial Sequence; identical to SEQ ID NO: 900165
  ENSG00000260827_7 (sequence is synthesized)

SEQ ID NO: 1018545 - DNA, 120 bp, Artificial Sequence; identical to SEQ ID NO: 900166
  ENSG00000260827_8 (sequence is synthesized)

SEQ ID NO: 1018546 - DNA, 120 bp, Artificial Sequence; identical to SEQ ID NO: 900167
  ENSG00000260827_9 (sequence is synthesized)

SEQ ID NO: 1018547 - DNA, 120 bp, Artificial Sequence; identical to SEQ ID NO: 900168
  ENSG00000260827_10 (sequence is synthesized)

SEQ ID NO: 1018548 - DNA, 120 bp, Artificial Sequence; identical to SEQ ID NO: 900169
  ENSG00000260827_11 (sequence is synthesized)

SEQ ID NO: 1018549 - DNA, 120 bp, Artificial Sequence; identical to SEQ ID NO: 900170
  ENSG00000260827_12 (sequence is synthesized)

SEQ ID NO: 1018550 - DNA, 120 bp, Artificial Sequence
  ENSG00000260827_13 (sequence is synthesized)
tcacgcttgtgtcctgcaggctggagcccatgcgagggtctgcagtctttgttccggatggggaactactgcttcagctggttacccaggtgtccccgatggggaaaggaaggaaatggt

SEQ ID NO: 1018551 - DNA, 120 bp, Artificial Sequence
  ENSG00000260827_14 (sequence is synthesized)
gagaatcttcagcacaacggatcacatcaccctggcagagaccagtccggcctgcgcatggcaccagcagccgcaggctagaggcagtcatgtcaggcctcctccatacagcatctctcc

SEQ ID NO: 1018552 - DNA, 120 bp, Artificial Sequence
  ENSG00000260827_15 (sequence is synthesized)
tgcttttttttcaaacggccctaatcacttaatttggtcatcttccctgtcacaatggggcacctggcgctatagacacttgggaaacacacagatctggggtcctacagtgtccaggtg

SEQ ID NO: 1018553 - DNA, 120 bp, Artificial Sequence
  ENSG00000260827_16 (sequence is synthesized)
tccaggtgaagacgccgggagtcagagaggaaagtcttttgaagcctccaaaaggaatgcacaggaccccacttgaagaggtggagtgcccagtggcggatacaggccccacacatcgca

SEQ ID NO: 1018554 - DNA, 120 bp, Artificial Sequence
  ENSG00000260827_17 (sequence is synthesized)
ggtgtccagctctccagcctggggtttctcatcacccagtgattccaaaagaaacgatctacaatggcatgactaagttccagaaacaaataaacaaaatactgagggaagcccgttggt

SEQ ID NO: 1018555 - DNA, 120 bp, Artificial Sequence
  ENSG00000260827_18 (sequence is synthesized)
aagcccgttggtcactttgattcttcaaaggtgacaattgtccctccctgaaatcttgtgagtgcatgaacaggctattctaatgtaaatgaaattcacactaaaactgattgaaagatg

SEQ ID NO: 1018556 - DNA, 120 bp, Artificial Sequence
  ENSG00000260823_0 (sequence is synthesized)
tcaggaagctcaggggctggggaaacagagaggaggagaccccatccagcctgggaggagggagtttgggaaaccggatgtcagattccagccactggggagttggatttcaccctctgt

SEQ ID NO: 1018557 - DNA, 120 bp, Artificial Sequence
  ENSG00000260823_1 (sequence is synthesized)
gtgccacatttgacgtgaaactgaaagtgatcatgtatgtgtccctcctgctcccatatgatctggcacagcgccattcagttttacagaagctgaagctcagtgcagtagcctggcttg

SEQ ID NO: 1018558 - DNA, 120 bp, Artificial Sequence
  ENSG00000260823_2 (sequence is synthesized)
ccagaatgcactctttcttaacggctcacatttccatccacagcccaggtctctgccctcccagttcaatccctcaccccagtccgttatttttaaggcatataaaggaaaccagagaca

SEQ ID NO: 1018559 - DNA, 120 bp, Artificial Sequence
  ENSG00000229539_0 (sequence is synthesized)
cgtcgaggccgccagcccctcccccagcatgtttgggctaagccgcctcctttccgcctgcgttggagagagaggtaccagaaggaatgaaaggactggggcttgtctccatggcaactg

SEQ ID NO: 1018560 - DNA, 120 bp, Artificial Sequence
  ENSG00000229539_1 (sequence is synthesized)
gcccggaaggatcccatcccgttctgtactctgaggtcacttcctcactccgtcaaatttcactggactgtgggctaattaaaagtgcctccgtattagcggggcgtggtggcccatgcc

SEQ ID NO: 1018561 - DNA, 61 bp, Artificial Sequence
  ENSG00000229539_2 (sequence is synthesized)
gtggctggcggaggctgcagtgacccaacattgtgcaacaagagcgaaactccgtctcaaa

SEQ ID NO: 1018562 - DNA, 120 bp, Artificial Sequence
  ENSG00000224729_0 (sequence is synthesized)
agagcatcgtagcggcaggcggggtgcagctccaggtcgaagactcggaatgagagggacacagtctggccctcggggacctgatagcggggacagaggcggggacccacagagtcaggc

SEQ ID NO: 1018563 - DNA, 120 bp, Artificial Sequence
  ENSG00000224729_1 (sequence is synthesized)
cccacacaacccagccagagggcagctcccctgccccaagcgtttcttgcagaaacggactgaatgggaaggggcctccatgaattcccggaatcctcctcggccccccttccagactcc

SEQ ID NO: 1018564 - DNA, 120 bp, Artificial Sequence
  ENSG00000224729_2 (sequence is synthesized)
cgcctcactctgcctggcagtccagggacaggagccgcctaactacttccagatgtggacacagccacgaggcggtgggggggagggggtggagagatggagggagctgcagtggcgatg

SEQ ID NO: 1018565 - DNA, 120 bp, Artificial Sequence
  ENSG00000224729_3 (sequence is synthesized)
gccctctgattgaacctggaggccaggctccgcgagctccacaccttagccctgcccctgttccaaactacttcagattctgactcccaagtctccactcactgccccctcctcccccta

SEQ ID NO: 1018566 - DNA, 120 bp, Artificial Sequence
  ENSG00000224729_4 (sequence is synthesized)
caatccctctcgaattccttcctggaatccagctaccaggcaagttcaggagcttggctctctcttgggttctatggggggtcaaggatctgggtgggtggggagacttaagagaccaga

SEQ ID NO: 1018567 - DNA, 120 bp, Artificial Sequence
  ENSG00000224729_5 (sequence is synthesized)
ggacgaaggtgggggaatgggagcagtggtggcctgcaggagaccaaggtcttgcagcagatggggaggatttgggggccagagaagggtgaggcggtggggaatctggggagtggtgtg

SEQ ID NO: 1018568 - DNA, 120 bp, Artificial Sequence
  ENSG00000224729_6 (sequence is synthesized)
tcagcaagggaacccaaaatatctccaggcataaccccaaaggaatcgggggtctgaagttcactggagctgtctggaagatgccaagagacctacctggtgtagttgggggtctggccc

SEQ ID NO: 1018569 - DNA, 120 bp, Artificial Sequence
  ENSG00000224729_7 (sequence is synthesized)
tgggcaaaaggcagcagggcgcaggcagtgaggaggggccccaggagggaggctgtggctgcaggcagcatggccccgggggaaaggcgctggggtcctcaagacagaggcagcagctga

SEQ ID NO: 1018570 - DNA, 120 bp, Artificial Sequence
  ENSG00000224729_8 (sequence is synthesized)
attttgcagagcagcagcagcggtggcggcagcagcaggataatcagcgccagatggggcagccttggacctgggccagactaggccaaggagaaggaattctcacccatgacctcttcc

SEQ ID NO: 1018571 - DNA, 120 bp, Artificial Sequence
  ENSG00000224729_9 (sequence is synthesized)
aactacttgaagccctctgcagcatgtccagggcctcccagaagaagtccttctgtgcggccatcaggggcatccaccctacgatctccttcatcttctccgtgcggtcctgcaacgttt

SEQ ID NO: 1018572 - DNA, 120 bp, Artificial Sequence
  ENSG00000224729_10 (sequence is synthesized)
ctgagcttgacgaaggaggcactccccttgggccagcctgggaggcggcccccagccccacagccgcagcccagcagctccttgctgaactctgagctctggctcagcaccagggagtgg

SEQ ID NO: 1018573 - DNA, 120 bp, Artificial Sequence
  ENSG00000224729_11 (sequence is synthesized)
ttgaggccgcaccacagggtgatgggccgctgcagaaaatcagctccttgcctgagcccagggcctgctgtggtgtacccctcattctcagcccacccgtctatgccagtccagcctctc

SEQ ID NO: 1018574 - DNA, 120 bp, Artificial Sequence
  ENSG00000224729_12 (sequence is synthesized)
atcctgcctgccagcctcggggagacttgcttcttgtgcaattccagcagggtctgaggaatctgcaggaaacagtttgcaaaagccattgctttgggccacacctgtgaggagcagtag

SEQ ID NO: 1018575 - DNA, 120 bp, Artificial Sequence
  ENSG00000224729_13 (sequence is synthesized)
agcccgctgggtctcctgaccaaccagcacgatctgcttgaaggtcattgagtggtggaatgtcatcttgaagacccgctgcccactagactgcagatagacctcaacacagtcacaggc

SEQ ID NO: 1018576 - DNA, 120 bp, Artificial Sequence
  ENSG00000224729_14 (sequence is synthesized)
ccggctgctggtggtacccaccacttcctgcggctcccgagtggccaagacgtagagggccggactccagaaccctgatcttggaggcgcggactgagtctgcgacagatgcgtctccac

SEQ ID NO: 1018577 - DNA, 120 bp, Artificial Sequence
  ENSG00000224729_15 (sequence is synthesized)
acgccttccccatcgcacacttcgtggaagtagcggcaggactcaccagctctggggggaacaactggatggaaatcggatttcctttccccctcttctcttcaaccccaagctccgagc

SEQ ID NO: 1018578 - DNA, 120 bp, Artificial Sequence
  ENSG00000224729_16 (sequence is synthesized)
cacaagaagggcagcttctcttcacctacccaagaaggggtgcatagggtcccatgagggtcccacatccttttttcccttctctccgcctaccttggggctcatctgactctagctggg

SEQ ID NO: 1018579 - DNA, 120 bp, Artificial Sequence
  ENSG00000224729_17 (sequence is synthesized)
cacagttatttcctcccctctctctccagacccatccctaacttctccaaataactcctcccgatctcctgcggccaatccccctcacccggagcccctcctcccgtccacacagcctgg

SEQ ID NO: 1018580 - DNA, 120 bp, Artificial Sequence
  ENSG00000224729_18 (sequence is synthesized)
tgaatttttgcagcttccgtctctggcttcccctgaccatcctgattgccccctccctgctcctgccctcctgtctcctaggcccttggcccccccgttcctgctggctttcccacacca

SEQ ID NO: 1018581 - DNA, 120 bp, Artificial Sequence
  ENSG00000224729_19 (sequence is synthesized)
tgtccccagcctaggcttgggggacctctgaggcccctctgcctcctaggcccctcccccatggagtctggggctaacaaacctctctgtgacctcactgtttggccactgtgacctgtt

SEQ ID NO: 1018582 - DNA, 120 bp, Artificial Sequence
  ENSG00000224729_20 (sequence is synthesized)
ccctttaatcttgcccaggacccatctcttagacagctcctgggttctagctcagttctagccatcacatggctcaagggatatgcattttactggagaaataaagtgtgaattactggt

SEQ ID NO: 1018583 - DNA, 79 bp, Artificial Sequence
  ENSG00000224729_21 (sequence is synthesized)
tttgtatttttagtagaggcagggtttcagcatgctgtccaggctggtctcaaattcctagcctcaaggcgtagccacc

SEQ ID NO: 1018584 - DNA, 120 bp, Artificial Sequence
  ENSG00000224729_22 (sequence is synthesized)
ccccggggtcctggggtgctctggcccccaggctgggctcaggagtccccaccaccctgctggctggcaggtggcgatagggggcgtgctgctcaatgtcgtggctggacaggatgtata

SEQ ID NO: 1018585 - DNA, 120 bp, Artificial Sequence
  ENSG00000224729_23 (sequence is synthesized)
ggcactccctggtggcacagagggcacaggcacacagagggaccttggaggaggagagaaagggggcatggctgagtggtgctttccttgcagggtttcccagggtgcccgggctaatct

SEQ ID NO: 1018586 - DNA, 120 bp, Artificial Sequence
  ENSG00000224729_24 (sequence is synthesized)
gcctattgcattcttccctctcacaccagccctgagccggctaagtcccaggggtgtgtgaggttgggcaaggccagcacagtctgctaagggagaaagcagagagcgtggtgtgcggca

SEQ ID NO: 1018587 - DNA, 120 bp, Artificial Sequence
  ENSG00000224729_25 (sequence is synthesized)
gtggcccgcccgctgtaccagagcaggaagcctcgtcctcctgtgccctcatccgtcgtcatcctcagggtcacctggttgccgggggcgactaggggcgcaggccggaaggtcccacaa

SEQ ID NO: 1018588 - DNA, 120 bp, Artificial Sequence
  ENSG00000229537_0 (sequence is synthesized)
gccgcctactgcacagtgaaattcccataggcagagggagatttctagttggttttctaggttgcagtgagtgctcagtgtatgttttctgactaatgggaatctcatgacatttggata

SEQ ID NO: 1018589 - DNA, 120 bp, Artificial Sequence
  ENSG00000229537_1 (sequence is synthesized)
aatcttgatatcttatgccatatccctggtcctctccactttctacctgctcagatcacaccatccttttgacccagatgatgaagatttctctgacacagtacagtaccattctcatct

SEQ ID NO: 1018590 - DNA, 120 bp, Artificial Sequence
  ENSG00000229537_2 (sequence is synthesized)
gtctactcagcaaagacaaaaaagaatgggaattttaaaagtctgtttctgataaggatactggtgggagcaaacattggtaaaacctttctggaaggcgatttggcccaaaatatttta

SEQ ID NO: 1018591 - DNA, 120 bp, Artificial Sequence
  ENSG00000229537_3 (sequence is synthesized)
aaaacttaaaatgtacacaacttttgatgcagcaactccacttctaagaatttattctgtggaaataatttcaaatgtgcccaaagacttattcaatatgatgtgtatcccagttgatgt

SEQ ID NO: 1018592 - DNA, 120 bp, Artificial Sequence
  ENSG00000229537_4 (sequence is synthesized)
gttgaatacagtcacaggatccaatatgggacactggtgcacaccagaagagtccttgccagaaagggaagactgtgaggtccatgaggcagaagaagccctcagaggaatccctcctgc

SEQ ID NO: 1018593 - DNA, 120 bp, Artificial Sequence
  ENSG00000229537_5 (sequence is synthesized)
tggcctccgttgtaagagcattcatcacaatttggaagcactgttgttctctcttatccacggtttcagttatgcaaggtcaatcgcagtctgaaaatagacacagggatcacatttacg

SEQ ID NO: 1018594 - DNA, 120 bp, Artificial Sequence
  ENSG00000229537_6 (sequence is synthesized)
aagggatctttcaagagcctcaaaagcaggactacttcatgagccaactcgtagtgacaagccctgcccctgcaagtgagaaggggggcgcttccaaatcaagcaccatttgtcaaggtg

SEQ ID NO: 1018595 - DNA, 120 bp, Artificial Sequence
  ENSG00000229537_7 (sequence is synthesized)
ggatggaatgggtaacttttttgctccctgaagtcaaaaatattttttaaaaatgagtttgtcgtgtcttgttgcataatacagagcagtatttatagaacatggaaatgaatatgaaaa

SEQ ID NO: 1018596 - DNA, 120 bp, Artificial Sequence
  ENSG00000229537_8 (sequence is synthesized)
aacgctactggagtgtgacatcataatacggcagaatgctgcagtctgctgtcttcaagaccactcaccaattagctctgtttccctgctctttttaaacctgcttgccaccgttaatgt

SEQ ID NO: 1018597 - DNA, 120 bp, Artificial Sequence
  ENSG00000229537_9 (sequence is synthesized)
tgtgccgccgccagtggactcgccagcggctgagcagctcagagtgacagcgactcagcgtctggaagccccactgggttgtgaaatgaagaaggccttctttgcccctgatgcagcctg

SEQ ID NO: 1018598 - DNA, 120 bp, Artificial Sequence
  ENSG00000229537_10 (sequence is synthesized)
ggcgagccccgaggctccagaagcgagcatctcccagctcctaaagagcagacatatatcctgcctttaagacaagactacaattgcaaatctgagaatataaattacactttcatcttt

SEQ ID NO: 1018599 - DNA, 120 bp, Artificial Sequence
  ENSG00000229537_11 (sequence is synthesized)
cctcgtcaggacctggctctgccctcggagtcagtctggatccaggagtgattcatcttacacagatgagagggggataaaaggaaaagaacagtcaggacaaatgtgttttcaatggtg

SEQ ID NO: 1018600 - DNA, 120 bp, Artificial Sequence
  ENSG00000229537_12 (sequence is synthesized)
cttagcagcaggagaccactgggacttcagagcaacgctactggagtgtgacatcataatacgccaaataccagagtctctcgcctcttggagtttatgggccaatttctcccaagatgt

SEQ ID NO: 1018601 - DNA, 120 bp, Artificial Sequence
  ENSG00000229537_13 (sequence is synthesized)
gggggataaaaggaaaagaacagtcaggacaaatgtgttttcaatggtgcttagcagcaggagaccactgggacttcagagcaacgctactggagtgtgacatcataatacgcctttctc

SEQ ID NO: 1018602 - DNA, 120 bp, Artificial Sequence
  ENSG00000229537_14 (sequence is synthesized)
tggaatggaccgaatatggaataacatggacatgtctgatgcacatctggagatgggacggcagcgcataatacttcctggaactgcgagacaatggggttgtcttttgacattgaggca

SEQ ID NO: 1018603 - DNA, 120 bp, Artificial Sequence
  ENSG00000229537_15 (sequence is synthesized)
cttatcacaggcacaaaaggggaaatgctttattatggaaatgtgtactatgttcttcaaaacagaagaataaaaatatatgcatttttaaatgaataacagcttgtaagactcccaatg

SEQ ID NO: 1018604 - DNA, 120 bp, Artificial Sequence
  ENSG00000229537_16 (sequence is synthesized)
attaacagcagttgtacattaagtattctctgaaatgatatttgtaaactggagggttgaccaatcttagtgcgaacttcctaaattaaaaattaaattttaaattaaattttaaaacaa

SEQ ID NO: 1018605 - DNA, 120 bp, Artificial Sequence
  ENSG00000229531_0 (sequence is synthesized)
tgatactgagcatccacctgtgtgattggcacaatgtgaaagaggggaaaagagtggaggaggaagagacaggagagctgatatgaaactcttgttatttatgaggatcacaatcaagag

SEQ ID NO: 1018606 - DNA, 120 bp, Artificial Sequence
  ENSG00000229531_1 (sequence is synthesized)
tttaaagacaaccggtctctgctccagccacacaggacttcttctagtacctttactacatcatgcctcccctgcctcaggcttctgctgggatggatcgagcacattcaccctaaaatt

SEQ ID NO: 1018607 - DNA, 120 bp, Artificial Sequence
  ENSG00000229531_2 (sequence is synthesized)
ttaaagcagatcaccttaagagaatgactgcaataggaaacacagtgaaatcaaaagtaccctcatcaactcactctgtcacaaacttcctccaaatgtgttaatgattttctgagacac

SEQ ID NO: 1018608 - DNA, 120 bp, Artificial Sequence
  ENSG00000229531_3 (sequence is synthesized)
attttcaaaggattatttataagaacgagacaaaattaagccaaagtccatattacgtgaaacttcatctcctaggctttgtaaataaaagctaaaggatacaggacacatctgacccag

SEQ ID NO: 1018609 - DNA, 120 bp, Artificial Sequence
  ENSG00000229531_4 (sequence is synthesized)
gaatctaagcaagtaacatactacctggctaatccagttgaggtgaaggtcacaatactgaatttgaatatgctgtgttctctactgtaaataaagtattttgtttatcttttcatgcca

SEQ ID NO: 1018610 - DNA, 120 bp, Artificial Sequence
  ENSG00000229531_5 (sequence is synthesized)
cattgagagcataaaccactcagaagatttatagcttaaagcagatcaccttaaggtactggaatcagtcagtgcttagatggaacattttttgaggcctacatcttcactgagtgccct

SEQ ID NO: 1018611 - DNA, 120 bp, Artificial Sequence
  ENSG00000229531_6 (sequence is synthesized)
tcttctctatttcctatacttccttgtttctttctgttcccactgcatcccttatggatttgtacaaataatgctgggttcttttcttcacccacatgcagcagttgctgctggatcata

SEQ ID NO: 1018612 - DNA, 120 bp, Artificial Sequence
  ENSG00000229531_7 (sequence is synthesized)
accattccttctattggttttaaaatctgtttttctcagattccttacacttgaaggaaaaaaaaaaaggacatttagcctgtttttcttttaagcaataaaaattcttctctcactgta

SEQ ID NO: 1018613 - DNA, 120 bp, Artificial Sequence
  ENSG00000229533_0 (sequence is synthesized)
cctggacaagcctcggaggaccaggcagaaccctctggctagcagaaaagctcgcacccccgcacccttgcggcgtctgcttcagaccctccacgcaggcgcccgctggagcgcctgctg

SEQ ID NO: 1018614 - DNA, 120 bp, Artificial Sequence
  ENSG00000229533_1 (sequence is synthesized)
gggatggcgtaccaccgacccttcaggctttttaaaaacctctccaagagctcggtcatgaaggagatatagacgatggccaggcggagggtctcgatccgggacagccttttctcgtaa

SEQ ID NO: 1018615 - DNA, 120 bp, Artificial Sequence
  ENSG00000229533_2 (sequence is synthesized)
gcaaacgtgggcaccttcctccgcagctggtcaaaggcctcgttgaggttgaacatccgcttcctttcgcggatgttggcggcctggcgctgggcgtaggtgatcacccttttcctcttg

SEQ ID NO: 1018616 - DNA, 120 bp, Artificial Sequence
  ENSG00000229533_3 (sequence is synthesized)
gggcggcctaatagggagacacctcttccgcgctcctcttcctcctcctcttctccgtccccctggtccacttcgcactcctcttcttctgggtccccctcttcaaaccgcgccatcctc

SEQ ID NO: 1018617 - DNA, 120 bp, Artificial Sequence
  ENSG00000229533_4 (sequence is synthesized)
ctgggtcttccctctcggagcgcaagggctgggtcccccaaggagaccccgggtgcgaagtcgcagaggagagggcgtctcggggaggccagggacaggtctgcgacgaagtccagcacc

SEQ ID NO: 1018618 - DNA, 120 bp, Artificial Sequence
  ENSG00000229533_5 (sequence is synthesized)
gtagtgtccacgcagctctccggataggccgccatcgcttcggcttggccctgcctctcatcggttttccgcagggaggggcgaggttgctggtggggattcttaacagccttgaatctg

SEQ ID NO: 1018619 - DNA, 120 bp, Artificial Sequence
  ENSG00000229533_6 (sequence is synthesized)
tctgacaacgtcccttctctcgaagcttatggaagatgacaagcttgagcacgcatggaagactcaaagggacagggctccagttctgagatccttttctctgcgccacccgggacagtt

SEQ ID NO: 1018620 - DNA, 120 bp, Artificial Sequence
  ENSG00000229533_7 (sequence is synthesized)
ccttgttggcaacaacccccagctcttacctgctgtgctttttgtgtctgtcttcacccctgcagccaactaatgttctccaggctccttatctcgtgtagttctttaatttcgtgttgg

SEQ ID NO: 1018621 - DNA, 120 bp, Artificial Sequence
  ENSG00000229533_8 (sequence is synthesized)
attttcaaagcgaggatgttttccaccgcgatggcttctccttgacttcagggtaggagtcttgaatcttgccaccatctgccaatggatgtggagcaagtgcatgtgcttttaatgatg

SEQ ID NO: 1018622 - DNA, 120 bp, Artificial Sequence
  ENSG00000229533_9 (sequence is synthesized)
tcctgaagaggggccctgcctgcctggcatcaaggggagctgtttgtctggtatcccagtgcagcggctgctgaaaggcaagaccttcaattagcttaagtaagcatggcagggggaccg

SEQ ID NO: 1018623 - DNA, 120 bp, Artificial Sequence
  ENSG00000229533_10 (sequence is synthesized)
agagtgcattccccagagtcgctgttggaaccggctttcttttctttccagggcatcgcaaacagctctcctgccacgttacaaaccctgacttctaaagtctgtttggatgcaatcagc

SEQ ID NO: 1018624 - DNA, 120 bp, Artificial Sequence
  ENSG00000229533_11 (sequence is synthesized)
gtaacaattgagatacttgactttcctttccctacctttacctcctactcatataaaatagaggattttattccaagaggaaaagttatgatggcaataaaatgagaaatttaagctcag

SEQ ID NO: 1018625 - DNA, 120 bp, Artificial Sequence
  ENSG00000238291_0 (sequence is synthesized)
acaagccttgcagatatctggggaaatatcattgtagacaaaagcaaaggaaaatgcagaggctctgaggggggaatatggctgatgtgttgagacagagcaaagaagctcatgtagctg

SEQ ID NO: 1018626 - DNA, 120 bp, Artificial Sequence
  ENSG00000238291_1 (sequence is synthesized)
gagcagagtaagcaagaaagaaaggctaagagaggagtttagagctgaaacaaggcctagatgatgcaagaccttgtaaattacaggagaaaatttgtgttttactgtgaataactagtg

SEQ ID NO: 1018627 - DNA, 120 bp, Artificial Sequence
  ENSG00000238291_2 (sequence is synthesized)
agaacattgaaggctcttgagcaaagaaatagtatgatctgactcaggctgttatgttagtaatagattacaatgaagacacaggaggaacagagaggaggctgttgtaatctaggggag

SEQ ID NO: 1018628 - DNA, 120 bp, Artificial Sequence
  ENSG00000238291_3 (sequence is synthesized)
taactaggctgtgagagtggagccctcatgaacaggggatttgtcccttgtaaaagaggaacaagggaggttgttttccctttccaccaccggaggactcagagaagaagacgccatcta

SEQ ID NO: 1018629 - DNA, 120 bp, Artificial Sequence
  ENSG00000238291_4 (sequence is synthesized)
ccaagcagggagcaggccctcctcaccagacactgaatctgaaaacacttgaatcctggacttcccagccttcagaactgtcatttactcattcagcgtcactagtgggaccttcacaag

SEQ ID NO: 1018630 - DNA, 120 bp, Artificial Sequence
  ENSG00000238291_5 (sequence is synthesized)
gcaaatgcgccagtgagttgcactctaacaaggattaccagttttggggaggaagatcacaaagtgacatttttatcacagtaaatcaatggcacatgctatcaacatgaataactattg

SEQ ID NO: 1018631 - DNA, 120 bp, Artificial Sequence
  ENSG00000266976_0 (sequence is synthesized)
tgagtggaagcatggcctgatcacccatggtgtgcccttattggcactttggtctcagttttgattttgatttggctcggcttgtttgaaaaaaaggaaagtgaaagtgagtgaatgctt

SEQ ID NO: 1018632 - DNA, 120 bp, Artificial Sequence
  ENSG00000266976_1 (sequence is synthesized)
gagtgaatgcttgtttgggatgggcaacagatagacagtggttgccgtccgaagtgagtgttgagccctgagctgcagttccgtaggatacctcgtacagctaagtggcggttcgtgctg

SEQ ID NO: 1018633 - DNA, 120 bp, Artificial Sequence
  ENSG00000266976_2 (sequence is synthesized)
gtgcctggtaccagcctgcctaagaggatctgagattcccgcaagggaagtggccagtgtcaggcgaggcaaggagagcgcagcctgggatcacaaagaaagcaagtcatctgcaacctg

SEQ ID NO: 1018634 - DNA, 120 bp, Artificial Sequence
  ENSG00000266976_3 (sequence is synthesized)
ctggagcctaagaccagaaggcagtttattctagcaggcccgacttccgagaccatccttggatgtcactagactgggagctgtacgtggacgggagcaactttgtcaactcacaaggag

SEQ ID NO: 1018635 - DNA, 120 bp, Artificial Sequence
  ENSG00000266976_4 (sequence is synthesized)
agaggtgtgtgggatatgcagtggtaaccctggatgctgtcattgaagccaaatcgttgccccagggcacttcagcccagaaggccgaactcattgctttaattcgggcctcagagctaa

SEQ ID NO: 1018636 - DNA, 120 bp, Artificial Sequence
  ENSG00000266976_5 (sequence is synthesized)
acaaatcggctcagacaaccggctggcgtttgtggctgacttggtacagaagagagcaaaggtgatcgggtgtggatcaaggattggaacgtagcccccttgcggccatggtggaaaaga

SEQ ID NO: 1018637 - DNA, 120 bp, Artificial Sequence
  ENSG00000266976_6 (sequence is synthesized)
ccccagaccatcatcttgaccactcctacagttgtaaaggtagagggaatcccagcctggatccaccacagccatgtaaaacctgcagcacctgagacctgggaagcaagaccaagccca

SEQ ID NO: 1018638 - DNA, 82 bp, Artificial Sequence
  ENSG00000266976_7 (sequence is synthesized)
acctgcagcacctgagacctgggaagcaagaccaagcccagacaacccttgcaaagtgactctgaagaagacgacaaaccct

SEQ ID NO: 1018639 - DNA, 82 bp, Artificial Sequence
  ENSG00000266976_8 (sequence is synthesized)
cctcagactgaggactgtacccattgcagtcctattattttatagttgttatgagtgtaccgggactctaaaaggaacttgt

SEQ ID NO: 1018640 - DNA, 120 bp, Artificial Sequence
  ENSG00000266976_9 (sequence is synthesized)
tagttgttatgagtgtaccgggactctaaaaggaacttgtttgtataatgctactctatacaaggtatgtagcccaggaagttaccagcctgatgtgtgttataacccatctgagccccc

SEQ ID NO: 1018641 - DNA, 81 bp, Artificial Sequence
  ENSG00000266976_10 (sequence is synthesized)
ggggagcttggttcttgagatgcaagtctgtcgacgctcccagcagaataaagcctcttccttctttaacctggtgtctga

SEQ ID NO: 1018642 - DNA, 120 bp, Artificial Sequence
  ENSG00000266976_11 (sequence is synthesized)
ttcctgaccgggaagtgaggtgattaagggacagtggaggcagccccttaggcggcttagccttgccctgcggagcatccctgtggggtactccggccagcttgagcaatgtggatcctg

SEQ ID NO: 1018643 - DNA, 120 bp, Artificial Sequence
  ENSG00000266976_12 (sequence is synthesized)
agagtgctcctgggtaggcatttgccccagtggaatgcctcatcagagtggtgcatggcaggcccccacggaggatcaacacaggggctgaacactgggaaggaactggcacgtggagtc

SEQ ID NO: 1018644 - DNA, 120 bp, Artificial Sequence
  ENSG00000266976_13 (sequence is synthesized)
acatactacctactgaccacaaagttctggaaacgtggagtggatgaatcagactatcaaaaatagtttaggtgatcgggtgtggatcaaggattggaacgtagcccccttgcggccatg

SEQ ID NO: 1018645 - DNA, 120 bp, Artificial Sequence
  ENSG00000266976_14 (sequence is synthesized)
tgactctcagtatgcctttttaactctccaagtgcatggggcattatacaaggaaaaaggcctattgaactctgggggaaaagacgtaaaatattagcaagggatcctgcaattattaga

SEQ ID NO: 1018646 - DNA, 120 bp, Artificial Sequence
  ENSG00000266976_15 (sequence is synthesized)
ggcagtttggaagccccaaaaggtggcagtcatgcactgcagaggacgccagtgagcttccaccttgatcaccttggggaactcctgagctgactcaggggctcaaaaagcagcatccac

SEQ ID NO: 1018647 - DNA, 120 bp, Artificial Sequence
  ENSG00000266976_16 (sequence is synthesized)
cccctcccgggcatcagtcacagcccccctgctccctcaggcacctgaccttgtacctacttactctaaagaagagaaggactttctccaggcagagggagggcaggtgatagaagaggg

SEQ ID NO: 1018648 - DNA, 120 bp, Artificial Sequence
  ENSG00000266976_17 (sequence is synthesized)
atggatccggttatcagacggaagaatagctgtgccacaactgctaggagccgcagttgtactggctgtgcatgagaccacccacctaggccaagagtcacttgaaaagttgttaggcca

SEQ ID NO: 1018649 - DNA, 120 bp, Artificial Sequence
  ENSG00000266976_18 (sequence is synthesized)
gtacttctacatcttgcatctgtcagccctggccaaaacagtggtgtagcagtgtcacctgccggcagcacaatgctaggcaaggtccaactgtcccacccggcatacaagtttatggag

SEQ ID NO: 1018650 - DNA, 120 bp, Artificial Sequence
  ENSG00000266976_19 (sequence is synthesized)
cagcccccctttgaagatctccaagtaaacttcaccaagatgcccaaatgtggaggtaacaagtatttgctagttctaatgtgtacatactctgggtaggtggaggcctatccaacatgg

SEQ ID NO: 1018651 - DNA, 120 bp, Artificial Sequence
  ENSG00000266976_20 (sequence is synthesized)
aaaaaaattatcttaaaatttgatgcctgtgcagcaatcaacagtgacctgtatggaaataggataagatgtggctctctagattgggaaaggggctatatagtagaaaataagtatgtt

SEQ ID NO: 1018652 - DNA, 120 bp, Artificial Sequence
  ENSG00000266976_21 (sequence is synthesized)
tgtcatgacttaggaatgtgtagtgatgaatgtagttactggtcctgtgtcatttaggccacctggaaaaaaagataagagggaccctgtccaccttcaaaaaggaaagagtaactcttc

SEQ ID NO: 1018653 - DNA, 120 bp, Artificial Sequence
  ENSG00000266976_22 (sequence is synthesized)
ctgcactagtggtcattgtaacccattagaactactaattaccaatctccttgatccctgttggaaaacaggagagtacgtaactctaggaattgagggaactggactggatctccgagt

SEQ ID NO: 1018654 - DNA, 120 bp, Artificial Sequence
  ENSG00000266976_23 (sequence is synthesized)
aaatattttaatccaaggggaggtccacaggtgctttcccaaaccagtgtttcagaccttttacgatgaattgaatctgccagcaccagagcttccacacacacacacacacacacacac

SEQ ID NO: 1018655 - DNA, 120 bp, Artificial Sequence
  ENSG00000266976_24 (sequence is synthesized)
acacacacacacacacacacaaagacaaagaacttgtttctccagttattaggaaatgtagctcattccctcaatgttacttcctgttatgtatgtgggggaaccactatgggagaccaa

SEQ ID NO: 1018656 - DNA, 120 bp, Artificial Sequence
  ENSG00000266976_25 (sequence is synthesized)
tggccttgggaagcccgggaattggtgcctactgatccagttcctgacataattccagtccagaaggcccaaattagcaacttctgggtcctgaaaaccttgattattggataatactgc

SEQ ID NO: 1018657 - DNA, 120 bp, Artificial Sequence
  ENSG00000266976_26 (sequence is synthesized)
atagctagagaaggaaaagacttcaccatccttgtaggaaggctcaattgtctaggacagaagctgtataacagcacaacagggacagtcacctggtggggtctaaaccatactgaaaag

SEQ ID NO: 1018658 - DNA, 120 bp, Artificial Sequence
  ENSG00000266976_27 (sequence is synthesized)
aatcccttcagtaaaattcctaaattacagactgcttaggtccatccagaatctcatcgagaccggacggctccctctggactatactggatatgtagacacagagcctacactccgtca

SEQ ID NO: 1018659 - DNA, 120 bp, Artificial Sequence
  ENSG00000266976_28 (sequence is synthesized)
cctgatcaatggggaagtagttgtgtcattggcaccattaagccatcccttttcctattgcccgtaaaaacaggtgagctcctaggtttccctgtctatgcctgagaaaagaggagcata

SEQ ID NO: 1018660 - DNA, 120 bp, Artificial Sequence
  ENSG00000266976_29 (sequence is synthesized)
tctataggaaattggaaagatgatgagtggccccccaaaaggatcatacagtactataggcctgccacacgagcacaagacggctcgtggggataccgaacccccatctacatgctcaac

SEQ ID NO: 1018661 - DNA, 120 bp, Artificial Sequence
  ENSG00000266976_30 (sequence is synthesized)
cagatcatacggttacaggccatattagaaataatcgctaatgaaactggcagagctttgactcttttagtccagcaggaaacccaaatgagaaatgccatctatcagaatagattggcc

SEQ ID NO: 1018662 - DNA, 120 bp, Artificial Sequence
  ENSG00000266976_31 (sequence is synthesized)
ttagactatttgctggcaactgaaggaggagtctgtggaaaattcaacttgaccaattgctgtctacaaatagatgatcaaggacaagtagttgaaaatatagagacatgacaaagccag

SEQ ID NO: 1018663 - DNA, 120 bp, Artificial Sequence
  ENSG00000266976_32 (sequence is synthesized)
cacatgtgcccatgcagatttggcataggtttgatcctggatctttgtttggaaaatggtttccagctctaggaggatttaaaactcttgtaataggcataataatagtgttaggacctg

SEQ ID NO: 1018664 - DNA, 120 bp, Artificial Sequence
  ENSG00000266976_33 (sequence is synthesized)
catgttactcccctgtatgttacacatatttctccagttactaagaggcttcgttaccatcttagttcatcaaaacacctcagcacaagtatacatgaatcactattaatctgtctcaca

SEQ ID NO: 1018665 - DNA, 120 bp, Artificial Sequence
  ENSG00000266976_34 (sequence is synthesized)
ggaagatctagatagtgaggatgagaatgagaactcccactagtgagtgaggttctcaaagggggaaatgaggagagaggctatttctcctactgtcctgtctccaaagaaaaggagaaa

SEQ ID NO: 1018666 - DNA, 120 bp, Artificial Sequence
  ENSG00000266976_35 (sequence is synthesized)
gtaaaaactgaaaaataacagactgattggcgccactggccaggcctgtaggttaaagattaacccccaccccaaccgcttgtgctatccatagatcacagacaatggtatgaagaaata

SEQ ID NO: 1018667 - DNA, 120 bp, Artificial Sequence
  ENSG00000266976_36 (sequence is synthesized)
cttgccttcctcaccacccctacctagtcatgcagacaatggtatggagaaatacttgccttggtcaccaccccatctagtcgcgtaccccatgcttgctcaatctatcacaactttttc

SEQ ID NO: 1018668 - DNA, 75 bp, Artificial Sequence
  ENSG00000266976_37 (sequence is synthesized)
ctttcttcagggagctcggttcttgagatacaaatctgccaatgctcccagccgaataaagcctcttccttcttt

SEQ ID NO: 1018669 - DNA, 120 bp, Artificial Sequence
  ENSG00000247011_0 (sequence is synthesized)
atagatgctaatcgctgcggatcgcccgccccagcttaaggtcaggaggtaacgcgacccgcggttataaataaccgctcagggcggcggccgagggcagcgcgctggacccgcgcccct

SEQ ID NO: 1018670 - DNA, 120 bp, Artificial Sequence
  ENSG00000247011_1 (sequence is synthesized)
cgccagccgccgggccggcttgattactgccctccccggcccgaccgcgggcacctgaacgccgacagcagagcacggcgacctctggggctagcgcgcaaggtcagaccaggtccaggg

SEQ ID NO: 1018671 - DNA, 120 bp, Artificial Sequence
  ENSG00000247011_2 (sequence is synthesized)
cttccctgccctctgcggggaccctggagcaccgacagccccacctccccacctccaagccccactcccatctcccaccaggggcaagaaggtggagggaggccagcggacacaacccga

SEQ ID NO: 1018672 - DNA, 120 bp, Artificial Sequence
  ENSG00000247011_3 (sequence is synthesized)
ggacccaggcggcctgcgcctccgcgccaagcctgggggtggccgatggcaagggaggcccggagtaacccagccagtgagggccaggctgcagctaacactgatcctgcttctggggcc

SEQ ID NO: 1018673 - DNA, 120 bp, Artificial Sequence
  ENSG00000247011_4 (sequence is synthesized)
gacacaggcctggtctgtgatggtgggacttaccagagcttagtggaaagaaaatccctgagtctggggcttcaggagtctcaggctggggagggactctggtagcacccatgaggggac

SEQ ID NO: 1018674 - DNA, 120 bp, Artificial Sequence
  ENSG00000247011_5 (sequence is synthesized)
acgtggttgtgccccagggaggccagccacctgctctccacttgcccttggatagaaaagggaggtggatttaacctgctccaggagacatgacttttatttttaagactttttaaaatt

SEQ ID NO: 1018675 - DNA, 120 bp, Artificial Sequence
  ENSG00000247011_6 (sequence is synthesized)
gaagttaagcacacacacagaacactgcacaaatcaaagtgtacaactgaaagaatttgcacatgctttgcatacctgtgcaaccagcacccaaattaaaaaacagcacctcaccggcac

SEQ ID NO: 1018676 - DNA, 120 bp, Artificial Sequence
  ENSG00000247011_7 (sequence is synthesized)
ccagaagcccctcgagaccccttccacctactgttcccgagtccagcctctctcctgactcagcccgcaggcgctctggcctgcttctgaactgtgtgtagatggagccatacagtgggt

SEQ ID NO: 1018677 - DNA, 120 bp, Artificial Sequence
  ENSG00000247011_8 (sequence is synthesized)
ggtttcttttgctgcatattatgtttgtgaggtttgtcagtactctcacaggcagtcaagggctgttcgtacccattgctggtggcttgccattgtgtggctctgttaaaatgtattcac

SEQ ID NO: 1018678 - DNA, 120 bp, Artificial Sequence
  ENSG00000247011_9 (sequence is synthesized)
ccatgttactgctaatggacatttggggaggttccagttcctggctatggtgaatagtgccactatgaacattctagttcctgtgtattgtgaacatatgaatgcatttctgttgggtga

SEQ ID NO: 1018679 - DNA, 120 bp, Artificial Sequence
  ENSG00000247011_10 (sequence is synthesized)
atacccagggcagggatgacggggcccggctgtgtgtctgctcagctttggaagatacaggaatgttactttttaatcatttcagtaagaatgatttttcaaggccatgctggtgtttgc

SEQ ID NO: 1018680 - DNA, 120 bp, Artificial Sequence
  ENSG00000247011_11 (sequence is synthesized)
gagcctaacaaatggttgtgattcaagaggcgaaggctctgggcgcctcttgctccctgccggctccaccacagtgccatgtgggcaggggatggagtcatgccaaggcctggccaaggc

SEQ ID NO: 1018681 - DNA, 120 bp, Artificial Sequence
  ENSG00000247011_12 (sequence is synthesized)
cactcccgccctctgacatcagattgtgggcactagatcccgcttggtggtgaaccgggtgcgtcagaacccagggattaaatagctttcgaaatccatcggcttgtccttgaccagcca

SEQ ID NO: 1018682 - DNA, 120 bp, Artificial Sequence
  ENSG00000247011_13 (sequence is synthesized)
gagggccagggcacgtgcccagacctcctgccagctcagggataggggaaaacaccatccatgcacacattcgaggcagctgcagagagccgcccacagtgggtcacagcccaggcccaa

SEQ ID NO: 1018683 - DNA, 120 bp, Artificial Sequence
  ENSG00000247011_14 (sequence is synthesized)
gactgatggtcctggcccaaagtgctctggagacctgagctcccgagacgggggttggttggaggctgggggctgtcagaacctctctccaggcacccagctaggggctgaggaatctgc

SEQ ID NO: 1018684 - DNA, 120 bp, Artificial Sequence
  ENSG00000247011_15 (sequence is synthesized)
tctgccagctgttttcacagtgggaagcaggtggcttgcacaggcctttgggggaccccatatgttgaggtaggaaacgctgtggtgtggcgggggagggagcaaggggtatccttcctc

SEQ ID NO: 1018685 - DNA, 120 bp, Artificial Sequence
  ENSG00000247011_16 (sequence is synthesized)
tgcacccaggggccatctgctttcaaatccagccacttgtcctccttcctggtagcaatatggagccacccagactctgctagacatatgagtgctaaagataaaaatactcaaaggaca

SEQ ID NO: 1018686 - DNA, 120 bp, Artificial Sequence
  ENSG00000286958_0 (sequence is synthesized)
gatgggtcgaagcccagagggctgtgggcggaagtggggaagtttgtggcgtgactgtgttatgaatttttggagaaacaccactaaagcgatgtgtcttttccagtgcatgatatcaag

SEQ ID NO: 1018687 - DNA, 120 bp, Artificial Sequence
  ENSG00000286958_1 (sequence is synthesized)
gtacacacttcccagatattccaatatgcctcctagaaaagcatgcccttctgagtggaaatgataccgttactctaatgatgcagtccatgctctaagcatcatttttttgacagtgac

SEQ ID NO: 1018688 - DNA, 120 bp, Artificial Sequence
  ENSG00000286958_2 (sequence is synthesized)
agaaaagtactatgtcatttcatgttattgttaaactttccctgtattctgtacttttgcaattcattttttgataaaagaggaagatcttatatctgtcacatttcgtctgttacaatt

SEQ ID NO: 1018689 - DNA, 120 bp, Artificial Sequence
  ENSG00000286958_3 (sequence is synthesized)
ggcccattgttgtagcttatcaagaccttttggatttgatggtgttacttatcgcattcactgtcctttccaatgtaattgtcacccataaagttgatatgtctatccataatacaaaaa

SEQ ID NO: 1018690 - DNA, 120 bp, Artificial Sequence
  ENSG00000286959_0 (sequence is synthesized)
ccggcctctttaggtgccgcagcggaaggcctggagcagaggctgcttctccgcccaagcactccctggggatccctgcatcactcaagggatctctcgagatagtcatggggcagcaga

SEQ ID NO: 1018691 - DNA, 120 bp, Artificial Sequence
  ENSG00000286959_1 (sequence is synthesized)
agcagaaacactgcaaactctgatcaccatgtgagccacgcctgaccccatgtgggtgaaacctgatcctacagtggttcccatgtgactgaggcctgattccatgtgagtgaagcctga

SEQ ID NO: 1018692 - DNA, 120 bp, Artificial Sequence
  ENSG00000286959_2 (sequence is synthesized)
tcatcatgtgagtgaagcctgatcatcatgtgagtgaagcctgattccatgtgagtgaaacttgatcccatgtgattgacggctgactccatgtgagtgaagcctgatcatcatgtgagt

SEQ ID NO: 1018693 - DNA, 120 bp, Artificial Sequence
  ENSG00000286959_3 (sequence is synthesized)
gaagcctgatcatcatgtgagtgaagcctgattccatgtgagtgaaacctgatcccatgtgattgacggctgactccatgtgagtgaagcctgatcatcatgtgaatgaaggctgatccc

SEQ ID NO: 1018694 - DNA, 120 bp, Artificial Sequence
  ENSG00000286959_4 (sequence is synthesized)
atgtgaatgaaggctgatcccacatgatgaagcctgattaccatgtgaatgaagactggttccatgtgggtgaagcctggttccatgtgagtgaagcctgatcccatatgagtgaagcct

SEQ ID NO: 1018695 - DNA, 120 bp, Artificial Sequence
  ENSG00000286959_5 (sequence is synthesized)
gattaccatgtgaatgaagcctgattccatgtgtgtgaagcctggttccatgtgggtgaagcctgatcccatgtgagtgaagcctgcttctctgtgaatgagaccttatcaccatgtaag

SEQ ID NO: 1018696 - DNA, 120 bp, Artificial Sequence
  ENSG00000286959_6 (sequence is synthesized)
agcccagtgagaacaggcagttccattctgaatagacagaagggacatgcagcttgcgttggcaaccttctgcctcctgcatttcttaaagtggagtcgattaatggctttccagaagca

SEQ ID NO: 1018697 - DNA, 120 bp, Artificial Sequence
  ENSG00000286959_7 (sequence is synthesized)
agggaaagatttctactgtgctcatcatgaagaagtgtaaattgttacaatcttttcagagggtgattttgcagaattatcagtacataaaagatggtaattgcaatgttgtttgtggca

SEQ ID NO: 1018698 - DNA, 120 bp, Artificial Sequence
  ENSG00000286959_8 (sequence is synthesized)
gtgaaaaagtggaaatggtctaaatgccatcaacagaggactggttaaaaaactggaagtacctttgtactatggaataatatgcattaactaaaggtgaggaagtaaatacgtatgcat

SEQ ID NO: 1018699 - DNA, 120 bp, Artificial Sequence
  ENSG00000286959_9 (sequence is synthesized)
agacatggagaggtgaccacattatcacattatattaaatgaaaaaagcaggtttcagaagaatgcatcagtatcagctcatatgtataaaaaagagttaaatgcatgtaatgtaaatgt

SEQ ID NO: 1018700 - DNA, 120 bp, Artificial Sequence
  ENSG00000286959_10 (sequence is synthesized)
ctgagtaatgcatggaacagacccaaaaggatgcaaaccaaataaatggtagttaattctagaaagagggattgatgggagatgggagagagaggaaaggaaacagggaatttcactttc

SEQ ID NO: 1018701 - DNA, 120 bp, Artificial Sequence
  ENSG00000286959_11 (sequence is synthesized)
tatgtaataggttcctgtactatttgcttgtcatgttttgtgttataataagcatgtactacaccttgcttttaaaagatgtaaaaaagaatctcaaaataaaactttgttatgttagta

SEQ ID NO: 1018702 - DNA, 120 bp, Artificial Sequence
  ENSG00000286950_0 (sequence is synthesized)
gggtctcccaggcgcgccgtggcgcctcccaccagcgcgatcacgttgtggcccgctcgctgcaaatgaaacaggcccagcagcgcaagtagatgacccacatgaagcgagtctgccgtg

SEQ ID NO: 1018703 - DNA, 120 bp, Artificial Sequence
  ENSG00000286950_1 (sequence is synthesized)
gggtcgaagccacagtaaatggtttggggaaaactcgccgtgccacggtcgaagagctctgggagctctattttcgtccccgtctccgggaagaagtccttgaacagacctcgagccttc

SEQ ID NO: 1018704 - DNA, 120 bp, Artificial Sequence
  ENSG00000286950_2 (sequence is synthesized)
tgcgctgccagtaacccctgagcgcccgagtgggccttacgcagccccaagggcaacaatactgagagatttagggtaccagaccaccggccccaggaaaaggaccgcaagatgggcgcc

SEQ ID NO: 1018705 - DNA, 120 bp, Artificial Sequence
  ENSG00000286950_3 (sequence is synthesized)
cggttacgtagttacggagcttgcgctctcagcagttgagtcccgactccaagtggcgattccgcctcagagccgtcgccttacgttcccttaaacttaatttttccatcagcagtgtgg

SEQ ID NO: 1018706 - DNA, 120 bp, Artificial Sequence
  ENSG00000286950_4 (sequence is synthesized)
atctgcttatgatagttcctacctcataaggctgttgtgagccttaaaaattaaagcatttggcacataacgcttcacaaatgctaacttgtatttacattttcacgtaaaaagattgtg

SEQ ID NO: 1018707 - DNA, 120 bp, Artificial Sequence
  ENSG00000286950_5 (sequence is synthesized)
atgcgcaagttctttgaagtcttggttccatgcaaaaagctgttcacagaggttgagaaaggttaggaattggtttaagttcgcggagagatagggagttgctgctgagacgcaagcaat

SEQ ID NO: 1018708 - DNA, 120 bp, Artificial Sequence
  ENSG00000286950_6 (sequence is synthesized)
ttcatagtaccgattccctaattgcacctcgtccccagtattcatcggctcttccaggaggtggcagtcttgtccaaggtatagcaagaaaaactcagtgcaataaagtacatgcatcaa

SEQ ID NO: 1018709 - DNA, 120 bp, Artificial Sequence
  ENSG00000286951_0 (sequence is synthesized)
tttcccaagcgtcagcatcaaagccaggaacagaaccttctctgccttttggcattcaagttgtgctgtccactctatgaacagaggacacatccaggctacagcggtcatcatcctata

SEQ ID NO: 1018710 - DNA, 120 bp, Artificial Sequence
  ENSG00000286951_1 (sequence is synthesized)
gctgatatttggcaccatgcggcaggatccattcacaccgatggcatgaatatagagaagcaatgaggtctagggcagaagccagtgtctatggatgagaaaatgagatgcaaccaacaa

SEQ ID NO: 1018711 - DNA, 120 bp, Artificial Sequence
  ENSG00000286951_2 (sequence is synthesized)
aggagacccaggaggaccagccagtgaggtcataaggaagcttgtgagatggaagagatgtccaggaagccaagagacgggtgtgtcttaaggatgggacatggtctaccatgtgatgtg

SEQ ID NO: 1018712 - DNA, 120 bp, Artificial Sequence
  ENSG00000286951_3 (sequence is synthesized)
ttggcagtcaagagaagcaagcactggttaacccatggaatcatctgtgacctggacccgagttctgtggagtggagggattgaaggcatcaatggatgggtccaagagaaatgacagga

SEQ ID NO: 1018713 - DNA, 120 bp, Artificial Sequence
  ENSG00000286951_4 (sequence is synthesized)
gaagaactggaaacagtgcttttagataatccctttctagtcatctagtcattttgtcaacataggccagtagcttgagggggaatgtggcattaaagctgaaacatgaggtcatccaat

SEQ ID NO: 1018714 - DNA, 120 bp, Artificial Sequence
  ENSG00000286951_5 (sequence is synthesized)
ctcgaaatagtcccaaatgattgctgaagactgacaagcaagtcagatgagacatggctcgaatgccaccagtaataatagaaatatttttagaagattcagatttcttctctttttttt

SEQ ID NO: 1018715 - DNA, 120 bp, Artificial Sequence
  ENSG00000286951_6 (sequence is synthesized)
ttttggaccaaacatttttgtgatattctcacaatcttaatggaaaattataacaaacataaaaatcacacgggatctttcttttagaattctgcaaacacaacaacttttggttacact

SEQ ID NO: 1018716 - DNA, 120 bp, Artificial Sequence
  ENSG00000286951_7 (sequence is synthesized)
gatgattctggcagcacaggtagggctgttcctctgcagatgttactaacccaccctcggcgatgctctagttttataaggcatgttttgtgtacgagttggatgttacctctgtgacct

SEQ ID NO: 1018717 - DNA, 120 bp, Artificial Sequence
  ENSG00000286951_8 (sequence is synthesized)
cggtggtatgcttggctggaatcaaaagcatcaattcccattagcgatttcctactgatcgtatctagtctccaaaatccaaagaaaactaaaagttttcaatgtttacagcaagaccca

SEQ ID NO: 1018718 - DNA, 120 bp, Artificial Sequence
  ENSG00000286951_9 (sequence is synthesized)
aggaaacatactagtgttcaattagatgagagccatgacacgaatgaaaaaaaaaagtcatgttggagctttaattttccgttgttttctttctctctgccagaataggtgtgactcaga

SEQ ID NO: 1018719 - DNA, 120 bp, Artificial Sequence
  ENSG00000286951_10 (sequence is synthesized)
ttctttagtgatacttgcaaatataatagaaaaggatgtctcaatttaagaaaatttatatatctgtgtgtatatgtacacacacacatgcatacacaaacacacactttctcataatag

SEQ ID NO: 1018720 - DNA, 120 bp, Artificial Sequence
  ENSG00000286951_11 (sequence is synthesized)
taaaatcacaattgtaaaataatcaaccaagggtcttgggaatgtaagtacaataaaagggataaaccaataaatgtaaagctgaactataaagatccattaattatttttaaagcccca

SEQ ID NO: 1018721 - DNA, 120 bp, Artificial Sequence
  ENSG00000286951_12 (sequence is synthesized)
aatctcaagtatctcaaaattagtataccttccttgcaattgcaaaacacatgtatatctgttctattctgtttacttgagagttaggctgacttctctttgaatccttttgtgtcaatg

SEQ ID NO: 1018722 - DNA, 120 bp, Artificial Sequence
  ENSG00000286951_13 (sequence is synthesized)
aatattaagtaggaactcagtcacacacagcagtaaattaaaaaaaaacctgtccaactgaatagcaaaatattgatcaagtgaagagcaattgcatgtcaggaccaaatttattaatta

SEQ ID NO: 1018723 - DNA, 120 bp, Artificial Sequence
  ENSG00000286951_14 (sequence is synthesized)
aaatgagtccccatttaaacactatagttggaatttcagccctaatctgacatgcacagtacattctgatatctttgctgacttcaggtctgtggatattgtttttaataggtggtgcct

SEQ ID NO: 1018724 - DNA, 120 bp, Artificial Sequence
  ENSG00000286951_15 (sequence is synthesized)
ctcttacacggtgaattgagaggaaaaaaagaacataacactgagtcctgtgtgtgctgggaggcatttagtacaccttattcacaagcgagaaaaagaagacacgcacgaaggactgtg

SEQ ID NO: 1018725 - DNA, 120 bp, Artificial Sequence
  ENSG00000286951_16 (sequence is synthesized)
agaaacagattattttaggtactttggggggaaaaagagttacaatttgcccataaagaatggagagaacagaaatgtagcttttatgctgaaaaacaaaatgcaagggcaatccagttt

SEQ ID NO: 1018726 - DNA, 120 bp, Artificial Sequence
  ENSG00000286951_17 (sequence is synthesized)
ctaattcctgtgccaaagctgctgttcttgatgacctcggtcaaatcatttaaattctctcaatttgttcatataaaagtgctattaacctgcagttcctcaaatactatccaatcaatg

SEQ ID NO: 1018727 - DNA, 120 bp, Artificial Sequence
  ENSG00000286951_18 (sequence is synthesized)
ttggctacttgattttcactaaatttaagagatagagccttagaaaagtgatagagaacaccttcaaagtgtaaaatcaaagttctcctttcagcacagagcaatacataaataaatgtt

SEQ ID NO: 1018728 - DNA, 120 bp, Artificial Sequence
  ENSG00000286951_19 (sequence is synthesized)
attgtaaatgggtatcattactgttaaaaccctgagcctcattacccacctggtaagcaacacaggaagcagaaggacataccaggaatccacagacatggactgcagtcaagatttgca

SEQ ID NO: 1018729 - DNA, 120 bp, Artificial Sequence
  ENSG00000286951_20 (sequence is synthesized)
gaaaaatgtgtgtgaccttgggcaaggtatctctctgttttcaaaacagttttattaggcaaaataatgtacaataaattacataaatgcccatcaatcaatgaatggataaagaaactg

SEQ ID NO: 1018730 - DNA, 120 bp, Artificial Sequence
  ENSG00000286952_0 (sequence is synthesized)
agaactgtggccttcagtgtccttggaatcctaagggaagaattcactctacacaagataaaattttgatcaaaattctgttttgttgaaatatttttaaattgttaatatacactaaaa

SEQ ID NO: 1018731 - DNA, 120 bp, Artificial Sequence
  ENSG00000286952_1 (sequence is synthesized)
aaagcaaagggaccacttgacatttcaaattaaatatgaagcaaatgccgagaagcacactgtcactgcaggtgtagaagttcggactgccctcaagccatcctactgcctttgcaggcc

SEQ ID NO: 1018732 - DNA, 120 bp, Artificial Sequence
  ENSG00000286952_2 (sequence is synthesized)
aacttcgcagctttgagtttcctttcctagtcacaaggatgcagtgagaaatggaaccgatgtcttagaggcatcctgcattctaatctggactggactaaagggactggactatttgct

SEQ ID NO: 1018733 - DNA, 120 bp, Artificial Sequence
  ENSG00000286952_3 (sequence is synthesized)
ggtctctttgtgctgggtggacatttgttgttttcctgcctatcttgaagtgataccatccttctcagtccaagcttctcagtccaggcacctctggtggtagaactccacctagccatg

SEQ ID NO: 1018734 - DNA, 120 bp, Artificial Sequence
  ENSG00000286952_4 (sequence is synthesized)
cagggtaggctggtgactcacacctggccagtcatacttccagcctgagtgactgattcagaaatggacatgtgacccaatcaaagccagagatgcagaaactcttgctgggactttcgg

SEQ ID NO: 1018735 - DNA, 120 bp, Artificial Sequence
  ENSG00000286952_5 (sequence is synthesized)
agaaaagactcactctcaactcctcaaagttgggtggatgtgaggccagagttgctgttgctatcttgctaccatcagatgacagcctgagaatggagtttacccaaagggaatggagac

SEQ ID NO: 1018736 - DNA, 120 bp, Artificial Sequence
  ENSG00000286952_6 (sequence is synthesized)
aacagatgaagtgcaagaagccaggacaagatatccatgtttgcaccctggtcaaatgttacctgaagccactttagctcctggagtttgcagttacatgagggaacaaacttcattttt

SEQ ID NO: 1018737 - DNA, 120 bp, Artificial Sequence
  ENSG00000286952_7 (sequence is synthesized)
gcttatgtcagaatttttgttacttataatggaatcaatccaaagtggtacagtgctttttatcccataagctacatagtgatctctttttcctttctttgcagtatctaaaccattcat

SEQ ID NO: 1018738 - DNA, 120 bp, Artificial Sequence
  ENSG00000286952_8 (sequence is synthesized)
tctttaaatcccacttaaatgctacctcatccatgaaacaatctctgctttcttgtgccataagaactctctcccttctttgaaatcccagagcattttacatgttggtctcttatggaa

SEQ ID NO: 1018739 - DNA, 120 bp, Artificial Sequence
  ENSG00000286952_9 (sequence is synthesized)
catcccttactatagtgtactaattttctttagatacatggcttgtcccctgtaagctcttggcagcttcagggcaggacttttgttgtgattatctttttatcacaggacacacaaggt

SEQ ID NO: 1018740 - DNA, 120 bp, Artificial Sequence
  ENSG00000286952_10 (sequence is synthesized)
ctgagcaggcaatacactctgggaagaagccagttttgctccataggaggaagagaacaaactgctgctggagatgctgcaacagtacaagctgtcaggtcaagaagaggcagagaaaga

SEQ ID NO: 1018741 - DNA, 120 bp, Artificial Sequence
  ENSG00000286952_11 (sequence is synthesized)
gatgaagtctgacaagggtaaaaccagggagagcgagcaccaagcacaagaaagctgtaaagacccacaaggcaaacatttagaaaacccactcgcccgtggcttcctttatcccagagt

SEQ ID NO: 1018742 - DNA, 120 bp, Artificial Sequence
  ENSG00000286952_12 (sequence is synthesized)
gtcattagtgtctgtggtcagctacttgtactacctctgaattagctaccatttactaagtgcttagtacatgccaggcactgtgctaaacatttcatatgcattgcctcatttactcta

SEQ ID NO: 1018743 - DNA, 120 bp, Artificial Sequence
  ENSG00000286952_13 (sequence is synthesized)
taaaataacagtgagttgaatattatttctgtcattttacagatgaagaaactggggtacagaaagatgagtaacttgctaaaagtcacaaagatagttaagtgttagatcaggatttat

SEQ ID NO: 1018744 - DNA, 120 bp, Artificial Sequence
  ENSG00000286952_14 (sequence is synthesized)
gctgggattttaggcagtgtgcaaaaagttttttttttaaaaaaaaggcacaggaaggagagaatgtgaagatgctatggactgaatgtttgttttcctccaaaattcatagattgaaac

SEQ ID NO: 1018745 - DNA, 120 bp, Artificial Sequence
  ENSG00000286952_15 (sequence is synthesized)
cctcatctccaaggtgatggtatttggagatggagcctttgggaggtaattaggtcataagggtggagccctcatgataggattagcacccttataagaagaaacagaagagacattttt

SEQ ID NO: 1018746 - DNA, 120 bp, Artificial Sequence
  ENSG00000286952_16 (sequence is synthesized)
ctctttttctctcatcgtgaaccaggagagctgtcaccagtaacctgaccatgatggcatcttgatctcagactttccagcctccagagcttgagaaataaatgtctgttctttaagtta

SEQ ID NO: 1018747 - DNA, 120 bp, Artificial Sequence
  ENSG00000286952_17 (sequence is synthesized)
tctagtctattttgcttttttatagcagcctgaactgactaaaaaggagatcgatagggtgaacagtgagagagaaatgaggaaagtgtagagtcctgtaacaatgaggaaagggcccca

SEQ ID NO: 1018748 - DNA, 120 bp, Artificial Sequence
  ENSG00000286952_18 (sequence is synthesized)
cgtgggggagaacaattgttctgaaaaatgtctaattacagacaatccactagcacatcttgtttccaaataccttgctgtgcctgtagcccgagcagcaccaccttgttctgcatagcc

SEQ ID NO: 1018749 - DNA, 120 bp, Artificial Sequence
  ENSG00000286952_19 (sequence is synthesized)
cctctagtaccaccctacaaaacttccctccagcccctggttctttgcagatagcctcttctctgctgtgctgcccactgcactgtttcaatgtattttcatactttctctaataaatct

SEQ ID NO: 1018750 - DNA, 120 bp, Artificial Sequence
  ENSG00000286953_0 (sequence is synthesized)
ctacagcatgaggccgggagatacaaggcagcatgttagaacaatgaagcaaagagcaacctcagaaggctgaaggatacagagatatatgagctacacaagaaaagggactgccatcct

SEQ ID NO: 1018751 - DNA, 120 bp, Artificial Sequence
  ENSG00000286953_1 (sequence is synthesized)
acactgtcttccacaatggttcaactaatttgcactcccaccaacagtatagtcaaggaaacttttgagctatcaacagttttaacagtctttatattccaaatggtcatacaaccagag

SEQ ID NO: 1018752 - DNA, 120 bp, Artificial Sequence
  ENSG00000286953_2 (sequence is synthesized)
aaatggtcatacaaccagagccttggatgatgacttccttttactggggagccttagataagcctctgagggaaatcggactgcggttttcccaaaacagcaccccctgtcagcagaaag

SEQ ID NO: 1018753 - DNA, 120 bp, Artificial Sequence
  ENSG00000286953_3 (sequence is synthesized)
cagttaagatcagtcttcatccccattctaatggcagttagatgtacctcttcagaggggggaaatgatagccataggaggcagccagatgcctaggaatataggggcagatccctgctg

SEQ ID NO: 1018754 - DNA, 120 bp, Artificial Sequence
  ENSG00000286953_4 (sequence is synthesized)
aaaacccatcttcaagccaaaaaaacaacctgaaggctgagtgaactgctggtcccggatgaaacccatgaccaagagtgagaacttctgttcctgtttgcctgtcctttcccaactgat

SEQ ID NO: 1018755 - DNA, 120 bp, Artificial Sequence
  ENSG00000286953_5 (sequence is synthesized)
tatatctgaataatgccttttaagcaatcaaattttgccttttctaatactacctacagcctgcccttcccctattctgagcccataaaagccccaaactcagccacattggggggactt

SEQ ID NO: 1018756 - DNA, 120 bp, Artificial Sequence
  ENSG00000286953_6 (sequence is synthesized)
tcccaccttagggtaggggacaaccctcgggtctcctctccatggaaagctgcttcgtcactcaaaagagtgccccaccttgctcactcctcaattgttagcatatcctctttcatcttg

SEQ ID NO: 1018757 - DNA, 120 bp, Artificial Sequence
  ENSG00000286953_7 (sequence is synthesized)
gacactagaaaagaacttgggaaccagtattcaagccagacttggcccaggcaggccaagtgggtgggctgtctcctgcggcaggtagcatggccaagcaaggcccacgtggggcgttgc

SEQ ID NO: 1018758 - DNA, 120 bp, Artificial Sequence
  ENSG00000286953_8 (sequence is synthesized)
cagctggaggtccccagtttgcaacatgactgagagaaaaatattgcgtcaataacagtaatacattaataatataagtaaaatgcaaatgtttaaaatatcttcaaagtttataggagc

SEQ ID NO: 1018759 - DNA, 120 bp, Artificial Sequence
  ENSG00000286953_9 (sequence is synthesized)
catcatgtaatacaaactgccataaagccctgcttgaaatttttaaaattgtgacttcataattaggcaaatactgattttcagcaaattaccttccaacacatttgtcatttgacaaac

SEQ ID NO: 1018760 - DNA, 120 bp, Artificial Sequence
  ENSG00000286953_10 (sequence is synthesized)
tggctttctgaggattgatatttttctcccctgagaagttgacttacaatcatattgtcactttctccctctttctctaagctctagccatatgagagcatgtcacttcagcacatcatg

SEQ ID NO: 1018761 - DNA, 120 bp, Artificial Sequence
  ENSG00000286953_11 (sequence is synthesized)
ctcctctgcatgtcttttaagataatgtttcctttggttaaacactctttcatccccacccccacaattgcctattgaaatcctatttactgtcagcaagatgccagcttcagaaaacat

SEQ ID NO: 1018762 - DNA, 120 bp, Artificial Sequence
  ENSG00000286953_12 (sequence is synthesized)
tctcttaaccccagaataacactgagctgtagttatacattcactagtttgaatatttgactaatgactgtaatagattggattcttttgccagtaaatatttattaccctcctcagtga

SEQ ID NO: 1018763 - DNA, 120 bp, Artificial Sequence
  ENSG00000286953_13 (sequence is synthesized)
tgcagaggatacttccctgctgtattgatgctgggctttcatgtgaattgtttaggataatagaatctggcacatttctgagtcaagtccaggaagaatccacctgttttcttgagatgt

SEQ ID NO: 1018764 - DNA, 120 bp, Artificial Sequence
  ENSG00000286953_14 (sequence is synthesized)
tttgtttgtgctcttctgtcatttactatgagaagagtgggcactggatagaaacagataatatacttgaagcagaactgcatccaatatgcattttgcagtcatagtcagtaaagtcag

SEQ ID NO: 1018765 - DNA, 120 bp, Artificial Sequence
  ENSG00000286953_15 (sequence is synthesized)
atgatttggctttaaacctctcagtttgggggtgggttgttaacagcatcattgtagcaatagctaagtactacaatgactatttcccaactatactgaaataattcctgggtgaatgaa

SEQ ID NO: 1018766 - DNA, 120 bp, Artificial Sequence
  ENSG00000286953_16 (sequence is synthesized)
taaatacatgaaaactggaaataacataaattgtatattattgcctactggttaaataaaacataattcattcttttgacagtgactatacagtcattaaaaatactgctttcaattttt

SEQ ID NO: 1018767 - DNA, 120 bp, Artificial Sequence
  ENSG00000286953_17 (sequence is synthesized)
ataatattattaggaaaataatatagttcattataaaaggccaatctagataggaaattccaaaaaatatacaatataaataccacaaaataaaccactcacacacacattattaattct

SEQ ID NO: 1018768 - DNA, 120 bp, Artificial Sequence
  ENSG00000286953_18 (sequence is synthesized)
atacaatataaataccacaaaataaaccactcacacacacattattaattctagaaaggtaggtatatagacagagaaatagatgctaagataaaatattatacaagttattttaaatta

SEQ ID NO: 1018769 - DNA, 120 bp, Artificial Sequence
  ENSG00000286953_19 (sequence is synthesized)
tagaaaggaaaattttgaagtgaaactgaaggaaatactaaaccccataagatatactgccatcttaaaataaaacactcttgatttagaagacatattataaaaattaagaggataaat

SEQ ID NO: 1018770 - DNA, 120 bp, Artificial Sequence
  ENSG00000286953_20 (sequence is synthesized)
gtttttatattacatatttaaaacgtggatagtatatattgactttttaaaataaaagatccgagaattaacactttcatactatcatcaactttttcccatcctcatttttattagttt

SEQ ID NO: 1018771 - DNA, 120 bp, Artificial Sequence
  ENSG00000286953_21 (sequence is synthesized)
cattattgaggtttatttaatttatatcctattttgtaactattccatcacagttgtttagacctaagtaaattcaatgctcgccatgagtgcttttctaagccttcattactgagatct

SEQ ID NO: 1018772 - DNA, 120 bp, Artificial Sequence
  ENSG00000286953_22 (sequence is synthesized)
ttatttaaattcatctcttatctgaatgtcctttgaaagggagccatgagtccattattatattagttctttcatgattgacaatgtatatctgtagtgtctgaacttcaagaatatatt

SEQ ID NO: 1018773 - DNA, 120 bp, Artificial Sequence
  ENSG00000286953_23 (sequence is synthesized)
gttgtgaaataattgtacatagttgtgggtatatatttattcagatatatcccaattgtcttatgtgtcactgaatacttatgtttaaaaatctaaggccaactgggcatttttcttctt

SEQ ID NO: 1018774 - DNA, 120 bp, Artificial Sequence
  ENSG00000286953_24 (sequence is synthesized)
tacaggcctctagatattttctatttgaagaatccttggttttcatttgaattgcaataacttacaaagaatgtatcaatactattattgagtattctaagtcaacagttcctggaattt

SEQ ID NO: 1018775 - DNA, 120 bp, Artificial Sequence
  ENSG00000286953_25 (sequence is synthesized)
gactttgctttttgatatgtaaatttggtgtttgcttcattttaagaatttttaaatattattgccttgaatatatatacataatttttttatttgttgagtttcgcaaaaaattttcag

SEQ ID NO: 1018776 - DNA, 120 bp, Artificial Sequence
  ENSG00000286953_26 (sequence is synthesized)
tgatattggaaactgcctgttttaaaattataggtaaaacttgaagttataaatctgatatgagagaaaaacatttatgtaacaaaaacaaaaatacaaagagattgtgtaaaaatatat

SEQ ID NO: 1018777 - DNA, 120 bp, Artificial Sequence
  ENSG00000286953_27 (sequence is synthesized)
attgaaatgatgcattgtttatactgggttgtcatggatgatttgtgtttatatctaccttcactacaatgcatattttttgtttgttctatattttgttttaaatgatgagattttgat

SEQ ID NO: 1018778 - DNA, 120 bp, Artificial Sequence
  ENSG00000286953_28 (sequence is synthesized)
gctccaaaaaagccgaaaacaaaaacaaacagactggttagtcaggctggttaggggtaaaaattcagcttgcacttttattaaacaatcttgggaaagaaagttttatcatttttttgt

SEQ ID NO: 1018779 - DNA, 120 bp, Artificial Sequence
  ENSG00000286953_29 (sequence is synthesized)
gactcaggtttcttatctgaaaattgaggatagtaaaaactgttccacagagttatatgagttaaattagataaaacattcagccagtaatcagtgaatcatacatattcaataaaatat

SEQ ID NO: 1018780 - DNA, 83 bp, Artificial Sequence
  ENSG00000286954_0 (sequence is synthesized)
gtgatctcggctcactgcagccttcacctcccaggttcaagtgattatcatgcctcagcctggtactataggtgtgcaccagc

SEQ ID NO: 1018781 - DNA, 120 bp, Artificial Sequence
  ENSG00000286954_1 (sequence is synthesized)
ctttagaaatggacacacgagtcagaaggtgttattggattctccttgttaacttattgcacaacttggggccttgtgattgaatgggtgttgaatttggatacacaggattgagtcatc

SEQ ID NO: 1018782 - DNA, 120 bp, Artificial Sequence
  ENSG00000286954_2 (sequence is synthesized)
aagggaccatcagaggaagagcctagtaaccactttcttttccctctgtctatcattgtcctcccaggtatgagtgaaatcattcatttttcactgaacgcttacttcatgctgggacct

SEQ ID NO: 1018783 - DNA, 120 bp, Artificial Sequence
  ENSG00000286954_3 (sequence is synthesized)
aagcaacaactgtggcgacaatggacttattggtaatttactatgtgcagacactctcctcactttttgacaggtattgtctcacttaatctgtctcaaatccttattggacatatacta

SEQ ID NO: 1018784 - DNA, 120 bp, Artificial Sequence
  ENSG00000286954_4 (sequence is synthesized)
ttatttctttggctgagcaataagaaaaattgagagagatttaaaatgccaactagaggttcatggctgcatccatcaggcccacagactctaaaacatgctcataaccaccatgctacc

SEQ ID NO: 1018785 - DNA, 120 bp, Artificial Sequence
  ENSG00000286954_5 (sequence is synthesized)
tacacaataggaatacataataaaacagcagatgtaccttagtccattatcatttcatggtggaaccttaaccaacactcttcccttgaaattgttcccagattaactccaaccatccca

SEQ ID NO: 1018786 - DNA, 120 bp, Artificial Sequence
  ENSG00000286954_6 (sequence is synthesized)
aggctctggtttaccatgccattatgcttccttttgatcatatgtattgtttttgttggatgttgctatatagtgtttttagtttttcatgtggatatcctgccgaatgtttattatcct

SEQ ID NO: 1018787 - DNA, 120 bp, Artificial Sequence
  ENSG00000286954_7 (sequence is synthesized)
tgtttgcgtacctggtggacgtaaggcctctctcaaatttctctctgtcttttttttttccttaacattctcaggttttaaaaaatcatttaaatggaagggtcacatgaaattagcttc

SEQ ID NO: 1018788 - DNA, 120 bp, Artificial Sequence
  ENSG00000286954_8 (sequence is synthesized)
tctactaatttggtcttgtttttctaatcatggttgggtggagcgccctgtctcctgaatcctctttcctttttcagagaacgttgattagatgaccaaaagtgcccggccctttgccaa

SEQ ID NO: 1018789 - DNA, 120 bp, Artificial Sequence
  ENSG00000286954_9 (sequence is synthesized)
gtgtgatagaaaacagggagaaggtatcatcatcgtttcacagatgcctacattccaaaggatctcatcagagcataagagctcttccagctgttgtttatccatgaattattattgcaa

SEQ ID NO: 1018790 - DNA, 120 bp, Artificial Sequence
  ENSG00000286954_10 (sequence is synthesized)
tgcttaaccggagatagaaactcaccatgagcgtatcaacctttcctcttcagaagtttcacttcagtttgaaagaaaacgcaactggtgaaacaattgctgtgtgtcataaattatagg

SEQ ID NO: 1018791 - DNA, 120 bp, Artificial Sequence
  ENSG00000286954_11 (sequence is synthesized)
tatctgacattcattacaaggaaagcaacagtcaaatatcatgggactcatatttatttatgtctatattatctgtagatattatagataatatatatgtatactttgacagagaaggaa

SEQ ID NO: 1018792 - DNA, 120 bp, Artificial Sequence
  ENSG00000286954_12 (sequence is synthesized)
ttctgttttttggttatctgcaattagtgtgctatttatttccagaatagaggaaactgaagcttactctgtgtacacaaaagaatactgtacccattcagtcatgtacaaatagagtta

SEQ ID NO: 1018793 - DNA, 120 bp, Artificial Sequence
  ENSG00000286954_13 (sequence is synthesized)
tctcatggaaaattcattttttttcttgttttggtacttttcctgaagttttagaatatgttctacttttgtctgtgacacaaattttggatcttttgatactgtggaggacacactgca

SEQ ID NO: 1018794 - DNA, 120 bp, Artificial Sequence
  ENSG00000286954_14 (sequence is synthesized)
gttgagcctgcaaactgataactgtctttttggtggcaccctgtcttggtcattactgacatcaaagcacattcttcctccatcctgataggtacataacatatggggtgcagcttgcag

SEQ ID NO: 1018795 - DNA, 120 bp, Artificial Sequence
  ENSG00000286954_15 (sequence is synthesized)
tgtgtaaaatataccatgcagatatggacataaaaatagacacattaatcatggaacaggatagagaacctagaaacaaacctgtgcatttatggtcgattgattctcaacaaagatgcc

SEQ ID NO: 1018796 - DNA, 120 bp, Artificial Sequence
  ENSG00000286954_16 (sequence is synthesized)
aaaaacatacaataaaaaaggacagtttgtctgataagtggtattggaaaactagatatccacaagcagaaaaatgaaattggagtcttatctaacaccatatgcaaatatcaacacaaa

SEQ ID NO: 1018797 - DNA, 120 bp, Artificial Sequence
  ENSG00000286954_17 (sequence is synthesized)
acaaattaaacacttaaatgtaagacatgaactgtgaaactactaaaagaaaacaaagaggatatactttactacattcatctgagcaaagatttcttagataggatcacaaaaccatag

SEQ ID NO: 1018798 - DNA, 120 bp, Artificial Sequence
  ENSG00000286954_18 (sequence is synthesized)
tcaacaaagaaaaataaacaaatcagattgcatcaaactaaacagcttctgcacagcaaaggaaacaatagagctaagagatagttcgtggagtgggagaaaatatttgcaaaccatata

SEQ ID NO: 1018799 - DNA, 120 bp, Artificial Sequence
  ENSG00000286954_19 (sequence is synthesized)
agtggctaatacccaaaacatataaggaactcaatgcaatagcaagaaaacaaataatccaataaaaattgggcaaaggacctcaatagacacttatcaaaagaagacatacgtggctgc

SEQ ID NO: 1018800 - DNA, 120 bp, Artificial Sequence
  ENSG00000286954_20 (sequence is synthesized)
cagatatattaaaaaatgttcatcatcactatcatcaagaaaatgcaaattaataccacaatgagatatcaccccacacctgttagaatggctatcatcaaaaagacaaaagataaatgt

SEQ ID NO: 1018801 - DNA, 120 bp, Artificial Sequence
  ENSG00000286954_21 (sequence is synthesized)
tggcgagggagtgccgacaagggaacccttatgcaatgttggtggaaatgtcaattaatacagccgttatggaaaacggtatggagactcctcagaaaactaaaaatgtatctaccatat

SEQ ID NO: 1018802 - DNA, 120 bp, Artificial Sequence
  ENSG00000286954_22 (sequence is synthesized)
gatccttcaatcccactggcagtatatagtcaaaggaattgaaatccgtattccaaagatacctgcactctcatgttcattgaagcattattcataatgggtaagatatggaagcactct

SEQ ID NO: 1018803 - DNA, 120 bp, Artificial Sequence
  ENSG00000286954_23 (sequence is synthesized)
gtgtccatcaaggaatgaatggatcaggaaaatgtggtatatatgcacaatgaaatactattcagccttaaaaaaagggaaaatccctgtgatcccagcaccttgggaggccgaggaggc

SEQ ID NO: 1018804 - DNA, 120 bp, Artificial Sequence
  ENSG00000286955_0 (sequence is synthesized)
gggagggtaaaacacaatcatggtgccataaaagagtgaaggagccggcattacacacagacagcccgcagaagggcagcaacgttttggagctccttttagttctctttattgatatat

SEQ ID NO: 1018805 - DNA, 120 bp, Artificial Sequence
  ENSG00000286955_1 (sequence is synthesized)
tttaattgaacccagattttttttttcctgtctagcccttggagacaagctctgccagagctcgtatagcagagagaaggtcttgagattagtgatactcagcgtttctgacactggaga

SEQ ID NO: 1018806 - DNA, 120 bp, Artificial Sequence
  ENSG00000286955_2 (sequence is synthesized)
cctgcataagaatttaacaaactgggaagcagttttcatgacaacccttttcattgcatagatgttaccaagagtttgggggtgtttttaagaaaagccattaggctggaagtcagacac

SEQ ID NO: 1018807 - DNA, 120 bp, Artificial Sequence
  ENSG00000286955_3 (sequence is synthesized)
acctggatttgagatccgctctgctacttcgtacttgcgtggttttgaggaatcatttggcctcttttcaggttttagatccttcacctgtaaaatgaggatggttgtgagaaagggaaa

SEQ ID NO: 1018808 - DNA, 120 bp, Artificial Sequence
  ENSG00000286955_4 (sequence is synthesized)
ttgctctgtaaacagtgaagcactattcaaatgctcaggctttgtaaaaaattgatggaaaatgtcataagaagtgggcagttctggtttgcttccattgctataggaagctggcacaca

SEQ ID NO: 1018809 - DNA, 120 bp, Artificial Sequence
  ENSG00000286955_5 (sequence is synthesized)
caagaaagtttattgacagcagctgagatgtgctgaagctggtaattatcttcaagacaggctgagttttgattgtacgtaagggtgcctggtagacctatcaatcagacatatgccttg

SEQ ID NO: 1018810 - DNA, 120 bp, Artificial Sequence
  ENSG00000286955_6 (sequence is synthesized)
atgtaatgctgacagtctatttacacagaggcagctgtgatattataaaagaatgaaaggcatgctgaaggtctaagttgttgtaggatggtaaaaatctggtgtgaacatgagcgaaag

SEQ ID NO: 1018811 - DNA, 120 bp, Artificial Sequence
  ENSG00000286955_7 (sequence is synthesized)
ccccttctccgcatggataaggacactgacacccattaatgtctgagtggttattaatgcagagagaaaaagtcactgttacctgtcttttatgaatgtgctaactcattaatctataaa

SEQ ID NO: 1018812 - DNA, 120 bp, Artificial Sequence
  ENSG00000286955_8 (sequence is synthesized)
caacacttcttctaatatttagcatttaacaattccaaatatttattcactatttacacataatcagcaaaagcacaaaacttcgcattaaatctccccagacatttaagcattcattac

SEQ ID NO: 1018813 - DNA, 120 bp, Artificial Sequence
  ENSG00000286955_9 (sequence is synthesized)
aaatttgtaatcaagctcttagataaacaaataattaaaactatgaatctaataaatcagatttgttggcatgctctaaacaccttaagaagtgacaatacatgcacagaatgtcacttt

SEQ ID NO: 1018814 - DNA, 120 bp, Artificial Sequence
  ENSG00000286955_10 (sequence is synthesized)
gattaccgaaattattatactatggggaaatggcttgctgagaccctgaagagccagagagaagatactgctcacacatgtgaaggatacacactctgttttctcctccttctgtatgag

SEQ ID NO: 1018815 - DNA, 120 bp, Artificial Sequence
  ENSG00000286955_11 (sequence is synthesized)
agagcctgctgatgttttgtgactcaaaaagtacgaggaggtctatgagcatattttcaattaagcgcatgagttgtcggcataaattctttctgaaatgatgatacaattccatagcaa

SEQ ID NO: 1018816 - DNA, 120 bp, Artificial Sequence
  ENSG00000286955_12 (sequence is synthesized)
aaccaggttatagtatagtggaaatgagtaccttagctctgttagcctcctactccaaggactgtatttctgaagggagcacacttgttttgggaattctgggagccaagggctggctgc

SEQ ID NO: 1018817 - DNA, 120 bp, Artificial Sequence
  ENSG00000286955_13 (sequence is synthesized)
actgtgaatgtgttttgctgctccagcttcttatggccccagatttctgatcatattctgcatccttggctaattctctcaggaattttacagtgaaaaggagaacaagagtgagaacac

SEQ ID NO: 1018818 - DNA, 120 bp, Artificial Sequence
  ENSG00000286955_14 (sequence is synthesized)
aagaataagatcaagaaaggtctcttctcaccagtgctataatccacctgaaaagctgtagccacttgcactactaaaaccagtcataaaagtgctaatacagtacactatgaatttaaa

SEQ ID NO: 1018819 - DNA, 120 bp, Artificial Sequence
  ENSG00000286956_0 (sequence is synthesized)
aagccaacgagttcagctgatgctaggcttgccatgcacagtggcagggcactgacagtttccacagctgcttagagtcagtgaaggaaggagtatgaaaaaaaatggaagaaggaactc

SEQ ID NO: 1018820 - DNA, 120 bp, Artificial Sequence
  ENSG00000286956_1 (sequence is synthesized)
ctctcatcctattttagcttattaattcttggcagatagtttgacttcccacttctgcctctgcctgagaatttctaagctctgagcagtgtcatttttccttgactctgatcttcacat

SEQ ID NO: 1018821 - DNA, 120 bp, Artificial Sequence
  ENSG00000286956_2 (sequence is synthesized)
ggacagcgaaggatcttaggggatttgagcctccctaaattaagtcttccaatgaatgcaaccaccacaggagtctgagacaaaacaagcacttcagaagcacctgcaagagaatggatc

SEQ ID NO: 1018822 - DNA, 120 bp, Artificial Sequence
  ENSG00000286956_3 (sequence is synthesized)
ctcactcaggacccacctcttcaatcacaagtctggccagctgggtaatgagtccaataattccaatggggcctcatttgcaatgggaagaccctgtaagccagatgtccatggaaagtg

SEQ ID NO: 1018823 - DNA, 120 bp, Artificial Sequence
  ENSG00000286956_4 (sequence is synthesized)
tcatctaccttattccaaacagtgccttaaatgaaagaccttggatgcttcatataacttaaactttaatgacaaatcctcagtgtattctaattatagaagagaaatgacaggcatgaa

SEQ ID NO: 1018824 - DNA, 120 bp, Artificial Sequence
  ENSG00000286956_5 (sequence is synthesized)
aagacatggccaagactggcaggaaaatcagagaaggtctggaaagaaaagcagcagaaaatgggcctatatcaaactaggcaaatggcaaagcagctattgggcattttagtttctgca

SEQ ID NO: 1018825 - DNA, 120 bp, Artificial Sequence
  ENSG00000286956_6 (sequence is synthesized)
atgatgtatattttgatatattttgtctccctaaaataaaaactttgctgcagtctataatatgcatacaaaaaatccaagccccatgaggatgggtttttatgtcagaaaagggaagtg

SEQ ID NO: 1018826 - DNA, 120 bp, Artificial Sequence
  ENSG00000286956_7 (sequence is synthesized)
taagcgttcactaaacttttaatgcctttcttgtcacttatcactgacagatgccatggggcattttgtataggatttaataaagtcaatgctcatcaaaaaatcaattaaaatgaaagc

SEQ ID NO: 1018827 - DNA, 120 bp, Artificial Sequence
  ENSG00000286956_8 (sequence is synthesized)
tgcctgtaggccaacttcttccctaggtgacaaggacagcatgttctcctgataccaactttacctccatgttgatcaagcaattctcagaagttgtgggtaactcaggatatccatgac

SEQ ID NO: 1018828 - DNA, 120 bp, Artificial Sequence
  ENSG00000286956_9 (sequence is synthesized)
caccacacaacactagatagatcttccagagtcctaaactatctctcatacagctagccgtccctccccctttccccaaaacatattgggagagtaatgacaatgctggtgttttaaggg

SEQ ID NO: 1018829 - DNA, 120 bp, Artificial Sequence
  ENSG00000286956_10 (sequence is synthesized)
aaaaataatattttggggtttttttaactgaagaattatacccaaactatgtatacaaatggcatccagaggaaacaataaaatactacattctcagtcagaatgttcattgctaacaaa

SEQ ID NO: 1018830 - DNA, 120 bp, Artificial Sequence
  ENSG00000286956_11 (sequence is synthesized)
caacaaaaaagtggaggagcttaggcaacgctggtgtactgatgtgagtgtaaatcatcattgcaggttatgggcccctcaactaatatttgtgtagcacttgacattgacaaaacactg

SEQ ID NO: 1018831 - DNA, 120 bp, Artificial Sequence
  ENSG00000286956_12 (sequence is synthesized)
ttacataattatcacatttgaaatcaaagcaaatctataaagttgcattttactattatcactaatttatacacaatgaaatggaaactgaaagagggtctatgacttattcaagcctat

SEQ ID NO: 1018832 - DNA, 120 bp, Artificial Sequence
  ENSG00000286956_13 (sequence is synthesized)
gaagccaagcagaggcaaagctgggctcaaacccagtccttctgcctccaggtactctgcttcccttctccatccaagctgtctctgtagatttccactggactggagaaactgtcaaat

SEQ ID NO: 1018833 - DNA, 120 bp, Artificial Sequence
  ENSG00000286957_0 (sequence is synthesized)
aggaaaacccatcccggaggaagctggcggttaggctggctgaaggcattctgcatgatgaacacaacagttctcaaaaaagtaatgatgtcataccagagcagcaggagggggtggtct

SEQ ID NO: 1018834 - DNA, 120 bp, Artificial Sequence
  ENSG00000286957_1 (sequence is synthesized)
gtgaccatgtatgcttgataaattctggatttaagcaaagtaggccggcttctttgtcaatagacgtattgggttattcccgggggggctgcagccggagcacctcccactccttcgcag

SEQ ID NO: 1018835 - DNA, 120 bp, Artificial Sequence
  ENSG00000286957_2 (sequence is synthesized)
gggttatttctgaagaccccctcttggaggagctctgctagggccctgcgtgcacctgctgccctggcatcctggccagcagctccgccaggctctagtgtgtatggcctgggctacctc

SEQ ID NO: 1018836 - DNA, 120 bp, Artificial Sequence
  ENSG00000286957_3 (sequence is synthesized)
ccggtactgtcgccgcaggccttgggacccgttcccgccgcgaggctcccgaggtagccccggcctccggttcttctcagatagccccgtcgtccagccccagaagcgggcactaatgcc

SEQ ID NO: 1018837 - DNA, 120 bp, Artificial Sequence
  ENSG00000286957_4 (sequence is synthesized)
ttccctgaacgctgaaagttgttgaatggatatggacaatgattagaatcatgtagaaaacattaagtgatggtcagtatgttctgtttgggaaatactgaaatgtgcaacacaagctag

SEQ ID NO: 1018838 - DNA, 120 bp, Artificial Sequence
  ENSG00000286957_5 (sequence is synthesized)
aaataacaacatgcagaacagcacaactttgtaagacccgcgctgaaggaggcagcatttgtgtgagagcgcccggcgctgcccagaagagctggaacgcccaaggaaggccgctgctca

SEQ ID NO: 1018839 - DNA, 120 bp, Artificial Sequence
  ENSG00000286957_6 (sequence is synthesized)
gcgcaggacccctgggctcccggaaacgggatagcgttgcttatctttaagctcgttgctgttcctcctagagttgcagattcaaggggcctcaccagtgactgtgatgactgtaaaacc

SEQ ID NO: 1018840 - DNA, 120 bp, Artificial Sequence
  ENSG00000286957_7 (sequence is synthesized)
caggcttgtgggtgctatctggacaccaaggagacagaggcacatggcaccacccaggacaagcactgaagttggactaccaggttcaaatcccagctccccacctttaactgtgtgacc

SEQ ID NO: 1018841 - DNA, 120 bp, Artificial Sequence
  ENSG00000286957_8 (sequence is synthesized)
gggccttggggaagttatttcaattttctctgccccctgtctatcaagcatggtggttgataacacctatttttcagaaccacagtgagaattgtggagatgctctatttgagatgtaca

SEQ ID NO: 1018842 - DNA, 120 bp, Artificial Sequence
  ENSG00000286957_9 (sequence is synthesized)
gggttctcagcttacaggcagcactcagcgaatgttaattatcattatccaaaactgggatccccagcaggagcagccccagcgctcccatgaggcttggttcgacctgaatgattgaca

SEQ ID NO: 1018843 - DNA, 120 bp, Artificial Sequence
  ENSG00000286957_10 (sequence is synthesized)
cagtggcatgagaggtccactttcctgagatgagcctccagccatctggaactagcctgttcctccctccctctgttcctgccctcccgaagcccacagtccctcagacccgcagtttgg

SEQ ID NO: 1018844 - DNA, 120 bp, Artificial Sequence
  ENSG00000286957_11 (sequence is synthesized)
tcccagctccctcactgcaccccacctgatgccatctctcccagccatgcagagcagagccctgatgcctgacccagagctgatgttcctttccgggatgatatgaagcatcagagagga

SEQ ID NO: 1018845 - DNA, 120 bp, Artificial Sequence
  ENSG00000286957_12 (sequence is synthesized)
tgttccagccctggggaagcccagcatgattggttcttcctctaacaacatttacacacttgacatcatccacttaacattttatcggtaaaggagctatggcaacatgagctcacctga

SEQ ID NO: 1018846 - DNA, 120 bp, Artificial Sequence
  ENSG00000286957_13 (sequence is synthesized)
ctgagaaggaaactgattccacttataaaagggaacttgtaacagcaacatgtgttccaaacccaggagcacctgggcctaaatcctgctctccttcttactccaggcataaggaagcct

SEQ ID NO: 1018847 - DNA, 120 bp, Artificial Sequence
  ENSG00000286957_14 (sequence is synthesized)
ggctgttgccagcctctcacctgcagaagatgcacctcatagcaccctggacaggtgaaccaagacacatcactgaagtgccaatacatgcacccctgagggcccaaagccaacctgagg

SEQ ID NO: 1018848 - DNA, 120 bp, Artificial Sequence
  ENSG00000286957_15 (sequence is synthesized)
gctctgcctgcctggctccctgcacccgagtccccagaaacgtgctcacagcacagggagctccagagcccaagcctcggagtgttggaaaacaacatcaacatgagaaatgggtgctag

SEQ ID NO: 1018849 - DNA, 120 bp, Artificial Sequence
  ENSG00000286957_16 (sequence is synthesized)
gagtacctttgtaggtgacattaaaatgcttacattagatagcagagatgagaccaaagaaactggggggagggggtgcccccagccctgacactgtgggcctttgcctgtatgcagcct

SEQ ID NO: 1018850 - DNA, 120 bp, Artificial Sequence
  ENSG00000286957_17 (sequence is synthesized)
ttgccctgcaagggacagcagcttcctctgcctataatacctgcaagcctcccattctcatggagtgcttccttttggctttttgcttttaggtttcttttgtttgtttttaattttaag

SEQ ID NO: 1018851 - DNA, 120 bp, Artificial Sequence
  ENSG00000286957_18 (sequence is synthesized)
aataacctgtttggagagctgggcatgggggcttgttcctatagtaccagcttctcagaaggctgaggcagaaggatcacttaagcctaagagtttgagaccagctctcatatagtgaga

SEQ ID NO: 1018852 - DNA, 120 bp, Artificial Sequence
  ENSG00000286957_19 (sequence is synthesized)
ccttgtctctaaagaaaagaaagaaaaagaacctgtttggacacacaaaatctaacttttccccctctcttcctgatccctttccagcagtgctttggggctgagcagtaaaatccaaaa

SEQ ID NO: 1018853 - DNA, 120 bp, Artificial Sequence
  ENSG00000286957_20 (sequence is synthesized)
cagcagtgctttggggctgagcagtaaaatccaaaagagattcagttgggtaaaatactaaaatctagccaggcacagtggcttgcacctgtaaccccagcactttgggaggctaaggcg

SEQ ID NO: 1018854 - DNA, 89 bp, Artificial Sequence
  ENSG00000286957_21 (sequence is synthesized)
tagtcccagctacctgggaggctgaggtgagaggatcgcttcagcctgagaggtcaaggctgcagtgagctgtggttatgcctcccgtc

SEQ ID NO: 1018855 - DNA, 120 bp, Artificial Sequence
  ENSG00000286957_22 (sequence is synthesized)
agacagagcaagaccccgtctcaggaagaaaaaaaaaagtctgctctccctgcaaatcgcgtgtgctggtgatgagggaggcatgtgcagttcgtgaaaaaatagggtttctgattttcc

SEQ ID NO: 1018856 - DNA, 120 bp, Artificial Sequence
  ENSG00000286957_23 (sequence is synthesized)
actcctcaggtacagggtgggtgggcctgggactcctggtgaagccctctacaggcagggtcatatcctaccctcaggctggtgggcagggcacactccaccctcaggctggtgggcagg

SEQ ID NO: 1018857 - DNA, 120 bp, Artificial Sequence
  ENSG00000266371_0 (sequence is synthesized)
ctttctgtttctatgaatttgactaccctggatacctcaaataagtggcgtcatacagtatttgtctttttataactggcttgtttccgttagtgtaatgtcttcaaggttaatccacat

SEQ ID NO: 1018858 - DNA, 120 bp, Artificial Sequence
  ENSG00000266371_1 (sequence is synthesized)
tgcagcatatgtcagaatttcctaccttttaaaggctgaataatattctgttatttgtgtaaaccacattttctttatccattcaggacatttgggttactttcaccttttggttattgt

SEQ ID NO: 1018859 - DNA, 120 bp, Artificial Sequence
  ENSG00000266371_2 (sequence is synthesized)
aaataatgctgccatgaacatgggtgtgcagataccacttcaagaccctgctttcagttcttttgcatatgtacctagaagtagggttgctggatcatatggtaattctatttgtaatat

SEQ ID NO: 1018860 - DNA, 120 bp, Artificial Sequence
  ENSG00000266371_3 (sequence is synthesized)
gttgaggaactgttttactgttttccataggtatatgcactattttactttcccatcagtagtgcacaagggttccaatttctccatatcctcatttacgtttgttattttgtgtctttt

SEQ ID NO: 1018861 - DNA, 120 bp, Artificial Sequence
  ENSG00000266371_4 (sequence is synthesized)
aaaaaaaaaaaggaaagaaaatacagtagtctccccgctccccccacaaccacttatcagcagttttgctttctatggtttgttgcccacagtcaactgcagtctgaaaatgttaaatgg

SEQ ID NO: 1018862 - DNA, 120 bp, Artificial Sequence
  ENSG00000266371_5 (sequence is synthesized)
ttccagaaataaacaattcataagtttaaaattgcatgctgttttgagtagtgtgatgaaatctcacacagtcctgcttcgtcttacttgggatgcaaatcatccctttgtccagtgtat

SEQ ID NO: 1018863 - DNA, 120 bp, Artificial Sequence
  ENSG00000266371_6 (sequence is synthesized)
gtatccacactgtgtatggtacctgcctgttagtcacttagtagccatctcatttatcagattgactgtcatgatattgtagtgctgtgttcagttaacccttattttatatagtaatgg

SEQ ID NO: 1018864 - DNA, 120 bp, Artificial Sequence
  ENSG00000266371_7 (sequence is synthesized)
ccccaaggaggaggagcagtgacgctggaatattgttataattgttctttttttaaaattagttattattgtcgatctcttactgtgtcttataaattaaacttttttataggcatgtat

SEQ ID NO: 1018865 - DNA, 120 bp, Artificial Sequence
  ENSG00000266371_8 (sequence is synthesized)
gtgtaggaaaaaaacatagtatatatatagggttcagtactatccctggattcaggcatccactggggctcttggaacttatgccccatggataaggggagactactgtatctttatttc

SEQ ID NO: 1018866 - DNA, 120 bp, Artificial Sequence
  ENSG00000266371_9 (sequence is synthesized)
tcccttattcttgaatgatagttttgctggatatatagaattctggacagttatgtttccctcagtatgttaaagatactatttcactatctgtctgctatcatagccattgagaattca

SEQ ID NO: 1018867 - DNA, 120 bp, Artificial Sequence
  ENSG00000266371_10 (sequence is synthesized)
tttataggtgacattttctctccagttgtttttttaggtctcctttttgttgtttgttctgtagtttcaccaaaatgtttgtaggtatatggatctctattctgctttgagtttttggac

SEQ ID NO: 1018868 - DNA, 120 bp, Artificial Sequence
  ENSG00000266371_11 (sequence is synthesized)
ttcttgggagtgacatttgttgttgtctaacagttctaaaaagccattaccttctcaaatattgtttcttttctgtatttctattagttttcttctggaactacaattagatgtatgtaa

SEQ ID NO: 1018869 - DNA, 120 bp, Artificial Sequence
  ENSG00000266371_12 (sequence is synthesized)
tattgtttgaggctgagccaagtagtgtactgtgattaagtttactttctggtacaactttttgtgtctcctaaatgtaatgtctcatttagcctcatttttttcatttgcttcagtttt

SEQ ID NO: 1018870 - DNA, 120 bp, Artificial Sequence
  ENSG00000266371_13 (sequence is synthesized)
tatgtagctattgttatttctttccatcattaacacgttctcagtacagtttttcacatagggtcaaacctgttaatctgttcagtgtgaccattttccttgaggatttcctcccatgct

SEQ ID NO: 1018871 - DNA, 120 bp, Artificial Sequence
  ENSG00000266371_14 (sequence is synthesized)
agtgtttagaattggctgcttgctataccaggtgtgcagctatcatcctgtgttctcccttcagcatcattttggaaattcctattgcttgtctcctgtgttgattcccttgttttgtgg

SEQ ID NO: 1018872 - DNA, 120 bp, Artificial Sequence
  ENSG00000266371_15 (sequence is synthesized)
atctcattcatttacaacacaccttccactagcttgctggaaaaaaaaaaaagtacaaaggagataaattttgagaccttgaatgtttgagaatgtctttattctaccttttttgaaaaa

SEQ ID NO: 1018873 - DNA, 120 bp, Artificial Sequence
  ENSG00000266371_16 (sequence is synthesized)
aaaattgataatttgtctaggtcttaagttctaatatgaaataattttttttctcagaatttggaaagaatttctccattgccttttagtttatcactgagattattgctaaccccaatg

SEQ ID NO: 1018874 - DNA, 120 bp, Artificial Sequence
  ENSG00000266371_17 (sequence is synthesized)
ccattctggtttctgttacgttgtcatcaatctgtttattttttcttttctagaatccttggaatttttttttatttgtccttgctattctgcagttcaataataacatgttgggatacc

SEQ ID NO: 1018875 - DNA, 120 bp, Artificial Sequence
  ENSG00000266371_18 (sequence is synthesized)
aaatgggtcttacttagtttagagactcttcaagtctggaaaacttcttgtgttattctctggcaacgtcttcctatcttatttattaatttttttctttttttcacatgttggaattga

SEQ ID NO: 1018876 - DNA, 120 bp, Artificial Sequence
  ENSG00000266371_19 (sequence is synthesized)
ttactcatgtaatgttttacatttttttctttcatggtctttcttttgttctttttttgtagaaaatatcttgactttatcttccaactctttaatgttttctttctttctttctttttt

SEQ ID NO: 1018877 - DNA, 63 bp, Artificial Sequence
  ENSG00000266371_20 (sequence is synthesized)
cttccaactctttaatgttttctttctttctttcttttttactctgcaacctccacctcccgg

SEQ ID NO: 1018878 - DNA, 120 bp, Artificial Sequence
  ENSG00000266378_0 (sequence is synthesized)
atttattagtctgaacagatgttgattactggccaccagaggtaaagcatcccaagttcaatggggggagatgggctcagagtttgctgtgatccacaggtaaaataaggaactctgatc

SEQ ID NO: 1018879 - DNA, 120 bp, Artificial Sequence
  ENSG00000266378_1 (sequence is synthesized)
ttatcacatttgttgtgtgtttttgcttagcatttaagttcaagacttttatgggtatagccacttaatgtcattgcgtcacttaatgtaatgggtgtgatgatacatgtatgtgtcatc

SEQ ID NO: 1018880 - DNA, 120 bp, Artificial Sequence
  ENSG00000266378_2 (sequence is synthesized)
tttggacatctttggacatcaggatactgggaccatcacccttttgaatcctggccccacctgtttattattccaagttgcccttgattcacccctgagtttcttgacatatttgcatca

SEQ ID NO: 1018881 - DNA, 120 bp, Artificial Sequence
  ENSG00000266378_3 (sequence is synthesized)
tgacctccagtcattagctttaagccttgctagttgattcattttctttcattcatttatttgttcattcaacaaatattttcaagtgcttgcgatgcctggtgttttgctgtttttctt

SEQ ID NO: 1018882 - DNA, 120 bp, Artificial Sequence
  ENSG00000266378_4 (sequence is synthesized)
gtatttttttaaagatagtctttaaaactcacagtctaaacaaatacgagacaaaacatggaaggcaataagctgcaattaaagattttgtttttggaaatggtcattaggcttaaaaat

SEQ ID NO: 1018883 - DNA, 120 bp, Artificial Sequence
  ENSG00000266378_5 (sequence is synthesized)
agtcacagggtcagtttttcacgaagccaatgcagggtaaaaggctaatctcacttgtaattcttagcagctctctcactgatggtttagttacttaatctccttggtgtttactgtgtc

SEQ ID NO: 1018884 - DNA, 120 bp, Artificial Sequence
  ENSG00000266378_6 (sequence is synthesized)
gttccttacgggtgaagaatgggagatgaacgggaatgctttgtctaaagcacagaagagttgctggaaattttaagactcaccagtcaggcaacatcatctatcaaaaagttctcatag

SEQ ID NO: 1018885 - DNA, 120 bp, Artificial Sequence
  ENSG00000266378_7 (sequence is synthesized)
aatgtaacaaataatcatggaacctactcaaataatgcagaacctttgtccatagcttcaggcctccaatgctttccttctctctttggatgtgaaatgcacaaggcaggttggactctg

SEQ ID NO: 1018886 - DNA, 120 bp, Artificial Sequence
  ENSG00000266378_8 (sequence is synthesized)
gctgaaagttgattccgggtagcatctgaacttcacaagctgagaattccaataaatccacaaaaagaattcccctagggaagggggtgtggactttaattgatgatgtccaattagagt

SEQ ID NO: 1018887 - DNA, 120 bp, Artificial Sequence
  ENSG00000266378_9 (sequence is synthesized)
ttccattgacattgccatgtctcttgttttcttgagacatctcttggtcaccctcaagcatatgtacaagccagttaggaagaagtaagtactgatgacaagaaggagtgtgagatgaga

SEQ ID NO: 1018888 - DNA, 120 bp, Artificial Sequence
  ENSG00000266378_10 (sequence is synthesized)
aacagtagccttttctttgtctgtagcatctcaagttttatagtctctgggatcttctctctgattagaaagtgcttcttttccacctggcaaggtggcacacacctgtaatcccaacac

SEQ ID NO: 1018889 - DNA, 76 bp, Artificial Sequence
  ENSG00000266378_11 (sequence is synthesized)
tttaaaataaaataatgcaaaaaaagagagagcaactgcttcattgcttttctaaaacgttgttgagctatttaaa

SEQ ID NO: 1018890 - DNA, 120 bp, Artificial Sequence
  ENSG00000266378_12 (sequence is synthesized)
tgcttcattgcttttctaaaacgttgttgagctatttaaagcctatgataacgggggtttatttgcacttacttcccttcattttagttgaattcaagcttatgtcttcagatttttatt

SEQ ID NO: 1018891 - DNA, 120 bp, Artificial Sequence
  ENSG00000266378_13 (sequence is synthesized)
gacttagttaccttatactgtttttagtggattgccgtgaagtagggttctgttggttgagcacaagggaagcagagagctggatggagccattatctcagacttaagtcaagcgctgat

SEQ ID NO: 1018892 - DNA, 120 bp, Artificial Sequence
  ENSG00000266378_14 (sequence is synthesized)
tgaaatttctcttgtcccaaactcctagtggtcctgcactcaggagatagggaaggtcgctgacgatactgagtcttttccacagtgcttgcttctttttagcagcctcagatggatccc

SEQ ID NO: 1018893 - DNA, 120 bp, Artificial Sequence
  ENSG00000266378_15 (sequence is synthesized)
ttctttttagcagcctcagatggatccctgcccctaaactggggctgtttctctccttctcaacctaattgtgtgccatgaggaaataaagaaagaaagagagaaagagagaaagaaaga

SEQ ID NO: 1018894 - DNA, 82 bp, Artificial Sequence
  ENSG00000266378_16 (sequence is synthesized)
gaggaaggaaggaaaagagagaaagagagagaggaaggaaggaaggaaaggaagggagggagggagagagagagaaagaaag

SEQ ID NO: 1018895 - DNA, 120 bp, Artificial Sequence
  ENSG00000262468_0 (sequence is synthesized)
tgacggcggcctccgggcatggagctcgcgctgacgaaaggttctggaagccgccgtaaaaaccctttgaggaaccgtttgaggtgtggcacgatacagcaagtcagctgccaaagaggg

SEQ ID NO: 1018896 - DNA, 120 bp, Artificial Sequence
  ENSG00000262468_1 (sequence is synthesized)
tgcgtgcccagaacgcatctcccgtgtccctcacagcagttctatgaggctggctgccctgtttgacaactgaggcccgcatcttccccggaatcaccgacgtgtggctctgagccctgt

SEQ ID NO: 1018897 - DNA, 120 bp, Artificial Sequence
  ENSG00000262468_2 (sequence is synthesized)
cccagggattttctccatcagagaagaggagcactttgagctttgagaggagcagccctctgcaagtgaagtggaaaaaaaggaagcaggcgaggaggcccatccagaccctcccccaag

SEQ ID NO: 1018898 - DNA, 120 bp, Artificial Sequence
  ENSG00000262468_3 (sequence is synthesized)
gcgctctctcgcacgatctgctcccggactccttcagcgcgctgcctgcctgcccagggccttcccggagagcaggtgacggcggcctccgggcatggagctcgcgctgacgaaaggttc

SEQ ID NO: 1018899 - DNA, 120 bp, Artificial Sequence
  ENSG00000262468_4 (sequence is synthesized)
tggaagccgccgtaaaaagtaatcaagaaacgggtgacaggacttttcgtaagacatttaatttttacccagagtatccgaaacattgccgtgtcaatctcagtgcgatgggagactgcc

SEQ ID NO: 1018900 - DNA, 120 bp, Artificial Sequence
  ENSG00000262468_5 (sequence is synthesized)
ggccccaaggagctgctcgtccttctgccgagttccggcccggacccgcggaggaggagaccgccgcgccggagctcggacctgacgtttttgtgaagcacagggggcgtgggagggacc

SEQ ID NO: 1018901 - DNA, 87 bp, Artificial Sequence
  ENSG00000262468_6 (sequence is synthesized)
cctgacgtttttgtgaagcacagggggcgtgggagggaccggatcaatgcggcactcaacaaaacctgtttttaaaagagtcgtgct

SEQ ID NO: 1018902 - DNA, 86 bp, Artificial Sequence
  ENSG00000262468_7 (sequence is synthesized)
ccagctcggctgttttatttatttattttttttttgagacgtaatttagctcatgttgaccaggctggagtgcagtggcgcgatct

SEQ ID NO: 1018903 - DNA, 86 bp, Artificial Sequence
  ENSG00000262468_8 (sequence is synthesized)
aacccccgcctcccgggttcaagcgattttccgcctcagcctcctgagtagctggggttgcttatagtagagacggggtttctcca

SEQ ID NO: 1018904 - DNA, 86 bp, Artificial Sequence
  ENSG00000262468_9 (sequence is synthesized)
agggccaaaagccttttattggagtactgggtaacacattcagaagagggtgcatagcttaggcgctccgtgaattttcacaaact

SEQ ID NO: 1018905 - DNA, 120 bp, Artificial Sequence
  ENSG00000262468_10 (sequence is synthesized)
agggtgcatagcttaggcgctccgtgaattttcacaaactgaacatacacccaggaacaaggtctcaccatgctgcccaagctggtctgaaaactcttgtcctcaggcagtcctcccacc

SEQ ID NO: 1018906 - DNA, 84 bp, Artificial Sequence
  ENSG00000262468_11 (sequence is synthesized)
agatggttttaattcctgtcacagtatattagttttcgctgttgtgtattgattgattgagacagggtctcgctctgttgccca

SEQ ID NO: 1018907 - DNA, 85 bp, Artificial Sequence
  ENSG00000262468_12 (sequence is synthesized)
ccagctcactgcaacctccacctcttggattcaagtgattctcccgtctcagcctcccgagtaacaggaaccacaggtgtgtgcc

SEQ ID NO: 1018908 - DNA, 85 bp, Artificial Sequence
  ENSG00000262468_13 (sequence is synthesized)
taatttttcaattttttgagttttgcctgttctagaagcttgtatcagtcatacaacacccctttgaggaaccgtttgaggtgtg

SEQ ID NO: 1018909 - DNA, 120 bp, Artificial Sequence
  ENSG00000262468_14 (sequence is synthesized)
gctgggatgcggcgtgcagaagctctcctttccttcacagcccctggctttccaagagtccctgcccacccagatgcccgctggcagatgcagcctcatctcaaggacactgcttgctgg

SEQ ID NO: 1018910 - DNA, 120 bp, Artificial Sequence
  ENSG00000262468_15 (sequence is synthesized)
ataaatccctcaccaccctagagacagcccacggtcctgagacaaggatgcgggccaggcttgttgcacgtaagcgcctcccgcagaaaccagtgaggccggagttccagaggaaatgat

SEQ ID NO: 1018911 - DNA, 120 bp, Artificial Sequence
  ENSG00000262468_16 (sequence is synthesized)
gtagggacagaggcagagggcctccaggaggcaccagccccagagtcttccctagaatcagactttaagcacaagcagggagggaaagcacttgagcagtgcccgtccctgcatacctgg

SEQ ID NO: 1018912 - DNA, 120 bp, Artificial Sequence
  ENSG00000262468_17 (sequence is synthesized)
cctctgctggaacccatgcagggacaggacacttctttatcagcaatcctgttcctctcctgggcagcttcaacctgaacatcctccttcaccttgagctaaaatgggtttcttgtcacc

SEQ ID NO: 1018913 - DNA, 120 bp, Artificial Sequence
  ENSG00000262468_18 (sequence is synthesized)
cttgcccatcaaacctggccttgccctcaggaaccacacaggacaagcctaatacttccttcttgtggcaacactttagcaattgagacctggctgtcaggtcctccaaataaacatttg

SEQ ID NO: 1018914 - DNA, 120 bp, Artificial Sequence
  ENSG00000262468_19 (sequence is synthesized)
tgactgtgatgttgacttgccgcttctggggacctcttctcatttgatcggagaaagtttttcagggttaaacctacttctttcccccaagaaactcttcttgtcaggctcacgcctata

SEQ ID NO: 1018915 - DNA, 120 bp, Artificial Sequence
  ENSG00000262468_20 (sequence is synthesized)
gggtgacaggacttttccctgaccaacatgatgaaaccccatctaaaaatacaaaacaattagccggactgtagtggtgcacgcctgtaatcgcagctactcagaaggctgaggcaggag

SEQ ID NO: 1018916 - DNA, 120 bp, Artificial Sequence
  ENSG00000262468_21 (sequence is synthesized)
gagatcacccagtatccctcagtgttaacatcttgcatagctacagttagcatagaagccaggtaattgacattggtactgtacatgggacttactcagatttacacgttttttaatgtt

SEQ ID NO: 1018917 - DNA, 120 bp, Artificial Sequence
  ENSG00000262468_22 (sequence is synthesized)
ttatgtgtatgtagttctctattctctaccatttttatgagagttccagttgccttgcattcccaccagcacttagtattgtcagatttatcattatttaggtattctggtaggtgtatg

SEQ ID NO: 1018918 - DNA, 85 bp, Artificial Sequence
  ENSG00000262468_23 (sequence is synthesized)
gcctcccgagtaacaggaaccacaggtgtgtgccagcacgcctggctaattttttttttttttttcttgaggtggagtttcactg

SEQ ID NO: 1018919 - DNA, 120 bp, Artificial Sequence
  ENSG00000262468_24 (sequence is synthesized)
tgagaccagcctgggcaacgtaggtagactatgttgctacaaaaagaaaaagaaaaaatggccaggtgtagtagtcccagctgcttggaggctgaggtaggaggtttgcttgagcccagg

SEQ ID NO: 1018920 - DNA, 73 bp, Artificial Sequence
  ENSG00000262468_25 (sequence is synthesized)
ctagcctgggagacagaactcctcacgtatttctccccggagcatgtgctcccaggctcaaatccacagcagc

SEQ ID NO: 1018921 - DNA, 120 bp, Artificial Sequence
  ENSG00000262468_26 (sequence is synthesized)
tccccggagcatgtgctcccaggctcaaatccacagcagcctcgttacacacacgtcatcccctggccccgagatattgcaccgccttcccctttctagctctgaacccccacatgaagc

SEQ ID NO: 1018922 - DNA, 120 bp, Artificial Sequence
  ENSG00000262468_27 (sequence is synthesized)
agccagacgtaggaaaacccagattcataaagcgctgatatgggtggtcctttaccaaaggattttctgctttacaaagtaattcaccaaatgatttccctagagtatgggcagagattt

SEQ ID NO: 1018923 - DNA, 120 bp, Artificial Sequence
  ENSG00000262468_28 (sequence is synthesized)
gcaaactacagcttggaaccaagctgccttttttttataataaagttttatcaggatgcatccacatccattcatctctgtggtgccagctgctctagctacacaggcagagtggaagag

SEQ ID NO: 1018924 - DNA, 120 bp, Artificial Sequence
  ENSG00000262468_29 (sequence is synthesized)
ttgcagatggccaacaaaacctaaactgtttaccgcctggccccttatagaagcagctggctgacgctggctccagggcatcagaaatgggaccattggaaaggagtagccgggctacat

SEQ ID NO: 1018925 - DNA, 120 bp, Artificial Sequence
  ENSG00000262468_30 (sequence is synthesized)
ggtttttcttctgccccacgtcttgttctcaaacatgcttcctccccagtcatctgaggaatgtcagtctgagacagtcaggagcaggtgtgcctagggatgcatggtttctgaaaatgg

SEQ ID NO: 1018926 - DNA, 120 bp, Artificial Sequence
  ENSG00000262468_31 (sequence is synthesized)
ggtggggtcttttaggctgagggctctggcagcttctgtctgaaggctgagctgagctgagcagagctgggcatggtggctcacgcctgtagtcccggctactcaggaggccaaggtggg

SEQ ID NO: 1018927 - DNA, 90 bp, Artificial Sequence
  ENSG00000262468_32 (sequence is synthesized)
actcatgggaagttcagaggagcctgggcaacacagtgagacctcatctttattttttgaaattttttgtttttattatttttttaattt

SEQ ID NO: 1018928 - DNA, 120 bp, Artificial Sequence
  ENSG00000262468_33 (sequence is synthesized)
ggcaaaagaaagagagagaggaaaacagctctctccagtgagagagagggtacttctgaaaggaaaacgccaccggcagcagatgcactggattttatagtcaggcttgaggaggtggtg

SEQ ID NO: 1018929 - DNA, 120 bp, Artificial Sequence
  ENSG00000262468_34 (sequence is synthesized)
atttacatagggctcacagattggttcagtcaggtatgatgtttacatagcgctggggtgtggggaaggctgacctccccactctaatcttattatgcaaatgaactttccccttggcca

SEQ ID NO: 1018930 - DNA, 120 bp, Artificial Sequence
  ENSG00000262468_35 (sequence is synthesized)
gccagcaccatcttgtctgctccttactgtgcacgtggctggcagagaagggaagatggagccgccattttgaacatgattggcacaactgcctgcatctatgtctgcagctcgatttta

SEQ ID NO: 1018931 - DNA, 120 bp, Artificial Sequence
  ENSG00000262468_36 (sequence is synthesized)
cacgctgctctttgttagaaaggaaaatgatttggggctgcttttcagtaaaaggaaaaccttactgaggacttctgtatcctcactatctaagtaatttcctcttaactcctgtatcat

SEQ ID NO: 1018932 - DNA, 120 bp, Artificial Sequence
  ENSG00000262468_37 (sequence is synthesized)
tccccactctggagtggtaaccctaactgctcttcggggttgtttgatgatgactctttctggctacttcatacttaaaaggggtgttgtgtggggaacagaagctaagggctcctcctg

SEQ ID NO: 1018933 - DNA, 120 bp, Artificial Sequence
  ENSG00000262468_38 (sequence is synthesized)
gggtcgagctaagggtcctcggaaaaaaggcatgtccgtgcatggttctgtctgcagcaccatttagagtttgattactgtcagccattctgatgggttgtaacactggtttgcctccac

SEQ ID NO: 1018934 - DNA, 120 bp, Artificial Sequence
  ENSG00000262468_39 (sequence is synthesized)
cagatgttgagatagtttccagattccagagaaaccaggcagagagaaacaaacatgctccaaattttcttcacaggagtataccttattcaattattaaaggccataaatagttcacaa

SEQ ID NO: 1018935 - DNA, 120 bp, Artificial Sequence
  ENSG00000239799_0 (sequence is synthesized)
cagaagaggctgtaccggccacttacagcttcccgcacgttattctggatgctcctgggatcccacagcaagcccaggtgcagccccagccgcctcccctgtgcagcacgtcctggagtc

SEQ ID NO: 1018936 - DNA, 120 bp, Artificial Sequence
  ENSG00000239799_1 (sequence is synthesized)
cggtgagcaggatgatgagtgagacactcccttcgggcagccgctcctcctggttgctgctgtccagcaactgcacagccatcagcattgcatcattgatgttggtccctgaggaacacg

SEQ ID NO: 1018937 - DNA, 120 bp, Artificial Sequence
  ENSG00000239799_2 (sequence is synthesized)
cactctcaagtatttcagatggtttatactaaaaagttcagacatcataaacctgacaaccatcaaaagagggaagacttcaaaaacatggagtaaaagggaagtataataacaatggca

SEQ ID NO: 1018938 - DNA, 80 bp, Artificial Sequence; identical to SEQ ID NO: 835446
  ENSG00000281550_0 (sequence is synthesized)

SEQ ID NO: 1018939 - DNA, 120 bp, Artificial Sequence
  ENSG00000281550_1 (sequence is synthesized)
attcacagaagctccagggcagagtcaccattaccagggacacatcttcgagcacagcctacatgcagctgagcagcctgagatctgaggacacggccgtgtattactgtgcgagagaca

SEQ ID NO: 1018940 - DNA, 120 bp, Artificial Sequence
  ENSG00000228723_0 (sequence is synthesized)
gggtttccctgctatgttttgtcacacatcattgctgggagagttcagtgctatccaagtgactcccccgggagaggacaactggaaatttatgcctggtgtcttcctggactccgacct

SEQ ID NO: 1018941 - DNA, 120 bp, Artificial Sequence
  ENSG00000228723_1 (sequence is synthesized)
atgcacctttttccttggatgattttaacctgtctccttttgctgcaatgaaccataaccatgagtatatcagcttttctaatttttgtgagtccctcaagtgaattatcaaacctaagg

SEQ ID NO: 1018942 - DNA, 120 bp, Artificial Sequence
  ENSG00000228723_2 (sequence is synthesized)
tagtaactccaggctctaacctggagctgacatgataaggtcaaatgtacacctctagaagacttccgactgcagaggggaatggatgggggagctgagggaggagagctgaagcaggaa

SEQ ID NO: 1018943 - DNA, 120 bp, Artificial Sequence
  ENSG00000228723_3 (sequence is synthesized)
gaccatggcctggaaagagatggctgaaccagtccagaatcacaagaaaggcatcagcaccttctgtgaaatggggagccatgcagaggaggtgcccaggtggcgaggagtccatgtcag

SEQ ID NO: 1018944 - DNA, 120 bp, Artificial Sequence
  ENSG00000228723_4 (sequence is synthesized)
ccgattgctcttttttctctccttgaagccatccccttagccctctgcccacagtgatcactaactgattgctcctccttaaaagccaccgaaaagtgtgcttggctgatctccctgacc

SEQ ID NO: 1018945 - DNA, 120 bp, Artificial Sequence
  ENSG00000228723_5 (sequence is synthesized)
tcaatttctctgctggcagaatcacaagaaaggcatcagcaccttctgtgaaatggggagccatgcagaggaggtgcccaggtggcgaggagtccatgtcagctgccgtcatccacacca

SEQ ID NO: 1018946 - DNA, 120 bp, Artificial Sequence
  ENSG00000228723_6 (sequence is synthesized)
aaccccaaacagcagcgcagaggctgcagccgccctcggaggcaacactgggaaacgctcattagcagccttccattgctcacccgccccatcccacctctgtgcatcccagatcatcag

SEQ ID NO: 1018947 - DNA, 120 bp, Artificial Sequence
  ENSG00000228723_7 (sequence is synthesized)
cgaagtgcacagctggcttccatcctcggagccttcctccttcatttgcctattcaacagttacaaaggcctgagttgcaaaggggcttacaacccattccacccagaagaaagagaact

SEQ ID NO: 1018948 - DNA, 120 bp, Artificial Sequence
  ENSG00000228723_8 (sequence is synthesized)
gagactgagcaagacagagaataggtggaaggggagatgaaaccaagcaatctctagatcccaaatggggaccctgatgtagcaagagcctcttttaaatccttttccaatagggtaata

SEQ ID NO: 1018949 - DNA, 120 bp, Artificial Sequence
  ENSG00000228723_9 (sequence is synthesized)
tggaaaatagttgaaagcacaagccaagtggggctggaatcccaaatgggccatttactagctgtgtgactggacaagtaatttcatatttctgggcctcgatttttctcatctgtaaaa

SEQ ID NO: 1018950 - DNA, 120 bp, Artificial Sequence
  ENSG00000286378_0 (sequence is synthesized)
gggggatggaggatgcgctctcctctgtcccttcaaggcctcttcctcgtcccaggtcgagtctcctccttgctgaccaggcatcgcgagcagatgaatcctctgggcggttgtccctgt

SEQ ID NO: 1018951 - DNA, 120 bp, Artificial Sequence
  ENSG00000286378_1 (sequence is synthesized)
caggctgtcaggacctgattttccctggttcactaaagcaccagaaggtatgaaggcggagagaggaaacagggcaatggaatgaacacttctcaagaatctctcaggtgccacggactg

SEQ ID NO: 1018952 - DNA, 120 bp, Artificial Sequence
  ENSG00000286378_2 (sequence is synthesized)
agccaggtgccttccatgtgttatctcattttacagggcaggtaacatttctgaaaggtcaggcagctaaaaagcagacagctttctggcacattagagaaacaaaagaaatgttggaga

SEQ ID NO: 1018953 - DNA, 120 bp, Artificial Sequence
  ENSG00000286378_3 (sequence is synthesized)
ctggaatgcctgctgtgtcaaggcacctaattagaaaacaacgtcagagtgaatttgtcgtgcgagtctccagctctgccagaagaactaaaagaaatgtgtcaccagaggaatcacaaa

SEQ ID NO: 1018954 - DNA, 120 bp, Artificial Sequence
  ENSG00000286378_4 (sequence is synthesized)
gtaaagtctattattgttctggggattctggggattcgatgcacaaatcagaggtctgacaggggatggggcatgtgttacgtcttagtaatgtgctaaatggtagtgcttccagattcc

SEQ ID NO: 1018955 - DNA, 120 bp, Artificial Sequence
  ENSG00000286378_5 (sequence is synthesized)
ccacagaatcctactgcagtcagagatcttgatgtcggttgaacttatctatttataacgaggaaacattaaggtaactcaaaccaacaaaataaaacaggttgacagtgactaagcaac

SEQ ID NO: 1018956 - DNA, 120 bp, Artificial Sequence
  ENSG00000286378_6 (sequence is synthesized)
aacagagtgctagatttatgtagagattctttctttcaagttgctgagacatttcacaaaggagaaccgtagattatcatcaacttccatttggggacttagaaatccaccaaagacaaa

SEQ ID NO: 1018957 - DNA, 120 bp, Artificial Sequence
  ENSG00000286378_7 (sequence is synthesized)
gacaatgttggtatcattccttccagctcttggctgaaactgttctttcctatgtcaccagtgaacttctactggccaacgcccaaagaatactttctcagttttagtttagagacctct

SEQ ID NO: 1018958 - DNA, 120 bp, Artificial Sequence
  ENSG00000286378_8 (sequence is synthesized)
ctattccacttgcatggttagacactaactgctggaaacttccaatctgaaacactccctgggaaatgtcttatttgcaaattttacagctaaaatccctcctccatagacaatctatta

SEQ ID NO: 1018959 - DNA, 120 bp, Artificial Sequence
  ENSG00000286378_9 (sequence is synthesized)
ataaacagtacctgcaaatgggggactctctgggggaaattttttcactgcaattggtgtcagcattatattataattaatccatctttatctaagataaagttgtaggttcagataaat

SEQ ID NO: 1018960 - DNA, 120 bp, Artificial Sequence
  ENSG00000286378_10 (sequence is synthesized)
aatgtccctctccctttaacacttgttatacttgtgctaggcctatttgtggccacacctgggattgagtggttgagatgagatgcaaaagagattatctaaacttctgggtgatttttt

SEQ ID NO: 1018961 - DNA, 120 bp, Artificial Sequence
  ENSG00000286378_11 (sequence is synthesized)
gctgaatgaatgtcttttaaagcaccatttctgatcccatttggcttctctctagcctctatcgattaattgttgatttaaattggaagagaggctatatggagtctagaactttactta

SEQ ID NO: 1018962 - DNA, 120 bp, Artificial Sequence
  ENSG00000286378_12 (sequence is synthesized)
gttcattgttatttccccaggacctcgaaaagtgcctgggatataactcacaaatatgtgtcgaatgaatgagtagttctatctgtttcatgtctgggtcaatgtaggctgtatccacat

SEQ ID NO: 1018963 - DNA, 120 bp, Artificial Sequence
  ENSG00000286378_13 (sequence is synthesized)
gttcctggtaggggaagtaatagtaacaaagattttggctaagcttcagaggccatgaattaatagattttggaagaggtcactttaggatttatcagcttcaaatcttatataaacttc

SEQ ID NO: 1018964 - DNA, 120 bp, Artificial Sequence
  ENSG00000286378_14 (sequence is synthesized)
caatggtgaatgaggtaaggttttgggacatacgtaaccaggcctgaattggttgaatatgaacttgaaagttcaaattcagactaacatctttcttttgtcagctcttcaatctcagca

SEQ ID NO: 1018965 - DNA, 120 bp, Artificial Sequence
  ENSG00000286378_15 (sequence is synthesized)
cttgtcaacttaaataacaaacagaagaggggctctctaaaataaaaatgatatgtactcaggagtaaggcattgcaatggaaatatgtgtgccatagtaaactatgtgcatactaagag

SEQ ID NO: 1018966 - DNA, 120 bp, Artificial Sequence
  ENSG00000286378_16 (sequence is synthesized)
aggtaaagaaagacaaaaatttttaaaggaaaaatgagatggattacataattgtttggagataattatccttgctacaaagatcaatagaaagggtgatgccagtacaaggttggacaa

SEQ ID NO: 1018967 - DNA, 83 bp, Artificial Sequence
  ENSG00000286378_17 (sequence is synthesized)
ttgtgtggccttcatgcaaggttgtggtttttacagtcttttgtgatattttttgttatcaggtacacaagcaagcgaaccca

SEQ ID NO: 1018968 - DNA, 120 bp, Artificial Sequence
  ENSG00000286378_18 (sequence is synthesized)
tgatattttttgttatcaggtacacaagcaagcgaacccactcttcatagccttccccaaccctatttgtcaagtgtttttttttctttaatactagtgaaataagatagaaaggaacaa

SEQ ID NO: 1018969 - DNA, 120 bp, Artificial Sequence
  ENSG00000286378_19 (sequence is synthesized)
gtctcatacctgatgtatgggccaaacaagaaatccatcatgctgcctaatgtcatgaccagagatgttcagactgcaaaccaggagagttgatgttttcatgcttttcttaagacatcg

SEQ ID NO: 1018970 - DNA, 120 bp, Artificial Sequence
  ENSG00000286378_20 (sequence is synthesized)
aaagactccacatcatgagactcttaccccttttaatgcctactttttcacttggcaagataataatgtaattgaaatttcataatcagtagctcctgctggaaacttgactaagagatc

SEQ ID NO: 1018971 - DNA, 120 bp, Artificial Sequence
  ENSG00000286378_21 (sequence is synthesized)
ctttaatatccattggttaaataggaaaacaggccacatggtaataacagctctcacttaattctctctcatcatttgatgtcttcaattgtttatctttaagcctcagtgtatggctca

SEQ ID NO: 1018972 - DNA, 120 bp, Artificial Sequence
  ENSG00000286378_22 (sequence is synthesized)
ataccattatttaaactgggattttcatactactattatttttactttgttgctgccgttggttgttgttgtctgagacagggtctcacacggtcacccaggctggagtgcagtggcacc

SEQ ID NO: 1018973 - DNA, 120 bp, Artificial Sequence
  ENSG00000286378_23 (sequence is synthesized)
atgggtcatggctcactgaagccttgatatttttactttgtattttccctttttaaactttgtatctgcaagccctgtggtcccagctactccaggggctgaggtgggaggactgcttga

SEQ ID NO: 1018974 - DNA, 120 bp, Artificial Sequence
  ENSG00000286378_24 (sequence is synthesized)
gcctgggaggcagaagttgcagtgaccccggatcacactactactgtactccaacctgggtgacagagaccccatctcaaaaccaaacaaaaactttgtatctattacttattaaaattt

SEQ ID NO: 1018975 - DNA, 120 bp, Artificial Sequence
  ENSG00000286378_25 (sequence is synthesized)
ttgcagaaacacaaccctaataggataatactagcccagcactttgagatgataacaaaagactatggaacagacaaaattgaacttaataatagactctaggtagaattagcatgagaa

SEQ ID NO: 1018976 - DNA, 120 bp, Artificial Sequence
  ENSG00000286378_26 (sequence is synthesized)
ccactttcttcaaatctcccttattgttcaaatgtggctgaaagggttttgacactgactcttagccgacattcactccccacaaggtgggatgagacaagcaactgggaccaagggccg

SEQ ID NO: 1018977 - DNA, 120 bp, Artificial Sequence
  ENSG00000286378_27 (sequence is synthesized)
tcacatccaactacaggataatcagtgatgctttcagagaaagatcttgatcaaaggtgggaaatgtgaaagttgtcagaatcaaaatagagtcaccagtattaaaaaaaaaaaacttga

SEQ ID NO: 1018978 - DNA, 120 bp, Artificial Sequence
  ENSG00000286379_0 (sequence is synthesized)
ggagctcagcgtttgaacaggggagacgggcatgatcaataattggatatatgtcaggttgtgatgaacacaatgaaaaaaaaaatgagtaaggggttagagaagtccaggtggacaggt

SEQ ID NO: 1018979 - DNA, 120 bp, Artificial Sequence
  ENSG00000286379_1 (sequence is synthesized)
gagggaaggcctctctgaggaggtggtattctgagcagacacctgaatgaggcagggagtcatggaaatacctgggagaagagccttcgagaaagaataaccagtgcagagtgttagggt

SEQ ID NO: 1018980 - DNA, 120 bp, Artificial Sequence
  ENSG00000286379_2 (sequence is synthesized)
caccccgaccagttcccctcctttcgcataggtcttacaatacagtcctttgtgacctccgcacagctcccccagggctaaaggcaacccccactgccgccctgcactgacccttccagt

SEQ ID NO: 1018981 - DNA, 120 bp, Artificial Sequence
  ENSG00000286379_3 (sequence is synthesized)
aactgtttgtccagaagacttcagctgaactggcaaacagttccaggatgcggtcagaacacctgctaaccaaagctggcaaaaacatcaccaggatgcagtcaagacacctgcaccccc

SEQ ID NO: 1018982 - DNA, 120 bp, Artificial Sequence
  ENSG00000286379_4 (sequence is synthesized)
aactcggttcacacaccccgacccagttcctcgccctgtaaagccctgctgcagtctgtaagcaaggctgcctcctctgcctgtcaaggaacagcctggcaggacaaataaaaattgctt

SEQ ID NO: 1018983 - DNA, 120 bp, Artificial Sequence
  ENSG00000286379_5 (sequence is synthesized)
gcctgtctttgggtctactcgtcgtttctcttggctaaccttttattttggtgccaaaacccaggaaggtggtagagttcggcctccctttctctctctttcctaaccaccacccccact

SEQ ID NO: 1018984 - DNA, 120 bp, Artificial Sequence
  ENSG00000286379_6 (sequence is synthesized)
tcccttggctgaactcccccttcccaaacctgccaaagacccagaggacttctgggaccctcccattgttggtgacttcatccatcactatagtctgcaaaggggtgagtaagagagacc

SEQ ID NO: 1018985 - DNA, 120 bp, Artificial Sequence
  ENSG00000286379_7 (sequence is synthesized)
cttgccatctacccgggacccttgaccgtctctgtcttcccaaaagacccagtgctgggccaagggctccctccggcctctaggcctccgactcctctgtttcagggacgcctgactggg

SEQ ID NO: 1018986 - DNA, 120 bp, Artificial Sequence
  ENSG00000286379_8 (sequence is synthesized)
tggttgccttctgtatactaaacaaggcccacaggactggggacgtcctctcccccggtccttgccaccggcagtctctctccttcctcaaccatctcctccattcaccatgggagccta

SEQ ID NO: 1018987 - DNA, 120 bp, Artificial Sequence
  ENSG00000286379_9 (sequence is synthesized)
tcaatctactctgtctaaagcaacccccctggggtcacttgtgcaaccttgagactctcagtttttgtgcaaaagtttgtcccaagaggcttattttctattgtgatacggcttggccac

SEQ ID NO: 1018988 - DNA, 120 bp, Artificial Sequence
  ENSG00000286379_10 (sequence is synthesized)
aatataaattagacataggctcccagtggcttgaaaatggtactttctatttcaatatactcagggacttagacaatttttgccattgcgatggaaaatggtctgaaattccttatgttc

SEQ ID NO: 1018989 - DNA, 120 bp, Artificial Sequence
  ENSG00000286379_11 (sequence is synthesized)
aggctttcgtcaccctctgtaaccgctcttcactttgccaatccttctccgatttccaaatcctcctcacccgctctaagcccaatttactctcagcagacccccccttcacagcaagcg

SEQ ID NO: 1018990 - DNA, 120 bp, Artificial Sequence
  ENSG00000286379_12 (sequence is synthesized)
acaactcctcctttgaccccgccggctttccacctccctggcaacatcataatcctccatcagatcatcacgatcctccaccatacactcccgctcctgccttatctctttcccctcccc

SEQ ID NO: 1018991 - DNA, 120 bp, Artificial Sequence
  ENSG00000286379_13 (sequence is synthesized)
tctctaaccacccagcttctgaatctgattcctccccatctctccacctcatacccgctctcgaactgagcacgtccaacaaccagtctccatacttcccctccgagaggttgccagagt

SEQ ID NO: 1018992 - DNA, 120 bp, Artificial Sequence
  ENSG00000286379_14 (sequence is synthesized)
tgaaggaatcattcgtgtccacgttcccttctccctctctgacctttcccaaattgaaaaacatctcgggtcgttttcctccaatcccgacacttatattaaagacttcaaataccttac

SEQ ID NO: 1018993 - DNA, 120 bp, Artificial Sequence
  ENSG00000286379_15 (sequence is synthesized)
ccaatcttaagaactcacttggcatgatctctatattgtcctctcttccactatcttcccagaagagaaggaaaaagtgtggctcacatctcaggcacatgctaatgatcttcaagcaag

SEQ ID NO: 1018994 - DNA, 120 bp, Artificial Sequence
  ENSG00000286379_16 (sequence is synthesized)
gcttcaaggatagcccccatttctttgggcaagccctaccccaagaccttgcctcgttaaacctatcccccagcctccttctccagtatgtagatgacctccttctctgcagctgctccc

SEQ ID NO: 1018995 - DNA, 120 bp, Artificial Sequence
  ENSG00000286379_17 (sequence is synthesized)
taaaagactcccatgtccacactgccacctttctcaattttcttgctgttaaaggctatagagtgtccccatccaaagcacagctttccacccctagtgtgacctacctagaagttcaac

SEQ ID NO: 1018996 - DNA, 120 bp, Artificial Sequence
  ENSG00000286379_18 (sequence is synthesized)
tctctaccgggtcccaagccatgaccccagcatgagcagccttaatgggcaacctatctccatgttcctcaaaaagtgaaattctttccttccgagggctagcaggctttttcagaatat

SEQ ID NO: 1018997 - DNA, 120 bp, Artificial Sequence
  ENSG00000286379_19 (sequence is synthesized)
ggatcctcaactttgccctcttagctcaccccctctatgaagcagccaaaggccccctaaaggagcacctaaatccctacgacaacatagcccctagcttccacaaacttaaaaccgccc

SEQ ID NO: 1018998 - DNA, 120 bp, Artificial Sequence
  ENSG00000286379_20 (sequence is synthesized)
cccttggcatacttggccaaccagaacgaagtcctccatcttttgcccccatagcctagctttccaaacagctggacaataccatttgaggatggccaacctgcctcagagctctagcgg

SEQ ID NO: 1018999 - DNA, 120 bp, Artificial Sequence
  ENSG00000286379_21 (sequence is synthesized)
cagctgccaccctggccatagaaagtaaaaagctaacattcggtcaagataccaccatccacagtccacataatctataagacctcctttcctcccaagcattaagcattctcccccgtc

SEQ ID NO: 1019000 - DNA, 120 bp, Artificial Sequence
  ENSG00000286379_22 (sequence is synthesized)
ccacatccagctttttcatgccctatttcttgacaaccccgagttctgtcctgccaaaagttcccccctttaaccccgcatctctaattccattatcttccttgcctccttcccactcct

SEQ ID NO: 1019001 - DNA, 120 bp, Artificial Sequence
  ENSG00000286379_23 (sequence is synthesized)
gtactgaaattctagaccacctgcaaccacacttccctaacatctcctctgagcctcctattgaccaactattggtcaatataatgaccaactatacccagatggctcctcttccggagc

SEQ ID NO: 1019002 - DNA, 120 bp, Artificial Sequence
  ENSG00000286379_24 (sequence is synthesized)
caccggctctcccaaaattgctaggtatgcagtagttaccttaaaccaagtaattgaggctaagcccctacccctaggaacctcctcccaaaaagcagatctcatagctctcaccagacc

SEQ ID NO: 1019003 - DNA, 120 bp, Artificial Sequence
  ENSG00000286379_25 (sequence is synthesized)
ccttaccctctccaaaggcaaatgagtcaacatttacacagactccaaatatgcctatcacatcctccattctcatgccgccatctggcaagagagaggattccttactgcccaaggaac

SEQ ID NO: 1019004 - DNA, 120 bp, Artificial Sequence
  ENSG00000286379_26 (sequence is synthesized)
ccccatcactaacggcccccttatttaccaacttcttcaggcctcacacctcccaactaaagcaggagttatgcacttttgaggacatcaaacaggatcagatgaaatctcaagaaataa

SEQ ID NO: 1019005 - DNA, 120 bp, Artificial Sequence
  ENSG00000286379_27 (sequence is synthesized)
cagaaaggccgataaggcaggaaaagaagactccctttcttctgtccctgcccccctcctccttgttaccccagcaatccaacccaacccaagtactctcccaccgaaaaggcttcacta

SEQ ID NO: 1019006 - DNA, 120 bp, Artificial Sequence
  ENSG00000286379_28 (sequence is synthesized)
actactacagcaaggagcctcccttcaagaggattaatcaaaaatcaagagttcgtcctcccccaagaggagaccaaggaaattctgacttttttttttttttttttagacggagtcttg

SEQ ID NO: 1019007 - DNA, 120 bp, Artificial Sequence
  ENSG00000286379_29 (sequence is synthesized)
cgcgtgagccaccgcgcccggcctaattctgacatctcttcaccaatccttccatattggttaaaaagggctcctgcaactgacctgccaccgactgttccctgtaaatactgtaaccag

SEQ ID NO: 1019008 - DNA, 120 bp, Artificial Sequence
  ENSG00000286379_30 (sequence is synthesized)
ctgttccctgtaaatactccagcaccctccttggaccaacctgactcagccttacacccatcccagaagacgccaacccaccccctccgccaagaaacataacagataagttaccacccc

SEQ ID NO: 1019009 - DNA, 120 bp, Artificial Sequence
  ENSG00000286379_31 (sequence is synthesized)
ttactgttaaatatcgaaaccctcattaatgggaatcatttactgcactgcccttataggagttgccttacttactctgctctttgccgtaggaagagatactgtaacacccccagggtg

SEQ ID NO: 1019010 - DNA, 120 bp, Artificial Sequence
  ENSG00000286379_32 (sequence is synthesized)
gaactctagcttcataatcctcctcatagcagaataaaggccactaataagtgactgcccctcctaaatgtcctgcctttgccctgtcttgccacttcactctctttcttacccagaaca

SEQ ID NO: 1019011 - DNA, 120 bp, Artificial Sequence
  ENSG00000286379_33 (sequence is synthesized)
acccaccctcacagcactccttaactgggtaactgatctcaccttccaaagagccctattcgtgagtttagcccaggtgagaccaatttcttcaccttcactcttatcctttgcctgctt

SEQ ID NO: 1019012 - DNA, 120 bp, Artificial Sequence
  ENSG00000286379_34 (sequence is synthesized)
actcctccttcccttctcctcctcactacgactccatctacaacgaaccatccaacaggcacacacaatacttaatcaaaccaatcctgacctcgcacgtaactgctggttttgtgtcca

SEQ ID NO: 1019013 - DNA, 120 bp, Artificial Sequence
  ENSG00000286379_35 (sequence is synthesized)
ttcctcagaaaccacatcaaaaattgccttcctggtcccacttaaagattggacccttaccaacctgacactccatcctcactatcgaagcttcggaggggtaaatgcacttaaaagtta

SEQ ID NO: 1019014 - DNA, 120 bp, Artificial Sequence
  ENSG00000286379_36 (sequence is synthesized)
taaaaccaacctcacccgctacacctccaggagcaaacttatcttagggacacttacatctgatgccaaattagaccaacaggcacccctttgtatacagcacgaccttccctcaggaac

SEQ ID NO: 1019015 - DNA, 120 bp, Artificial Sequence
  ENSG00000286379_37 (sequence is synthesized)
ccctttaggcactctccccaccggctcatgtaactacaccctacaactcagcccacctgctggtatccagccgctaacagtatacaatcccactcaaatactcaaaatttctggtccccc

SEQ ID NO: 1019016 - DNA, 120 bp, Artificial Sequence
  ENSG00000286374_0 (sequence is synthesized)
gggacaggcaggcagccctcagccaggatggccggccttgggggtgagggcagctgtctgttcatggctgtcctgtgggagagagcagatgcagccttgtgaacaaatgagcctgtcaca

SEQ ID NO: 1019017 - DNA, 120 bp, Artificial Sequence
  ENSG00000286374_1 (sequence is synthesized)
gttggcatccttgtgaaatcaaagtcagctgtactcactgagtgagctactttcttcttgtgatgcacctgctcctgctctgccttctgccatgagtggaagcttcctgaggcctcacca

SEQ ID NO: 1019018 - DNA, 81 bp, Artificial Sequence
  ENSG00000286374_2 (sequence is synthesized)
agctcaagtatacctttgtagtaatgcaaatggactaatgcactgttcaaaagaaatccggttgaaactgggttttgcata

SEQ ID NO: 1019019 - DNA, 120 bp, Artificial Sequence
  ENSG00000286374_3 (sequence is synthesized)
actgttcaaaagaaatccggttgaaactgggttttgcataactagatctctgacctcttgttcttttgggattggggagggccagcctgctcacttggggacctcctcctgacagactag

SEQ ID NO: 1019020 - DNA, 120 bp, Artificial Sequence
  ENSG00000286374_4 (sequence is synthesized)
gagctcatgataagccattccaaagtgttttatggaaaccatgagctctctggcagattccctgcaggcttaggaatgaaggatcctcctcacagttgttgtgtgtctatacctcagatg

SEQ ID NO: 1019021 - DNA, 120 bp, Artificial Sequence
  ENSG00000286374_5 (sequence is synthesized)
cctgtcacaaaacccaagagggtcccagtgaatggaagaaaggcttcccgaggtgatttccttactataagacagaccctgcaccaggctggattctttcttttttttgccatgccacaa

SEQ ID NO: 1019022 - DNA, 120 bp, Artificial Sequence
  ENSG00000286374_6 (sequence is synthesized)
tgtcgggagaggagctgaaggtcataccctcacacaggtaggagggtctaagtcaagcctattttggaaggcaatgtgctcacagaaacatcatccaactttgaggtcaaggcgagaggc

SEQ ID NO: 1019023 - DNA, 120 bp, Artificial Sequence
  ENSG00000286374_7 (sequence is synthesized)
tggaagaaggtgccaagaatgacagattctgctccggtgtcaaggacagaagctgcatattccactgtgaaggccacagctttttcataagaaaagtgcaatttactgatgatcaaatag

SEQ ID NO: 1019024 - DNA, 120 bp, Artificial Sequence
  ENSG00000286374_8 (sequence is synthesized)
ttcatttaagagattccagtgaggagtggaagatgaattgaaggagatattagagatgacattcatgaattgaacagaggagttacccagatgatccctgagatatcttataaaccccag

SEQ ID NO: 1019025 - DNA, 120 bp, Artificial Sequence
  ENSG00000286375_0 (sequence is synthesized)
ggaagacgcctgcggggcgggtgcgggagcgcctcctggtggacaacgcaggggccagcacagaggctgacagccattgtttcaacctccatgagctgaacctccaggaagcagcttcct

SEQ ID NO: 1019026 - DNA, 120 bp, Artificial Sequence
  ENSG00000286375_1 (sequence is synthesized)
ggggatttaaagagacaatacttgtgctcccacccccatgtcttttgggaaccagacatttaaggaaatctttgtcgggtcactggttgattacagaaatgatggaacagaaactttagt

SEQ ID NO: 1019027 - DNA, 120 bp, Artificial Sequence
  ENSG00000286375_2 (sequence is synthesized)
gaccacaaacaacaatatatatcttgcaaaaatagttttaaaaagtcataaatagatgacccagtcctcataaagtacaagaaatctctgaggtattgaagaattagatatccagttagt

SEQ ID NO: 1019028 - DNA, 120 bp, Artificial Sequence
  ENSG00000286375_3 (sequence is synthesized)
gcaacatggtatttaaaatttctagctctcaacaaacaattacaaaacatacaaaaaaagaggaaaacatggtccattcacagaaaaaaagaagtttacagaaatcttttctaagaaaga

SEQ ID NO: 1019029 - DNA, 120 bp, Artificial Sequence
  ENSG00000286375_4 (sequence is synthesized)
ttaatgagataaggaaaaccataaaccaagaactaaaaggaatcagtagaattatatatgaacaaagaaagaatatcaattaataaatagaaataaaaaagaactaaactgaaattctgg

SEQ ID NO: 1019030 - DNA, 120 bp, Artificial Sequence
  ENSG00000286375_5 (sequence is synthesized)
aggtgaaaactgtaataactgaaatgaaaaattaactagaggcattcaacagcaggtttgagcaagtggaaaaaagtgtctatgaacttgaagacggggcaattgaaattatccagtctg

SEQ ID NO: 1019031 - DNA, 120 bp, Artificial Sequence
  ENSG00000286375_6 (sequence is synthesized)
gggagcacaaagacaaaagaataagtaaaagtgaacagaggctaagggccctgtaggacaccatcaagtgaatcaaatttacaatatgagagtttcagaaagagtagagagagttgggaa

SEQ ID NO: 1019032 - DNA, 120 bp, Artificial Sequence
  ENSG00000286375_7 (sequence is synthesized)
agaaagaacatctgacgaaataatgactggcaaatgtcccaaattcgatgaaagaaatgaatctacagatccgagaaactcaacaaacctccaaggataaactcaacaaactcctaggat

SEQ ID NO: 1019033 - DNA, 120 bp, Artificial Sequence
  ENSG00000286375_8 (sequence is synthesized)
aaactcaaagagcttcaccccaagacatattataatcaaagtgtcaaaagtcagagacaaagagaatcttgaaaacagaaaaagagaaatgattagtcacacacaaggactcctcaataa

SEQ ID NO: 1019034 - DNA, 120 bp, Artificial Sequence
  ENSG00000286376_0 (sequence is synthesized)
attcatggaaattccaaatgttagagcctgagtaaatacacaaattgtatcttgcaacattaggccctctaagctcttattgttgtataggtgagttgtaaatagtcgtctttgacatcc

SEQ ID NO: 1019035 - DNA, 120 bp, Artificial Sequence
  ENSG00000286376_1 (sequence is synthesized)
tttgctcgtaagatttattaatataagtagagtatcatatgcatattgtttgcttattaattcatgattatatttattgcagtggttcgttcattctacactgtaggttgtcaagaatat

SEQ ID NO: 1019036 - DNA, 120 bp, Artificial Sequence
  ENSG00000286376_2 (sequence is synthesized)
aggccctgagtcaggtagacctgggggttgaatcctgtctctaccattaactattatagctcttcattacatgtttataatatgttcatcggctaatgaacgaacctaggctcaggcttc

SEQ ID NO: 1019037 - DNA, 120 bp, Artificial Sequence
  ENSG00000286376_3 (sequence is synthesized)
ctcgtctataaaaactggtgtgatgatatatgcctcataggatttttgtgacgatagaaggagattcgacatataaaacaacatggcgtggaacaatcagtgtttaataactgctgtcta

SEQ ID NO: 1019038 - DNA, 120 bp, Artificial Sequence
  ENSG00000286376_4 (sequence is synthesized)
ttgttactatttgaaccttaggctctttttttcagggtcctaatatattagccaaggagcaatttaatatatttccatcttccatttccattttctaaaatcctcaatcccaggtgaggg

SEQ ID NO: 1019039 - DNA, 120 bp, Artificial Sequence
  ENSG00000286376_5 (sequence is synthesized)
tgctggaaaaggttttctttcttaaatgaatttaggcagaccagttattccacataaatcaagtacccccttgaggttccccggttctaaaagcatgggaatgtgggtagtcttggcttc

SEQ ID NO: 1019040 - DNA, 120 bp, Artificial Sequence
  ENSG00000286376_6 (sequence is synthesized)
actgtctttgtccggtgtgtaggatgtcctggcagtccatccacttgatctgaaatttggccttggggctgggttctgttcacttcctcctaactaggctttcaggccaggaaaatgttg

SEQ ID NO: 1019041 - DNA, 120 bp, Artificial Sequence
  ENSG00000286376_7 (sequence is synthesized)
taatagagtttcttctctccagaaaatccctagagattcttcctcttggacttgagggtagacattcaaatactgccttccttggatgttttttagtttagctgaggattaaatttttca

SEQ ID NO: 1019042 - DNA, 120 bp, Artificial Sequence
  ENSG00000286376_8 (sequence is synthesized)
aattgtctgccttaataaatatgtccaacccttctattcattccttatttgaacccaaggtcagggggctgtttatattttagcctcttccagaaacccatattcttttcctttgtaacc

SEQ ID NO: 1019043 - DNA, 120 bp, Artificial Sequence
  ENSG00000286376_9 (sequence is synthesized)
ttttaacccattttctttctttcttttttaagtgttaggatttttagttgcttgctgacttttccgttttatacctttaatcttcttttatgttatattttaatatatgcactagggcac

SEQ ID NO: 1019044 - DNA, 120 bp, Artificial Sequence
  ENSG00000286376_10 (sequence is synthesized)
aatgaggtttcttttataataacatgaaaggcagagaaaaaatagtttggatcaataacaaaatattcaggaaatggacatggaaaagacccatttttaagtgtaaaaacataagctctt

SEQ ID NO: 1019045 - DNA, 120 bp, Artificial Sequence
  ENSG00000286376_11 (sequence is synthesized)
tagggaaggagaaggtgcttccaaaggacaacccttgtaaaagaagagactcccatggccctgattcacagtgtatttattttaggcttgtgtttctgagtgcagtgtgaaaaatggaag

SEQ ID NO: 1019046 - DNA, 120 bp, Artificial Sequence
  ENSG00000286376_12 (sequence is synthesized)
aagtcatatagcacaatttattgttgagacccataggtcatggagcagaaatttataaacatactgagggatatatgtaatgacacaaatgactgcactgcttttcaaagagtgatccac

SEQ ID NO: 1019047 - DNA, 120 bp, Artificial Sequence
  ENSG00000286376_13 (sequence is synthesized)
atgactgcactgcttttcaaagagtgatccacacaaagcaccattgcttataaatacttcactcactgatatggtttggttctatatcccctcgcaaatctcaccttgaattgtaataat

SEQ ID NO: 1019048 - DNA, 86 bp, Artificial Sequence
  ENSG00000286376_14 (sequence is synthesized)
accaggtggagataattgagacatgggggcagtttcccccatgctattctcatgatggtgaggaagttcttagcgttcagcactca

SEQ ID NO: 1019049 - DNA, 73 bp, Artificial Sequence
  ENSG00000286376_15 (sequence is synthesized)
ctctcctgccaccctgtgaagaggtgcctcccaccatgactgtaagtttcctgaggcagaattacccagtctc

SEQ ID NO: 1019050 - DNA, 120 bp, Artificial Sequence
  ENSG00000286376_16 (sequence is synthesized)
acactcaactatctagaatttgttgttttctgattgaaggcacaaggaagggtaaggtacatgcaaaggattacgccagaaacacagagatgaccctggaagatcttcatagtattccta

SEQ ID NO: 1019051 - DNA, 120 bp, Artificial Sequence
  ENSG00000286376_17 (sequence is synthesized)
agaaacctcatgaaaagccctacagttgatggctgcagaggagagtgtgtctctctttagctaagagttgcatgctaaaattccatctatataatctagaggtatttttttctccatttt

SEQ ID NO: 1019052 - DNA, 120 bp, Artificial Sequence
  ENSG00000286376_18 (sequence is synthesized)
ataaaaagaaatctaatatgctatttcagttatctacacagacactggttctgatgaataatgcagtgagacctgaattccttaaagagtagtcagtgccttctggaattagggtttctg

SEQ ID NO: 1019053 - DNA, 120 bp, Artificial Sequence
  ENSG00000286376_19 (sequence is synthesized)
aagggtctccgatggatatctgcattaccttagactatgaaattggcaagtttcactgtcaattcttctctctgtatttccatccacccttccaattactacatcctataacagatatag

SEQ ID NO: 1019054 - DNA, 120 bp, Artificial Sequence
  ENSG00000286376_20 (sequence is synthesized)
cacatagtccattcttacagaacatgtgaaaagaattagttaactaaatgagactgacccctgtccagggaagtggaggatcaaaatacatctgcaggaagctgtagatctagctttgcc

SEQ ID NO: 1019055 - DNA, 120 bp, Artificial Sequence
  ENSG00000286376_21 (sequence is synthesized)
ctccacccctatgctacccttctaccttctcttctccttgtaatgtacataaaagaaggcctgatttgtcacttgggatggttactggacccttctaaagtgtacttaggtgaggtttta

SEQ ID NO: 1019056 - DNA, 120 bp, Artificial Sequence
  ENSG00000286376_22 (sequence is synthesized)
tattccctgaagtttgacatttcctgaatttttattaattctgatgacttggaaattatcacctagtgaaatttgtaaaatcaaagtagtcatgggtctctcttaaataccatctttaaa

SEQ ID NO: 1019057 - DNA, 120 bp, Artificial Sequence
  ENSG00000286376_23 (sequence is synthesized)
atgctggtggagcctggcaagctaatttgcttttctgtatattccttattgcagaacaattgcaattcaatactgggaggacttccagaaggatttcatcaaataacaagcgtgttattc

SEQ ID NO: 1019058 - DNA, 120 bp, Artificial Sequence
  ENSG00000286376_24 (sequence is synthesized)
agagatccataatgatatgttcagacccaagtacagacacttctttggaatgattatagcagaagagaaattcaaaacaaacagctccgtacctgaaaaggtacaacaaggagggatgaa

SEQ ID NO: 1019059 - DNA, 120 bp, Artificial Sequence
  ENSG00000286376_25 (sequence is synthesized)
gaaagatcactgaccagaaataaaattgggagtttagacaattaaattatctggacattttaattcctgaactacgactaggctacaacatgcggactgctgtagatgtcacccaggaac

SEQ ID NO: 1019060 - DNA, 120 bp, Artificial Sequence
  ENSG00000286376_26 (sequence is synthesized)
agaaaataactagcctcgtgagaaagttttgaatgggcaaaagggaaattgaatacaattgttttttgcttgcaccatatagaggcgtattctttctatgtacagtgataggaaactggt

SEQ ID NO: 1019061 - DNA, 120 bp, Artificial Sequence
  ENSG00000286376_27 (sequence is synthesized)
ggtgtttgacatcatccaaaaacagggcccattttttgaatcataaattatcttcatgaacacacccattgccttcaacatacagcctaagtctcatactttctaaaatatctccggtac

SEQ ID NO: 1019062 - DNA, 120 bp, Artificial Sequence
  ENSG00000286377_0 (sequence is synthesized)
gtcttttcacaaaataacaactaccgggaagtgctttctgttctgaattctcaaatgaaaaataaaaccttgggctccagctgaaaggtggaatctgccattcgattcctaacacaggga

SEQ ID NO: 1019063 - DNA, 120 bp, Artificial Sequence
  ENSG00000286377_1 (sequence is synthesized)
gtggagttggagtgagagaacatgaagccagctctacaatttttgcattgtataatgttttccacgaacttggcagaagcccacaaaggaaagacagttggtgcttaggagctagccttg

SEQ ID NO: 1019064 - DNA, 120 bp, Artificial Sequence
  ENSG00000286377_2 (sequence is synthesized)
attttctgcttgggacgggattccagttttgaatgtttcccaagatgtgtttcacgggagagtttattttgtctacagtatccccaaggaagcttgtggttaatgatgtgctcctgcagg

SEQ ID NO: 1019065 - DNA, 120 bp, Artificial Sequence
  ENSG00000286377_3 (sequence is synthesized)
cgcctggcagccaaggggaccagaagaacagaagaggcgccctgattggctcctgggattacagctttattaatgcgctctgacagcctgtctgtcactagcgccaagcggagaacatta

SEQ ID NO: 1019066 - DNA, 120 bp, Artificial Sequence
  ENSG00000286377_4 (sequence is synthesized)
acttgaacctgacagctccaccccccagagaaaatgagggcctaatgtgttataaatcaagctggcttttgaaatcaatattcctaaaaaaatactactggaagaaaacacattcctatt

SEQ ID NO: 1019067 - DNA, 120 bp, Artificial Sequence
  ENSG00000286377_5 (sequence is synthesized)
actcagagtgttgacatatttattaaagtagcataaaggccactgagttagtcactaaaaaatagaaatgaaaatgtgactatcaattgaaacttagacgtttctacctttatgtttctc

SEQ ID NO: 1019068 - DNA, 120 bp, Artificial Sequence
  ENSG00000286377_6 (sequence is synthesized)
ctcaaggttttgaataggcaccatttttggctgactactttgcctaaatcatgcagtgctcaatagacctgaatgtagatagactgtacactaagaaatcagttctcctgaagacatttg

SEQ ID NO: 1019069 - DNA, 120 bp, Artificial Sequence
  ENSG00000286377_7 (sequence is synthesized)
ttctcccaggtgaatgtatgtgtgtgaagtgcaaacgggaggtacagcaaataacagcagaaaaagaatatgtagaaatagttctgacggagagaaagaagtttctttcttcaaaagaaa

SEQ ID NO: 1019070 - DNA, 120 bp, Artificial Sequence
  ENSG00000286377_8 (sequence is synthesized)
ctttatgttttgagataattgtagatttcacatgcatttgtaagaaataatgcagttacccagtttcctccagtggtaacatcttgcaaaactgtagtgcaacatccagaccaggagatt

SEQ ID NO: 1019071 - DNA, 120 bp, Artificial Sequence
  ENSG00000286377_9 (sequence is synthesized)
gacattgataacgtcaagatacgaacatttccgtcaccacaaagatatctcatgtggcccttttataacaacatccattttcctctagcctccaaattacccctgagaatcactaatctt

SEQ ID NO: 1019072 - DNA, 120 bp, Artificial Sequence
  ENSG00000286377_10 (sequence is synthesized)
tctctacttttataattttcttattttaagaatttgggaaattgttagccagtatttcttcaagtacattttcagctcttccctctttcttctctctttctgaaactctgatgacacgaa

SEQ ID NO: 1019073 - DNA, 120 bp, Artificial Sequence
  ENSG00000286377_11 (sequence is synthesized)
tgttagatcttttattatagttccacatgtccctgaggctctattcatgtttttcagtctattttctccgtgttcagatggataatatctattgatttatcctccaattcaatgatttgt

SEQ ID NO: 1019074 - DNA, 120 bp, Artificial Sequence
  ENSG00000286370_0 (sequence is synthesized)
agactctgtgaaagcaggagcagcagcagcaaggactccagaacagcggactgcagctgtcatttagaccctgggcgaaggaagcagagggaaagagaaggggcgaggaggaatgatata

SEQ ID NO: 1019075 - DNA, 120 bp, Artificial Sequence
  ENSG00000286370_1 (sequence is synthesized)
tgcctgggtagaagaaaggagtcccccagagcacaacctttaagaagagccaaaatcactatcaaggaagaactgaagcctcagtcatgtgaaggcccagaagagaaggtgagaatggaa

SEQ ID NO: 1019076 - DNA, 120 bp, Artificial Sequence
  ENSG00000286370_2 (sequence is synthesized)
atgggagtaactaggctgataattgctagaggcaaaacaaaggctaatgagttggaactaaggttactgacattttttattatagattacgctcagcaataatgatggcaggttaaagga

SEQ ID NO: 1019077 - DNA, 120 bp, Artificial Sequence
  ENSG00000286370_3 (sequence is synthesized)
aaacttatagaataatttattttaaacaccttgcagcaaggaattttgtcttttactttttgtaatactaccaagtactaaaagcatccttaaattaataatggccacaatgataatcat

SEQ ID NO: 1019078 - DNA, 120 bp, Artificial Sequence
  ENSG00000286370_4 (sequence is synthesized)
tttaccacaaccttttggtaagcatatattttcaccttttaaaaaaattcatttcaaaaaaaagaaaaggattctcacacattttaactaaaacacacaaagtcacttagctaatttgta

SEQ ID NO: 1019079 - DNA, 120 bp, Artificial Sequence
  ENSG00000286370_5 (sequence is synthesized)
gtgaagatgagattcaaattcaggtccatgctcctacacaacactgcatctgtaaggagtataggtgagacagggttggttaagaaccaacttaacctctctagaccttagtctgtgtat

SEQ ID NO: 1019080 - DNA, 120 bp, Artificial Sequence
  ENSG00000286370_6 (sequence is synthesized)
aaaatgaatctaaattgaatctaacctatggagttattctgaatattcaatgagctaattcatgtaaagcatttattgtagtgtttgatgcataataagtgctataaatagtatctatta

SEQ ID NO: 1019081 - DNA, 120 bp, Artificial Sequence
  ENSG00000286370_7 (sequence is synthesized)
ctattataaggcataccattctggcttccaaatgtttgctctttaaatcaatatctgcatcttttgtcataaatattgatactagctcaatttagataataaaaacactataaaaagaaa

SEQ ID NO: 1019082 - DNA, 120 bp, Artificial Sequence
  ENSG00000286371_0 (sequence is synthesized)
taatgcagataagctctgtggcatcaattcaccctccagaagaaacccaaatagcaacacaggatgaaggtcaaggattaactgatgctaatggaaatgttcccagtgaccgtccagata

SEQ ID NO: 1019083 - DNA, 120 bp, Artificial Sequence
  ENSG00000286371_1 (sequence is synthesized)
aaatattgtatcccagctgatgaggccggcacatgatgacaacactacaagcaccaagaaaattgatgcgatggcctgtcttaagttggcttcctctattggtcttttatctgacaagac

SEQ ID NO: 1019084 - DNA, 120 bp, Artificial Sequence
  ENSG00000286371_2 (sequence is synthesized)
gcatgctacctgatttctgtgagcactcattcattcctgaaagctttctctcagctgttacaagagtgaccctgcttagaggtcagagataaagatgctctgcagtcagaggatgcacgc

SEQ ID NO: 1019085 - DNA, 120 bp, Artificial Sequence
  ENSG00000286371_3 (sequence is synthesized)
ctgactgaactcccacaaaagcatggctgcaaatcccagagaaagaagaaagagaacttacataaaggaggctttctggagaactcgctgtaagagggtcaatgcggaaatatggaatgt

SEQ ID NO: 1019086 - DNA, 120 bp, Artificial Sequence
  ENSG00000286371_4 (sequence is synthesized)
taagctgcctgattgaagagaagaaatcaggagaaggttgaagcagcagccaggtgggagaaaaacccatcttagcactgctggcaaacctggaaacacagtgatccaccaggttcatcg

SEQ ID NO: 1019087 - DNA, 120 bp, Artificial Sequence
  ENSG00000286371_5 (sequence is synthesized)
ctgggtcattgggcaatcccctctgccctggcacctttcactgctctcattcaatcaatgaacatgaccaagtatctattacacgcatcaggtcccatgctaattgggcggtgggaagag

SEQ ID NO: 1019088 - DNA, 120 bp, Artificial Sequence
  ENSG00000286371_6 (sequence is synthesized)
gataagatataaaagacccagttctataaactgtcagctttctgagagctccatattcccagtatctagaacagtagatggcacaccttagcctcaagtcagtatttgctgtttcaatta

SEQ ID NO: 1019089 - DNA, 120 bp, Artificial Sequence
  ENSG00000286371_7 (sequence is synthesized)
ggagttacagattttagttagaaaacaaggctcttctctgctctattgccaatcaggggcgagtttgtatcctcagagggcagcagctgcattcctagtatcatctttgcctcatccgcc

SEQ ID NO: 1019090 - DNA, 120 bp, Artificial Sequence
  ENSG00000286371_8 (sequence is synthesized)
actctggcactgcacaaactgagccccgtgaagcgccgcgttccctctctccctgaagcgacgcccccttccttctcagagggccccctgagctgcgtccctctgccccagagctgtgcc

SEQ ID NO: 1019091 - DNA, 120 bp, Artificial Sequence
  ENSG00000286371_9 (sequence is synthesized)
tggcgtctggctgtcaggaggcaccgcggcccctcccggcagctcccggccgtcctgaggcaggcgccgagcggggtcagcggggagtcggggctccctgggcctgtcactcagcaagac

SEQ ID NO: 1019092 - DNA, 120 bp, Artificial Sequence
  ENSG00000286371_10 (sequence is synthesized)
tgagccagggctccctgacagccctccagaccctaggggataaccgtgtccgtgtctgtctgtgcatcagatcagagggaacgaagcgcgctcccccgcctaattcctccccttccctgg

SEQ ID NO: 1019093 - DNA, 120 bp, Artificial Sequence
  ENSG00000286371_11 (sequence is synthesized)
aatgtccacgagttcctgctaatgctattgtttgcttttgcttatgcacatataagtctttggtacacacacactgttttgttgtggtttttcttttcctttctaaagctaatagtttgt

SEQ ID NO: 1019094 - DNA, 120 bp, Artificial Sequence
  ENSG00000286371_12 (sequence is synthesized)
ggtggggtgaagatacggctttgggtgtggattcaactgggaaaaagaaatgcaagcaggatttagaaaataataaaaccacttaatacatttccagaactgcaattattgctagtgaga

SEQ ID NO: 1019095 - DNA, 120 bp, Artificial Sequence
  ENSG00000286371_13 (sequence is synthesized)
aaatatggatagcaattatttttaagttcagtgaattgaaaagattggaactagaataggatttaagtaaagaagaaattccttctctaaaccaatttctggttgctcaaaattcccagg

SEQ ID NO: 1019096 - DNA, 120 bp, Artificial Sequence
  ENSG00000286371_14 (sequence is synthesized)
ttcccaggataaactaaagtatgaaaaaaatgatgacttcatattatcaaaatatacatagatttctgatttgttttaaatacattttatactagtaaaattcattgatggtagagaatg

SEQ ID NO: 1019097 - DNA, 120 bp, Artificial Sequence
  ENSG00000286371_15 (sequence is synthesized)
tggaccactgcagtccatctccgacacacacatacctcggatgcttgccttgctctgccccacttcacgatttaggaccgaatttttcaggaaggaaagagaagagctctgaaagacttt

SEQ ID NO: 1019098 - DNA, 120 bp, Artificial Sequence
  ENSG00000286371_16 (sequence is synthesized)
taacagaaaataaagggcttctaggatgtctacagacttgtagtttgtcattttctaatcttaatgtttataactaatattttagtatgaattattaatttatctgaggtgaataaaatt

SEQ ID NO: 1019099 - DNA, 120 bp, Artificial Sequence
  ENSG00000286371_17 (sequence is synthesized)
cactgagttcattggtatctcataagatgtaaaactagttcttctgatattctggagaaatgtttattttatctgatatctgtcttctatgagcagatggagtgagccattcatattttt

SEQ ID NO: 1019100 - DNA, 120 bp, Artificial Sequence
  ENSG00000286371_18 (sequence is synthesized)
ttttcattttgaagaagaccgaggtctggaaaagcttcaaaaattgcgggtctatagcaattgattaataattaatagtaagccatgtgacattctagcatgtcacttagtaatcaccat

SEQ ID NO: 1019101 - DNA, 120 bp, Artificial Sequence
  ENSG00000286372_0 (sequence is synthesized)
aggagccaacatcaaaggttaatatcgcagggcctggaggtgagagattctccatggattcttcttgtgaattggaggggccaagtgtctttcatcttctaggctccacataggaggggc

SEQ ID NO: 1019102 - DNA, 120 bp, Artificial Sequence
  ENSG00000286372_1 (sequence is synthesized)
cagctcccccagggaggccatcaagtccaggcccagatgtctcatccctgcagctgacagactctaaacaagctattgggccagagagccctcagaatggggccaagtgagctgcgttac

SEQ ID NO: 1019103 - DNA, 120 bp, Artificial Sequence
  ENSG00000286372_2 (sequence is synthesized)
tgaggcagtcagccctaggtggtgagagaggcccaggccattccctccagctgaaagtagcttctcttttcagcccagtgtgctcttcaagttgtcatttcctggtactttaacatgaaa

SEQ ID NO: 1019104 - DNA, 120 bp, Artificial Sequence
  ENSG00000286372_3 (sequence is synthesized)
gtggcaccatttattttgacaagaagaattaccaacagataaaaagcaaaaaagtgatgtttcctccaaagggaagatagacttcaggaatctgcttgcacccccctggctctgggcacc

SEQ ID NO: 1019105 - DNA, 120 bp, Artificial Sequence
  ENSG00000286372_4 (sequence is synthesized)
tcacctgtgcaattccagaccaggccatctgtcctcaagaggccgctggcctcagagccttctaccccgtcaagaagagcctttctctccccacttatgggggatcatctgcttaaacta

SEQ ID NO: 1019106 - DNA, 120 bp, Artificial Sequence
  ENSG00000286372_5 (sequence is synthesized)
ggccggagtcataatcattcattccagaaggggctgtgattcacatctgagcttcagaaaatggtttagtttgatttaaaggggagatgaaagcaaaataaatgctcagatgctgacaaa

SEQ ID NO: 1019107 - DNA, 120 bp, Artificial Sequence
  ENSG00000286373_0 (sequence is synthesized)
gcttctcccctctgttccagcgctgagacgcaggcctttcctggcgcgaagcgactcgccccggagctcccctgcaccgtcctgggtgtcaggacgcgtcaacccagatgacccgacccg

SEQ ID NO: 1019108 - DNA, 120 bp, Artificial Sequence
  ENSG00000286373_1 (sequence is synthesized)
gagatcctggatcctctgccctcttccccctaccaagtccttaaccggagagggaggagctaccaatgtcctccagacgttctccaaagcccgagctgccgggagaagcttgctcaaggc

SEQ ID NO: 1019109 - DNA, 120 bp, Artificial Sequence
  ENSG00000286373_2 (sequence is synthesized)
gggtgcgcccctcagacgtttgtttgcacgcaggggttttgacgtttcgctaagcaacagcgtttgccagggaatcagggctgtttcgaagagcttgcgtctatttgatgctcccatctt

SEQ ID NO: 1019110 - DNA, 120 bp, Artificial Sequence
  ENSG00000286373_3 (sequence is synthesized)
gaacaaatcgtttccattcgatttgtttaaccaaggcgagggcggactatgttgttacttaaaagttattcttcatccaagctgtcctcagattttcatctaagggtgtcataacacccc

SEQ ID NO: 1019111 - DNA, 120 bp, Artificial Sequence
  ENSG00000286373_4 (sequence is synthesized)
aggtcgttgcgcaaatgttttgtgacaatttagaaaaccagaggggggaaatatccttagagaaaaaatcataaccaacaagaaaattatgttaaatgatgttggtcctttttcatcgga

SEQ ID NO: 1019112 - DNA, 120 bp, Artificial Sequence
  ENSG00000286373_5 (sequence is synthesized)
tggtcccagttgacacatagtcttttacaaaaccagtgactattcacagtcttcaatttatggcacatctcccggtgggggcgaagtgcatgaatgggtcccaccttattcaccagctga

SEQ ID NO: 1019113 - DNA, 120 bp, Artificial Sequence
  ENSG00000286373_6 (sequence is synthesized)
aactctgaacaagccttggggtttcctctcccaaagactgccaggcttcactaagaatcaaaacaaaacaggatactaaatgcctgcgtgttgttaatcaaacacaagacccataaagtg

SEQ ID NO: 1019114 - DNA, 120 bp, Artificial Sequence
  ENSG00000286373_7 (sequence is synthesized)
aatttggggtcatcttgtcctttactggtttcctgattgggaggctcacccttggcttatgatcacatccatttggcagaaagtcagcttatttgacagggttggaaacaatgccatgtg

SEQ ID NO: 1019115 - DNA, 120 bp, Artificial Sequence
  ENSG00000286373_8 (sequence is synthesized)
gttggaaacaatgccatgtgagcagaagagaaattgctttcatccctttttctacctgatggtcttatattatgatatggtttggctgtgcgcccacccaaatctcatcttgaattgtag

SEQ ID NO: 1019116 - DNA, 67 bp, Artificial Sequence
  ENSG00000286373_9 (sequence is synthesized)
atggaaatggttttataagtggtttttccccgctttgctctgcacttctctctcctgccaccatgtg

SEQ ID NO: 1019117 - DNA, 67 bp, Artificial Sequence
  ENSG00000286373_10 (sequence is synthesized)
aggatgtgtttgcttccccttctgccctgattgtaagtttctggaggcctcccaagccatgccaggc

SEQ ID NO: 1019118 - DNA, 62 bp, Artificial Sequence
  ENSG00000286373_11 (sequence is synthesized)
tactaaaaatacagaattagccaggcatgatggcgtgtgcctgtaatgccagggccaaggtc

SEQ ID NO: 1019119 - DNA, 120 bp, Artificial Sequence
  ENSG00000286373_12 (sequence is synthesized)
aataaataaataaataaataaataacctagtctctggtatttcttcatagcagtttgagaatggactaatacatattataatatccttattttcctgatgaagaagttgaggttcagaga

SEQ ID NO: 1019120 - DNA, 120 bp, Artificial Sequence
  ENSG00000286373_13 (sequence is synthesized)
atatccttattttcctgatgaagaagttgaggttcagagaagttaaggtcccatgggtagtaaatgtttaagtcaggcttatatggtaatttatctaattccagagtccatggtcttgac

SEQ ID NO: 1019121 - DNA, 120 bp, Artificial Sequence
  ENSG00000286373_14 (sequence is synthesized)
tgacaaatatactataaactgcctctaatgtttattaaagtttataataattggcagtggctttttaaattatttttgaagagttacctttacatttaaaaaaaataaaatcaaggtaat

SEQ ID NO: 1019122 - DNA, 120 bp, Artificial Sequence
  ENSG00000286373_15 (sequence is synthesized)
aaaagaatgttaagacaagaatctggaaacatgagttctaaccagaacctatcatgaatgaggggaaacctggaaattacttaacttctattctcaattaggtatccatataaaaatttt

SEQ ID NO: 1019123 - DNA, 120 bp, Artificial Sequence
  ENSG00000286373_16 (sequence is synthesized)
attattttattccaaggctcttataaacaactttacagaaaaattaaaaagttatctagtggttcatctgtaccttgtctctacacatatatttttaaaatttgttgtaatcactgtatc

SEQ ID NO: 1019124 - DNA, 120 bp, Artificial Sequence
  ENSG00000281832_0 (sequence is synthesized)
atatctgctttccgcttcatttcgagttcataaatttaaaaagagacagtgagagaaagaaaaagaaaaaaaaaggcaaggcgccgggagcacagtgggtccagggttccatggagaact

SEQ ID NO: 1019125 - DNA, 120 bp, Artificial Sequence
  ENSG00000281832_1 (sequence is synthesized)
gcgcaaagcaagttgccaagaaagcccgctggccaagttcgggacctgtccaccacgctcgcgcgctccgctcagcaggcagattccaaaggcttggggcactctggggtgcgcgccgat

SEQ ID NO: 1019126 - DNA, 120 bp, Artificial Sequence
  ENSG00000281832_2 (sequence is synthesized)
cttctcgcaaaaggcgagtgtgtggggttcctccttccctcctttccatctgggggtctcggggaaagctgcacccagcgccttgggcgcccatgaagaccagtccatctcagctcaagc

SEQ ID NO: 1019127 - DNA, 120 bp, Artificial Sequence
  ENSG00000281832_3 (sequence is synthesized)
ccttgggcgcccatgaagaccagtccatctcagctcaagctcccagcagcagcaacttcggactcagacctctctctttagaacatgagtgcttgtgtgtgcgtgcgtgtgtgtgtgtgt

SEQ ID NO: 1019128 - DNA, 120 bp, Artificial Sequence
  ENSG00000281832_4 (sequence is synthesized)
ctcaggaacgactctcccggctgcccggaacttagagagtttccctttaagccggagatgctgctcggacacccccccgcgtccaacaggaggcgatgacgtctgtagcctcgttgccag

SEQ ID NO: 1019129 - DNA, 120 bp, Artificial Sequence
  ENSG00000281832_5 (sequence is synthesized)
aacagtccccaggctaccgctgccgttcattgacaggagcgggcgctcggacgtcagcagccggacctttggcaaggctgctcccgcggagacggctcccacccccgcacctgccagccc

SEQ ID NO: 1019130 - DNA, 120 bp, Artificial Sequence
  ENSG00000281832_6 (sequence is synthesized)
gcccccccggggggtggtcacgaaatcaaagccaccagaggaggggcccggggaggtgctggggctgggggagggggatgactcggatctgccctctttgtcctggagcaccggagtata

SEQ ID NO: 1019131 - DNA, 120 bp, Artificial Sequence
  ENSG00000281832_7 (sequence is synthesized)
taaatagtgcagtctccagccagactctctcccagtcttgcacgcccccgcagtccccccaacccgacccccgccccttgtcactacgtgtcgggctcgctctgcctggagggaggctgg

SEQ ID NO: 1019132 - DNA, 120 bp, Artificial Sequence
  ENSG00000281832_8 (sequence is synthesized)
cagacattggttctctttcctcttcccattcatacatttctgttggagtcctagggccgccgcgccgggagtcgcaatgaatggatggatgcccgcgcgctgggaccaccaggtccgcag

SEQ ID NO: 1019133 - DNA, 120 bp, Artificial Sequence
  ENSG00000281832_9 (sequence is synthesized)
agatgtcgccggcgctaggggcgctcctcccgcgtggggacaggcgccctcgcctaggcgcagtgtggggggaccccaaaagacccttaagaggccaaaggcctgctctccccgttctcc

SEQ ID NO: 1019134 - DNA, 120 bp, Artificial Sequence
  ENSG00000281832_10 (sequence is synthesized)
ccaacacacaccaggggtcttttctgccccggagaagttgggacgcaaaacgtagggaactgcgctcagtctccgcaccacgaagagtcgagatggggaccgagaccagcacggacggta

SEQ ID NO: 1019135 - DNA, 120 bp, Artificial Sequence
  ENSG00000281832_11 (sequence is synthesized)
gcaacagagaggggagcgcccaagtggcgcaacgttgtggctgaagccaagcctgtcgcctccccctgagtaccgctggcggcccaggaccgtgcgctctcccttcctgagcacccaggg

SEQ ID NO: 1019136 - DNA, 120 bp, Artificial Sequence
  ENSG00000281832_12 (sequence is synthesized)
atgcactgcgcagggaaggagggcacggcgggagggtgcttgcaggggactgctgcgcggattccccatccgcacccggctcgcggggaatccgtgggcttgcactcgccagaaagagct

SEQ ID NO: 1019137 - DNA, 120 bp, Artificial Sequence
  ENSG00000281832_13 (sequence is synthesized)
gctgcaggagcagccggatggtgaggcccgttcccgaccctgggtgggaggaacttaaagggctgagttctgaggcgccaggcacagggcgcagcttcataaatgcacccaaaagcttcc

SEQ ID NO: 1019138 - DNA, 120 bp, Artificial Sequence
  ENSG00000281832_14 (sequence is synthesized)
atggacagacggcacagatgtcgctgaagtgaacctaaggaagtttgctaccccaagacccgggcttcgcgccaggtgacaacagacgtctgggagtgtggtgacacctgcgcagagtcc

SEQ ID NO: 1019139 - DNA, 120 bp, Artificial Sequence
  ENSG00000281832_15 (sequence is synthesized)
ctggtggttcaacctgtccgagaaggttgcaagaagatgccactgtcttacctttctcccctagtgctcatgccccagaaaaggccactgggtcactagatcccaaccccttgtgccatg

SEQ ID NO: 1019140 - DNA, 120 bp, Artificial Sequence
  ENSG00000281832_16 (sequence is synthesized)
agagggaagcctgcacaacggcgttggcactcccccataaatcgtctcctgggtccttcccattacgcacacacataatgtcatttctccagggaaaaataaataacaactttcttgact

SEQ ID NO: 1019141 - DNA, 120 bp, Artificial Sequence
  ENSG00000232891_0 (sequence is synthesized)
gaaacaatgagctggatccttgacttgaatgtgctggcggagcggggtttagcgtttattgagaacctactatgcctaggataattcctgaccaatacaagagagacagtttccatggag

SEQ ID NO: 1019142 - DNA, 120 bp, Artificial Sequence
  ENSG00000232891_1 (sequence is synthesized)
tggagactcagagtgatggatgggctccctttgattggtggtccaggaagcctctaggaggaggaggtggcaacatttaaactgagaccttaatgatattgatgagttcctgttttatca

SEQ ID NO: 1019143 - DNA, 120 bp, Artificial Sequence
  ENSG00000232891_2 (sequence is synthesized)
gatctaagatatctttgaaatatttcaatttttaatgaaatatacagttttaaaatgttccactttaaaatgtaccacaaagaaagaaaaactactgtcaataaaattggcaccatctac

SEQ ID NO: 1019144 - DNA, 120 bp, Artificial Sequence
  ENSG00000239911_0 (sequence is synthesized)
gtcccgctccccgtcgccccacgccgccctcgtcgccgcgcccagacccctgcggcggccgcagccgcttgggactcgctgcgagctggtttcggatccatcccgcctcccggcgtctca

SEQ ID NO: 1019145 - DNA, 120 bp, Artificial Sequence
  ENSG00000239911_1 (sequence is synthesized)
ctgtgtgccctaccctttgaaacacgcccccgcgcccgccctgccgtagaccaggcagcgaggaagcccacagtctccgggggcgctgcgcgcgaagtagcacgtgcttctcgaaacacc

SEQ ID NO: 1019146 - DNA, 120 bp, Artificial Sequence
  ENSG00000239911_2 (sequence is synthesized)
gaaacaccgcagcccccgggtcccgccccgcccggcgcgcgcactcgaacccgcccagagagcggtgcgtggcgctgggtgcgagcagggtctagccacccccaccctcaccccacccca

SEQ ID NO: 1019147 - DNA, 120 bp, Artificial Sequence
  ENSG00000239911_3 (sequence is synthesized)
tgcttttttcaggttcatcaaggtttgcgcagtggatccgcgaatgaagccagcctggaagatccccagtctcgagacagagcctgacaggggcagatgcactggaaggaccctgtctgg

SEQ ID NO: 1019148 - DNA, 120 bp, Artificial Sequence
  ENSG00000239911_4 (sequence is synthesized)
attgtcccactgaatgctcaagatattggttagaagtagaaaaggggagggggtagtatttagcctctgtccccactaaaaattattcccaattgtcatttgtgtcatctgtttagctta

SEQ ID NO: 1019149 - DNA, 120 bp, Artificial Sequence
  ENSG00000239911_5 (sequence is synthesized)
cagttttaatccttgtcaaaatgatcatttgccagggtgcataaaacaccctatttgatgagaactggttttaaaggaaaatggggccatcagaaggaagccggttggtgtgaagagacg

SEQ ID NO: 1019150 - DNA, 120 bp, Artificial Sequence
  ENSG00000239911_6 (sequence is synthesized)
tctgggaagagcccctggcgagggccctcattccactgggtgacccagaaggagaaaaccgcgatggcgcttctcatttgaaatgttttctttatggacagtgtttagcaattgttataa

SEQ ID NO: 1019151 - DNA, 120 bp, Artificial Sequence
  ENSG00000239911_7 (sequence is synthesized)
tgtgtacttttgttgattgatctgtatacatatgtaaaataatttgttctctgagttaattttgttggaacaaagactttagtgcttcctacattaaaacattttactgtattgcctgca

SEQ ID NO: 1019152 - DNA, 120 bp, Artificial Sequence
  ENSG00000245322_0 (sequence is synthesized)
gctgctccgctagcagccgacaaaacacctccccccactcttctaaatcctgtctccgcgcgttcccaaccgtcgccacttcacccccatccctctgtgtaacgggtttttctctcgccg

SEQ ID NO: 1019153 - DNA, 120 bp, Artificial Sequence
  ENSG00000245322_1 (sequence is synthesized)
gcaaaaacccgcggagtcatcgagcgtctctgcgaagtttaccatttcgaattccgctgaagctcaagcaagcaaggcagagaaaaggctaatcggacccacgagaacttgaacatgaaa

SEQ ID NO: 1019154 - DNA, 120 bp, Artificial Sequence
  ENSG00000245322_2 (sequence is synthesized)
caacctatgtgagcattccacttctcttgggcagaatgggactattgtgaagactgcatgagctaagtcatgtgcttttttaactgtaatgcatcataccaagataaaatattattagca

SEQ ID NO: 1019155 - DNA, 120 bp, Artificial Sequence
  ENSG00000245322_3 (sequence is synthesized)
tgaagaatgaatgctggcaatatttcatgactattttcattttacaaaagtgaaaaattatttacactgatttttaaaaagaattaaaaataatttacaaaatttatcctaataaacagc

SEQ ID NO: 1019156 - DNA, 120 bp, Artificial Sequence
  ENSG00000245322_4 (sequence is synthesized)
agacagaacagggaagccagcaggggaagaaaaagatgctgctgctcttgatgcctcaaaaacagcaaggaagaacccaagcaactgatgtacacacccttggaacaaatctgccccaga

SEQ ID NO: 1019157 - DNA, 120 bp, Artificial Sequence
  ENSG00000245322_5 (sequence is synthesized)
agtacaagacacactcttcgaattcatggaataaatgggagctcctggccacagtgggagccatgatctctctcctttacatgtggctgtattcccagagctttcatttccatgtggcac

SEQ ID NO: 1019158 - DNA, 120 bp, Artificial Sequence
  ENSG00000245322_6 (sequence is synthesized)
atttttatgctcattttgggtaccccagtgctcagcatattgttaggcaaagatacgtgaaaagagctggtgtagtgaaggatgaagagaaggcaatgcattggtttagacaagcctccc

SEQ ID NO: 1019159 - DNA, 120 bp, Artificial Sequence
  ENSG00000245322_7 (sequence is synthesized)
ctgaaaaacatgactgcctccatggaagcaggggatgtagaaatgctccttaatgttgctgcaaaatgggggatccaagaagcccaagaacttctggagaatgttatttggactaaaagc

SEQ ID NO: 1019160 - DNA, 120 bp, Artificial Sequence
  ENSG00000245322_8 (sequence is synthesized)
aagctcttgccaactgaaagaaccaggagttcttataaaccataatgtgtgcctgcatgctcttcctggaacatgggatgttctgctctcacttgtccactgtggccttgcaatgctttg

SEQ ID NO: 1019161 - DNA, 120 bp, Artificial Sequence
  ENSG00000245322_9 (sequence is synthesized)
atgctttgtggcattttcaatggaagctccttttacttatagtctcatatgctgctgcagcattaatttgctggttaaaatcctttaaatgaacagtccccaacctttttggcaccaggg

SEQ ID NO: 1019162 - DNA, 120 bp, Artificial Sequence
  ENSG00000245322_10 (sequence is synthesized)
ctacgctgcaggagcgcagttaccagccggctgcgatcacgtgcctgggaggaggagctgagacctcaggggaggggcgcgcggtagcgtcccgggtcccctagcagggctctagagacc

SEQ ID NO: 1019163 - DNA, 120 bp, Artificial Sequence
  ENSG00000245322_11 (sequence is synthesized)
acgtgaagtctcctcggcgagtccccagccaccaacagatcacgacccgctgctcccactttattttcagccgggtcttccacctctccctcactacttatgaaatcctccacggaatag

SEQ ID NO: 1019164 - DNA, 120 bp, Artificial Sequence
  ENSG00000245322_12 (sequence is synthesized)
ttctgtgacagcaaacggtgaagccaagtcacctcactggtcacgaaaccctttttgtctatacttagggagcttctggcgaggcagtattctttaatcaaatcataaaccatatttttt

SEQ ID NO: 1019165 - DNA, 120 bp, Artificial Sequence
  ENSG00000245322_13 (sequence is synthesized)
ggagactacacatcaatgggttgtacctgtagcctggtgtgtaaagctcatttagtgaaacctcagagctattatgtgtcaacttttctacagtaagtattttgccacatgacaaatgtt

SEQ ID NO: 1019166 - DNA, 120 bp, Artificial Sequence
  ENSG00000245322_14 (sequence is synthesized)
cggcaaatgtcgatggagtaactctgacatgattttcaggcagttagagggtccatgcaatgcaatcagttgcaaatgatgaggttaaagtaatggtactgtacacacagtactatcctt

SEQ ID NO: 1019167 - DNA, 120 bp, Artificial Sequence
  ENSG00000245322_15 (sequence is synthesized)
ccaactagtaggttattaacacctatgtacatctccagctgcttggggacagtagtgtctcaatctcatttgcagtgttttagtgtattacattttttaacataattgaatagtttcaat

SEQ ID NO: 1019168 - DNA, 120 bp, Artificial Sequence
  ENSG00000245322_16 (sequence is synthesized)
aggagaattgcttgaacccgggaggcggcggttgtggtgagtcaagattgcgccactgcactcagcctggggaacagagcgagactttctcaacaacaacaacaacaaacatatactctg

SEQ ID NO: 1019169 - DNA, 120 bp, Artificial Sequence
  ENSG00000245322_17 (sequence is synthesized)
atactctgaagtactttagattgggtttcaatttgaaagattttatcgaattagaggacctcccaatttctgtgagataaattctagagaagagcttcccaacaattttgacattgaggt

SEQ ID NO: 1019170 - DNA, 120 bp, Artificial Sequence
  ENSG00000245322_18 (sequence is synthesized)
ttattatttcttggaaccaaggaactcttatgatgtcgtcgatagcaagacttcagccgttttcctactgataatataataatgatatattaagctatgaaacctgatagttaacgatgg

SEQ ID NO: 1019171 - DNA, 120 bp, Artificial Sequence
  ENSG00000245322_19 (sequence is synthesized)
ctccagggaagctttgtgatatataaaaaaccaacattaatgccatctctagtttagataatactctgccagctctttgctatgaagccccataaagggaatttactgttgcctcgctga

SEQ ID NO: 1019172 - DNA, 120 bp, Artificial Sequence
  ENSG00000245322_20 (sequence is synthesized)
atagtggttaggaggatgaactcagaagcaagtacagatggattctgttctgcctcctcctcactgtgtcatcttagttactaatctttctgagcttcgagttcctattctgtgaaaaga

SEQ ID NO: 1019173 - DNA, 120 bp, Artificial Sequence
  ENSG00000245322_21 (sequence is synthesized)
tagtatcatctattttcacatggttgaaagattaaggaaaaaggtatgcaatgtacatagtagcatgtgtttggcacgtagttagccctcagtaaataactgctattattttctacattg

SEQ ID NO: 1019174 - DNA, 120 bp, Artificial Sequence
  ENSG00000245322_22 (sequence is synthesized)
aaccagcttctggacctggagagaggatgaaagggaataggaattgagggaagcggaagggaagaataagggacccctggagagtccctaccaagccagacataacaaacaaaagtcctc

SEQ ID NO: 1019175 - DNA, 120 bp, Artificial Sequence
  ENSG00000245322_23 (sequence is synthesized)
tgttacttatatgttttcctgggatctgagtttgatctcttctggatagaggaatattttatttgggtttcattactgctcacttcagctaaagtttcattcaagccagtgagcattcta

SEQ ID NO: 1019176 - DNA, 120 bp, Artificial Sequence
  ENSG00000245322_24 (sequence is synthesized)
taacgtggtaagtggaaaataacgaagaaacctgtcataccagagattggcttcttggatgtgttagctggcactcacagatccactgaaagagctagactcatcattagcctaatctat

SEQ ID NO: 1019177 - DNA, 120 bp, Artificial Sequence
  ENSG00000245322_25 (sequence is synthesized)
aggtttctatagtattttattacactcactttttgtattatagaaagtcctttataggggtaaaaaggctgttattgttgtcaattaaagggaaaaggataaagtataagacctaacaat

SEQ ID NO: 1019178 - DNA, 120 bp, Artificial Sequence
  ENSG00000245322_26 (sequence is synthesized)
ggataaagtataagacctaacaattattgaccatctgccacatgcaagatattttcttagctgtttaacatatatatatatatttgagactgagtttcgctcttgttgctcaggctggag

SEQ ID NO: 1019179 - DNA, 76 bp, Artificial Sequence
  ENSG00000245322_27 (sequence is synthesized)
gttgctcaggctggagtacaatggcatgatctctactcactgcaacctcagcctctcaggttcaggatgaccatca

SEQ ID NO: 1019180 - DNA, 81 bp, Artificial Sequence
  ENSG00000245322_28 (sequence is synthesized)
gtgatctacctgccctgctctggcctgcttaacaaatattttaacattcactagttataaaagtcttataaggtggatctt

SEQ ID NO: 1019181 - DNA, 120 bp, Artificial Sequence
  ENSG00000245322_29 (sequence is synthesized)
taacattcactagttataaaagtcttataaggtggatcttataactcctattttacagagtgaaaacaggtgtagagaagttgtgatatgtgcaaagtcacagagtgagtgatagagtgg

SEQ ID NO: 1019182 - DNA, 120 bp, Artificial Sequence
  ENSG00000245322_30 (sequence is synthesized)
ggtttttagtgctggcagtctgattctagagtcaacattcttaaccagttctaccaacattactctcccaagtcattaacatctctttcctaacaacaaagatgttctaagaacagataa

SEQ ID NO: 1019183 - DNA, 120 bp, Artificial Sequence
  ENSG00000245322_31 (sequence is synthesized)
ctgggtttattactggcatatggtgaacacttatcttagcaaataactcagccccattttctgactatgatttttttaaggacaaaccacgtagtcctattcttcaaaagtgatgttttt

SEQ ID NO: 1019184 - DNA, 120 bp, Artificial Sequence
  ENSG00000245322_32 (sequence is synthesized)
aaccttaattataattagctgtatttatctcatttagattatagcgcaattttctccttggaatatacatacagaaacacaaattgagggtgacaaaagtgtcaaactggaattcaatat

SEQ ID NO: 1019185 - DNA, 120 bp, Artificial Sequence
  ENSG00000245322_33 (sequence is synthesized)
gatgattaagctgtgtttaaaatatttgtttcccttttgattgccttgtttacactgtatacatatggaatatgactgtaagccttcagcaatcttctctttgtccaacgtgaacacata

SEQ ID NO: 1019186 - DNA, 120 bp, Artificial Sequence
  ENSG00000245322_34 (sequence is synthesized)
aacctttaaagatgtacatgaaatggtcacatgcaattttaaattctttaatgtagaaaatcccaaattcataaactaaattcttcacgtgaacctttggtaatagtatttttatcttct

SEQ ID NO: 1019187 - DNA, 120 bp, Artificial Sequence
  ENSG00000245322_35 (sequence is synthesized)
ctagaagcactttatttttcttacatttttcccagagaaaccagtcttcatttcagtttatgttgttcaagatacaactctggaaattttattctgtgccacaaacacttataaaatact

SEQ ID NO: 1019188 - DNA, 120 bp, Artificial Sequence
  ENSG00000286021_0 (sequence is synthesized)
cacagaaatatctgatttcaaagagatgcttgcattctgtactgatgccatctagaattgtaaatgaccagtgtcacactgctaagtggagaaagcgtgaaagaagaatcccatcagtac

SEQ ID NO: 1019189 - DNA, 120 bp, Artificial Sequence
  ENSG00000286021_1 (sequence is synthesized)
attcacgatagaggaaataagaaacaatgaaagccacaagtaagtcctgagttgatcaacagtattgcacttctccagtgcagtcctacagctccgttatgataatcctccagatgaagc

SEQ ID NO: 1019190 - DNA, 120 bp, Artificial Sequence
  ENSG00000286021_2 (sequence is synthesized)
tatgttcaagactggactagatcttgtgctataaagccacactggaaccatctccaattccccaccttgcttcagttttatattcttgcagatagcctctttgaatccatcagacatgat

SEQ ID NO: 1019191 - DNA, 120 bp, Artificial Sequence
  ENSG00000286021_3 (sequence is synthesized)
tcagctcactgcagcctcaacctcccagacgcaagtgcacctccagccgcagcctcccagagatggggtttcaccatgttctgcaggttggtcttgaacttctaggctcaagtgatccac

SEQ ID NO: 1019192 - DNA, 120 bp, Artificial Sequence
  ENSG00000286021_4 (sequence is synthesized)
ctgcaggttggtcttgaacttctaggctcaagtgatccacgtacttcggctttctgaagtgctgggattacaggtgtgagccgcagctcctggctgtctattaaactctcattcagaatg

SEQ ID NO: 1019193 - DNA, 120 bp, Artificial Sequence
  ENSG00000286021_5 (sequence is synthesized)
tgtaaaatgcactcttgagagccagagattttacttctagggatctattcatagcagcattgaaatagtgaggattagaaataattttaatttctctcagtaatggaagtgtgcgtctct

SEQ ID NO: 1019194 - DNA, 120 bp, Artificial Sequence
  ENSG00000286021_6 (sequence is synthesized)
gctgtaagatagacaatcaataaaaacactgaggtagccttaaatgtactaaggacagttgtccaagacatattcttagtgaatgacttttttaaaatcaaggtttgaaagaataaatat

SEQ ID NO: 1019195 - DNA, 78 bp, Artificial Sequence
  ENSG00000286021_7 (sequence is synthesized)
gggaggccgaggcaggtggatcagaaatatatatttatttatttatactgtgaagggaaggaggcattagagaatggt

SEQ ID NO: 1019196 - DNA, 120 bp, Artificial Sequence
  ENSG00000286021_8 (sequence is synthesized)
ttatttatactgtgaagggaaggaggcattagagaatggtttaaaacttgcattcttctgtaatttttgtgccttatacaatggtaatgtgcttacatattatttatattatttaaaaaa

SEQ ID NO: 1019197 - DNA, 120 bp, Artificial Sequence
  ENSG00000286021_9 (sequence is synthesized)
aagtgtttttttaaaaactgtaaattgtggtaaagaaagcagatagagccttgtagagattactcttgaaaaacctgtatcaacaaagacaatcaaataaattgagttatagctgaggaa

SEQ ID NO: 1019198 - DNA, 120 bp, Artificial Sequence
  ENSG00000286021_10 (sequence is synthesized)
gatggggaagagatggcattggtgattcaagactctttgctatcctcttcaatgcctctttcagtgtaggaagttaaaatcagttatgtaatggaattgaatgaagcaagtgtcagatct

SEQ ID NO: 1019199 - DNA, 120 bp, Artificial Sequence
  ENSG00000286021_11 (sequence is synthesized)
acatctctacaaacactcactttatcagttcagagaataaagagatgaatttaataatgccactggacacttatactctatcggatcctaataatttctcacactaatgaattcttctat

SEQ ID NO: 1019200 - DNA, 120 bp, Artificial Sequence
  ENSG00000286021_12 (sequence is synthesized)
ggtgtaagtctattaccaggagctatatgacaacattaattaagttgtgttttgggaaaatgaaagcaagcaagatgcacatttgcctttctgccaataaacacttaagtacagcaatgt

SEQ ID NO: 1019201 - DNA, 120 bp, Artificial Sequence
  ENSG00000286021_13 (sequence is synthesized)
gcaggaattcctggcacattaatcaacttgatctttttccttcttcttttgttgtatctttcctttctttttgactttcttccttcctttcttctttaatttttagtgatagtttgtact

SEQ ID NO: 1019202 - DNA, 120 bp, Artificial Sequence
  ENSG00000286021_14 (sequence is synthesized)
gagccaagaagtgagtaattgcttactgaattgtgaaagctgggatgatttaactacagctgccattttcaactgccctgagaataccatgtcagaagccagtcaagagtactggatgat

SEQ ID NO: 1019203 - DNA, 120 bp, Artificial Sequence
  ENSG00000286021_15 (sequence is synthesized)
ggaaatctacatggaggagaatgaaagtgtctcaaccaaaatcagcactgactgaaaagtaaggccatctaggatgttccagccccagctaaacttcacctgaatgcatgagtgtaccca

SEQ ID NO: 1019204 - DNA, 120 bp, Artificial Sequence
  ENSG00000286021_16 (sequence is synthesized)
ggagaaatgtcagaagaaccaccaagtaacctacagacaaataaaaaataatcaagtgccattttttttttgtaagcaactgagctttggagatgtttgttatgcagcaatagttagtct

SEQ ID NO: 1019205 - DNA, 120 bp, Artificial Sequence
  ENSG00000286021_17 (sequence is synthesized)
aacatgactgtcattctaaaaatcaatgctaatcattgcaaatgttaataccaataattaatacaaatgacagctttctgacaagagtcgagtatatctccaaaacctaagtttcttaat

SEQ ID NO: 1019206 - DNA, 120 bp, Artificial Sequence
  ENSG00000286021_18 (sequence is synthesized)
gttgaattagagttcttaatgaataaacatatagtcttctaagttagtaaatgtacttcaaatagaaatccgttttttgaaactaactatattgctgttgtgaattaaattgtgtcccca

SEQ ID NO: 1019207 - DNA, 120 bp, Artificial Sequence
  ENSG00000286021_19 (sequence is synthesized)
attgatactgtatttggggataggggactttaggaagggaattaaggttaaatgagattatgtgggtggagttttaatctgataattctggtgaccatcataagaagaggaagaggcacc

SEQ ID NO: 1019208 - DNA, 120 bp, Artificial Sequence
  ENSG00000286021_20 (sequence is synthesized)
agcaatctctctttcttcacaagtacacagagaagaggccatgtgaggacacagtggggaagtaaatatctgcaaattaagaagggaagcctcaccagaagccagccctgacaggccatg

SEQ ID NO: 1019209 - DNA, 120 bp, Artificial Sequence
  ENSG00000286021_21 (sequence is synthesized)
gatcttagagttacagctttcagaactgtgagaaaataaatttctgttattaaagccacccagtttgtggtattttgtcatggtagccctagaagatgaatgcaatcacttatttacttt

SEQ ID NO: 1019210 - DNA, 120 bp, Artificial Sequence
  ENSG00000286021_22 (sequence is synthesized)
actttacatttggattttcatttactcctggagaattaaatagtcatgaagaaggactgagataaaatgttctgctactattgtagttttcttctgctgctttgtatttcctgccaattt

SEQ ID NO: 1019211 - DNA, 120 bp, Artificial Sequence
  ENSG00000286021_23 (sequence is synthesized)
cccccatatatttgatgataagttacggagggcataagagttctttagtacactcttctaattctgattatatacccattgtgacaaaatagcactttcagtaaatgcctttggctttga

SEQ ID NO: 1019212 - DNA, 120 bp, Artificial Sequence
  ENSG00000286021_24 (sequence is synthesized)
agaggaaataagaaacaatgaaagccacaagtttactcgaaggcagcaaaattggccctactcccaaccctgcaacatgcaccatttccataaacaatctacagagatggctgagaaaaa

SEQ ID NO: 1019213 - DNA, 120 bp, Artificial Sequence
  ENSG00000286021_25 (sequence is synthesized)
gaaaaaggggtactctcctttaccccttctccaaagcccgatgaagtaaagagtagaaatcaagagtgtctacaagaattggggattggcattgattctccactgtgtgattactcatgc

SEQ ID NO: 1019214 - DNA, 120 bp, Artificial Sequence
  ENSG00000286021_26 (sequence is synthesized)
tttatggcaatgtgcctatttaaagggcaggtaatgacttagcaagaaggaaggagagagaatgtcaaactcacctgaagtcttaccaattggtgtggcaggtatgtggctgtttcccat

SEQ ID NO: 1019215 - DNA, 120 bp, Artificial Sequence
  ENSG00000286021_27 (sequence is synthesized)
gagtgaatacactataagattattaggctctagctgttttgcttgtatctaatccaggtgacaccagcatttagagactatgaggtgtactgggagctgagataatgaaagaggtagcat

SEQ ID NO: 1019216 - DNA, 120 bp, Artificial Sequence
  ENSG00000286021_28 (sequence is synthesized)
taaagtaatatcccccaaattatggcagatctatggttagaagcctaagaataacatgtgaaaacctcatgtcagagcctgacaatataccagaatttggatacctgccatacagaaggt

SEQ ID NO: 1019217 - DNA, 120 bp, Artificial Sequence
  ENSG00000286021_29 (sequence is synthesized)
accagccgccaaggggtaactgtcagaaaagtgacaacaatcacaagttgggaaaaggacttgtctctttgcccctcactcctctctgtgcccaataatttggatgagctattgcctaca

SEQ ID NO: 1019218 - DNA, 120 bp, Artificial Sequence
  ENSG00000286021_30 (sequence is synthesized)
gaatgaaaggagagttgtagggctatgaatcaaatatgagacaagttttaaatgagaagaaagtaacatttaataagcaaaaatgcccagagaactatggaatcatcccaagaaaggatt

SEQ ID NO: 1019219 - DNA, 120 bp, Artificial Sequence
  ENSG00000286021_31 (sequence is synthesized)
aataaacaaaaattggattcaatagaaaacacatcagagaaaaaagttaatatttttataccatagatgtgagagtccttaatgcactagttacagcatattagtgcattatgtacattc

SEQ ID NO: 1019220 - DNA, 120 bp, Artificial Sequence
  ENSG00000286021_32 (sequence is synthesized)
catgtgactctcttattaccactatacccacaatgcttagaactgggtcctcaataatcgagtatgggtggctaaaggacttttcattttatgtggcagaggataataataaaaaaagaa

SEQ ID NO: 1019221 - DNA, 120 bp, Artificial Sequence
  ENSG00000286021_33 (sequence is synthesized)
cagtgcactcaaagtctccaaagaaatttgcagagaatttcttccagtagccccaagagttctcagcataagtactggaaaaactcactagcatggaggatgcttctctccagtggaatc

SEQ ID NO: 1019222 - DNA, 120 bp, Artificial Sequence
  ENSG00000286021_34 (sequence is synthesized)
aacagtggcctctgctgattcagagacttcagtgttccacagtgaaactagattgtgatgagagcaaatatggctggaaggcaacactgctcaggtggttagagcgtgagttctgtagta

SEQ ID NO: 1019223 - DNA, 120 bp, Artificial Sequence
  ENSG00000286021_35 (sequence is synthesized)
tcaaggagcttttttctcagtgtgtctgtcagtggagaatttgggggaaagatcaaatcaaattgctaaataaaacataaagccccacagagatggaagccagcaatatgtgtatgctgt

SEQ ID NO: 1019224 - DNA, 120 bp, Artificial Sequence
  ENSG00000286021_36 (sequence is synthesized)
ggtttgggtgccccctttaccttccagaatgtctttgaactgcatgttgagctggtttcacctgggtgaaaacatgagggaaaaggaagtaagggaaggatggacagatagtggtagaga

SEQ ID NO: 1019225 - DNA, 120 bp, Artificial Sequence
  ENSG00000286021_37 (sequence is synthesized)
ctgatgaccacttcaagtaagtgtgctatcaggagaataactctcccatgtcttcataggagtcagtgaacagtcacctgttgtatagaatcacccatgggcagtcactggttaccagca

SEQ ID NO: 1019226 - DNA, 120 bp, Artificial Sequence
  ENSG00000286021_38 (sequence is synthesized)
gcagcaccaaccaaccacctgagaattacaccaatggtcagttaggcaaagagacatctgcctccctctcctcttccccaacacttagattttacttatcactgattcttgcatagaaat

SEQ ID NO: 1019227 - DNA, 120 bp, Artificial Sequence
  ENSG00000286021_39 (sequence is synthesized)
ggttctgactggtgaaaacaaagagaaaaatatgttgaaggaagtacctatgaacctaattattattttactcatttttttctccaaagtctattgataaataatgttttcagtgtcaac

SEQ ID NO: 1019228 - DNA, 120 bp, Artificial Sequence
  ENSG00000286021_40 (sequence is synthesized)
tttgactttattttcaatatacaaagtcaaactaaaaactttcgtatttcaggttgaaatttatagtgtaactctttacttttaatggcttccagttgttctattttggtttctggcaga

SEQ ID NO: 1019229 - DNA, 120 bp, Artificial Sequence
  ENSG00000286021_41 (sequence is synthesized)
aatccttttggtatgttacatagaaatatagatagataaaggaaagccaattatcttttctttacagagaaatatcctgaatgctgtaagttgaggggaatggcagggtatgtactggta

SEQ ID NO: 1019230 - DNA, 120 bp, Artificial Sequence
  ENSG00000286021_42 (sequence is synthesized)
tgactggccaatacagaatctagtctagctgagatatggcttttagtaggaagcctcatagggaacatgatggaggaaaatcctttcatttatggtatcaagagattttcattttaatcc

SEQ ID NO: 1019231 - DNA, 120 bp, Artificial Sequence
  ENSG00000286021_43 (sequence is synthesized)
cagctatattttacatcaatgttgtcatgcattctatcttctctgggcttgagatatacaagatgaggatgctgatttagcagaagttcaagcatcctttccaaggtgaacatctatgac

SEQ ID NO: 1019232 - DNA, 120 bp, Artificial Sequence
  ENSG00000286021_44 (sequence is synthesized)
cactcagtgttgagaattacttcagactattattaacactattattaaccaaaggaaggacccccctgattactgatcagttctccagtccattgggaaatccttctaaaggccatttca

SEQ ID NO: 1019233 - DNA, 120 bp, Artificial Sequence
  ENSG00000286021_45 (sequence is synthesized)
tttcagactgaaatgtacaaatgtataaagagtggaaaagacatcaaaactaaaaatactatgttaaactttgttccatataggacaatacatcaaagattaaagttaggttgaaagcaa

SEQ ID NO: 1019234 - DNA, 120 bp, Artificial Sequence
  ENSG00000286021_46 (sequence is synthesized)
aaaaataaaaaacaattggaggaaatggcagtttgatgggaaatgctagtttataggacccgagaccaacaggagacagatccaaaactgacagaaagcactttggataatcgagagatc

SEQ ID NO: 1019235 - DNA, 120 bp, Artificial Sequence
  ENSG00000286021_47 (sequence is synthesized)
cttgagtttgaactagatgcagtgactggatggaccttcaggttggcagccagatttcaaggatctaatgcaagactctaatgccctaaggagttaattttcaaatatccacaacaaact

SEQ ID NO: 1019236 - DNA, 120 bp, Artificial Sequence
  ENSG00000286021_48 (sequence is synthesized)
attacatgagtaggaaataaaatttaattttgtaaagctagtgatattttgaagttgttggttctaggacttagtctattcgtataatacacaaaatttaccaaaatacattagcccaga

SEQ ID NO: 1019237 - DNA, 120 bp, Artificial Sequence
  ENSG00000286021_49 (sequence is synthesized)
attatctcatgtatacctgaaatctaaaactatgtaatttgagtttatttgtcctttgtctattagcgatgatattttcagatgtatactctttaacccaataaatataagtcccatgag

SEQ ID NO: 1019238 - DNA, 120 bp, Artificial Sequence
  ENSG00000286021_50 (sequence is synthesized)
gacatttccttccgcaatatactctggatactgtctcttctcgtactttgccagacagctttctccataatctgttctctctcctattaatctctccattgcactagccccttcctatta

SEQ ID NO: 1019239 - DNA, 120 bp, Artificial Sequence
  ENSG00000286021_51 (sequence is synthesized)
tcatttaaacatttttatgtctccatcatgaaataaaatttctccctttattacattttacctcacagaaacaactacaatgcaatttttttcacacattcatagccaaacatattcaaa

SEQ ID NO: 1019240 - DNA, 120 bp, Artificial Sequence
  ENSG00000286021_52 (sequence is synthesized)
gtgttgtccattcattctgcacccacatctttactatctgcttgtcaatgtattccattctggcttataattccacaattcaagcaaaaatgacttttgataaagtcagaaatgaccttt

SEQ ID NO: 1019241 - DNA, 120 bp, Artificial Sequence
  ENSG00000286021_53 (sequence is synthesized)
atcttgctaaatacgatggacttttgttctaagtaacctcaatttctttcatttaatgtttcttgttggagtccttttgaagcacattttcaaaataattcaagtaagtccaatttatcc

SEQ ID NO: 1019242 - DNA, 120 bp, Artificial Sequence
  ENSG00000286021_54 (sequence is synthesized)
aagtgtgcaattcattttgagttagtatttgtatatgctgtgggataaagcttcaactttatttttttcttgtggctatccagttgtctcagtaccatgtattgaaaacacatttctctt

SEQ ID NO: 1019243 - DNA, 120 bp, Artificial Sequence
  ENSG00000286021_55 (sequence is synthesized)
cccagcattatgttgttttgaaaactttgtcaaagacaactatcataaatgtaaatgtttattttggggctgtcaattcgatttcactgacctgtatgtatttccttaaaatagcattac

SEQ ID NO: 1019244 - DNA, 120 bp, Artificial Sequence
  ENSG00000286021_56 (sequence is synthesized)
agtctctttcttgattactaaagttttgcagtaaattttcaaatcagattatgtagagtcctataactttgttctgttttaaaaaagattattttggctattcttggtttttttcctcat

SEQ ID NO: 1019245 - DNA, 120 bp, Artificial Sequence
  ENSG00000286021_57 (sequence is synthesized)
aaattttagaatcaacttgtcaatttctgcaactaggccctctggatcttgatagcaatcatgttgaatctgtagatctatttggggaatattgccatttaaccaatactaagtcttcta

SEQ ID NO: 1019246 - DNA, 120 bp, Artificial Sequence
  ENSG00000286021_58 (sequence is synthesized)
ggaatatctttttatttatttaagtctttgttttctttcaataatggtttatagcttttactgtataagttatgaacttttttgttaaaatttccctaaatagtttattctttttgatgc

SEQ ID NO: 1019247 - DNA, 120 bp, Artificial Sequence
  ENSG00000286021_59 (sequence is synthesized)
taattctaattgtctttcagtggattatttagaattttctacgtacaagattgcatcatccgaaagtagaaatagatttacaactttattttagtctagttaactttttttattgcctaa

SEQ ID NO: 1019248 - DNA, 120 bp, Artificial Sequence
  ENSG00000286021_60 (sequence is synthesized)
ttatcctcacgagaacgttcagtatagctatgttatgggaaacagcattcattttttcaccaggaagtgtgatgtaaactgtaggatttttataaatgttcgttatcaagttaaggatgt

SEQ ID NO: 1019249 - DNA, 120 bp, Artificial Sequence
  ENSG00000286021_61 (sequence is synthesized)
ttccttctattcctaatttgttgaggtttttttttaaacaacaacaacaacaacaacaacaaaaattaaaaactgttggattttgtcaaatgcttttttgtgtctatggtaataatcatg

SEQ ID NO: 1019250 - DNA, 120 bp, Artificial Sequence
  ENSG00000286021_62 (sequence is synthesized)
tttttgcttttactatattaattctttgtgaaaattgattgatttttaaagtattaaaccaaccatgtaatactgggataaatcccaattggtcatagtatgtacaaatgtttagatgct

SEQ ID NO: 1019251 - DNA, 120 bp, Artificial Sequence
  ENSG00000286021_63 (sequence is synthesized)
ggtggattcgatatttgcatctatatttataaggaatattggtctgtaagtttttccttgtaatgtattctttctggttttattattggattaatactaacctcatagaataaaaaggaa

SEQ ID NO: 1019252 - DNA, 120 bp, Artificial Sequence
  ENSG00000286021_64 (sequence is synthesized)
agaggagacagagccaagaagtgagtaattgcttactgaattgtgaaagctgggatgatttaactacagaagccctacaagccagaagagagttggggccaatatttaacattcttaaag

SEQ ID NO: 1019253 - DNA, 120 bp, Artificial Sequence
  ENSG00000286021_65 (sequence is synthesized)
aatatggaaaggaaaaacctgtaccagccactgcaaaaacataacaaattataaagaccatcgaaactgtgaaaaagctgcatcagctaacaggcaaaataagcagctagcatcataatg

SEQ ID NO: 1019254 - DNA, 120 bp, Artificial Sequence
  ENSG00000286021_66 (sequence is synthesized)
ccgagattcataaagtaagtttttagagacttttatttgtaaaattaaaatacttacattgtattttgctatccgttgatataattattaaaatttaatatgtttacctgtactcagaat

SEQ ID NO: 1019255 - DNA, 120 bp, Artificial Sequence
  ENSG00000286021_67 (sequence is synthesized)
tacaattgatagaaggaagagctattcaacatgaatgccctacaatctcacatttacagaggagtttaaggaagaatacatgcaataaaattgggcttcaggagccactggggcctatga

SEQ ID NO: 1019256 - DNA, 120 bp, Artificial Sequence
  ENSG00000286021_68 (sequence is synthesized)
acagctatccttaataatttgtctttgttctacatatgtggtattttgtttgtgttttgttgggaggaaaaaagctgttcttcacatacaccactgttattatatgaaagattatttaga

SEQ ID NO: 1019257 - DNA, 120 bp, Artificial Sequence
  ENSG00000286021_69 (sequence is synthesized)
tttataagttgcctttcttcagtaacatctctcacaatgattttttttaatcagtaagttcacaggattttaggaaactgtatctgtgcaataggtacaaagagttaggtctaaactctt

SEQ ID NO: 1019258 - DNA, 120 bp, Artificial Sequence
  ENSG00000286021_70 (sequence is synthesized)
ttcatgtgctggctaagtcctcagcaacctctccaatcttttgtccagcccttcctccacaccaaactgtttataggctgtgctgtttccctgtgatattcgttttgatttattgttctc

SEQ ID NO: 1019259 - DNA, 120 bp, Artificial Sequence
  ENSG00000286021_71 (sequence is synthesized)
ttcaccaccttccatccccaacttttttaaggattctcacttattttcaagatccatcacaggtatttccctttctcagccatcttagcctctctcaagtgaactaaagtttccttttat

SEQ ID NO: 1019260 - DNA, 120 bp, Artificial Sequence
  ENSG00000286021_72 (sequence is synthesized)
atttttgccattatattttgttaatgtcagcatcacaggacctgtcacattttattttttcaattatttatgtatggcctctggttgcactgtaagttccatgaatataggagctgtttc

SEQ ID NO: 1019261 - DNA, 120 bp, Artificial Sequence
  ENSG00000286021_73 (sequence is synthesized)
ctgttcattcattttttacagtagtgtttattatgctttttatggctcttaccaaagaatacatataacaaattatcttcctatatttcctttcacctccccttcccagaactatcaaag

SEQ ID NO: 1019262 - DNA, 120 bp, Artificial Sequence
  ENSG00000286021_74 (sequence is synthesized)
tgaataacagatatgtgttgtcacatgattatcaagaaatatttaggcagtgcctactgtgtgtcagggtaaatactgcttttggtgatattcatacagcagttaacaaaacagaatctc

SEQ ID NO: 1019263 - DNA, 120 bp, Artificial Sequence
  ENSG00000286021_75 (sequence is synthesized)
tgtcctctaaaaacctccaatttagtgggataattatgctatgcttgaggatatttcattattaaatcgagtaaaaaacagtttttgcaatatcaagtgtactcaatattaaaattctga

SEQ ID NO: 1019264 - DNA, 120 bp, Artificial Sequence
  ENSG00000286021_76 (sequence is synthesized)
ataacagcataactagtggagcataatttgaagagaatacgaaataattccacattgataaatctaatgtcacaaataaaatgttttaatcaccaaaaccaattgagttatctttttttg

SEQ ID NO: 1019265 - DNA, 120 bp, Artificial Sequence
  ENSG00000286021_77 (sequence is synthesized)
ttttatattaatttgttccaaataatgttatgctttgtttacttcttattgggattatggctttctagtatagcagtttatttttcctggaattgttaattgtctttgattttgctttgt

SEQ ID NO: 1019266 - DNA, 120 bp, Artificial Sequence
  ENSG00000286021_78 (sequence is synthesized)
ttcttaattgttgatataacaaaaacaattatctccaacatatcactcagttgacttactgctcattgatagtaattgttaaaataacaatttgagacaaacttcttccgcttcaagaag

SEQ ID NO: 1019267 - DNA, 120 bp, Artificial Sequence
  ENSG00000286021_79 (sequence is synthesized)
tttaaatgactattggctgaattattaaatgcagataattggttacagtgaaaaaaaaaaagtttgtgggaaaaaaaactgcgtagctggattcctgtgatcccacatcatcccaaccct

SEQ ID NO: 1019268 - DNA, 120 bp, Artificial Sequence
  ENSG00000286021_80 (sequence is synthesized)
gtaagttcagggtccaggccaatataaacatgagacagaatataataatgcagtatctgcctcagaatctaggcagcaagacccacagcactttgccccttgagtgaccactgcattact

SEQ ID NO: 1019269 - DNA, 120 bp, Artificial Sequence
  ENSG00000286021_81 (sequence is synthesized)
tcattggatccccagtccttcttgataccagagtgagtaggagttatttaattccagtgctgactactagccttctctagtcaaagctgaccctctgttgcagacaattcacctctaatc

SEQ ID NO: 1019270 - DNA, 120 bp, Artificial Sequence
  ENSG00000286021_82 (sequence is synthesized)
cctcatttcagagtcttctctctccctattgttatgagtgccacttacagtcaggtttctgctttaatcactgctttatattctgacttaagtcagttgccagcttctaccgtatcccag

SEQ ID NO: 1019271 - DNA, 120 bp, Artificial Sequence
  ENSG00000286021_83 (sequence is synthesized)
tggtgattgtacacttaagtagatttcttagagtcccataattatgtaaagacgcccctcacctaaatcccaatccaaaggccaaggccccattatccatcatcagcagtttcatccaca

SEQ ID NO: 1019272 - DNA, 120 bp, Artificial Sequence
  ENSG00000286021_84 (sequence is synthesized)
caattttatcttattacctagaattctgaatttgcacatcggctttcccatcctgttgctctttttggagctgctttctatgcagaattcttgctgtcttgctcttctgatggaatctcc

SEQ ID NO: 1019273 - DNA, 120 bp, Artificial Sequence
  ENSG00000286021_85 (sequence is synthesized)
acctatggacagggctgatgggcacagtaacctaaatcttccttagcttggtataaataaattattacatttgccaggttgtcctgagttgtaataataagtcattcattgcacctatac

SEQ ID NO: 1019274 - DNA, 120 bp, Artificial Sequence
  ENSG00000286021_86 (sequence is synthesized)
gagcaactaacatcgcttttcatttttaatctatgtgaacatgatctgacaagaatattaaatattcagaccctaaattttcaaatgataaaccagtgggaaagttgttactagaatttc

SEQ ID NO: 1019275 - DNA, 120 bp, Artificial Sequence
  ENSG00000286021_87 (sequence is synthesized)
taattttaaaaggaatgttccatcatattatttttgaaatatgtaagtaaaaaaaactaaaatgcactcattatcatagtctttaaaatgatgtgtaaagaactgaaagtctccctttta

SEQ ID NO: 1019276 - DNA, 120 bp, Artificial Sequence
  ENSG00000286021_88 (sequence is synthesized)
ctaattctattgtttagagaaaattattgttagtatttattgagccctaccatgttccagaaactgttctaggccctgaggctagagaatgaccagaaaaaattaggtgccttcacagac

SEQ ID NO: 1019277 - DNA, 120 bp, Artificial Sequence
  ENSG00000286021_89 (sequence is synthesized)
cttatattttgatgaggaatacatacaagcaaagggaaattaagaaaaataaaagataaatgataaggagaaaaataacattaggttagatacaggagctgttgggggagaacatactga

SEQ ID NO: 1019278 - DNA, 120 bp, Artificial Sequence
  ENSG00000286021_90 (sequence is synthesized)
aatattggattcagtggccagggaaaatgtcacagaagaatcgatcagaccatccatgcaaatctctggcagagaaaattccaagcaaatggaatggtaagagcaaaactctgagttgga

SEQ ID NO: 1019279 - DNA, 120 bp, Artificial Sequence
  ENSG00000286021_91 (sequence is synthesized)
agtctgattagcatatatgaggacagcaaggagacttgtgtggataaaataaagggaaaggaaagaaaagaaagtgacagaattgctcggtgggtatggggtggaggagaaccaaggatc

SEQ ID NO: 1019280 - DNA, 120 bp, Artificial Sequence
  ENSG00000286021_92 (sequence is synthesized)
catatcataataagtacagccactcattgcttaagaacagtgatatattctaaatgtgtcgttaggcaatgatgtcgttatgcaattactattatattcttgtgaaatcatagagtgtac

SEQ ID NO: 1019281 - DNA, 90 bp, Artificial Sequence
  ENSG00000286021_93 (sequence is synthesized)
tgcaattactattatattcttgtgaaatcatagagtgtacttacacaaatatactatagcctattcctctcacttaatactgtagacaat

SEQ ID NO: 1019282 - DNA, 120 bp, Artificial Sequence
  ENSG00000286021_94 (sequence is synthesized)
ttacatttttcttctctgagtctctattttcgttttgtatgtatataatcatctaaccatcacaacaatcaagacataaagtatttccacctccccctcaaaaattctttcatgttcctt

SEQ ID NO: 1019283 - DNA, 120 bp, Artificial Sequence
  ENSG00000286021_95 (sequence is synthesized)
tgtcatcaatcctctgctgccatctccgcccctggaaagtactgatttgatttcagttaccataggtttacctttcccgaatatgacataaggaatgaagtctgttgagtctgacttcat

SEQ ID NO: 1019284 - DNA, 120 bp, Artificial Sequence
  ENSG00000286021_96 (sequence is synthesized)
tcacttagcataattctatgtagattcatctgtgtttttgtgtatagtagtagtttttctttgttactgagaagcatatacatacatataacacaatttgtttattcctcatttggtgaa

SEQ ID NO: 1019285 - DNA, 120 bp, Artificial Sequence
  ENSG00000286021_97 (sequence is synthesized)
caatgggttatttccaattttcggatattatgaagaaatatctaaaaaatcattcacatacagttattttcatgactatacatattctttctatttaaaaaaatagcttggagtgggatt

SEQ ID NO: 1019286 - DNA, 120 bp, Artificial Sequence
  ENSG00000286021_98 (sequence is synthesized)
gcaggactatctgatatatatgtaggtttaactttataaaaaactgccaagctgttttccaaaatatctgtactaccttgcatttctaccagcaatgttgagagttccagttacttttta

SEQ ID NO: 1019287 - DNA, 120 bp, Artificial Sequence
  ENSG00000286021_99 (sequence is synthesized)
tgttcaacagcagttgtatttgttttagttttagccattatagtacatatgtagtagtatctcactttggaatttatatgtatttatctaatgattagttatgttgagaatgttcttatg

SEQ ID NO: 1019288 - DNA, 120 bp, Artificial Sequence
  ENSG00000283064_0 (sequence is synthesized)
atatacatacatacatacactgaatcctcacacgaagagccctacaggcgtgagaacagtaagggagatgcaagaaaggtctccttggagttgggaggcgtatttacagctactagagaa

SEQ ID NO: 1019289 - DNA, 120 bp, Artificial Sequence
  ENSG00000283064_1 (sequence is synthesized)
gggggaagtgccagctccccgagaagaaagcaggaggatgctgagagactaaagctgaaattttctgcctgcttcctcactcttttcgttggtttcagccgtctgaaaaacccttgtgag

SEQ ID NO: 1019290 - DNA, 120 bp, Artificial Sequence
  ENSG00000283064_2 (sequence is synthesized)
cttgtgagaggagcaaaaaggtcaagggaagattgttgccttgctctcagtcttcaaaattttcgatcctccgttttttttgttttgagacgcagtctcgctctgtcgcctaggctggag

SEQ ID NO: 1019291 - DNA, 71 bp, Artificial Sequence
  ENSG00000283064_3 (sequence is synthesized)
ctcgctctgtcgcctaggctggagtgcagcggcgcgatctcggtcactgcaacctccgcctccctggttct

SEQ ID NO: 1019292 - DNA, 120 bp, Artificial Sequence
  ENSG00000283064_4 (sequence is synthesized)
gtcctctgtttttaaactgtaaaggactccagcggattgttcgaagtctccgatatcccgcgatctggtggccgcagaagaaagaggccgagtcggcggggactgggaaccaccagttag

SEQ ID NO: 1019293 - DNA, 120 bp, Artificial Sequence
  ENSG00000283064_5 (sequence is synthesized)
ccggacgcgcgcgccgggccgacgttaaacagaaaacagttgtttggttttgaagataatcagttacccctctagagaggtctaacgggcaaggaactgaggcctccacccaaaagtcgg

SEQ ID NO: 1019294 - DNA, 120 bp, Artificial Sequence
  ENSG00000283064_6 (sequence is synthesized)
cttgaacttgccagatatgcgagtgtgccaccttggaagggaatcctccagctacagtcaaggattcggatgattgcagcctatgtttacagcttgacttcaacctcaaggaagacccgg

SEQ ID NO: 1019295 - DNA, 120 bp, Artificial Sequence
  ENSG00000283064_7 (sequence is synthesized)
agccataaccacctagctaaatcacttctggattcccgactcacagaaattagttttgggataatttgttacacggcaatagataacataatagacatggggagccccacagttaagctt

SEQ ID NO: 1019296 - DNA, 86 bp, Artificial Sequence
  ENSG00000283064_8 (sequence is synthesized)
agataacataatagacatggggagccccacagttaagcttatagagctaccataatttttataatgaaacttgataagacaattgc

SEQ ID NO: 1019297 - DNA, 63 bp, Artificial Sequence
  ENSG00000283064_9 (sequence is synthesized)
tcttttttcaaaaagacactagtcaattcgagtctgtttttttttttttttgagacagagtct

SEQ ID NO: 1019298 - DNA, 120 bp, Artificial Sequence
  ENSG00000222022_0 (sequence is synthesized)
gacagaaaactacaccttggagactgcacacaatttccttctactgctgttttgaaaggtgaccctgtttgtagcacgttgttacagcagccctagcaaactaacacagagagtgtgtgt

SEQ ID NO: 1019299 - DNA, 120 bp, Artificial Sequence
  ENSG00000222022_1 (sequence is synthesized)
gcccactgctgcccaacatgctggccaatgggacaggagcttgacggcctcagctcagtcttggaaaataacgggagcctccagttcctgagcgatctgttatcactgcagatcggattt

SEQ ID NO: 1019300 - DNA, 120 bp, Artificial Sequence
  ENSG00000222022_2 (sequence is synthesized)
tctccgcgggtctgcaatgagatcctcgaggtccacgcctgcttcattttggcgtcacctccacttcctagggcagggcttccccacacaatagcccctcagtgcacatttgttgagtaa

SEQ ID NO: 1019301 - DNA, 120 bp, Artificial Sequence
  ENSG00000222022_3 (sequence is synthesized)
gtgaaggaatgaaggagttgagatgactttgaagctaaaatgagtagacatctgactttgtgcctaagagaaaattcttcctaaggctaagattgttaaataaaggaactggtccaccca

SEQ ID NO: 1019302 - DNA, 120 bp, Artificial Sequence
  ENSG00000226722_0 (sequence is synthesized)
aagctggccaccccagccagcagtggtaaccggtttgggtcctttttcgcaatgtggagtcttcgtccttttgctcttcccaaaaaaccttgctgcctcttactttttgggtctgtgcca

SEQ ID NO: 1019303 - DNA, 120 bp, Artificial Sequence
  ENSG00000226722_1 (sequence is synthesized)
taagagctgtaacactcaccgtgaaggtccgtggcttcattgatgaagtcagtgagaatcatgaagtcagccagagtactggtaggaaccaaccccagacacaccagcactttggtaggc

SEQ ID NO: 1019304 - DNA, 87 bp, Artificial Sequence
  ENSG00000226722_2 (sequence is synthesized)
actaagatagtgaaaccccgtctccactaaaaatgtaaaagttagccaggcatagggacggggacctgtaatctcaactacagggga

SEQ ID NO: 1019305 - DNA, 84 bp, Artificial Sequence
  ENSG00000226722_3 (sequence is synthesized)
tagtgaaaccccgtctccactaaaaatgtaaaagttagccaggcatagggacggggacctgtaatctcaactacacgccagagg

SEQ ID NO: 1019306 - DNA, 120 bp, Artificial Sequence
  ENSG00000226722_4 (sequence is synthesized)
gcgacagagtgagactccgtctttgaataaataaataaagtggactggagcgctgtgctttgctgctgtccatgatctcaatggctactttctaggaaggttactacacatttttcattg

SEQ ID NO: 1019307 - DNA, 120 bp, Artificial Sequence
  ENSG00000226722_5 (sequence is synthesized)
aattattataccactatttcaaaaaaagacatgcagaggggaaatatttctatttctggcccatttttctctatccccagagtccggagctggctctcctttaccagagtcagatcatgg

SEQ ID NO: 1019308 - DNA, 120 bp, Artificial Sequence
  ENSG00000226722_6 (sequence is synthesized)
tcatcagacacgtcccattctcactcaacccaggggcaacagagtgctgaccacaaagcacgtgcttaatgagtgatgagtgacccaaaaaacaaatcagaagatgggcaaaaattcatc

SEQ ID NO: 1019309 - DNA, 120 bp, Artificial Sequence
  ENSG00000226722_7 (sequence is synthesized)
gcaagggtcaggggacaccactgcagaagaatcattgtcaaatcatcgcataggaaaacccagcagcctcagaggggctcctgcaggccaagctcatgtacagtgggcctgtgctcttcc

SEQ ID NO: 1019310 - DNA, 120 bp, Artificial Sequence
  ENSG00000226722_8 (sequence is synthesized)
ttagcagaagggcgtggccagcccttgcccactgtccttacggcgggcttcaacctgggctcaacctgcactctcttcccatctgcagccctggagggaatcgactgccagtttaaggag

SEQ ID NO: 1019311 - DNA, 120 bp, Artificial Sequence
  ENSG00000226722_9 (sequence is synthesized)
tcattgtccagttcagactccagaatacgaaacgtagaaactgacaggaaatgaccaagtataaattgcaacttgtaaagaatcatcttaaatcctggcactgcgttcaagggggagttt

SEQ ID NO: 1019312 - DNA, 120 bp, Artificial Sequence
  ENSG00000226722_10 (sequence is synthesized)
gagcaaggaatgttgctaaaacggctaaaaccaggaactcagaatatcgttctacaatagaacctaaaaactgtttccaacccatcacgacatcaccctgaaaaatgagtgagcagtcac

SEQ ID NO: 1019313 - DNA, 120 bp, Artificial Sequence
  ENSG00000226722_11 (sequence is synthesized)
tgaggcttcccaagtttgaaaattccacaagactgagagcaaatgttttgttgaaactgaagtcaagatgaagtcagctgactctcaaacctcaggtgaagtgactcagggcccacaccc

SEQ ID NO: 1019314 - DNA, 120 bp, Artificial Sequence
  ENSG00000226722_12 (sequence is synthesized)
cggttctgaggcagggacacattttacttgcagcaccctgcagctttggatgaggctgcaacccgggtgaatcctggccctgctatcacgtgggcagccactgcatcctccggaggctgt

SEQ ID NO: 1019315 - DNA, 120 bp, Artificial Sequence
  ENSG00000226722_13 (sequence is synthesized)
ggatgggagtcaccatgctgggaggtctggagtaagatctgtgccatctgccttgcccaatcctgtaccagtgcctgtgtttcaaaatctcaaaataaaagtgattattcttgcaacaca

SEQ ID NO: 1019316 - DNA, 120 bp, Artificial Sequence
  ENSG00000226722_14 (sequence is synthesized)
agacagcaggaggggcttgccagtgcacctcacaagagctcgctgctctgcgtcagtgctgccaaggagctccttcagggttgagagatgagagagccaagtccgtgattactagatctg

SEQ ID NO: 1019317 - DNA, 120 bp, Artificial Sequence
  ENSG00000231052_0 (sequence is synthesized)
tcctcagtttcactttaaaataaaataaataggttagattttcaagtgttattaagttgcttacacaaatttaaagtcatgagcatgactttaggatctgtgctttttatgtcaagtgct

SEQ ID NO: 1019318 - DNA, 120 bp, Artificial Sequence
  ENSG00000257940_0 (sequence is synthesized)
atatgtctgaaatgtcacagcattctttgtagccactataaaggccactgtccagatgactttgatgtgtggcatttccttctcaacaccaagtttctggcatcactggaccagaaataa

SEQ ID NO: 1019319 - DNA, 81 bp, Artificial Sequence
  ENSG00000257940_1 (sequence is synthesized)
tctcaacaccaagtttctggcatcactggaccagaaataatcatggagacatccacatcagctcctcagcagctaagtctc

SEQ ID NO: 1019320 - DNA, 120 bp, Artificial Sequence
  ENSG00000257940_2 (sequence is synthesized)
ctgtgcaagactaatcgcaaagtcccatgcaatgcaaaggggctaggaaatgtagtttccctaactacaaaaaggtgaagagaactggtgacattgaattctaataataataatgtttac

SEQ ID NO: 1019321 - DNA, 120 bp, Artificial Sequence
  ENSG00000257940_3 (sequence is synthesized)
ctcaaaactccatcaaaataagacaagtttaacttgaaactgcacctgtctgtactgggttgaataatattcctcaaaatttatgtctaccaggaacttcagtgtaggatctttctggga

SEQ ID NO: 1019322 - DNA, 120 bp, Artificial Sequence
  ENSG00000257947_0 (sequence is synthesized)
aactgttgtaaaacatcacacaattctattgctctgaaaatattaatatgatcctccaggatacaaatgcaccttcactgaaataaattatgaactaaaagtattcttgattattttatc

SEQ ID NO: 1019323 - DNA, 120 bp, Artificial Sequence
  ENSG00000257947_1 (sequence is synthesized)
ttacaaagtgaagagactgtatattttatatttatattttccatgcacagtggtctgttcttccattatcttttcttatgagaggcataatgacaaataagtccaaagaatgtgtagcat

SEQ ID NO: 1019324 - DNA, 79 bp, Artificial Sequence
  ENSG00000257947_2 (sequence is synthesized)
ggcattatcttgctttaaaggtgatgaaaataacaaatgaagaagttatttcgttttttaaaaacaattctgtaaggaa

SEQ ID NO: 1019325 - DNA, 66 bp, Artificial Sequence
  ENSG00000257947_3 (sequence is synthesized)
tgtgtctttattaaaaattattggattatgggtggagaaaatacatacaaatggccaacagataga

SEQ ID NO: 1019326 - DNA, 120 bp, Artificial Sequence
  ENSG00000257948_0 (sequence is synthesized)
ccgccgccccgagggctccggaagcagcgggtgctcggcccacgtcgcctgcgaggccccgcactgggagcagtcgaaggaggagtctttattatttctatttcacctatgatgaatatg

SEQ ID NO: 1019327 - DNA, 120 bp, Artificial Sequence
  ENSG00000257948_1 (sequence is synthesized)
atcctcagtcggccaaggtcacaaagcttttaagagtgtatgtgaaagcttgcgtacaaaaagaaggggcaacaactatacaggaaggagaacagatcaaatatgatatcaggaaataca

SEQ ID NO: 1019328 - DNA, 120 bp, Artificial Sequence
  ENSG00000257948_2 (sequence is synthesized)
gaagactaaatatacccattgttcctgctgcgaaaaagatggaatatgattaagctctcataccacccaggtccacaccagactcagctcacccaggaatgagtcactgctctgatggac

SEQ ID NO: 1019329 - DNA, 120 bp, Artificial Sequence
  ENSG00000257948_3 (sequence is synthesized)
cctgggctgagccaaagcagtgattaaatagcttagagctttggagctgaagggaacctctgcactaattctccttcatgcttaaacgaaagctgattctggaagatatccagtgatggc

SEQ ID NO: 1019330 - DNA, 120 bp, Artificial Sequence
  ENSG00000257948_4 (sequence is synthesized)
tgggatttaggaggatggtcttctgcaaaccaaccacaggaactgatgccaacaggctcttcactgagcagatgaagtgcgggctggggagctcttcggctaatttgttttccatgtata

SEQ ID NO: 1019331 - DNA, 120 bp, Artificial Sequence
  ENSG00000257948_5 (sequence is synthesized)
gtgaatgttttcaaacataaattattaattgtactttaaaagttgactgtataaaatgaattttcagttaatctacactccaaatggtctgcaacaaataaacaactaaaataccaaaca

SEQ ID NO: 1019332 - DNA, 120 bp, Artificial Sequence
  ENSG00000257948_6 (sequence is synthesized)
catagatatccacgcaccgatgttcagatatattaaatatgtgagaaggacttgattcaatccatcatcactgtgaaacactgctcaaagtgaatacatttgggagagttatgaggacaa

SEQ ID NO: 1019333 - DNA, 120 bp, Artificial Sequence
  ENSG00000257948_7 (sequence is synthesized)
atggatcctggacttctgtgaaatcttccactcaagaattctacccaggaggattagagatggctttatctctgttatgtatgtagagattcctattgttgggtaaattttctagtctgt

SEQ ID NO: 1019334 - DNA, 120 bp, Artificial Sequence
  ENSG00000257948_8 (sequence is synthesized)
tttatgccagatccttgtctctcaatttaccactctaatagtattttctcattcagcatacatttaagaggaaaatgatgtatatttgcatatattaaattactgtcatcctttcttaga

SEQ ID NO: 1019335 - DNA, 120 bp, Artificial Sequence
  ENSG00000257948_9 (sequence is synthesized)
acgcaccgcacgcccgggttacccgtagatgtccaagcaccgcacgcccgggttacccgtagatgtccaagcaccgcacgcccgggttacctgtagatgtccatgcaccgtacgtccggg

SEQ ID NO: 1019336 - DNA, 120 bp, Artificial Sequence
  ENSG00000257948_10 (sequence is synthesized)
ttatccgtagatgtccatgcaccacatgtccagattatccatagatatccatgcactgcatgcccaagttactcgtagatatccatgcactgcatgtccaggttaccggtagatatccat

SEQ ID NO: 1019337 - DNA, 120 bp, Artificial Sequence
  ENSG00000257948_11 (sequence is synthesized)
ttttcattttaaaaacaagtaatttaggcctttcaaatagcatccaaaacaaattaaggattgcaaaacttgaatttcaacgtaagccttgaaaaaatgtgaggttcaatagttatctgg

SEQ ID NO: 1019338 - DNA, 120 bp, Artificial Sequence
  ENSG00000257948_12 (sequence is synthesized)
ttttaatatgtctttttggtttctctgttgactgatatattcctgcctaaaattttgatccaaatttaatatctcttgttacacaagatttatgtaaaaagtaaattcagttgctttcaa

SEQ ID NO: 1019339 - DNA, 120 bp, Artificial Sequence
  ENSG00000257948_13 (sequence is synthesized)
attcattttgtgtctcagtgaaaacagaatttactaattgcaaatcttctggaaagcattgttttttcctgcctctaattgtacctttaaaacttcagtccataatttattcttttaaag

SEQ ID NO: 1019340 - DNA, 120 bp, Artificial Sequence
  ENSG00000257948_14 (sequence is synthesized)
aaaagtacaatttatagtatagttgttaagattgtttagtaaagcaaatatgttggtaaaataagcaactttttaaaaatctgaaattatcaccaagatgaaattacagaatttataaaa

SEQ ID NO: 1019341 - DNA, 120 bp, Artificial Sequence
  ENSG00000255893_0 (sequence is synthesized)
aaaacaaagaaggttttcacagattggaagaaagaatctgaatttggagatgacttggtcatgcaaaatctttcaacaaggatattgtgatcacttctaggtcacaaattacagtcagcc

SEQ ID NO: 1019342 - DNA, 120 bp, Artificial Sequence
  ENSG00000255893_1 (sequence is synthesized)
taccagcatcatcctcccttcttcttccgggaaagaaccagcactcaatgaaggcacaatggcatcatgttgtatttgggaattattctgcttttctttagtagttgtgataatctcata

SEQ ID NO: 1019343 - DNA, 120 bp, Artificial Sequence
  ENSG00000255893_2 (sequence is synthesized)
ctgttccttgaattcactgaacacattcccactttagcaccatctgctcttctactgcttaggactttctctctccgcgtactgatgcttcatctcagttctctgctcatttgatgctag

SEQ ID NO: 1019344 - DNA, 120 bp, Artificial Sequence
  ENSG00000255893_3 (sequence is synthesized)
tcagagaggtcttcctgactaccctgtgtatgtagagaggagtatggcacttctatgtcacttttccctttatttttctttacagcacctatcactaactgacaagttatacatgtgcat

SEQ ID NO: 1019345 - DNA, 120 bp, Artificial Sequence
  ENSG00000254760_0 (sequence is synthesized)
tgtttactcatgtaacctccagaggtatactgcgttgatcacgaccttcactctttcggcctgcaacacctcccctcttcctgggtccaggccccagaccccgccacgcctcctcttaac

SEQ ID NO: 1019346 - DNA, 120 bp, Artificial Sequence
  ENSG00000254760_1 (sequence is synthesized)
ctacatgatcagggccaggcagaggaaaagaagagccgtgatgccgattcccagaaacgctccgttggagaatgccgttgagatgagtcccttcttatctgcacacggagagggcaagat

SEQ ID NO: 1019347 - DNA, 120 bp, Artificial Sequence
  ENSG00000254760_2 (sequence is synthesized)
ctgtgtccctccaagctcctgctccaaccacaggaccctactctttgccccagtcagcttctcctccaagaaccttggcatccaggcggccccctaacctggcagctgcaggatggatcc

SEQ ID NO: 1019348 - DNA, 120 bp, Artificial Sequence
  ENSG00000254760_3 (sequence is synthesized)
actctgggccccatggacgttccaggcctcacagcggagcctgaggccggagctgagccctccatggaggctcagggagctgttggcccagggcccggctgagctgggggtgacctcgaa

SEQ ID NO: 1019349 - DNA, 120 bp, Artificial Sequence
  ENSG00000254762_0 (sequence is synthesized)
gggaaactcactcaaggtcaaaaactttgtgaggagcagagctcataagagcccgcggtctccagaaccccacaacaacatctgaaaatatgagagcagccgcctcacccgcaacagggg

SEQ ID NO: 1019350 - DNA, 80 bp, Artificial Sequence
  ENSG00000254762_1 (sequence is synthesized)
cccctcgcgagaagctgcaggcgtggggggaggcgaggcaggatggctcggtgggcggtgcccggggcggggtcggccgt

SEQ ID NO: 1019351 - DNA, 120 bp, Artificial Sequence
  ENSG00000253388_0 (sequence is synthesized)
gtgttccctgccccttcagctggatggagacatttggagggatgccctgccctagcccacctcactctcaccatgtcaacaggacttctatggaaatatgcgtatgatgagaagcagatc

SEQ ID NO: 1019352 - DNA, 120 bp, Artificial Sequence
  ENSG00000254768_0 (sequence is synthesized)
gtagatgcggttgagtccttttcctggaagtcggtcagctgaaaaacaatgtaaattcccggttttgaagacttattgctctcaaatctgatggcttttaaacggaggggccggaatatc

SEQ ID NO: 1019353 - DNA, 120 bp, Artificial Sequence
  ENSG00000254768_1 (sequence is synthesized)
acagaagccttgggaacagcaaagtcaaaagaatggtacttttaaaaatggtgtctttgctgtaaggagcagagcatattcaaaactcatgggagcatctcaggtctcaggccaaatcat

SEQ ID NO: 1019354 - DNA, 120 bp, Artificial Sequence
  ENSG00000254768_2 (sequence is synthesized)
tgtttggaatttggcattatttctatagagttttgttctccttccttatacatgtcatccatatatttatccattctttcctttattttactttgatcaaagtatgagtgttttgtctga

SEQ ID NO: 1019355 - DNA, 120 bp, Artificial Sequence
  ENSG00000254768_3 (sequence is synthesized)
ttctgcctttgcaaatttaaaaactgctctaaaaattattcttgtgcattccaaaaattcgaacagaagaataaaattctaaattcacctagaaacctactaccaagatatagctcccgt

SEQ ID NO: 1019356 - DNA, 120 bp, Artificial Sequence
  ENSG00000254768_4 (sequence is synthesized)
ctcggagtatgaaatgtgaaatcagtttacctgagtttgggtcctggttccactgattatcatctctgcaattttgtatcaatcatcgaacactaataagccagtttgcttactggcaca

SEQ ID NO: 1019357 - DNA, 120 bp, Artificial Sequence
  ENSG00000254768_5 (sequence is synthesized)
aatgaaggcttgtatcgtgtggtttctattatcctttctgcttgtaaaattttatgccttttcatgactttagatgaaaagtctttagatgtaaaaagatgtaaaacttattttcttttg

SEQ ID NO: 1019358 - DNA, 120 bp, Artificial Sequence
  ENSG00000254768_6 (sequence is synthesized)
aacttattttcttttgtttctcccatcctaagttttttttattatatttgagttaaatgattaataataaactgaaaaaatactaatatgtagaaatgtgctttctgaaagttcttttta

SEQ ID NO: 1019359 - DNA, 120 bp, Artificial Sequence
  ENSG00000254768_7 (sequence is synthesized)
ttaccttatttgttgtttcactatatgtatacactgagttttataagcaattgtttaaataattgtatccatactatttttcaagatgtacataaggtattagccaacagcaatgtaata

SEQ ID NO: 1019360 - DNA, 120 bp, Artificial Sequence
  ENSG00000254768_8 (sequence is synthesized)
ggtttctatttgtttatatccctgtgggaggaaatacttttgagtaatcatttaaatgtcttgcaaatgttgccctctggtggaaggatatgttaatattttagagacaattgtggtcct

SEQ ID NO: 1019361 - DNA, 71 bp, Artificial Sequence
  ENSG00000254768_9 (sequence is synthesized)
tggaaggatatgttaatattttagagacaattgtggtccttaattatgcaattacacctactgttttctct

SEQ ID NO: 1019362 - DNA, 120 bp, Artificial Sequence
  ENSG00000254768_10 (sequence is synthesized)
tatttgttaaattaaatctacatctgaaactataaagtcttttttgtgggcaacacatttgcagttgtcttagtactaaatgtatttagaaataagttgattgagaatcccccagttaac

SEQ ID NO: 1019363 - DNA, 120 bp, Artificial Sequence
  ENSG00000254768_11 (sequence is synthesized)
caaaaaactagtactaaaggaaacttcactgtattaagatttagtaatggtgtggtaatcacataggtaaaaatgatatacaatagaataaattgtgataattttataaatattttgaaa

SEQ ID NO: 1019364 - DNA, 120 bp, Artificial Sequence
  ENSG00000254768_12 (sequence is synthesized)
atgttttgctccctattaccaaaaatacaaacatgttttaaaggcattctatttaagatcattcaaaaactatttctgtggtatttttaaggcaaactgatttttaagaaatacctcaag

SEQ ID NO: 1019365 - DNA, 120 bp, Artificial Sequence
  ENSG00000254768_13 (sequence is synthesized)
tacatacctcaaggtggtggtgtgcatctgtagtcccagttactaggaaggcagaagtgggaggattgctggaacccagaagtttgaagtgcatctgggaaatatacccagaccccacct

SEQ ID NO: 1019366 - DNA, 120 bp, Artificial Sequence
  ENSG00000254768_14 (sequence is synthesized)
caaaaagagaaaaacgaaccttaaggtgactgtttctgaggctattttgaatgcaacatcttcagtttattatttcaaaaaatattcactcaataggtatttttatctactgttggctag

SEQ ID NO: 1019367 - DNA, 120 bp, Artificial Sequence
  ENSG00000254768_15 (sequence is synthesized)
gcccttttctgggatatagtaaataaatggactcaatacagttttatagctttttatattatatgtagagagtggacattcctaaagacaaaactgctttgaaaagcttttttacagtat

SEQ ID NO: 1019368 - DNA, 120 bp, Artificial Sequence
  ENSG00000254768_16 (sequence is synthesized)
ggctttatttgactttgaattcctaagtaaatgttcagcctaataattacacacttctttcagttcgaagctatacaaataagccctagaattcatctgtgacttttttcttaccaaggg

SEQ ID NO: 1019369 - DNA, 120 bp, Artificial Sequence
  ENSG00000254768_17 (sequence is synthesized)
tttttaagcagacaatttttagttcagctttatttgattttactttgcagtgttagcctcagagacaatttctaagaaattatcattatataatttccttagagctggaaagagaagaaa

SEQ ID NO: 1019370 - DNA, 120 bp, Artificial Sequence
  ENSG00000254768_18 (sequence is synthesized)
taattcagtttgtcttaaaaacgacaatctgtgcacatagcccaatactttacactgctatatttagtggcctggtgtaagacgtcttttgacttctctgtgaactgtctgattaaaaaa

SEQ ID NO: 1019371 - DNA, 120 bp, Artificial Sequence
  ENSG00000254768_19 (sequence is synthesized)
ctggaagcaggaagtattaaataagcctatattgttacctcaaacatatattttaattaccaaaaacacatgtatgtagtcatatatgcaatgtttccttttctctgtgcatctactctg

SEQ ID NO: 1019372 - DNA, 120 bp, Artificial Sequence
  ENSG00000254768_20 (sequence is synthesized)
tatttataatttacaatgagaaaagtgtatacatcttattctacccttttatttctgcattaatgggagaaaatagccttaattcactacaggccattgtgccttgggaaaattaagatt

SEQ ID NO: 1019373 - DNA, 120 bp, Artificial Sequence
  ENSG00000254768_21 (sequence is synthesized)
ttaaagtgaatggagaacaaatgctgctcctctaatgccagaaaaatatttctaactttgaattccacactatacacgtagagcaacatgataaattacagaaagactttgaaagcatca

SEQ ID NO: 1019374 - DNA, 120 bp, Artificial Sequence
  ENSG00000254768_22 (sequence is synthesized)
gtgtcttcaactctaaaaaaaattcttaaagtaaaagttttaattgtatacagaaagtttgagaaaaatctaagaatagaaaagaactgcaaatctgtaaaggaagtaaaataaatatac

SEQ ID NO: 1019375 - DNA, 120 bp, Artificial Sequence
  ENSG00000254768_23 (sequence is synthesized)
catctgccttaaggttctggaccagtgtatgcaacacaataaacgttcaggaaatggttgctatgatgatgacgacgatgattatgacaacaatgatgatgatgaaatgagttggcttca

SEQ ID NO: 1019376 - DNA, 120 bp, Artificial Sequence
  ENSG00000254768_24 (sequence is synthesized)
gcccagagcagaatatgttccctaataaagtatgaggatgtcagcacatgccatttgtgtcccacccaaagctgcaaacttacttaaagtttatctgtagcttcaggggacaatttccat

SEQ ID NO: 1019377 - DNA, 120 bp, Artificial Sequence
  ENSG00000254768_25 (sequence is synthesized)
aatgactgatggcattttaccctgggtgtggatcttcaggaggttgcctctccctggctgcagaattatcatttttagagaagcagtgtgataatcgtggaaccatcccctacattcctt

SEQ ID NO: 1019378 - DNA, 120 bp, Artificial Sequence
  ENSG00000254768_26 (sequence is synthesized)
attacggctggagctgagctttcactcgccctgcaccactgctgctggctgccgtcacagacccgccactgacttccatccctccggatgcggcagggtgtccgctgtgctcctgatcca

SEQ ID NO: 1019379 - DNA, 70 bp, Artificial Sequence
  ENSG00000254768_27 (sequence is synthesized)
cctccggatgcggcagggtgtccgctgtgctcctgatccagtgaggcgcccaatgcccctccctgaccta

SEQ ID NO: 1019380 - DNA, 120 bp, Artificial Sequence
  ENSG00000278107_0 (sequence is synthesized)
gctctcacgagtgtgtaagccagggttttggggaaggggtggatgtgtgtgtctcgcattttcccagctgcctctcctttccccttcttccttgctcccggagacttccttgtggattcc

SEQ ID NO: 1019381 - DNA, 120 bp, Artificial Sequence
  ENSG00000278107_1 (sequence is synthesized)
ttcccagaacttggtctgaattccctaatagacattctcctagcgggatgagtccccctttacagcactcgggaaatgcctgctcctctagctgtctctgatccacctctcctgtctttc

SEQ ID NO: 1019382 - DNA, 120 bp, Artificial Sequence
  ENSG00000278107_2 (sequence is synthesized)
atctcactcatttccttttcatcagtaggaggcagcagtctgcacttttgcatcacatttcaaagacatctgtgtgtttgttctcgtgcagaacactttgactattgtaacctctaggtc

SEQ ID NO: 1019383 - DNA, 120 bp, Artificial Sequence
  ENSG00000278107_3 (sequence is synthesized)
catgaatgaccctcatcttcagtaaaagtggattcacgctggcaaagtctgctttgttttattgtgacacatggaacattatggattttggtgaataaaaactaacttaaattgaagtca

SEQ ID NO: 1019384 - DNA, 120 bp, Artificial Sequence
  ENSG00000253381_0 (sequence is synthesized)
ctgcagtcaacctggagtaggcagatgaagcagctggggaaaagacctcttgacctaccaacaaacagtcacaggtctgtaattttgaaatacagcatgtgcacaaaagagagtataaaa

SEQ ID NO: 1019385 - DNA, 120 bp, Artificial Sequence
  ENSG00000253380_0 (sequence is synthesized)
gagatcaaggaagaggaacacgataaaatgcttatggctccaagaagaaatagggtgagagataggaccacaaattgtttactcatttcaaccagtaaacatgtcctgcaatgtcaatct

SEQ ID NO: 1019386 - DNA, 120 bp, Artificial Sequence
  ENSG00000253380_1 (sequence is synthesized)
tcctgagttgtttccatctccctccagtcattcaggaccaccaatgagatttgtgatatttggaaaactgccacccagtgcctccttttcctaatctgctgaataaagttaataagacta

SEQ ID NO: 1019387 - DNA, 120 bp, Artificial Sequence
  ENSG00000253386_0 (sequence is synthesized)
gaagggactggagtgaatcaggtgcacaggtcatgagggagaacacaacgcaacccacgcctcaagagtccagtcaccatctccagatccacatccaaaacacagtttcttctacagctg

SEQ ID NO: 1019388 - DNA, 120 bp, Artificial Sequence
  ENSG00000253385_0 (sequence is synthesized)
taatcccaactacttgggaggctgaggcggaagaatcagttgaaccagggaggctcacaaaaactttttcacaattaggggcccattaatctttgatattgaccttaaaatattttgtta

SEQ ID NO: 1019389 - DNA, 120 bp, Artificial Sequence
  ENSG00000253385_1 (sequence is synthesized)
gaccttaaaatattttgttaagacatttttacagtgtttgcgtactacatcatacacacattctaaattatgaaagaaaaggattatgtaagcaacttccaaaatttccagatacttagt

SEQ ID NO: 1019390 - DNA, 120 bp, Artificial Sequence
  ENSG00000253385_2 (sequence is synthesized)
ttattccatcaaaattcaggtggttgatttaaaacctaactctgaagccaattctggatctcagactacctgcacgggaatcctagtggaccagttcaagcagagttcatatagctacat

SEQ ID NO: 1019391 - DNA, 120 bp, Artificial Sequence
  ENSG00000253385_3 (sequence is synthesized)
ttttaatggttttcaaataatattgttgatctacagaaaattaaccccaggatttcggtgtccaatagagcaaactcttattgatttgtaaggataacacatttctggaatgcggaattt

SEQ ID NO: 1019392 - DNA, 120 bp, Artificial Sequence
  ENSG00000253385_4 (sequence is synthesized)
tctcttgccaattttacaaattctagtcaagaaacctttgggactaggtatctttgtgaattcagaattctccagattttgaaccataatgtagtacacatactttacatatgttatgta

SEQ ID NO: 1019393 - DNA, 120 bp, Artificial Sequence
  ENSG00000253385_5 (sequence is synthesized)
atattcttcaggagaatgagtcagcaccctgcaaccacaatatttctgaagcaaaatttaggaatattaacactaaatgggataagtaaagacaaaaatagcctcaaatcagcacagatc

SEQ ID NO: 1019394 - DNA, 120 bp, Artificial Sequence
  ENSG00000227564_0 (sequence is synthesized)
agtcacttgaatgccagtttagattcaagaggagaacaattagactccaccaatgtcagactgctaaaatgtaaaaaatggccatcaggattttctagggcagcataattattctgcgag

SEQ ID NO: 1019395 - DNA, 120 bp, Artificial Sequence
  ENSG00000227564_1 (sequence is synthesized)
cgagtaggtaaaggagttttgattgagatgaagaggtcatagaagtgagaagcactgaaagacacagaagtttgttccttccagtgggttcgtggtctcactgacttcaagaatgaagcc

SEQ ID NO: 1019396 - DNA, 120 bp, Artificial Sequence
  ENSG00000227564_2 (sequence is synthesized)
accctcgcgaaaggaccagaaccaggggcaaaatctcacagctgcagtatcatttaagactcagagacagcctatccttctgggcaaaggggctgaaaagaaggaccctgtgatccaaag

SEQ ID NO: 1019397 - DNA, 120 bp, Artificial Sequence
  ENSG00000227564_3 (sequence is synthesized)
ttcggatccgtattgaagtgattcagctagaaattgataatcttcattttaacactgctctgagttaatggctgctcttgaaaaggtattgaatccacctggaatttccttgtgtttatg

SEQ ID NO: 1019398 - DNA, 120 bp, Artificial Sequence
  ENSG00000227564_4 (sequence is synthesized)
gttcaagctgttcgtgagtattataccacttgacgactgaggcagaatcaaagaaagtactaatgctcttcagtaaaatatacaaaactacagacaatggcagtgccttattttgtaaag

SEQ ID NO: 1019399 - DNA, 120 bp, Artificial Sequence
  ENSG00000227564_5 (sequence is synthesized)
tatatagctatgagcctttgctactccttgctgacatttggaatttaactgaagtgtcttgttaaaaaacatttatggaaataaaaagaatatctttcctttttagggatataaattaaa

SEQ ID NO: 1019400 - DNA, 120 bp, Artificial Sequence
  ENSG00000257497_0 (sequence is synthesized)
ccccctttgactgtaattttccattacccaaatcctataaaacagctccaccccatctcccttcattgactctctttttgaactcagcctgcctgtacccaggtgataaaaagctttatt

SEQ ID NO: 1019401 - DNA, 120 bp, Artificial Sequence
  ENSG00000257497_1 (sequence is synthesized)
acccaggtgataaaaagctttattgctcacacaaagactgtttggtggtctcttcacaaggacgcaagtgaaattattatttaagccttccaacatatctaatatctgaacctcaactct

SEQ ID NO: 1019402 - DNA, 120 bp, Artificial Sequence
  ENSG00000257497_2 (sequence is synthesized)
tcatcttactagctaaatgacatcaggggaacaacttattaacctctctaagtctgtttattcacctgtgggtaataccattaacatctccttaatagatttgtggtaataattgaatga

SEQ ID NO: 1019403 - DNA, 120 bp, Artificial Sequence
  ENSG00000257497_3 (sequence is synthesized)
ggtcttcagtgtagagagctaaacactatgcccatttaaaaagtgattgctgctgctctatcttcccagcccagggggttcttggacattctccccgtgatgagtgcccctcttctgaag

SEQ ID NO: 1019404 - DNA, 120 bp, Artificial Sequence
  ENSG00000257497_4 (sequence is synthesized)
ttaggatcactgagcttgggttttaatatctgtatgtatgggactgggttttagaaaatgaattttctcatgaccaaaatattagtcctccttttttcccttagatgtaaggggaaattt

SEQ ID NO: 1019405 - DNA, 120 bp, Artificial Sequence
  ENSG00000257497_5 (sequence is synthesized)
tacaagtaagctcagttaattttgggagggccatctgtgaaatctcaggcatttatggcataaactcaaatgttctcttctttcgatttcctggaatggtgaacatggagtgtcttaact

SEQ ID NO: 1019406 - DNA, 120 bp, Artificial Sequence
  ENSG00000257497_6 (sequence is synthesized)
tgtgtattgagcatggtttaggagtctgttgtcaattttacagtcttttgacctctatatatttggcatgctgagcttcttgccattgatctaaagtaccaggcccattcatacacattg

SEQ ID NO: 1019407 - DNA, 120 bp, Artificial Sequence
  ENSG00000257497_7 (sequence is synthesized)
tatactttccacaccttgctgagaattctcttccctttccttttcatctgaaaaattcccactcagttttcaagtaccaattcacatgtctccagcagtgtgaagctttacacttccttt

SEQ ID NO: 1019408 - DNA, 120 bp, Artificial Sequence
  ENSG00000257497_8 (sequence is synthesized)
tggccggataagttgctcattctgtcctccttgctcacatggcactttgtcagcttctctaaattgtactagccaaacactgtcataatccatttacacataagtctctcccaaaaggtc

SEQ ID NO: 1019409 - DNA, 120 bp, Artificial Sequence
  ENSG00000257497_9 (sequence is synthesized)
aatttctgagggccagggaccatttccagctgtatttctcctccttccctggctcattccctatttctcctcacttccgcttctccaagattgtatcccaataaaatgttagctcataaa

SEQ ID NO: 1019410 - DNA, 120 bp, Artificial Sequence
  ENSG00000257496_0 (sequence is synthesized)
attgcctccacagctcaaaactatacattctctaattctaagacttatttttattatttttaaatactaatttgttcatacaatggatatccaggtggtactgttcttaagaggatttta

SEQ ID NO: 1019411 - DNA, 120 bp, Artificial Sequence
  ENSG00000257496_1 (sequence is synthesized)
aagaagaaatctatgcgaaaacaatacacagttctggccaaaagaagttaaaacaaatgtgaaaaataagcgacatccagaaacttcagcagctcccttctgtcctatgcctcaaggtac

SEQ ID NO: 1019412 - DNA, 120 bp, Artificial Sequence
  ENSG00000257496_2 (sequence is synthesized)
agttggtaaagaaagatgtgaactctatttcagggtagtatgtttttttcatttgcttccaagactttgatggaatgacttgagaggaaaagttcacaattactagaaagaacctaaaag

SEQ ID NO: 1019413 - DNA, 120 bp, Artificial Sequence
  ENSG00000257496_3 (sequence is synthesized)
gacatgagagatgaaaccgttgcagtatttttgaaataaatgttttcctgcaagagcagagtcatgggcggggtgtctgtgtaatatctactcaacacagccgaagggtaagaggaaatc

SEQ ID NO: 1019414 - DNA, 120 bp, Artificial Sequence
  ENSG00000257495_0 (sequence is synthesized)
gtcatccccatgccggccggctgctagctgcagctcctggaactagaggaaaaggaaccaaagcaagaacactgactcagggcttggctgggatcagcctggtacagagactgtgcctgc

SEQ ID NO: 1019415 - DNA, 120 bp, Artificial Sequence
  ENSG00000257495_1 (sequence is synthesized)
acttgcagagcctggcagagagtcaccttctgattttctgcctaaatgcagtggaatttgaagtcagtcacctagattctgatccagctgcgtcacttgtcagctattgcctttgtgccc

SEQ ID NO: 1019416 - DNA, 120 bp, Artificial Sequence
  ENSG00000257495_2 (sequence is synthesized)
aggagagtgctgtgctcccagcaagctatgggccaccacagtgagtcatggggcagacaagacagagtctggagcagagggccctgcatacttcactatggggagttttgcggcctcacc

SEQ ID NO: 1019417 - DNA, 120 bp, Artificial Sequence
  ENSG00000257495_3 (sequence is synthesized)
ggcctcggcctcggccttgctcttccgggcgatctcctcatactgggcacggacctcagcaatgatgctgtccaggtccaggttccggttgttgtccatggacaggatgatggacgtgtc

SEQ ID NO: 1019418 - DNA, 120 bp, Artificial Sequence
  ENSG00000257495_4 (sequence is synthesized)
gctgatgtgggactggatctgagcagtctcctgcaggggaaacaaggaagcatgaaatgccttctgtgaccagagaaaggtcccaaggtgatggccctgtcccagagggatggccctaga

SEQ ID NO: 1019419 - DNA, 120 bp, Artificial Sequence
  ENSG00000257495_5 (sequence is synthesized)
ccatcccacacagatggaagctgcacttcccaaagcttgtaagaacagagctcacagcccagaggttccaataccacatctgaaaactgctgaatgggtttgaagcagcccaggaagaaa

SEQ ID NO: 1019420 - DNA, 120 bp, Artificial Sequence
  ENSG00000257495_6 (sequence is synthesized)
ttatcaccagggtaaatagaaaccagtattattacctaaccaaataagaaaaaaagtagcagtaaaaataaatataatgaaaagaaaacaatttaaaacttttgggctaaataatgctat

SEQ ID NO: 1019421 - DNA, 120 bp, Artificial Sequence
  ENSG00000257495_7 (sequence is synthesized)
tattttcccagagatgctgcacctgagatctactgtctctttatcaataggggatatttgtaagtgtctgagaggtgtttttgtgttttgtctgtttgtttgtttgtttgtttgtttgtt

SEQ ID NO: 1019422 - DNA, 69 bp, Artificial Sequence
  ENSG00000257495_8 (sequence is synthesized)
ctcctgactcagcctcccaagtagctaagattacaggcatgcaatgttggccaggctggtctcaaactc

SEQ ID NO: 1019423 - DNA, 120 bp, Artificial Sequence
  ENSG00000257495_9 (sequence is synthesized)
agtgctgggattacaggcacgaaccactgcgcctggccatctgagaggtgttaaagacacaacagcacccagctaagactttctccaaagagtcaaaagagaactgtaaaggaaattgct

SEQ ID NO: 1019424 - DNA, 120 bp, Artificial Sequence
  ENSG00000257495_10 (sequence is synthesized)
aaattgctgtcacattatctggcaggatgctgtttgaaactatgcttgtgggtgaagtaaacacatcgccagctcgccgccccctcccccccgcccccaaccacactctgggaaacttta

SEQ ID NO: 1019425 - DNA, 120 bp, Artificial Sequence
  ENSG00000257495_11 (sequence is synthesized)
aggtggagacttgcagtttcttccagtccctcggtcccacccacctgcactcctcgccctccagcagcttgcggtaggtggcgatctcaatatccagggacagcttcacgctcaaaagct

SEQ ID NO: 1019426 - DNA, 120 bp, Artificial Sequence
  ENSG00000257495_12 (sequence is synthesized)
cttggtactcgcgcagcatccgtgccagctcctccttggcctgctgcagggcgccctccagctcatccagcttggccctggcatccttgagggcacagtccccccgctgctcggcgtcag

SEQ ID NO: 1019427 - DNA, 120 bp, Artificial Sequence
  ENSG00000257495_13 (sequence is synthesized)
cgatggccgtctccaggttggcacactggggtcaggaggtagcatttctccctgagttcctccctgggcctcgcttcacctctcccatgctctcaatggttgagccctcctctgtcctgc

SEQ ID NO: 1019428 - DNA, 120 bp, Artificial Sequence
  ENSG00000257495_14 (sequence is synthesized)
cccatgtcctggagcagagacccagccacatccaggtggagtcctgtcaacctgagactgagaggcttgctacgctgggccccacagctttatgaaaataatctgcaattgttccaaact

SEQ ID NO: 1019429 - DNA, 120 bp, Artificial Sequence
  ENSG00000257495_15 (sequence is synthesized)
tcagatgggagctaagggtgagggatgagagcaggacctccatttgaagaaggggattctgaaatggatgctcaagagaaggagggggcagggggtgctaagcagttcacccctccctta

SEQ ID NO: 1019430 - DNA, 120 bp, Artificial Sequence
  ENSG00000257495_16 (sequence is synthesized)
tgcagagcctggcagagtcacagagagtacatcagttctactcagaatgtggctcaaggggaaaacaaaacagggacccttcagcactctggtgtactgctctgtctctgtcactgggtg

SEQ ID NO: 1019431 - DNA, 120 bp, Artificial Sequence
  ENSG00000257495_17 (sequence is synthesized)
ctccaccccagcatggcccaagatttaggattgttcctaaagatgtcaagttatccagaaagcagagaaggcagaagggcttctctcttcactccttgtattttatctttggtgccaacc

SEQ ID NO: 1019432 - DNA, 120 bp, Artificial Sequence
  ENSG00000257495_18 (sequence is synthesized)
aggtggaagacaacagcctggctgccacacatgggacactaaggggcacaggagcccagaaatgcttggccaataggttgaggcttgaaaccagatgtacatagagaaggcagaaggggt

SEQ ID NO: 1019433 - DNA, 120 bp, Artificial Sequence
  ENSG00000257495_19 (sequence is synthesized)
atgaggacttcctacctctatccctggggattcctgcccaagaccccaggaaacatccccagccacagagagaagagaagcaggaatgagaatatgcttggctgaagttcagtgggaacc

SEQ ID NO: 1019434 - DNA, 120 bp, Artificial Sequence
  ENSG00000257495_20 (sequence is synthesized)
ctttaaggactctgttttcctggaggaagtgaaagcaggacatcctcagggcagtcagggatggatggggcaccaggatagatggccactcccacctttgatctacaaatttctcagcac

SEQ ID NO: 1019435 - DNA, 120 bp, Artificial Sequence
  ENSG00000257495_21 (sequence is synthesized)
cccaatgctggaggtgccctggactgcttaagttacagataagtaagaaactgttcatcacatatctgtccttccagaagacagagccagaggtggggcagggggagccttaccccctcg

SEQ ID NO: 1019436 - DNA, 120 bp, Artificial Sequence
  ENSG00000257495_22 (sequence is synthesized)
tacagacacttgaagaacttgatttctccatccagggcatccaccttggcctgcagctccactttgctcgtgtaagctgcgtccacgtcctatggagaatccagatacccctgacctcac

SEQ ID NO: 1019437 - DNA, 120 bp, Artificial Sequence
  ENSG00000257495_23 (sequence is synthesized)
ctttcttcaagcccagacaggcctctccagcgaactgacacctgcaggccctgccctagctagctgcccaggacttcagatccaaggggcaggaaccggccttccagccacaacttcact

SEQ ID NO: 1019438 - DNA, 120 bp, Artificial Sequence
  ENSG00000257495_24 (sequence is synthesized)
gtcagactcactgcgaaacctggggcaagtttctcatgcctctggaactccttctgcctctatttctcagagaagggtgtgagactctataccccactcagccagtcattcagccaacag

SEQ ID NO: 1019439 - DNA, 120 bp, Artificial Sequence
  ENSG00000257495_25 (sequence is synthesized)
agggaggcaaggacagccacggcgatttgccagaaactagcagagttggaaggcaaacctgcagcccctcccaaagcctgtcctgttccccagccagaggggacatgagttgggactgac

SEQ ID NO: 1019440 - DNA, 120 bp, Artificial Sequence
  ENSG00000257495_26 (sequence is synthesized)
tatccacatctaggttcctgtccacagacaaagtactgtgtgctaaaccaacaccaggtgtcccaaaatgtcccaagcagcaagcccttcatctcctccttcagcactttggctccaggc

SEQ ID NO: 1019441 - DNA, 120 bp, Artificial Sequence
  ENSG00000257495_27 (sequence is synthesized)
ccttctgcggggggctcagacctcagctgctcctctctcttagcccagcacccactgctgggggactgaagggaacccatgcaccctcctcaccttcttaagcaccacaaattcattctc

SEQ ID NO: 1019442 - DNA, 120 bp, Artificial Sequence
  ENSG00000257495_28 (sequence is synthesized)
atcctccaggggtgctgttgatctaagtgggtgccaaggacagagctgtgtcttctcctcccctttggcttcccccagtgcccaggagagtgctgtgctcccagcaagctatgggccacc

SEQ ID NO: 1019443 - DNA, 120 bp, Artificial Sequence
  ENSG00000257494_0 (sequence is synthesized)
agggcgaagcccagttgatatccaagagaagacctgatcaattctcatttaaagctagataatccttgctaaaaatcattttcataaaaggagtactacgctttcacccaaagaaaacaa

SEQ ID NO: 1019444 - DNA, 120 bp, Artificial Sequence
  ENSG00000257494_1 (sequence is synthesized)
gaaaagggttcctgcaaggaagcagcattcattacctctcatcagggaacagcctgcacttctggtctggtgcaccacacggggaacagcccacctcagcaaaaaccggacactgggttt

SEQ ID NO: 1019445 - DNA, 120 bp, Artificial Sequence
  ENSG00000257494_2 (sequence is synthesized)
taagcagcaacgccgtctgaaacacaaaaccatcattatgtcttccagggctactgtcagttatctgaatggtatgacagccaaacttagaggtctctcttaaatcatctttttacaatc

SEQ ID NO: 1019446 - DNA, 120 bp, Artificial Sequence
  ENSG00000257494_3 (sequence is synthesized)
tgctacttagaccacttaacattattttacttaatgctgtaatggaatgcatcatttatattagctactattagctggcaaggactcaggagacaaactataatggtaggtttttggtag

SEQ ID NO: 1019447 - DNA, 120 bp, Artificial Sequence
  ENSG00000257494_4 (sequence is synthesized)
cattgtatattagcatttttatagctgatcagccatgaacacttgctaaaaggttgcagttagtaatttagtcaaacaaataaaatgttttcccttattatttatttttatgacatgata

SEQ ID NO: 1019448 - DNA, 120 bp, Artificial Sequence
  ENSG00000257494_5 (sequence is synthesized)
tttttcttcattccatcattatttcccttggtttctgaaaggcaggattatgtttattctgtcttcagtgaaagcaaacagccatcctgtgaagcaggttggccaaaaagcagttcactt

SEQ ID NO: 1019449 - DNA, 120 bp, Artificial Sequence
  ENSG00000182165_0 (sequence is synthesized)
gcctgcgcggtagtgggacccgaccctgtctccagtgggcgtcttgggccccggctctattctgggctgcgggcctgggaagggctcgccgggtgccaaatgagctgtcctaactctgcg

SEQ ID NO: 1019450 - DNA, 120 bp, Artificial Sequence
  ENSG00000182165_1 (sequence is synthesized)
gggctgcagcttcctgcatgatgctggggagcttggcgcctgacccaggatctagaaggcactctgggcaggccgcgctccgcccacgaaggtctggcttaccacacgctcctccccatt

SEQ ID NO: 1019451 - DNA, 120 bp, Artificial Sequence
  ENSG00000182165_2 (sequence is synthesized)
caaaagaacagtgatcacacagattcctacttgggctctttcctttaatcttcggaggctgagtttgcccaactcaggtttaaccaccaaggactctgagagctggcaggtctgagtaac

SEQ ID NO: 1019452 - DNA, 120 bp, Artificial Sequence
  ENSG00000182165_3 (sequence is synthesized)
cctggtaacaattctcttcaccttatcaaaacctgagctaaaaccaatgcatcagctgatgatgacagcagagagtggcagggctgaggacccaaagtcatttcccaggctggcggagag

SEQ ID NO: 1019453 - DNA, 120 bp, Artificial Sequence
  ENSG00000182165_4 (sequence is synthesized)
tgagtaaatgagattctaaaactaaacaagggaggtcagagactctttccaaccttacctgatggcttctggccaaagcaaggaagtgtcttggaaggtgttggttggtgatggtgcgaa

SEQ ID NO: 1019454 - DNA, 120 bp, Artificial Sequence
  ENSG00000182165_5 (sequence is synthesized)
aactgaattctttttctccactttgttttgccactcttaatgcatgcatgagaggccctaagataatttctgatggcctgggactccttgggaaaaaaatgaaaaggcaccacaggttcc

SEQ ID NO: 1019455 - DNA, 120 bp, Artificial Sequence
  ENSG00000182165_6 (sequence is synthesized)
attttgggagaaacctccattttcctcatgaaaccgcaggaattagaggcagataaactgccagggagaagaatgagaagacaggagacaaactgtttggaaagctaaatcttccctctt

SEQ ID NO: 1019456 - DNA, 120 bp, Artificial Sequence
  ENSG00000182165_7 (sequence is synthesized)
aatgaataaaggtttttgccttgtcttaaagtttctgagtcctaattttggcaaaataaataacttatggtaatctggaattgtattttgtaatattaagtgttttgaacctctaacatt

SEQ ID NO: 1019457 - DNA, 120 bp, Artificial Sequence
  ENSG00000182165_8 (sequence is synthesized)
tacttcccaaaatcaaacttcagtttcaaaattgtctctcttgacccctagcttttggatgctacagaaggcccctgaagcatccagaagagaggtaaacaggattatttaacatgttta

SEQ ID NO: 1019458 - DNA, 120 bp, Artificial Sequence
  ENSG00000182165_9 (sequence is synthesized)
aaagcagcgccccttgataaagataaactgccagggagaagaatgagaagacaggagacaaactgtttggaaagctaaatcttccctcttaatgaataaaggtttttgccttgtcttaaa

SEQ ID NO: 1019459 - DNA, 120 bp, Artificial Sequence
  ENSG00000182165_10 (sequence is synthesized)
cagggggttacaatctatgctttggccaagggcgggagtggaggagtgggggttaggatgatggcttggagcgggcatcatttaagacttaaagaaaccatgggtgcaggcaaagcaccc

SEQ ID NO: 1019460 - DNA, 120 bp, Artificial Sequence
  ENSG00000182165_11 (sequence is synthesized)
cacacactaagcagtagtcccacaggctgcgacctgaaaccttcacatctactcttaacaagcccccatggctagagggctgttgcaaggggagaaggcagagaccccagaccatgtaat

SEQ ID NO: 1019461 - DNA, 120 bp, Artificial Sequence
  ENSG00000182165_12 (sequence is synthesized)
caacagcaaggtgattgtgtgatgtgtcttttcccatatttaggagggtgagttttatgaatgactttaaatattatgcacttaatggttatgtttattacttcgtacaaaatatttctg

SEQ ID NO: 1019462 - DNA, 120 bp, Artificial Sequence
  ENSG00000182165_13 (sequence is synthesized)
aaaaaattttttaaaaattagcctggtatggtggtgcacaccagtagcccagctatttggaaggctgatgtgggagggtcacttgagcctaggaggtcaaggctgcagcaagccatgatc

SEQ ID NO: 1019463 - DNA, 120 bp, Artificial Sequence
  ENSG00000182165_14 (sequence is synthesized)
ttaagggctcttccttactgaaagtttttccctgagaaataggaacttggcaactttatgcaaaacttcaaatgacttattattaggtcaataaaaataaaataatgttgaagcgctaag

SEQ ID NO: 1019464 - DNA, 120 bp, Artificial Sequence
  ENSG00000182165_15 (sequence is synthesized)
attgttaaagaagcttaaagatattgttatattagtgtttacacaataatgtgtcaacttttattcagcattatctccttgctttttgaggcaaatatattttgtataaagttttgagaa

SEQ ID NO: 1019465 - DNA, 120 bp, Artificial Sequence
  ENSG00000182165_16 (sequence is synthesized)
tgtctgaggtgtttcctgtacctcttctgggctctcagtcttatcttggtatataaaaccattcaggctttaggggcatcgtttttttccagatagaattttccagatgagcctataata

SEQ ID NO: 1019466 - DNA, 120 bp, Artificial Sequence
  ENSG00000182165_17 (sequence is synthesized)
ttccggaataaataacaaaccattgtttataaaatttaaaacaaccttgataagcctcaagattccctagcaggatcattgcaattcagataattggatgaggcacggtaacatacagtg

SEQ ID NO: 1019467 - DNA, 120 bp, Artificial Sequence
  ENSG00000182165_18 (sequence is synthesized)
ctgaaggggaggtctagaaacttaattctgttgctaaaagacatgtggtcttgggctaatcatttaaaccctactagttagacctcagcattctcttggaaataaaattattgctctctg

SEQ ID NO: 1019468 - DNA, 120 bp, Artificial Sequence
  ENSG00000182165_19 (sequence is synthesized)
ttctccagaatccctacctattttatagctctcagaaactcccagtgagcttcacaaggtatctccaagcagagttcagtgtggcattgtctcctgcagggcagaaatcccatgagaaag

SEQ ID NO: 1019469 - DNA, 120 bp, Artificial Sequence
  ENSG00000182165_20 (sequence is synthesized)
tggagtagtcatgacaagtgtgtgatttacagtccaccacaggaaacttgtaggattccttagaaaacaaagtgggttccaccgtctcttgggtctgttattccctcttaagaaaccttt

SEQ ID NO: 1019470 - DNA, 120 bp, Artificial Sequence
  ENSG00000182165_21 (sequence is synthesized)
cttattattctcccttttttcctcttcttggcccttcactagcaacccaggccaactacacaacctgtttcctcaaagatcgtttccactgcctgtctttttcacaaccattatgacctc

SEQ ID NO: 1019471 - DNA, 120 bp, Artificial Sequence
  ENSG00000182165_22 (sequence is synthesized)
ttcacagctgcagtttcaccctgaggccttgtgcaactgaagttgtctaaccaggacagttaactgtgcctgggcaacttgatacacttagcacaggctgcctaatattgttttcttttt

SEQ ID NO: 1019472 - DNA, 120 bp, Artificial Sequence
  ENSG00000182165_23 (sequence is synthesized)
agcattttaactactttggactctgctttggattgcacaaggttcacttctttttctttttgtttaatagaagctgttgtgtgattagttaaagaggtaaaaggctatacaaataagtat

SEQ ID NO: 1019473 - DNA, 120 bp, Artificial Sequence
  ENSG00000182165_24 (sequence is synthesized)
ttattgaacactgttccttgcccagcattatgttaaatacagatacaaatcaataagacaattctgaattttccagttttgtgtttccatggatattacaactcatagaaggttagagtc

SEQ ID NO: 1019474 - DNA, 120 bp, Artificial Sequence
  ENSG00000182165_25 (sequence is synthesized)
cttaggtatacttcattgtattttatggtgaagcaaggatactgtgaaaaataatcataaactgtccaagtatgtaacttctatacacagtgcatttgacattctgcttgtataaatata

SEQ ID NO: 1019475 - DNA, 120 bp, Artificial Sequence
  ENSG00000182165_26 (sequence is synthesized)
caggccgcgctccgcccacgaaggtacccaaccctctgggatagatgcaggaagcgatggttaagacccattttcacccaacttctcgccgcaggtctggcttaccacacgctcctcccc

SEQ ID NO: 1019476 - DNA, 120 bp, Artificial Sequence
  ENSG00000182165_27 (sequence is synthesized)
gctattgctcaccgtcacaggctagccgctgacttccacccctctggatccagcagggtgtctgctgcacttctgatccagtgagacgcccattgccactcccaactgggctagaggctc

SEQ ID NO: 1019477 - DNA, 120 bp, Artificial Sequence
  ENSG00000182165_28 (sequence is synthesized)
catgggattggccaaatggtgtttaatgatcttcaggttatattttagtgaataatattaatatattttccaaaattgtatgggatttctaaaattctaatgtctgagtatatgctagaa

SEQ ID NO: 1019478 - DNA, 120 bp, Artificial Sequence
  ENSG00000182165_29 (sequence is synthesized)
atcataattaaggttattatgttaagttattgtaaaacacagaaataataaaatttgtcagtcatgttcttgactaactaccttggacatttcaccattcaaaatcgtcttgttttaatc

SEQ ID NO: 1019479 - DNA, 120 bp, Artificial Sequence
  ENSG00000182165_30 (sequence is synthesized)
ctctttaaaggatggtttataatcagctataggactttgacacatgctctcaaatgcaagtttctgataactttggagattatgacattggaataaaggaaaaatgtacaggactcatga

SEQ ID NO: 1019480 - DNA, 120 bp, Artificial Sequence
  ENSG00000182165_31 (sequence is synthesized)
atgaagagctaaaatattcatgaatatcaagcaaaacaagagttaacaaaatggactttttaacctttttgcttaaaatgttgctgatccttattttgtttttcagagtcaaggaaactt

SEQ ID NO: 1019481 - DNA, 120 bp, Artificial Sequence
  ENSG00000182165_32 (sequence is synthesized)
taagctatttatagcctctaataattatgtaaggtatacttctgtaaataaaattcagagcatatttatttgtttctctctggttcctctagaacttggaaagtatttgtgagtattctt

SEQ ID NO: 1019482 - DNA, 120 bp, Artificial Sequence
  ENSG00000182165_33 (sequence is synthesized)
cacaatgagaatcattttcttttacaagaggacacaattggagaaactggttgttttctcaaggttttgactaaaggctgtgcttccctttaaggaatcgagcttgacttgcagagccaa

SEQ ID NO: 1019483 - DNA, 120 bp, Artificial Sequence
  ENSG00000182165_34 (sequence is synthesized)
taaaagccccttgggaaaactgcctcatactttgtctacacagcccccgaacagggttcctaacctgtggtgagtaaagaatatcactttctacaggcccaggaacaccatgttcttagg

SEQ ID NO: 1019484 - DNA, 120 bp, Artificial Sequence
  ENSG00000182165_35 (sequence is synthesized)
gagggtacaaacccatggctgggctcagctttaaaaagttctgagattcctgtggaacagtttcatcaaagataatataaaaacctatgtaaaaataattattcttgctgtgctttgtac

SEQ ID NO: 1019485 - DNA, 120 bp, Artificial Sequence
  ENSG00000182165_36 (sequence is synthesized)
aaacctatgtaaaaataattattcttgctgtgctttgtacaaataatcaggccaagtataaaactaaagttgattttgcaaacaactcagtcctatcatgatttgtttttttaacaaaaa

SEQ ID NO: 1019486 - DNA, 120 bp, Artificial Sequence
  ENSG00000182165_37 (sequence is synthesized)
tgagtagagacagaaaaattatgtttcaaaacatatcatatgcttgtcattaattctaatctcattgattgtttttaagtttttgcctacattttaaactaatcctgcttattcctataa

SEQ ID NO: 1019487 - DNA, 120 bp, Artificial Sequence
  ENSG00000182165_38 (sequence is synthesized)
accagcaatctctggctgcagctcagaaagtgcaaaaagggatgggtgatgtacaaatctgaatattctagttcttggcaattatcctacaaatcctgtcaggtgatgggagtaaatagg

SEQ ID NO: 1019488 - DNA, 120 bp, Artificial Sequence
  ENSG00000182165_39 (sequence is synthesized)
tagggtacccataacccagaggtttctttgggaaaataaaaccaaggaagttaaccaaagccaagccccttgcactcaaatcttagtgggcataactgtggccaccagttatctgtacat

SEQ ID NO: 1019489 - DNA, 120 bp, Artificial Sequence
  ENSG00000182165_40 (sequence is synthesized)
gtcagcagccttgggatttttaagctgtgcttatcccctgcttgtttcctctaataacccaaattgtttcttcttgcctaaagactatcaaactccaaatggtaatgcaaatgaaacaat

SEQ ID NO: 1019490 - DNA, 120 bp, Artificial Sequence
  ENSG00000182165_41 (sequence is synthesized)
acatggatatgcctttcttccaggaatccttagaccagccccaggagaaaccctagctgctgttccccatgcagtgcccctttccagtaggaagtagctagaagaatcatcaccccattc

SEQ ID NO: 1019491 - DNA, 120 bp, Artificial Sequence
  ENSG00000182165_42 (sequence is synthesized)
cccctaagaccagttagggtctccacccttgaggagggaaataagacaggagaaaggaagaaagaggtcagggaggcagttaaagtgggtcattggttgaattctttcaaacaaaagaac

SEQ ID NO: 1019492 - DNA, 120 bp, Artificial Sequence
  ENSG00000182165_43 (sequence is synthesized)
agcctgaaggcacatataagggaacttgcacagggcggcttgcctaagacatggccacagccacacagataagaaaggcttcacaggtgacttgtccagacatgctcagcaaagttctgc

SEQ ID NO: 1019493 - DNA, 120 bp, Artificial Sequence
  ENSG00000182165_44 (sequence is synthesized)
ccccctcacacatactttggggaacaaagcaatttggagtacctcaagctaagggcccacatgtacactaggaggacagggtggagctagcagaaattcatgctttatgcagatgaaatg

SEQ ID NO: 1019494 - DNA, 120 bp, Artificial Sequence
  ENSG00000182165_45 (sequence is synthesized)
cccagctatcctcttttataaaagcttttgcattcaactgtaaaaatggcaactctcttccaggccccttctcagtggtggagagctttcttctttgcttattaaactttattaaacttt

SEQ ID NO: 1019495 - DNA, 120 bp, Artificial Sequence
  ENSG00000250075_0 (sequence is synthesized)
ataggccttttatcacgtcatcacaaaaagacggtgccttgaacagtacctgccactcaataggatgtctgatttgaaagtgatcttggcttgggaaaagtccatcaggtgtgacacaag

SEQ ID NO: 1019496 - DNA, 120 bp, Artificial Sequence
  ENSG00000250075_1 (sequence is synthesized)
gctcaaggaaagtatgagaaaaggtgactattctccatcttcttgggtgtccagagagtgttggagtggctccagcatagctacaagggcaggctcggaggtggtatctgcccccaaaaa

SEQ ID NO: 1019497 - DNA, 120 bp, Artificial Sequence
  ENSG00000250075_2 (sequence is synthesized)
tcatttctgtgttgcatgagcatcatttgagaagacctgctgcatcatccctatcaataaggctgtctccatttattgaagctcagataccattgcttcaaggtgcgagctggtataact

SEQ ID NO: 1019498 - DNA, 120 bp, Artificial Sequence
  ENSG00000250075_3 (sequence is synthesized)
gaaagcaaagaagacattgctaagttgaacattttaactagttttaaaaaaattgttaaaacagcattgcagaaacaatagtctggtaagcaaggctttcatttgcaagaactttacaag

SEQ ID NO: 1019499 - DNA, 120 bp, Artificial Sequence
  ENSG00000250075_4 (sequence is synthesized)
agaaaaaggatatgcatgacttaaatagcccaaacttgaagtacagagtctttagtataagccagtacttctgaaggtatactctgtggacctctggatactggcatcaaatgccctcgt

SEQ ID NO: 1019500 - DNA, 120 bp, Artificial Sequence
  ENSG00000250075_5 (sequence is synthesized)
agtcattgtattcttcatcaccaaggaattacgttttttttaaaaaaatagcttcagaatgtccttgctgaagcagtaaaaaattaattttattaaattttgatccttgagcgcacatat

SEQ ID NO: 1019501 - DNA, 120 bp, Artificial Sequence
  ENSG00000250075_6 (sequence is synthesized)
ttttcaatattctgcgtggtgaaatgggaaatatatagagagcacttctgctatgtacaaaagttccgtagttgaacaactgtatggcaataaactaggtaacttagataaaatgaaaaa

SEQ ID NO: 1019502 - DNA, 120 bp, Artificial Sequence
  ENSG00000250075_7 (sequence is synthesized)
tttctagaaagacccaaactacctgaactgattcaagaaagaccaaaaaatccgaatagacttataacatgtaaagcgattcaaattgtaataccaacattcccatgaaggaaagcccag

SEQ ID NO: 1019503 - DNA, 120 bp, Artificial Sequence
  ENSG00000250075_8 (sequence is synthesized)
caataaataaaagatgagagaacacttcccaatgcattctatgaggctaattttatcctgataccaaatctaggcaaatacattacaagaaaagaaaactacggatcaatgtcttttatg

SEQ ID NO: 1019504 - DNA, 120 bp, Artificial Sequence
  ENSG00000250075_9 (sequence is synthesized)
aatatagacacagaattcctcaacaaaacactagcaaatcaaatccagcagtatattaaaaggattacactccataaccaagtatgatttattccaagaatacaagccgttttgacatct

SEQ ID NO: 1019505 - DNA, 120 bp, Artificial Sequence
  ENSG00000250075_10 (sequence is synthesized)
gaaaatcaattaatgtaacacacctcatcaatagaataaagaacaaaaaccatatgatcaccccattataagcagaaaaagcatttgacaacattctatacttcttcacagtaaacacag

SEQ ID NO: 1019506 - DNA, 120 bp, Artificial Sequence
  ENSG00000250075_11 (sequence is synthesized)
ttaataaacaagaaatagaaagaaatttatgcaacctactaaagggcatctatgaaacacccacaactaactaatgtggttaattgttaatggggtaagactgaatgctttccctctaat

SEQ ID NO: 1019507 - DNA, 120 bp, Artificial Sequence
  ENSG00000250075_12 (sequence is synthesized)
atgtgaaacaagagaaagctgttctggccacttctactcaacattatactgttagctttagtaagggcaattagggaagtaaacaaaataaaaggtgtccatattggaaaggaagaagta

SEQ ID NO: 1019508 - DNA, 120 bp, Artificial Sequence
  ENSG00000250075_13 (sequence is synthesized)
caactatctttatttgcagatgatgtaattttatatatagaaattcctaaggaatccactaaaaaactattagaactaataaatgagtctagcccattgctggacgcatgagcaatatac

SEQ ID NO: 1019509 - DNA, 120 bp, Artificial Sequence
  ENSG00000250075_14 (sequence is synthesized)
aaacataattatatttctatgcacttgcaataaatgatctgaaaattaaattaggaaagcaatcacattaacaatggcgtcaaaaataatgcaatgctgaagaataaatttggtgagaga

SEQ ID NO: 1019510 - DNA, 120 bp, Artificial Sequence
  ENSG00000250075_15 (sequence is synthesized)
agtgcaagagttgtacactgagcactaaaaaacattttgctttaattaaagaaggcctggataaataaaaagatatccgatacttgtgggttgaaagacttaaataaaaagatatgccat

SEQ ID NO: 1019511 - DNA, 120 bp, Artificial Sequence
  ENSG00000250075_16 (sequence is synthesized)
catgattttggcaagcaatgttatggaaacactaggtttccccacaatgttgttctagtattccttctctagcttcctgggtgttgaaatgcaatgctggcaattgtcatttcttgatat

SEQ ID NO: 1019512 - DNA, 120 bp, Artificial Sequence
  ENSG00000250075_17 (sequence is synthesized)
gctttttccttctcagaatcttgactaaaaaaacagaaaggaaaggtgagaaaaagaaaaaaatggaataaagatgtctatgtcacaacaggaattttgccttgagaaaaagccctggtg

SEQ ID NO: 1019513 - DNA, 120 bp, Artificial Sequence
  ENSG00000250075_18 (sequence is synthesized)
agagcaatacaactttgctgatctgtctctttccttccatgggctttcctcttctgggtcctgtttatcggccaccctcaattttaattgcacagttgaaggatgtttctggagactgtt

SEQ ID NO: 1019514 - DNA, 120 bp, Artificial Sequence
  ENSG00000250075_19 (sequence is synthesized)
attcttgggaccacagttgctgacttctgtggcacaagctcttcttccccacttgaaaattagaattgctggaaccagtgtcattatcccagcatgctccatcatcaccaagtcatcagc

SEQ ID NO: 1019515 - DNA, 120 bp, Artificial Sequence
  ENSG00000250075_20 (sequence is synthesized)
catactagctcttacacccaagctactgagcgctgttgaagatactcacacaagcttgcaaaatggtataaataaaaatgagcagaaactaacttggctattctcagcaatgtacagaaa

SEQ ID NO: 1019516 - DNA, 120 bp, Artificial Sequence
  ENSG00000250075_21 (sequence is synthesized)
acttctgttaaataattcaccatatatctcgactcacatatctcataaacacccaaaactgcctgtgccaaactcagctaattaacttctcacctaaatatccccaaccccttcctgtgt

SEQ ID NO: 1019517 - DNA, 65 bp, Artificial Sequence
  ENSG00000250075_22 (sequence is synthesized)
gacctcgtgatctgcccattgcgtatcttaagatgacacaccatccatcagaaacgtctccattt

SEQ ID NO: 1019518 - DNA, 120 bp, Artificial Sequence
  ENSG00000250075_23 (sequence is synthesized)
ataggccttttatcacgtcatcacaaaaagacgggaagaagatcacagaagtaaagtgccattttcatcacatcattttaagggtacaaattatcaacatgatttgtgattactgatgtt

SEQ ID NO: 1019519 - DNA, 120 bp, Artificial Sequence
  ENSG00000242671_0 (sequence is synthesized)
gggtcagccctgctctgtctacggagcagctattttgctgtatgctgttgttctaataaacttctttctttcactgctggctggcgcttgaattctttcctgagtgaagccaagaatcct

SEQ ID NO: 1019520 - DNA, 120 bp, Artificial Sequence
  ENSG00000242671_1 (sequence is synthesized)
cccaggctgaacgccaattcgggataaacctgcatccgctggataacttgataatgaatttttaaattaattttttcacttattgatccacttttctcagtcattttctgtttcctgcaa

SEQ ID NO: 1019521 - DNA, 120 bp, Artificial Sequence
  ENSG00000242671_2 (sequence is synthesized)
ccgaagacccctaagttacacagaaatcagatttaaaaatacagactcagacgaatgtaaatattttgaattgaatggagtgaaaagtgctgagactcctacccatgttcagagatatga

SEQ ID NO: 1019522 - DNA, 120 bp, Artificial Sequence
  ENSG00000242671_3 (sequence is synthesized)
aagtggtggtcaatgagaaagaatctttaaacaaccacaagcagtgaccggttggaacctgggcctcctgaagatgaagttcagagagcaggtggctgttgtcatagaactgcttaaata

SEQ ID NO: 1019523 - DNA, 120 bp, Artificial Sequence
  ENSG00000242671_4 (sequence is synthesized)
gaatgaggaatggtaggcccaccgagtagaatggctacatctgacaggcctagtaatgaaattggagactggaaagcccaggccttatgggtttcaaagcacaggatgaaattcagaatc

SEQ ID NO: 1019524 - DNA, 120 bp, Artificial Sequence
  ENSG00000242671_5 (sequence is synthesized)
cttgtgtgagtgtacagaacagtcccttattacttgtagctatgctgcggagcacacagaaaactaattccacggatgcattttgcaccttgctgaattataatattagttgaattcaca

SEQ ID NO: 1019525 - DNA, 120 bp, Artificial Sequence
  ENSG00000242671_6 (sequence is synthesized)
aactctcatgtatgtgaaagctaaggcattaattaagaaagagtggactcggtataaagtcataataacactctggcatccaatttccagaatttaaaattatctctctgcctaaatagc

SEQ ID NO: 1019526 - DNA, 120 bp, Artificial Sequence
  ENSG00000242671_7 (sequence is synthesized)
atatgtcttacttttcatggggaatactaacaatattgttagtagcattatttcatgaatagctatattttaaagaataaattagataacccacaccaaacacttaacacagtgcctagt

SEQ ID NO: 1019527 - DNA, 120 bp, Artificial Sequence
  ENSG00000242671_8 (sequence is synthesized)
acaaagatagtacttggatgttagctagtaattcaagtaaaatctttaataattttcaaatagatgaaaaagaatttgtattaagtgtatttatcaaacgattacttactctgctacaca

SEQ ID NO: 1019528 - DNA, 120 bp, Artificial Sequence
  ENSG00000242671_9 (sequence is synthesized)
atcttcatgttcaaagaaatttaatgcatatttcttacaatcagaaatcttccaattattctgggaaggtctgaataaaacttgcaaaaatttaaatgataacataggagaaatagaagg

SEQ ID NO: 1019529 - DNA, 120 bp, Artificial Sequence
  ENSG00000242671_10 (sequence is synthesized)
tcgaagtagtgagacaagaactcagtcataaggttttataagattaagtgctcaatgaatgctcttggaaaaaggtgttatatttttcttaaatatcttttttatcaaatgactatttga

SEQ ID NO: 1019530 - DNA, 120 bp, Artificial Sequence
  ENSG00000242671_11 (sequence is synthesized)
tctactgtatttgaagagttaaactcatttctacatgtcttatttttcttatgttcttatagcaaggatcagtcagatctaaatacttgtttcagaactgcacactttgggttttgacat

SEQ ID NO: 1019531 - DNA, 120 bp, Artificial Sequence
  ENSG00000242671_12 (sequence is synthesized)
ttatttttttatttcctaagccagaaagtgaatctttgaaaactgtaagacaataatccaagtggaaaatgctttgaaagctctttgtagttggcaataaggctttattaatgacaattg

SEQ ID NO: 1019532 - DNA, 120 bp, Artificial Sequence
  ENSG00000242671_13 (sequence is synthesized)
ttctcacatgatggatgtacttgccataatacctatgggcttatactgtgactgttagtatttccttgaacaattccctaagtgaccatatataatttaatacacctagcctcccaaaac

SEQ ID NO: 1019533 - DNA, 120 bp, Artificial Sequence
  ENSG00000242671_14 (sequence is synthesized)
acattgtcttgtggatttgtcagtagtgtatcttaatgagaaaaaatgtcctccttaaatcaaatgtaaattacttttttaaaaaaatctaactacagataaaacgtacttttaaaaata

SEQ ID NO: 1019534 - DNA, 120 bp, Artificial Sequence
  ENSG00000242671_15 (sequence is synthesized)
gctctgtttgggtacactgctggggctgctgctgctctggtctgttctgcctatggagcagccactttgctgtacaccgctactccgggccactctgcctataaggaagcactgctctgt

SEQ ID NO: 1019535 - DNA, 120 bp, Artificial Sequence
  ENSG00000242671_16 (sequence is synthesized)
ttaaaattttgttaaatgaatcatattttccattgatttgcactattatattagagatgtgttcctatggtaagaaatttgaccaaaagtgaatatataatacaacttagaaatgcagag

SEQ ID NO: 1019536 - DNA, 120 bp, Artificial Sequence
  ENSG00000242671_17 (sequence is synthesized)
tttgctgaaataatatgtaaaaacatatctgtaaagttttctgcattcctgtatatgaattagaaaaataataccttaatcacatagctattgtcgggagcaattaaataagactttaaa

SEQ ID NO: 1019537 - DNA, 120 bp, Artificial Sequence
  ENSG00000242671_18 (sequence is synthesized)
tgctataaatttcacaatactgtgcaatatttttatcataatcccctttacaaacaatatggcttatctgtagtttgccttgcttgctatacaaatgctcaggtgaccatctggtacaaa

SEQ ID NO: 1019538 - DNA, 120 bp, Artificial Sequence
  ENSG00000242671_19 (sequence is synthesized)
atggtgctcagaatcatttacatctctctttttcttctaagttatttcattatctgtttagcaataatttcacataaagataataacatctattttgcttaattttctattgatatctag

SEQ ID NO: 1019539 - DNA, 120 bp, Artificial Sequence
  ENSG00000242671_20 (sequence is synthesized)
tttccaacaatattttagctttctatttacttttaaaatgtggtttgcaacatagcaagtgagttcctctttcagtaaagatcgaggacagagaatttgggtcatctcgcctaaagtgtg

SEQ ID NO: 1019540 - DNA, 120 bp, Artificial Sequence
  ENSG00000242671_21 (sequence is synthesized)
taatagctaaaaaaataccaatctggtttcaaagtggaaaaagtgacataaagatgttgagccgaccccttctcactttatttctatggatcatgtcatcattctaattcaagtgtaaca

SEQ ID NO: 1019541 - DNA, 120 bp, Artificial Sequence
  ENSG00000242671_22 (sequence is synthesized)
gcagaagttggattctcttcatgctacaatcatataagagatgttgctaaaatgtacacttgtcatattcctttaaatacacccagaaaggatttattctttccattctgtcttctccat

SEQ ID NO: 1019542 - DNA, 120 bp, Artificial Sequence
  ENSG00000242671_23 (sequence is synthesized)
tccactaccataacttgagttcagggggacttttctctccctggaccatatatcccaataatctaatataactacatataacaccaatcatttcacacactagatgctgatctaatcttc

SEQ ID NO: 1019543 - DNA, 120 bp, Artificial Sequence
  ENSG00000242671_24 (sequence is synthesized)
tgctcacctcactaatcttatattcttgaaaacaactctaatcgtattactgcaaaaatatcaatagctcattacttaagcagtaaaatttcaaactcttaaatctacaagtgaaggtct

SEQ ID NO: 1019544 - DNA, 120 bp, Artificial Sequence
  ENSG00000242671_25 (sequence is synthesized)
actgtcattgacccctgcttttcatccagaccccaattcttcctgacactcccatgaaactggagtacttgctcttacttatcagtaccattctagcactcttacctccatttgttcgct

SEQ ID NO: 1019545 - DNA, 120 bp, Artificial Sequence
  ENSG00000242671_26 (sequence is synthesized)
tgtgctagttctgggtatactgccgccgtcttcccacactgatgatcgcacccaaatagaaggtcattcattgattttttactatcaaaacatttaattattcacaagacaatggcctcc

SEQ ID NO: 1019546 - DNA, 120 bp, Artificial Sequence
  ENSG00000242671_27 (sequence is synthesized)
acttcatccatgctgctgcaaattacaggatttcacattccattctatgtatcccctaaatctgtcaaaacaaaaacaaataatttaatgctcatttgcttgatttatttctgtcttaaa

SEQ ID NO: 1019547 - DNA, 120 bp, Artificial Sequence
  ENSG00000242671_28 (sequence is synthesized)
ttatttggggtactagtaaaagaatgagattagattcagacaatctctaagcctcctaaagttcaaagattatattccaggcactcagaatatcatgacaaaatgtgaatatttttgttg

SEQ ID NO: 1019548 - DNA, 120 bp, Artificial Sequence
  ENSG00000242671_29 (sequence is synthesized)
attaaagtgttatgttaaagcttgtgtttgactaaaagtgaaccgctggatgaattttcacaatgtgaacacacccaagtaaccaacacccaaagagacagaatgtcagtggcaccccac

SEQ ID NO: 1019549 - DNA, 120 bp, Artificial Sequence
  ENSG00000242671_30 (sequence is synthesized)
aaaacacctctagtaaccccttccagttcaccagatccatcagtaggcaactgctatcttgacttgtaaaagcacaaattaattggaatattttggaacatcatggacatggaatttctc

SEQ ID NO: 1019550 - DNA, 120 bp, Artificial Sequence
  ENSG00000242671_31 (sequence is synthesized)
tcacagtttgtactgttttgtgtctggcttgttgttgtcgttgttgtttaacattatggttgtgagattcatcaaacaaacaaaggttgtgtttgaaagacattttgcaaatatttgttt

SEQ ID NO: 1019551 - DNA, 120 bp, Artificial Sequence
  ENSG00000242671_32 (sequence is synthesized)
ttaagttactgtcaatacttgaaaaggtcgctagatgtagatgttcttagccttccaaggtatcatgatttctcagtttcctgctctacctagcacagacagcacctaattcttattaaa

SEQ ID NO: 1019552 - DNA, 120 bp, Artificial Sequence
  ENSG00000242671_33 (sequence is synthesized)
ctgctctacctagcacagacagcacctaattcttattaaacacaatcagcaaaccgtagaagtgtaataatactgttaaaaaatctcgttcccagccaggcgcggtggttcatgcctgta

SEQ ID NO: 1019553 - DNA, 120 bp, Artificial Sequence
  ENSG00000178248_0 (sequence is synthesized)
ctgtgctgagtttttcgaaggtcagagcagattgaacctttgtgctttcatttttcctgattttgatttttcttatggggatccacttttcctgcattcgaggtgacttgaagaagcctt

SEQ ID NO: 1019554 - DNA, 120 bp, Artificial Sequence
  ENSG00000178248_1 (sequence is synthesized)
ccaaaaagcgtgtgaaaagggagccctactctactaccatgttacaggtgacttcattgagcccaatcaatgaaattttgagaagatacagcctgtacaccaaccagcattggaggcatc

SEQ ID NO: 1019555 - DNA, 120 bp, Artificial Sequence
  ENSG00000178248_2 (sequence is synthesized)
atggcttctggagaaagaagatacagccacaagaagcctctgaggagcctccagctcacaaggacagaggaggtggagagaggccagtcaacgcgagggtggtgcgggtggcccctctga

SEQ ID NO: 1019556 - DNA, 120 bp, Artificial Sequence
  ENSG00000178248_3 (sequence is synthesized)
ggcctggttttgctctttgtgggtacgctgtacaagacatctctaaagaagacactgtatatgacatctgtaatgaggatgctgtagacatctctgatgaggacactgtagatatctcta

SEQ ID NO: 1019557 - DNA, 120 bp, Artificial Sequence
  ENSG00000178248_4 (sequence is synthesized)
atgaggcttctgtacatgacatctctaatgaggctgctgtatgtgacatctctaacgatgccgtaaacatctctaatgaggctgctgtacgtgacatctctaatgacgctgtagacatct

SEQ ID NO: 1019558 - DNA, 120 bp, Artificial Sequence
  ENSG00000178248_5 (sequence is synthesized)
gtaatgaggctgctgtacatgacatctctaatgaggacactatagaagacatttcttatgaggacactgtatacgacatcactaatgaggatgctgtacgatacctctgtaaaaaagatg

SEQ ID NO: 1019559 - DNA, 120 bp, Artificial Sequence
  ENSG00000178248_6 (sequence is synthesized)
cactggagaatgatttgattgtggagagcatgtctgatgacgaggattttgcagcttaaagggagctcccggggtgagtgatggaggcgggatcggaccctggcagtttgacggcaacac

SEQ ID NO: 1019560 - DNA, 120 bp, Artificial Sequence
  ENSG00000178248_7 (sequence is synthesized)
ctgtgttcctctgcactgggccgtggatgacattacacaccttggtgagaatcaggaattgaggctaatcacatctgaaattgagctcgctcactggacaggatagactgggcgcccagg

SEQ ID NO: 1019561 - DNA, 120 bp, Artificial Sequence
  ENSG00000178248_8 (sequence is synthesized)
cctcaagggcttatgatttcttctcgggtttgaaacatgcccccagatgagcaagacggggctgccacattgacggagcagctgcgggacacacccaagaaacctcctggagaacacagg

SEQ ID NO: 1019562 - DNA, 120 bp, Artificial Sequence
  ENSG00000178248_9 (sequence is synthesized)
ggacattcacggctggaggcttcatctatggccgggggcttcatccatgagctggggacttcatccatgggctggggacttcatccatgactggggacctcatccacgtctggagacttc

SEQ ID NO: 1019563 - DNA, 120 bp, Artificial Sequence
  ENSG00000178248_10 (sequence is synthesized)
atccgcgactgggggcttcatccatgggctgggggattcatccacgggctgggggcttcatccatcactgggggcttcatccacgggctgggggcttcatccatgactgggggcttcatc

SEQ ID NO: 1019564 - DNA, 120 bp, Artificial Sequence
  ENSG00000178248_11 (sequence is synthesized)
cacgggctgggggcttcatccatgggctgggggcttcatccatgactgggggcttcatccacgggctgggggcttcatccatgactggggacttcatccacgactggagacttcatccat

SEQ ID NO: 1019565 - DNA, 120 bp, Artificial Sequence
  ENSG00000178248_12 (sequence is synthesized)
aggctgggggcttcatctacagctggagacttcatccacagcaggggcttcatccttggttggtttgcctgatctgtatctgagccacagatacagattattaaacagataataatttta

SEQ ID NO: 1019566 - DNA, 120 bp, Artificial Sequence
  ENSG00000287778_0 (sequence is synthesized)
gtgggggaaaatctaagcgctggatgtacaacgggaagggtaaggcagggatttgcagcggagcgcgcgtctcctggaatttcagtagaagaaattaaatcatttttgggaagccctcaa

SEQ ID NO: 1019567 - DNA, 120 bp, Artificial Sequence
  ENSG00000287778_1 (sequence is synthesized)
ggtaccataagctctgggcagtgtgcctaagacttctaatggagaatttagccctgtgcagatgatattgcagaggaggaatgcttagttaatttagttccaggatacctgtgcaggaca

SEQ ID NO: 1019568 - DNA, 120 bp, Artificial Sequence
  ENSG00000287778_2 (sequence is synthesized)
tgccatggtggtttgctgcacctgtcgacccatcacctaggtaacctggtaccatcttgaagagaactccaaaaccgtagagtttatcacctcagagtcctgcctggaacaaaaatcact

SEQ ID NO: 1019569 - DNA, 120 bp, Artificial Sequence
  ENSG00000287778_3 (sequence is synthesized)
acctcagagtcctgcctggaacaaaaatcactgatgaactttgagttctattacagaccctgtgtagtgaggtgagtattaaagccaggccttgataaaaggataaataacttcttgagt

SEQ ID NO: 1019570 - DNA, 120 bp, Artificial Sequence
  ENSG00000287778_4 (sequence is synthesized)
ttctgtagattcagcagggatcagaagcccagcagagctgactttccgtatgactgaggtggagagaattcaagctatgacacagtgaaggctgaaatgtgcttcttctggcctcaacaa

SEQ ID NO: 1019571 - DNA, 120 bp, Artificial Sequence
  ENSG00000287778_5 (sequence is synthesized)
catttagaaaagagctcagtgacagaaaaagatatgggaattgagataatggggtcctcgtttctcctcagcttgggatttggactgggaaacaaggaagttttaaaaagattcaggaag

SEQ ID NO: 1019572 - DNA, 120 bp, Artificial Sequence
  ENSG00000287778_6 (sequence is synthesized)
gtttggggaactcagaacgtggggaaatggatgacatccttctccaggccaccagtccccaggagaagcactccacaaggacaccttcagcatgggcagaggtgaggtagaactatctgt

SEQ ID NO: 1019573 - DNA, 120 bp, Artificial Sequence
  ENSG00000287778_7 (sequence is synthesized)
ggagggagggggctggacagtgggcttgaggcagtatgagcagctccacagacctgggagagtgttacagggatccagaagtcccccattgaaatgagggaaggatggaacatttctgtc

SEQ ID NO: 1019574 - DNA, 120 bp, Artificial Sequence
  ENSG00000287778_8 (sequence is synthesized)
gggctggtggtccagcagagtctgacagtcatgacgtaaaagagcctgcagtgtggggaaccgtggtgtctctgcagaaaagctacaaccttgtactccagacatgggcattctcatgtt

SEQ ID NO: 1019575 - DNA, 120 bp, Artificial Sequence
  ENSG00000287778_9 (sequence is synthesized)
gaccctggaaaggtcttaagcccagtgagcacatcagactgatcatcggttgaaaccgtgcagactcagattgacaatgcatgggtctatatgcaccccttgcttgctttcttcaaacac

SEQ ID NO: 1019576 - DNA, 120 bp, Artificial Sequence
  ENSG00000287778_10 (sequence is synthesized)
ctcttgcctgagtgtctgtgcatttgttcttccttctctcaaggataccctttcttttcctcttcactcctgtgctttcttagccttgagatcattattccagttgcctcttcccagaag

SEQ ID NO: 1019577 - DNA, 120 bp, Artificial Sequence
  ENSG00000287778_11 (sequence is synthesized)
acctccaggaccaccacctgcattatattaagggatttcccttcttaatttttctgcttgtctatttcccatcatccaccacgtaagttccatgatgtcagggccctttctgtttggtta

SEQ ID NO: 1019578 - DNA, 120 bp, Artificial Sequence
  ENSG00000287778_12 (sequence is synthesized)
atttctgcatcttattatcgactgcatgtttgtgtacccctcaaattaaatgctgaatccctgaacatcaatggaaaagtatttgtaagtggggccttcggaaggtaattagatcacaag

SEQ ID NO: 1019579 - DNA, 120 bp, Artificial Sequence
  ENSG00000287778_13 (sequence is synthesized)
atttgtaagtggggccttcggaaggtaattagatcacaagggtggagctctcatgatgagattagtgacgttataagaatagacaggaaagagcctctctctctctctctctctctctct

SEQ ID NO: 1019580 - DNA, 120 bp, Artificial Sequence
  ENSG00000287778_14 (sequence is synthesized)
cagagggctctcaccaaactctaccatgcagccttctgatattgatcttctagactacagaagggtgagaaataaatttctgttgtttaagctacccagttaatggtattgttattatag

SEQ ID NO: 1019581 - DNA, 120 bp, Artificial Sequence
  ENSG00000287778_15 (sequence is synthesized)
attatattgtcccatcatggactgggcccctactacatgttggcaccatactcaaccatttatttaaattatttcttatcgtagaaatgccctgttacattgtgcaagtagacaaactcg

SEQ ID NO: 1019582 - DNA, 120 bp, Artificial Sequence
  ENSG00000287778_16 (sequence is synthesized)
ggctctggtgagataatgttgcctgaagttttcagattaaatgttagtaagtaggagagctaagaatagactcagatacttcaaattttaaggttttctattatgttaccatgtctttca

SEQ ID NO: 1019583 - DNA, 120 bp, Artificial Sequence
  ENSG00000287778_17 (sequence is synthesized)
aataacaaaaataatgttttcattttacaaagtgctttggtttattttggaaaatgtgaggtgaattggaaagagcactattaacattttactctggataattccttgctatagggtgtt

SEQ ID NO: 1019584 - DNA, 120 bp, Artificial Sequence
  ENSG00000287778_18 (sequence is synthesized)
cttctgtgcactgaaagatggttagcagtattcctggcctctatccactaggtgccaatagtataaatggtccccttccccagttgtgacaaccccaaatctccaaacattgccaaacat

SEQ ID NO: 1019585 - DNA, 120 bp, Artificial Sequence
  ENSG00000287778_19 (sequence is synthesized)
ctcgtggatgcacaattaatcccaatggagaaccagtggtttaaactgacaccatttgtgtgatcttggtcagtttatttgtatccgtgagctcagtcccctccaccacagagaggaatc

SEQ ID NO: 1019586 - DNA, 120 bp, Artificial Sequence
  ENSG00000287778_20 (sequence is synthesized)
acaatatttgccacccgtactacaaagctcatcaagccagtatatctggtgagatgaaagggaatcaccatatattgagagcctgttgtatgtaaggcatcactccagcctgcatgtttt

SEQ ID NO: 1019587 - DNA, 120 bp, Artificial Sequence
  ENSG00000287778_21 (sequence is synthesized)
cttgtttagtccaccccacatccttgtgaagtcctattatctcttttttacatatgaagaaagtcaggttcagagaagtaaagtaacatgcttaaagtcacagattcagcaggcatgaga

SEQ ID NO: 1019588 - DNA, 120 bp, Artificial Sequence
  ENSG00000287778_22 (sequence is synthesized)
gagcagtcacacttcatagcaagtgcaatggaaaaatgtgactggtcaactctaacctacgatacatgtggaaaatatgataggttgctacacgtggttaattggtcaatattatcaccc

SEQ ID NO: 1019589 - DNA, 120 bp, Artificial Sequence
  ENSG00000287778_23 (sequence is synthesized)
cgtggttaattggtcaatattatcaccctgcaacaagacaaacaacaacaaaaattttatatatatatatatatacatatatttatatacacattttgttatttgaaagatatgataaca

SEQ ID NO: 1019590 - DNA, 120 bp, Artificial Sequence
  ENSG00000287778_24 (sequence is synthesized)
acacacacacacatatatatatatatatcctgagtcaaaaaggaagtggaaatgttagtaaatgccttgagtttgtaaacttgtatagacattctttaatttcctttatgactatgaaaa

SEQ ID NO: 1019591 - DNA, 120 bp, Artificial Sequence
  ENSG00000287778_25 (sequence is synthesized)
ttcctttatgactatgaaaataaatattttaccttcacagaaaggaaacgatccatagacatcattaaaaaacactgatgaaccccttatacaatagcattttattctcatgaaagaaca

SEQ ID NO: 1019592 - DNA, 120 bp, Artificial Sequence
  ENSG00000287778_26 (sequence is synthesized)
aggttatgtccagcactagagtctatcacattagtgtaatttcatggagcatcgatacttcaaacttttgtttttaactgcttttatggttttcaggaattttactgttgtcattatttt

SEQ ID NO: 1019593 - DNA, 120 bp, Artificial Sequence
  ENSG00000287778_27 (sequence is synthesized)
ttacataaatgtactttgtgttctctgtaaggattaagcaggaaaaaagtattgttttggagagagagagactgaggggtgaaagggaagaaggaaggaagggacagacagtatgaagac

SEQ ID NO: 1019594 - DNA, 83 bp, Artificial Sequence
  ENSG00000287778_28 (sequence is synthesized)
gaaagggaagaaggaaggaagggacagacagtatgaagaccattccagctgggcgcgccggctcacaccattaatcccaacat

SEQ ID NO: 1019595 - DNA, 120 bp, Artificial Sequence
  ENSG00000287778_29 (sequence is synthesized)
attgcaaacgtcagctctgaaataaaaagcaggatatttctgccccgctcctctattccggaagctgggaggttctgtgggagaaaggacctgcacccaataactcaatttaagatttaa

SEQ ID NO: 1019596 - DNA, 120 bp, Artificial Sequence
  ENSG00000287778_30 (sequence is synthesized)
gacaggggcagaagtcagccatctacaagtcaaagggagacatgtggaacagattcaccctcacagccctcagatggaagcaacaccactaacactttgctcttggacttctagcttcca

SEQ ID NO: 1019597 - DNA, 120 bp, Artificial Sequence
  ENSG00000287778_31 (sequence is synthesized)
gaactgagagacaatatctttctgttgcttaagtcattctgtctgtgatactgtgtttatggcagccctggcaaactaatacagtcccacaaagatttggttgttgctttgcaagagaat

SEQ ID NO: 1019598 - DNA, 120 bp, Artificial Sequence
  ENSG00000287778_32 (sequence is synthesized)
tcccaggtgaaatcatagtgcattttaaatgatattttaaagagcaattatactcgtcatatgtacttcaaataatactgattcctcaattgaagtaatggtaacatgagtgtattagtt

SEQ ID NO: 1019599 - DNA, 120 bp, Artificial Sequence
  ENSG00000287778_33 (sequence is synthesized)
aattttttctgaataactagttacctccaaagttcatgccttcaagcaacacatattcattatttcacagcttctttgggtcaggagtcttggcatagcttagctgagtcctctggctcc

SEQ ID NO: 1019600 - DNA, 120 bp, Artificial Sequence
  ENSG00000287778_34 (sequence is synthesized)
tggcgtcccaggctgtaatcaaggtggtggccaggactgtagtcatgtcagggctcgccagggaaggatctgcctccaagctaaccagtgtggcttttggcagaatatatttctatgcag

SEQ ID NO: 1019601 - DNA, 120 bp, Artificial Sequence
  ENSG00000287778_35 (sequence is synthesized)
gttgttggactgagtttcttgctggctgttccagaggttcccttagcatcttgtcgtgtggcctcttcataggtcaattcatattggcttcatcaaagtgagcaggtaagatagcaaaag

SEQ ID NO: 1019602 - DNA, 120 bp, Artificial Sequence
  ENSG00000287778_36 (sequence is synthesized)
agaatgcccaagatagaagccatagtctttttgtaatctaatcttagaagtgacagcctgttatatttgctatattctctttgttagaaacaagtttctagggctgggcatggtggctca

SEQ ID NO: 1019603 - DNA, 120 bp, Artificial Sequence
  ENSG00000287778_37 (sequence is synthesized)
ttttgaggggcgtggggttggaatcgccttggagaaacgggtttgcctgcttacctgagccaaaggaagttgccctcaaaggcaggtcagcaatcataccccgccaaaagcaaatgcaca

SEQ ID NO: 1019604 - DNA, 120 bp, Artificial Sequence
  ENSG00000287778_38 (sequence is synthesized)
tcaaagtaacttcctttaaatgagattactgtagtttccatgtcttccacattagtaaataaatatttggaagacttcgaatttgtgatttacgtttaaatatatttcaccaacattgtt

SEQ ID NO: 1019605 - DNA, 120 bp, Artificial Sequence
  ENSG00000287778_39 (sequence is synthesized)
taattaaaaaaaaatcccatctaagagaaggttcctataggaaattggccctttaactcatacacagattaccctcggcactttcagaaaacaacacagtgaccagtatattctgtcttt

SEQ ID NO: 1019606 - DNA, 120 bp, Artificial Sequence
  ENSG00000287778_40 (sequence is synthesized)
ttgatacagccagaagcaccctgaaagctgagacctaactgtgcttttggaaaataagcttttaggagttgaatgaccttgtctacttcttttagtcagaataatgttggcatgtctatt

SEQ ID NO: 1019607 - DNA, 120 bp, Artificial Sequence
  ENSG00000287778_41 (sequence is synthesized)
ttaggttaaaaaaaaatacaaattctaaaaagtgactttaaaggcccactttgaaagccttagcatttaaactaacattagatttaaaagaagggcttttctcccccattataggaagct

SEQ ID NO: 1019608 - DNA, 120 bp, Artificial Sequence
  ENSG00000287778_42 (sequence is synthesized)
gtgtaaaatcatgtgtgaggttgtgagggtcaaatggaagtctaagataaagttctgccaattactggtgtctttaagcttccaccagcagccaagcacagtgcagatcatgagtccttc

SEQ ID NO: 1019609 - DNA, 120 bp, Artificial Sequence
  ENSG00000287778_43 (sequence is synthesized)
aaaatacggggtggttttaatgctctaagttggtatgattactttttctaaagagctcaaagtgctttggtgccatagtatgaatttcattacccattgtgagacacaaagggggttagc

SEQ ID NO: 1019610 - DNA, 120 bp, Artificial Sequence
  ENSG00000287778_44 (sequence is synthesized)
aatgattctgtttgcaccctggaagccaaaggcaggttactcacccacttagttccctaccacaagaccttgaaagaaactggaaccccaggtctccagcccagagattttgttggaagt

SEQ ID NO: 1019611 - DNA, 120 bp, Artificial Sequence
  ENSG00000287778_45 (sequence is synthesized)
ttccatttgcaggaaatgactgcagggcacatgtgggaagtgacaggaatttgaggactaacattttagttttcctcatttctttttaaatctgagcaattgttcattgatcgataatct

SEQ ID NO: 1019612 - DNA, 120 bp, Artificial Sequence
  ENSG00000287778_46 (sequence is synthesized)
atgttcttacattcagataaataaaaacaccaactggctattttgttcttacttagttttatgtgtatgtccaggcatttgccactgctcctaaatagctctccctgaagtcttctggtc

SEQ ID NO: 1019613 - DNA, 120 bp, Artificial Sequence
  ENSG00000287778_47 (sequence is synthesized)
atgagttaggtttcttatccagaagctcatgtagtgccagagcttagctctcctatgacaacacaatcacattattgaaacatctatttagggatctgtcttctctaatagattataaac

SEQ ID NO: 1019614 - DNA, 120 bp, Artificial Sequence
  ENSG00000287778_48 (sequence is synthesized)
gccttgagcttgggtatcgtgatttaatgatgaatcctccatggtatctgaatcccagaatcctacaatcctgcatggtatctgaaacatactatgctcttaaaaaaaaaaaaaaaaaac

SEQ ID NO: 1019615 - DNA, 120 bp, Artificial Sequence
  ENSG00000287778_49 (sequence is synthesized)
tttgtaaatggaacttccctcaaggagtcagggtttaagtcaaacatgtttccctttcaaagccgtgggcatgagaatagaggctgttaggagacacagtagtagttgactgcaaaagtg

SEQ ID NO: 1019616 - DNA, 120 bp, Artificial Sequence
  ENSG00000287778_50 (sequence is synthesized)
tctgtcagtcagttgtgtggcccaagactctttttatcagttccaacaactgaaaaatgagagggttttagtggaagatctctgtactgctaatattttaagatctcgaagtctttattg

SEQ ID NO: 1019617 - DNA, 120 bp, Artificial Sequence
  ENSG00000287778_51 (sequence is synthesized)
agcacctagtatgtgtacaacactatgccagttactaagagagagatgaaaaaataagatatctccattgccctaagagagcataaaatcttatctcaaggaaaaacaaggcaaacactc

SEQ ID NO: 1019618 - DNA, 120 bp, Artificial Sequence
  ENSG00000287778_52 (sequence is synthesized)
agcaactgacctatgagtttgggcaataatcagtaataataccagctaaagtgtatctaaggcttatagtgccaggtactatgcaaaatgaatcataggagctgcaccttttgttcattt

SEQ ID NO: 1019619 - DNA, 120 bp, Artificial Sequence
  ENSG00000287778_53 (sequence is synthesized)
tacaaatggggaaacggaggtttaggagagtttagtgactcgttcaaggtgacatactaataagtggtagggctgatattcaaagagttctcacctgactccaaagtgcatcttctcaac

SEQ ID NO: 1019620 - DNA, 120 bp, Artificial Sequence
  ENSG00000287778_54 (sequence is synthesized)
caatattagagattattagcccagacttccctattttataattgagggatttcattagagcactagaggaggaagctacccttccagtaaaaactagactcctagtctagtgctctatgt

SEQ ID NO: 1019621 - DNA, 120 bp, Artificial Sequence
  ENSG00000287778_55 (sequence is synthesized)
aattaagtaatatgcttatgtttgctatttttctggtttttctctttcccacaaaatatgtaataggagacgggaggtcaggaaaaggggagagagagaaaaagagagaagttgcttctt

SEQ ID NO: 1019622 - DNA, 120 bp, Artificial Sequence
  ENSG00000287778_56 (sequence is synthesized)
ttgaagatgtccagaatccacagtagtctacctgctcagactcaatggggttttatttgtaacccccagtctagtgggcagccctgtatagcctttcttcccatcatggctgtttgaatc

SEQ ID NO: 1019623 - DNA, 120 bp, Artificial Sequence
  ENSG00000287778_57 (sequence is synthesized)
tttcaggttaatagcatgaatattaaagactccagtgggactctttatccacaaaggaaattgggatcaggttaaaaatccaattttaataaactttccaagtcctgatttagatgaggt

SEQ ID NO: 1019624 - DNA, 120 bp, Artificial Sequence
  ENSG00000287778_58 (sequence is synthesized)
actaatggctcttactgctgaatcaccttaaaagtcaaatgtatttttaaaagggaagcttgttgggtattgtttaattgtgcattgcacattcctgtcttaatagaaaaagatcatctg

SEQ ID NO: 1019625 - DNA, 120 bp, Artificial Sequence
  ENSG00000287778_59 (sequence is synthesized)
taaaacttatgagagcagataggaaatgccactatccacagagccagttgggtagagggaagggcgttgggtttgaaagataattttcactcgtttgaccaaaacaaagagagcatgatt

SEQ ID NO: 1019626 - DNA, 120 bp, Artificial Sequence
  ENSG00000287778_60 (sequence is synthesized)
gcactgtgtgaaaatgatatcctcgaataactccactaatttgattgtgctgaggtctagaattgtttctatttcttttgatttgctaattagctagagcagtccgctagtgagagggga

SEQ ID NO: 1019627 - DNA, 120 bp, Artificial Sequence
  ENSG00000287778_61 (sequence is synthesized)
aatgagggtcacagccataaaacatggaggattgttgttccttccaactcagctcacccatctcatgcctccccaaccatcccgtcccaacgcccaattttgtctctgtgtatgtaacaa

SEQ ID NO: 1019628 - DNA, 120 bp, Artificial Sequence
  ENSG00000287778_62 (sequence is synthesized)
caatccatccatctatgacaaattgagtgattcttttctgaaaacaggatttttaagattatctactttatgacaccaaatttgacacatcttggcatatgtggttatgaggtccagtta

SEQ ID NO: 1019629 - DNA, 120 bp, Artificial Sequence
  ENSG00000287778_63 (sequence is synthesized)
tgacttttatgatgttttcctttatgaatcctgctccctgccttgccaagttaaaattatatcttatgattacattagtataaaggtgagtatattttcttctttatttaaatatcttct

SEQ ID NO: 1019630 - DNA, 120 bp, Artificial Sequence
  ENSG00000287773_0 (sequence is synthesized)
ttgtttcagagcccatggattcgagattctccaataaactggttctacaagtaaataaatgatcaagataatttgaggcagtgcagatgacaaaacggagctgagatgggtgttgatttg

SEQ ID NO: 1019631 - DNA, 120 bp, Artificial Sequence
  ENSG00000287773_1 (sequence is synthesized)
tggggtaactggtttggggggataggaaggactatgagaagaagggacatttgcactgagattcagcaagaaggtcagcaagtgcaaaggccctgaggcacgaacaagcttggaacatgg

SEQ ID NO: 1019632 - DNA, 120 bp, Artificial Sequence
  ENSG00000287773_2 (sequence is synthesized)
aggaacttaaggccggtgaagacataccctggtgtgtgccggggaaggagaggaagtgcccaacgctggacctccgtaaagtccgatgagtgtgggaggtgtggatggacaccagagatg

SEQ ID NO: 1019633 - DNA, 120 bp, Artificial Sequence
  ENSG00000287773_3 (sequence is synthesized)
tagaatcacctgccatccatagaggagaaaaaggagccgactcttgatttctaaactccagtggaacccaaaaagcgttgatctttcaaatcctgagggaggttagaggaaccgcccctc

SEQ ID NO: 1019634 - DNA, 120 bp, Artificial Sequence
  ENSG00000287773_4 (sequence is synthesized)
tgtctcctttaggatctccgaagaaggttctgtttgttgtcctccacgattcttgccttctgtaagagcggtttggcctgggacctggcctcttgtcctcttccatggctctgggctggc

SEQ ID NO: 1019635 - DNA, 120 bp, Artificial Sequence
  ENSG00000287773_5 (sequence is synthesized)
cattccgcagcatcttttagagctgcctcttgacatcacctgattcagccagagagggcggggaagccgaggtgactgggagggtggacacactgtggggccggtcgtgtttggggtggg

SEQ ID NO: 1019636 - DNA, 120 bp, Artificial Sequence
  ENSG00000287772_0 (sequence is synthesized)
gggtggacactgccatcagaaccacgggccccagggttccggaaagatgccatcctggaccctcccctatgcccctctcctcccttcagagctctgagcatgctgtacgttgatgcagat

SEQ ID NO: 1019637 - DNA, 120 bp, Artificial Sequence
  ENSG00000287772_1 (sequence is synthesized)
acattggcctgtatgccttccccttctctggctcagggctgggcacacgcctggaccctgggatgaacacccttcgagtagatctgagcccagtcctcagagagaagccaaacccagcca

SEQ ID NO: 1019638 - DNA, 120 bp, Artificial Sequence
  ENSG00000287772_2 (sequence is synthesized)
agtcctgcttacatcagctgaacccccgccaacctgcagaggtgtgcgagagaaacaaatgcatattgtggtatgtccctgaggatctgtgattgtttgtcacccagcgacagctgactt

SEQ ID NO: 1019639 - DNA, 120 bp, Artificial Sequence
  ENSG00000287772_3 (sequence is synthesized)
ctacagccacacactaccatctgctcccagtgtgtttgtgttcactcccaattccctggattccaacttcagactcctgaccccgacttcagtaagggtctcgtgcctctccatccagct

SEQ ID NO: 1019640 - DNA, 120 bp, Artificial Sequence
  ENSG00000287772_4 (sequence is synthesized)
aggaccttggctgatctctccgtgccacctctggggaggcctcctcatgtcaggccccagcagtggggcagaggggtggtgaggagatctggaaaattataggatttcccttgttgtgct

SEQ ID NO: 1019641 - DNA, 120 bp, Artificial Sequence
  ENSG00000287772_5 (sequence is synthesized)
ggattgaattaattacatgtctgtgaaccttctaggccagcactgtgcaacagaaacagaatgtgagccaggtgtataatctaaaatttttcagtagctacattaaaaagtaaaaaagag

SEQ ID NO: 1019642 - DNA, 120 bp, Artificial Sequence
  ENSG00000287772_6 (sequence is synthesized)
gccaggtgcagtggcttacacctgtagtcccagcactttgggagattacagggcagggaatcacttgaagccaggagttcaaggccagtctgggcaataaagtgagatcctgtctctata

SEQ ID NO: 1019643 - DNA, 120 bp, Artificial Sequence
  ENSG00000287772_7 (sequence is synthesized)
atataccccaaatattatttcaacatgtaaccaacattaattacttaaattattatatgtttctaatatattatatatacgcattatttaacagatattttgcattccttttcatgccca

SEQ ID NO: 1019644 - DNA, 120 bp, Artificial Sequence
  ENSG00000287772_8 (sequence is synthesized)
cccagcctctgaggtccagcgtgtatttaacaggcacggcatgcctcacttcagaccggccacatctcagtccttaacagccatatgtggcttacggctaccatactggacagcgcagct

SEQ ID NO: 1019645 - DNA, 120 bp, Artificial Sequence
  ENSG00000287772_9 (sequence is synthesized)
ctgaataatggaaggcaaaactccatgtcaccagtgtgtaacgtggtgcctggcacacaaggggcactcagtaaataagtcctgaatggatgaatgataaacacataggcattgctttaa

SEQ ID NO: 1019646 - DNA, 120 bp, Artificial Sequence
  ENSG00000287772_10 (sequence is synthesized)
agctgagaacaggtgggcagacctgttacccacggggaaaaaaaaaatgcctatggcttagacccatcaaattttcattataacggatggtggtgttttggaaggccacgttggctggtg

SEQ ID NO: 1019647 - DNA, 120 bp, Artificial Sequence
  ENSG00000287772_11 (sequence is synthesized)
ctgtgtctgcgtctgaagcagacttgctcaaaggggtcatatgtgatgaaaatacaacctcaggcagcatttcccaaacttgtctgaccactgcatgttatttaaattgttctgtttttg

SEQ ID NO: 1019648 - DNA, 120 bp, Artificial Sequence
  ENSG00000287772_12 (sequence is synthesized)
tcaggatgccaatagagcatccttatgtgatactgtttaagttgaagcagacagaaaaaaaatgatctcagagttgaattaattgctgtaagaaatgatcaaaatttgattcatatgctt

SEQ ID NO: 1019649 - DNA, 120 bp, Artificial Sequence
  ENSG00000287771_0 (sequence is synthesized)
gacgtatcttcaaagtcaaaaggctgggttgatttcagacacctcatggagataaaggatcccgataagacttctcatgccctaaaggtgatgttgaacctctgattctgctacagtact

SEQ ID NO: 1019650 - DNA, 120 bp, Artificial Sequence
  ENSG00000287771_1 (sequence is synthesized)
aagatttattatgtcactggagggcagtgaagatatgatgtgacatgatgtacagagcaaaccaactggccctcttgcaactggaactcttgaatggaacacttgctcttggagtcctga

SEQ ID NO: 1019651 - DNA, 120 bp, Artificial Sequence
  ENSG00000287771_2 (sequence is synthesized)
ggggccattgaaggtatccaactactctgaggctcccatgctggagagatcccaggtaagtgctccagttgagggtctcagctgaccccagtcttccagctgtccttgccaaggtgccag

SEQ ID NO: 1019652 - DNA, 120 bp, Artificial Sequence
  ENSG00000287771_3 (sequence is synthesized)
atgtatgagagcccctccagaccagaccatcttttagtccagtgccaccaagtcaactctgttgatgccacatggaacagacgaaccactcagctgtgccctgtccaaattcctgaccta

SEQ ID NO: 1019653 - DNA, 120 bp, Artificial Sequence
  ENSG00000287771_4 (sequence is synthesized)
aaaaattctgagcatgcctggaactttgaataatgcatctgaagaatctgcccgcataggtaaaaacatgctcccttcttgtcattgaattttaagctgtggacacaagtcttatgagtt

SEQ ID NO: 1019654 - DNA, 120 bp, Artificial Sequence
  ENSG00000287771_5 (sequence is synthesized)
catctataaacataagcatagaaagcagtagaagccacacctgtggtgaggagctctccatatggggttgcaggtgccatgtgagtctccatgtgtggttgtgttttaagcccaggaagt

SEQ ID NO: 1019655 - DNA, 120 bp, Artificial Sequence
  ENSG00000287771_6 (sequence is synthesized)
taagctggaataagctagaactcacagctggttcttccacatagagaaatgaaggagtggaatcactggggatacctcccgcaataggaaagccccttgagaactgaaacaagtcatctg

SEQ ID NO: 1019656 - DNA, 120 bp, Artificial Sequence
  ENSG00000287771_7 (sequence is synthesized)
tttctcaggaggagctgaccaagagccccctcctttcgtgtgaatttaaattccccttttcatgagacttttcttaaagacaaggaaaaaaagctatcaggggaaaatgaataatatgac

SEQ ID NO: 1019657 - DNA, 120 bp, Artificial Sequence
  ENSG00000287771_8 (sequence is synthesized)
atcgaaagtattgaaaggcttgaaatgatcccacatgtgtcatctgactttgagaggtgaaggggctcccgtctgtacgtagagaggctggcgtgctgcctggattacttgtctgatgtc

SEQ ID NO: 1019658 - DNA, 120 bp, Artificial Sequence
  ENSG00000287771_9 (sequence is synthesized)
acatgctaatgggatcccagctagaatgctggcaactctgactgtaacaacctcagacacctttgcgcacagcttcagtttcaaattaattttcacatcctccttaggaaactgggccct

SEQ ID NO: 1019659 - DNA, 120 bp, Artificial Sequence
  ENSG00000287771_10 (sequence is synthesized)
ccgtaatcaacagaactctgcatcgcacatcctaacattgaaactcacctgagcacaaggatcctacagttctcctagacagacctcaagaacccgcacagaccctcggggcacactccc

SEQ ID NO: 1019660 - DNA, 120 bp, Artificial Sequence
  ENSG00000287771_11 (sequence is synthesized)
ctgtgtgttttggaacaaatagtcactctctgtgttttcaaatgtcctttggccttttgtcaaatccacactgacctcttttcaaatgcgtgtggtcagtgttatttttcaaaggccctt

SEQ ID NO: 1019661 - DNA, 120 bp, Artificial Sequence
  ENSG00000287771_12 (sequence is synthesized)
tgaagtttgctttgttgccttccctccctgtgggtcacagagcaattactggaagatttgtgggaggccgcttttggctttgtgtacatgtgaacgcctgtttataaatcaggtgagtta

SEQ ID NO: 1019662 - DNA, 120 bp, Artificial Sequence
  ENSG00000287777_0 (sequence is synthesized)
agggtggagctcagctatcgggccaggagagcctagtgggaaggagagattttactttagctccctcaggcaagattctaaaagtacagtttgctttgcaaatgttctcattttacacac

SEQ ID NO: 1019663 - DNA, 120 bp, Artificial Sequence
  ENSG00000287777_1 (sequence is synthesized)
aagcacaccaaagtgtgaacacacacaaattaaggtgataagtatgcctaggccttgcataccagaaaaaagcaatggagaacatttttcccttctgtggcagttccaggggatcttgtt

SEQ ID NO: 1019664 - DNA, 120 bp, Artificial Sequence
  ENSG00000287777_2 (sequence is synthesized)
ctcatgaaaaaatggtactgcatcaaggtagcttttttgaggcaaaagaatcattctaggtttggcaaggtagtccttgtaagagcactggcttgcttttggagtgcacccatcatcttc

SEQ ID NO: 1019665 - DNA, 120 bp, Artificial Sequence
  ENSG00000287777_3 (sequence is synthesized)
atttcaggattggcaagaagatcaagtaaagtacaagcatctttgaagagtgaaaaaataattttccaagtaagcaaatacaactttgcacttcaaatcaggccttgattcatcaaaaaa

SEQ ID NO: 1019666 - DNA, 120 bp, Artificial Sequence
  ENSG00000287775_0 (sequence is synthesized)
acatcacaatggtgagcactcagagaggacaattacagggtactatgagagtacaggagatgtccctgcccctgtgtgcctgataagcaagggctgtatgagtgaagtcatagtctaagt

SEQ ID NO: 1019667 - DNA, 120 bp, Artificial Sequence
  ENSG00000287775_1 (sequence is synthesized)
ctcggctatttaaagtatacactagatggtggtgaggatattggggttgtgagaaaagagtgttccaggtggaagaatcagcatatgcaaattcctaggagcttgaagaaaccgagaatc

SEQ ID NO: 1019668 - DNA, 120 bp, Artificial Sequence
  ENSG00000287775_2 (sequence is synthesized)
gttgtggggttgttaagattttagcctgactagaatatggctgtacagagtacggctgggagatactgatactgcagcaagaggaggtcacgcagaaaagacccctgtgaggcctaatag

SEQ ID NO: 1019669 - DNA, 120 bp, Artificial Sequence
  ENSG00000287775_3 (sequence is synthesized)
gaagtcttcagtttgtcatcacagaaatgaaaatcagtaagattttatccatctgaaccgagcaagcaacagaatgcagacaaatcactaagactggctatggtgggaaggagtggggaa

SEQ ID NO: 1019670 - DNA, 120 bp, Artificial Sequence
  ENSG00000287775_4 (sequence is synthesized)
tctaatgaaatgaaaatactgagattggggccccagatggctgagtacaagcagccagtgtgcactgcgctcatggaaaagagaaagaggaacaagtgagcactagctcctcaactggat

SEQ ID NO: 1019671 - DNA, 120 bp, Artificial Sequence
  ENSG00000287775_5 (sequence is synthesized)
gggccaggcgtacacactggggttaatcaaggaagcaacacaatccacaaagaacagagaagagcaagacaggacagccacctcctcaggactggcacagactcagggggaggctcccca

SEQ ID NO: 1019672 - DNA, 120 bp, Artificial Sequence
  ENSG00000287775_6 (sequence is synthesized)
ctgccgggaaacggaggaaagctttgtgagtaagcaggggccacagctgttgcagatcattaggatgcttctctcaagataactccaggcctgactattgcccatggtgaccaaggatgg

SEQ ID NO: 1019673 - DNA, 120 bp, Artificial Sequence
  ENSG00000287775_7 (sequence is synthesized)
cctcctatccaggaccataggacaaaatggattttcactctgtgtttcatccagcattttggtcacataaaattgaaagactttcaacatacttaagtcagcaaacaacgaaaacacagt

SEQ ID NO: 1019674 - DNA, 120 bp, Artificial Sequence
  ENSG00000287775_8 (sequence is synthesized)
caaaagaatgggggaggcatcatgtgtagtgtctttagtttgtcagaaatctcagaagtaattttttctagtgaaaaataaataaataaaatatagagacaaatgagtgaaaaagaaaaa

SEQ ID NO: 1019675 - DNA, 120 bp, Artificial Sequence
  ENSG00000287774_0 (sequence is synthesized)
agaaatggaaacccctttcacaaccacgatgttggagagggaagcagctacctcaaaagaagggaatgaacggttgagaccagacaatataataagtggccactctctggtagagaaaga

SEQ ID NO: 1019676 - DNA, 120 bp, Artificial Sequence
  ENSG00000287774_1 (sequence is synthesized)
ctttggaggtaaatccacgggaaccttctcagtgcagtggtaatacagagtataaagtagccctccttactcttaagaggaaattttgcctcttcacctttccaaaagaaatgacggtat

SEQ ID NO: 1019677 - DNA, 120 bp, Artificial Sequence
  ENSG00000287774_2 (sequence is synthesized)
cccaccttgagacgtacttttcaaaaactctctacagccgttgttgttattaattcaaggttgaacataaagtaatctgcatccctgtaatggcttctctttcatgtgcaagttatggag

SEQ ID NO: 1019678 - DNA, 120 bp, Artificial Sequence
  ENSG00000287774_3 (sequence is synthesized)
acatgcaattttctctttgccatatgctatgaaaaccactcagactgcctcctctccctcttactctccagggaggagagaagaatgatcatcaagggcagaaggcagttacatcgaagc

SEQ ID NO: 1019679 - DNA, 120 bp, Artificial Sequence
  ENSG00000287774_4 (sequence is synthesized)
gaatgctgcgctttttcctcgtgatttgtggtgctctacatattcagagaaacttctccagtaacaaactatagaaatgatccctcaaagtatagtcttcaagattcttaatcacatctg

SEQ ID NO: 1019680 - DNA, 120 bp, Artificial Sequence
  ENSG00000287774_5 (sequence is synthesized)
aaaagagcctttgtcatgccagacccttgctgacatcgataggagtgacaccctgtttgacaggctgaagaagagacctagagccggtgaatgaaatacagggtttattgaaggaaccca

SEQ ID NO: 1019681 - DNA, 120 bp, Artificial Sequence
  ENSG00000287774_6 (sequence is synthesized)
gagccggtgaatgaaatacagggtttattgaaggaacccagtgtcaatgggctggataaaagaacagctaccacttgtaaaaaacatgcagtttaggccgggtgtggtggttcacgcctg

SEQ ID NO: 1019682 - DNA, 120 bp, Artificial Sequence
  ENSG00000242790_0 (sequence is synthesized)
gagaatacgtgagactgtcataaaccctgggtattttgaatcaaaccatgggtcttttactgttatgtgacctttggcaattctgggcttgaactttcctactgcgtctctttgaacttt

SEQ ID NO: 1019683 - DNA, 120 bp, Artificial Sequence
  ENSG00000242790_1 (sequence is synthesized)
gttctataaagaaggtgtacagaggaaaaacaacattccacctatacaagtgctatcaaggagaagggtgatatattagaaagaaaggattttgatgttggagagacttgggttcaaatt

SEQ ID NO: 1019684 - DNA, 120 bp, Artificial Sequence
  ENSG00000242790_2 (sequence is synthesized)
ccagctctttctgtaatgaaagccaagttgcttaacctgggaatcagcttctttagttttaaaatgaggataataatacctactcatgggagtcgcataaagatgaaatgaaagtctgta

SEQ ID NO: 1019685 - DNA, 120 bp, Artificial Sequence
  ENSG00000250073_0 (sequence is synthesized)
gggaccctgcggcctcctccaggtctggacgcagggaggggtgagactgttctggccaaagagactggagatccagtatcagcaagctactttcttggtaaacctccatttcccaatgct

SEQ ID NO: 1019686 - DNA, 120 bp, Artificial Sequence
  ENSG00000250073_1 (sequence is synthesized)
catctttgtcctctacccccacccatcccaaggcaaatgatgaaaacatctattggatccagcctttgctatcttctccatgctgctcatagtgggtctagcaatgtcccattctcggta

SEQ ID NO: 1019687 - DNA, 120 bp, Artificial Sequence
  ENSG00000250073_2 (sequence is synthesized)
aagatgcagaaaaaaaatgcatggagcataatgttagttttgggactcgtcagtggcaacgttttagagatgccatgaagaattcctggtaataatccttcttcctacagcatttagcaa

SEQ ID NO: 1019688 - DNA, 120 bp, Artificial Sequence
  ENSG00000250073_3 (sequence is synthesized)
tgaatactatgggattatggctaaaagatggtcaagactgcctcagccattaggatcagaattctaagttccaaagaagagcaaactcaagaggatttcctcaggcctctgactatagat

SEQ ID NO: 1019689 - DNA, 120 bp, Artificial Sequence
  ENSG00000250073_4 (sequence is synthesized)
gctgcctggggagaacaggtgctacactcaaaacattctcattttatttatatcctccctgaactagtacccaactccataaccccagactcaaataacagaaataaaagccatctcact

SEQ ID NO: 1019690 - DNA, 120 bp, Artificial Sequence
  ENSG00000250073_5 (sequence is synthesized)
atctcagaggcgggcttccctcggaaaacggagggttgaaacccagaaagctcctcggagcccttctggggttcgggcgatctgggcagagaactctcgggtggcaaggaattaagggca

SEQ ID NO: 1019691 - DNA, 120 bp, Artificial Sequence
  ENSG00000250073_6 (sequence is synthesized)
gcgcgaacgacggtctctagacaagtatgaagcctcccctgagtgtgtccggcgctcagggggtggaccggggtgttggtttcaaggagggggccatcgtttgcaccacggcgtccagaa

SEQ ID NO: 1019692 - DNA, 120 bp, Artificial Sequence
  ENSG00000250073_7 (sequence is synthesized)
gcaggaaaagaacactttttgttaatatgtaactatatcttcagtagtacagaaaaatgagaagaacgagagttcttacctggatttgcggctcacttaaagtagagcacctgagatgct

SEQ ID NO: 1019693 - DNA, 120 bp, Artificial Sequence
  ENSG00000250073_8 (sequence is synthesized)
gggaaatcataaagataaataaccaatctaacaaattcctgccatgagaccaaagtgatccttgactactctattagtaagcgactctgagccaagagtacgaacctgtaagtggagtgg

SEQ ID NO: 1019694 - DNA, 120 bp, Artificial Sequence
  ENSG00000250073_9 (sequence is synthesized)
tggttggcccattagaaatctctgaaagatctaaacatgacagttaccttcctactggactcatacttctcaattccctctcctaaaagaatacttttgggctggccccagtggctcaca

SEQ ID NO: 1019695 - DNA, 84 bp, Artificial Sequence
  ENSG00000250073_10 (sequence is synthesized)
cctgtaatctcggacaagagtttgagaccagctcggtggaaacatagcaccatccatgtctctaccaaaaaaagaaaaaaaaaa

SEQ ID NO: 1019696 - DNA, 86 bp, Artificial Sequence
  ENSG00000250073_11 (sequence is synthesized)
ggcacttgagcctgtagtttcagctgctcaggaagcttagactgcagtgagctatgattgtactactgcactccagcctgggtgac

SEQ ID NO: 1019697 - DNA, 120 bp, Artificial Sequence
  ENSG00000257235_0 (sequence is synthesized)
tttctgatgagtgtttgagttaggagatctggaaacgcagaggctgggaccaacatgtgcgggccggagcacacatataaatgaacataggtataagccagcaagaataaatagcatata

SEQ ID NO: 1019698 - DNA, 120 bp, Artificial Sequence
  ENSG00000257235_1 (sequence is synthesized)
tctagtgaaaagaatcagaatttctcaaacacagtaaatacctacatcctactttttaggaaccaaatgccaactacatatatataacaagtgtttttgcactctttttcagatgggcct

SEQ ID NO: 1019699 - DNA, 120 bp, Artificial Sequence
  ENSG00000257235_2 (sequence is synthesized)
gaaggaatactgaggaagacttcttcatttattccgtagaggcccttaattatggtggaaactggatgttttctcctaagattcttcaaaatactttctgttaaatcagctccagatagg

SEQ ID NO: 1019700 - DNA, 120 bp, Artificial Sequence
  ENSG00000257235_3 (sequence is synthesized)
ccaatggcccacgaagtagaacttttcatttcaataatctcataggcactagcaatcacttctttgtggacatttttccatttctcaggatctttatcagttcctatatcagagttcaga

SEQ ID NO: 1019701 - DNA, 120 bp, Artificial Sequence
  ENSG00000257230_0 (sequence is synthesized)
cattctgacttgaaacctctcttctgatccaggaacaactatcctgagctgctgttcatgattcaggttggcatcaatcaaattggaagcacatgaattatacattattgtttctgagcc

SEQ ID NO: 1019702 - DNA, 120 bp, Artificial Sequence
  ENSG00000257230_1 (sequence is synthesized)
acagttttttgtttttatctgctaaagacatgaagaatgggaacactaccattgcatctcccagccccagagaaggatgttcactcccatgttctcaccttttcttcatctttatttgat

SEQ ID NO: 1019703 - DNA, 120 bp, Artificial Sequence
  ENSG00000257230_2 (sequence is synthesized)
cttccagaggaggctggtatattttttctctgttcaacaacgagagaagtatcaagttttaggctcccttcaaatcaagacagttcgtgtgtatctttgtggttcataatctgaaaacaa

SEQ ID NO: 1019704 - DNA, 120 bp, Artificial Sequence
  ENSG00000257230_3 (sequence is synthesized)
agcagattctgtgtgactgagatgggatcctaggggctggaaaccatcactgattgcctgtactgtccttctcctgtcgtaccatacccttttcttttaataaagacttatgtgagtata

SEQ ID NO: 1019705 - DNA, 120 bp, Artificial Sequence
  ENSG00000285735_0 (sequence is synthesized)
agattcaagaaaacccagaccaagcttgggattctaagagtctctccgtgcaagctgacctcatggagaaagtggcagagcttgtcccttccactgggagaccctggagttcattcagga

SEQ ID NO: 1019706 - DNA, 120 bp, Artificial Sequence
  ENSG00000285735_1 (sequence is synthesized)
gactggatgcccctgggctcgggctgcactgtggaccccactgtggaatcaccactcccaggctgacctcaggcaggttccagatctgttctccacttctgcaacaaaacttacccgggc

SEQ ID NO: 1019707 - DNA, 120 bp, Artificial Sequence
  ENSG00000285735_2 (sequence is synthesized)
catggttttatgcagaaatctgacaaggcaggtccatcaagaggtttccagaagaaggcatcgctatcacaggagatggcagctccatgcctgttactgcccctgaagatgttccagtgg

SEQ ID NO: 1019708 - DNA, 120 bp, Artificial Sequence
  ENSG00000285735_3 (sequence is synthesized)
gacagggtgtggaggtggaagacagcaacagtgacgatcctgaccctaaattgaccagattgctttgaggaactaagaagctgttaaacctttggaagaactggcctgatacgttgtcta

SEQ ID NO: 1019709 - DNA, 87 bp, Artificial Sequence
  ENSG00000285735_4 (sequence is synthesized)
ctgttaaacctttggaagaactggcctgatacgttgtctacatggttctcctacaaggtgtatgtgcaactaagaggaaaaagttgt

SEQ ID NO: 1019710 - DNA, 88 bp, Artificial Sequence
  ENSG00000285735_5 (sequence is synthesized)
cgaaaggcacttcttacatggtggcaccaagggaaaatgaggatgatgaaaaagtgaaaacccctgaaaaaatcagattctgggggaa

SEQ ID NO: 1019711 - DNA, 120 bp, Artificial Sequence
  ENSG00000285735_6 (sequence is synthesized)
gaacagtctgggggaaaccgctcccatgattcaaattatctcccacccggtccctgcccccgcaacccccccacaacatatgagaattacgggagtacaattcaagaagatttaggtggg

SEQ ID NO: 1019712 - DNA, 120 bp, Artificial Sequence
  ENSG00000285735_7 (sequence is synthesized)
gacacaaagccaaaccatattacaaggtttatagccttgcagtaagtaaagaataccattttctgacaagcccaggaacttcaggatattttggggacctcaaaaaagagggatttaccc

SEQ ID NO: 1019713 - DNA, 120 bp, Artificial Sequence
  ENSG00000285735_8 (sequence is synthesized)
aattcatacaagtattacaggcaaaatctgatggtgaattgctggcctggcttccaatcttaagaggcttttaaagattgaacctgaaattccttataaaaaaagtttcagtcaagtcaa

SEQ ID NO: 1019714 - DNA, 120 bp, Artificial Sequence
  ENSG00000285735_9 (sequence is synthesized)
agtacaattctggctgtactttagtcaaatactcaggccaagtataacaagtctaagactttattttgcaaataaattggtcctactgtaaaccaaaaagtgtctgagacaagtttcagt

SEQ ID NO: 1019715 - DNA, 120 bp, Artificial Sequence
  ENSG00000285735_10 (sequence is synthesized)
aaagtttattttgccaaggttaaggacataccagtgacacagcctcgggagatcttgacaacatgtgcctaaggtggttggggcacagcttggttttctacattttagggagacatgaga

SEQ ID NO: 1019716 - DNA, 120 bp, Artificial Sequence
  ENSG00000285735_11 (sequence is synthesized)
ggagacatgagactcaatcattatatgcacgatgtacattggtttggtccagaaaagagggacaacttaaaaccaaaagagggcttccaggtcagaggtagataagagacaaatggttgc

SEQ ID NO: 1019717 - DNA, 120 bp, Artificial Sequence
  ENSG00000285735_12 (sequence is synthesized)
ttttgagtttctgattaggctttcactgaatacacaatttacagaaatagtcgcttatgccttagtctggcttagtaaagcaacagaacaaaggaagcactcagatgcgcgtgtcccatg

SEQ ID NO: 1019718 - DNA, 120 bp, Artificial Sequence
  ENSG00000285735_13 (sequence is synthesized)
tgagcagagggataactttgacatctgtttgtgctttgtctaaaggaatttttcttcgtgggaaaattgtaagggaggctttcagacaaatttttctcctattttttaagctcactgaaa

SEQ ID NO: 1019719 - DNA, 120 bp, Artificial Sequence
  ENSG00000285735_14 (sequence is synthesized)
ttgataatacctttttaccgaggccttgcaagctgaagtttatgcataaataaccttgtgacatacaaattacagatcacaaaatctgtcagatcgccaatgcctccttccacagtaact

SEQ ID NO: 1019720 - DNA, 120 bp, Artificial Sequence
  ENSG00000285735_15 (sequence is synthesized)
aaagatgcctctagttgaacagctggatacctcaactgactgctctccagactctaaagaaatccgtttatagactgctccaaatattaacctttgtttttctgctgtttgggagcccat

SEQ ID NO: 1019721 - DNA, 120 bp, Artificial Sequence
  ENSG00000285735_16 (sequence is synthesized)
ctgcaacgccatttcctgaaatgagacacagctgtttaattggactggtctactcgtagaaatagaacaccagtttaatgataatttttgctactcagctattaactcaaatattatctt

SEQ ID NO: 1019722 - DNA, 120 bp, Artificial Sequence
  ENSG00000285735_17 (sequence is synthesized)
cacacccaacaacttagattttagtgtgtgaaactttgagggacattttagacagaggacttttggggtgcagaagtggttccctgatatatgacacctgggcatggtgagtgcttttaa

SEQ ID NO: 1019723 - DNA, 120 bp, Artificial Sequence
  ENSG00000285735_18 (sequence is synthesized)
gacagggtgtggaggtggaagacagcaacagtgacgatcctgaccctaagagttgggtgcttttgtgcacagaagaaaaacaaatacctggaattagaattactgacaaaataactggtt

SEQ ID NO: 1019724 - DNA, 120 bp, Artificial Sequence
  ENSG00000285735_19 (sequence is synthesized)
caccagcagtcttcaaaaccatacaggacctgctggcttgagataagtcctcacaactttcacattttcctattcattggaaaacccaaaagagcctcatggggggcccagtgattaaag

SEQ ID NO: 1019725 - DNA, 120 bp, Artificial Sequence
  ENSG00000285735_20 (sequence is synthesized)
ataattgtaatcttagtaacaataatagcaacagtcatctatggagtattataggcctaccaacattctaaatctgtatgtgcattatttcaaattattttaacaataacaggaggaaac

SEQ ID NO: 1019726 - DNA, 120 bp, Artificial Sequence
  ENSG00000285735_21 (sequence is synthesized)
aattataactgaaaaaaaaaaccagattggagaatttaagcaaacggcctcaggttacacatataataatgaaataagcagggattaatcccaggaagtctgattttagaactcatacaa

SEQ ID NO: 1019727 - DNA, 120 bp, Artificial Sequence
  ENSG00000285735_22 (sequence is synthesized)
ataactattctattttagtatattgtatgaaaggggaattttgagaaggaaaatgaaaaatgaggaaaaattgacgatgtgagtatgtttcattggggaagacaaattttgaagttaggt

SEQ ID NO: 1019728 - DNA, 120 bp, Artificial Sequence
  ENSG00000285735_23 (sequence is synthesized)
tggctcagtgcaacctctgcctcccaggattaagcagttattctgcctcagcctcccaagtagccagaactacaggcacataccaccacacttggttaattttggtatttttagtagaga

SEQ ID NO: 1019729 - DNA, 80 bp, Artificial Sequence
  ENSG00000285735_24 (sequence is synthesized)
cgcacccgcctcagcttctcaaagtgattacaggcatgagccaccgtggccagccaccttaatttttgacttgctgtcct

SEQ ID NO: 1019730 - DNA, 120 bp, Artificial Sequence
  ENSG00000285735_25 (sequence is synthesized)
ccaccgtggccagccaccttaatttttgacttgctgtccttcatctatgagctaaagaggctccagaacttaattaacactagtacctgtcaacccagttcatcccctgccccagaagca

SEQ ID NO: 1019731 - DNA, 120 bp, Artificial Sequence
  ENSG00000285735_26 (sequence is synthesized)
gagcttttctgcacctgtcgtctcacatagtctcatccgctcattgctctcaccttcgcccttgatttctttacatttgcctccaggttttgcgttctgtcacgtattctattcaccgtt

SEQ ID NO: 1019732 - DNA, 120 bp, Artificial Sequence
  ENSG00000285735_27 (sequence is synthesized)
acaaatgcatgttccagagaaggatcactcaattctgccccatgttgccacttctgagcaaagggctggccttcagagccagggagataacttcagactgtattctataaataaccactg

SEQ ID NO: 1019733 - DNA, 120 bp, Artificial Sequence
  ENSG00000285735_28 (sequence is synthesized)
gaagagtggagggggacgtcacttggcattcataagtttctgtcagccacagaaataatcaaatttccttgtcaattgtgtctttagccatggctattctaagtcttttgtcattcatag

SEQ ID NO: 1019734 - DNA, 120 bp, Artificial Sequence
  ENSG00000285735_29 (sequence is synthesized)
acaatatcactttactttgattcatttcaaaaagtggtttatagttggctatagccaaaaatttacttcttctacaagaaaattcatgaaaaagaccacaacaagtactcttgaatgtag

SEQ ID NO: 1019735 - DNA, 120 bp, Artificial Sequence
  ENSG00000285735_30 (sequence is synthesized)
atttttgataattttggagattataccattggattaggtaaaaacttacaaaactctagtaaacgaatgagttcatgaagattactaacccaacatcaagtagaacaaaattaattacat

SEQ ID NO: 1019736 - DNA, 120 bp, Artificial Sequence
  ENSG00000285734_0 (sequence is synthesized)
agtgtgggtggtggccatgcccagggtgccaccatggcccagggaggcctgagcgagctgaggggcaggccctctgccgtcataaaggcaggagctggacaagcgctggacaaacgtggg

SEQ ID NO: 1019737 - DNA, 120 bp, Artificial Sequence
  ENSG00000285734_1 (sequence is synthesized)
aagcagatcatctgcgagcctaaatctttgtggccgtctgacaacgaccctgtcttcagctgacttaaggaaaagtcccgcaacactggcccataggtggaagggatttgccttccatct

SEQ ID NO: 1019738 - DNA, 120 bp, Artificial Sequence
  ENSG00000285734_2 (sequence is synthesized)
tgctcctaccgggccctccagccctgctacttcagatgagtctttggacttttgagttaatgctgaatgacttaagactttggggggaccatggagaagggatgattgtattttgcaaca

SEQ ID NO: 1019739 - DNA, 120 bp, Artificial Sequence
  ENSG00000285734_3 (sequence is synthesized)
tgaggacatgagatttgggagaaggcaagagcagaatatcgtttgagcataacttcacctagatctcatgttcaattgtaatccctagggttggaggtgtttgggtgatgaggatggatc

SEQ ID NO: 1019740 - DNA, 120 bp, Artificial Sequence
  ENSG00000285734_4 (sequence is synthesized)
cctcatgaaaggcttagcccatccccttggagataagtgagctctctgcattcctgtaagatctgatcatttaaaaatgtgtggcacctccctgctccattctctctcttgctctgttct

SEQ ID NO: 1019741 - DNA, 88 bp, Artificial Sequence
  ENSG00000285734_5 (sequence is synthesized)
ctttgccttctgccatgattggaagcctcctgaggcctccccagaagcagatggcactatgcttcctgtacagcccaatacattaccc

SEQ ID NO: 1019742 - DNA, 120 bp, Artificial Sequence
  ENSG00000285734_6 (sequence is synthesized)
acccagtctcaggcagttctttatagcactgcaacaacggcccaatacaggctggaagggattccccggtgctcctggaggaccctgctcctctgacagtgggtggatccctgccagcct

SEQ ID NO: 1019743 - DNA, 120 bp, Artificial Sequence
  ENSG00000285734_7 (sequence is synthesized)
gggtggatccctgccagccttgaggcaggctgatgaccttgcccacagatagctcctgtcttcttcctttctaccactttctcttcaattccatttttcctttattgcttcctatttcca

SEQ ID NO: 1019744 - DNA, 120 bp, Artificial Sequence
  ENSG00000285734_8 (sequence is synthesized)
tcttcttctccctttcttccttctctccctgttcatttcttagatctcctactggcaactggggggtccatggccacactcatgtctgaaatatttagaagaggtcagtggagagagagc

SEQ ID NO: 1019745 - DNA, 120 bp, Artificial Sequence
  ENSG00000285734_9 (sequence is synthesized)
cccagttccaggaatcatgatggcttctaaacacttgtggagctaattagacactgatgtgtacaggctatcctagttttccaatttatcttctcacgtatatattaccactcttttcaa

SEQ ID NO: 1019746 - DNA, 120 bp, Artificial Sequence
  ENSG00000285734_10 (sequence is synthesized)
ctacattataagcttcttgaggacaaagactcaagaatgagaataataatgatgagtctttactgatgagaagtctttgaatgatggtaataattttgattctggcaccaactggctgca

SEQ ID NO: 1019747 - DNA, 120 bp, Artificial Sequence
  ENSG00000285734_11 (sequence is synthesized)
catccttggacaagtcactctacttctctgggtctattttctcatgtgcaaaaggacgtaagaaaattacagtgctgcaaagagctctaggcctccacagagggcttcgggacaggtgca

SEQ ID NO: 1019748 - DNA, 120 bp, Artificial Sequence
  ENSG00000285734_12 (sequence is synthesized)
ggcaagaggaaggctaagtaaggaggctttgactccccatcccctcttgaaccagagcaatgccataatcccacatgctgagtgtcgaagggtcctaacacagttgaagagggtccaggg

SEQ ID NO: 1019749 - DNA, 120 bp, Artificial Sequence
  ENSG00000285734_13 (sequence is synthesized)
cggaagaattttactggctttatgtgccaggttctgcataagatttgaaaagagggatcagtgtttttttcgtttttcttggaactttgaataccacttccaaagcggtagctaacttcc

SEQ ID NO: 1019750 - DNA, 120 bp, Artificial Sequence
  ENSG00000285734_14 (sequence is synthesized)
aaagtccctccaagatgctatggcgagggagaccgccaggccctggtttgtgtgcatttctgccaaaggcacagtgagattttaggacatgggacggaataaagagctcctcttcttcac

SEQ ID NO: 1019751 - DNA, 120 bp, Artificial Sequence
  ENSG00000285734_15 (sequence is synthesized)
ttcctctccttgttgttctgaggatcaccatgaatacaaagagactttataacaaaacaccctccattaatgagattattaatatttgtgctttagaggaacacagactccttgtgagca

SEQ ID NO: 1019752 - DNA, 120 bp, Artificial Sequence
  ENSG00000285734_16 (sequence is synthesized)
gaagccatgccagggtagatctcttgggaccaggacagtctggagagactgactgaagtgtctactcccatgtgcacagtagagctgggggatgctcacccacctgtgctgaacactgtg

SEQ ID NO: 1019753 - DNA, 120 bp, Artificial Sequence
  ENSG00000285734_17 (sequence is synthesized)
tggctacatccactaggtgacagacccagggtgtgagaactcataccaagacagcttgtgtgtgcccacctagatttatgtaaatgtacttatggaagccagcaagaattctccaccaaa

SEQ ID NO: 1019754 - DNA, 120 bp, Artificial Sequence
  ENSG00000285734_18 (sequence is synthesized)
cagaattgatgagaagcccagttatgcaattccatctcagtacaaggtgcaaaagacaatcaacacaataataacacctcaagcagcacgctgtatctcaggttgtttcagaacttgaat

SEQ ID NO: 1019755 - DNA, 120 bp, Artificial Sequence
  ENSG00000285734_19 (sequence is synthesized)
actcatcagcccgacctctacatgcatttcctgcctattctctgtctgagagatgaaggatgcacaacctcttagctctcactacctcattcttctcccatgtattcatccagcacgcca

SEQ ID NO: 1019756 - DNA, 120 bp, Artificial Sequence
  ENSG00000285734_20 (sequence is synthesized)
caaatacttcctgagagttgcagcactttgctccacttgccgcattgccctctcagcgcatcgatgagttggagaatgtaagaggctgggagaaaaaccaggacacccatcccaaactcc

SEQ ID NO: 1019757 - DNA, 120 bp, Artificial Sequence
  ENSG00000285734_21 (sequence is synthesized)
ttgggatatggaggtgagggggctgattcaaggacacatgtcttgcctatgtgaggggcatgagagtttctccatggctggtctgacattccttctgctgaagcacggccgtctctatcc

SEQ ID NO: 1019758 - DNA, 120 bp, Artificial Sequence
  ENSG00000285734_22 (sequence is synthesized)
atggactgtctgaaacccctgggttactgtgcccaacaggagctgctgggcaggtaaaagcctgcttgccaggtatggctggaggggtgggcagcaggcctcccacactgaaggcctcct

SEQ ID NO: 1019759 - DNA, 120 bp, Artificial Sequence
  ENSG00000285734_23 (sequence is synthesized)
cctcctgggatctccacctatgcctgagattcagccatgaagaagccttccttccactgacagaaatggataaacaaaatgtggtgcctacacattcccacacatgctacagcatggacg

SEQ ID NO: 1019760 - DNA, 120 bp, Artificial Sequence
  ENSG00000285734_24 (sequence is synthesized)
agccgtgaaaacactgtgctaagcaaaagaagccagacacagtaggacaaataccgtatgatcccacttacatgaaagatctagagtaggcaaattcacagagacacacagtagattacg

SEQ ID NO: 1019761 - DNA, 120 bp, Artificial Sequence
  ENSG00000285734_25 (sequence is synthesized)
ggttacgaggggctgggggaaggagcaatgggaattactgcttaacaggtacagagttcctgtttgtggagatgaaaaacttcggaaatggtggtgatggttgcacaacattgtgggtgt

SEQ ID NO: 1019762 - DNA, 90 bp, Artificial Sequence
  ENSG00000285737_0 (sequence is synthesized)
tttttttttcttttgccttcttgaaacactttatctttgatttttcttcagtttgaatatgatatgcctacatgtagggtaagagagaaa

SEQ ID NO: 1019763 - DNA, 120 bp, Artificial Sequence
  ENSG00000285737_1 (sequence is synthesized)
gagagacagagagaaagagaaagagaaagagaaagaaagagagagagagatttatcctgcttggtgccctctcagcttcctggatttgtggtttggtgtctgacatttatttgagcaaaa

SEQ ID NO: 1019764 - DNA, 120 bp, Artificial Sequence
  ENSG00000285737_2 (sequence is synthesized)
ttctcaatgattattgcttcacttaatctcttctgttcctttctcacttcttcgttttctgtttttccaatttgaatatttctattgacatttcctcaaacttagtgattctatcctcag

SEQ ID NO: 1019765 - DNA, 120 bp, Artificial Sequence
  ENSG00000285737_3 (sequence is synthesized)
tcatattcagtctactaacaaggtcatcaaaggctcttcatttctcttacagtgtttttgatttctagcatttctctttttaaaaattgtagtaatagcatttaacatgagacctattct

SEQ ID NO: 1019766 - DNA, 120 bp, Artificial Sequence
  ENSG00000285737_4 (sequence is synthesized)
ttcaacaaacttttaagtattagctatagacatttaattgtacagcagatgtctggaacttattcatcttgtataactaaatctttatacccaatgaatatcaactccccatttccccct

SEQ ID NO: 1019767 - DNA, 120 bp, Artificial Sequence
  ENSG00000285737_5 (sequence is synthesized)
ccccgccgccagcctctggcaaccagtcttcttactctctgtacgggtttggctttggctatttttagatacttcatgtaagtggaaccacttatatgaagcatctaaaaaagtatttgt

SEQ ID NO: 1019768 - DNA, 120 bp, Artificial Sequence
  ENSG00000285737_6 (sequence is synthesized)
tgtcctgtgactaccttatttcacatagtgtaatgtcctccacattcatccatgttgtctcatactgtaggatttccttcttttctaaggctgaataatacttcattgtttgcatatatt

SEQ ID NO: 1019769 - DNA, 120 bp, Artificial Sequence
  ENSG00000285737_7 (sequence is synthesized)
ttctttatccattcatctgtcaatggacatttagattattttccacatcttggcatacataaatagagttccttatccttagttcaggtcttcgttaaaacctgaacttctccattacca

SEQ ID NO: 1019770 - DNA, 120 bp, Artificial Sequence
  ENSG00000285737_8 (sequence is synthesized)
ctgtaatctgtaacattaacattctctaatggatctctctgaatctgaccttccatcattcagtctaactattacattgttagtagtgtatttttctaaaaggcaaaaataataatcctt

SEQ ID NO: 1019771 - DNA, 120 bp, Artificial Sequence
  ENSG00000285737_9 (sequence is synthesized)
ggtaatagatgagtagctcataagaggcttagtccattttgtgctgctaaaacagaataccacagactgggtaatttataatgaacagacatttattggcttatagttctggaggtcgag

SEQ ID NO: 1019772 - DNA, 120 bp, Artificial Sequence
  ENSG00000285737_10 (sequence is synthesized)
aagtccaatataaagtactagcatctggtgacggccttcttatgcatcataatgtggtggaatacatcatatggatgagagagacagcaagaggggacaaaactcatccttttataagaa

SEQ ID NO: 1019773 - DNA, 76 bp, Artificial Sequence
  ENSG00000285737_11 (sequence is synthesized)
agactcccccactcctgtgataataaacctactctcacaataatggcattaatccatttatgagggcagagctttt

SEQ ID NO: 1019774 - DNA, 120 bp, Artificial Sequence
  ENSG00000285737_12 (sequence is synthesized)
acaataatggcattaatccatttatgagggcagagcttttacaaactaaacacctcttaaaggtcccatctcccaccacctccacattggggatcaagtttccaatacatgaactttagg

SEQ ID NO: 1019775 - DNA, 120 bp, Artificial Sequence
  ENSG00000285737_13 (sequence is synthesized)
taatcttttacacaattgaaattcactagaaaggtgaacaaacaagaacatggaatccatagtcaagacaaacaaacgctgagatatttgaattaccagacaaaatcttggaaggagcta

SEQ ID NO: 1019776 - DNA, 120 bp, Artificial Sequence
  ENSG00000285737_14 (sequence is synthesized)
ttatggtcatcttcaaagacttaaagggaaatgaccacaatgactaaacaaacttataattttattggagaaatggataaaagaaatcaaatggaaattccagaaatgaaaagtactgta

SEQ ID NO: 1019777 - DNA, 120 bp, Artificial Sequence
  ENSG00000285737_15 (sequence is synthesized)
tctgaaatgaaatgttttctgggtgggtttagccagtagactagagatggcaaaagaaactagcatgaactgaagatgagtgaactgaaggtaaaatcaaaagctagagagaaaattttg

SEQ ID NO: 1019778 - DNA, 120 bp, Artificial Sequence
  ENSG00000285737_16 (sequence is synthesized)
aaaatagccaaaggaacaaggatacagatggtgtcttatatctcatttgagcagtggagcccagagataatggaacaacatattaaatgtgttgagatgaaaaaaatttgcttgcccaga

SEQ ID NO: 1019779 - DNA, 120 bp, Artificial Sequence
  ENSG00000285737_17 (sequence is synthesized)
atatcatatccatctagaatatcattcaaaagagaatgaagaaattttgtgatcaatgaaagctgagagatttttttttttttttttttttgccagctcatcaacactacaaatctaaag

SEQ ID NO: 1019780 - DNA, 120 bp, Artificial Sequence
  ENSG00000285737_18 (sequence is synthesized)
ctgaaagctcagggtacggtaatgacagatggaaacttcattacagaaagcaatgaagaacacccaagtggtaaatatgtggctggtcttggctcattcctgctcctccctgctagtatc

SEQ ID NO: 1019781 - DNA, 120 bp, Artificial Sequence
  ENSG00000285737_19 (sequence is synthesized)
tcaaagccaccttacaggaatgtaaaagccacactacccaattactgcaactcaaaggataaatgtcaacatctatacaaagtattgtcagaaagagtgtgaaaaaaaggtgtagaccag

SEQ ID NO: 1019782 - DNA, 120 bp, Artificial Sequence
  ENSG00000285737_20 (sequence is synthesized)
acccatgacttgctcctaaacaacagaatatgacaaatggaatggcacgtcactcccatgattatgtgatgttatatgactgtgtcttgctagctggctggctccacagacgttctctct

SEQ ID NO: 1019783 - DNA, 120 bp, Artificial Sequence
  ENSG00000285737_21 (sequence is synthesized)
cccttgctggctgtgaagaagcaagctgccagaactcctaaagccacatggagctcattgctgccaaaaggaattgggaagcaaatccttccctagctgagcctccagttgagagccagt

SEQ ID NO: 1019784 - DNA, 120 bp, Artificial Sequence
  ENSG00000285737_22 (sequence is synthesized)
cctggccaacaccttgaatgtagccttgtaagaccttctgaggaggaccaagctatgccgtatccagatgtgtgacctgcagaaactctgagtgcctaagacacagttctggaatctgca

SEQ ID NO: 1019785 - DNA, 120 bp, Artificial Sequence
  ENSG00000285737_23 (sequence is synthesized)
gtgggatcaatgaggtacggtctctgctttaactaacgctccactttgacctcacacaatgttctaccaagtggagatggggcaaggaggtgggaggaaggacaacaggaaagatttctt

SEQ ID NO: 1019786 - DNA, 120 bp, Artificial Sequence
  ENSG00000285737_24 (sequence is synthesized)
cacctacaaggtactgttgatagttcttgctacagtgtcaaattactctgtcccgtagacctccaagtgtgagctctcttggaggcatttggtgggggcatactcctcacccagattgga

SEQ ID NO: 1019787 - DNA, 120 bp, Artificial Sequence
  ENSG00000285737_25 (sequence is synthesized)
agcccctttggtggagtcctttcgacatagcagtttaggcatggtggctcacacctgttatcctagctttttgggaggctgaggttgaatgatcacttgaggccaagagtgcaggacctg

SEQ ID NO: 1019788 - DNA, 120 bp, Artificial Sequence
  ENSG00000285737_26 (sequence is synthesized)
cctgggaaacacagtgagaccttgtcacttacaaacaaacaaacaaacaaaaaattagctgggcacagtggtgtgcacttgtagtctcaagctacttgagaggctgaggtaggaggattg

SEQ ID NO: 1019789 - DNA, 120 bp, Artificial Sequence
  ENSG00000285737_27 (sequence is synthesized)
cttggttctgggaagttgaggtggcagtgagccttgactgtgtcactcaactccagactgggagacagagcaagaccgtgtctaaaaacaaaaacaaaaacaaacaaacaaacaaaagta

SEQ ID NO: 1019790 - DNA, 120 bp, Artificial Sequence
  ENSG00000285736_0 (sequence is synthesized)
ggtaggcgaggtcctagtagtaactacagtctccgtgctgggcgcagggtcggcagcaaagaaagcagatcatagctgtgcccgcatggagcttacttgatattatgagcgataaacaga

SEQ ID NO: 1019791 - DNA, 120 bp, Artificial Sequence
  ENSG00000285736_1 (sequence is synthesized)
tacaagcgggatgtaaagtcagaatatgagcggtgtttgaaggtcataaaagaccttgcagcatcagccttgctgttccttcttgggttgcttgctctgggggaagccagctgtcacatc

SEQ ID NO: 1019792 - DNA, 120 bp, Artificial Sequence
  ENSG00000285736_2 (sequence is synthesized)
acaaggataagcaactctatgaagaaatccccatggcaaagaactgaggcctccttccaacaaccagcacaaacttgccaggcatgcagtgagccatcttagaagtggatccttcagcct

SEQ ID NO: 1019793 - DNA, 120 bp, Artificial Sequence
  ENSG00000285736_3 (sequence is synthesized)
cttcagatgaccggccaacgtcttgagatctcatgagagaccccaagccagaactatctatccaagccatttggagattcttgacccacagaaaccgtgtgacataacacatgttcctgc

SEQ ID NO: 1019794 - DNA, 120 bp, Artificial Sequence
  ENSG00000285736_4 (sequence is synthesized)
ttattgtttagaggagctaaattttgggtaatttcttatgtagcaataggcaattaatacatgatcgtgggcaaaatcctttggctatagactagatgtttacatcccccaaaattcata

SEQ ID NO: 1019795 - DNA, 120 bp, Artificial Sequence
  ENSG00000285736_5 (sequence is synthesized)
tgttgaaacctaatccccttcgagatggcacttggaggtggggcctttggtaggtgattaggtcacgagggtggagccctcatgggtaggattagtgcccttaggaaagagaccccaggg

SEQ ID NO: 1019796 - DNA, 120 bp, Artificial Sequence
  ENSG00000285736_6 (sequence is synthesized)
agcaaaaagatggtcatcaccaggaaacaggccctcaccagacaccaaattggctgccaccttgatctcagacttcccagcctccagaacaatgagaaataaatttctgttatttataag

SEQ ID NO: 1019797 - DNA, 120 bp, Artificial Sequence
  ENSG00000285731_0 (sequence is synthesized)
agagcagcttcaccatcaggcacaggacatgccagtttcgagagacgtttaggatttatgtgcaaccaatgaataagatggagtgtcagagagagtggggcctacccactgtctcctgga

SEQ ID NO: 1019798 - DNA, 120 bp, Artificial Sequence
  ENSG00000285731_1 (sequence is synthesized)
cgagctgggaccaaacccagcctacgcaggaggggtcataacatgaggcctgtatctgctttgttcccatggaatccggtaaagtggatccccagttcgactccagcaggcccatctctc

SEQ ID NO: 1019799 - DNA, 120 bp, Artificial Sequence
  ENSG00000285731_2 (sequence is synthesized)
acctgtctgccacgtccacactgccaccagggacagagctaacatctggctctgcttcatgaggcctccagccccagagcagctcagggacaggaaggatgaactctgcctggccttgct

SEQ ID NO: 1019800 - DNA, 120 bp, Artificial Sequence
  ENSG00000285731_3 (sequence is synthesized)
gagctagttctcggggctcccactgcaagctctgtggttaacgcctctgctgacagcggacaggacagactttctctgaaagtctgagtttctctgaatctctgaggtgcaggattctca

SEQ ID NO: 1019801 - DNA, 120 bp, Artificial Sequence
  ENSG00000285731_4 (sequence is synthesized)
gaaacccagcggcagccttgccacgcaccaccgctgcgacactggccactcccggcaatctgaggggcattttgtgtgtccccagcacctgtacagcctcacactttgaaggtgtccaat

SEQ ID NO: 1019802 - DNA, 120 bp, Artificial Sequence
  ENSG00000285731_5 (sequence is synthesized)
atgttgcatggatcctctgggtcggtgtcatctctctgggtcggtgtcatctgtcccctctcaccaacagcctcttctttgccttccgccaagattgtaaatttcctgaggcctccccag

SEQ ID NO: 1019803 - DNA, 120 bp, Artificial Sequence
  ENSG00000285731_6 (sequence is synthesized)
tacagcctgaagaactaggatgaagataaagataagtgatggaggaagaagacccagcatgaggtgaatgagtgtttcactcaacccaaagggcactgttctgcaaaggacattgcagca

SEQ ID NO: 1019804 - DNA, 120 bp, Artificial Sequence
  ENSG00000285731_7 (sequence is synthesized)
ctctatttcctgtgattctgctttcacagccttctcagattttttttttaatttaaaataaatgtattgcaccataaggattttaaaaagttggttgtaaaacctgtttacaaaagctaa

SEQ ID NO: 1019805 - DNA, 120 bp, Artificial Sequence
  ENSG00000285731_8 (sequence is synthesized)
attaaaatgtcatgctaaaactgttgaaaatagagggcttttaatgatgctccctttgatgttcacatttctttgcaatagagttacatgatttgggtgatgcaaaaagatggagaaaga

SEQ ID NO: 1019806 - DNA, 120 bp, Artificial Sequence
  ENSG00000285731_9 (sequence is synthesized)
aggaaagaactctctcacaaagatatatagtctactcttcctgaccttgagtacgtttactggcagacagattgtaaacaaggtttacaaaacatcgaatgactaaatgtatgtttcaaa

SEQ ID NO: 1019807 - DNA, 120 bp, Artificial Sequence
  ENSG00000285731_10 (sequence is synthesized)
tatccaggttaatttggccttagattaaaattactatcatgagacttaaactgctgatgtttaaattcattttatatctattcatttcaataaactatactaaatgggaatatattttaa

SEQ ID NO: 1019808 - DNA, 120 bp, Artificial Sequence
  ENSG00000285730_0 (sequence is synthesized)
gatgcggttcaggaccccgctgttctccagcgtctgcaccagcaggtcccgcagctccgtgtcctcctcggccaccactgcggccgccgtcgccgccatcttgcttctccaagacaaccg

SEQ ID NO: 1019809 - DNA, 120 bp, Artificial Sequence
  ENSG00000285730_1 (sequence is synthesized)
ccgaagccgcgctaacggccaacggccgcagcaggtactgtaaaccttgcgtaacaccatgggaccattacgaagtgccgctagtggtgctggaaatgctcccaagaatcagagaaaagt

SEQ ID NO: 1019810 - DNA, 120 bp, Artificial Sequence
  ENSG00000285730_2 (sequence is synthesized)
taatgacattacagaaaaagcggaattgcttgctgtgtattgtagattgaggtctgcagctaaggtcgcctgccattttaagataaatgaatccagtataaggactgtggtataaaaaca

SEQ ID NO: 1019811 - DNA, 120 bp, Artificial Sequence
  ENSG00000285730_3 (sequence is synthesized)
aaaggaagtttatgaagccatcgctgcagctacaccaacaagcatgaaaaccttgcactttttgggaaatacctttttatctcatattgcaaatgcagctttttgtgggtgcaggattgc

SEQ ID NO: 1019812 - DNA, 120 bp, Artificial Sequence
  ENSG00000285730_4 (sequence is synthesized)
gtgaagtcattatctgacaaagcaaaaggaagatgaaggaaggtatgataattttaaaaagtgggttggctttcaaaaaatgtcaagataacaggagaagcagcttctgctgacccagat

SEQ ID NO: 1019813 - DNA, 120 bp, Artificial Sequence
  ENSG00000285730_5 (sequence is synthesized)
aagataacaggagaagcagcttctgctgacccagatgcagccgacgagttcccagataccattaaggaaattattgaggacaaaaggccaggctttgtggctcatgcctgtaatcccagc

SEQ ID NO: 1019814 - DNA, 120 bp, Artificial Sequence
  ENSG00000285732_0 (sequence is synthesized)
gtgtgtgtggtgtgcatgtatatgatatatccaacaaatgactcattacataatacataaaagcttttacaaatcagtaagaaaaaactgataaaccaatgtaaaaatgagcaaaagact

SEQ ID NO: 1019815 - DNA, 120 bp, Artificial Sequence
  ENSG00000285732_1 (sequence is synthesized)
tacaggcacgtcataacaaaggctatccaaacgtccaatgagtaaataaaagtgcttaacctcaatagtcattagagaaatgcaaagtaagaccacagtgaagtaccactatacactcat

SEQ ID NO: 1019816 - DNA, 120 bp, Artificial Sequence
  ENSG00000285732_2 (sequence is synthesized)
gagaatgtctaaaatgaaaaagccagacaaagatatggaggaaatagaacccttacacattgctgttgggaatgtaaattgaaagaactttttttggaaaactgttttacaaaatctgct

SEQ ID NO: 1019817 - DNA, 120 bp, Artificial Sequence
  ENSG00000285732_3 (sequence is synthesized)
aaagctgaacctatgcatagcctgtaatctagcagttttacttctagttaagtactcacagatatgtatatacatacaccaaaagatctggacaaaaatgttcttaacagcgctattact

SEQ ID NO: 1019818 - DNA, 120 bp, Artificial Sequence
  ENSG00000285732_4 (sequence is synthesized)
aatacccagcaaactggatacaatctaatgtctgctaacaacagaatggttaaataaaatggtatagtcatacaacgggatgctatatagcaaagtcaataaatatgctatggttatact

SEQ ID NO: 1019819 - DNA, 120 bp, Artificial Sequence
  ENSG00000285732_5 (sequence is synthesized)
cagtaacactgatgaagctcataagcataatactgagtcaaagaagctagtcataaaagagtatgtattatataatactatttatgaaattttcaaactagcaaatactacttgatagtg

SEQ ID NO: 1019820 - DNA, 120 bp, Artificial Sequence
  ENSG00000285732_6 (sequence is synthesized)
aggtcattatactttgtgacaactcattaactggtacactaatgattatgcccatattggcatatatgctatactttaaacaattgtagtcacttttatgcatacctaattagagtttta

SEQ ID NO: 1019821 - DNA, 120 bp, Artificial Sequence
  ENSG00000285732_7 (sequence is synthesized)
aagtacgcctttgatatgtattgataatactgctatgttcattggtcaaaaagagtacaattatatccaaattggcccacaatataaaataacatttcaacgatttggcattggaatatg

SEQ ID NO: 1019822 - DNA, 120 bp, Artificial Sequence
  ENSG00000285732_8 (sequence is synthesized)
agacaataatgcagcagaaactgaagctatggttataatcttattggcagtacattttaggaataaaagcatcacccatgctactggagtgcatgcagtgcctttcagttactcctgata

SEQ ID NO: 1019823 - DNA, 120 bp, Artificial Sequence
  ENSG00000285732_9 (sequence is synthesized)
tcctgcttcacactcacagatcacaaacatgttgacattactggcagtgctagtagcttagacactcttttttcctgcctgttaggtgtctgtgataagatattgacagagtaacctcat

SEQ ID NO: 1019824 - DNA, 120 bp, Artificial Sequence
  ENSG00000285732_10 (sequence is synthesized)
ttcttcacataatttcagtcattctcttaatactaagtaaagaaaggggtgatagtctttaaaaatagtataatagaaactctacataactaacacttcaatgcctctttgccaaccatt

SEQ ID NO: 1019825 - DNA, 120 bp, Artificial Sequence
  ENSG00000285732_11 (sequence is synthesized)
tggtcccatggttactctgcctcaaacttacccatcttccttatagaataagttccaatgtagctaatatggtggcagcatgatgcagtagaagaaagcagtgcatctggagttatataa

SEQ ID NO: 1019826 - DNA, 120 bp, Artificial Sequence
  ENSG00000285732_12 (sequence is synthesized)
cgccctccatccttagagcttccgctaactaactgtgtgactttaggcaaagctggggctctagaccagatggcctttaagctcctcttttgatgtgaaaatgccatgttgtatatgtga

SEQ ID NO: 1019827 - DNA, 120 bp, Artificial Sequence
  ENSG00000285732_13 (sequence is synthesized)
ttttattatgtgaatttgaatacaaacataatcctgtctttaccataagatttcacttaaagttttaggtggatagtacagcaaatctgcaatagaattatttttcctttcccttccaac

SEQ ID NO: 1019828 - DNA, 120 bp, Artificial Sequence
  ENSG00000285732_14 (sequence is synthesized)
aaaaattatgcgggttcttcctttctccattttcacctctgaattcctaatcacttttgaacgtgctcctttaagctacagcagtgatcatgttagcaaacatctactgaatatctgtga

SEQ ID NO: 1019829 - DNA, 120 bp, Artificial Sequence
  ENSG00000285732_15 (sequence is synthesized)
gccaggccttgttctaagtttcacatatctgatcttatttaatgcttgtaacaacgctgctatcatttctctcattttggaaatgtggaaattgaaggacaaaaggttacatgatttgcc

SEQ ID NO: 1019830 - DNA, 120 bp, Artificial Sequence
  ENSG00000285732_16 (sequence is synthesized)
cagggtcacagtctagaaagcaaagaagccagcatatgatccagaatatctgactcaggagccacagggtaagaatatgataaatattaacaattgcttctacctaggttcttacttagc

SEQ ID NO: 1019831 - DNA, 120 bp, Artificial Sequence
  ENSG00000285732_17 (sequence is synthesized)
caaggactgtttcaaaacacattaagtatgttacatgtaacttcgtaaaaattttgaaagatgtgtataattatctctatagttaagataggaaaactgatgtacataaagtgtatgtaa

SEQ ID NO: 1019832 - DNA, 120 bp, Artificial Sequence
  ENSG00000285732_18 (sequence is synthesized)
ctttcccaggaaaggacaactatcaaatagcagagccaacatttgaacagcagccttcttttttcttcattttatcctctttttcccccctctacttcacattttccccttgccatttct

SEQ ID NO: 1019833 - DNA, 120 bp, Artificial Sequence
  ENSG00000285732_19 (sequence is synthesized)
ttctgactcacctatttttctaccttttttttttgccttaaaatatataaagcatcatgcactttacctctaacataagggacaaactaaaggcatacgtgtaaactatgactgaagatt

SEQ ID NO: 1019834 - DNA, 120 bp, Artificial Sequence
  ENSG00000285739_0 (sequence is synthesized)
acatgaggcaggctgcttccacataaaacaacttcaaataatatctgtgagatgggagccggactttaataactttaccttaaaatagactcattgaggagagcctggccaagcctcaaa

SEQ ID NO: 1019835 - DNA, 120 bp, Artificial Sequence
  ENSG00000285739_1 (sequence is synthesized)
tgtctacataaagctctcctctcaacgtcatgtagttgtaagaagagagattctggtgcagtcccctggggttagctgatgaacatggaccatatgttcctgactttcttcagagattac

SEQ ID NO: 1019836 - DNA, 120 bp, Artificial Sequence
  ENSG00000285739_2 (sequence is synthesized)
tgtgtgcattatattgacaaaccaactacccaaaacaattctggataactttatattacaccaacagcttgctaatgagccatggtagcagttgccatattttagtaatatttattaaat

SEQ ID NO: 1019837 - DNA, 120 bp, Artificial Sequence
  ENSG00000285739_3 (sequence is synthesized)
tgttatgaggcatgaaactgtattggtttagctctgcgataaactagttaaaagctagaaggttttatttttgaaaataatcatttgtaattgacgttcctgtagtttttttttttcccc

SEQ ID NO: 1019838 - DNA, 120 bp, Artificial Sequence
  ENSG00000285739_4 (sequence is synthesized)
tcatacgtgttttaaacactttttcctactattgctgatatttactctgggaagaccaaagaacagagctcctcaaacattgtctttgttcgtgctcttttataggatgctctttgtatg

SEQ ID NO: 1019839 - DNA, 120 bp, Artificial Sequence
  ENSG00000285739_5 (sequence is synthesized)
cttctttgcttgctcatctacaggacaaagagcaaggtggtaaaacatatggttatgggaatggcatagtccccatgtgctccagcctctgctgagaggtataaatgagacaataatagt

SEQ ID NO: 1019840 - DNA, 120 bp, Artificial Sequence
  ENSG00000285739_6 (sequence is synthesized)
aacatttgattacggtaaaaatgaaatccaggtgcaactctttatttattattcccaaaggcatttaaaaggcttccaattttgtgtaattgttacatagtccaaaactgagtccagaaa

SEQ ID NO: 1019841 - DNA, 120 bp, Artificial Sequence
  ENSG00000285739_7 (sequence is synthesized)
ggcttcgcatattagttatgctaattagttatgctgcctctcctcagacacacctttttaaatcatttcatataatttatatcgatgagacttaagttaaaaaacttccctatatttcag

SEQ ID NO: 1019842 - DNA, 120 bp, Artificial Sequence
  ENSG00000285739_8 (sequence is synthesized)
ttttctcatcttttaaattgtgatcataattgtttctacctgataatttaggtcaaatgagatagtgcagatagagttttccaagtaataaatggtcagatactgtatgtcaattaatat

SEQ ID NO: 1019843 - DNA, 120 bp, Artificial Sequence
  ENSG00000285739_9 (sequence is synthesized)
taactattcttaaaagtggtaagttctttacacagtaatatggtttggctgtgtgcccaaccaaaatctcatcttaaattgtaatccccataatccccactgtcaagggagacaccaggt

SEQ ID NO: 1019844 - DNA, 90 bp, Artificial Sequence
  ENSG00000285739_10 (sequence is synthesized)
tgtcaagggagacagtttctccccatgccgttcttgtgctagtgacttctcatgagatccaatggttttataaggggctcttcccccttc

SEQ ID NO: 1019845 - DNA, 120 bp, Artificial Sequence
  ENSG00000285739_11 (sequence is synthesized)
cttcactcattcactcttctctttcctgccaccatatgaagaaggtctatgcccgcttcccctttcgccatgattgtgtgtttcctgagccttcccagccatgtggaattgtgagtcaat

SEQ ID NO: 1019846 - DNA, 120 bp, Artificial Sequence
  ENSG00000285738_0 (sequence is synthesized)
gatccacattcagtgtcagcagtaggggtggtggttgcatgctcagcttttcattttcatggggaaggtggacatcttcaggtcccatgaaccaagaattacatgttctcactctgtcac

SEQ ID NO: 1019847 - DNA, 76 bp, Artificial Sequence
  ENSG00000285738_1 (sequence is synthesized)
ggtcccatgaaccaagaattacatgttctcactctgtcacccaggctagggtgcagtggtaccttccacatcggcc

SEQ ID NO: 1019848 - DNA, 67 bp, Artificial Sequence
  ENSG00000285738_2 (sequence is synthesized)
ctacaggcatgtgccaccatgcctggcacatttttgtattttttaaggaattcacccgactcggcct

SEQ ID NO: 1019849 - DNA, 120 bp, Artificial Sequence
  ENSG00000285738_3 (sequence is synthesized)
tgaaccaccgcaccaggccaaaactaactcttttacatgtcttatctcagcatttaagcagcactagaccctcaagagtggcaaactggatgcctgggtggaccacccactctggttaag

SEQ ID NO: 1019850 - DNA, 120 bp, Artificial Sequence
  ENSG00000285738_4 (sequence is synthesized)
tgtcaccatgtgaaaatgaggacccagtttgtcctaatctttaggttttttcaagagaagctgaaagttaatttttatgtgaaatcttgtgatgtatgtgtgaaatctcactatatttaa

SEQ ID NO: 1019851 - DNA, 120 bp, Artificial Sequence
  ENSG00000285738_5 (sequence is synthesized)
atacgggaaactttgaaaggcaaaactgtgctggccaaaaaactctacatctgtgggccagatttggcccatggaccgctagctttcagtctctacgctggatgttatatcaagatttct

SEQ ID NO: 1019852 - DNA, 120 bp, Artificial Sequence
  ENSG00000285738_6 (sequence is synthesized)
gtggttaaatagatttgcaaaatgcaacagaatgggatctttcttcaatattcttgatgaagatcaatacattaaatgctcggagaagtcgtgtcagaatggaaactatttagcttgatt

SEQ ID NO: 1019853 - DNA, 120 bp, Artificial Sequence
  ENSG00000285738_7 (sequence is synthesized)
taaatgactgctcccccaaatcaccagtctgtgtgtgctcctcacattacaataacctgtagaagtgtggttgctaagtacactggggaaagctgcataagtccatttgatcctgcacca

SEQ ID NO: 1019854 - DNA, 120 bp, Artificial Sequence
  ENSG00000285738_8 (sequence is synthesized)
gaaactgtgaaaggcaggtactgctgttattattcccattttatgtgtgaaaacaactgagggtctgcaaggttaagaaaattgctcaggctcatatagccagatgggggacaggtgctt

SEQ ID NO: 1019855 - DNA, 120 bp, Artificial Sequence
  ENSG00000285738_9 (sequence is synthesized)
cactgactttaaaactgaaatggtttctactacatttcatgactaggtccgcaccacccccacaccaaaaaaaaagtggattttgctttttctatgactggtacaataacaattttagga

SEQ ID NO: 1019856 - DNA, 120 bp, Artificial Sequence
  ENSG00000285738_10 (sequence is synthesized)
gtctcattttataaccatgagctcggatgaacaacatctcccctggggaggcattgtgggttctctcccgatgccctgccctgccctgggtaatctgaggctcctgggcccttttgggac

SEQ ID NO: 1019857 - DNA, 120 bp, Artificial Sequence
  ENSG00000285738_11 (sequence is synthesized)
cttcccccaatccttccctccctccctgcactgcatcacctttctcccccaccaacacccaaccccagccctggtttagctaggctttggccatctccctttgttgcctccacagtggga

SEQ ID NO: 1019858 - DNA, 120 bp, Artificial Sequence
  ENSG00000285738_12 (sequence is synthesized)
gggaactggaacaggacaggtcagggctccagccgtatggggaggaggtttaggggacctcgtgtggagacaagaccctggaaacaggcttggggggctggggtggggtcagggtgagaa

SEQ ID NO: 1019859 - DNA, 120 bp, Artificial Sequence
  ENSG00000285738_13 (sequence is synthesized)
gcagtgagagaggcctgaaatgcggcctggcccctctcataccatttgggcacctgacgcagaatgagggctgccatttggacaggcttgagccaaaccccattcctgggagtgaggcat

SEQ ID NO: 1019860 - DNA, 120 bp, Artificial Sequence
  ENSG00000285738_14 (sequence is synthesized)
ccctgctgtgtctgaaagaccccacagaggatctttcatccccaaaagggaattcactgctttcttggcaatcacttccaggcttaactaactacccttaacaggagaaagttcattctc

SEQ ID NO: 1019861 - DNA, 120 bp, Artificial Sequence
  ENSG00000285738_15 (sequence is synthesized)
agctgcaacagaaactcttcctgctttgtttttcttcagtacctctccagagacccaggagggatgggtgtctctgccctccatattttaacctctgatgaaatggagtgcaacagagca

SEQ ID NO: 1019862 - DNA, 120 bp, Artificial Sequence
  ENSG00000285738_16 (sequence is synthesized)
gagtaactaagagcattacacagagctaagtttgactctcagagcattcacaggctgtgtgaccttgggcaagttatgtagcatctctgaacctcaatttcctcatctgtaaaatggggt

SEQ ID NO: 1019863 - DNA, 120 bp, Artificial Sequence
  ENSG00000285738_17 (sequence is synthesized)
gaaacacagaatgtctaagagaaacagaagcatacatccatataaaaacttgcacataagtattcatagcagcgttatttgtaatagccccaaagtggaaacaactcaaatatctattaa

SEQ ID NO: 1019864 - DNA, 120 bp, Artificial Sequence
  ENSG00000285738_18 (sequence is synthesized)
gtgatgagtggataaacaaaatgtggtatgtccatacaatgactactatgcagctatcaaaaagaatgaagtactgatacatgttccaacatagatgaattttggaaacatgctcagtga

SEQ ID NO: 1019865 - DNA, 120 bp, Artificial Sequence
  ENSG00000285738_19 (sequence is synthesized)
aagaagtcagatgcaaaggatgacatattgtgtaattctgtttatataaaatgcccagaacaggcaaatctatagataggaaacagatcagagttgtctagggttgtagggagggggaaa

SEQ ID NO: 1019866 - DNA, 120 bp, Artificial Sequence
  ENSG00000285738_20 (sequence is synthesized)
cggggaaatgactgctaatgcatatgggatttccttttgggtgatgaaatgttctaacattgactatggtgatgactacaaactctgtgatatacttcaatatattcactgaatataatc

SEQ ID NO: 1019867 - DNA, 120 bp, Artificial Sequence
  ENSG00000256721_0 (sequence is synthesized)
ccagggctaaacttagagggaagctgtcatcaccctagggcctgaggaggaaggggagaaaatactgtttggggggcctggtgggagctgtagctgggaggaggaccatgagggagaaac

SEQ ID NO: 1019868 - DNA, 120 bp, Artificial Sequence
  ENSG00000256721_1 (sequence is synthesized)
catagtcatggaaggatgttgtcactgccaggaccaagacaccaagactgtgtgctaggcactgagttagagttgaagaccctcaagaattccactgacaactgaatcatcaaagggaac

SEQ ID NO: 1019869 - DNA, 120 bp, Artificial Sequence
  ENSG00000256721_2 (sequence is synthesized)
agttgttttcctcttccttgtcctttggagaagcacagctgaagcttcctgcccacaccccagcccctcctccttgagcatgaatgtgcagaccacccaccgccccatgcttgtatctac

SEQ ID NO: 1019870 - DNA, 120 bp, Artificial Sequence
  ENSG00000256721_3 (sequence is synthesized)
aacagctatgaggaagaacatacagattaatcaccctgctgcgggatgccagctacccagtggctctggcagccccagtcaatggatcctgcagtgtagccttcatcagtagagctgcca

SEQ ID NO: 1019871 - DNA, 120 bp, Artificial Sequence
  ENSG00000256721_4 (sequence is synthesized)
ctgccagcacccaaaaggtagcactaatatgcatgtgtgacctgaaaattacaatgtaaatggtggggcaacacatgtataggaaggtaaattttaattaaaagtctgttctccaactca

SEQ ID NO: 1019872 - DNA, 120 bp, Artificial Sequence
  ENSG00000274904_0 (sequence is synthesized)
aaccccatccccaccccggcccggtcctgcaaggggcccacctgcggcgaggccgaaggagccggcagagcctggtcagcagcgagtgagctaggggttcccgggctggttataaggcag

SEQ ID NO: 1019873 - DNA, 120 bp, Artificial Sequence
  ENSG00000274904_1 (sequence is synthesized)
ctcctgcccgccccacatgtgtccccgatcttctctaatgacccctgcccttttcccgccacggatcctctggcagggacctatatttagggaaacctgaagcccctgacattcacacta

SEQ ID NO: 1019874 - DNA, 120 bp, Artificial Sequence
  ENSG00000274904_2 (sequence is synthesized)
gtcggccctattgatggggagggagcccctgcccactcaccggtgcttcagaggaaattcttccttggaaatccagacggaggcccttggttgtcaagagaaataaatctttggccaggg

SEQ ID NO: 1019875 - DNA, 120 bp, Artificial Sequence
  ENSG00000274904_3 (sequence is synthesized)
acctgtgggaaggaaaggggtgaggggactcggatcacgtggcctccctgccaccctccctggctccttctctaatctccctcctcccttgactccctgcggtgatggtggctgttctga

SEQ ID NO: 1019876 - DNA, 120 bp, Artificial Sequence
  ENSG00000176912_0 (sequence is synthesized)
agcactgggcaaacgctgcccgatgacgcccgcctcgggggccacggcatcactggggcgactgcgagcccggccgcggagccgctgggacgcggcttacctcccggctgtcgctgctgt

SEQ ID NO: 1019877 - DNA, 120 bp, Artificial Sequence
  ENSG00000176912_1 (sequence is synthesized)
gtgtgttgcccgcgccagtcacgtccctaatgggaccctccgtttcggcgtctgtaaggcgaggaggacgatgcgtcccctccctcgcaggattgaggttaggactaaacggggtccgca

SEQ ID NO: 1019878 - DNA, 120 bp, Artificial Sequence
  ENSG00000176912_2 (sequence is synthesized)
acctctcaggctgtagcgcgcctgcatgccgaataccgacagggtgccggtgcccgtgcggtcgtccttcctgacgccgcagcggaggatgtgttggatctgccccagataggcggtgtc

SEQ ID NO: 1019879 - DNA, 120 bp, Artificial Sequence
  ENSG00000176912_3 (sequence is synthesized)
ctccaagtgcttccgggtcatctggagaatctggccatactgctgattggatacattgaccaacctgatcgcctcgtctaattctgtgtgcagagcaggtacatcaggacagtctagcag

SEQ ID NO: 1019880 - DNA, 87 bp, Artificial Sequence
  ENSG00000176912_4 (sequence is synthesized)
gttatgcaaaaagttattgactgaatctgggagtcatggtataggtggaatttaagatggcaatatgtttttatttttgtttttttt

SEQ ID NO: 1019881 - DNA, 71 bp, Artificial Sequence
  ENSG00000176912_5 (sequence is synthesized)
ctgggattacaagtgtgtgccatcacacttggctaattttttatgtttttggtagagacggggtttcgcca

SEQ ID NO: 1019882 - DNA, 120 bp, Artificial Sequence
  ENSG00000176912_6 (sequence is synthesized)
gcgcccagctggcaatgtatttttatgtgacgagtaacatataaatgtttaattctcaagataactcagtggctttattgtgtcagcaactaataagagctataatttacagagctcttg

SEQ ID NO: 1019883 - DNA, 120 bp, Artificial Sequence
  ENSG00000176912_7 (sequence is synthesized)
ttttgtataagaaatctatactaatcactttataggtgtacacgttaagatagctatgattgttaccattttacaggtggaacactgaggcctagaatggttgaggtactttcccaagct

SEQ ID NO: 1019884 - DNA, 120 bp, Artificial Sequence
  ENSG00000176912_8 (sequence is synthesized)
tactcagctggtaagtttcagagtcaaattttgaactcaaattgctttatttgtaagtcttctctcctaaaacctacattggccatatttcttcaaggttacctctatcagttatagccc

SEQ ID NO: 1019885 - DNA, 120 bp, Artificial Sequence
  ENSG00000176912_9 (sequence is synthesized)
tataactctaagcagaaatagccatttctagattagaaagtattttgtgttttaaattgattttctttatggactttcttgttttctaaagaccatgaactacgttaaatcaagtcagcc

SEQ ID NO: 1019886 - DNA, 120 bp, Artificial Sequence
  ENSG00000176912_10 (sequence is synthesized)
acaattcataagtaaattaacagtgaaatcaaggtatgcacgtgtcatttccgtatctgctcttgggtctctcctttacctgtattgaattaaagatgatctctgtttctggggcctggt

SEQ ID NO: 1019887 - DNA, 120 bp, Artificial Sequence
  ENSG00000176912_11 (sequence is synthesized)
aattattaataactatcttttagaagagggagttgataagggattcataaggcaaatgaagataattccaagagctactttcctggacctattcgctttcaacagattcaggaactgagg

SEQ ID NO: 1019888 - DNA, 120 bp, Artificial Sequence
  ENSG00000176912_12 (sequence is synthesized)
tccagaaagaccaaggtaggaaagaaatatgagaacaaaatgaacctatactcaacaaaaatagcattaattatcaagatatttctgattctttttatttccgctctccttttcctggtg

SEQ ID NO: 1019889 - DNA, 120 bp, Artificial Sequence
  ENSG00000176912_13 (sequence is synthesized)
ttcataattcagtgttagctatttttctaattttggccctttaaacaatcatgaccaataaggcccatccatgaaggttgccacacggaacttgctcagtaaatgttggtcagttactat

SEQ ID NO: 1019890 - DNA, 120 bp, Artificial Sequence
  ENSG00000176912_14 (sequence is synthesized)
tattattagctctgctacagctaccacagattcagtggcttgaaacagcacaaattcattattgtttggtcttttaggtcagaagtctgaagtgggtctccctaggctaaaatcaagatg

SEQ ID NO: 1019891 - DNA, 120 bp, Artificial Sequence
  ENSG00000176912_15 (sequence is synthesized)
ggcaattaactttaagataatttcttaaccctcttatacctgactttgcctttgcctatggaaacaggatctgaaatttctcctggtttacattgcccaccaatagcctaaaaaggtcaa

SEQ ID NO: 1019892 - DNA, 89 bp, Artificial Sequence
  ENSG00000176912_16 (sequence is synthesized)
aagatggcaccactgccctctagccagggcaaaagagccagaccctgtctcatgaaaaaaaataaagaaaagaatttgggtggattgtc

SEQ ID NO: 1019893 - DNA, 120 bp, Artificial Sequence
  ENSG00000176912_17 (sequence is synthesized)
tcatgaaaaaaaataaagaaaagaatttgggtggattgtctgcctctccctctaccagcttctgtttacttgactcttcatccacaaaaacaaacctttaaagccccaagaaatgttcat

SEQ ID NO: 1019894 - DNA, 120 bp, Artificial Sequence
  ENSG00000176912_18 (sequence is synthesized)
aagatcacacaactgacccagatgggaatggtccccatatctcctgacttcctgctggtgctgattacaccatattctggtgtattagcaggcgacagtagctctaaaaatagagcagat

SEQ ID NO: 1019895 - DNA, 120 bp, Artificial Sequence
  ENSG00000176912_19 (sequence is synthesized)
gcaattaatagtggaggcaaattaacttggcgcattcattatcttagtagttgctccctttgtaattgagtacggcattgccaagccaggagcataccctaattagtatgtgctctaata

SEQ ID NO: 1019896 - DNA, 120 bp, Artificial Sequence
  ENSG00000176912_20 (sequence is synthesized)
tggagcgtgaaattccactcaattttgtattcagctcacttcttgaagggggagaaaaatctagcttaattggagccgttagtggggcagagctcatcctattcaggtcaccaccctctg

SEQ ID NO: 1019897 - DNA, 120 bp, Artificial Sequence
  ENSG00000176912_21 (sequence is synthesized)
accctctgtgatccctctgctcagaagataaccaaagggtacaaaaaagaaaacatgccagtcctacatacatgggtagggcaaaaggggacatgaaggggtgtgtgtgtgtgtgtgtgt

SEQ ID NO: 1019898 - DNA, 120 bp, Artificial Sequence
  ENSG00000176912_22 (sequence is synthesized)
gtgtgtgtgtgtgttatgcataaggaggcaagcatgttgaaggtaagatttgggaggcagagagtatctttaaatatttggcctccagaaggaaaaattaatgtggattgaaatcagaga

SEQ ID NO: 1019899 - DNA, 120 bp, Artificial Sequence
  ENSG00000176912_23 (sequence is synthesized)
ctgcaatgctatgattccaaatgcaatttggtaaacatttactggatgccaccaatgcataagtgaagacaaataagatatgatccctgccctcaaagagcttactatctagtgggaaca

SEQ ID NO: 1019900 - DNA, 120 bp, Artificial Sequence
  ENSG00000176912_24 (sequence is synthesized)
attttaagagatgcattcagtgaccactgaatgggtgctctaccttataaattgcgtatacacaggtgatggtatgtaaacattagtattagattctagaaagcaaaaggcccctatcag

SEQ ID NO: 1019901 - DNA, 120 bp, Artificial Sequence
  ENSG00000176912_25 (sequence is synthesized)
atcaggcatctccgttctaaatattaacataaattaataaaaaagtaagctgaaataggtgcctcaagaactgtgaaatcttgagctctctttttctcttaccttatttttcacagagga

SEQ ID NO: 1019902 - DNA, 120 bp, Artificial Sequence
  ENSG00000176912_26 (sequence is synthesized)
ccagctaggttggcaggttgtataaattctcatgcagttattttccaggcaagacctgcattcaccccaggaatctgccaaagactcccggcatagcctttcttcttcctccagatgttc

SEQ ID NO: 1019903 - DNA, 120 bp, Artificial Sequence
  ENSG00000176912_27 (sequence is synthesized)
ttgaacttcattcagaagtttcagggcctcctagttaaaagtagaaacaaaagtccaatttccatttcataatctatgtgcaccttagttgatttcaccctttgaaatgtatacattcta

SEQ ID NO: 1019904 - DNA, 120 bp, Artificial Sequence
  ENSG00000176912_28 (sequence is synthesized)
aactgctttttcattctttctccttcaggtgcctcgcagctgtcagatctcccccaaagctttctgtttagtttaagaaaagagcactgattgattcctattgaagactgtaaatcttat

SEQ ID NO: 1019905 - DNA, 120 bp, Artificial Sequence
  ENSG00000176912_29 (sequence is synthesized)
tcatctgttcattcatttgttcaataagtatttactgagtgtttgctatgtgacagacattactctaggtgtgggtgacctgacaatgaagatgccatcccgatctgggaacaactgtga

SEQ ID NO: 1019906 - DNA, 120 bp, Artificial Sequence
  ENSG00000176912_30 (sequence is synthesized)
tttacctatttaccgtgctcccccttgtggtgcttgctgtacttggccaagtcctgctctgggtggtgaggagcccagcagcagtggcacctgtccctgcgagcctcagccctgcccctg

SEQ ID NO: 1019907 - DNA, 120 bp, Artificial Sequence
  ENSG00000176912_31 (sequence is synthesized)
gagtgcctcacgggtcagcaccatggtgcaacagacctttcttcctgtgcccctgcccaaacctctggcttccctgcaagtgtggacttctgaaccccagccccctccatgccgagatat

SEQ ID NO: 1019908 - DNA, 120 bp, Artificial Sequence
  ENSG00000176912_32 (sequence is synthesized)
cgtgcaggggaatgaagtgagtatagtggatctggccataagaagacagcctcagagctaatggaaatgaccctttcctggagtattaagcccaaagaatcacctgggcactgacaatct

SEQ ID NO: 1019909 - DNA, 120 bp, Artificial Sequence
  ENSG00000176912_33 (sequence is synthesized)
tccacatcttctctgcctggctaggatttgtcagttgtcctcattgtaaagtttggctgctaagccacgtagcatttggtatgatccacgtaagaaaactgccagggccccagcttgcca

SEQ ID NO: 1019910 - DNA, 120 bp, Artificial Sequence
  ENSG00000176912_34 (sequence is synthesized)
taataaattactcacagactcagtgtattttttcttggagtaaaagtccaggatgggtaatagaatacctgctgttggcttttggaaaaattggtactgtatgtagcaaaataatgtgaa

SEQ ID NO: 1019911 - DNA, 120 bp, Artificial Sequence
  ENSG00000176912_35 (sequence is synthesized)
acccatatgcatggatattcttaacaatttgaagaaatcgtcacagctttcctgggttgttgagcctctaagatggtcttttcctctgatgtgataataaagtgtttattctgaactcta

SEQ ID NO: 1019912 - DNA, 120 bp, Artificial Sequence
  ENSG00000285191_0 (sequence is synthesized)
aggaaacgactgtagtatatgagatccattgtggtatatgttgactgaaacatcattaggtggtacatgaatgtatttgacattaagagctgaacagaaagcatggcttttgaggcctca

SEQ ID NO: 1019913 - DNA, 120 bp, Artificial Sequence
  ENSG00000285191_1 (sequence is synthesized)
ggaaacacaatcatggtgcaaggtgaagaagaagggggcacatcttacatcgccaaaggaagagggagagagagcaaagacggaggtgctacacacttttaaacaatcagatcttgtgag

SEQ ID NO: 1019914 - DNA, 120 bp, Artificial Sequence
  ENSG00000285191_2 (sequence is synthesized)
ctccaagcaggcccctctgtttaacactggagattacaattcgaccttagatttaggtggggacacaaatccaaaccatattaaatatcatggagcaagttagtctagatgatatcacat

SEQ ID NO: 1019915 - DNA, 120 bp, Artificial Sequence
  ENSG00000285191_3 (sequence is synthesized)
ttgtataaggccatgatatagtggccttattttcatatttttagtatttcagcaaatgtttgaatttatttaagaggtatattaaaaatatatgccaaaataaaaacatgctcaaaaggt

SEQ ID NO: 1019916 - DNA, 120 bp, Artificial Sequence
  ENSG00000285190_0 (sequence is synthesized)
tctccgcattggctactgggaaaaaccttccccaacatcatctcttgacaagtgaacggctcttgccacgcactaccttagcacactacttactctcttcttcactacgttacaaagact

SEQ ID NO: 1019917 - DNA, 120 bp, Artificial Sequence
  ENSG00000285190_1 (sequence is synthesized)
ggttacttgtctgccattcgacgacggggatggcgttgttcgtctttgtacccacggaacctggcaaggtgctcgcttattttgatagaaaaacgcactccgcgccgcagaggcagagaa

SEQ ID NO: 1019918 - DNA, 120 bp, Artificial Sequence
  ENSG00000285190_2 (sequence is synthesized)
acgacggagcgagattgtcctgggagccagaagagctcccgcagctgctcagaatttagtgaccgggcaactgggcaaccgttgggaaaacctcaccttcccgttggccacggctttgca

SEQ ID NO: 1019919 - DNA, 120 bp, Artificial Sequence
  ENSG00000285190_3 (sequence is synthesized)
tctgaatttgcggttggcgtcagcccgcagtcttgccagctgctcctcgctggagaaggtccagtgccgcttctgactactgttgtggtacattatggaatcgtgaccaggtccagaggg

SEQ ID NO: 1019920 - DNA, 120 bp, Artificial Sequence
  ENSG00000285190_4 (sequence is synthesized)
tctgcagacgagaacccaaacgcatcagcgtcctggcgtaaaacacccgtacccccaccgaagatctcgcggaagcctagggcgtccggctagccggcgctggcgcgctgtcgtcacgat

SEQ ID NO: 1019921 - DNA, 120 bp, Artificial Sequence
  ENSG00000285190_5 (sequence is synthesized)
tacgcggccagcccgtacgcagttgcatttccggagcggactaggaacagaccgtatcccgggttcgttagggcgcccactgagacgtaagtgggcggagcctagagaacgctcctctcg

SEQ ID NO: 1019922 - DNA, 120 bp, Artificial Sequence
  ENSG00000285190_6 (sequence is synthesized)
cctagagaacgctcctctcgttgtgaaggagaaggtagtaaccattgaggagaaaggaagatggaagaggctggtatccagctgatagttctcacagatggagtctcactctgttgccca

SEQ ID NO: 1019923 - DNA, 120 bp, Artificial Sequence
  ENSG00000285190_7 (sequence is synthesized)
caggcgtgagccactgtgcccagccagtgctctctattcttatgtcaacatggatggaaatgaaggccattatcctaagtgaagtaactcagaaatagtcaaatactgcatgttttcaca

SEQ ID NO: 1019924 - DNA, 120 bp, Artificial Sequence
  ENSG00000285190_8 (sequence is synthesized)
actgcatgttttcacaagtgagagctaaacaatgggtacacatggctatatggagtcgaaaaatagacatggaagacaacaaaagataagaaaacagagactgaagactttatataaatt

SEQ ID NO: 1019925 - DNA, 120 bp, Artificial Sequence
  ENSG00000285190_9 (sequence is synthesized)
gcccaatccacacagctgggatgtagcataaccaggattcagattatctaagaagacctcatgatctgaaaatctttataaatgtgcttcctccttgagacagatcattaaaagcagtta

SEQ ID NO: 1019926 - DNA, 120 bp, Artificial Sequence
  ENSG00000285190_10 (sequence is synthesized)
ttatgtttctataacactatgtatcttgtgtgtattgcatatcatatctgtttaggttcaactttgcttttcttttaaacacttttaaggcttatcagaagctgctagacttcctgaaaa

SEQ ID NO: 1019927 - DNA, 120 bp, Artificial Sequence
  ENSG00000285190_11 (sequence is synthesized)
ataccattaagacttccaggtattccagtatatttaaatttcttatagttgcaagtgacaaaacctcaactcaactaacttaggccaatatgagaaatttattgtctaatataaacatct

SEQ ID NO: 1019928 - DNA, 120 bp, Artificial Sequence
  ENSG00000285190_12 (sequence is synthesized)
acaacaaatccaagtgtagaattggactcagagatgacagaatttataaacttcacccagttatttcctttcactgattcttatctctgatttttttctgcatatcagattttcctgttc

SEQ ID NO: 1019929 - DNA, 120 bp, Artificial Sequence
  ENSG00000285190_13 (sequence is synthesized)
cagataaatttctccagaattgggaatatggctctagaccactccagactaaaaacctcccatctatttagctcaagaggcaaaaaggagattcttagaatttccagttatatcctacta

SEQ ID NO: 1019930 - DNA, 120 bp, Artificial Sequence
  ENSG00000285190_14 (sequence is synthesized)
aagacagatgtagagaaattctaggcagacaggagcaggtcccagtgaaccctaccttcaagctgaaaagtctgaaacctgcagcccaaagtgagaacttctattcctgtttgcccactc

SEQ ID NO: 1019931 - DNA, 120 bp, Artificial Sequence
  ENSG00000285190_15 (sequence is synthesized)
tctcctgatcagtaaaaaggcattattcagaaagagtcaactgaatgttgccttttccaaaactacctatggcccgccccaccctgatcctgtgtctttaaagatcccagactcagtcag

SEQ ID NO: 1019932 - DNA, 120 bp, Artificial Sequence
  ENSG00000255568_0 (sequence is synthesized)
cgggtgccgggggcggaagcgcggccacaagagggggcgattcaccgccgccccccgtgggacctgggtcctctacgcgggaccgcaggggccccgagtcgcgggttgggcaaggtcgcc

SEQ ID NO: 1019933 - DNA, 120 bp, Artificial Sequence
  ENSG00000255568_1 (sequence is synthesized)
cgcccgctccgggtcgctcggaagggtcatttcacggaccggtcgtctggggccagtgcgtcttgccccgcacggaagacccctcgcttcgaggacaggaaagcttttaaagtgaggatt

SEQ ID NO: 1019934 - DNA, 120 bp, Artificial Sequence
  ENSG00000255568_2 (sequence is synthesized)
ggctcgccgcgcctcccgcagaggggaacgccgcccggacccgcgctcctggggcgggggcctcgtatgctggcgttgccggagcgtctgcggcgctgaaggctgccgagacccagccac

SEQ ID NO: 1019935 - DNA, 120 bp, Artificial Sequence
  ENSG00000255568_3 (sequence is synthesized)
atcccccacaagccagcagcccggcagaaaattacataaaatgcagcgcttcgccgagggggtgcgagtcgggggagcagcgcgcagctgcggctgacggctcggctggatccatccaag

SEQ ID NO: 1019936 - DNA, 120 bp, Artificial Sequence
  ENSG00000255568_4 (sequence is synthesized)
gaagccggaaactagggagtcatgtgcagttagaatcctcttggaagactagtaggatgtgaggttggagaggtggacgacgaccagaaaattcccttgtcttgccaggcttctgaccta

SEQ ID NO: 1019937 - DNA, 120 bp, Artificial Sequence
  ENSG00000255568_5 (sequence is synthesized)
actatgagtttcctccgcgcatccagcctgccctgctctggcccctaaagtacagcagtaacactcagtggtgtccctgccttcctggaatgcgcgttaacaattctgattcttactcat

SEQ ID NO: 1019938 - DNA, 120 bp, Artificial Sequence
  ENSG00000255568_6 (sequence is synthesized)
ggcaataacctacacaccacatagacgttaaatgtggttcgggtcagactctagggcaggactcactgcctgcaccttgtcttggctccaccagcttgaccttgagcaagtcacaacctg

SEQ ID NO: 1019939 - DNA, 120 bp, Artificial Sequence
  ENSG00000255568_7 (sequence is synthesized)
tgggtctcagtgttccttactagtaaaccgtaggtaattcctcactagtaaacagataatatttgtgcctgtctcaaagttgtgaggatttaatgaatttgtgttcctggtatacagtaa

SEQ ID NO: 1019940 - DNA, 120 bp, Artificial Sequence
  ENSG00000254041_0 (sequence is synthesized)
ccattccaagggagaaactgagatctgggagttttctctcaattgcattgcactgaggaagagggcctatgagaattttactatctgagaagctggtggagcctaaagacctgaggattt

SEQ ID NO: 1019941 - DNA, 120 bp, Artificial Sequence
  ENSG00000254041_1 (sequence is synthesized)
cttcctagctgcagcagaacacgaatatcaataagttccaattgaagagcggattcttttgcaattcaggcatgtgccggcgataacgggcgagttggcatgaagagaggcagagatgga

SEQ ID NO: 1019942 - DNA, 120 bp, Artificial Sequence
  ENSG00000254041_2 (sequence is synthesized)
ttaattatgcagagaacatggaaattctgcttatcatcggctagcaaaggagcccggctcacataatcagcaaacgaagggagaggaaaaaataacaatgcaatggcaccttccagccca

SEQ ID NO: 1019943 - DNA, 120 bp, Artificial Sequence
  ENSG00000254041_3 (sequence is synthesized)
tcatcaggattttttctacccccttgtaattaaaaaataacatacacttatagccctatctcctgtgcaggcaaggagtggatgtccacaaaataattgcactgggatattagagctggc

SEQ ID NO: 1019944 - DNA, 120 bp, Artificial Sequence
  ENSG00000254041_4 (sequence is synthesized)
gcttctgaacccagtccaaatcagagagacgtctcaggtgacattcaagctcggtttccaaaaatcccaaattggtaccttatcatgatccaagcaaacatacatacatatatgataaat

SEQ ID NO: 1019945 - DNA, 120 bp, Artificial Sequence
  ENSG00000254041_5 (sequence is synthesized)
atttggagggctgactctagaggaggctttggaactgatcacctgtggactatctggtcagtttcattttttatgaaacatgtccaaatagccttcattttgcaaagtggctggattaaa

SEQ ID NO: 1019946 - DNA, 120 bp, Artificial Sequence
  ENSG00000254041_6 (sequence is synthesized)
atggtggctgtgcaacggctgtgctatcttctcaaatcatttaacttacctacaagtttttgtttctattccctttgccaactcattttataaatgttaagttaatgattgcaatgtctg

SEQ ID NO: 1019947 - DNA, 120 bp, Artificial Sequence
  ENSG00000254041_7 (sequence is synthesized)
cacctcaaaatcagaattcgcaattctgtattgtcattgtaaaatctgacagctcaatgccttgtatttctctaaatgccaaaagactacaataaacctagtttattgctttaaagaaaa

SEQ ID NO: 1019948 - DNA, 120 bp, Artificial Sequence
  ENSG00000255565_0 (sequence is synthesized)
cacatgaatttgtttgctacataaagagctacatttagaaggccatgtgactagaagagaagatttatgcaattcttaaacagttatggaggttaagaagtccatggtcgaggggctaca

SEQ ID NO: 1019949 - DNA, 120 bp, Artificial Sequence
  ENSG00000255565_1 (sequence is synthesized)
tctcttccttttcttacaaagccaccagtcccactcccatgataaccccttaatccattaattcatgaatggatcaatcacttcttaaaggcctcacctctcaacactctcacattgagg

SEQ ID NO: 1019950 - DNA, 120 bp, Artificial Sequence
  ENSG00000255565_2 (sequence is synthesized)
atgaaatttcaacatgagttttggagaggacaaatatgtaaactatagtacatcacaatatcaataacacaaaatgtataccaaaagagaggtacatttgacttttgaaaagccaggttt

SEQ ID NO: 1019951 - DNA, 120 bp, Artificial Sequence
  ENSG00000240527_0 (sequence is synthesized)
tgaggctgctgaagttaccattaaagctacaggaacttttaagaaagtttttgaagacacactgtgtctgaagggaccatgaaaagttaatgatcatacttgcctgtgttaccagatgtc

SEQ ID NO: 1019952 - DNA, 120 bp, Artificial Sequence
  ENSG00000240527_1 (sequence is synthesized)
ttagtctgttttgtgtggctgtaacagaatgtgacaaacttggtaatttataatataaagaacagaaattacttttctcacagttctggaggccaagaagcccaagatcaaggtgctggc

SEQ ID NO: 1019953 - DNA, 120 bp, Artificial Sequence
  ENSG00000240527_2 (sequence is synthesized)
ggcccataggaaagagtaggtaggttatgccagctcacacgcatcctttaaaaatggtttagaagtttagctggtttcttattactcctgtctatggatgtttccttctgtcactctact

SEQ ID NO: 1019954 - DNA, 120 bp, Artificial Sequence
  ENSG00000240527_3 (sequence is synthesized)
agggatgaaacagctaatcatgttcaatagttacatttagattggtttttaaaaactatgattgtattagttcgtttccatgctgctgataaagacatatctgagactggaaacaaaaag

SEQ ID NO: 1019955 - DNA, 120 bp, Artificial Sequence
  ENSG00000240521_0 (sequence is synthesized)
tgaggcttccccagccatgtggaactggagctgacatcatcagcggtggtttgctgtgattccttcagccttctgacctctgaaagccagacctttgctcccacagatcaacccataatt

SEQ ID NO: 1019956 - DNA, 80 bp, Artificial Sequence
  ENSG00000240521_1 (sequence is synthesized)
cagcggtggtttgctgtgattccttcagccttctgacctctgaaagccagacctttgctcccacagatcaacccataatt

SEQ ID NO: 1019957 - DNA, 120 bp, Artificial Sequence
  ENSG00000240521_2 (sequence is synthesized)
gactacaggcacacgccaccacgcccagaattttctagcagaatggaattccacctggggcagcaagctcagtgggaatgttccaatcaacccagatgactgacccctgctaagaatggt

SEQ ID NO: 1019958 - DNA, 120 bp, Artificial Sequence
  ENSG00000240521_3 (sequence is synthesized)
aatcaacccagatgactgacccctgctaagaatggtagagagaaagattctactggaagtcctgtaatggacctgcaatcctattttccaggtccctggctccagggcccactgtgacac

SEQ ID NO: 1019959 - DNA, 120 bp, Artificial Sequence
  ENSG00000240521_4 (sequence is synthesized)
aggattcatcctggcattcaagtgcctacacaacctggttacctcattgattggcccttgccccgactcttccctaaggagaacactcgatacaggatgaccctcttctactttcttcct

SEQ ID NO: 1019960 - DNA, 120 bp, Artificial Sequence
  ENSG00000240521_5 (sequence is synthesized)
agacttcaaagctcagaacaaattgcatcccctctctataatcttcactgagcagcttcagcaaacattgctattttcctttcctgaattcttactattgcactaactggaaactcccaa

SEQ ID NO: 1019961 - DNA, 120 bp, Artificial Sequence
  ENSG00000240521_6 (sequence is synthesized)
ttctgttctccttttgtatggtttctggtacccaagtcttatcatttcagtaggattgtaaattctcagtggcaggaaacatactttataatgaacacttaataggtgctcaatgaaatt

SEQ ID NO: 1019962 - DNA, 71 bp, Artificial Sequence
  ENSG00000240521_7 (sequence is synthesized)
ttcaaatggattctcacagccaaatttttgtatttttagtagggaagaggtttcaccatgttggccaggct

SEQ ID NO: 1019963 - DNA, 72 bp, Artificial Sequence
  ENSG00000240521_8 (sequence is synthesized)
tcaaactcctgaccatagtgatccggcttggccatgaaattttcgatgattgataagccatgtactgagcaa

SEQ ID NO: 1019964 - DNA, 120 bp, Artificial Sequence
  ENSG00000240521_9 (sequence is synthesized)
catgaaattttcgatgattgataagccatgtactgagcaagcctggtaggagaattttatcaggccaagaagtcacttaaagagcataatgttgaataaatgactagtttattaaatgaa

SEQ ID NO: 1019965 - DNA, 120 bp, Artificial Sequence
  ENSG00000276417_0 (sequence is synthesized)
ttattaattcacttgtctgaagttcctttaactctgctttctggtcctcagtttcactttgcaaatcattttttattcataaccatataaaacataatttattttgaaaagtctctcata

SEQ ID NO: 1019966 - DNA, 120 bp, Artificial Sequence
  ENSG00000276417_1 (sequence is synthesized)
taattttcacttattctaggattataatttttccgtttgtctcttagaataaaactttcagatttgtcaacactcatttagcagtagctcctattgataggattccatccatctcttttg

SEQ ID NO: 1019967 - DNA, 120 bp, Artificial Sequence
  ENSG00000276417_2 (sequence is synthesized)
acctagtaagtgaatataacaatagatgccatagaaattcaatcctgtcagatctaactgcctacatataaatttccatgtcccgcaaaggcatctcattgaggtcatgttctgttgtat

SEQ ID NO: 1019968 - DNA, 120 bp, Artificial Sequence
  ENSG00000276417_3 (sequence is synthesized)
ccttactttgtatcttgagatgcttggtggggcatggaaatttatatgcaggcagtttcatctgacaggattgaatttcagcagcatccattattatatccactcactaggtcaaaagac

SEQ ID NO: 1019969 - DNA, 120 bp, Artificial Sequence
  ENSG00000276417_4 (sequence is synthesized)
atggatggaatcttatcaacaggagctactgctaaatgagtctcttttctatttttccctattataatcctagtgaagctgtaaatattaggttcttgaacccacaggactgattctagg

SEQ ID NO: 1019970 - DNA, 120 bp, Artificial Sequence
  ENSG00000276417_5 (sequence is synthesized)
ggagaataaggagaagcacatggagtctcacggctgaagggccagcatcaatgtgggttgagcctggattctctgggcattgtgggtctgggcctttttatgatgctctctgagtctgtg

SEQ ID NO: 1019971 - DNA, 120 bp, Artificial Sequence
  ENSG00000276417_6 (sequence is synthesized)
atttgttcttggtcagtagagcctaacgaaaagagaataactaaatctcccacaggaaacttccagggacacacaagtacataaatgtggtgatatctcaatggatgagaaagcaggtga

SEQ ID NO: 1019972 - DNA, 120 bp, Artificial Sequence
  ENSG00000276417_7 (sequence is synthesized)
atgctatttatttcccaaagattcaggatgtctttattgtcacctgctttctttattatttttgacatgcacatgcaataatcattgatctcactttatacatctattgtttgccaggca

SEQ ID NO: 1019973 - DNA, 120 bp, Artificial Sequence
  ENSG00000276417_8 (sequence is synthesized)
atatagtaggaactgaagtaaaactgttatacacaaacagtacataattaatggatatagtttggcaagtttgcacatatatattatcttgttaccacaccaatatccaggtaataatat

SEQ ID NO: 1019974 - DNA, 120 bp, Artificial Sequence
  ENSG00000276417_9 (sequence is synthesized)
atccatcacctccaaatgtttcctacgtccctttgttgttgttgttgttgttgtcagaacccctaagatcgaccctcttaacaaattgttaaatacaaagtacctcattgttaactatag

SEQ ID NO: 1019975 - DNA, 120 bp, Artificial Sequence
  ENSG00000276417_10 (sequence is synthesized)
gtactatgttttggagcctatctctgtaattgactcattttgtatagctttaacccttgaacaataactccccatattgctctttccccactcaataaaacactaaactcttttaaagca

SEQ ID NO: 1019976 - DNA, 120 bp, Artificial Sequence
  ENSG00000276412_0 (sequence is synthesized)
aaagttcagcgactccacttgcctctcctctcatttctttcggaaaggggaaaccagacgacccagcggccacgggacgagtcgccccaactcaaccccagcaggacgctggaggggcct

SEQ ID NO: 1019977 - DNA, 120 bp, Artificial Sequence
  ENSG00000276412_1 (sequence is synthesized)
cccttgcccacctctcttcgctggcactggcctcctgcacccgggtctgcagtccctccgccatctcacaagtgtgcagccgctaggcctgggggatccgaatgactggggctggatagg

SEQ ID NO: 1019978 - DNA, 120 bp, Artificial Sequence
  ENSG00000276412_2 (sequence is synthesized)
aatgccttcgtgtttcccaagacccccgggcctgctccacaaagtttgaagggtgggtacaccccgacccaggagctcagagatgcccgggaagacggggggcccgaatggaagcagaaa

SEQ ID NO: 1019979 - DNA, 120 bp, Artificial Sequence
  ENSG00000276412_3 (sequence is synthesized)
aacacttatggccgctgggaagttgggagagccaggctgggactccggcaggcccagggaaagttccccttctaggctctttattaaaaaatttaaaaggaggagttgaggcgccttgaa

SEQ ID NO: 1019980 - DNA, 120 bp, Artificial Sequence
  ENSG00000276412_4 (sequence is synthesized)
gctttttcatttttctcccttaggcctctccacttgcccgagctctcagccaccaggagacagacggaaggggcttctgggctgtgttgggagcgggcattgtcccctacccactcctgc

SEQ ID NO: 1019981 - DNA, 120 bp, Artificial Sequence
  ENSG00000276412_5 (sequence is synthesized)
acagtttcccaaagtccagccacctccgaccctccttgggggaaaaaataccagtacccagacacctctgcaccctgttatatgactgggcttgcttcaggaatatcttacaaagaagaa

SEQ ID NO: 1019982 - DNA, 120 bp, Artificial Sequence
  ENSG00000276412_6 (sequence is synthesized)
ggaggaggaggaggaacggcttggagtcatgtttacatctagttctactgatccgttcacatctggagagtttatttataactccctctataactctctgtttggaggcactggtggctc

SEQ ID NO: 1019983 - DNA, 120 bp, Artificial Sequence
  ENSG00000276412_7 (sequence is synthesized)
tactgacagactgatgtctaggaaatattgctctatgtctaatggtacctaaatgtgctgtggttgtatttacagatttacgtttgagggaaatataattatttccattgtatttgtgca

SEQ ID NO: 1019984 - DNA, 120 bp, Artificial Sequence
  ENSG00000253100_0 (sequence is synthesized)
agtgtcatgggaagacagagagaaggctgctgtctgaaagccagaaaaagagccctcagcagaacccagccatgctggtgtcctgatctcagccttccagcctccagaactccaaatata

SEQ ID NO: 1019985 - DNA, 120 bp, Artificial Sequence
  ENSG00000253100_1 (sequence is synthesized)
agtcttaacgttacatctgcaatggaaaaacaagtcaaactcagcaaaaaggagccctgaagagacagagttaagtgcttccgtgatgagagtagagttggcctatgctgtccctcccag

SEQ ID NO: 1019986 - DNA, 120 bp, Artificial Sequence
  ENSG00000253100_2 (sequence is synthesized)
agggaaaatagaaccattcagagcagttcagggatctttactactctgacatggaaggaagaaggaggagaagagaaaagatgaacggaccttgaacctgggatatcgctcatgtgactg

SEQ ID NO: 1019987 - DNA, 120 bp, Artificial Sequence
  ENSG00000253100_3 (sequence is synthesized)
ctacattggtattaagatacagcattcatgtgccctggaatgttttgttctattaggtgctacacccagtagaacagtgctccatccaatgcaattttctggaatttaaacaatccagac

SEQ ID NO: 1019988 - DNA, 120 bp, Artificial Sequence
  ENSG00000253100_4 (sequence is synthesized)
cagaatttttcctccttggagatggaatgtcttgctccagagggaggaggaagaagagaaaagagaagtctcaaccagcctcctctctaccccacacagagaatagagatgcaaaacttc

SEQ ID NO: 1019989 - DNA, 120 bp, Artificial Sequence
  ENSG00000253100_5 (sequence is synthesized)
agaaaggattgggaagacaggaggtagaaggaggcatttttgcattcctttagataaagggaagtacccccaaaaaagatactcttgctttgcaggtgtctgctctggagtcactgctct

SEQ ID NO: 1019990 - DNA, 120 bp, Artificial Sequence
  ENSG00000253100_6 (sequence is synthesized)
ttggtgagaggaagaaggccttgtttgactgccacagatgggacatttagtggagtaagaagactggtgtgagaacggggtgttggtgttaatgtttggattacggtcctagatgctgag

SEQ ID NO: 1019991 - DNA, 120 bp, Artificial Sequence
  ENSG00000253100_7 (sequence is synthesized)
cttcggcgctcgctgattggccatccgtgcaggcaggtgcggtctggcacctcgggatcccaacgggtggccgcctgcgtggctgcctgcctcacctcaggagagaccctgctgatatcc

SEQ ID NO: 1019992 - DNA, 120 bp, Artificial Sequence
  ENSG00000253100_8 (sequence is synthesized)
cacagtcagaaagtgggaactacaatatctttaataccatcctcagagaccctcataagcagaagagaagtatgagaaagctcacaaggtccacagcaatatcttcatcgcgccagaatg

SEQ ID NO: 1019993 - DNA, 120 bp, Artificial Sequence
  ENSG00000253100_9 (sequence is synthesized)
tcaggggctttagcacaacagaaatcaatagtttctagtacattttttggtacaatttttttttaatgacctaacctgagaaagtacagggaaggcagaggtacagaacagtaggaaaca

SEQ ID NO: 1019994 - DNA, 120 bp, Artificial Sequence
  ENSG00000253100_10 (sequence is synthesized)
aaacctccttaaccgaaggcctatttagacatgtcatgcaacgtcagtttaggagagacgcgttctttatctgagccacacaaccgggcagctggagcgaggtcttggtcctggagtgct

SEQ ID NO: 1019995 - DNA, 120 bp, Artificial Sequence
  ENSG00000253100_11 (sequence is synthesized)
gctcttctccaggggtgctcacagaaataactacagtggactagaatgagatgcttgaaaccttcccccgagcctagctctgcatttaggagaacagcacagcgcaccatgatctgatat

SEQ ID NO: 1019996 - DNA, 120 bp, Artificial Sequence
  ENSG00000253100_12 (sequence is synthesized)
aggtataggtgggtgggagtctcagtctgtagttctatatcacctattaagagactggaacctggtcccatgttttctgcaggaggttgagctcttaacaatgtgccaagccagcagctg

SEQ ID NO: 1019997 - DNA, 120 bp, Artificial Sequence
  ENSG00000253100_13 (sequence is synthesized)
tgccctagagtcttggcctaagacaagcaaataattgtcagatgactgaatagttctgtttccttattaaatcttaggtttagaattcctttcacaattaaaaagatttggacaacaact

SEQ ID NO: 1019998 - DNA, 120 bp, Artificial Sequence
  ENSG00000253100_14 (sequence is synthesized)
cgtgtgtgcacgtctgtgtgtgtgcttcagtcacagaagggggtgagaagtgggaagaggggatttgcatagaacctccaattttccttatttcctagggagttgatgatttcagccaaa

SEQ ID NO: 1019999 - DNA, 120 bp, Artificial Sequence
  ENSG00000253100_15 (sequence is synthesized)
ggtcccctcaaccctaatgtgcactgtgtctttctgtccactcaagtcctggctgatctctccctattcacacttatgccactattcttttcagctctacccatgtggcgcttgccagat

SEQ ID NO: 1020000 - DNA, 120 bp, Artificial Sequence
  ENSG00000253100_16 (sequence is synthesized)
gatgttaccttttttgctttgggaattttgctttcccaactacagcacaagtaggagtggtgtcttgtagtactttgtgtctttcttcatgtttcagatgagtgttttccatagagtgga

SEQ ID NO: 1020001 - DNA, 120 bp, Artificial Sequence
  ENSG00000253100_17 (sequence is synthesized)
gctcaattcctatttcagatttgagccatcaatgctgggcaatttcttcccaggtaaaatgaaggcaatactaaaatctacctccagatgggactgtgaggaccagatgagatgctgttt

SEQ ID NO: 1020002 - DNA, 120 bp, Artificial Sequence
  ENSG00000253100_18 (sequence is synthesized)
taaagccccgagaccccagcacacagtaggtcttcaataggtatcattcccttccctgtcctttctggcaaggagtttagctttgacttattaaggactcataggcaagtcattttttaa

SEQ ID NO: 1020003 - DNA, 120 bp, Artificial Sequence
  ENSG00000253100_19 (sequence is synthesized)
ttgttatgggaggaaaaaatggcattgccttccttgttttactgtggtttgtggaaactcaaaaaaaagcagcgttcggttttacaatctctataaattgaatttcctgtcttttcagaa

SEQ ID NO: 1020004 - DNA, 120 bp, Artificial Sequence
  ENSG00000253100_20 (sequence is synthesized)
ggcaggtgcggtctggcacctcgggatcccaacgggtggccgcctgcgtggctgcctgcctcacctcaggttgttcatcacgctcaggctaatttcccactctgagagctaatgctgatc

SEQ ID NO: 1020005 - DNA, 120 bp, Artificial Sequence
  ENSG00000253100_21 (sequence is synthesized)
agccctaagcctcacacgcagtcaggctccagccactttaatttctggctgggaattagagaggaggctgtgctgcccccatgcccctttcctgtagatgttgctgtcgatcaccacaca

SEQ ID NO: 1020006 - DNA, 120 bp, Artificial Sequence
  ENSG00000253100_22 (sequence is synthesized)
cccaacaaacacctccttttcctacattactcccctcagccccctgatctccccatctccaccattttgcgggggagggggggcaacacttccccctcttaatgtcaccccatccactgc

SEQ ID NO: 1020007 - DNA, 120 bp, Artificial Sequence
  ENSG00000253100_23 (sequence is synthesized)
caagtacattctgattttaaagaggcgtcctctaggttgacatcctagcatgaagaggcagcgtttgaccttccttggttaccacactgtcgattcggctggtgtggatggaaaggctcc

SEQ ID NO: 1020008 - DNA, 120 bp, Artificial Sequence
  ENSG00000253100_24 (sequence is synthesized)
cacactcactcctccttctgtctcttaaaaaaaaaaatcacccacctcccctttcaaataaaaaaagagagggagagggagggagagagaatttgacattgtataatttaaaattgcaca

SEQ ID NO: 1020009 - DNA, 120 bp, Artificial Sequence
  ENSG00000253100_25 (sequence is synthesized)
gatctatgggatggctctgggctccagattgcagcgatcactgtggagcagcaaccatctctccatcctggctccattgagcttctgcttctgtcatatctgcgctccccattggcactg

SEQ ID NO: 1020010 - DNA, 120 bp, Artificial Sequence
  ENSG00000253100_26 (sequence is synthesized)
cccgcctggcgctcacccagtctggtctgacacttgctgctgaggatggggcggggacccaggcaggcttccaattctttcatgagctgggtgctgcctgaagccagtgaactgtgaagc

SEQ ID NO: 1020011 - DNA, 120 bp, Artificial Sequence
  ENSG00000253100_27 (sequence is synthesized)
cctgttgtaaaggcttcagagggccccagcatggcggggtgggggcaccgagccacgggaagtgtgtgagcaaagagggctgctgagagtaaattagctcctggctttgagtcctgctga

SEQ ID NO: 1020012 - DNA, 120 bp, Artificial Sequence
  ENSG00000253100_28 (sequence is synthesized)
gaaaaacaagtcaaactcagcaaaaaggagccctgaagagacagagggtgctcacagaaataactacagtggactagaatgagatgcttgaaaccttcccccgagcctagctctgcattt

SEQ ID NO: 1020013 - DNA, 120 bp, Artificial Sequence
  ENSG00000253100_29 (sequence is synthesized)
tagggccaattctttttattccaggttatcacaacatcctcaaagaaaaatgcatcatgaatggtcttcataccatctaacagatccagtttaccctcattcctgtggctttgttctggc

SEQ ID NO: 1020014 - DNA, 120 bp, Artificial Sequence
  ENSG00000273451_0 (sequence is synthesized)
tctccttatactagggttcgagacatgaggctgtctttttgggccttttgcgttgtcacagtcccagaccacggaacattctctcttccccaggacaggacattctctcttccccagcct

SEQ ID NO: 1020015 - DNA, 120 bp, Artificial Sequence
  ENSG00000273451_1 (sequence is synthesized)
ccttcctgtcctggcgttgagtcttccaaatggaaaattccagccatatcaattggtgatgcacccatttcttcctgtggaacgacagtctgatggaattgcttctggagtaaatgccca

SEQ ID NO: 1020016 - DNA, 120 bp, Artificial Sequence
  ENSG00000273451_2 (sequence is synthesized)
gcttcttaccacttcagtgtcagcctgaatgtttggaaagttctagcacctcaaaccatttgcatctatgaaagcagaactctattttttccctttggtttagcttgtgagttctctgtg

SEQ ID NO: 1020017 - DNA, 120 bp, Artificial Sequence
  ENSG00000273451_3 (sequence is synthesized)
ggaggaagatctgatatggccggctctctttcaaccctagttccagcagagagagagagagaatgttctgggtgacggaccctcccagcaaaggggcttgctttatttgcttctctcccc

SEQ ID NO: 1020018 - DNA, 120 bp, Artificial Sequence
  ENSG00000273451_4 (sequence is synthesized)
ccacttttgtggtgggggataattagtcacaactcagtagtaagccgtgcctgctgtagagaggaagcattcagggggttggaagtgtggagaccccagtctgattgctggaatcagtgc

SEQ ID NO: 1020019 - DNA, 120 bp, Artificial Sequence
  ENSG00000273451_5 (sequence is synthesized)
tcctcggttcagtgttttgagaccaggtctttagcttctagctgggcatatttttctgctttgtaatttaacctgtatcttttttttcccatgttcctgcctcatcagggaattgtaaga

SEQ ID NO: 1020020 - DNA, 120 bp, Artificial Sequence
  ENSG00000273451_6 (sequence is synthesized)
tttagggggaggtgtgggaaatcttactctttgccctaaagtattcagcgatcagaattctggataccctgcaaaacacctccaacctccctgcctttgaaccctgtgttaacaatgaga

SEQ ID NO: 1020021 - DNA, 120 bp, Artificial Sequence
  ENSG00000273451_7 (sequence is synthesized)
agcttgtttatttgaaggctgggttctcattggcccacaggggtaggttgtaattgtgtgtctaaaaaattgccttttgcattccccaatagcatgacaactggaatagtaatttgactt

SEQ ID NO: 1020022 - DNA, 120 bp, Artificial Sequence
  ENSG00000253802_0 (sequence is synthesized)
ttcctagaatctaacccaactgatcaacggttattacagctctggggttccttacagtcaaaagatttgtctctgtcaagatttttagtagaggaaaaggcattatcttctagatagggt

SEQ ID NO: 1020023 - DNA, 120 bp, Artificial Sequence
  ENSG00000253802_1 (sequence is synthesized)
tatataaagcagctctccagcattaagaaacatagctttgccaatacttctgctcattgcaaagaaacagtgttataggcccaggggtgagcatgcacagagaaaaggctttgtgaggac

SEQ ID NO: 1020024 - DNA, 120 bp, Artificial Sequence
  ENSG00000253802_2 (sequence is synthesized)
acagtgagaagatggctgtatgcaaaccaaagagagaggtctccggagaaacctgacctgctgacaccttgatctgggatttccagcctccagaactgtaagaaaggtacacttggtctt

SEQ ID NO: 1020025 - DNA, 120 bp, Artificial Sequence
  ENSG00000253802_3 (sequence is synthesized)
tggctgctagtgatcctctgcagagaccttgaagagcacggcaattatgaaacttcaacaagaaaagatttaagctgatcttttaaaaaaatatatactgtcaggaattttgtagaaatg

SEQ ID NO: 1020026 - DNA, 120 bp, Artificial Sequence
  ENSG00000253802_4 (sequence is synthesized)
actttaatgtaataactgcttctttgacttatgttttgtcttgtggtgaaaagaaaaatatttataaaagcatgcctgtgtcctaaaattggggacacaaacttaaatgactgaaggcac

SEQ ID NO: 1020027 - DNA, 120 bp, Artificial Sequence
  ENSG00000253802_5 (sequence is synthesized)
ttgaggagtggaggcaaggatggtgaaaccaggccctgtaccaagcaggagagcgtgaacctgctaaagagagtgactgcttctcatttccagtcaatgcgactggtgtcgcattccagt

SEQ ID NO: 1020028 - DNA, 120 bp, Artificial Sequence
  ENSG00000253802_6 (sequence is synthesized)
caaatggagttgcgacaccatttcagccacagcgattgatctggattttctgtaaaattccctgatttttacatattgccaattaattaattaattaaaaagaaatgtagatgttcaacc

SEQ ID NO: 1020029 - DNA, 120 bp, Artificial Sequence
  ENSG00000253802_7 (sequence is synthesized)
acacgccatgttgggagacttccaaacaagtctagagagttggcacttagggatgaagaaatcatcttctggtcagtggcccggacaatgcttttgatgaacagatgatgagtgacaatg

SEQ ID NO: 1020030 - DNA, 120 bp, Artificial Sequence
  ENSG00000253802_8 (sequence is synthesized)
caagatgaactgtgacaaggatcccgtgggttgtcaaatgagttaagaggaaggaaaaattcctttgggttgccgaggccaagacaagcttcatttcaagcttagtcttgaagatgagtg

SEQ ID NO: 1020031 - DNA, 120 bp, Artificial Sequence
  ENSG00000253802_9 (sequence is synthesized)
ggattaagataaaaaataaagaatggaaatgagcatgaacaaaaacgtgatggtgaaagcatatttgctattttcaaaagccaggagcagtgctatcagtgacaggcaaacaggcctgga

SEQ ID NO: 1020032 - DNA, 120 bp, Artificial Sequence
  ENSG00000253802_10 (sequence is synthesized)
gaaagtttcctaaatatatcatttttccctgttagaattcattgtctctactgatttcaaaatcagcaaatatttattgtaaaaaagaaagaaaaaatacttgttaaaatctatttctat

SEQ ID NO: 1020033 - DNA, 120 bp, Artificial Sequence
  ENSG00000253802_11 (sequence is synthesized)
aaaaactactgctactggtttctccctaaatgctcggcagtgagcaaagaaagatactgttaacatttagtagctgctgcggtcaccttggcataatcgagtgaacacagactttaatgg

SEQ ID NO: 1020034 - DNA, 120 bp, Artificial Sequence
  ENSG00000253802_12 (sequence is synthesized)
cagtttaattagatttaccacggggaagatgtcacacaggagatgcgatgcttctgtatttagaaacctatatgatgacatgaataaataaaaaatgaacagaaaatgaaacattgcaaa

SEQ ID NO: 1020035 - DNA, 120 bp, Artificial Sequence
  ENSG00000253802_13 (sequence is synthesized)
gtggtgactgaaaccacacgccatgttgggagacttccaaacaagtctagagagttggcacttagggatgaagaaatcatcttctgggtacacttggtctttcctgatgacgcttttaag

SEQ ID NO: 1020036 - DNA, 120 bp, Artificial Sequence
  ENSG00000253802_14 (sequence is synthesized)
tgaattcatggttttatggccttaatcatctagcagatacaatacaaacctatttgaccaacaaacccagaagtaacctggccaggcgcagtggcatacacctgtaattccaacacagtg

SEQ ID NO: 1020037 - DNA, 120 bp, Artificial Sequence
  ENSG00000253805_0 (sequence is synthesized)
tgcagaccccgaagaaggactggctcctcggtgctgatggctgtccttctaaaccaggggggagtccaaaagcttcagtgcaggaggaaggcagtgagtgttagccctgacctgcgctga

SEQ ID NO: 1020038 - DNA, 120 bp, Artificial Sequence
  ENSG00000253805_1 (sequence is synthesized)
caggaccctgctgtgcgaggtccatatggggcaggtgcagctgccaacacggccaaactgaaggttcgctcgcaccaggaccagtcgtgggtgaactctttgcacgctcttgacgtcagg

SEQ ID NO: 1020039 - DNA, 120 bp, Artificial Sequence
  ENSG00000253805_2 (sequence is synthesized)
tctttgtggactcagtgggaactgagaacaattccatccgtacgacgtccagatgaaccttgctggtcggagaggaaacttctgaccaccccgagctgagctttgtgttcctcaggcccc

SEQ ID NO: 1020040 - DNA, 120 bp, Artificial Sequence
  ENSG00000253806_0 (sequence is synthesized)
gcggtggcgcgcgcacgaggccgccagcaccgtgtgcgcccgcaactccctcagcgccccgagcaccccgcagcgggtccaagtccgagggcagcacgcggcccgggaagcgctgctcag

SEQ ID NO: 1020041 - DNA, 120 bp, Artificial Sequence
  ENSG00000253806_1 (sequence is synthesized)
gtccagcagcgcaaagacagcgagccccagggccagcaacgccaccagcagccccagcatagcggcggcggcgggcgcggggtcctgcggagtccgtggcgccggtgccggtgtccgcgg

SEQ ID NO: 1020042 - DNA, 120 bp, Artificial Sequence
  ENSG00000261332_0 (sequence is synthesized)
agtgacggagctgagcctgcccctgcaggtagctcatcccagagcattggcgctggctcccttaccgggaaatgaaatgagaagtcagtgcatgacatgctggtggtgacagctatattc

SEQ ID NO: 1020043 - DNA, 120 bp, Artificial Sequence
  ENSG00000261332_1 (sequence is synthesized)
cttctgagttcatgtctccctcctgggaacaacccccgtcttctggtccggtggccatccagctgcagagtgagcactccacttcatgcactgggatctcagctggagagaaggacatca

SEQ ID NO: 1020044 - DNA, 120 bp, Artificial Sequence
  ENSG00000261332_2 (sequence is synthesized)
tcccgccagcaaagccagagaactctccttccctaaagcagacctcaacatgtcactgtctcctcttaaggaaaataataatgatactttttatttatttattttgagagagggtctcac

SEQ ID NO: 1020045 - DNA, 87 bp, Artificial Sequence
  ENSG00000261332_3 (sequence is synthesized)
aacagctcactacagcctcggcctcccaggctctagtaatcctcccacctcagcctcccaaggatctgggaccacaggcatgtgcca

SEQ ID NO: 1020046 - DNA, 120 bp, Artificial Sequence
  ENSG00000253809_0 (sequence is synthesized)
gaggatttgagccccaaatccaacaacaggaacaacaaagaaggttgcagactatgctgttctgcagtttctttattttaggaagtccagggggcccaggcaagccagggaggccagggc

SEQ ID NO: 1020047 - DNA, 120 bp, Artificial Sequence
  ENSG00000253809_1 (sequence is synthesized)
tggaaagcaaaaacaaagtccccggagttactgtcactgcaacactgaaagcacggaaggcagaaacaaccttgggtgtgttgacttgtgtctaaaataaacgtgctgtggttggttgaa

SEQ ID NO: 1020048 - DNA, 120 bp, Artificial Sequence
  ENSG00000264345_0 (sequence is synthesized)
agagctgcaagagaaagaagactgaattcagtctctcttgcagaaaaattgttttccgtcaagttgataataatgatcacactgagaatgaatgactcaagatgaatatccaaagatata

SEQ ID NO: 1020049 - DNA, 120 bp, Artificial Sequence
  ENSG00000264345_1 (sequence is synthesized)
tcaaaacctggtcagcagtcgtggggaaaggaagaaagcctgagttgagtttatgaaagttttccactaaagtcagcaacagcttaaattcaaaccaggcacaagacgcttgaatctcca

SEQ ID NO: 1020050 - DNA, 120 bp, Artificial Sequence
  ENSG00000264345_2 (sequence is synthesized)
tatgagttgttcatcaaagggctgaaagaaaagaaatctgagcccgagcacggtctggcctaaaagctttcaagtgactcctttctgagctcaggacaatggcccccaggagccactgga

SEQ ID NO: 1020051 - DNA, 120 bp, Artificial Sequence
  ENSG00000264345_3 (sequence is synthesized)
tgttccattttagtcctggcttgtacggagtgcgccctctttctgagaggaggtttcctgggaattggatgctgagatgaaaagcatatgagtagctttcttccagcattcttcttggtg

SEQ ID NO: 1020052 - DNA, 120 bp, Artificial Sequence
  ENSG00000264345_4 (sequence is synthesized)
attaaccaactatccaagtacaaagttgctcctaattaaccctgaggaccccaatataaagttgcaaatgaaagaagtcctgctactctaaagaataactaaaccagactggagtcactg

SEQ ID NO: 1020053 - DNA, 120 bp, Artificial Sequence
  ENSG00000264345_5 (sequence is synthesized)
ctgtggaggacactggcttaggactcatgaagtagtacctcaggaaggtgtctctgtaagtgttccttccaccagctccaagacacaatgagatggagagaactggaacaattccctatg

SEQ ID NO: 1020054 - DNA, 120 bp, Artificial Sequence
  ENSG00000264345_6 (sequence is synthesized)
attgcagctggatattttcacatgaactatctagtaatgaaggcaatggcatgtggtgtggcaaagactggccccagattacatttccagtccttttgtactgaggaggggctttgggac

SEQ ID NO: 1020055 - DNA, 120 bp, Artificial Sequence
  ENSG00000264345_7 (sequence is synthesized)
caagacagtaggagtgagggtacaggttccacattctatttctctcttagttttctgtggttatcttggtgactgcatggtaaagatggaggtgacaaaagatggaaggagcctggatcc

SEQ ID NO: 1020056 - DNA, 120 bp, Artificial Sequence
  ENSG00000264345_8 (sequence is synthesized)
ctgaatgacttcatggtgcagagccttacactacccccaactcatactaaaacaggggtgggaggaacaatagaccattattctgttaaggtgctgaaattgtagagctgttaatttgaa

SEQ ID NO: 1020057 - DNA, 120 bp, Artificial Sequence
  ENSG00000264345_9 (sequence is synthesized)
cagttagagtttcttatactgatacagtatccttaccctggattgttgaaataattagtccaaatagtttctttgcctaaaactgtggacagagcctaagcaatattgaatccaagacaa

SEQ ID NO: 1020058 - DNA, 120 bp, Artificial Sequence
  ENSG00000264345_10 (sequence is synthesized)
cactctctatgcagctcattcctgaagaagggctttggcatgtggagattatgccctcttgctagggtactggaagggatccatgtggtattgtcccagcaataactctgccacagagat

SEQ ID NO: 1020059 - DNA, 120 bp, Artificial Sequence
  ENSG00000264345_11 (sequence is synthesized)
atcaaatgctactcactatacaatacagatgaatgtggcacttacttcccgtgttgttacccagcctgcttctagtattctttacacaaaataacattcatgagcaacctgggcacaaga

SEQ ID NO: 1020060 - DNA, 120 bp, Artificial Sequence
  ENSG00000273456_0 (sequence is synthesized)
ttgcaaggatgcgaagccagaaaaaaaaaaaagacttttaattctataaatcgtcccgctgcgtgcgcgcgtctgtccgtacagcgcggtgcccaccccgagagagggcctggattcacc

SEQ ID NO: 1020061 - DNA, 120 bp, Artificial Sequence
  ENSG00000273456_1 (sequence is synthesized)
aaggctgggggccttgagggctttttagggcacgtgaaaggaaaatggagttagagttgtgtcgggatagagagtgggatcattttgcactcaaggaattgagaagatcccgttggtacc

SEQ ID NO: 1020062 - DNA, 120 bp, Artificial Sequence
  ENSG00000273456_2 (sequence is synthesized)
ccctcccgcccttacaccccgctgcggggtcagccgacgtgggtgggattttgctggcggcgaggggagaaggtgacgtgcgtggcgccatgatcggaagtctggactgaattcttagct

SEQ ID NO: 1020063 - DNA, 120 bp, Artificial Sequence
  ENSG00000273456_3 (sequence is synthesized)
gcgaggtggaaaatgcgcgtgggagggcgatcttgaggggtgaagtctggccttcccatctcctaccaggcaggagggttatgctgaaggctggttttgctggtctttcattgtggctaa

SEQ ID NO: 1020064 - DNA, 120 bp, Artificial Sequence
  ENSG00000273456_4 (sequence is synthesized)
gggcagttccacagatacagtcatagatagactccttaagtcatgctctgcttgcttcttctagtccgctgttacctctttatctgaatttgatgtaaataaatctccacattccttaaa

SEQ ID NO: 1020065 - DNA, 120 bp, Artificial Sequence
  ENSG00000230573_0 (sequence is synthesized)
agtaacagtgacactccaagaccaagagagaggccgccctggtggggttccgcttgctcactcgcgcgtggtgcagtctggggcacattatttatttaagccatgtgaactccagctgcc

SEQ ID NO: 1020066 - DNA, 120 bp, Artificial Sequence
  ENSG00000230573_1 (sequence is synthesized)
aacctaaaatgaggatgatgctactatctacttcatggattattctgaggacaaaaggagctaacccacgtacaatgcacggctctccacccaggactaagaaaggttcactgcagtggc

SEQ ID NO: 1020067 - DNA, 120 bp, Artificial Sequence
  ENSG00000230573_2 (sequence is synthesized)
gatccctctgtctgagacacatggatgagattcctgagaaggaagctgggcggttgtttcttggtttggagcagaggaggaagtgttacatatggtgttgagatgctggcactggatctc

SEQ ID NO: 1020068 - DNA, 120 bp, Artificial Sequence
  ENSG00000230573_3 (sequence is synthesized)
acccttcctctgtatgactgtccttcatgtgataggaccacacttgtcaccgtcctacctacatcccagcgccagtctccacctcatccagaggcggttaataaatgctccctcaatgga

SEQ ID NO: 1020069 - DNA, 120 bp, Artificial Sequence
  ENSG00000230575_0 (sequence is synthesized)
tccacagtaataaagaatcgagaaacagatattttttcaatttcttcccattacattttatgtccacatttagatgtatctgggaagatctctaaactgacaccactgtgagaggcccct

SEQ ID NO: 1020070 - DNA, 120 bp, Artificial Sequence
  ENSG00000230575_1 (sequence is synthesized)
catgacactcagaaaacgggggaaaagaggaaaatgtgagcggtgataaattggagctaatctctttctgccacaacctgaaatgatacttggccagatgtacacacctgaattcaggat

SEQ ID NO: 1020071 - DNA, 120 bp, Artificial Sequence
  ENSG00000230575_2 (sequence is synthesized)
ttacccagagaagcctgcccagaactttgagcacagtaggtcctcaataaacatttcctagggggctaactgaaaggaaaacaatcaaaacaaaacaataaaattaaggtgttggaagaa

SEQ ID NO: 1020072 - DNA, 120 bp, Artificial Sequence
  ENSG00000278955_0 (sequence is synthesized)
tgttgttgtggctgtgagaaggcggcggcggcggcggagcagcagccggaccagactccctagtagctcaggcgctgccctgcgccggccctggcagggagcctgggaggtgagtgtgcg

SEQ ID NO: 1020073 - DNA, 120 bp, Artificial Sequence
  ENSG00000278955_1 (sequence is synthesized)
cccttcgctccctgccgtgtctgtgagggtccatcgttgccggagactggaggtcgggggccatgggagccccggggcgaacggtgcggacatgggccttgtggaaaggaggagtgaccg

SEQ ID NO: 1020074 - DNA, 120 bp, Artificial Sequence
  ENSG00000278955_2 (sequence is synthesized)
ctgttcaagtccatctggtcaagaattcactaagatcataatgtgaaagttgctcaagtgcagatttgcacgacagcctgcaaatgttcctttggagacgaaatggtttctcaggtcaat

SEQ ID NO: 1020075 - DNA, 120 bp, Artificial Sequence
  ENSG00000278955_3 (sequence is synthesized)
gatctgcatatttaaaagtctctaggacaccctaagatggcggcgagggagacggtgaaggttggctcccgcctgtctgggctctgatcctctgtctccccctccccctgcggccggctc

SEQ ID NO: 1020076 - DNA, 83 bp, Artificial Sequence
  ENSG00000275294_0 (sequence is synthesized)
ctttgcgtcaccgccttcgccggaagctgccttgtatccgcgtctccgcagggaaaactgcggctggcggagtgtccggaatt

SEQ ID NO: 1020077 - DNA, 120 bp, Artificial Sequence
  ENSG00000275294_1 (sequence is synthesized)
gcaccacatctggtgagagccttcattccgatgacagccttcatgctgcaacctgcagcaggaaaatgggcttcagttttcaagtctgcagctgagttgggaagttgcggacagtaacca

SEQ ID NO: 1020078 - DNA, 68 bp, Artificial Sequence
  ENSG00000275294_2 (sequence is synthesized)
caagtctgcagctgagttgggaagttgcggacagtaactttcactgcaacctctgtctcccaggttca

SEQ ID NO: 1020079 - DNA, 120 bp, Artificial Sequence
  ENSG00000275294_3 (sequence is synthesized)
cttcattccgatgacagccttcatgctgcaacctgcagcaggaaaatgggcttcagttttcaagtctgcagctgagttgggaagttgcggacagtaaccagtaatacacaatattggcaa

SEQ ID NO: 1020080 - DNA, 120 bp, Artificial Sequence
  ENSG00000275294_4 (sequence is synthesized)
caatgcaacaaaatggacacactctactctccagcgggagtgttaaaaaaacgaaaagaagagaaagaaaaaaggaaagaagcagaaggaagaactctgctgcagtactggaagcaggca

SEQ ID NO: 1020081 - DNA, 120 bp, Artificial Sequence
  ENSG00000275294_5 (sequence is synthesized)
ggaacaagagaaggcagatgaagagcgacacccttcaagttaacacaggaacaattaacaatagaatccttaagatgcaaaactccttgctgtttaccagcaacagaagagaggaagaag

SEQ ID NO: 1020082 - DNA, 120 bp, Artificial Sequence
  ENSG00000275294_6 (sequence is synthesized)
tggctctgggggaattgcgtgccagtctgcggcaggttggctggagaagcagccctggttggagctttggagagacacatgtgcatttacttgttacctggaagaccttttaaaaaaaat

SEQ ID NO: 1020083 - DNA, 120 bp, Artificial Sequence
  ENSG00000275294_7 (sequence is synthesized)
tctcgtaaatctgtcatttgtgtatcctcaaggtttgtggcagaaagcagatatatctgctcctgtgtgtaattgttgttaaaaaacacaaaaaggaaataaaagtgcacaacataccta

SEQ ID NO: 1020084 - DNA, 120 bp, Artificial Sequence
  ENSG00000275297_0 (sequence is synthesized)
gtttccactcacacggtaggcggctgtgcaatttcgtctggagtccgcagacccctcctcatccttcccagggttgctctgaggccattcctcgtcatctaggaggggtctacataaaag

SEQ ID NO: 1020085 - DNA, 120 bp, Artificial Sequence
  ENSG00000275297_1 (sequence is synthesized)
catttataaacacctccaaatgggagccaggcgtgcccacctttggagcacttttctctactgcaaatttatctactgctcgtgaaatctctggatttaactctgatgaaagactggagg

SEQ ID NO: 1020086 - DNA, 120 bp, Artificial Sequence
  ENSG00000275297_2 (sequence is synthesized)
ctgaaggagaacttcaatatcatatattttaaaggttgattcacagtttggagcaagaattaaagaaccacgaacttcaaggtaaaacgggcaacggcgttggggcaagcctctctgcat

SEQ ID NO: 1020087 - DNA, 120 bp, Artificial Sequence
  ENSG00000275297_3 (sequence is synthesized)
ctgcgtgtccagcctctcctgcatgccagaagtccccaggcaggagtgtggtgggacatccggctggggtaaggacagacaccctcccactgtgtcagggcccagagagtgggtggagaa

SEQ ID NO: 1020088 - DNA, 120 bp, Artificial Sequence
  ENSG00000275297_4 (sequence is synthesized)
gctctgcaagagacctgtgcaagggcgccttgcaggagcctgcagtccccacaggtgtgtttgtggataacacttggggagccctggccttttggggtcacagagggcttggcctctcac

SEQ ID NO: 1020089 - DNA, 120 bp, Artificial Sequence
  ENSG00000275297_5 (sequence is synthesized)
gagatgggtcgcagagatggcccgtgtggaaggttggattctcaccccacctctgcccctagatgtcctggtgaccctcccctctgtagtcttggttttttgcaaaacagttatgacctc

SEQ ID NO: 1020090 - DNA, 120 bp, Artificial Sequence
  ENSG00000275297_6 (sequence is synthesized)
ctgccatactgggtactttgcttatgtattgtgtttactctttactgtgtgtctctcctgctaaggtctacgaagaagggtctttgtgggtggggttcttagaggcatcccaagtaccag

SEQ ID NO: 1020091 - DNA, 90 bp, Artificial Sequence
  ENSG00000275297_7 (sequence is synthesized)
tctttgtgggtggggttcttagaggcatcccaagtaccagaagcagtccctggactaaggggctcaataaatattttttatttattactt

SEQ ID NO: 1020092 - DNA, 120 bp, Artificial Sequence
  ENSG00000275297_8 (sequence is synthesized)
ctgggattatagacatgagccaccatgcctggccaaatatttgtcaaattgaatttgtatttccatacaaattttagtctggataaagtgcttcatgcctgtaatccaagcactttgaga

SEQ ID NO: 1020093 - DNA, 80 bp, Artificial Sequence
  ENSG00000275297_9 (sequence is synthesized)
atacaaattttagtctggataaagtgcttcatgcctgtaatccaagcactttgagaggctgaggcaaaacatagagaaac

SEQ ID NO: 1020094 - DNA, 120 bp, Artificial Sequence
  ENSG00000275297_10 (sequence is synthesized)
ccccaggcaggagtgtggtgggacatccggctggggtgatgtaaaattctcaaacaatgagatagataaaaagtacgcagccaaaaagttcaagaagaagtgttatggagatggagcagg

SEQ ID NO: 1020095 - DNA, 120 bp, Artificial Sequence
  ENSG00000275297_11 (sequence is synthesized)
cccttcgtaaaaacacgatgttggttttctggattttggaggcctcacaaaacccggatcagactcgcccactgccctgtgtctgccctcccgaccgcctctcctgcccagcagggatga

SEQ ID NO: 1020096 - DNA, 120 bp, Artificial Sequence
  ENSG00000275297_12 (sequence is synthesized)
gggtggcagtggtgctgtgtggagggtggcgggaggacctggaagactgcgaccagtgagccgggaggccttgggacagcctctctctgaatcatcctgtgcactgccgggtgtgacaga

SEQ ID NO: 1020097 - DNA, 120 bp, Artificial Sequence
  ENSG00000275297_13 (sequence is synthesized)
ggctcctagaatcctgtctcaagtggccgccttcacagagggagtcactgacgtccctgctcagcgcagccctggcatgtgggggtccctctactcatgagaaacccccacccaatcacc

SEQ ID NO: 1020098 - DNA, 120 bp, Artificial Sequence
  ENSG00000249173_0 (sequence is synthesized)
aggtgaaaaggcaggtcgggtgaagaagagcaggatgtttcatttttatcaagcatcacctgattcaaaatgtagccactgaaaagaagccatcgtttttggcctgcgtctctgaggata

SEQ ID NO: 1020099 - DNA, 120 bp, Artificial Sequence
  ENSG00000249173_1 (sequence is synthesized)
agatagtgcgtgggtgatggatgcagcccaggagatgtgtttgtttgagtagatcagctatgaaaatacccagccggcctgcagccctcccggcagatgctgaaaaggaaacccgactgg

SEQ ID NO: 1020100 - DNA, 120 bp, Artificial Sequence
  ENSG00000249173_2 (sequence is synthesized)
gagatgccgcccacccttatccccagagagctgcgttgtttcctcttgccttggcctttggatccggccatagcaagcatccctgggcacctggctgaagctggaaactcgggataagaa

SEQ ID NO: 1020101 - DNA, 120 bp, Artificial Sequence
  ENSG00000249173_3 (sequence is synthesized)
ctcctttgcagttaagtgtgaaatagtgccaatagagtgtaaaagaaaagaaagaagatgattcacctcccaaagattccccactgctgtgtcccttctatcaacttgatacaaaaaaac

SEQ ID NO: 1020102 - DNA, 120 bp, Artificial Sequence
  ENSG00000249173_4 (sequence is synthesized)
acaatggccccgggaaccacgtgttgaagatgagagagctaaaagatggaaagagactggagccctgagtcaccacctggaggaaaactacccacccatcaggaatttctactacacatt

SEQ ID NO: 1020103 - DNA, 120 bp, Artificial Sequence
  ENSG00000249173_5 (sequence is synthesized)
tgggagtttttggggttacagcagctaatttaacgaaaacacccagagacaagagctattactgcacaaattggttaagttacctttttgtatgtttgggtcctctctattcgatgagac

SEQ ID NO: 1020104 - DNA, 120 bp, Artificial Sequence
  ENSG00000249173_6 (sequence is synthesized)
tgcgcgttcctttgaagcaaatctgtttaaaattcttatatccccagagggcctagcagagagtatgcacagagtgagccttcagtaaatgctgagtaaataagctcctaatggatgaaa

SEQ ID NO: 1020105 - DNA, 120 bp, Artificial Sequence
  ENSG00000249173_7 (sequence is synthesized)
tataggattttgtgctgttggtcacttttcataaaggttcttgctattaaggaacttgacatccaatgtactcatagaaagtagaaattcaggggaaacaaatagaagagatatgtccaa

SEQ ID NO: 1020106 - DNA, 120 bp, Artificial Sequence
  ENSG00000249173_8 (sequence is synthesized)
aaatccatttaaaatttcattgacagatatttatctctttaatcctggaagttgtttcatgtaagggaaggttcagtagaatgaaaacaggactgtaagctgggaggagatttggggtct

SEQ ID NO: 1020107 - DNA, 120 bp, Artificial Sequence
  ENSG00000249173_9 (sequence is synthesized)
cttggccaactctgccacaaattgtgttaccttcaacttccctgcctgtaaaatgaagtcagtggtccctaaaatgaaattggactaatggcaaattagctagcatttgattatacatcg

SEQ ID NO: 1020108 - DNA, 120 bp, Artificial Sequence
  ENSG00000249173_10 (sequence is synthesized)
atagtttccccatgtgattttaacgcacaaatcagattttggaaccattaggtaggtgatcttatcttatgagtttatctttttcaacatggaaaaataaatttgttttgctgaccgaag

SEQ ID NO: 1020109 - DNA, 120 bp, Artificial Sequence
  ENSG00000249173_11 (sequence is synthesized)
gctgtgtaacttagaactggaaagagacatgtaattgaataacccatctctatggggcaaaaaaatgaaacacctttagtttgttcaaagatgaaatggaaaaataaacatgttttaaga

SEQ ID NO: 1020110 - DNA, 120 bp, Artificial Sequence
  ENSG00000249173_12 (sequence is synthesized)
cttggctagtgagcaatgcaattctgggaatgttcaggctctctctgttctttcctctcttgcaaaccatgggcacccttgggtcccttggggtcactatgttacacctgctttttatct

SEQ ID NO: 1020111 - DNA, 120 bp, Artificial Sequence
  ENSG00000249173_13 (sequence is synthesized)
atcacctgccattccagttgaacactggcctcaggctcgccgtgcctgctatttgacatcccttcctcttctttgcgcaactctttcctttaacctagaatgatctccagaacgatttcc

SEQ ID NO: 1020112 - DNA, 120 bp, Artificial Sequence
  ENSG00000249173_14 (sequence is synthesized)
aaatattttctttgccaggatattagagaatttgtcaaaagttattacacaggaaagtcaaaggtttcattgcaggaacttaataaatatttgtttattagctgattaatgtgctgatcc

SEQ ID NO: 1020113 - DNA, 120 bp, Artificial Sequence
  ENSG00000249173_15 (sequence is synthesized)
aagccacaccttgtgacactgagcctcaggaggacaacgtcagaaaccaaaagctcctctgcccagggatggggacccgccgacttcaagggcagaacaggtgcctggctagtgggggag

SEQ ID NO: 1020114 - DNA, 120 bp, Artificial Sequence
  ENSG00000249173_16 (sequence is synthesized)
ctgggcaagagctgctcaagccacaccttgtgacactgagcagcctcaggaggacaacgtcagaaaccaaaagctcctctgcccagggatggggacccgccgacttcaagggcagaacag

SEQ ID NO: 1020115 - DNA, 120 bp, Artificial Sequence
  ENSG00000249173_17 (sequence is synthesized)
cactgagcctcaggaggacaacgtcagaaaccaaaagctcctctgcccagggatggggacccgccgacttcaagggcagaacagatcagctatgaaaatacccagccggcctgcagccct

SEQ ID NO: 1020116 - DNA, 120 bp, Artificial Sequence
  ENSG00000249173_18 (sequence is synthesized)
tcagcttctcccacggaggccacctgcccccctaacactgagctgctcacctagtccagccaccagcgacggcccctggcctttgacgtgtctgttctctcctctctcactccaccacca

SEQ ID NO: 1020117 - DNA, 120 bp, Artificial Sequence
  ENSG00000249173_19 (sequence is synthesized)
ctagcttccagggatctccagcctgtatagaaacttctcactacgctctgctctcgcccttttagcagtctccttatgctgctgactccacctcccaggcaaatcattctaatttaattc

SEQ ID NO: 1020118 - DNA, 120 bp, Artificial Sequence
  ENSG00000249173_20 (sequence is synthesized)
tttacaagtattctccctcctggagtgctgggctccaccacgggggcaatcaaggcacatcacccacagctttccagacacccacagccttcctgtcctgctgtgagcgtggctccttca

SEQ ID NO: 1020119 - DNA, 120 bp, Artificial Sequence
  ENSG00000249173_21 (sequence is synthesized)
gccttcttccttcttcgcctgtggggagtcagacattcgccaacctcgtgctcaatccctgcctctgtccaggcctgctaagcccataagacatatctgcatgtgtcagaatatgtgcaa

SEQ ID NO: 1020120 - DNA, 120 bp, Artificial Sequence
  ENSG00000249173_22 (sequence is synthesized)
gctttcgacaggatccccgtttctccccatggagcttttggcaaatgaagggtgtggttcagcagctggtctgatgtcccttaagctcccccacaccagcacaccaggactgtctctgtc

SEQ ID NO: 1020121 - DNA, 120 bp, Artificial Sequence
  ENSG00000249173_23 (sequence is synthesized)
tccacattccagcatatctgggtctcagctttgacacaatcagacactgttgctgaagtttttatgtttatatgacagaagaaactgtcacccctcccctgccccccgcccccacccacc

SEQ ID NO: 1020122 - DNA, 120 bp, Artificial Sequence
  ENSG00000249171_0 (sequence is synthesized)
aactcaacaactatctgtttaaggccaaaggcctgagaacctggcgggggctggtggtgcaattcccagagttgaggggccagaaaatctggagttctgatgtccaacgacagaaggaaa

SEQ ID NO: 1020123 - DNA, 120 bp, Artificial Sequence
  ENSG00000249171_1 (sequence is synthesized)
agggtgtcccagcttcaatagagagagaagtctcctctgctctgcctttttattctatctgggccctcagtcaattggatgatgcctgcacacaatagggtctcactctctcgcccagcc

SEQ ID NO: 1020124 - DNA, 78 bp, Artificial Sequence
  ENSG00000249171_2 (sequence is synthesized)
gtgggattacagtgcctgttgttacttcattcagaagtctgaaatttgatatgctttcctaagaaatagtcccaacta

SEQ ID NO: 1020125 - DNA, 120 bp, Artificial Sequence
  ENSG00000249171_3 (sequence is synthesized)
catctaagaaagcagtggaaatagataagaaacttacacattgcaagtcagatatctgcactgatacccaagagcaaaatgtacagagctcagtggggaagagggtacagaagaaggaag

SEQ ID NO: 1020126 - DNA, 120 bp, Artificial Sequence
  ENSG00000249171_4 (sequence is synthesized)
atcaatctatctggcagaagaggatgagaaaagcttcctggaagatgtgacccttcacacagaacaaaggctacacctatgtatcctctgcaagctccaatttttataaattcatccatt

SEQ ID NO: 1020127 - DNA, 120 bp, Artificial Sequence
  ENSG00000249171_5 (sequence is synthesized)
ctgtaaataggctatatttcatctgaagagcctatagaataactttggcctgtaaatcagttaagattccaaatccatgtgattccaaattgaagaaaggactcaggaaccaccaattgg

SEQ ID NO: 1020128 - DNA, 120 bp, Artificial Sequence
  ENSG00000255008_0 (sequence is synthesized)
acgcgggctggggcagttaagggaaaccttatcgtcattttcccctgggagggaggatactggggacatatgtcttaccttttaaactgcccagtacgaagttacgcctctgccctcact

SEQ ID NO: 1020129 - DNA, 120 bp, Artificial Sequence
  ENSG00000255008_1 (sequence is synthesized)
tgggacctggtttgagacaagctcttccggagcactgcgcatagctcactttcttgagcaaccctgtgtccccgcaccccgctcctcttctttcgggttctaggcagccgtgggcgctgc

SEQ ID NO: 1020130 - DNA, 120 bp, Artificial Sequence
  ENSG00000255008_2 (sequence is synthesized)
gacccttctctcactgtcagaggggcgggagctctcggcctgcgccgcctccgctgcctgcttggtcgcgggcttgccgggaatggtgacagcccgggccccctcttggccaaagaagtc

SEQ ID NO: 1020131 - DNA, 120 bp, Artificial Sequence
  ENSG00000255008_3 (sequence is synthesized)
gaatggtgacagcccgggccccctcttggccaaagaagtcctcgaaagcgttcggcgcacgggctttgtccagctttttaaaccgtaacaaggaccggggccgggcgcggtggctcacgc

SEQ ID NO: 1020132 - DNA, 83 bp, Artificial Sequence
  ENSG00000255008_4 (sequence is synthesized)
ctgtaatcccagcattttgggaagtcgaggcggacggattcgatggagtcttgctcccatgctggagtgcagtggcgtgatct

SEQ ID NO: 1020133 - DNA, 120 bp, Artificial Sequence
  ENSG00000255008_5 (sequence is synthesized)
cagcctccggagtagctgggattacagcaaagatatccagacgctgtatgcaggaagaactgaatttcagaggacaccgtttgatcttcaacacctggcagtttacaaaacagagacggg

SEQ ID NO: 1020134 - DNA, 120 bp, Artificial Sequence
  ENSG00000255008_6 (sequence is synthesized)
tggagctcaagcgatctgcctgcctcggcctttcaaagtgctgagactacagcctgaagaggagagggggaatcctggtgagaagcatttggaattcaagctcagagaagaagacacgga

SEQ ID NO: 1020135 - DNA, 120 bp, Artificial Sequence
  ENSG00000255008_7 (sequence is synthesized)
gtcccagctgagaactcaaactggtagaaggaagattatttttccttctctataggtgcttggaggtaacgaggggaaaggagttgaaaggaaggtgacatttcaggtgggcacctggga

SEQ ID NO: 1020136 - DNA, 120 bp, Artificial Sequence
  ENSG00000255008_8 (sequence is synthesized)
tggaggcaaggaatcacgaagtggcgtctcctcggaaggggcagcctgatgtctttaaccactgaactgtggtttccaactggatgcgctttgggttcagggctaagacacgcgtaggcg

SEQ ID NO: 1020137 - DNA, 120 bp, Artificial Sequence
  ENSG00000255008_9 (sequence is synthesized)
gtgcagacagttcaattcgtgggcggctttttctctcccctgcgcggttttgcagaactgaggattcacgtttgccacgcagtctctaaatcctcctcccagccctcgccggatttctgc

SEQ ID NO: 1020138 - DNA, 120 bp, Artificial Sequence
  ENSG00000255008_10 (sequence is synthesized)
atcggaattggattggatcacacacaaaagaagagcccaggaactcgttcaccaccttgcaccttgcctgttagttcacggcataatggtaacagagtcttcattaatggaagcaacgtt

SEQ ID NO: 1020139 - DNA, 120 bp, Artificial Sequence
  ENSG00000255008_11 (sequence is synthesized)
actaccgtgagcccggatagctcagtcggtagagcatcagacttttaatctgagggtccagggttcaagtccctgttcgggcggtatcttttttttcctcattaaaagagtaagaaccaa

SEQ ID NO: 1020140 - DNA, 120 bp, Artificial Sequence
  ENSG00000255008_12 (sequence is synthesized)
gcctgaagaggagagggggaatcctggtgagaagcatttggaattcaagctcagagaagaagacacggtatttctggctgaatcacatttcctgcatgcctgcacactcctactcacctt

SEQ ID NO: 1020141 - DNA, 120 bp, Artificial Sequence
  ENSG00000255008_13 (sequence is synthesized)
tcaaggcacagttctaatgccttaccccctgccaggtgctactctgccttccttctagtgatttctctgggttaccaaaggtcttgcatatttctctattaaagcattgattaaaagcca

SEQ ID NO: 1020142 - DNA, 120 bp, Artificial Sequence
  ENSG00000249175_0 (sequence is synthesized)
ccagaattgtgggtatccttttttcctccccagtcttacatctcaattacggaaatggtgaagtcctgggggcagatatttggaagaacagaaatgataagaccctttggcagacatatg

SEQ ID NO: 1020143 - DNA, 120 bp, Artificial Sequence
  ENSG00000249175_1 (sequence is synthesized)
ggtggacgctttggagaaccatcaagatggtgaattctttggatccatggaaggatttgaggggtttaggaagctggtttttcagtgactctctggggctccagggttcaactgcagctc

SEQ ID NO: 1020144 - DNA, 120 bp, Artificial Sequence
  ENSG00000249175_2 (sequence is synthesized)
aaataagtgaaaatcaaccacttatgggagcactaatttcagatttccttcacagctgccaaaaacaattcatttgatagaaaaggagttggggaagaaatcctctataagaactaagag

SEQ ID NO: 1020145 - DNA, 120 bp, Artificial Sequence
  ENSG00000249175_3 (sequence is synthesized)
tacctctttgcctcatcatattcttatatgcatctctggagaactgagcaaggtgggaagaattcaggaagatggtggaggctaaaatatgagagtaactggaaacaacctctagggcaa

SEQ ID NO: 1020146 - DNA, 120 bp, Artificial Sequence
  ENSG00000249175_4 (sequence is synthesized)
ctaccactaactttaaactggaagtctctcttctgagtcctaatagatctaaagcaagaagtgtgcattccagttggactgcagtttgagaattgagtaaaaggatagccaataaactca

SEQ ID NO: 1020147 - DNA, 120 bp, Artificial Sequence
  ENSG00000249175_5 (sequence is synthesized)
aaaagtattaaaaccaaacatggagttactaagtgaaagcaacagactgaggcgtgaagaacaaacagtggccacaggtcttcttttcccagggtgaaaggcccctcttccagcaccttt

SEQ ID NO: 1020148 - DNA, 120 bp, Artificial Sequence
  ENSG00000249175_6 (sequence is synthesized)
ctcaggtgggtcatagccctcatggctggacagccacttcctcatcgacgccaaccggcttgcctacaagtctgctgtgccagtggaggagccccgaagaccatcccaggatgatgcacc

SEQ ID NO: 1020149 - DNA, 120 bp, Artificial Sequence
  ENSG00000249175_7 (sequence is synthesized)
ccataagagtacagccttgcaggggctacagccacccacagtgcacctgtgtctttgccagccccctgcagctgcatagacaccatgcatcacactcagacctcaaactcttcatgtgcg

SEQ ID NO: 1020150 - DNA, 120 bp, Artificial Sequence
  ENSG00000249175_8 (sequence is synthesized)
aagctcttccaccacgctgcacatctgtcctcagtgctcacgtgacttccaggcctctgccaagttccagaccctgcctgcactgcccttctccaggccaccacatctatcccatgctgt

SEQ ID NO: 1020151 - DNA, 120 bp, Artificial Sequence
  ENSG00000249175_9 (sequence is synthesized)
gccattcccacacacgctctgtgagtactggctttgcggatattactgccttattctgggcctgagtttctccatctgtccaaaggcagaagcatcactcctttttcctcttttccagtt

SEQ ID NO: 1020152 - DNA, 120 bp, Artificial Sequence
  ENSG00000249175_10 (sequence is synthesized)
gtgtcatgaagacaaaaggggttgccttccctgagcctgtggactgggtgaataggagttaaagcagggaacacaggcctgtgagccagctgtgcttcccatccagctgtgctgtgctag

SEQ ID NO: 1020153 - DNA, 120 bp, Artificial Sequence
  ENSG00000249175_11 (sequence is synthesized)
cttttgcaagtggcttggtttcctgctctcccaagtggcgagcaattgctgtccagaagaaagtgataacaaaagagtatggccatggtctggttcatttctgtttcctcacccttagcc

SEQ ID NO: 1020154 - DNA, 120 bp, Artificial Sequence
  ENSG00000249175_12 (sequence is synthesized)
cactactcccaccttttgctcaataaacactgcatactccaaaacaaacaaaagcaaaacaacaacaacaacaacatacacataaacaatcctgttggaatattggagggatgaagctga

SEQ ID NO: 1020155 - DNA, 120 bp, Artificial Sequence
  ENSG00000249175_13 (sequence is synthesized)
aactatggtttaagtggggcctgctccttatgggtcttctatgcttgaagatgttggggaatacctttatttcagaactgtcaccttcctacaggtctggagtgatcgtgttggaaaact

SEQ ID NO: 1020156 - DNA, 120 bp, Artificial Sequence
  ENSG00000249175_14 (sequence is synthesized)
aaaggtctggttcttttcatggtcctcctcagattttttcaagctgatgaccttttgaaaaaaactgagaaaactgctgttgaaataagcacgaagaagaaaagagtgatcatccatttt

SEQ ID NO: 1020157 - DNA, 120 bp, Artificial Sequence
  ENSG00000249175_15 (sequence is synthesized)
tagatgtgtttacaggctgtatgactcagtgttgcttctgctaagagcactgaatatgtggtcttttttggtactgagatgcaaacacaggaaacttgtggtctatgctgctttcagtga

SEQ ID NO: 1020158 - DNA, 70 bp, Artificial Sequence
  ENSG00000249174_0 (sequence is synthesized)
gtccccttccacactgtggaagctttgttattagtctgcagcttcactcctgaagccagggagaccacga

SEQ ID NO: 1020159 - DNA, 61 bp, Artificial Sequence
  ENSG00000249174_1 (sequence is synthesized)
ttatgagctgtaacactcaccgcaaaagtctgcagcttcactcctgaagccagcaacactc

SEQ ID NO: 1020160 - DNA, 120 bp, Artificial Sequence
  ENSG00000249174_2 (sequence is synthesized)
gacatgatgtaacagtcagaaaagaagacttgacaatcaaatgaaacatatgaagatgctaggttgctggctttgaagatggaagaaaggaccgcaaggcaaggctgcaggcaaccccta

SEQ ID NO: 1020161 - DNA, 120 bp, Artificial Sequence
  ENSG00000249174_3 (sequence is synthesized)
gaaactgaaaaatgaaaggcagctgtttgtcgactttcacctccagaaggaacgcagccctccctgacacagagtagaggatttctgacctctagaactgtaaaataataaatttgttgg

SEQ ID NO: 1020162 - DNA, 120 bp, Artificial Sequence
  ENSG00000249174_4 (sequence is synthesized)
tttagaccactaaatttgtactatttttctaagcagtaattagagactggtaaaaattgtagtacttgaaaatgtgatgctgctataacaaataaaaatttgaaattggctttaggattg

SEQ ID NO: 1020163 - DNA, 120 bp, Artificial Sequence
  ENSG00000241345_0 (sequence is synthesized)
agaaatgctgtagcataataaagggagcagatgaatgactgaagccctacagctccactaaagattagagtaaaatctgcacttcaaaagatcctgtattcttgcaagagaacagagctc

SEQ ID NO: 1020164 - DNA, 120 bp, Artificial Sequence
  ENSG00000241345_1 (sequence is synthesized)
ctgatcacctgtgtgcgtcctttgagtggatggcagctgcatctctgcattacagctagttagaatgatgagtccttgctatgcctcaagcactgtttcgagtgtttgatgtctattatc

SEQ ID NO: 1020165 - DNA, 120 bp, Artificial Sequence
  ENSG00000241345_2 (sequence is synthesized)
tcacttcatcctcaccaggaccccatccgaggatttgcgacttgagtagcattgacggtggtgatggggagcctggcaagacagcagatgtctacagcaagaggagggaatgggaagctg

SEQ ID NO: 1020166 - DNA, 120 bp, Artificial Sequence
  ENSG00000241345_3 (sequence is synthesized)
ctctgatggcgtaatcatcaaggttgctgataaaatggccttaatttcagttgacagtaactattggatccccaggaatatgtttgcatatttggggagaaaatactattggaggggaac

SEQ ID NO: 1020167 - DNA, 120 bp, Artificial Sequence
  ENSG00000241345_4 (sequence is synthesized)
agaaatgctactaagggtctcactgtgtcacccaggctggagtccatcaaagctcactgcagccttaaccttctgtgctcaagggatcctcccacttaagcctcctgagtagctggaact

SEQ ID NO: 1020168 - DNA, 120 bp, Artificial Sequence
  ENSG00000241345_5 (sequence is synthesized)
acaggcatatgccaccgagcctggctaatctttgatttttttgtacagattgtgtctccttatgttgctcaggctggactcaaacttctggtctcaagcgatctttccatcttagcttcc

SEQ ID NO: 1020169 - DNA, 120 bp, Artificial Sequence
  ENSG00000241345_6 (sequence is synthesized)
caaattgttggaattatggacatgagccagtgtgcttggcctgatttttttttttttttaatgagaaaaacgttccttaagaaaagtttcattgtagtaagtaatcaggatgaatagcat

SEQ ID NO: 1020170 - DNA, 120 bp, Artificial Sequence
  ENSG00000241345_7 (sequence is synthesized)
ctttcctcccatttagcctttgtgtgaaaaacacaattaatactttcttgagtagtacaagctgagccgagaaaccatctttcagaggtgtaaattcttgccttgggtggaaggctggat

SEQ ID NO: 1020171 - DNA, 120 bp, Artificial Sequence
  ENSG00000241345_8 (sequence is synthesized)
gttattaactttcacaatttctttcaacacttgattttcctcaatcatggtaaagacatattatttatttttctttttagttgggaaagttgattcacgtgacttttgcattttgtagaa

SEQ ID NO: 1020172 - DNA, 120 bp, Artificial Sequence
  ENSG00000241345_9 (sequence is synthesized)
tttttaagaggtaagatgaaaattaaacatttgtgcgtgttaaggatccatgtttctctgtcagatgtctggtaatttgcttgacgatttttgcaaagataatttagaaattaaggaaac

SEQ ID NO: 1020173 - DNA, 120 bp, Artificial Sequence
  ENSG00000241345_10 (sequence is synthesized)
cattctctacgtttttctttacattaaaagaaaaaagtctccaataaaaaatttctctatccacattacaggttaatttacaatttcagctgctggtggctggcttgaggcctcaatgtt

SEQ ID NO: 1020174 - DNA, 120 bp, Artificial Sequence
  ENSG00000241345_11 (sequence is synthesized)
aaaaatgagaatgaggctaattctagtgaatagaggtccacacagacaattgctatctttgttagatgctccagtaccaagcctaagaataggaaaaaaactaaaaacaccctggaaatg

SEQ ID NO: 1020175 - DNA, 120 bp, Artificial Sequence
  ENSG00000241345_12 (sequence is synthesized)
taacagaatcatcttttgctgccatctttctcttcagtataagctgagcatgtgtttgatgcatagcggtgtgggaactatatactttcttcttactttccttcagtaaaggagcttagc

SEQ ID NO: 1020176 - DNA, 120 bp, Artificial Sequence
  ENSG00000241345_13 (sequence is synthesized)
tccattaagcattgttcaagatagtgtatttaaaattaacataaaaggtaaaagattttaatgccttttaatataaggaaaattgattttattaaaatgctttaagatactacaatacaa

SEQ ID NO: 1020177 - DNA, 120 bp, Artificial Sequence
  ENSG00000241345_14 (sequence is synthesized)
atcacatagttgttacttggcagagtaaagatttgaatccaggatttcactccataacctgttttaaaattattatatgaatttacctcttttccaatctggatgccctgatgaaaggag

SEQ ID NO: 1020178 - DNA, 120 bp, Artificial Sequence
  ENSG00000241345_15 (sequence is synthesized)
agtgtaaagccacactccggtgcttaggggatggaatctcccttgaaagggataaacatggttaatgttaatccctaaagagaacagggtttacgcaggaaactgggactagaaagactg

SEQ ID NO: 1020179 - DNA, 120 bp, Artificial Sequence
  ENSG00000286528_0 (sequence is synthesized)
acataacacatattgctaatccatggctgcagttctatgatgtaggctggatccaacatcagaatcctcccaaagcagcctcttaagcatctgctgccaaataatggaagctgtcatctg

SEQ ID NO: 1020180 - DNA, 120 bp, Artificial Sequence
  ENSG00000286528_1 (sequence is synthesized)
aatcaaaatctgcctatgttccttggtgcagttaaattcagatactatttcaacgattgtcacccagtagatgctcaagaagatttttacaaccatgttggtagagcaacacaataagga

SEQ ID NO: 1020181 - DNA, 120 bp, Artificial Sequence
  ENSG00000286528_2 (sequence is synthesized)
gaaggagagaaggaggaggaggaagaagagatgaaaagtcacacctaagtcacatatgaatacgcaaatgcaacaccagagagaaaggcctttacagagacttgccctagatgacctgca

SEQ ID NO: 1020182 - DNA, 120 bp, Artificial Sequence
  ENSG00000286528_3 (sequence is synthesized)
tgctgccgagagatgcctgtggccagatgtgaggcaccgtcactgccttttttttggaaaatgcccgatttctacagctatgaagccaaaggtacagtgggccttttgagcacctctaaa

SEQ ID NO: 1020183 - DNA, 120 bp, Artificial Sequence
  ENSG00000286528_4 (sequence is synthesized)
aggtcatgttttctgtccgctcctgaatgtccttaaagtcttggtaccaagcatcacattatcctttcgttgtatcctgtgctgagttggagcttcaggagtgcagagatgagatgatga

SEQ ID NO: 1020184 - DNA, 68 bp, Artificial Sequence
  ENSG00000267927_0 (sequence is synthesized)
gccacagcattgacatcccggcctcaggcgatcctcccacttcagcctcccagtagttgggactacag

SEQ ID NO: 1020185 - DNA, 120 bp, Artificial Sequence
  ENSG00000267927_1 (sequence is synthesized)
cgatcctcccacttcagcctcccagtagttgggactacaggcatgcgccgccacacctgttgggagccgaaaaggccaaagggatcatgaccaactcagcgttccgctggagactatatt

SEQ ID NO: 1020186 - DNA, 120 bp, Artificial Sequence
  ENSG00000267927_2 (sequence is synthesized)
ggctccttgaagttatctattgagaaatctagcacctattgttcgaagaatgcagtcttgcaagcctgctgtcaatcaaactgctgaccgacaaccccccaccgctcttgctatctcttt

SEQ ID NO: 1020187 - DNA, 120 bp, Artificial Sequence
  ENSG00000267927_3 (sequence is synthesized)
tgcctaataaatacggagggctgtgtaggaggactgtgtaaagctcagggtccttgtccactagaggcaagtgccccctgaccccttcttccaaatatactctcttgtctttgtctttta

SEQ ID NO: 1020188 - DNA, 120 bp, Artificial Sequence
  ENSG00000255004_0 (sequence is synthesized)
agatgccatttgtacaaagctgtcatatcaaaatgtcatatcaaaatatccaagagtactttggaaatatggattcccaagttgtttttgtgggtgccaaaaggactgctggtcatgttc

SEQ ID NO: 1020189 - DNA, 120 bp, Artificial Sequence
  ENSG00000255004_1 (sequence is synthesized)
aaagcaatgtatggaaagagtccgccatctcagaggaaccaaagagtggagtgattatcatcatggaggatgaaagtgtattccagtgtctacctcattcatttcctaaagtgaatcacc

SEQ ID NO: 1020190 - DNA, 120 bp, Artificial Sequence
  ENSG00000255004_2 (sequence is synthesized)
caggccttggctgttctaatatctggaattctctttctactacaagtacatctgtcacacagaatgttacccacttactccctatgttttctgatcacatagaatctgagaggggaaata

SEQ ID NO: 1020191 - DNA, 120 bp, Artificial Sequence
  ENSG00000255004_3 (sequence is synthesized)
gctgtggtgacaggtgcagcaggccaggcataagtaatagggagcaggggagactgtgggaaactgaagggcagctgtctcataagaggatgaaattctaatcttttacaatatatttca

SEQ ID NO: 1020192 - DNA, 120 bp, Artificial Sequence
  ENSG00000255004_4 (sequence is synthesized)
aggcaaacaaagcaacactctgggctgggagtccatccatgaactaccaacttttagccccaaattatgaataccttccttatttatagatgaggaaattgagactgagagtagggatat

SEQ ID NO: 1020193 - DNA, 120 bp, Artificial Sequence
  ENSG00000255004_5 (sequence is synthesized)
gacataaggcagaaattggcttctggcttaattgaagcatttagatgggttgggagtgataatattaaaaagatgattgcaaaaagctttatttcatgctgtaatgtcaatataacattg

SEQ ID NO: 1020194 - DNA, 120 bp, Artificial Sequence
  ENSG00000255005_0 (sequence is synthesized)
tagcaggaaacaaagggcacattcaaacaggatacctggagaaaatttaacaaaggcaatatatacaaaggtgtgggcagcatcaaggaaaaccaacaggaatgatacaccatatacaca

SEQ ID NO: 1020195 - DNA, 120 bp, Artificial Sequence
  ENSG00000255005_1 (sequence is synthesized)
ggcacatgtgaagaagaagtgaggccctcagtttagccagcatcaacatgctagccatataaaccaccttggaaatgaagactcctgccccgatcaagccttcagatgagtgcagcccta

SEQ ID NO: 1020196 - DNA, 120 bp, Artificial Sequence
  ENSG00000255005_2 (sequence is synthesized)
gccaacatatggttgcaactgactgagagtccaccaagtgagaactgtctagtggagcccttcctgaatttctaaccaacagagccctaagcgagaataaatagttattgttataagcca

SEQ ID NO: 1020197 - DNA, 120 bp, Artificial Sequence
  ENSG00000251309_0 (sequence is synthesized)
aaggaattgaattcttggaagatgaggctggaaaatttcatcgtcattacgtcaacatgctaacagatggtctgcaaagcacttctcaggtttcattcagtatttctgtgaagaagccag

SEQ ID NO: 1020198 - DNA, 120 bp, Artificial Sequence
  ENSG00000251309_1 (sequence is synthesized)
gggatcatgatgttctactgtgagaatgacagaaagagcaaacaagaacacctgggttacacgagctgacttgcttctcttcaatggacagtatgaacacagagaaaagaattctacaaa

SEQ ID NO: 1020199 - DNA, 120 bp, Artificial Sequence
  ENSG00000251309_2 (sequence is synthesized)
gaacaacagagaacaagacagagatcttggagaacaagaatatgaccatcaatagaaggatgggaagataacggccaaacggtagacgaacacaacatgggattccattcttgtcctgag

SEQ ID NO: 1020200 - DNA, 120 bp, Artificial Sequence
  ENSG00000251309_3 (sequence is synthesized)
aaactccctaggcattggaatatagaagatgagctagcctatcctgactgaaacagcatctcttggaattcagggactttcttcatccctgactacatgcatcagacttaattagatgca

SEQ ID NO: 1020201 - DNA, 120 bp, Artificial Sequence
  ENSG00000251309_4 (sequence is synthesized)
caaaatctggatgactttcacaacactaaagtaattttactttctaattcataatatttgctgattcatattattacttttgttataatagaaataaattgaatactgcatcctgtaaaa

SEQ ID NO: 1020202 - DNA, 120 bp, Artificial Sequence
  ENSG00000177133_0 (sequence is synthesized)
cttccgtgtccccaaacgcccagagcccgggacacgggccggcggccgggtcaccaagccagttcccggaatcggctcgcgccggaatccagactcggcttgcaaagcccgctcctgccg

SEQ ID NO: 1020203 - DNA, 120 bp, Artificial Sequence
  ENSG00000177133_1 (sequence is synthesized)
tagcttcaaaaccaaattttgcctttcatcctgagagattaataccccgcaggtgaaaccgtggagacggagctgcggaggcgctgcaaggctccgtgctcctggagcttcgagtctatg

SEQ ID NO: 1020204 - DNA, 120 bp, Artificial Sequence
  ENSG00000177133_2 (sequence is synthesized)
atggaatcactcgggcgtcctcctgggaaagagctgcctgctcccccgccgccgccagtacaccggcgcccatgccccgggggctggagagagcagccaggcacaggtaactcaagaact

SEQ ID NO: 1020205 - DNA, 120 bp, Artificial Sequence
  ENSG00000177133_3 (sequence is synthesized)
gcagggctgagtggcaggaacacccctgtgtgcagaatagtgccccctgcagcccccacaggtcacctctttgaggacctaggtggggcctgccctggggactggggtgaagagggcagg

SEQ ID NO: 1020206 - DNA, 120 bp, Artificial Sequence
  ENSG00000177133_4 (sequence is synthesized)
tccagccttcagcagcccctcccccatgacttcagtggaattacaaggggaacacccagggcagctcccgtaggctgcacaagggaagaggggagggcttctactgaggtgaaacagtga

SEQ ID NO: 1020207 - DNA, 120 bp, Artificial Sequence
  ENSG00000177133_5 (sequence is synthesized)
cggcgggcggcactcggacccgccgccctcggtccctcgcgaggccacggaggccaacacgcctcgcacggggggacagcgcgggggcagccgtccaaacaccaggcgtcctcggctggt

SEQ ID NO: 1020208 - DNA, 120 bp, Artificial Sequence
  ENSG00000177133_6 (sequence is synthesized)
gcgggggcagccgtccaaacaccaggcgtcctcggctggtcgtcccagggcgcccgcacctctccgcccgcgctctcctgccgccgcgcccccaagcccccaaactccgaggcgctgcgg

SEQ ID NO: 1020209 - DNA, 120 bp, Artificial Sequence
  ENSG00000177133_7 (sequence is synthesized)
cggaggggccgggctgagcgcaggcagggtggcccgggcccaggagcctgacggcctgagtgcggatttctcatctgagtatctgggaatcgagaatgaattggaaggaaaccgaggcgc

SEQ ID NO: 1020210 - DNA, 120 bp, Artificial Sequence
  ENSG00000177133_8 (sequence is synthesized)
tgccctggccaggttgctgccccgcacccttccggagcaccgaagtcctgcccggcaacgggacttggagctgccgcagagtcagcctgagcccgaggcaggggtcgcgcccgcgatgcg

SEQ ID NO: 1020211 - DNA, 120 bp, Artificial Sequence
  ENSG00000177133_9 (sequence is synthesized)
gggtctctgcgccgccccgcgaggctcctggccttgccctccctgccctttgttgtgtaataagacctgtggcggctccactgagacccacacgtgcaactccgcgcctccgcgttaaag

SEQ ID NO: 1020212 - DNA, 120 bp, Artificial Sequence
  ENSG00000177133_10 (sequence is synthesized)
gaggtgaaacgcagcagccctgagaaaccccgagaccccggtgtcctagcagaggcgccccggatggggaggggcgcggggccggcgccaccccagaggaaaagcccagcggagccgggt

SEQ ID NO: 1020213 - DNA, 120 bp, Artificial Sequence
  ENSG00000177133_11 (sequence is synthesized)
tgggcaggagctggcggcggcggtgcgctgggccttctgccttggatcctccgcggtcggcaccgcttccctgctcagattcgaacccagattcggctcccaaggctcccacggctccag

SEQ ID NO: 1020214 - DNA, 120 bp, Artificial Sequence
  ENSG00000177133_12 (sequence is synthesized)
ggtgcccagtcttgcagccagctcgccgcccgagccccggatggaggaagcgctcactggccgctacctctgctgtttctggcaccagagattgagactgtgaacctgaactcccttgat

SEQ ID NO: 1020215 - DNA, 120 bp, Artificial Sequence
  ENSG00000177133_13 (sequence is synthesized)
ctcctcccgttgggcccaggagggagccgaatccaggcccaaccgggctcactgagaagaacctttaaaaatccgccaacgaatgctgttgcctggatgcgctgcctatgaccttcagcc

SEQ ID NO: 1020216 - DNA, 120 bp, Artificial Sequence
  ENSG00000177133_14 (sequence is synthesized)
gtgtgttcacgcgcgcccgcagccgtggagtggcggtccctcctgccgcccgcaaccccggggccgccggtctgcgcacaccgggagcaacttcgttacccacagcgcccgcgtcctgcg

SEQ ID NO: 1020217 - DNA, 120 bp, Artificial Sequence
  ENSG00000177133_15 (sequence is synthesized)
gctcgcgcggaactgcgcgcgggaaggtggcagagcgacgctccagaacgctgcttgcgtagacgctgccgctgccttcagatcccaattcggccgcgcgcgggcggggccctggcagca

SEQ ID NO: 1020218 - DNA, 120 bp, Artificial Sequence
  ENSG00000177133_16 (sequence is synthesized)
cgcgcctgtgcttctccgggagtttattgcagggctggctggagagaatggctgggtggaagctgccaggaggaggcccaaggccgcccaccccgtgggcctcgtttgctgagcgggggt

SEQ ID NO: 1020219 - DNA, 120 bp, Artificial Sequence
  ENSG00000177133_17 (sequence is synthesized)
ctgagcgggggtcagaggcgtgcgggacagggcgcgccccacggcggctctggaggcggcccggcccgtccctgtctcctcccctcgctccccctcccccggccttcccggaactctcct

SEQ ID NO: 1020220 - DNA, 120 bp, Artificial Sequence
  ENSG00000177133_18 (sequence is synthesized)
ggaggaggggcgagggccgactccgccgcccctggggtctccctcctcccacccccaccgcagagtctggcccgccctgggctttcctctcaggtccctttgggtctccagaagcccgga

SEQ ID NO: 1020221 - DNA, 120 bp, Artificial Sequence
  ENSG00000177133_19 (sequence is synthesized)
atcctgcagagtgtggaggggatctggggagaaggcaggggctgcccgggcgctctggctgctgggggtgggggacagggcctgccggggaagcgggtcgggggaggactggagacccag

SEQ ID NO: 1020222 - DNA, 120 bp, Artificial Sequence
  ENSG00000177133_20 (sequence is synthesized)
gctcccctaggtacaacgaacctcgcgggagggaatacgccatccccgtacccacttccgaggacgtaggtcttttggcaccggcggcagccgcgttcccacacatctgggcggggcccc

SEQ ID NO: 1020223 - DNA, 120 bp, Artificial Sequence
  ENSG00000177133_21 (sequence is synthesized)
gcagcatggcctggggagctgaggcttcgggatccggcacaaactaccattctaggtgtagacggaggaggtggggtgtgggaagcagggggccatggtctgagcagaccttctcacctc

SEQ ID NO: 1020224 - DNA, 120 bp, Artificial Sequence
  ENSG00000177133_22 (sequence is synthesized)
tgggcctcccacctcctggggcaggacttacggggaaggacccgaggggagtggggtgtccatagggacacccaagggtctatccctgcgagctttgctttctactaaaccaataatcgc

SEQ ID NO: 1020225 - DNA, 120 bp, Artificial Sequence
  ENSG00000177133_23 (sequence is synthesized)
gggaccccagggcccatagacagctgggggagtggggagacaggaggaactcaagctcagcttctgcctcctgtctcctgggaccctcgggcagcccctccagcttcctgggagtccaat

SEQ ID NO: 1020226 - DNA, 120 bp, Artificial Sequence
  ENSG00000177133_24 (sequence is synthesized)
ttcccaaggtagaacggtggcggcagagcctggccctgtggtggggcagctgcaccccgatgagtggcttgcagttcctggagccctgcaggttgttggagaggcagggagcccttctcc

SEQ ID NO: 1020227 - DNA, 120 bp, Artificial Sequence
  ENSG00000177133_25 (sequence is synthesized)
ctcctgcctgccctcttgcacttcctctcccagaacccagcactactcccagaggctctgagctggagccctagaaggtaaccacctcctggctggacacagggcaagttggggccaggc

SEQ ID NO: 1020228 - DNA, 120 bp, Artificial Sequence
  ENSG00000177133_26 (sequence is synthesized)
gtgaggacaggtgccccaggagccacctgctccactcatccacaaaggccttaactggctcaggggcccctagctcccagtcaagccctgccctcctgaccttgtcctgccctggtgctg

SEQ ID NO: 1020229 - DNA, 120 bp, Artificial Sequence
  ENSG00000177133_27 (sequence is synthesized)
ccagtcgggtggagatgtctaggggccagctggtctcctggcaactgaagtccgcgcttcccttccgttcactcattccttcctttcctcatgcaggaggcgctgcaaggctccgtgctc

SEQ ID NO: 1020230 - DNA, 120 bp, Artificial Sequence
  ENSG00000177133_28 (sequence is synthesized)
ctggagcttcgagtctatggtatgagttaaacagaagggtatctcctccatcagatctacaggagggtgtctgctccatcagacctggagcttccaaggcattttacccgaagctccagc

SEQ ID NO: 1020231 - DNA, 120 bp, Artificial Sequence
  ENSG00000177133_29 (sequence is synthesized)
acctggcccaaggctgggctgtgctgtgtcctcagtgaaagaatggatgagtcacagctgaatgactgaagagctgaaccaatgggaaaactgatgctcagaggcttgagcaacctaggc

SEQ ID NO: 1020232 - DNA, 120 bp, Artificial Sequence
  ENSG00000177133_30 (sequence is synthesized)
caggacctgtccttagaggcagaagcaggactcagaggaagagcaccctgaccacaaagccccagggtccagaaagactcagccactggagtctgtatttcctgagtcgcctctcactgc

SEQ ID NO: 1020233 - DNA, 120 bp, Artificial Sequence
  ENSG00000177133_31 (sequence is synthesized)
tggagctgtttatcatcgctccaactttcactaaaaaggaaaaactatcacttaaacaaagccattgaaaccccagcatcatgtgtggattttttaacataaataaatcatacaaactaa

SEQ ID NO: 1020234 - DNA, 120 bp, Artificial Sequence
  ENSG00000177133_32 (sequence is synthesized)
cccgttccttcccagcacccactcttggagcagctctccagggctgtgctgtggctgctgcggtcagggagaggtcgcatgctccagccagggtctttggggactcagtttagaactaat

SEQ ID NO: 1020235 - DNA, 120 bp, Artificial Sequence
  ENSG00000177133_33 (sequence is synthesized)
acgccaagcaagtcgtgctgagtgtctgggcttcttctaggaaggtatttccaatcatcaaatgtgccattaaaaaaaatgcatgtcagttaagtgtgcactaagcctggaccacatggg

SEQ ID NO: 1020236 - DNA, 120 bp, Artificial Sequence
  ENSG00000177133_34 (sequence is synthesized)
acatagtggttccaataaacacgaataagccagttttcacattagagaaataccagtttcttgcagaaatgcggtgcttttaaaagaggttaattaataaacagcaggtaattgttcgtg

SEQ ID NO: 1020237 - DNA, 120 bp, Artificial Sequence
  ENSG00000177133_35 (sequence is synthesized)
gcacgttgtggcagagggtaattttcattttagaggatggaagggccaaatacccctccccactcagcatttttctgtaataatcacctcagcttcacctccgcctttcatttttacagc

SEQ ID NO: 1020238 - DNA, 120 bp, Artificial Sequence
  ENSG00000177133_36 (sequence is synthesized)
ggagatgagggccaccttgcaggacgctgtggtgtggaggcagcagcctggggcagggactgtgctgagtgtctgaggccgagccacccctctgtaacctctataatccatcaggtctca

SEQ ID NO: 1020239 - DNA, 120 bp, Artificial Sequence
  ENSG00000177133_37 (sequence is synthesized)
gagggccgtcctatgttcagtaagccaatgctagcaccatgtgacgaggacacagcagtgagcagctgcccaggccccttgcactgtgtttggaaaaggaagctggcttgttcaggggtc

SEQ ID NO: 1020240 - DNA, 120 bp, Artificial Sequence
  ENSG00000177133_38 (sequence is synthesized)
cccagcaggatggggggcgggggcagggaccatggcagagcgagagttctaggagagaagctggtccacccacaggctccctggcctgggtgctgtaccaggcagggtgctgggcattgt

SEQ ID NO: 1020241 - DNA, 120 bp, Artificial Sequence
  ENSG00000177133_39 (sequence is synthesized)
gctgctcacttcccacccctgggttgcaactgggggctgtgtggccttcccagtcctgttgtgggtgctgtgattgtgcccaccttacagatgggaaaactgatgctcagaggcttgagc

SEQ ID NO: 1020242 - DNA, 120 bp, Artificial Sequence
  ENSG00000177133_40 (sequence is synthesized)
cagaggtgcctctgcagagagatccctgcctgggaccctttcctggggctcttctggtgctgggagtgtgagcaccacgaaagccccactacagtcatgccacccagagggcgctctggc

SEQ ID NO: 1020243 - DNA, 120 bp, Artificial Sequence
  ENSG00000177133_41 (sequence is synthesized)
ctcctactcgtgtgcggcccatactgggccaggacgctgcagtggccgagccgctgggtgtctgcaacggggagctcccccgccgctgggggcaataaacggaatcggtttcacacgctt

SEQ ID NO: 1020244 - DNA, 120 bp, Artificial Sequence
  ENSG00000272418_0 (sequence is synthesized)
ctcataccagctcaattttaattttaaagtgacaaatgtacaggtggaataaaattttaagcgacaccctccaaattccttttatatgacaagaaggagctgaatgtaattttacaccat

SEQ ID NO: 1020245 - DNA, 120 bp, Artificial Sequence
  ENSG00000272418_1 (sequence is synthesized)
aacagtagttctttagcaataattaggaagtcacagcacaaaaacgacaccccagagttgtggtccatttataaatagattttcacctaggcttcgttggaagaagtgattttatatcta

SEQ ID NO: 1020246 - DNA, 120 bp, Artificial Sequence
  ENSG00000272418_2 (sequence is synthesized)
tcctcaccaatggtcaaagtgggcacagaacagtaggaactaagttggccctgttaagcaggcacatgcagccatgtccgatccacggatgtgcttttattctttaagaggatcatctag

SEQ ID NO: 1020247 - DNA, 120 bp, Artificial Sequence
  ENSG00000277425_0 (sequence is synthesized)
gggacctggatgtggaactgcagtgtgccttgcaaacttgaagagaacgaccttgataatggatggtgaagcaagaaagaggagcctgaggctgagcgcagtgactcacacctgtaatcc

SEQ ID NO: 1020248 - DNA, 120 bp, Artificial Sequence
  ENSG00000277425_1 (sequence is synthesized)
agcccaggaatttgagaccagcctggataacgcgtggtgggcagttccaggacacctgacatgttcccactgcagaaaccacacgggtttctccagcaccactgagacttgctcagcctg

SEQ ID NO: 1020249 - DNA, 120 bp, Artificial Sequence
  ENSG00000277425_2 (sequence is synthesized)
cagcaccactgagacttgctcagcctgtgtagagtagcctggacatactggggctttattttcctgaggacaaccctcaaccaatgagtgccaggaatcattttgccttttctgggatgc

SEQ ID NO: 1020250 - DNA, 120 bp, Artificial Sequence
  ENSG00000277425_3 (sequence is synthesized)
tccagaactctaggaggacaaaaaagcccttcatgtccaacattagaggaaggcagcatcctccaaagaagagtgactcaccctgaccagctggcagagaagcccaaggccaggccctgg

SEQ ID NO: 1020251 - DNA, 120 bp, Artificial Sequence
  ENSG00000277425_4 (sequence is synthesized)
gatgtggagagccagtcccagcctggtctggaaggaggcgtgccagggtggcaatgatgcatcacccacgtggtttactggccttgactaacctgaccatgacttagcaaagctgtgagg

SEQ ID NO: 1020252 - DNA, 120 bp, Artificial Sequence
  ENSG00000272411_0 (sequence is synthesized)
ctggtccctcagatccccctgcaggggcaggaatgtctgagccagggcattgtttctgtggaatcttcccaccaatgaatctcccagcaggaccaactgtttggctgtatttaaactgtc

SEQ ID NO: 1020253 - DNA, 120 bp, Artificial Sequence
  ENSG00000272411_1 (sequence is synthesized)
gcttgtttaaacatcatttgaaccaaacagccagtcaatttaaaaatactccaagccaaaagccaatgagatttgaaaacaagaaaaactgaaaatgaaaataaaagggaaatatatgaa

SEQ ID NO: 1020254 - DNA, 120 bp, Artificial Sequence
  ENSG00000272416_0 (sequence is synthesized)
acaattcttacctgagaggttcatgttgaaatgaatgatttctggccagtttgcgtataatctgtgtaaaggtaaatcagaaaaatgtgtgtccagggcaccttgaaggccagagtgatg

SEQ ID NO: 1020255 - DNA, 120 bp, Artificial Sequence
  ENSG00000272416_1 (sequence is synthesized)
tggtatgatattaaatcattagacatataaatattaaaaatgagaagattttgttagaatggaaacggctcaccaaaaggcagagacaagaatgcaaacagtaagtctagctgtcattct

SEQ ID NO: 1020256 - DNA, 120 bp, Artificial Sequence
  ENSG00000272416_2 (sequence is synthesized)
ctgtaatctggagcaagtcaggtttgtctctggaccttctccagttgttttacaactttctagacatgcagtgtatcaacccaacacttttattaagcagctttgacagggtttttgaga

SEQ ID NO: 1020257 - DNA, 120 bp, Artificial Sequence
  ENSG00000272416_3 (sequence is synthesized)
tatttcacaattggaactttcggttttaatacttttaggactttattcattaatgcaacactttttgttgaacacctactatgtaccagggattgatatagctgtaaatatgacatactt

SEQ ID NO: 1020258 - DNA, 120 bp, Artificial Sequence
  ENSG00000272416_4 (sequence is synthesized)
agtctctgtctttgtagtactttaattcctgtaacacttgttaaattggattatttttatgaccgtagagaattagagggggtgagggattttattatattaaaattgcaatttcagtct

SEQ ID NO: 1020259 - DNA, 120 bp, Artificial Sequence
  ENSG00000272416_5 (sequence is synthesized)
ctagattttaaaaaatttgttcttggtcctaatttctgttttttagccctcctaatttagaattgtttttgggtgctgtttagcttctgcgaccattaataaaactaaaaatctaaccat

SEQ ID NO: 1020260 - DNA, 120 bp, Artificial Sequence
  ENSG00000277423_0 (sequence is synthesized)
gagaaagaggccacttgtgtatattgtcatagtgaccattcatgggacactcttcctggcaccagtacagtgctttttcttgccgttttgtgtctcttcataacaatcctaggaaagacc

SEQ ID NO: 1020261 - DNA, 120 bp, Artificial Sequence
  ENSG00000277423_1 (sequence is synthesized)
ggccagagtcacatagctggtaattggcagagcaaagactggaacccaatgctgtttgaccccaaaatctgtgcttttagtgccatgatatactagttttaaagaggaacctttgagtat

SEQ ID NO: 1020262 - DNA, 120 bp, Artificial Sequence
  ENSG00000277423_2 (sequence is synthesized)
tgataactgatgaatctatgattacatggaggttttattatttctctgaaaaagtaacttttaagacttggtgatataaagatctataaatatatacagaaataaattcttaaaaaagtg

SEQ ID NO: 1020263 - DNA, 120 bp, Artificial Sequence
  ENSG00000271148_0 (sequence is synthesized)
ataaattacttaatctttttgagtctattcactttaaaatgaaaataatgcaacttatttagtagagttaataaatagcacctggatcaaggttttgtccatatgtgacagatggcacac

SEQ ID NO: 1020264 - DNA, 120 bp, Artificial Sequence
  ENSG00000271148_1 (sequence is synthesized)
tctctagaagatctctccatgcctctctgacaggaacagtgctgcagagaatttttattgttcattaacatcaagcagtaaatatggctgtatttgaagtgtggtgtagataaaatttgt

SEQ ID NO: 1020265 - DNA, 120 bp, Artificial Sequence
  ENSG00000271148_2 (sequence is synthesized)
aaaatcctcataggatatgctgccaatttggcctagggtataaaatagtttttaattgcctagtagctatacccctttctaataagtatacatatatatttcagtagcctccttcttaaa

SEQ ID NO: 1020266 - DNA, 120 bp, Artificial Sequence
  ENSG00000271148_3 (sequence is synthesized)
atatacgtgtgtgtgtctgtgtatgtgtgtgtgcgcaagtatgtgtgtctgtgcatgtgtgcctataaatgtgtgtgtatgtatttctaaaaagaaataaatattactttgatacttcca

SEQ ID NO: 1020267 - DNA, 120 bp, Artificial Sequence
  ENSG00000271141_0 (sequence is synthesized)
gtccttggttatatcaccaaatttcaattctttgggtgcacttgggcgagctgaaaaaaaatgcactcacgagtcactgttaatagtctgaactaatatttgttaatactgccaaatcac

SEQ ID NO: 1020268 - DNA, 120 bp, Artificial Sequence
  ENSG00000271141_1 (sequence is synthesized)
cttagatgataaatgttttgttccttaccaattacattgacatcaatttccccagaaattgttttcacacggttttctaatttcagtgtataaatgcccttgtctgaacgttcacttgga

SEQ ID NO: 1020269 - DNA, 120 bp, Artificial Sequence
  ENSG00000271141_2 (sequence is synthesized)
actttatctccaaaacaccaggttgcagttggccttggatagcctgtacttggaaccaggatcgtgataggatttgggacaataacttccagaccatctttaaatgcacttaaatccatt

SEQ ID NO: 1020270 - DNA, 120 bp, Artificial Sequence
  ENSG00000271141_3 (sequence is synthesized)
gttggttcaactacaaagaagaaaagttaatgagtttgcagtgccatatttaagtccctgttgccccaaagtagctatgtgctattccccgatctaaaaataaaatatctatttaccaaa

SEQ ID NO: 1020271 - DNA, 120 bp, Artificial Sequence
  ENSG00000271147_0 (sequence is synthesized)
gttgtgggtaacgcggacgtggaagaacctcgtctgcggaggaaaaggtagatgttaaatggtaactacgcgcgaggttctgaggagccctgggaacaggaaggagaaaagaataccaaa

SEQ ID NO: 1020272 - DNA, 120 bp, Artificial Sequence
  ENSG00000271147_1 (sequence is synthesized)
agtgacaacagtttgccaatcgcagtctttaatctgataaagcggttatctcgtcttgagtcccaggtgccgagtcaatccccatacacagccgccgccattgcctcgagtccttgtgtc

SEQ ID NO: 1020273 - DNA, 120 bp, Artificial Sequence
  ENSG00000271147_2 (sequence is synthesized)
cctgtaataccagctgtgggtactactctcagtgttggagatcatcaaaatacaattggaccagaccctttggaaataattctgtgtctcaaatgccctgtggagcacacacttaatcag

SEQ ID NO: 1020274 - DNA, 120 bp, Artificial Sequence
  ENSG00000271147_3 (sequence is synthesized)
ttgatggctatggaattttccaacatcagctaaagagaagggcctactttaaggctggccaattctgcaagaaaggcaaggaggaggagactggctcacagctctggaggacccccttct

SEQ ID NO: 1020275 - DNA, 120 bp, Artificial Sequence
  ENSG00000271147_4 (sequence is synthesized)
ggtgacttccaagcttcatgcagaaccggacaacagaaattgagagggaaatttctatgacagaagagagaaagaagaaaattgctggaataatgaccttgaatagaggaaatgggatat

SEQ ID NO: 1020276 - DNA, 120 bp, Artificial Sequence
  ENSG00000271147_5 (sequence is synthesized)
tgacacagcacctcgaggcaaggaaataagaaaactgcctctgatccaagcagagaaggtcagtgagaaggtctgcctgtagatctgctgtagggcttgtcaccattggaagcaagaact

SEQ ID NO: 1020277 - DNA, 120 bp, Artificial Sequence
  ENSG00000271147_6 (sequence is synthesized)
ctgctctgctggtggtggagttgctgctgacaaccaccctcaacgggtctgcacccatccaggaaatatctgtcttcctttagcttggttgtacctgttctcactctatctgtattattg

SEQ ID NO: 1020278 - DNA, 120 bp, Artificial Sequence
  ENSG00000271147_7 (sequence is synthesized)
aattatgaataaagctgctagacacatcaacgtgcaggttttggtttggatgtgttttcagtttatctgggtaaataccaaggagagcaattgctgaattgtatgctaagtacatttagt

SEQ ID NO: 1020279 - DNA, 120 bp, Artificial Sequence
  ENSG00000271147_8 (sequence is synthesized)
tttgtaagaaactgctaaattgccctccaaattacctctacaattttgtattccaccagcaatgaatgacacttcctgttgcctcatatcctcaccagtatttggcactgtaagtgtttg

SEQ ID NO: 1020280 - DNA, 120 bp, Artificial Sequence
  ENSG00000271147_9 (sequence is synthesized)
gattttggccatcctaatagttgtgtattggtatctcattgtttttataattagcatttacctgatgacatatgatgtggaatgtcttttcatatgttcatatgccatctgtatatcttc

SEQ ID NO: 1020281 - DNA, 120 bp, Artificial Sequence
  ENSG00000271147_10 (sequence is synthesized)
ttaggtgaggatatatctgttaagatcgctggcctgtttttaaattgtcgtgtttgttttcttattgttgattttaagagctcttagtatattttggttaacaatactttcatcagatat

SEQ ID NO: 1020282 - DNA, 120 bp, Artificial Sequence
  ENSG00000271147_11 (sequence is synthesized)
gtcttttgtaagcattttctcccagtttgtggcctcagcctcttgacagcatgttttgcagatcagaaatgtttaattgtaatgaagtacagcttattaattctttttttaaaaaaaaca

SEQ ID NO: 1020283 - DNA, 120 bp, Artificial Sequence
  ENSG00000271147_12 (sequence is synthesized)
cttgctttttatgttttttagtaatacgtagtatttttacgtattttggggtacatgtaatgttttgttacatgcatagaatgtgtaattatcaagttagggtatttagggtatccatcg

SEQ ID NO: 1020284 - DNA, 120 bp, Artificial Sequence
  ENSG00000271147_13 (sequence is synthesized)
cctctagtatttgtcatttctatgcgttggaaacatttcaagtcctcttttctagcttttttgacatatataatatatagttgttaactatagtcaccctataatgctattgaacattag

SEQ ID NO: 1020285 - DNA, 120 bp, Artificial Sequence
  ENSG00000271147_14 (sequence is synthesized)
gtagtgtatctatgtcatcatcaaaccagggtcatccagattttatcttatgttatcttctaggagatatactttatatttaagactgtgatctatttttagttaatttttgaaaggtat

SEQ ID NO: 1020286 - DNA, 120 bp, Artificial Sequence
  ENSG00000271147_15 (sequence is synthesized)
aaggtatgtatctagattaatttttttgcatgtggatgtccagttattccagcataatttattggaaagactgtcctttctccattatattgcctttgctcctttgtcaaagatcagttg

SEQ ID NO: 1020287 - DNA, 120 bp, Artificial Sequence
  ENSG00000271147_16 (sequence is synthesized)
accatatttatatggatctatttctgggctctctgttctgttgcattgctctctatctgttgtccttcctttcactgctaccatactgtctttgattcctatagctttacagttagtctt

SEQ ID NO: 1020288 - DNA, 120 bp, Artificial Sequence
  ENSG00000271147_17 (sequence is synthesized)
gaagtcacaaaagcatgggatcccccattagtggatcgtcctggaatttttaactctcagatttgtacacacctagccttcagcaatttgtgaattacagttcagattttcctaccctag

SEQ ID NO: 1020289 - DNA, 120 bp, Artificial Sequence
  ENSG00000271147_18 (sequence is synthesized)
cactggttcccaaagaggtttctgttaaagtatgttgtgattctctccatctacgactttctcttcctatttttgggacagaggtttgtcttgtgacctcacttctcttacagatctaag

SEQ ID NO: 1020290 - DNA, 120 bp, Artificial Sequence
  ENSG00000271147_19 (sequence is synthesized)
accagtgtagactttctatgctgcttcaatctgacatggagtccctgccttccacatctaaagtacccttgcaattacattggccaagataacccagaataatcttaaattaaactcagc

SEQ ID NO: 1020291 - DNA, 120 bp, Artificial Sequence
  ENSG00000271147_20 (sequence is synthesized)
aatggtcacccaacttaaaactaggaaattacgaagaagagaaaattgccctgtatctgttaaggtctgcctgtagatctgctgtagggcttgtcaccattggaagcaaggtcctacttc

SEQ ID NO: 1020292 - DNA, 120 bp, Artificial Sequence
  ENSG00000271147_21 (sequence is synthesized)
aagctggctttagataagagcctggacaattcattcatagaatagcagaaaaggcagaatttatgtccatagatgcaagtggtatagtagatatagtgatgggagtttgtaaaagttacc

SEQ ID NO: 1020293 - DNA, 120 bp, Artificial Sequence
  ENSG00000271147_22 (sequence is synthesized)
ttctaattgctattttttttaatgaaataagaaacaaagtcatcaactcaaagtgagtaatatgtaggaggtgattattgtttgaggagagaggagaatgtgtgatatcttttgttaatt

SEQ ID NO: 1020294 - DNA, 120 bp, Artificial Sequence
  ENSG00000271147_23 (sequence is synthesized)
atggtaaaatataacacaaaatttgccattttaaccattttaagtggacaattaagtgtcattaattacattcacactgttgtacatctgccaccactatcttcttctaaaactttttat

SEQ ID NO: 1020295 - DNA, 120 bp, Artificial Sequence
  ENSG00000271147_24 (sequence is synthesized)
cacctcttatagtttaaattgtgcccccacagaagatatgttggagtcctatcccttaatattaatgtgaccttatttggagataggatctttataaaggtattcaaattaacatgagat

SEQ ID NO: 1020296 - DNA, 120 bp, Artificial Sequence
  ENSG00000271147_25 (sequence is synthesized)
cattagggtggaatcctaatccaatatgattagtgtccttataaaaaggggaaatttggacacagaggcaagcacacagggagagtgccaagtgaagatgaagaaaaagatcagagtgat

SEQ ID NO: 1020297 - DNA, 120 bp, Artificial Sequence
  ENSG00000271147_26 (sequence is synthesized)
acaaagaagtcaaagaacaccaaagattgccaacaaaccaccagaagctaggagaaaggcctgaaacatatccttcccgcatgccttcagagggagcgtgggcctgcagacactttgatc

SEQ ID NO: 1020298 - DNA, 120 bp, Artificial Sequence
  ENSG00000271147_27 (sequence is synthesized)
tcagacttctaccctatggaactgtgcaaaaataaatgtctgttgtttaagccattcagtttgtgttacagcacaaatgtattctatttagaatacatcattctaaatagaaatttttta

SEQ ID NO: 1020299 - DNA, 120 bp, Artificial Sequence
  ENSG00000271147_28 (sequence is synthesized)
ataattaagtattttcctctccttggagcacttggtaacttctaattctactttctatctctattaatttgcctattctagatatatcaaatgagtgaaataatacaatagttgtctttt

SEQ ID NO: 1020300 - DNA, 120 bp, Artificial Sequence
  ENSG00000271147_29 (sequence is synthesized)
ctcctcccactgccgttgtgggtaacgcggacgtggaagaacctcgtctgcggaggaaaaggtgccgagtcaatccccatacacagccgccgccattgcctcgagtccttgtgtctgact

SEQ ID NO: 1020301 - DNA, 120 bp, Artificial Sequence
  ENSG00000271147_30 (sequence is synthesized)
ggtgagtgtggggtgtgtacgtatttgtgtcaaagcacaaagttgatggtctctccttggatgggaattgtgggatgcgaagtcatctcctagattgttcatgaggtgtcatctgttgat

SEQ ID NO: 1020302 - DNA, 120 bp, Artificial Sequence
  ENSG00000271147_31 (sequence is synthesized)
ggacacttaggttgtttccatcttttggctcttatgaatattgctgcagtgaacattggagtacaagtatctgtttgagtccctgatttaaattcttttgggtatatacctagacgtgga

SEQ ID NO: 1020303 - DNA, 120 bp, Artificial Sequence
  ENSG00000270816_0 (sequence is synthesized)
gcccacttcccgacagcccccgcgcatctctgtggcagctgctccgtgcttcccgccccgccgcgcccgcccacccaacggcgctgtgtcccgccggtagctcagcggggacttccttta

SEQ ID NO: 1020304 - DNA, 120 bp, Artificial Sequence
  ENSG00000270816_1 (sequence is synthesized)
tgtggtacagggttgggcctggagacccggatgccggcgaggtcctggctgggagaggccgccgctgccttcaggtttccgagacaatggagactctgagaacatccagaaatatccaca

SEQ ID NO: 1020305 - DNA, 120 bp, Artificial Sequence
  ENSG00000270816_2 (sequence is synthesized)
ggactggcgaggctgtgggctttcaaccaccacgagaggctgtttgcatatgattcttctaaaattgacatcagtgaaatgccttgaagataataaagtgttgaagaaataaacaaaatc

SEQ ID NO: 1020306 - DNA, 120 bp, Artificial Sequence
  ENSG00000270816_3 (sequence is synthesized)
agaatatatgggatcagttagaaagctcttatttaagtaatacaaaccatgtcctcagatgtcacagagctcaggtatagtcaaaattgtttcttggatgaatctctggagaaggagagt

SEQ ID NO: 1020307 - DNA, 120 bp, Artificial Sequence
  ENSG00000270816_4 (sequence is synthesized)
tggctctgcagagatggatcatcgtgtgtgtcacccttgcaatgtgttcctgacagcccatggaagcgggctagtggattcagctccagcagtaactgttggttgggatggacaacccag

SEQ ID NO: 1020308 - DNA, 120 bp, Artificial Sequence
  ENSG00000270816_5 (sequence is synthesized)
aaatggggcatgtgaggaagagaaaatgaaagtggatagcctgttaccgaaaactgctggactaagacacttgtaagcctgtcaatctcagtggccaacagacatgaaaaaaatttccaa

SEQ ID NO: 1020309 - DNA, 120 bp, Artificial Sequence
  ENSG00000270816_6 (sequence is synthesized)
catcattaattatcagagaaatgcaaataaaaacaacaatgaaataccatctcagaccagtcataatagctaatatgaaaaaagttaaacaaaaaacagctgctgggtgggaagtgaaga

SEQ ID NO: 1020310 - DNA, 120 bp, Artificial Sequence
  ENSG00000270816_7 (sequence is synthesized)
tgtaaattagttcagcactgtgcaaagcagtttagagaattctcaaagaacttgaaacagagctactgtttgacccagcaatcccatcattaggtatatagccaaagtaaaataaatcat

SEQ ID NO: 1020311 - DNA, 120 bp, Artificial Sequence
  ENSG00000270816_8 (sequence is synthesized)
tctaccaaaaaatgcacatgcactcatgcctcttgccacactattcacaacagcaaagatatggaatcaatctaggtgccaatcaatgatgtattagatgaataaaatggtatgtatgca

SEQ ID NO: 1020312 - DNA, 60 bp, Artificial Sequence
  ENSG00000270816_9 (sequence is synthesized)
ggtatgtatgcaatataaaatcataaaataccacacattcataaaaaagaggtcaggaga

SEQ ID NO: 1020313 - DNA, 62 bp, Artificial Sequence
  ENSG00000270816_10 (sequence is synthesized)
tcaggagatcaagatcatcctggccaatatagtgaaaccccctctctgctaaaaatacaaaa

SEQ ID NO: 1020314 - DNA, 120 bp, Artificial Sequence
  ENSG00000270816_11 (sequence is synthesized)
atcacttgaaccagggacttagaggttgcagtaagctgagatcgcgtcactgcactcctgcctggtgagagagtgagactctgtcacaaaagaaacaaaatcatgtcctttgcagcaaca

SEQ ID NO: 1020315 - DNA, 120 bp, Artificial Sequence
  ENSG00000270816_12 (sequence is synthesized)
tcatagtcgtaaacaagttaacacagaaaaaggaaacaaaatatcacatgttctcacttgaaagtgagtgctaaaggttgagcacatgtggacatgaccatggaaacaataggcactgtg

SEQ ID NO: 1020316 - DNA, 120 bp, Artificial Sequence
  ENSG00000270816_13 (sequence is synthesized)
aactgctggagtggggagggagagagaggtgcatgggttgaaagactgactattgggtattatgctaactccctgggtgaggggatccataccccaaacctcagcatcacacaatatgcc

SEQ ID NO: 1020317 - DNA, 120 bp, Artificial Sequence
  ENSG00000270816_14 (sequence is synthesized)
tgcccatgtaaaaaaacttgcatatgtaccccctgtacctgaaataaaagttgaaattttaaaaataatattaaaattataattaaataatttttcttcaattttttgaatagtttaaca

SEQ ID NO: 1020318 - DNA, 120 bp, Artificial Sequence
  ENSG00000270816_15 (sequence is synthesized)
gtccgataaacattatatatttgttagtttgtgaataataatgtttctaggtattatattattggctggatacttttttatttcaatattttgaatatactatcctactctatcatgctc

SEQ ID NO: 1020319 - DNA, 120 bp, Artificial Sequence
  ENSG00000270816_16 (sequence is synthesized)
tttgtcttttgataatttgaggaaagcattcttcagagaggatctgtttagtttcagtctgtttggaatatttgagtttcctggatctgaataaccatctatctcccatgatatgggacg

SEQ ID NO: 1020320 - DNA, 120 bp, Artificial Sequence
  ENSG00000270816_17 (sequence is synthesized)
ttttctgctcttgttttattaaatatgtttcctacatcattttcatttttttccctctggaattttcccctggattttccataactcaaaaacttgttttcaaattgtgttttgaaaact

SEQ ID NO: 1020321 - DNA, 63 bp, Artificial Sequence
  ENSG00000270816_18 (sequence is synthesized)
attctctttttttttctttttggtctgctggaattattttgaaagacttgtcttcaagctcag

SEQ ID NO: 1020322 - DNA, 120 bp, Artificial Sequence
  ENSG00000270816_19 (sequence is synthesized)
tctgctggaattattttgaaagacttgtcttcaagctcagaaattcttatttttgctcgttattttctgttattgaatctgtaaactgcatttttattttattcattaaattcttcagct

SEQ ID NO: 1020323 - DNA, 120 bp, Artificial Sequence
  ENSG00000270816_20 (sequence is synthesized)
cagttagaaagctcttatttaagaaacatggaggatatgagagcaagcaatgaagtaatgttacaaaatgacatatttgagtagttcatactggtggaattttcctggcactctcatgag

SEQ ID NO: 1020324 - DNA, 120 bp, Artificial Sequence
  ENSG00000270816_21 (sequence is synthesized)
ttgaaacataatcattaaagactctggcacttgaaaccgtgatgacagctgcatttcttgcagtcaagggaactcggagtgttttagcttatgggttctgtggaagccaggccacttgtc

SEQ ID NO: 1020325 - DNA, 120 bp, Artificial Sequence
  ENSG00000270816_22 (sequence is synthesized)
ttcctcgcttcagcccccttcgcacaggaggtgacgaatctcttccctcactggagttcctggagccagagtatacaaagaagccacacacaaagctcctaaagagagctccacaggcct

SEQ ID NO: 1020326 - DNA, 120 bp, Artificial Sequence
  ENSG00000270816_23 (sequence is synthesized)
gggaccaagagattccctccattatgaaaatgttgtacagccttattatgcaacacactctgttttgctctgtgtgagttccactcccactgtcacagctctgtcagcagaccctgaggc

SEQ ID NO: 1020327 - DNA, 120 bp, Artificial Sequence
  ENSG00000270816_24 (sequence is synthesized)
ctgggcatcaatttcaaatcttcatggagagccaatgctgtgggaagggtgtcctttagtctgtgatattcacgagtgagggacagagctggacattttagtgaatctcagagctgcagg

SEQ ID NO: 1020328 - DNA, 120 bp, Artificial Sequence
  ENSG00000270816_25 (sequence is synthesized)
gaaagtactgtcttcagctactcttctctgcctagacttgggactattctataatttcctcactggattaataatcggtacctgttgaatcctgtgtccactgttcaatataacccggta

SEQ ID NO: 1020329 - DNA, 120 bp, Artificial Sequence
  ENSG00000270816_26 (sequence is synthesized)
gggtggaacaatcggaaaatcatctgctttatgcctgcatcctctcctggctaagatttcaataggtccagttgtgcacattaggtagaattgtcatgtctgaagaagtaatacaaacca

SEQ ID NO: 1020330 - DNA, 120 bp, Artificial Sequence
  ENSG00000270816_27 (sequence is synthesized)
caagccgtttttaagatgactctcgagggaagttgccaatacaatcactgaggcgatgccctgacacaggatggtagagagacttggtcctgtggtggtggctgtcggcgacacaggatg

SEQ ID NO: 1020331 - DNA, 120 bp, Artificial Sequence
  ENSG00000270816_28 (sequence is synthesized)
cttaaccctagtgggtgcctttgccactattttgtccatgagagacattaagctacgatgtgctacatgctggtgagttccttaacctcagatgaagagaggaacatgacaacacagaag

SEQ ID NO: 1020332 - DNA, 120 bp, Artificial Sequence
  ENSG00000270816_29 (sequence is synthesized)
atgagtgtgatgtttaatactgagtgtcagcttgattgcactgaaagatgcaaagaattgttcctgagtgtgtctgtgagggtattgccaaagaagattaacatttgagtcagtagactg

SEQ ID NO: 1020333 - DNA, 120 bp, Artificial Sequence
  ENSG00000270816_30 (sequence is synthesized)
ggtgaggcagacccaacctcaacctccctgggcaccatctaatgagctgccagcatggctagaatgaagcaggtaggagaaattggaaagactagacttgctgagtcttccagcctccat

SEQ ID NO: 1020334 - DNA, 120 bp, Artificial Sequence
  ENSG00000270816_31 (sequence is synthesized)
gctttttcactcttggacttaagccagtggtttgccaggggctctctggcctttggcgacagaccgaaggctgcaccgtcgtcttcctgactttcgaggttttgggacttggactggctt

SEQ ID NO: 1020335 - DNA, 120 bp, Artificial Sequence
  ENSG00000270816_32 (sequence is synthesized)
gctcctcagcttgcagacggcctatcacgagacttcatcttgtgatcgaacccactcgaagaacctgttgtgcttcaagatagtttagacttggtatgccaagggaccgccggaagagga

SEQ ID NO: 1020336 - DNA, 120 bp, Artificial Sequence
  ENSG00000270816_33 (sequence is synthesized)
aagaaccaatccatccatggtggtaaacatgttgccgtgtgaaattctcaggaaccatatgctgaagggcactgataaagtgaattaaatatggcctgaggaggactccgtacttctatg

SEQ ID NO: 1020337 - DNA, 120 bp, Artificial Sequence
  ENSG00000270816_34 (sequence is synthesized)
tttgagtccttgtggacaaactgtaacctacctgaataggtggacgagattgaaaacctaactcaggagtatgtacctgagcacctcaccaacagctgagcgttggccaatttcagcagc

SEQ ID NO: 1020338 - DNA, 120 bp, Artificial Sequence
  ENSG00000270816_35 (sequence is synthesized)
ccaacagctgagcgttggccaatttcagcagccatacctcaaccactcatacactcttgagtgtgcaaactgtgtttaaataagacaaacatcagcctgtaaccaatccagctgtttctg

SEQ ID NO: 1020339 - DNA, 120 bp, Artificial Sequence
  ENSG00000270816_36 (sequence is synthesized)
aaaaatgtataaatcttcttcaaccacatggctgcactgaattctctttcaatccgctgtgattccgggggctgcccaattcatgaatcatccattgctcaattaaactcctttaaattt

SEQ ID NO: 1020340 - DNA, 120 bp, Artificial Sequence
  ENSG00000236627_0 (sequence is synthesized)
tgtctttccttctactgcacactgagctcctgaaggcactggggcttgctcccatttgtaccctggagcacacagtaggtgcttactaagtgactgtggagcagaacttctaatattttt

SEQ ID NO: 1020341 - DNA, 120 bp, Artificial Sequence
  ENSG00000236627_1 (sequence is synthesized)
gaaacacagatttggaaacatcttcccagaaaacagactacaacaaatcatttccctggtatgaaggaatgaagttttttgtttctttcatagtcctaaaaaaatcccccaagagctcac

SEQ ID NO: 1020342 - DNA, 120 bp, Artificial Sequence
  ENSG00000236627_2 (sequence is synthesized)
cagcatgaaagcactagctctgaatatgatatggaggaacaatgatttgaagaccttcgaaaggcaagcaacttgacacggggcatctttctagatcattgtttggaagagaaccatcag

SEQ ID NO: 1020343 - DNA, 120 bp, Artificial Sequence
  ENSG00000236627_3 (sequence is synthesized)
gacgatcccaggggtcctgtgaaacgctgttggcctgggcaaggagggaactggtgctcatcactggccctcttcagaaacaatctgctccgtccaagtgcaatatgagtatttccagct

SEQ ID NO: 1020344 - DNA, 120 bp, Artificial Sequence
  ENSG00000236627_4 (sequence is synthesized)
atcaagaaaatagtcaatggagtcaacaaatgcaaacctctggaaaacatttcagagactggcttgttgctacaacaagaacggtgatatcataatcaccattgtggagcagatgccagg

SEQ ID NO: 1020345 - DNA, 120 bp, Artificial Sequence
  ENSG00000236627_5 (sequence is synthesized)
tagcattgctaacctcttcagaataattgacatttttctaacatgcagagtggccataacaaccacttcagctacacaatagcctccaccgtaacacttccttagcaacccgcttaacac

SEQ ID NO: 1020346 - DNA, 120 bp, Artificial Sequence
  ENSG00000236627_6 (sequence is synthesized)
cgtgactttgaaatcatccgctattttggcagcaggatgaatgtttgctggtcgtgaacttttcaaaggtcatcagctggaaacaagcctgcccacttcctttgcctaccccgccactgc

SEQ ID NO: 1020347 - DNA, 120 bp, Artificial Sequence
  ENSG00000236627_7 (sequence is synthesized)
ctgtcgtacccatccatcacaggacataatgcttaagcacttgaggaaaagataatgcaccgcttacattttcctagtggaacaataaattttatttcggggatgttgggggaaaaaagt

SEQ ID NO: 1020348 - DNA, 120 bp, Artificial Sequence
  ENSG00000236627_8 (sequence is synthesized)
cgtagtgttactgacccatgttttattaacctgtctccaattaacagaaaggatgacactaattggaaacacaccattttgcttaagcaattaatcttttttggtttatcttttaaagcc

SEQ ID NO: 1020349 - DNA, 120 bp, Artificial Sequence
  ENSG00000116652_0 (sequence is synthesized)
gaaagttttcactgcatctcttgtgggatacgtataatgtttggcagatgatacttttaaatgacaataacaatagttatttttcagagagaggaatcaagatagccctgcaaattcagt

SEQ ID NO: 1020350 - DNA, 120 bp, Artificial Sequence
  ENSG00000116652_1 (sequence is synthesized)
gtagttgttaattctctgtattcttattaacaagattcctttattcatttatttatcaaatagttatcgagggccttatataccagacatcagtttaggtgtttaggatacattagagtt

SEQ ID NO: 1020351 - DNA, 120 bp, Artificial Sequence
  ENSG00000116652_2 (sequence is synthesized)
aaaaaaagacaaaaatccctgccctcgtcaacttaaattttagtgagggaaacaatacataataaacataataaatagtaaatgacatggtatgtaggaaagtgataagtgttatgggaa

SEQ ID NO: 1020352 - DNA, 120 bp, Artificial Sequence
  ENSG00000116652_3 (sequence is synthesized)
aatcagagggaaagggggttagtgagtgctgagggaatgtgggttgccattgaaatggagtggttagtatatgcttcattaagaaggtgtcatatgaataaagactttgaaagagatgta

SEQ ID NO: 1020353 - DNA, 120 bp, Artificial Sequence
  ENSG00000116652_4 (sequence is synthesized)
tgagttaccaactgctacataaaaaactaccccaaaactcagtggcttaaaacaattaaacatttgttcactcatgaatcagtagatctgttagttcttagtctgagccaggcttgtttt

SEQ ID NO: 1020354 - DNA, 120 bp, Artificial Sequence
  ENSG00000116652_5 (sequence is synthesized)
ttctctatagggcttgctcacacagttatggttagctacaggttagctggtggctggctttgctaatcttggctgggttctttcttacgtatgaagtcccatctgggacaacttgactca

SEQ ID NO: 1020355 - DNA, 120 bp, Artificial Sequence
  ENSG00000116652_6 (sequence is synthesized)
gcctcatatgatctttaataatccttcagtaaactagcctggacctgttctcttggcacaataggatctcctgaggtttgggctcagaaccagcacaatgttacttcgttatattctgtt

SEQ ID NO: 1020356 - DNA, 120 bp, Artificial Sequence
  ENSG00000116652_7 (sequence is synthesized)
gctcacagaaagtcacaaggcaagtccagattcataggctggggaaatagacttgatctcttgatggaaaagctgcaaagtcacattgcaaaaggctgtagatactgagggggacagcca

SEQ ID NO: 1020357 - DNA, 120 bp, Artificial Sequence
  ENSG00000116652_8 (sequence is synthesized)
tttttgctgtcttccacagaaggcaagggagtaagccttgtgggtgtatggtgctggaagggatgggtgaagagtggaggaggtggcagagtattccaggtagacagaatactctgtgca

SEQ ID NO: 1020358 - DNA, 120 bp, Artificial Sequence
  ENSG00000116652_9 (sequence is synthesized)
gaggctctgtgagagtgtactggtgttaaaagaacagaggctagagtgtctcaaatggagtaagtgaggagagagttgtaggagatgaaaccagggagaaacaaggacaaaatcaggaag

SEQ ID NO: 1020359 - DNA, 120 bp, Artificial Sequence
  ENSG00000116652_10 (sequence is synthesized)
aggtttctttttgccataattaggacttgggcttttgatcagagaaatgaggtttccccctcgttttttgtgagttttattctccatatataaggtcaagattttatcttaatctttcat

SEQ ID NO: 1020360 - DNA, 120 bp, Artificial Sequence
  ENSG00000116652_11 (sequence is synthesized)
tttcagcagtttgactgtgtgtctaggtagtttttgtttttgttgttgatgctgttgcctgggtttttttgttttttggtattaatcctgcttggggttctctgagcttcttggatatgt

SEQ ID NO: 1020361 - DNA, 120 bp, Artificial Sequence
  ENSG00000116652_12 (sequence is synthesized)
ggcttgttgcctttcattatttttagaaaatcctctgccttatttcttcaaatatttcttctgccctctttcttcttcttccacttgtatggtacctgacatctcttcctgttctgctcc

SEQ ID NO: 1020362 - DNA, 120 bp, Artificial Sequence
  ENSG00000116652_13 (sequence is synthesized)
accacaggtaagccagtgcttgcatctcgtctctcctgggaaagatctgtctttccttggattttaagcttatagttgtcctgtaaccccagctctgatgggatcaagaaaagttatgat

SEQ ID NO: 1020363 - DNA, 120 bp, Artificial Sequence
  ENSG00000116652_14 (sequence is synthesized)
tgagtagaaggcaggacataatctgatttatattttaacaagagcagttaggttactgtattgaaagtaggtagaaggcagggttggctctaacgaatttgaatgaggagcctcagcact

SEQ ID NO: 1020364 - DNA, 120 bp, Artificial Sequence
  ENSG00000116652_15 (sequence is synthesized)
tttcggcgccattttcgagtgatacctgatctcatcaatctagcggaagagacaggataacctatccaagagtatagcgccactatgactccgccggaaaaattactttaaaaatcgcca

SEQ ID NO: 1020365 - DNA, 120 bp, Artificial Sequence
  ENSG00000116652_16 (sequence is synthesized)
aaaattacttggagcaaagggcagtaggcggagcttcgccaaggctggcgcagtcggttttgacctgtagcagagaaccaattctggagaacagcctcacttctttgattgaatactcac

SEQ ID NO: 1020366 - DNA, 120 bp, Artificial Sequence
  ENSG00000116652_17 (sequence is synthesized)
ataatgctttggaacaggacatgagattaaggtttaataatgatagaatgaagaccataataaaagagacctctacttacctcagcaattcttacctttcttacctatttgatgaagatg

SEQ ID NO: 1020367 - DNA, 120 bp, Artificial Sequence
  ENSG00000116652_18 (sequence is synthesized)
tcttttgaaaggtgtactgcaaggaacaaaatgtttgtaaattctgcttttaccaaggtttcttttttagttgatgccaaagagttccaatattgaacatcttaagtctgttacttggag

SEQ ID NO: 1020368 - DNA, 120 bp, Artificial Sequence
  ENSG00000116652_19 (sequence is synthesized)
tatggattgagtttggagcttactcagaggactacaggagagtatccaggaggtggataattactgtaccttcctcatggaaaaagttttatttaaagtgttatttctcgttgaatacta

SEQ ID NO: 1020369 - DNA, 120 bp, Artificial Sequence
  ENSG00000116652_20 (sequence is synthesized)
tcaaaaaggaaaaaaaaatgacctaaacttttgagacagatttggctctagtaagtatttagatatatcgcttgcatatctgggagaagaaataagagactatcatcaatacattcccat

SEQ ID NO: 1020370 - DNA, 120 bp, Artificial Sequence
  ENSG00000116652_21 (sequence is synthesized)
ctactaaaaaattttattttacacatgtcaagggattacttataacttccattgtcttttttttaagcctatatgcaatgaaaaatatattggcaaaataaatatttaaaccttttatgt

SEQ ID NO: 1020371 - DNA, 120 bp, Artificial Sequence
  ENSG00000116652_22 (sequence is synthesized)
taaaattactgtgaaagatgacaagttagctgctgtttttgtctacattatactgaaattaaatgtttataatttatattttgggtttatttatttataaatcatggaatttatgcaaaa

SEQ ID NO: 1020372 - DNA, 120 bp, Artificial Sequence
  ENSG00000116652_23 (sequence is synthesized)
aacatgagtagtacagattctcctctaattctgtaggactttgaataatgtgatatttttcttatagttggacccttgtgttttgaagaaatgccaactgcttgaagaatttccttgtta

SEQ ID NO: 1020373 - DNA, 120 bp, Artificial Sequence
  ENSG00000116652_24 (sequence is synthesized)
tttgtattatttgctatagggttagatgttgagaaattcttctgacaaaaaattttaagccagttttacactaaatattccttagtctgattaatttgttattggatgtattctgtatct

SEQ ID NO: 1020374 - DNA, 120 bp, Artificial Sequence
  ENSG00000116652_25 (sequence is synthesized)
ttcttttgtaatttgtaacttttatccacttagcacgaatgattctattgaagaaaatctttaggaagtggtagaaactttaaatcgccccatagtttgcctgtttccacattttattat

SEQ ID NO: 1020375 - DNA, 120 bp, Artificial Sequence
  ENSG00000116652_26 (sequence is synthesized)
cttataatctttgggagtgcttacacttatggagctaacattttcagagatacaggttctcatagtactactaaaacttttttcctctttggactgaatacctatgattataactataca

SEQ ID NO: 1020376 - DNA, 120 bp, Artificial Sequence
  ENSG00000116652_27 (sequence is synthesized)
gtagtttaagtttccttgtgattagtcaaaaataccattttagtatgaagcaatgaagtctattatttgttgtcccataattgagaaacttagatacaccttttattaagagtttgtaaa

SEQ ID NO: 1020377 - DNA, 120 bp, Artificial Sequence
  ENSG00000116652_28 (sequence is synthesized)
ttctagcttagtctacacagatttttatatcaatttgtttatatttttattaatgtcatttctggaattgtgaaaatgttaatgttcgacaagcaacattaaaaatagatttgaaacatt

SEQ ID NO: 1020378 - DNA, 120 bp, Artificial Sequence
  ENSG00000261314_0 (sequence is synthesized)
ctagatctggatttcaaaaagatcactctggcagtaaaatggagtacaactcaggaacaggagggcagagtggctgtttggagaaaggcaagataattttacagtctagaagagagcctg

SEQ ID NO: 1020379 - DNA, 120 bp, Artificial Sequence
  ENSG00000261314_1 (sequence is synthesized)
gaaatgctcccttccacagaagttccagctcctgcagcctagttccgtcctcatgcaaccttccttccgtgaggttctgcctaccaagagggaaggaggaaggacctgtgcaatgagctt

SEQ ID NO: 1020380 - DNA, 120 bp, Artificial Sequence
  ENSG00000261314_2 (sequence is synthesized)
aatttgcaagttgagaactcagctctggattcttggtgaccccaagtacaggaggcctgaaaggccctgtctgagaatatgcactaggcagctccatctcctgtactcaccttttaactc

SEQ ID NO: 1020381 - DNA, 120 bp, Artificial Sequence
  ENSG00000261314_3 (sequence is synthesized)
cagttaagaagctatcatgtacaccccatcactgagaagatgtggaaagtgaggcccagagaggtttagtaacttctccaacatcacacagtaacttttaagggccagtccctgaactgt

SEQ ID NO: 1020382 - DNA, 120 bp, Artificial Sequence
  ENSG00000261314_4 (sequence is synthesized)
catcctaaaactcattaggtgtgtgatcctttcaaaatgctctactggccggcatgtttagggatgagtaatggagagagtcataaaaacatacttttaaattaaattctttttttcaaa

SEQ ID NO: 1020383 - DNA, 120 bp, Artificial Sequence
  ENSG00000261316_0 (sequence is synthesized)
ggcttagcaggcccagagggccccggaagacactgagtgatttccctctgtggcgtccgtgagagtcagtgtcactgctgggccctcaccctggtataccaggcaaccaggaagaaggga

SEQ ID NO: 1020384 - DNA, 120 bp, Artificial Sequence
  ENSG00000261316_1 (sequence is synthesized)
gcaacacagagacccaggccttcagcccaagcggggctctgtgcctccatcggaaacatgaaccagatttccttgtaatgggctccatatttaggcccagcagccttagatgtctggcca

SEQ ID NO: 1020385 - DNA, 120 bp, Artificial Sequence
  ENSG00000261316_2 (sequence is synthesized)
ataggaaagctatgtccttcctgcacaatttcagccctaagaatctgtgactctccctccctggaggcctagagaacaagaggagggagggcttgaaatcaataaatggattgcacacct

SEQ ID NO: 1020386 - DNA, 120 bp, Artificial Sequence
  ENSG00000273437_0 (sequence is synthesized)
accgcacccggccctatctcaagcttcttaactgcacctgctaaatcccttttgccatgtaaggtaacgtaccaacggtttcagagattaggatgtggacattttggggggctgtttttc

SEQ ID NO: 1020387 - DNA, 120 bp, Artificial Sequence
  ENSG00000273437_1 (sequence is synthesized)
aggcaaaagtgctgcctgaagccagaaaatacctttttaatattagtttttttcacccaatttgatgtgttattgtatccaacttaaaatacatgaactaataaaatcagatttttttca

SEQ ID NO: 1020388 - DNA, 120 bp, Artificial Sequence
  ENSG00000261310_0 (sequence is synthesized)
cgagactccgtgggcgtaggaccctccacgccaggtgccggatataatctcggggatataatctcccgttttttaagccggtccgaaaagcacaatattcaggtgggagtgacccgattt

SEQ ID NO: 1020389 - DNA, 120 bp, Artificial Sequence
  ENSG00000261310_1 (sequence is synthesized)
atgtcttcaatttattcatgtattcattcattattcattgatatatagccaatcaagcaagcaagcaaacaaaaatatatgagtgcctatcatggaccaaaattttgctggctaaagact

SEQ ID NO: 1020390 - DNA, 120 bp, Artificial Sequence
  ENSG00000261310_2 (sequence is synthesized)
gaagaaatagaagataaagtttaaatacagttcatttgtcttctttatagactcactttttgcagcagacaatgtgctatgtctgaaacagtaaattccagggaccttagaagaaaataa

SEQ ID NO: 1020391 - DNA, 120 bp, Artificial Sequence
  ENSG00000261313_0 (sequence is synthesized)
acaacgcggacttctcctgtccaaccaaggcgggggaaatctcacagacagcagcaggacacagcctgcacaccaagctcgggaggagctgggcagactccgtttatacaggagtgaaga

SEQ ID NO: 1020392 - DNA, 120 bp, Artificial Sequence
  ENSG00000261313_1 (sequence is synthesized)
agaaatcaaaatattctcagatgaagaaaagcagagaatttgtcatcaggagacctgccctaaaagaatggccctaatggaagttcctaaaaaaagagaagacactgaaaacaaaaaaca

SEQ ID NO: 1020393 - DNA, 120 bp, Artificial Sequence
  ENSG00000261313_2 (sequence is synthesized)
tatcataaagaaagaggagcatagtaagcaaaaatctacttgccttcaaaagaaggaggaagagtaggaggaggaagagctgcaagaggtgctgtgtcacctctgaaagcaccaccctgg

SEQ ID NO: 1020394 - DNA, 120 bp, Artificial Sequence
  ENSG00000261313_3 (sequence is synthesized)
aggccccgtgatttataaggacagtagttaatagtttctgtcatcagagaggtcagtgtgttctgttcccatattgttcagttcaataggcctattacttggaaatcaagacgcattata

SEQ ID NO: 1020395 - DNA, 120 bp, Artificial Sequence
  ENSG00000261313_4 (sequence is synthesized)
cctatgattacaaacatgtctggggatgatgacattgtagataactctccaaccacaaagtgcaagaaagtttcccaagctagagttttttcattaaatgtgcacatttatttgcattta

SEQ ID NO: 1020396 - DNA, 120 bp, Artificial Sequence
  ENSG00000261313_5 (sequence is synthesized)
agaggagcatacagaaactactgagagatacattatctgagctccatatcaagcacataaaagattgagaaaaataatgcaataaatgtaattcttaaataacagataaatgctacttgc

SEQ ID NO: 1020397 - DNA, 120 bp, Artificial Sequence
  ENSG00000261312_0 (sequence is synthesized)
cttagtggctgggtgaccccaggcaattttattactttatccctgaacctcagttgcctcatctataagatggggctaataatagcacccatttcataattatgaagattaaatacatta

SEQ ID NO: 1020398 - DNA, 120 bp, Artificial Sequence
  ENSG00000261312_1 (sequence is synthesized)
aggaaaacactagtatgtccctagtacctgctaaacactcaacaaaagttaactgtacatactgatgtctcaaacagggacggaatgtttaacacagaaaacaggaggttttagcactca

SEQ ID NO: 1020399 - DNA, 120 bp, Artificial Sequence
  ENSG00000261312_2 (sequence is synthesized)
ctcgttctcctggctcccgaaatatgagctgccctgccccagttcatccaagcccatcaatatagttgtcctcgtccttaatctccacaggtgttcaatgtgagccaactgtcagatggc

SEQ ID NO: 1020400 - DNA, 120 bp, Artificial Sequence
  ENSG00000261312_3 (sequence is synthesized)
tttcatttgcacaactgaataaaccatttatgcctagtgttccattactggaacgctaagcttatgggagttatttatatcttactgctcgaggtcctcaccaagatctgattttttcac

SEQ ID NO: 1020401 - DNA, 120 bp, Artificial Sequence
  ENSG00000261312_4 (sequence is synthesized)
aaaaaaaatttgtaatctccagcataaatggaataatcaaagcaattgtggcagttttggggggacaaaactctagagtttaatcttccagcttgactgacttggaagcgttcctgtcaa

SEQ ID NO: 1020402 - DNA, 120 bp, Artificial Sequence
  ENSG00000261312_5 (sequence is synthesized)
cagctcatggcccggtcgtagtcccgctgcagattctgctgcaggctgtcagccgccttcttgccgagggccatgttgggccttgcaatcgtgctggcggggcggctgaacgaaggggac

SEQ ID NO: 1020403 - DNA, 120 bp, Artificial Sequence
  ENSG00000261312_6 (sequence is synthesized)
aggttctacatgctcctcgcaaagggtgctgacacccttctttttcttcttctttttcttcactagaggcatctcaggtgcctgcccatgggccacactcttagagggggatgtagctct

SEQ ID NO: 1020404 - DNA, 120 bp, Artificial Sequence
  ENSG00000261312_7 (sequence is synthesized)
taaaggagaaacatcagcaaagtaatcatcattgtttaaaactgagtatcgagtctctggttctttgaccactttcttcttctttttcttctctgggagcccaaggtctactttgtgtgt

SEQ ID NO: 1020405 - DNA, 120 bp, Artificial Sequence
  ENSG00000261312_8 (sequence is synthesized)
cttggtgatcattcctgaaaaaacaaatggtacaagttatcccataccaagccatcctgtgttcaattctactaagcattgccaagagccatgtttctttgagtgggtggtcaaagcgtt

SEQ ID NO: 1020406 - DNA, 120 bp, Artificial Sequence
  ENSG00000261312_9 (sequence is synthesized)
gtgggacagggaaaatggacatgattcctttaaagcaaaaaaagaaatactacagaaacagcgtaaattttaaatccacacagccctaggttcaaacctaaatgcctctctcaccttaag

SEQ ID NO: 1020407 - DNA, 120 bp, Artificial Sequence
  ENSG00000261312_10 (sequence is synthesized)
taaatcagctaacctccctgagcctcaatttctccatctggaaaatgggggaatataacacctccctcctcaaaagggtgttggagggagtaaatgagataacccatggaaagggcttgg

SEQ ID NO: 1020408 - DNA, 120 bp, Artificial Sequence
  ENSG00000261319_0 (sequence is synthesized)
ctaagacatcatttcttttatcagatgaggaaaccaatacatagaaagacttttaaattttccctaaacaatggaagtacatgctaagtgcaataggggtatgtagaaaagagtgttcag

SEQ ID NO: 1020409 - DNA, 120 bp, Artificial Sequence
  ENSG00000261319_1 (sequence is synthesized)
attttagggagatttccagaaaaggcctcttcatgctggagatggctttttttaaataatggaagggagttcccaaggcaatggttgagcagtggagtgggagcccaggtaagagtatgc

SEQ ID NO: 1020410 - DNA, 120 bp, Artificial Sequence
  ENSG00000261319_2 (sequence is synthesized)
aggtggtagaaacaaaatattctaagacagacgggcacaaaacagcatggcttatttggggaactacaagtacctctatgttgctgatgcctgatgttctagaggacacatttcaaggca

SEQ ID NO: 1020411 - DNA, 120 bp, Artificial Sequence
  ENSG00000261319_3 (sequence is synthesized)
ggaacaagctgagggcatatctcaacctccccttcctcaggggcactcatccttcatccctttagcagttttactcagcatttgttctaggatgccaggctgtgaggtaagacaggtaag

SEQ ID NO: 1020412 - DNA, 120 bp, Artificial Sequence
  ENSG00000261319_4 (sequence is synthesized)
tgagactcagcctctaccctcagagttcacaatctaatgggaaaactaaattatcataaagatagcattacaaatgcagtgcttgacatatgcctggagcactatgagactgtaggtgag

SEQ ID NO: 1020413 - DNA, 120 bp, Artificial Sequence
  ENSG00000261319_5 (sequence is synthesized)
tgtgtttgaggtcaaggggcagcaggagaagatgcaacagaaaagcacacagcacgagcaaagccacatagctgaaaaacagctatcacctgcaacagcttctgctgctacaatacctgt

SEQ ID NO: 1020414 - DNA, 120 bp, Artificial Sequence
  ENSG00000261319_6 (sequence is synthesized)
actcctcttagattttattccagtatcagccaacaacgtgatctgacaggacagtcccagccctaggaaatgaactatgattcgtgcagaccgatcgaagtcataccatacagcgatgga

SEQ ID NO: 1020415 - DNA, 120 bp, Artificial Sequence
  ENSG00000261319_7 (sequence is synthesized)
tttgggcatgtgggccagttgggatcaagggaaaggaagcatttccattttgatcaatggggggattctgggaaagtcttctgcccgtaaaaagaaacaagccaggaaaaacgtcccctt

SEQ ID NO: 1020416 - DNA, 120 bp, Artificial Sequence
  ENSG00000261319_8 (sequence is synthesized)
cctccctgtagacatggctatgaacggcaggatgcctgaaactgtccaggcttgttatgatggagagacacactgcacagggtgggggaaaggggaaatataccctaagaatggtagacc

SEQ ID NO: 1020417 - DNA, 120 bp, Artificial Sequence
  ENSG00000261319_9 (sequence is synthesized)
agaaagatgtaaagcatctgtatccttgttgaaattatagtgcctcccaattaacatacctagaactgtttacctctggacatttcattatgtgagatattaaagacctgtgtatttgaa

SEQ ID NO: 1020418 - DNA, 120 bp, Artificial Sequence
  ENSG00000261318_0 (sequence is synthesized)
gagggaagactaggatgatacctggacggcagagacagcagtgatccagttccagtcccacttcctcaactgccggctggtggtttccacctgcatgtgctcatctctttactcatgccc

SEQ ID NO: 1020419 - DNA, 120 bp, Artificial Sequence
  ENSG00000261318_1 (sequence is synthesized)
taaggactcaacaccagtgcctgataggatctactgaggatgctgaaactcacttgatagatgttcaagctccccacgccttctccagctggtggtcagtattcttaggtccagcatacc

SEQ ID NO: 1020420 - DNA, 120 bp, Artificial Sequence
  ENSG00000261318_2 (sequence is synthesized)
gcagacccatatctctgggattccaccagctcttctgactatgcctcctgtgttccccactccccgctgtcaggaagcccttccttttgcccactttacatcactcacattgacgtttga

SEQ ID NO: 1020421 - DNA, 120 bp, Artificial Sequence
  ENSG00000261318_3 (sequence is synthesized)
cctccacatggaattccaatgtgcccccgttttgtgaccaggactaggcccccttgacatctacgagctcatgtgtacatggggtaactctgataaagccagcattattatgcttctgct

SEQ ID NO: 1020422 - DNA, 120 bp, Artificial Sequence
  ENSG00000264149_0 (sequence is synthesized)
tgaatataccacacagaaacaaagctccgtgtctgctgtgaaggctttggaggagacagaccatgaccagacacaggccctgtttctgatgctgagaagagaggaactaaataaatcctg

SEQ ID NO: 1020423 - DNA, 120 bp, Artificial Sequence
  ENSG00000264149_1 (sequence is synthesized)
tggtacctgcagcctgaatgcatcgcatctgagttatgggcaaaggcagcactgcctgatggcctccttcccatgtcatctcctcaccgatgatctgttacaggtctggtcttccatttt

SEQ ID NO: 1020424 - DNA, 120 bp, Artificial Sequence
  ENSG00000264149_2 (sequence is synthesized)
caaataaggtctatcatttttttgtccttaataagataaaaatgaatttatcgagttttattataagggaaaaactatttgccaaatgattattcttcaataaataatttatctgagaaa

SEQ ID NO: 1020425 - DNA, 120 bp, Artificial Sequence
  ENSG00000269124_0 (sequence is synthesized)
gttctccccagaacctggaaacacagatatgacccccccaaccctcctcacccctgattccccaaaataaagccaagagaggcagagaaagggataatgaggtaaccaagtattgagaac

SEQ ID NO: 1020426 - DNA, 120 bp, Artificial Sequence
  ENSG00000269124_1 (sequence is synthesized)
ggctgaggtaggcccgaggtgggagtcagggagggtccttggctccagcccagaaagcctgttcaggtgatgtcctattacagaaggcaatggcgcccaggggcttggagggcattttgc

SEQ ID NO: 1020427 - DNA, 120 bp, Artificial Sequence
  ENSG00000269124_2 (sequence is synthesized)
ttgcagaaaataattgcccacatttatttgtctcctataagggtttcatttctgttgactgctttttattctgacagcattttatttttttaagacaaggtctcactctgtcgcccaggc

SEQ ID NO: 1020428 - DNA, 120 bp, Artificial Sequence
  ENSG00000269125_0 (sequence is synthesized)
cctgccacgggaggtcctgtagatccggtgcacgcttctcagaggtcagcaccccgcaggcacactggtctgcatttgcggcagcaacatgagaataaaaatcagcgccttctcagcgaa

SEQ ID NO: 1020429 - DNA, 120 bp, Artificial Sequence
  ENSG00000264491_0 (sequence is synthesized)
ccccctgcggcctggcacagaagttatccacctaactggaaatgcagacttggagaggggcaccaggcccagggcaaggtgggcaggaagccctgggaccagcagagcctgtggaagaga

SEQ ID NO: 1020430 - DNA, 120 bp, Artificial Sequence
  ENSG00000264491_1 (sequence is synthesized)
ctgcccagctgcaggtgaaggggtggcattgcttcccaacagccgcagctcctgccaggcagccctgtccctactgctccctcctccaggctcccatgcctgcccccctcacctatccag

SEQ ID NO: 1020431 - DNA, 120 bp, Artificial Sequence
  ENSG00000264491_2 (sequence is synthesized)
gctgaggagggtaagggctcccggctattgctggccccggggtgctctccagcccttgtgggtttcccttaacctcacccgcacctttgtaaatagtccttccgtaaacatccttcattc

SEQ ID NO: 1020432 - DNA, 120 bp, Artificial Sequence
  ENSG00000264490_0 (sequence is synthesized)
tatttttcacaccagcaggtggacgcagcagtgagtaaatcatctgcatcttttggacgtgaggctgcacgtggcactctgtggataatgcatgcacatctgctcatcgcttcttttttg

SEQ ID NO: 1020433 - DNA, 120 bp, Artificial Sequence
  ENSG00000264490_1 (sequence is synthesized)
caaagtgcgcctgtcacccataaatccatcacatccacggccaaaggctccttcagaacgagccaaattgcagtttcaggtgttgggtcttctctcacagtctctcttgcacgcacactg

SEQ ID NO: 1020434 - DNA, 120 bp, Artificial Sequence
  ENSG00000264490_2 (sequence is synthesized)
gcttgtgcacacagggacctcctgaccgggcccggggcggttgtggatgtgtagggtctttcaggagagcaaagctgacttgaggacagacagcaaagcagtagcagcaaagccccgcag

SEQ ID NO: 1020435 - DNA, 120 bp, Artificial Sequence
  ENSG00000264490_3 (sequence is synthesized)
cccctcggagagttcttttcattcccggaaccaagagtgggaggaaatggcccctaggaagtgtcttattttctcatttgttagacgccgctgtcagcctgggagagcaggcactctctg

SEQ ID NO: 1020436 - DNA, 120 bp, Artificial Sequence
  ENSG00000264490_4 (sequence is synthesized)
ttgtgaatcagcccagttggatgagctcatgctgtgggggctgcagcccgccgcccctgcacccactccattagctgcagggaggtgagctccgcgaggggcgggccagggcgccacatc

SEQ ID NO: 1020437 - DNA, 120 bp, Artificial Sequence
  ENSG00000264490_5 (sequence is synthesized)
agatcactccccttcacggaacccagtctaagtgtgggatggccctgtcatggctcacaccaaataaaactgagtccaggacagcgctgtgagccctcaccacacccttagctggaggcc

SEQ ID NO: 1020438 - DNA, 120 bp, Artificial Sequence
  ENSG00000264490_6 (sequence is synthesized)
acaggtggcggggctcaggtccgaagcccttcagcaaagtcctggtgtggggccttggagaagccaccaatgtctcaagcctgctctcacctcctcatgggagggtcaggtggggccatg

SEQ ID NO: 1020439 - DNA, 120 bp, Artificial Sequence
  ENSG00000264490_7 (sequence is synthesized)
gggagtctgaggcagggggtgccggaggaggccgtgcccttgagatgctgggagagtgctgatctcccgctcctggatgtgtggccgaggcctcctgagtgtgcctgggtcccgcctgcc

SEQ ID NO: 1020440 - DNA, 120 bp, Artificial Sequence
  ENSG00000264490_8 (sequence is synthesized)
tggggccaccgtcagcctccctgatgcttcgaacaccatagctgcctctccttcctcgccgttccctagaggaaagtccttctcaccctgtgcaaggagctcttggtttgggaagagact

SEQ ID NO: 1020441 - DNA, 120 bp, Artificial Sequence
  ENSG00000264490_9 (sequence is synthesized)
ggacaggacccccaatgacagctcagtctgggaaggcagccgatctttctcaggcctgggtacaggtttatgtgggatcctgggcacaacatttaccttctgcacccatgggaaacctgc

SEQ ID NO: 1020442 - DNA, 120 bp, Artificial Sequence
  ENSG00000264490_10 (sequence is synthesized)
ccaggaagcatggcccacaccaggcagagtgcacacaccatttttattaagcagagtggcgagagcgcagtggctgtgaggtccttccaggaccccgcttgtggacagctcccagcagct

SEQ ID NO: 1020443 - DNA, 120 bp, Artificial Sequence
  ENSG00000264490_11 (sequence is synthesized)
gcagctcactcccagccccagctgactcccagaccctcagtgagccctgggctggatcaaagtacagggacgatcctgtgggtgcaccccagcatggcaagcttccaggagaccctagac

SEQ ID NO: 1020444 - DNA, 120 bp, Artificial Sequence
  ENSG00000264490_12 (sequence is synthesized)
cccggctgggggtcaggaaggctctcgcctccgtgcttctgagtccataggaattgagtctctggccacacgaggacagaatcagctacatctgaagaacctggagctagaagatgaggg

SEQ ID NO: 1020445 - DNA, 120 bp, Artificial Sequence
  ENSG00000264490_13 (sequence is synthesized)
caattaagtcatgcgcctcggcaagttcattaaaatgttgacttgctaatggtcccgggtgcaatttggaatgagggtgttaacatagagacttggtctattcgggaactccctggtctg

SEQ ID NO: 1020446 - DNA, 120 bp, Artificial Sequence
  ENSG00000264490_14 (sequence is synthesized)
aaaatggagctgccaagcttctaatatgccctccacagactagagctccgacacatgaattattaatgccgcatcatattaattgtattgatatgttaataattaacaacaatatgctaa

SEQ ID NO: 1020447 - DNA, 120 bp, Artificial Sequence
  ENSG00000234663_0 (sequence is synthesized)
atcacatttagaggcctattagagcagatagcagtcagtgagggttttaggagcagaggtgatatacttggtgactaattggataagaagtatgaagaaggaggtggatttttaaacgac

SEQ ID NO: 1020448 - DNA, 120 bp, Artificial Sequence
  ENSG00000234663_1 (sequence is synthesized)
cctaagtcttttagttcaggtaacttgctatatcaatcaagaaaggagttatcactaaggaaaagagtaagagcaggaaaaggagagaactcactactactgtgcctggtcatcaccata

SEQ ID NO: 1020449 - DNA, 120 bp, Artificial Sequence
  ENSG00000234663_2 (sequence is synthesized)
tatgatttcatgattctctgaaaattccaatgaaggagacataataagactaagtgatttgtccaagtttacacagctaaagagaccaggattcaagctcaggaccttttaactgcaaag

SEQ ID NO: 1020450 - DNA, 85 bp, Artificial Sequence
  ENSG00000234663_3 (sequence is synthesized)
agagaccaggattcaagctcaggaccttttaactgcaaagccagtgccattttgttacaacgtcatgaaatccttcctggccggc

SEQ ID NO: 1020451 - DNA, 120 bp, Artificial Sequence
  ENSG00000234663_4 (sequence is synthesized)
tcccttcatttcctgacagcttcccctttctctgatggcttgtttactgctgatatccaggctctgctccaagtggggaaggagtaaccaatcaagttattttcaaataagaccgttttc

SEQ ID NO: 1020452 - DNA, 120 bp, Artificial Sequence
  ENSG00000234663_5 (sequence is synthesized)
ttcctaacagacattcttgtgctggctattaaaatcttaaaaatttaacatcattgcacatacaatgacaaatgacaaatgtaacaaatttatatcttcgtgtgcagagaagaatgtcgg

SEQ ID NO: 1020453 - DNA, 120 bp, Artificial Sequence
  ENSG00000234663_6 (sequence is synthesized)
gaagaatatacactagaatgtttacaactagagagaatgtgccaccttaggctacggagaaaagggagaaaattaattttggctctgcctatgctggacttgaagctttctgtctgtcaa

SEQ ID NO: 1020454 - DNA, 120 bp, Artificial Sequence
  ENSG00000234663_7 (sequence is synthesized)
aaaataaaagaagatggaaggaaggatgtacagaaggaagaaaaaaaaaagaaagaacctgtgactatgaagcaacacccaaagccactgtcagatgtcatggagatgagacctcacaag

SEQ ID NO: 1020455 - DNA, 120 bp, Artificial Sequence
  ENSG00000234663_8 (sequence is synthesized)
aggcaacacccaaagccactgtcagatgtcatggagatgagacctcacaagcctactcaacgtgaagatgatgagaatgaagacctttatgatgatctgcttccacttaaagaatagtat

SEQ ID NO: 1020456 - DNA, 120 bp, Artificial Sequence
  ENSG00000234663_9 (sequence is synthesized)
ttggctgactcctggactatgcaagcacaagaagagatttcagaaggtttggaagagagtctcttctgagaggctgagggctaagaagactgccctgtgcaggaaagatgttggagtgca

SEQ ID NO: 1020457 - DNA, 120 bp, Artificial Sequence
  ENSG00000234663_10 (sequence is synthesized)
agcccatctggaatggagagacctcgatgaaacacataggcaattaattagatcccagaaaggccacactgtgcaagcccatcatgatctgaaggcagcggtggttgctggtggaggatg

SEQ ID NO: 1020458 - DNA, 120 bp, Artificial Sequence
  ENSG00000234663_11 (sequence is synthesized)
tgagctttggaactggagctctttgattcaaagctctgccgcttactcactggataagaccatgatcaagttatttcatctgaaaaattgagttgactgcaggtaactgaaactgcggaa

SEQ ID NO: 1020459 - DNA, 120 bp, Artificial Sequence
  ENSG00000234663_12 (sequence is synthesized)
agtgaaactgcagataagagggaccactgtaaataagtgacatgaatgatactgcaaaggaccatagcctaaccagccaagcaaactggaagtacctttagactcacgctttgccaagct

SEQ ID NO: 1020460 - DNA, 120 bp, Artificial Sequence
  ENSG00000234663_13 (sequence is synthesized)
cagttccagaatcacatgatgaaaagaatgatggaaagaaaatgtttgtgatattaaaattaaggaaattactccaactcagagtttcatcctaaactgagagaccaacatcaaaagaat

SEQ ID NO: 1020461 - DNA, 120 bp, Artificial Sequence
  ENSG00000234663_14 (sequence is synthesized)
cttctcaagtttctgagtgacggcaagaaactagactactgttaccaaggaactttttaaagcaaactgcttttgctgatatgaggagaaagttaattaataagaaaataccttaaatgt

SEQ ID NO: 1020462 - DNA, 120 bp, Artificial Sequence
  ENSG00000234663_15 (sequence is synthesized)
gttttgaagctgttaaaggtgtgtaacaattactctgaatttattatagcaccagttagagacccaggaaaactataaaattgcacatcagggcagagctgagagacgacatctgctttg

SEQ ID NO: 1020463 - DNA, 120 bp, Artificial Sequence
  ENSG00000234663_16 (sequence is synthesized)
aaaaaaaaaaaaaacagaaagggaacaagagaaatagcaagtcatttaacatttggaattcaggactccagactcatctataggaccaaactgctcttgaaatatactagatttccttta

SEQ ID NO: 1020464 - DNA, 120 bp, Artificial Sequence
  ENSG00000234663_17 (sequence is synthesized)
gctccagaggttttgccttcatcaaatgcctgtaacactcttattgtcaaaaggaataagtgatggtgaacactgtgccagataggaggtaccacacacaggttcagcaaaaagcagaag

SEQ ID NO: 1020465 - DNA, 120 bp, Artificial Sequence
  ENSG00000234663_18 (sequence is synthesized)
caagaggtatattttttgttagatcttagttcatccctatgtaacagacatttcagggaagggaggagaaaataacaaagctacctatgagcaaaggtaaatgggattccctatccttgt

SEQ ID NO: 1020466 - DNA, 120 bp, Artificial Sequence
  ENSG00000234663_19 (sequence is synthesized)
ttcccagtttcggtcatggtattgcttatccattattagttatccactgctgggtaacaaattactcccaaacttagcagcttcaaacaacaataaacatgtattatgtcacatagtttg

SEQ ID NO: 1020467 - DNA, 120 bp, Artificial Sequence
  ENSG00000234663_20 (sequence is synthesized)
tttcagaactttgggagtggcttagctgaatggttgtagctccaggtgctttttgtggttgcagtcaagaagtcagcccattcacacagctgcagacaaaaggactcggttccttgcagg

SEQ ID NO: 1020468 - DNA, 120 bp, Artificial Sequence
  ENSG00000234663_21 (sequence is synthesized)
ctgaggcctgattaggcagggggcctgagtgtctcgccacatggacctctccatagggctgcttttcgtggcatggcagctgactcccctcagaacagatgatcaaaagcagcaaaagag

SEQ ID NO: 1020469 - DNA, 120 bp, Artificial Sequence
  ENSG00000234663_22 (sequence is synthesized)
aagcctcacatgacttttgccctagccttgggaatcacactcttccatttctacaaaatcctattggttacatagcagccctatccagtgtgggagggaactgtatacaggcatgaatac

SEQ ID NO: 1020470 - DNA, 120 bp, Artificial Sequence
  ENSG00000234663_23 (sequence is synthesized)
caggagtggaaaaccactagagactggctaccatggtcacttacacaccaacatgaaactttcagcctttccacctcctaccacttatactatatttaatgtttttcctgttatggactt

SEQ ID NO: 1020471 - DNA, 120 bp, Artificial Sequence
  ENSG00000234663_24 (sequence is synthesized)
gtttttcctgttatggactttaaaaaagaggtcatcataagcaataatatccatgaaatcatggatatcatgtgatctttatatttatttttatttttatatattaatttccaaataaaa

SEQ ID NO: 1020472 - DNA, 120 bp, Artificial Sequence
  ENSG00000234663_25 (sequence is synthesized)
agatcccagaaaggccacactgtgcaaacacgcctgtagacacagctttaatcagtcgtgaaatgagatacatggttaatcagtttacaatatgcacaaccctgaggtatcatgaagaaa

SEQ ID NO: 1020473 - DNA, 120 bp, Artificial Sequence
  ENSG00000234663_26 (sequence is synthesized)
tccatatgccctgaagttaccatcctagagacatcatttggagagactacagtgcacagaagtagagaggcccagctgtgcctgtccccaactgatggagtcttctcagtgtcagtcacc

SEQ ID NO: 1020474 - DNA, 120 bp, Artificial Sequence
  ENSG00000234663_27 (sequence is synthesized)
gatattaaaattaaggaaattactccaactcagagctttgaatcttgacagagtgttgcaaagacagaagaaatggtaaagtttcatttccttatttttggcaactggaagacaaattgc

SEQ ID NO: 1020475 - DNA, 120 bp, Artificial Sequence
  ENSG00000234663_28 (sequence is synthesized)
ctacttgttccaaacctggttcactagctatccctcaattcccataagcttccctattattcttccataaagttccttttttgctgtcattactgaagcaatacagaatcacaaaattct

SEQ ID NO: 1020476 - DNA, 120 bp, Artificial Sequence
  ENSG00000234663_29 (sequence is synthesized)
aagtcacctggatgaatctccagagaattatgctgagtgaaaagagccaagcccaaagatgacctactgttcgattccatttatataacgttcgtgaaatgctctgcctatgctggactt

SEQ ID NO: 1020477 - DNA, 120 bp, Artificial Sequence
  ENSG00000234663_30 (sequence is synthesized)
caacagactaactccggatatgacaaactctttataaatacttataagtactgttggctacaatagttctaaagccttaacaaatgatgttgaagcaaaatgaataatgattattcctat

SEQ ID NO: 1020478 - DNA, 120 bp, Artificial Sequence
  ENSG00000234663_31 (sequence is synthesized)
ttaatcaagaggatccttgaaacatatccacctgacagttggaggacaattctatacccctagagatctttcataagtagcatacggatattcatttttgatcaaatttggggaatctct

SEQ ID NO: 1020479 - DNA, 120 bp, Artificial Sequence
  ENSG00000234663_32 (sequence is synthesized)
atttcaataatgaagtttgatgacttttgataaatgtgaactgctgcataaccatcatcacaatggagattcagaacatttccatcatttcagaaagctttctcatgccactttgtagcc

SEQ ID NO: 1020480 - DNA, 120 bp, Artificial Sequence
  ENSG00000234663_33 (sequence is synthesized)
atgtccacagaaaaaagaccatgtgaggagatagcaagaataccctatctgcaagccatggagaggtctcagcagaaaccaaaactgccaacaacttaatcttggacttctatcctctat

SEQ ID NO: 1020481 - DNA, 120 bp, Artificial Sequence
  ENSG00000234663_34 (sequence is synthesized)
catctttagtataaatgcaagaaaggaggaaataatttgggagtaaaagcttctatgaccttttcacgtgaggattttcttgataagccacagcagacaaatctagcattgtgagattgg

SEQ ID NO: 1020482 - DNA, 120 bp, Artificial Sequence
  ENSG00000234663_35 (sequence is synthesized)
gcagataagacagcaaatccttgctaatcctaggtattgctgtctcactaagtcctaaaacaacaaacaacaaacaacaaaacctctatgaggcaacacccaaagccactgtcagatgtc

SEQ ID NO: 1020483 - DNA, 120 bp, Artificial Sequence
  ENSG00000234663_36 (sequence is synthesized)
atggagatgagacctcacaagcccaaaaagaaaacttccatctgttctagcatctgcttactgtggttcaagaatttcttcaatttaacaagtaggtgtgtcaattgtgacatctgggaa

SEQ ID NO: 1020484 - DNA, 120 bp, Artificial Sequence
  ENSG00000234663_37 (sequence is synthesized)
tgtttataaagacacatacacaaaaaggaaaggtgaggagccaagatgtcccactagatgcagccaaggagagcttctccaatggaaagagaccagaccatcaagtagactggcatattc

SEQ ID NO: 1020485 - DNA, 120 bp, Artificial Sequence
  ENSG00000234663_38 (sequence is synthesized)
tgaaaagatctctggaaagaaggcatagagactggacagagggaagtttcaagccctgggctgaaagaggaggaatttgggaaccctgcatgggattgcctagcacaaagacttgttcct

SEQ ID NO: 1020486 - DNA, 120 bp, Artificial Sequence
  ENSG00000234663_39 (sequence is synthesized)
aagggtagatcaacagttactatggaaacatatcactgttttgggtgtgcctactcaacgtgaagatgatgagaatgaagacctttatgatgatctgcttccacttaaagaatagtaggt

SEQ ID NO: 1020487 - DNA, 120 bp, Artificial Sequence
  ENSG00000234663_40 (sequence is synthesized)
cagtggacaattcagtgatgcaaactccatgaaggataaagttcatgcagttcaactatgtaggtttttgttagtccagttctttgatccaaggaagaatttagagcaacttgaaagatg

SEQ ID NO: 1020488 - DNA, 120 bp, Artificial Sequence
  ENSG00000234663_41 (sequence is synthesized)
gttggaatatgcaattatgttatttaacacaacagtttaattggctttctgatgacagctggtggaagaaactgtgagcccatcatctgaggcccatcatgatctgaaggcagcggtggt

SEQ ID NO: 1020489 - DNA, 120 bp, Artificial Sequence
  ENSG00000234663_42 (sequence is synthesized)
aagccactgtcagatgtcatggagatgagacctcacaagcctactcaacgtgaagatgatgagaatgaagacctttatgatgatctgcttccacttaaagaataaccctgaaacaagatg

SEQ ID NO: 1020490 - DNA, 120 bp, Artificial Sequence
  ENSG00000234663_43 (sequence is synthesized)
atgtgatgcagcagagacttgaagatgcactgcagagactagatttattcttttctgctgcagcaattgccatgaagttgcagtcccagcctagcctgctggccccaggatgagggtgag

SEQ ID NO: 1020491 - DNA, 120 bp, Artificial Sequence
  ENSG00000234663_44 (sequence is synthesized)
cacaacattaattagcaaatgaagaaggtcctgagaaagaggctgcgaaagaaaacctactcaacgtgaagatgatgagaatgaagacctttatgatgatctgcttccacttaaagaata

SEQ ID NO: 1020492 - DNA, 120 bp, Artificial Sequence
  ENSG00000234663_45 (sequence is synthesized)
aagctcaagctgttcttgcttgagggagatctttataagctcagtgtaagtcaggaggcatttgtttcacatgccatcctcacttacactaaattccctagaagtccaaggtaatagtac

SEQ ID NO: 1020493 - DNA, 120 bp, Artificial Sequence
  ENSG00000234663_46 (sequence is synthesized)
ttggggataggctacaatgctacaacaaagccatttgctatggtggttataactgtcacttgccagccatcgtttgtaattacttaaaacagaaacagtttaaagaattaaaccagaagg

SEQ ID NO: 1020494 - DNA, 120 bp, Artificial Sequence
  ENSG00000234663_47 (sequence is synthesized)
gtaaagcagattgttctcaggacgtaaaactaaactcaccttattatgtattgttacactcctgtccactttcattaccaaaggcaataaagcaattttaactgttccctggaatgtcac

SEQ ID NO: 1020495 - DNA, 120 bp, Artificial Sequence
  ENSG00000234663_48 (sequence is synthesized)
cagcaataagtggttttgttttactgttctgttgagccgaatataatagttatattttagatctcttgcaactggggaatctagaaatgctttctggtctttgtgaatttattaaaatat

SEQ ID NO: 1020496 - DNA, 120 bp, Artificial Sequence
  ENSG00000234663_49 (sequence is synthesized)
ttgatttgggtaaccttggtgttactttaagtatagtcagggaaatcatgtcataatcactgagtttcattagcgactggccctttttaatcataaaattcagtgttctgaaacctattg

SEQ ID NO: 1020497 - DNA, 120 bp, Artificial Sequence
  ENSG00000234663_50 (sequence is synthesized)
cctgttctgtcctacacttgtgactttgtctcttctcttgattgtacagccatgagccctcattatgctttcctgagggtgttgtatttactggtgtccttcattgccaaaggtgacaag

SEQ ID NO: 1020498 - DNA, 120 bp, Artificial Sequence
  ENSG00000234663_51 (sequence is synthesized)
gcagggaatgtaagagtacagctggcgggaagaatctctattccgagtacacggagcatgtcccatacttcagcctgcagagcccgtgactactagcagggtcaaaattgtgtcatttag

SEQ ID NO: 1020499 - DNA, 87 bp, Artificial Sequence
  ENSG00000234663_52 (sequence is synthesized)
agcccgtgactactagcagggtcaaaattgtgtcatttaggctgggcgcagtggcttgcacctgtaatcctggcactttgggaggca

SEQ ID NO: 1020500 - DNA, 90 bp, Artificial Sequence
  ENSG00000234663_53 (sequence is synthesized)
acacacacacacacacacacacacaactagccaggcgtggtagcacatgtctgtgatcccagctatgcaggaggctgaggcatgagaatc

SEQ ID NO: 1020501 - DNA, 120 bp, Artificial Sequence
  ENSG00000234663_54 (sequence is synthesized)
gaggttgcagtgagccaagatcacgccacgacactatagcctgggtgacagagctagatgatttctcaaaaaaaaaaaaaaaaaaaaaaagtcattttaccatatgcctgtcaggtttac

SEQ ID NO: 1020502 - DNA, 120 bp, Artificial Sequence
  ENSG00000234663_55 (sequence is synthesized)
tgcctgtcaggtttacattttttacttcatttgataagacaatgatttattttatttaaattctaaattcatatctgaattaaaataactattatattgttaagtaggttttcttcatca

SEQ ID NO: 1020503 - DNA, 120 bp, Artificial Sequence
  ENSG00000234663_56 (sequence is synthesized)
ttttcagaaaactggagaaagtgtagggagctccaaagcagtacatacacttaccacaccaatgccattattttccagagtacttcttcctccttcacccagtttctttattatgaaatt

SEQ ID NO: 1020504 - DNA, 120 bp, Artificial Sequence
  ENSG00000234663_57 (sequence is synthesized)
taacttccaagaataaaggtttttccacttacaactaatatgccctattctgcttcatgaagagtagagggagaaatagcacccaggactattctggagacattaatacctgatctctgt

SEQ ID NO: 1020505 - DNA, 120 bp, Artificial Sequence
  ENSG00000234663_58 (sequence is synthesized)
tgcactgtttgtgatttgggcatattttaaggtaatttatacagttattatttccctcttttttgacatccaggtaagaagtgcaatgaatcttcatgatcaaaaactcattaaaactaa

SEQ ID NO: 1020506 - DNA, 120 bp, Artificial Sequence
  ENSG00000234663_59 (sequence is synthesized)
ataaaataaaaataaatgtacttaagtctataaataatcatagtgctttgtagttaaggaagttaagtagttaagaaaaaagagtccaggcggggtgcagtagctcacgcctgtaatccc

SEQ ID NO: 1020507 - DNA, 120 bp, Artificial Sequence
  ENSG00000234663_60 (sequence is synthesized)
aagactccatctcaaaaaaagaaagaaaaaagaaaaagtgcaattagagctggagttaaaagtggggagtcatggtcaggagttgttcttcatgtctctcaaacaccatgtgttttctac

SEQ ID NO: 1020508 - DNA, 120 bp, Artificial Sequence
  ENSG00000234663_61 (sequence is synthesized)
catccttgtttctccctttgcatctccactctccagtgactttctctgcttcccactggacccccacttttacaatacataactatttcaatgccagccattatctaacatttctcggta

SEQ ID NO: 1020509 - DNA, 120 bp, Artificial Sequence
  ENSG00000234663_62 (sequence is synthesized)
tgtctccgttcaaattagagaaagaaagaggtctgaatgttatttatactttctccatagagattctaaggaagacaatattaatgacagttctttgtttactgaatgggacgaggaatg

SEQ ID NO: 1020510 - DNA, 120 bp, Artificial Sequence
  ENSG00000234663_63 (sequence is synthesized)
tgccaataaaagattatataagaaatgagatttaaaatttttcagggagaaggaaaagttaagagaaagatgaatcatcttgagagacaataagacaatttgatgagttgctggaaatga

SEQ ID NO: 1020511 - DNA, 120 bp, Artificial Sequence
  ENSG00000234663_64 (sequence is synthesized)
tacagtgtttaaatgagaacttctgttacatgtttttgtatattgtgtgatagaattctcttttgtttcctcatcgaaccttctgtaatatctcttttggctaacctttgtgaggccaag

SEQ ID NO: 1020512 - DNA, 120 bp, Artificial Sequence
  ENSG00000234663_65 (sequence is synthesized)
attgccttctgtgcctgtgattaagaagtgttaagtccaggtatagcttgagaaagcacagagaccacactcagtaatgtagtcacacctatggaatagaaaaacacccagactctttag

SEQ ID NO: 1020513 - DNA, 120 bp, Artificial Sequence
  ENSG00000234663_66 (sequence is synthesized)
tttcctaaactaacagcattactgttagttttgcagcattactgacaagaaatcattctctcataccccaaatccagccaagatgagctcgtttctataggccccttgtttttacatatt

SEQ ID NO: 1020514 - DNA, 120 bp, Artificial Sequence
  ENSG00000234663_67 (sequence is synthesized)
tctgtgcctttgctcatgttattctacctcctcatcaaaaaccatttcagcaattgtggaaactactctgcatcaacacccaacccaaatgctactctttgtagctaaaattaacctctc

SEQ ID NO: 1020515 - DNA, 120 bp, Artificial Sequence
  ENSG00000234663_68 (sequence is synthesized)
cttctcaactctcatagcacttggtttggtactcatataatacctctatcacatttgccttgcattaaacttaatgattgtatgcttcatatatcctatcagaatataagcaacatctta

SEQ ID NO: 1020516 - DNA, 120 bp, Artificial Sequence
  ENSG00000234663_69 (sequence is synthesized)
tatacctcagattctccaaagaagccaggctcagtgcatgacatatatgaacactcagtaaatgtttcttgaattaaatgaaaaggtcagtaactcagttcgctgtgtctttttttccag

SEQ ID NO: 1020517 - DNA, 120 bp, Artificial Sequence
  ENSG00000234663_70 (sequence is synthesized)
atttttacagtacaacagtagaaaatagtaagctaaaacatgtacacttaaataaatgcattttcataatgaagacattttggcttcttactggtaaataatgagctttcctctacctgc

SEQ ID NO: 1020518 - DNA, 120 bp, Artificial Sequence
  ENSG00000234663_71 (sequence is synthesized)
catgtagtctgttctgaagataaatagaagtatgaatatgcaaacactttgggaagagaaaacatgctacataaataagagagtgtttattgctgtaactactacatggagtccatcctc

SEQ ID NO: 1020519 - DNA, 120 bp, Artificial Sequence
  ENSG00000234663_72 (sequence is synthesized)
ataactcagtgtttctctgtattatagggaatcatgatagcttaggataatctgaagtccccgagtgaatgctcctcaaattgtgaactgtggaccagtaccagtctgagaactgttact

SEQ ID NO: 1020520 - DNA, 120 bp, Artificial Sequence
  ENSG00000234663_73 (sequence is synthesized)
agtctatacggagataagtataaacattgggactaagcatttaaaaatttgtatagcaatttgatagaatgactgctgaatttaataataaatatgtgactatatccatatgcctttctc

SEQ ID NO: 1020521 - DNA, 120 bp, Artificial Sequence
  ENSG00000234663_74 (sequence is synthesized)
tttgccagcaatagattttcattgattatataatacagttgatacacaacagattgccagcaaaaataaaacaacatcaaaaaacctggtacttcaatatagataggttgagaaccaatg

SEQ ID NO: 1020522 - DNA, 120 bp, Artificial Sequence
  ENSG00000234663_75 (sequence is synthesized)
ttatagataattctctccagaatggaagatacccacattatgaacatggaagttctggggaaaagaaggaacataaatttgtagatattgtgggttataaaatactagtttcaacaaagg

SEQ ID NO: 1020523 - DNA, 120 bp, Artificial Sequence
  ENSG00000234663_76 (sequence is synthesized)
ttaatataaaagaacaagagagtgaatggtaatgagaataaagcataatgtgacagtctgattcataatattcattttgatcatctttttaaagctttttgtacatctttaacaatcttc

SEQ ID NO: 1020524 - DNA, 120 bp, Artificial Sequence
  ENSG00000234663_77 (sequence is synthesized)
tgcaggctcctctctctaggaactgaacttacatctggaactttcagagaaactaacattcttttctgttgttaagtgaatgtgggggttttgttggcttgaagaaaacaactatgcacc

SEQ ID NO: 1020525 - DNA, 120 bp, Artificial Sequence
  ENSG00000234663_78 (sequence is synthesized)
catttaattgatattaacagtaattccccagtcatctataaattttctctgtgaaaaagtccttcaggaagccaataaattattgtctttaaaatacaattgagctttagtaatcctttg

SEQ ID NO: 1020526 - DNA, 120 bp, Artificial Sequence
  ENSG00000234663_79 (sequence is synthesized)
cttttttgccagtttaacattgaccttttatgaaagttttcttaagttgggtcgagatgacatttggagcaaacaatatgtggtcttcttattgtcagaacattttgtttttccagatta

SEQ ID NO: 1020527 - DNA, 120 bp, Artificial Sequence
  ENSG00000234663_80 (sequence is synthesized)
ccaagataacatatttcacgggggtttagaatatgttctatagatttctcaaactactgaaaatgataatttgcaagtatattaaaatttaacatttatgaatcatattacaaatgttga

SEQ ID NO: 1020528 - DNA, 120 bp, Artificial Sequence
  ENSG00000234663_81 (sequence is synthesized)
cttgagaaatcttggtttcattacttagatcacaaaattggaggacgaggactgaattagacatcaagctttgtgctgtgccttctgtggtagtattgctcaaaaaagattcttcatgta

SEQ ID NO: 1020529 - DNA, 120 bp, Artificial Sequence
  ENSG00000234663_82 (sequence is synthesized)
ggggaggtagagttcccaacaatgcatccatttagacaaaacagcggggtgtgctgggggtgggggttgttgagccatttataaaatacctttaactttgctatatttcatttgtgtttt

SEQ ID NO: 1020530 - DNA, 120 bp, Artificial Sequence
  ENSG00000234663_83 (sequence is synthesized)
acttccttttgctgctaggcaaatctggccccctgctgcacaggtcccatgtgaactgaaattgggaaactaagaagccctgtgtgatgggtttctggggctcacacaccatctctactt

SEQ ID NO: 1020531 - DNA, 120 bp, Artificial Sequence
  ENSG00000234663_84 (sequence is synthesized)
ttctccttctacctttcaggctctgattatcttcactcatttcacaaagtagcccatttttcttcagcagtctttaaaaaggggaattgggatgttttatgtagataataatactccaat

SEQ ID NO: 1020532 - DNA, 120 bp, Artificial Sequence
  ENSG00000234663_85 (sequence is synthesized)
aaagagaaaatcagtttcctgctgaccaaattgcttcctctatatattaatatccaaatctgctctaaagcatgtgcatttaaagttacttcttatataactgtttgtgggggagagagt

SEQ ID NO: 1020533 - DNA, 120 bp, Artificial Sequence
  ENSG00000234663_86 (sequence is synthesized)
aaagaaagtctaaattacacccactaaaagttctgaaagttttaacttttgaaattctttagttcagtaagcacagatttaaatccaaaaagacaatcattgtgaaaatgagatgacttc

SEQ ID NO: 1020534 - DNA, 120 bp, Artificial Sequence
  ENSG00000234663_87 (sequence is synthesized)
ttgatttttgaccttatctttgcctcttgaccttgctatcttaggaattcttgatggcctttttctgaatctttttccaatctaactttaagactctgttcccaaagcatgctgtaggcg

SEQ ID NO: 1020535 - DNA, 120 bp, Artificial Sequence
  ENSG00000234663_88 (sequence is synthesized)
taacacattttcttcaggcatgagtttagctgcagctgctccaggacacaccccctgcagactcttgacttcccaatccatcagaccatccatccctcaacaggcctcccattctcctgc

SEQ ID NO: 1020536 - DNA, 120 bp, Artificial Sequence
  ENSG00000234663_89 (sequence is synthesized)
ctctgccttccctctcaatgtgatcagatccatcacatctgatcctaagctgctttaggtatgttgttttgatctccatttgccttcttccctgttcttattgacaacgcaggcttccta

SEQ ID NO: 1020537 - DNA, 120 bp, Artificial Sequence
  ENSG00000234663_90 (sequence is synthesized)
aacacatagtagctagctccatctccatcatcactcagttaccccttttcttttaaattcatcttcactcccaaacccaattctgacctcaagtgctcaagaggaaaatccagacatctt

SEQ ID NO: 1020538 - DNA, 120 bp, Artificial Sequence
  ENSG00000234663_91 (sequence is synthesized)
gggatatgatcagccatcttaatcatgaaattgagagtgagggtgatttcaacagtggccaacctttctctggctccaccctatagttctcttttacccttagttaaattgtgagcccta

SEQ ID NO: 1020539 - DNA, 120 bp, Artificial Sequence
  ENSG00000234663_92 (sequence is synthesized)
ttttgcggaatgtacttgtatcaatgacattattttacctatacctgaccatttactagaacttaaataatctcagtaactcatgctccaatggaagcaggaagagagtcaggcaagctt

SEQ ID NO: 1020540 - DNA, 120 bp, Artificial Sequence
  ENSG00000234663_93 (sequence is synthesized)
gatgtgtcttgttgtttggtgacaaggttcttgacagtatacctctatcatctatgcttatctactcttgattgtttaaaaagctgccaacttagaaacctaaaatgcaattttccattg

SEQ ID NO: 1020541 - DNA, 120 bp, Artificial Sequence
  ENSG00000234663_94 (sequence is synthesized)
tgcttactactttccaccctctcaggctgatgtctatgccttgccctgaactgccctccacctgcggcatcctatgtgagcatttcacttggcaccagcagcagatgctttctatggcaa

SEQ ID NO: 1020542 - DNA, 120 bp, Artificial Sequence
  ENSG00000234663_95 (sequence is synthesized)
atcagctgtgaaagctcatcagcctagacttttcacccgagtccatttaaacttgaatgtataagatgtgacagacataactaggcgtatctttccaatttaccgtcttagccttatgct

SEQ ID NO: 1020543 - DNA, 120 bp, Artificial Sequence
  ENSG00000234663_96 (sequence is synthesized)
tggaacaagcaagaagatttggtctgttcctcaggtattaggaagaataccaaaagcttcctgtcatgaataacactcctttctacactaatccttcaaatctcagtgaatttcttgaga

SEQ ID NO: 1020544 - DNA, 120 bp, Artificial Sequence
  ENSG00000234663_97 (sequence is synthesized)
acaaatagaattgacctctccagagactgacttctctctcattgggttacaatataacaaatttcatctttttgaagtgagcaatctgtcagtttcaacacataatttctctttttcccc

SEQ ID NO: 1020545 - DNA, 120 bp, Artificial Sequence
  ENSG00000234663_98 (sequence is synthesized)
atatttacatctggagccaaaactgattcttttcacttgccagcaactctcagaagaattaagatggttttgtttatacctatgtatctttctgtctatctatatacctatttacccatc

SEQ ID NO: 1020546 - DNA, 120 bp, Artificial Sequence
  ENSG00000234663_99 (sequence is synthesized)
tattatttaatatggtccctaccttagtctctggtctaggtgactgtcttttgaatgatctcatgtactctctcttctactcacctatccattggtttcttctttctttccaccttatgg

SEQ ID NO: 1020547 - DNA, 120 bp, Artificial Sequence
  ENSG00000234663_100 (sequence is synthesized)
ctcctgttccgctggctttcaccaggctaagactgttttgctttgcagttccctcccttttctgtctgctgctctgctcctagactaacacaatcctatcgaaccttttgcttattatca

SEQ ID NO: 1020548 - DNA, 120 bp, Artificial Sequence
  ENSG00000234663_101 (sequence is synthesized)
tactaccatgtgtgagcttcatttctgtggaatgctatctctgagatgctagtcctctacacctgtacagatcacaactgtcgaagaaaacaaaagctagatcctgtccactgttgtact

SEQ ID NO: 1020549 - DNA, 120 bp, Artificial Sequence
  ENSG00000234663_102 (sequence is synthesized)
cctggtagatgtacttgggaaagccacttcagtgcaatcccaagaattgccgatgctgatatttacattgtagatacacaatgtggtccatgttctaagtgttccatacatatgcactca

SEQ ID NO: 1020550 - DNA, 120 bp, Artificial Sequence
  ENSG00000234663_103 (sequence is synthesized)
ttagatccttagcaacccaaggaggtttggagcatcatcgttcgcattcacaggtaagagattgagtcaaagaaggataagtgacatgctggtcacacaacttgtcagtgagaaccaggt

SEQ ID NO: 1020551 - DNA, 120 bp, Artificial Sequence
  ENSG00000234663_104 (sequence is synthesized)
ttgagccagggagtttggttccagagctcatgctattaaccacgatgctccaaatagtgtttcaacatctaatacttctgctttccatctcttctcttggcttcgtgaggttctcctaca

SEQ ID NO: 1020552 - DNA, 120 bp, Artificial Sequence
  ENSG00000234663_105 (sequence is synthesized)
gtcccaggctccttttcagccacatcctgacaaactaaaaggaaatgaagattccttcttgaaccttgaaatctcatgatttcctctctgcacaccacatcttcatttctttgtgcaaac

SEQ ID NO: 1020553 - DNA, 120 bp, Artificial Sequence
  ENSG00000234663_106 (sequence is synthesized)
tgaactcagttcctttatcttgatggccttactcatgactcactttaccaaatatagatagacatttgtaatcctcttacaaatgacatttcccgtcaggaagggcagcaccagagacag

SEQ ID NO: 1020554 - DNA, 120 bp, Artificial Sequence
  ENSG00000234663_107 (sequence is synthesized)
catagctcctctaaggatgtgcacagcctcaactcagctcccagctcttgagattgtagaatgaaagtctttattttcctgtttatattacttgatgaccattacagagtttaagtcatt

SEQ ID NO: 1020555 - DNA, 120 bp, Artificial Sequence
  ENSG00000234663_108 (sequence is synthesized)
gtaaagcacagacaattatttgtaatctgttaccttctcaatgagggatgaaaaccaaccacataataaggcaggcttttaatcagaacagctggtgtgatgtcaaaggaaggagcactg

SEQ ID NO: 1020556 - DNA, 120 bp, Artificial Sequence
  ENSG00000234663_109 (sequence is synthesized)
gctcacacactcacaagatgaggtcccacagtaggtctttgcaagctgaagagcaaggaaattctgagtcccaaagctgaagaaactgggagtctgatgtttgaggccaggaagcatcca

SEQ ID NO: 1020557 - DNA, 77 bp, Artificial Sequence
  ENSG00000234663_110 (sequence is synthesized)
agcatccagcactcacgttcttctgcctgcctttatttggctgtgctaacagctgattagatggtgcccacccagat

SEQ ID NO: 1020558 - DNA, 120 bp, Artificial Sequence
  ENSG00000234663_111 (sequence is synthesized)
ccatcacatcttctgtgcttgacacatagtggaccttcaatagatgtttcatgaatggcaatggttgtctcagctgatttataacataaagttaatgagaccaagttcatattcatttga

SEQ ID NO: 1020559 - DNA, 120 bp, Artificial Sequence
  ENSG00000234663_112 (sequence is synthesized)
ctgaacatacttcttttggaaccaaaacacactgtatctttattttcagccagaaactcaccatatactgtatccttattgccatcacccaagttactcattagccacaaaagaaaatga

SEQ ID NO: 1020560 - DNA, 120 bp, Artificial Sequence
  ENSG00000234663_113 (sequence is synthesized)
gccagagaatgcttccaatttaatataacgtacagaacttttcaacaaaggctgataatgtcactttcatataccaagagcagcataagtatataaatagatagattgatttaagtagat

SEQ ID NO: 1020561 - DNA, 120 bp, Artificial Sequence
  ENSG00000234663_114 (sequence is synthesized)
acatacatacgtgtaaatatacacatatacacacaatgcatatatgtgtgtgcatatatataaaatatagtgtatgtgtttaaactgaaaagatgtgtgaatcgatgttatcattatgtg

SEQ ID NO: 1020562 - DNA, 120 bp, Artificial Sequence
  ENSG00000234663_115 (sequence is synthesized)
tataatagattgttataattgcaaggggaaaacagttaattgctcattatcacaggcctgacacacattgaagttttagtgtgtattcgaatgatcccactgaatagttaatacatttaa

SEQ ID NO: 1020563 - DNA, 120 bp, Artificial Sequence
  ENSG00000234663_116 (sequence is synthesized)
agcaaataaaaataaaaggcttttaaaaaattgtgttaaagctctttacacaacaacttttattccactttctgtcaaagcttatgtgtttccaagggagtacagtaattgtgcattttc

SEQ ID NO: 1020564 - DNA, 120 bp, Artificial Sequence
  ENSG00000234663_117 (sequence is synthesized)
tatttttaaatcattcattgttctagttaaatattatgaatgtatgccaattcttaaaagagccatgcagagatagtaggtataattgtgttgtactcaaaataaattcatggttaaagc

SEQ ID NO: 1020565 - DNA, 120 bp, Artificial Sequence
  ENSG00000234663_118 (sequence is synthesized)
aaatatttaacaactgccaaatactggattgcatgtagaaaacgaatcctgtatagctctggtaaattaaagcttcaatccaaaccttccttctgtgctttataattagaaaaccaaatg

SEQ ID NO: 1020566 - DNA, 120 bp, Artificial Sequence
  ENSG00000234663_119 (sequence is synthesized)
aggaacttctctgggcagcctggtttaaaaagcccacctgttttctgtttttgaaaatatattttttcaagttaatatgtttaaataaaggattcagatgactcaaaaaaaaaaaactgg

SEQ ID NO: 1020567 - DNA, 120 bp, Artificial Sequence
  ENSG00000234663_120 (sequence is synthesized)
aactgaattgtagactaaagaataccttctcgtatttaaattactatgtatattgtggtatgctgcaatatgttaactggcttataagacattaattacaaataaaatgcactgaaaaag

SEQ ID NO: 1020568 - DNA, 120 bp, Artificial Sequence
  ENSG00000234663_121 (sequence is synthesized)
gggattaaatttccaacacatgaactttgtggggctcaatcaaaccatagcaatagggtatggggaacatcccagtcccaaaatacattctcttcgtgacctagaggcccatcatgatct

SEQ ID NO: 1020569 - DNA, 87 bp, Artificial Sequence
  ENSG00000234661_0 (sequence is synthesized)
cccgggttcaagatatttttatgttcaaagatggggacaaacaaatattttgttagaaacctgatgtgagaacctgcatacctgctg

SEQ ID NO: 1020570 - DNA, 120 bp, Artificial Sequence
  ENSG00000234661_1 (sequence is synthesized)
ttttgttagaaacctgatgtgagaacctgcatacctgctggtggtgtttcatgatggtctgacggctggctaggctgacttctccctacttcgttcacggctatgaccctgaactggtat

SEQ ID NO: 1020571 - DNA, 120 bp, Artificial Sequence
  ENSG00000234661_2 (sequence is synthesized)
ctcacaaatggagccaaaggtggaagtgagaagcaggctgggatatggacacgacagaagaaacaaaaatgctccttattaataccgaagatcctttccattttgtgttttcttgaagat

SEQ ID NO: 1020572 - DNA, 120 bp, Artificial Sequence
  ENSG00000234661_3 (sequence is synthesized)
gaagtgagaaggaataatacaaagctgtttatgactcaaaaagaggatcaaaaaccctcctcattctgtcatgcctcagtcattataaagttatgagtttgtgaaatctttagctcaaaa

SEQ ID NO: 1020573 - DNA, 120 bp, Artificial Sequence
  ENSG00000234661_4 (sequence is synthesized)
acttgattactgttaccattaccttgagttagctttggaaataaaatatagttacagaaatatggtgtagtatggttaataggtaatttttaaatattgacagccatctgtcactacaga

SEQ ID NO: 1020574 - DNA, 120 bp, Artificial Sequence
  ENSG00000234661_5 (sequence is synthesized)
cacctggctgcctcttaaaataggatgaagctgtgcacatatcatgggcataccctgtagttcttgcaataatcttttagatgaaacccattctaggaattttgaaaaacggttcaaaga

SEQ ID NO: 1020575 - DNA, 120 bp, Artificial Sequence
  ENSG00000234661_6 (sequence is synthesized)
actttatctggtactccaacttaaatggtattattccatttgggcaaatgaagacagactgaacccatgtgacaattcatgcaaagtaacagtgaaataaaaatacttctaatatccaaa

SEQ ID NO: 1020576 - DNA, 120 bp, Artificial Sequence
  ENSG00000234661_7 (sequence is synthesized)
ggagcaggaccaagatagcgaactagaaacagctgtgttcggaggctcccatggaaaagaactatagtaagtgtgtgaatccttccctggcaaccaaggtatccaggtttctcttagaag

SEQ ID NO: 1020577 - DNA, 120 bp, Artificial Sequence
  ENSG00000234660_0 (sequence is synthesized)
tacaagatttgagaaaacactggagatgcctatactcttcctgcattttcagtgacctcactgactggaaactgggcacctcgttccttctcacaagtgtcataatacaccatgaggtgg

SEQ ID NO: 1020578 - DNA, 120 bp, Artificial Sequence
  ENSG00000234660_1 (sequence is synthesized)
ttgggtcccatttccagaacaaccagagtgacgtctgaacaatgctctctaaacaagatcttcatgtctgctcccaaagagggttgctacattcttagcttccctcaatttaattctttt

SEQ ID NO: 1020579 - DNA, 120 bp, Artificial Sequence
  ENSG00000234660_2 (sequence is synthesized)
atgataaaaagaagtaaggaggcttagcagaggtgcttgaagaaggcctccacctaaagcctcagagaaagacacctaggaatgaaggtgcctgggcttggaatgcaaatggcggaagaa

SEQ ID NO: 1020580 - DNA, 120 bp, Artificial Sequence
  ENSG00000234660_3 (sequence is synthesized)
cttgatggaccggagcagcctggcctgagtccttttctgccattccccttggacactgccatcctctggatgggcgtcaagcctgctgtggaaagggcagcttccacttcgaggcctgtc

SEQ ID NO: 1020581 - DNA, 120 bp, Artificial Sequence
  ENSG00000234660_4 (sequence is synthesized)
aaccttttgtaatcatttgtggtcacacctggaaaatagtaagtaggtttttaaccaggagttggactcctcacaccaatactgtttaaaaaaatgataatttaagtttcacacatgttt

SEQ ID NO: 1020582 - DNA, 120 bp, Artificial Sequence
  ENSG00000234660_5 (sequence is synthesized)
cttttgagtagcctgtgagaaaggaaattataaatgtttaaaataaagtgagcataactttgggaataatcaagatcgagtttgaagaattatcggccttggttgttaattgatacaaga

SEQ ID NO: 1020583 - DNA, 120 bp, Artificial Sequence
  ENSG00000234660_6 (sequence is synthesized)
aagaaagagagtaatcactcaaaagaatgagtagcgtgaaaagaacaacatcaaatatttgaagttcaaaactattcagaaaatatttggaaggagagaggacattcagaagatagagaa

SEQ ID NO: 1020584 - DNA, 120 bp, Artificial Sequence
  ENSG00000234660_7 (sequence is synthesized)
gatgaaatgaagatgtttaggtttagacacaggggtaccttgtcacaatagaacatgagtaggtaattttgaagaaaaatctacaggaataaacagagagaaagaacaggcagctgtatt

SEQ ID NO: 1020585 - DNA, 120 bp, Artificial Sequence
  ENSG00000234660_8 (sequence is synthesized)
cataagcaaataaagtaaaaatgataaaatactacagcattctcaaatactacaaactcttctatgagtctgtacaaattgaaaaaaaagataaggttctatccaaatagtaaatagatc

SEQ ID NO: 1020586 - DNA, 120 bp, Artificial Sequence
  ENSG00000234660_9 (sequence is synthesized)
ttcaatcctcttggaaacaattgatttggaagtggtctgtggtctaaagattttgacaaaattttaggagcaagtaaagatgatataaatatataaagagacagaacagaagggagatag

SEQ ID NO: 1020587 - DNA, 120 bp, Artificial Sequence
  ENSG00000234660_10 (sequence is synthesized)
acatggagaaattatacaagtgattcttcccaggaaattcttcagaaatgtccaaagaaaaaattatggacttacaaatctgactgtgcgatgactgcaaaatcctcctttatcttcctc

SEQ ID NO: 1020588 - DNA, 120 bp, Artificial Sequence
  ENSG00000234660_11 (sequence is synthesized)
acacacacacacacacacacacaccctgagatttgcatcatttgtctttaggctaaaataagggaaaacatttcaaaatgatttaccgatttttttaaatgatgggcacagtaaccataa

SEQ ID NO: 1020589 - DNA, 120 bp, Artificial Sequence
  ENSG00000234660_12 (sequence is synthesized)
ttttaaatgatgggcacagtaaccataattaagtcttccgtatttggcattggaatgaaggtaacgggatcaaacccttctatttacttctccttactcatccaaagatgcagtcaacca

SEQ ID NO: 1020590 - DNA, 120 bp, Artificial Sequence
  ENSG00000234665_0 (sequence is synthesized)
aggaagccagctggaaatacaacaaaacgcctctcccgctcctttagcaaaacatgtgtcagagcaacgcaagatttgattgggactgctttacttcgttaacaattacatctgttcgtg

SEQ ID NO: 1020591 - DNA, 120 bp, Artificial Sequence
  ENSG00000234665_1 (sequence is synthesized)
acatttggtattcctaatatgcccacttggaggaaattgccagcttaggccaaccagggtgaaatgcatgcgcttataaactcataagcccaataataattttcagaaggaggcactcat

SEQ ID NO: 1020592 - DNA, 120 bp, Artificial Sequence
  ENSG00000234665_2 (sequence is synthesized)
tcacttcggcttataaacttgcaaatctgtagattcattagtctatcacttacatggaaagacaaaatttatatttaattgttgagacttgacttcaaaattttcaagaatatcaacatt

SEQ ID NO: 1020593 - DNA, 120 bp, Artificial Sequence
  ENSG00000234665_3 (sequence is synthesized)
tgtttttgttgtgcacctctctgtcaaaagtatcagccttttgccaagctgaacacaaggggatgaaaagaaaatctgggctcgaatgtgcaatttcatattttctgttaaggcaattta

SEQ ID NO: 1020594 - DNA, 120 bp, Artificial Sequence
  ENSG00000234665_4 (sequence is synthesized)
tacgaagaccaaggcacttttcggagcagatttttttgtcttaaagttttatctcatgcaaacactgcgtataacacaaacttatataatcaatgcttttagcaaaatgtcatagtagaa

SEQ ID NO: 1020595 - DNA, 120 bp, Artificial Sequence
  ENSG00000234665_5 (sequence is synthesized)
ccaaggcccagttgttagctgaaatctatataaatataggcaggagtagggctgattggagccattgtacagtgtcgggaacataccaggacactgagaatagtgtcatgtcataaggac

SEQ ID NO: 1020596 - DNA, 120 bp, Artificial Sequence
  ENSG00000234665_6 (sequence is synthesized)
ccagagcagatggaccctgctgtgatgcacaaaggtgagggtgcagctgcccaggacacactcatgcatgtttgtgtggaccatggaagatggcaggggaagagctgtcaggttgttggg

SEQ ID NO: 1020597 - DNA, 120 bp, Artificial Sequence
  ENSG00000234665_7 (sequence is synthesized)
gcagagggtgcgcatgagtactcgcctaggaccacgcaagatatgataaagatctacatcactgaattttggttccatttttgtatctcagcttccaggaaataaaaaagaattctaaca

SEQ ID NO: 1020598 - DNA, 120 bp, Artificial Sequence
  ENSG00000234665_8 (sequence is synthesized)
gcacagtggtggccaccgcgactggtgctgaagtgttggcgcgtgccgggcgctccgctgggacccgggttgctggccctgagtctcagctttctcatctgtacggttgggacaagtaca

SEQ ID NO: 1020599 - DNA, 120 bp, Artificial Sequence
  ENSG00000234665_9 (sequence is synthesized)
aaaatttagctttagagcttttattgacctgccaatgacctgaagttaagattattcttttctactgaatgaagacaaactaccttataaaaattaacccagaaggctgtagagggatga

SEQ ID NO: 1020600 - DNA, 120 bp, Artificial Sequence
  ENSG00000234665_10 (sequence is synthesized)
gttggcaccaagacctgattgctttgccagttaccctcacccctggctcacaaggaaagtgtatggaggagattctcgaggaaccacatgagttttaatatcataagcttctgccctgaa

SEQ ID NO: 1020601 - DNA, 120 bp, Artificial Sequence
  ENSG00000234665_11 (sequence is synthesized)
ttgaaagatagcagcattttaatcatctcttccattaaaccaagattacacaaaagcgtttgaggacactgaggactgggacttctaattttgcttcagaaaccagtactcaaaatgtct

SEQ ID NO: 1020602 - DNA, 120 bp, Artificial Sequence
  ENSG00000234665_12 (sequence is synthesized)
ggtttggaggagctgggctgcttggatcagaggttccatggtctgaactactccactctggtgaaggtttcttccccaaagccactcctcaagctgacttatattgtacctgagttgcat

SEQ ID NO: 1020603 - DNA, 120 bp, Artificial Sequence
  ENSG00000234665_13 (sequence is synthesized)
gcctgtgctccaagagcagacgtccttccgcaggagcaggtcattaagagtcactgcgttgatcatgtagaagagctgtttgaatacctgcaggatgatctcagggtccaagccctggtc

SEQ ID NO: 1020604 - DNA, 120 bp, Artificial Sequence
  ENSG00000234665_14 (sequence is synthesized)
acacatgactgtatgaaaggcattcatctggcggatgatagcttccaggcggtatgagttatccccatctgccatgctggaggagtgcttctgggagccagtgggcttcacaccagatag

SEQ ID NO: 1020605 - DNA, 120 bp, Artificial Sequence
  ENSG00000234665_15 (sequence is synthesized)
ggaccctgctgtgatgcacaaagaggaccacgcaagatatgataaagatctacatcactgaattttggttccatttttgtatctcagcttccaggaaataaaaaagaattctaacattca

SEQ ID NO: 1020606 - DNA, 120 bp, Artificial Sequence
  ENSG00000234665_16 (sequence is synthesized)
tgtttccccaggaagccagctggaaatacaacaaaacgcctctcccgctcctttagcaaaacatgtgtcagagcaacgcaagatttgattgggactgctttacttcgttaacaattacag

SEQ ID NO: 1020607 - DNA, 120 bp, Artificial Sequence
  ENSG00000234665_17 (sequence is synthesized)
actacacgaagctcaaagtatagataaacatatcagtgttgacaaccgtgaaaccacgctatccaaaggctacgagctctgaggaattcctgttagctacagcacatgtaggatcaatga

SEQ ID NO: 1020608 - DNA, 120 bp, Artificial Sequence
  ENSG00000234665_18 (sequence is synthesized)
aggaagaaaatgaagcctcctgggagacaaaattatgccaggacaaagctgaagaagagcaacacctgtcggaaatgtcctaagataaattttgaaaggtgccaggcttggaggtggggc

SEQ ID NO: 1020609 - DNA, 120 bp, Artificial Sequence
  ENSG00000234665_19 (sequence is synthesized)
aggcaccgccggaagagacaccttccctttggggctttctttgcctgtgacaagaacagcacttgatgcccttagaatagttcctggaacatctgaataaatatctgtggaatggctgaa

SEQ ID NO: 1020610 - DNA, 120 bp, Artificial Sequence
  ENSG00000234665_20 (sequence is synthesized)
acggtattcggtgaggtcaaagttcttaaggcagtgttcgttgtgctttgctgtattctgagtcatgaagccctcatccccgctgtaccgcttcagacagtgaagaaggtggcaggtgtt

SEQ ID NO: 1020611 - DNA, 120 bp, Artificial Sequence
  ENSG00000234665_21 (sequence is synthesized)
ggataacaggaatgacgtcatctcaaagtcatcactgtgcttcttcaggactttcttaatgccgttggtggtggaggtcatcagggagtgcaccttgagatcatcgttggtttggtccgc

SEQ ID NO: 1020612 - DNA, 120 bp, Artificial Sequence
  ENSG00000234665_22 (sequence is synthesized)
gagccgaatgcacatgtagaggatgtaggcggagagacagggcactgtgtccaacagcatctggggcttcaagtctgtcaccaggttgaggatgaggagggcctcgccctctttgcggca

SEQ ID NO: 1020613 - DNA, 120 bp, Artificial Sequence
  ENSG00000234665_23 (sequence is synthesized)
ctccaacatgccctggaaatccttttctttccactgaactgggacctgcctgttgaactcatggcgcttcctctcactctgggccaacgcctgggcagcttcttcatgtaaatcttcagt

SEQ ID NO: 1020614 - DNA, 120 bp, Artificial Sequence
  ENSG00000234665_24 (sequence is synthesized)
tgcttttagagcttcctctcattcttttcctcttactttatttttcaccacagagcttcctatcaactagtatgttgaatattttgcttattaactttgtttattgtcttctccctcgat

SEQ ID NO: 1020615 - DNA, 120 bp, Artificial Sequence
  ENSG00000234665_25 (sequence is synthesized)
tagaatattagctacttgagtacaaggatttgagcctgttacattcactgctgaattttaggctcctggaagatacccagcattcaatagagaccacacaataaatatatgtcaaataaa

SEQ ID NO: 1020616 - DNA, 120 bp, Artificial Sequence
  ENSG00000234665_26 (sequence is synthesized)
acatgctcagtgaggtcggcgcccgccagtaacaaacatggctccctgaagccgctcaggctcaagagcaacatggaggtctgcacttaatcgctcctctccgggggcggccataccgag

SEQ ID NO: 1020617 - DNA, 120 bp, Artificial Sequence
  ENSG00000234665_27 (sequence is synthesized)
gaggcgtctcttccgtgcaggcaggctctcctggggacctcagagattctctccagcggcagcggaaaacggacaatgggtggattcgggtccagattctggtaggagggagtttgggat

SEQ ID NO: 1020618 - DNA, 120 bp, Artificial Sequence
  ENSG00000234665_28 (sequence is synthesized)
cgagatctggaaaaaagcactagactggaagaggacgcgatggagtcggagccgctggcggggacaaaaaccagaggccggggaaggcgccggtgggaggcaaggcacggatggacttta

SEQ ID NO: 1020619 - DNA, 120 bp, Artificial Sequence
  ENSG00000234665_29 (sequence is synthesized)
aggggacattgtcctcaacaataaccctataataaacacgttttggacaataaatatatgacaatttcttaaaagcaatttcttgggcaatcaagacagtatggcttgagtatggagtta

SEQ ID NO: 1020620 - DNA, 120 bp, Artificial Sequence
  ENSG00000234665_30 (sequence is synthesized)
ttatttctgatgacagttaaatagcttgactaaaactcttggttccctaaatggcttttctgcttttggatggtggtagcctggggaacgtaaggaaagcagatatctcccaaaactggg

SEQ ID NO: 1020621 - DNA, 120 bp, Artificial Sequence
  ENSG00000234665_31 (sequence is synthesized)
aataaaatacatgatttattccaatacattccaggaaaccccatttccaagctctttaaactaaaacattactgtaaacatgttggcctaaaatttttcagagctagaaatgttcagagc

SEQ ID NO: 1020622 - DNA, 120 bp, Artificial Sequence
  ENSG00000234665_32 (sequence is synthesized)
aatagctgccagttgccaccatgatgttaggaaattctcattaattcttacatgacagttgtctacatagagatgaaacacttgactaaattgtcagcagcataattgtatccatacaga

SEQ ID NO: 1020623 - DNA, 120 bp, Artificial Sequence
  ENSG00000234665_33 (sequence is synthesized)
cagatagaacaaatccaatgctgtgatgtagtttaaatgtgcacatgttaactgattagagagctagaaaatggagggtatttttagcagcatatgataaatatatttctgactgttgaa

SEQ ID NO: 1020624 - DNA, 120 bp, Artificial Sequence
  ENSG00000234665_34 (sequence is synthesized)
ctaagttcaattaccagctgccctttatcattgaacttaatgctttcttctcatagtagaattaagaggaaagtaaaatattttttgtacctatatctttattatatttagacaaatcac

SEQ ID NO: 1020625 - DNA, 120 bp, Artificial Sequence
  ENSG00000234665_35 (sequence is synthesized)
agagtgagagagtaggggtttcaagaacaataggagagagacagggaagagagaaagaactgcttgtggaaatacagaatatcccacattttcaatgtggaaagtgtatgagggtctgaa

SEQ ID NO: 1020626 - DNA, 120 bp, Artificial Sequence
  ENSG00000234665_36 (sequence is synthesized)
atttacacctaattctaggcagataagtgtgcttcaaggaaaggcaagggcctggctagattctagatgtttttaaactggaggccagagacagctttagggagtctatatacaggcaca

SEQ ID NO: 1020627 - DNA, 120 bp, Artificial Sequence
  ENSG00000234665_37 (sequence is synthesized)
aatttatttcttttatattcttcttgctctttgaaaacggtctttatgcaaatacacactatataaccaaagtttctctttgttccaggcaggagtagggctgattggagccattgtaca

SEQ ID NO: 1020628 - DNA, 120 bp, Artificial Sequence
  ENSG00000234665_38 (sequence is synthesized)
aggtacctatcttgtgcagggccctgagatggggtctgactcagttcctgcggggaacttcaccagtgacccagtcagtgcccttcagttaaagaccaccaggagcacacttgcaggagt

SEQ ID NO: 1020629 - DNA, 120 bp, Artificial Sequence
  ENSG00000234665_39 (sequence is synthesized)
gggggccagatcacaagggctcagagaaaacaaacaacaacaaaacggagggatttctgcattccctcagagtaataagagtcctctttcctgcccaaacttgtagggcttatccttgat

SEQ ID NO: 1020630 - DNA, 120 bp, Artificial Sequence
  ENSG00000234665_40 (sequence is synthesized)
cagccgctgtatcttcccaccagcatcaccagataactcctttatcatcacttcagtaatgcttgattttggctgacttttttatgtttaccagttcagataaagagaattgcactctca

SEQ ID NO: 1020631 - DNA, 120 bp, Artificial Sequence
  ENSG00000234665_41 (sequence is synthesized)
tcattgctataatgtacatttgactactaatgagtctgagaatcttcagatacatttgttagtcattaatgttttctctctctcttttttctgttttttgagatggaatcttgctctgtt

SEQ ID NO: 1020632 - DNA, 120 bp, Artificial Sequence
  ENSG00000234665_42 (sequence is synthesized)
gtgagccaccgcgcccggccatgttttctcttcttaatctgtttgtactttcatttactttttctttcctctataataagaggtttttattttggatatcaatctttatatcttcaataa

SEQ ID NO: 1020633 - DNA, 120 bp, Artificial Sequence
  ENSG00000234665_43 (sequence is synthesized)
tgttataaatatctttttgttcccactagcttttcttacaaacttattcctagtgtcttgttgcacagaaattttattttattatggtcaactttgtcagcctttatctttataatttgt

SEQ ID NO: 1020634 - DNA, 120 bp, Artificial Sequence
  ENSG00000234665_44 (sequence is synthesized)
atggggttgttttcttgtttgcttttgatttgtataaaagtgattttttaccctaaagtcaaaagttaaaatttaatgttttcttcctatttcagaggaccacgcaagatatgataaaga

SEQ ID NO: 1020635 - DNA, 120 bp, Artificial Sequence
  ENSG00000230968_0 (sequence is synthesized)
tttaggaattttaaagccagttggagtgaaaatgtcctcatcttctctgggacaggaaatcctttttacctacatagaaaagttacgttattggaatttacatccctcctccataagaaa

SEQ ID NO: 1020636 - DNA, 120 bp, Artificial Sequence
  ENSG00000230968_1 (sequence is synthesized)
aaagacattatcttctcttccaaatgtccaccatgctaattttatctctttcttattatatttaactttaaaaatcttgatcattataattgctgtgggtcgtatattcactgtgaatat

SEQ ID NO: 1020637 - DNA, 120 bp, Artificial Sequence
  ENSG00000230968_2 (sequence is synthesized)
tctgtgagagatgacagttttattcttaataacctgcatattaagaattgccatgcctttttcatgattagtgttcaatccacatgttaaaagaatgaaaaatgcattactgaattatct

SEQ ID NO: 1020638 - DNA, 120 bp, Artificial Sequence
  ENSG00000230968_3 (sequence is synthesized)
tttataaaatgctgcctctgctgtctcacaatgcctaatgctacctctaaacgatagttattattcttttctgtcatataaagaaacatagtcatgccaattggttttctgccactatat

SEQ ID NO: 1020639 - DNA, 120 bp, Artificial Sequence
  ENSG00000230968_4 (sequence is synthesized)
atccagtgggaatcacacagagaatcaattcattacaatgataaattacaccattaaatagtatattatgccagaataatctagaaggtcatgaaagaaagattaagagatgacaagaga

SEQ ID NO: 1020640 - DNA, 120 bp, Artificial Sequence
  ENSG00000230968_5 (sequence is synthesized)
atctacaatgtgtaagaaagtgcatgatacatgaaaaaataggttttggtttgatatctaccaaatatgttaaatgaatatataaccctgtaaaaattgaaaaattacatacttgtaaaa

SEQ ID NO: 1020641 - DNA, 120 bp, Artificial Sequence
  ENSG00000230969_0 (sequence is synthesized)
aggaagtgagagacaggcagacacttctgttcttcctgcagaaagtgctgcttctgcagtgactcgtcagatgctccccagagcccagcacagacccggctccacccacttctgtgggtt

SEQ ID NO: 1020642 - DNA, 120 bp, Artificial Sequence
  ENSG00000230969_1 (sequence is synthesized)
gagctgaggccggacccaggagtctttttcctatggtcctgcctgatatagtaaccgggaaagggatgaatgtgatgcaatgtgctcttgtaatggagcatcacagaacaggtcaaagac

SEQ ID NO: 1020643 - DNA, 120 bp, Artificial Sequence
  ENSG00000230969_2 (sequence is synthesized)
acaagccacacagcaacgagcgcggacaggcagggcagagcacagctgcacccccatcaggtacatttcaggtgctcagcagtgcacttgtgctttgtggctgccttctggacagcatgg

SEQ ID NO: 1020644 - DNA, 120 bp, Artificial Sequence
  ENSG00000230967_0 (sequence is synthesized)
agtcttcagaggtggctgggtttctacttccagaggatggaagagactgtcaggggccctgcagtaactgggatgcacccagaggatgcctcagagccccgggccgcagttaaggtgacg

SEQ ID NO: 1020645 - DNA, 120 bp, Artificial Sequence
  ENSG00000230967_1 (sequence is synthesized)
agatgcagcaattctttatgaacatttcattcctgctcgctacacgacgtaaattagatggtgtgttacattcgggcaataagagagatatgtcaccacgacgctggcccattggatgga

SEQ ID NO: 1020646 - DNA, 120 bp, Artificial Sequence
  ENSG00000230967_2 (sequence is synthesized)
gcacactactgagtgaccccgctcaccagcggctccgctgattgctttgcaccttgcagacgccgcaattggctcagcctctctgccccccttgactccctccctggtccccagccctcc

SEQ ID NO: 1020647 - DNA, 120 bp, Artificial Sequence
  ENSG00000230967_3 (sequence is synthesized)
ccgcctggctttttcttgaatcaagaagaaaggagacctaatggagtcacaaggtcatgaagggaaatggggtggggtggggaggaaggtagcagagtgaaaaaacaccacctaaagcaa

SEQ ID NO: 1020648 - DNA, 120 bp, Artificial Sequence
  ENSG00000230960_0 (sequence is synthesized)
agtgctggcagagactccggcagggcctcgtgcgggggccgggagcagcgccttctttttaggaaacgacgcttcaggctcaggcccgtccatgctcctctcccgtgtgagtgcagagaa

SEQ ID NO: 1020649 - DNA, 120 bp, Artificial Sequence
  ENSG00000230960_1 (sequence is synthesized)
ggtcctgggttctgtctgctgcttcactctgggggtcttggacctggacctgagagagcccagaaccccagtagcagcagaagggccgaagcgtcacatagaaactgtgggctgcggtgg

SEQ ID NO: 1020650 - DNA, 120 bp, Artificial Sequence
  ENSG00000230960_2 (sequence is synthesized)
ctctggagctggtcagcgtgactctgccgttacctctgtccccttggaagtacaagtactgcccctggctgggagtttccttcttcattttcgtgcctggagtgccttcgatcacacctg

SEQ ID NO: 1020651 - DNA, 120 bp, Artificial Sequence
  ENSG00000230960_3 (sequence is synthesized)
tcgtgtgcgtgaatcaggtcttctccatttctcagaggtacgtcatgcgttctagagagttctgtctctcatatgaagtgcttcctacagaaagaatgaatgtacagctcttcatgttgc

SEQ ID NO: 1020652 - DNA, 120 bp, Artificial Sequence
  ENSG00000230960_4 (sequence is synthesized)
caaagcaccaagacacactaaacccacacaggcacattccacagggcattttgagtggctggaggccatggcaccagagtccggggtggcacctgcaccctcccatgtgggaagtgggca

SEQ ID NO: 1020653 - DNA, 120 bp, Artificial Sequence
  ENSG00000230960_5 (sequence is synthesized)
cagagaccagacttggcagcacgtggtgaggctgcacagccctgaggaagctgctaggccccgacactgggtggcctggacaatccagcctgacaaggagctgcattccacctgcgttgg

SEQ ID NO: 1020654 - DNA, 120 bp, Artificial Sequence
  ENSG00000230960_6 (sequence is synthesized)
agatggatgctgacagacggccgcacagaagcttctgcagcctggtgcccaccaggcccacagaggaaaagggttctggagtgaaaagcctcatctggcactcaggaggtatctgcgtga

SEQ ID NO: 1020655 - DNA, 120 bp, Artificial Sequence
  ENSG00000230960_7 (sequence is synthesized)
gggcagggccctgtttgcccccgggtgtcagaagatatgaaggaccagatctgggcttggccactcctcagacaacttcaatggatcctgcacacagcattcccaggccaggctggaggg

SEQ ID NO: 1020656 - DNA, 120 bp, Artificial Sequence
  ENSG00000230960_8 (sequence is synthesized)
actttgatggatcctgtacacagcatccctgggctgggctggagagacctcctgcctgcttgcacatactggaagagatattgttgtgtgaattgttttctgaacacaccattatcctta

SEQ ID NO: 1020657 - DNA, 120 bp, Artificial Sequence
  ENSG00000230960_9 (sequence is synthesized)
cagaaactcctattcatccttcaatcccagctcacagtcacctcctccgggaagccctccaccctccatcgccggtcagtgttgggtggtgtgcctgtctcctctttggactgcgagctc

SEQ ID NO: 1020658 - DNA, 120 bp, Artificial Sequence
  ENSG00000230960_10 (sequence is synthesized)
cccggggtccttgtgatgtcttttcattgctttcctccacttcccacctggttcttggcacacactgggtgcttattgaacacatggtcagtatatttgaaggatgagacgtactgaatt

SEQ ID NO: 1020659 - DNA, 120 bp, Artificial Sequence
  ENSG00000230962_0 (sequence is synthesized)
cgactttactgtgccagatgtcatcccaagtccagaaaccatgtctcaggggaggaatctttttactgaaggggcatgaagaggggaaagaacactggccctgggtccagcattgtatca

SEQ ID NO: 1020660 - DNA, 120 bp, Artificial Sequence
  ENSG00000230962_1 (sequence is synthesized)
gctgcttcacatccagcatctaatgcagttgccccatctaatgctcaagctgtaacgctaccttagtttctccaattaacagatgagagggccaaagctccaagtagttgggcaggttgc

SEQ ID NO: 1020661 - DNA, 120 bp, Artificial Sequence
  ENSG00000230962_2 (sequence is synthesized)
ccaggatggatgcatacgtagaagatagaacaacccagagtggtgtgattccaaaccatgctttctccattgcatcacagtgatctttaagatcaccagcagagtggactgggacttcag

SEQ ID NO: 1020662 - DNA, 120 bp, Artificial Sequence
  ENSG00000230962_3 (sequence is synthesized)
ggtaagatcacatcaagatatcaagtccagagaggccaaccccacaccgttcacatgatctctgaaacaattttcaagaacagcactgtgaattcaactcgacactcttccatcaagcaa

SEQ ID NO: 1020663 - DNA, 120 bp, Artificial Sequence
  ENSG00000230962_4 (sequence is synthesized)
ggacggaaaactccaaatgactgcaagacaagagctcccaggaaacacagaattccagagcagattcttcttttgaagtttctgtgaataaaatctcataatcagagcttcactgcagca

SEQ ID NO: 1020664 - DNA, 120 bp, Artificial Sequence
  ENSG00000230962_5 (sequence is synthesized)
gataaatgggccagcgcctgagctcaaatgcacggaagcaaggaagacccaccccgcctgtctcccacctctctcggtgaaaccttcccagatggctgccagaaaggcttcagattcttg

SEQ ID NO: 1020665 - DNA, 120 bp, Artificial Sequence
  ENSG00000230962_6 (sequence is synthesized)
tcctgcctctccctgactctcagatgatgtccatagagaatggagctgttgaggaagccagaaaggaactgaggaagtgacaaatagattcttgtataaaacaaaccaacaaaaatttta

SEQ ID NO: 1020666 - DNA, 120 bp, Artificial Sequence
  ENSG00000230962_7 (sequence is synthesized)
tgggtgcattgaatgccaggagactcaaaaatagaagtgccttggatctctgtcaacctctaaggggtcccatgggagtgtgcctctcctccttcctctcaattgcattccccagcatct

SEQ ID NO: 1020667 - DNA, 120 bp, Artificial Sequence
  ENSG00000230962_8 (sequence is synthesized)
gtctcctgtgagagatgcttcccatctctggcattctactctacttcatcctgtgtgtgaccgccccagaactgtggaatggagttccaagacacagagaattggacaataagcagtgtt

SEQ ID NO: 1020668 - DNA, 120 bp, Artificial Sequence
  ENSG00000230962_9 (sequence is synthesized)
gatgaggatgtacagcaacagagactctcatcttcctaagttcagtgggagcaaatgttggtaaaatcactttggaaaacagctactattaaaaaaaaaaaagtaccacaaaccagatgg

SEQ ID NO: 1020669 - DNA, 120 bp, Artificial Sequence
  ENSG00000230962_10 (sequence is synthesized)
cttaaagcaacagaaatttgtgactcacagttctggaggccagaaattcaaaatcaaggtgtcagcagagtttcctggaggtgagagattcatatctgagctttccacctctaatgagga

SEQ ID NO: 1020670 - DNA, 120 bp, Artificial Sequence
  ENSG00000230962_11 (sequence is synthesized)
gcggcttcatgaaggaacggacgggattgctccagaaggtcattgattttcagcctctaaaaggacaactgtaatcctggttgatcttaactctcaaatttaataaaatcagtttaaata

SEQ ID NO: 1020671 - DNA, 120 bp, Artificial Sequence
  ENSG00000262662_0 (sequence is synthesized)
aggaaagttcccaaagcgcctgcaggtcaggtgtcccccagcaggggagcagctgtggcccctgggcccctacgggctgcgcctgatctttctggccagttccagggcaggagttaatta

SEQ ID NO: 1020672 - DNA, 120 bp, Artificial Sequence
  ENSG00000262662_1 (sequence is synthesized)
ctgcccgaaatgccatccccttccagctgtttaaataccaaggacgtattttaaatggaggggaaaataatgtttttacagcagaacggctgctaaatatcggcgctcctcacctcacac

SEQ ID NO: 1020673 - DNA, 120 bp, Artificial Sequence
  ENSG00000262662_2 (sequence is synthesized)
agggtcaggaatgagaatcccagacctaaagctgatgaagctggaggcacaaggaccttctgggaatcctcgctctgtgctgggtgaaatttacttctgctgcatgagccgtgtgggcca

SEQ ID NO: 1020674 - DNA, 120 bp, Artificial Sequence
  ENSG00000262662_3 (sequence is synthesized)
agacggactgtcccctgctaggcccggacagcacctgcccacgggggtgctcagcagaggcagtgcccggggctgctgtgcccacgcgtgtgccctgtcccctgccagacatggacagca

SEQ ID NO: 1020675 - DNA, 120 bp, Artificial Sequence
  ENSG00000262668_0 (sequence is synthesized)
aaggacaggagactaggaaggcggagggaggctgctattggcagggcctcagtggagacctcccggggtcccgggacgcagacggacgggcctgaatcgctcgccttggtgaaatgggat

SEQ ID NO: 1020676 - DNA, 120 bp, Artificial Sequence
  ENSG00000262668_1 (sequence is synthesized)
ccagcgctgccaactgcggcaactgcggttaaaggagacgaccccgtgcagcaggaggaggttatttagaataaggaagaatgcgccgggctcattggtcgctacaggggcataaatttt

SEQ ID NO: 1020677 - DNA, 120 bp, Artificial Sequence
  ENSG00000262668_2 (sequence is synthesized)
ttctaggattccagagtatggctgctccagtcccagattcggctcgacttacagacctcagcgcaggacgtggacgccctgcaaaggacatttcagcggacggcagagaatacagattta

SEQ ID NO: 1020678 - DNA, 120 bp, Artificial Sequence
  ENSG00000262668_3 (sequence is synthesized)
catttcagcggacggcagagaatacagatttatgccagcgccctgcggaaggagcctctggcgggtcatctccatttatgggagatcgcagagcgggtcatgctctgtcacccaggctgg

SEQ ID NO: 1020679 - DNA, 120 bp, Artificial Sequence
  ENSG00000262668_4 (sequence is synthesized)
ttttttttttgagacggagtctctctatgtcgccaggctggatgctgttgcgggaagtcagggaccctgaacagagggaccagctggagctgtgtcagaggaacataaattgtgaagatt

SEQ ID NO: 1020680 - DNA, 78 bp, Artificial Sequence
  ENSG00000262668_5 (sequence is synthesized)
ttactgcaatctctgaacataagctgtgaagatttcacggacatttatcagttcccgaaattaacacttataatttct

SEQ ID NO: 1020681 - DNA, 61 bp, Artificial Sequence
  ENSG00000262668_6 (sequence is synthesized)
gtcacctcaggaccactgtgataattctacctaactatacaaattgattgtaaaacatgtg

SEQ ID NO: 1020682 - DNA, 77 bp, Artificial Sequence
  ENSG00000262668_7 (sequence is synthesized)
tatcactgaattcttttcctagcaaggaatgttaataattaagaccttgggagaggaatgcactcctcgggggaggt

SEQ ID NO: 1020683 - DNA, 120 bp, Artificial Sequence
  ENSG00000262668_8 (sequence is synthesized)
ctgaattcttttcctagcaaggaatgttaataattaagaccttgggagaggaatgcactcctcgggggaggtctataaatggctgctctgggagagtctgtcttatgcagttgagataag

SEQ ID NO: 1020684 - DNA, 70 bp, Artificial Sequence
  ENSG00000262668_9 (sequence is synthesized)
tgtggggaaaaaaccccaccctggtgaatttaaggtcagacagattctctgctcttgaaccctgttttct

SEQ ID NO: 1020685 - DNA, 120 bp, Artificial Sequence
  ENSG00000262668_10 (sequence is synthesized)
gctgaacatagacccttatctggaggttttgattttgtcctttgccttgtgatctctattggcttcagaggcatgtgatctttgttctcctttttgccctttgacacctgtgatctctgt

SEQ ID NO: 1020686 - DNA, 120 bp, Artificial Sequence
  ENSG00000262668_11 (sequence is synthesized)
gacctactccctgttcgtacacccccaccccttttaaagtccttaataaaaacctcctggttttgcggctcaggtgggtcctaccaatatgggatgtcacccccagaggcctagctgtaa

SEQ ID NO: 1020687 - DNA, 120 bp, Artificial Sequence
  ENSG00000262668_12 (sequence is synthesized)
catctccatttatgggagatcgcagagcggttccctctcaggatcttcaccttcaggattactgccattgactgctgaaacaaagagagaatttaacaacttctgagagatatcacaaca

SEQ ID NO: 1020688 - DNA, 120 bp, Artificial Sequence
  ENSG00000262668_13 (sequence is synthesized)
ccaggcaggaaaaaacaagtcaggtttcttatgccacagccaccttgaacgtcaatctggggagtggcggatactgccgtcgcactccttttccatacttattgagggtgggatacataa

SEQ ID NO: 1020689 - DNA, 120 bp, Artificial Sequence
  ENSG00000269873_0 (sequence is synthesized)
tcaactcaattgattacttttaaatgggttgtctttttcttagtttatgaaagcttttgtagattatatcttttaagaataacatttctgcatcataactgttaacatacacacacacac

SEQ ID NO: 1020690 - DNA, 120 bp, Artificial Sequence
  ENSG00000269873_1 (sequence is synthesized)
aatttgccaactaagctatcttttcctttctggttttatgatctcctgcttaaactcctccctccccattttccctacccagatacatgacatgcagacaatatacaaatattctcctaa

SEQ ID NO: 1020691 - DNA, 120 bp, Artificial Sequence
  ENSG00000234089_0 (sequence is synthesized)
gcagcaaggagtggccacatgaccaggcagtggccaatgcacatgaggccagtgcacagcaactgcctttagaggaaggaagatttgtgtcctcatattctcttctcccctccctgctca

SEQ ID NO: 1020692 - DNA, 120 bp, Artificial Sequence
  ENSG00000234089_1 (sequence is synthesized)
ctggcagtagataggatggacactgtgggggaagctacaccctaagaaagtcagagcagcaagatggaagtagcctaagaccctgaaaaatgcacaaagaagaatcacccgactggcttg

SEQ ID NO: 1020693 - DNA, 120 bp, Artificial Sequence
  ENSG00000234089_2 (sequence is synthesized)
gactttcatgtgaaaggaatgaacctctgtcttagtaaagccactgtctttactaagttcagggtccttgtcacgttcactgaggctgtaacataattgttagaaagaacaggagtggga

SEQ ID NO: 1020694 - DNA, 120 bp, Artificial Sequence
  ENSG00000234089_3 (sequence is synthesized)
ggggagatggagtcggagagtcaggcagaggttagatcacatcgggcctgtaggccaaggcggaggaagaaacaggcgacacaggactcaaggacaacacctgctcccaggcaaaaggag

SEQ ID NO: 1020695 - DNA, 120 bp, Artificial Sequence
  ENSG00000234089_4 (sequence is synthesized)
tttgttgtgggtgcccctccctgtctgtgtgtccagtgtgtggatattctttatactttgcccatactgtacaaatgctttttttctattcaatatttagaagacattgcattaaatagc

SEQ ID NO: 1020696 - DNA, 120 bp, Artificial Sequence
  ENSG00000234089_5 (sequence is synthesized)
aagatggcagatgaacatcaggaaagaacattaggaacatccacagtgttccatccaggaaccttcaccatggaaacccttgtgctcatgggcctggtctcaagacacattcagctgttg

SEQ ID NO: 1020697 - DNA, 120 bp, Artificial Sequence
  ENSG00000234089_6 (sequence is synthesized)
gggatcagaggccgcactcatcgtagcagagaggcaggaccaactgggagagggtcattctgtgacacctactgcatcaccgggctgtgtgaagtgactcagctgccagaactcacacaa

SEQ ID NO: 1020698 - DNA, 120 bp, Artificial Sequence
  ENSG00000234089_7 (sequence is synthesized)
tatcattctacaccaaaacctcacgggaaaaatcctccccgaccctcagacttaaacagcagcactggctcctccccagatctccagctccctgaccctcaaactccaactgcagcacca

SEQ ID NO: 1020699 - DNA, 120 bp, Artificial Sequence
  ENSG00000234089_8 (sequence is synthesized)
gctccacctgggtctccagctccatgatcctcaaactacaacagcagcaccagctcccccgtggatctccagctcaatgactctcagacttgggaggtggcactggctcccaaccaaggc

SEQ ID NO: 1020700 - DNA, 120 bp, Artificial Sequence
  ENSG00000234089_9 (sequence is synthesized)
tccagctccacaaacctcaaactagaacagcagcaccagctactccctgggtctccagctccctcaaacttcaactatagcactggctcttccctggggccaccagctccacaaccctca

SEQ ID NO: 1020701 - DNA, 120 bp, Artificial Sequence
  ENSG00000234089_10 (sequence is synthesized)
aacactggctcctccctgaatctccagctcaacaactcacagacttgagaggcagcaccggcacctccccaaggctccagctccatgaccctcagatttgaacagtggtagcaccagctc

SEQ ID NO: 1020702 - DNA, 120 bp, Artificial Sequence
  ENSG00000234089_11 (sequence is synthesized)
ctgtccaggtctccagcttcactatccttaaactagaacagcagcaccgccgcctccctgggtttccagctccatgactctaagacatgaatgaaagaaccgggtcaccccagcactcca

SEQ ID NO: 1020703 - DNA, 120 bp, Artificial Sequence
  ENSG00000234089_12 (sequence is synthesized)
actccaagacccacagatttgaacggcagcactggctcttcccgggatctccagctccacggccctcaaactagatcagcagcaccggctcctctctggttctccagctccacaatcctc

SEQ ID NO: 1020704 - DNA, 120 bp, Artificial Sequence
  ENSG00000234089_13 (sequence is synthesized)
acacatgaacaatagtaccagctcctccttgggtctccagcttcactaccctcagactagaacagcaacactggttcctccgtggacctccagctctacaatcctcagaaatgaacagca

SEQ ID NO: 1020705 - DNA, 120 bp, Artificial Sequence
  ENSG00000234089_14 (sequence is synthesized)
gcagcaccgcctcctacctttgtctccacttccacaaccctcaaactacaacagcagtaccggcctctccccaggtctccacatacatgaccctcaaaatagaatggcatcataggctcc

SEQ ID NO: 1020706 - DNA, 120 bp, Artificial Sequence
  ENSG00000234089_15 (sequence is synthesized)
ctcctggatctccagctcccaaaccctcaaacttcaattgacacaccagatcctccccacagctaaatagcagcacgggctcttccccaaagctccagatccacgaacctctgacttaag

SEQ ID NO: 1020707 - DNA, 120 bp, Artificial Sequence
  ENSG00000234089_16 (sequence is synthesized)
tggcggtagcaccggctcctccctaggtctccagttccacgaccctcaaactatacaccagcaccagctcctccccaggtctcaggctccatgaccctcagacttaaaaagccatagtat

SEQ ID NO: 1020708 - DNA, 120 bp, Artificial Sequence
  ENSG00000234089_17 (sequence is synthesized)
ggacttctccctggggctccagctctacaaccctcagacatgaacagcagcagcaccggctcctcgccctgtctccacttccacgaccctcaaactacaacaacagtaccagcctctccc

SEQ ID NO: 1020709 - DNA, 120 bp, Artificial Sequence
  ENSG00000234089_18 (sequence is synthesized)
caggtctccagatccacgaccctcaaaatagaatggcatcaccggctcctccctgggtctccagctcccaaaccctcaaacttcaattgacacaccagatcctccccacagttaaacagc

SEQ ID NO: 1020710 - DNA, 120 bp, Artificial Sequence
  ENSG00000234089_19 (sequence is synthesized)
agcacgggctgttccccaaagctccagatccatgaccctctgacttaaatggcggtagcaccggctccttcctaggtctgcagttccatgaccctcaaactacacagcagcaccggctcc

SEQ ID NO: 1020711 - DNA, 120 bp, Artificial Sequence
  ENSG00000234089_20 (sequence is synthesized)
tccccaggtctacagctccaccaccctcacactagacaccaagactacctcctccccactctccagctacatgaccctcagacttgaacagcagcggctcctccctgtacctaaagcccc

SEQ ID NO: 1020712 - DNA, 120 bp, Artificial Sequence
  ENSG00000234089_21 (sequence is synthesized)
taacgaagagaaagaatgtatatcttgtggtaatggggaccagcagctccatgaatcaaagctttctgtggctcgatctagttcagagtctgagtgatacatttaatgtgccagcaaaag

SEQ ID NO: 1020713 - DNA, 120 bp, Artificial Sequence
  ENSG00000234089_22 (sequence is synthesized)
cctctggtaaacagggagcagtgttacagccagcagagcccaagagcttgccagagctgatggagattgaagggagcaggttggagctcctcctgaggcagaatgagaggaaggctctcc

SEQ ID NO: 1020714 - DNA, 120 bp, Artificial Sequence
  ENSG00000269877_0 (sequence is synthesized)
ttcctttcaccatctaacccagattcccttagttgtgtcaggtgagagcccaggaggcccccttcccttccccaggttttccggagccattacagccagacgctgtaagggacctgtacc

SEQ ID NO: 1020715 - DNA, 120 bp, Artificial Sequence
  ENSG00000269877_1 (sequence is synthesized)
gtcaccggtgacgctcaaatgtcgcagcactttccacttggacatcagaatagtgctccacatttgaggcccacagggttgagtcttctcaagcggtaacactcaaaagatggcggcact

SEQ ID NO: 1020716 - DNA, 120 bp, Artificial Sequence
  ENSG00000269877_2 (sequence is synthesized)
ttcaccagagagcagaaagtgcccccacagtttgagtgccacaggctgaggggatgcggcaaggcggcgatcgcaagtggaagcacttacccatcagaagaggcttttaagcaaggaggt

SEQ ID NO: 1020717 - DNA, 120 bp, Artificial Sequence
  ENSG00000234084_0 (sequence is synthesized)
atttcaagaggatattatgcttttctggaccataattatatgattattactgctagctgtagagctttaagtcaagcataataaaaacaagaattaaagagcaaggagactttttggtga

SEQ ID NO: 1020718 - DNA, 120 bp, Artificial Sequence
  ENSG00000234084_1 (sequence is synthesized)
aaggaaagtatcttcaggaggcaggtaaaaggtgcaatgaagactgaagaatgggagaatggatactgttatcagcagagaccagaaggctatataccaggcagtggctgttacacagaa

SEQ ID NO: 1020719 - DNA, 120 bp, Artificial Sequence
  ENSG00000234084_2 (sequence is synthesized)
cttagaattcctgcaaactgaagggtcattgggttacccacttcctcttttgggactaaactatttcctaatctcttatcactagggaatagttcttcccaaaccaggtcacccaaatac

SEQ ID NO: 1020720 - DNA, 120 bp, Artificial Sequence
  ENSG00000234084_3 (sequence is synthesized)
agtggtgtgtaagaggtggctgcttaaaaacgcctatagcaatggggaagcggtaagagaggtaaaaagagaacagactcattaagtacaaaaaaattcaaataaaagagtaataaaagc

SEQ ID NO: 1020721 - DNA, 120 bp, Artificial Sequence
  ENSG00000234083_0 (sequence is synthesized)
agagagaaatggaatgcagctgagagaatctaaactcttcctcaacccttggaggaggtctcttcccagggcaggattcaagtgcatctgctttgctgcaagatggagcctggctctgtc

SEQ ID NO: 1020722 - DNA, 120 bp, Artificial Sequence
  ENSG00000234083_1 (sequence is synthesized)
taatcttccatggagttcatgaccagaggatgactagaccttgagaagtatttgaagaaggggtcaaggtgggagccaaggcaaccatctgaaacagctggcctgcctgggcatgtctga

SEQ ID NO: 1020723 - DNA, 120 bp, Artificial Sequence
  ENSG00000234083_2 (sequence is synthesized)
gccagatgtctacttctggtccagagttagaattatgtataaaatcaggtactgggaacaatttatctatgttaaaaagatgtgtgtgtgtgaatggatgtatatacgtgtgctataaga

SEQ ID NO: 1020724 - DNA, 120 bp, Artificial Sequence
  ENSG00000265369_0 (sequence is synthesized)
ctttttcttcgtaacttcatggcaacatgacctacagttactcatttttcaggcctgagttgatcgttaatcatcttaattatgttcattctgaagccaacaggagaaccaagaccaaaa

SEQ ID NO: 1020725 - DNA, 120 bp, Artificial Sequence
  ENSG00000265369_1 (sequence is synthesized)
ctttattgtctctgctttcatttcttgatgaaacctctggactaagcacacatcttccttgtttatctctctcaaaggagtgtggagtgcttcatctggacatccacgggaagaaggaag

SEQ ID NO: 1020726 - DNA, 120 bp, Artificial Sequence
  ENSG00000265369_2 (sequence is synthesized)
acatgagggaatgctggaagaggagacaggccccagatttgggcaggaagtaaacagttttcaggctgaggccaatctgagcaggaacattccaatatttcttcagctacgttgtcccag

SEQ ID NO: 1020727 - DNA, 120 bp, Artificial Sequence
  ENSG00000265369_3 (sequence is synthesized)
cacttcactggttaaccttttatgtccaccatttgtggatttcacagctacttgtcaatggtgaatattgatcatcatcattatctactgagctgctaccatatcccagctactccttgc

SEQ ID NO: 1020728 - DNA, 120 bp, Artificial Sequence
  ENSG00000265369_4 (sequence is synthesized)
atgttgttcattattttctcaacactcagcatatttgcaatatgttatgtaatatcacagacaaggaaactgaacgcagaaatgttttatttcttgccaaacatcacatgaggatgaaca

SEQ ID NO: 1020729 - DNA, 120 bp, Artificial Sequence
  ENSG00000265369_5 (sequence is synthesized)
atgaaaccgatttgaaaccaggattgtctgattccaacatctctgggtcctttttcactctgatatgctgcaattaaaaagccatttctaagactgtacgttccaagattgtttctatag

SEQ ID NO: 1020730 - DNA, 120 bp, Artificial Sequence
  ENSG00000265369_6 (sequence is synthesized)
ttggttgtgagagaagtttctctgaacttgcagagcacgggaaaccaggaggaggaggctcagggtgctctccacacgtgtgaaaccggctgtgggtgttgctttcctgtgactgccatt

SEQ ID NO: 1020731 - DNA, 120 bp, Artificial Sequence
  ENSG00000265369_7 (sequence is synthesized)
tgccactgatgatcttctcttcctctggaagagtaagagggggaaggacacagtttcagtgcttcccatttataattaattaattaattaagggcaggtgcaggggctcacacttgtaac

SEQ ID NO: 1020732 - DNA, 120 bp, Artificial Sequence
  ENSG00000265369_8 (sequence is synthesized)
cccagcactttaggagattgagcaaggaggatcccctgagcctgggagtttgagatcagcctgggaagcagagtgagaccatgacttaaataaaaatttttttgtgttttgttctaattt

SEQ ID NO: 1020733 - DNA, 60 bp, Artificial Sequence
  ENSG00000265369_9 (sequence is synthesized)
aaaaaaaatttttttttttcaattagccagacattgtggcatgtgcctgtagtcgcagct

SEQ ID NO: 1020734 - DNA, 90 bp, Artificial Sequence
  ENSG00000265369_10 (sequence is synthesized)
tgagccaccacgcccgaccaaaaaaaaatttttttttttcaattagccagacattgtggcatgtgcctgtagtcgcagctaccatgggga

SEQ ID NO: 1020735 - DNA, 120 bp, Artificial Sequence
  ENSG00000265369_11 (sequence is synthesized)
aaaaataaaaaataaaaaaaaagctatttcttacagatattcattgagtggaaagcaatttaattttacgtataataagttatttcaaaaagaattgtagttatgtgtggcaatttttca

SEQ ID NO: 1020736 - DNA, 120 bp, Artificial Sequence
  ENSG00000265369_12 (sequence is synthesized)
taaatacctgatacaaatcaagatctaccatggtaagtgtgctccagagatacccttcttgaccaaaacaaagcagggcagggattgggaggccttttgggctgggctccaggacacaat

SEQ ID NO: 1020737 - DNA, 120 bp, Artificial Sequence
  ENSG00000265369_13 (sequence is synthesized)
gactagaagatgatgcaaagtgcatgacagagtagagagctacacagtttacacatattagactctgcacatattagagtctacacatattagactctgcaaaagtagttcttaaatgtt

SEQ ID NO: 1020738 - DNA, 120 bp, Artificial Sequence
  ENSG00000265369_14 (sequence is synthesized)
agctcacatgcaccccagtcacgttactgagcagattcctgggctccagtcctgggtgattcttgcaggtggtccattgaccagattaggagaatcatcatccaaggtctcaaagccaaa

SEQ ID NO: 1020739 - DNA, 120 bp, Artificial Sequence
  ENSG00000265369_15 (sequence is synthesized)
tttaggacgcagagagaaagaatcctaagtggttgaatgggaaactgattctcctcttgagcacaccttagattcaaataattgattggagaagatcattccatacaaaaatcttctgac

SEQ ID NO: 1020740 - DNA, 120 bp, Artificial Sequence
  ENSG00000265369_16 (sequence is synthesized)
ctgcagagtttctacaaaaagtcttgagaaagaaaaagaaaaacatatatttttggaaaagattgaatttaattataattttgcaaattatactgtgggaaaggtcaacaaaaacaagcg

SEQ ID NO: 1020741 - DNA, 120 bp, Artificial Sequence
  ENSG00000265369_17 (sequence is synthesized)
tattgcggatgatcttataaaaagaaccttttgtaaagtaaacaattaccttctgatttgtctactctgaacccttgatgtttatttaaattggatgttctcatagcaggacacacctga

SEQ ID NO: 1020742 - DNA, 120 bp, Artificial Sequence
  ENSG00000265369_18 (sequence is synthesized)
tacctggcttgtctaaacacttagaaagtcaaattgtctagttatcaaagcccaggcttattttctaaataagtatggatggtctttcaggagtcatttcacagtgatgtgcagagagaa

SEQ ID NO: 1020743 - DNA, 88 bp, Artificial Sequence
  ENSG00000265369_19 (sequence is synthesized)
aaacaattcattgttcctaagtgtgttttccagcctatgtctaactttctagcagataatggcaataaaaatgtttgggtccaacatt

SEQ ID NO: 1020744 - DNA, 120 bp, Artificial Sequence
  ENSG00000236017_0 (sequence is synthesized)
aggagcgtctccaccagcagcaggccggcccctgagggagacagcagagagctggagtcctggccagccaggcggggatccttcagcaggacacaggggacacagcaggcaacaggagct

SEQ ID NO: 1020745 - DNA, 120 bp, Artificial Sequence
  ENSG00000236017_1 (sequence is synthesized)
cagaacgctctcggcgaccctgctgagtaacttgtggactttgtcgtctggccagtcatgcaggatccggcacaggacgtacagctcagcgctggggagggggtccctgaaaaagtcacc

SEQ ID NO: 1020746 - DNA, 120 bp, Artificial Sequence
  ENSG00000236017_2 (sequence is synthesized)
gagtgatgcggccacaagcccagggacgcctggagcccccaggagctggaagaggcgggaaggatcctcccctagagcctctcagaaagaatcaaacacaactgcaatgggttgggtggt

SEQ ID NO: 1020747 - DNA, 120 bp, Artificial Sequence
  ENSG00000236017_3 (sequence is synthesized)
gaatcaaacacaactgcaatgggttgggtggtgacgtccaaaagatctgtccaagtcctaagccccagaacctgggaatgggacctcatttggataaagtttctttgcagatgtaattaa

SEQ ID NO: 1020748 - DNA, 120 bp, Artificial Sequence
  ENSG00000236017_4 (sequence is synthesized)
tgtgtgggcaccagagggtgaactgaggtctgagggtcgggacacaggccgggaacagcagctgggagcggagcacgggggaaacgtggatgcgctgagctccctacaaccgcagtgagc

SEQ ID NO: 1020749 - DNA, 120 bp, Artificial Sequence
  ENSG00000236017_5 (sequence is synthesized)
atgtgcccaggagggcctcacggggtgggtgtgagtctggcctgcctgggctcggggtggggggtgtttacagacgcatttcagccccgcagcaggggctggggaggtcccgctcgtgac

SEQ ID NO: 1020750 - DNA, 120 bp, Artificial Sequence
  ENSG00000236017_6 (sequence is synthesized)
cccatggaggaaacacactggaaatcgtgcagaagatgggaagatgcaggctggagtgcggagaaggactgagaccctgcctggtagacggcaccgtcacagcagccgtctgcctgctag

SEQ ID NO: 1020751 - DNA, 120 bp, Artificial Sequence
  ENSG00000236017_7 (sequence is synthesized)
gaggctccgctccttgccttcagtctgcaccagcatgttcagtgactgcatcagggcgcgctgcgccaccctcttctcctcatccaggagcgtctccaccagcagcaggccggcccctga

SEQ ID NO: 1020752 - DNA, 120 bp, Artificial Sequence
  ENSG00000236017_8 (sequence is synthesized)
ctggagtcctggccagccaggcggggatccttcagcaggacacaggggacacagcaggcaacaggagctcagaacgtcatgcaggatccggcacaggacgtacagctcagcgctggggag

SEQ ID NO: 1020753 - DNA, 120 bp, Artificial Sequence
  ENSG00000236017_9 (sequence is synthesized)
tggaagaagcagtcctccccggacagatcctgggacggccacccgcatcctaaatcagggacagagaagagaggggtgtgggcgggaatgggtcttcctgaagtacatccccgtggggac

SEQ ID NO: 1020754 - DNA, 120 bp, Artificial Sequence
  ENSG00000236017_10 (sequence is synthesized)
acatccccgtggggacttgaacagagctccatgaggagctggttagtgatgtcacgcccgtgcggtttgactcgggctgagaaaacgctggggacagtggctcacacctgtaatctcagc

SEQ ID NO: 1020755 - DNA, 90 bp, Artificial Sequence
  ENSG00000226364_0 (sequence is synthesized)
ccttccggtgtgtgggttgtttgttcttttgctcttcgcagtaaattttgctggtgctcagtccgactgactgtgcaggtctgcggcttc

SEQ ID NO: 1020756 - DNA, 88 bp, Artificial Sequence
  ENSG00000226364_1 (sequence is synthesized)
gaaacaaaattccggacacaccatctttaagaactgtgacactcaccgcaagggtctgtggcttcattcttgaagcaatgagacgaag

SEQ ID NO: 1020757 - DNA, 120 bp, Artificial Sequence
  ENSG00000226364_2 (sequence is synthesized)
acaaagggaaaatcgactatcaccaagcggtggtctaatactcaacatttgtcagtgcccactggaaaccattctgagactccctgcagctgaggatcacagcttttcattgtaatgatg

SEQ ID NO: 1020758 - DNA, 120 bp, Artificial Sequence
  ENSG00000226364_3 (sequence is synthesized)
tgaattattgctgaactgatgacctcaaactcctgcaaacaacttggatatcagtgaccccatgagaatctgtaatatcactggacatgaaaagaagcctggtcccttctacaaccatga

SEQ ID NO: 1020759 - DNA, 120 bp, Artificial Sequence
  ENSG00000226364_4 (sequence is synthesized)
catatatttgtatttatggtcctctggagaatcttgccttttcccaccaatttttattttactctatctatagtattgtaatttcagaagaagaaaataaactacattccattcattgcc

SEQ ID NO: 1020760 - DNA, 120 bp, Artificial Sequence
  ENSG00000226363_0 (sequence is synthesized)
agcagggctcaaaacctggccaggaggtcttgttgggccaggaatgtccgtggttggtgaggaggctgggagaaggcctttttgatggctccattgttcacagcgctgccctacaaatac

SEQ ID NO: 1020761 - DNA, 120 bp, Artificial Sequence
  ENSG00000226363_1 (sequence is synthesized)
catatccgtccccacctcctctgcaagggtcgagcggaagagtaggtctggtgagctgagctctagggagctggtaccatcttccctcaatccccctcggttaccccttggggcagcaac

SEQ ID NO: 1020762 - DNA, 120 bp, Artificial Sequence
  ENSG00000226363_2 (sequence is synthesized)
gacgccatcccagccccttccagagaacacacaaaggaagccccacccgtccttagacctgaggacacgctcgggagcgggctgacgtggaccccgtttcagggcgccccgggcccctgc

SEQ ID NO: 1020763 - DNA, 120 bp, Artificial Sequence
  ENSG00000226363_3 (sequence is synthesized)
ggggaacaatagccgccgcctcctgggcggtctggcgggcgcgcggcacaaacgtccgcgccgccacgtgatgcgcgcgctcgttccgcgctctccgcgcctcagcgagcggccaggctg

SEQ ID NO: 1020764 - DNA, 120 bp, Artificial Sequence
  ENSG00000226363_4 (sequence is synthesized)
tttgcaaagacagacgcggttcctcctacttcagagcaagtctgggccagctgggatccgaccagaaatcgcaagcggaggagacgcagtagcgcaggctgagcgctaactgaaggcgcg

SEQ ID NO: 1020765 - DNA, 120 bp, Artificial Sequence
  ENSG00000226363_5 (sequence is synthesized)
acctgagcccggcgcctgctggggagctgcgcagccaggacagcggtcggcagcacagggcctgggcgcagggcccgccgtcaccacctcacgtcggaagccagcactgctgcccgccag

SEQ ID NO: 1020766 - DNA, 120 bp, Artificial Sequence
  ENSG00000226363_6 (sequence is synthesized)
ccctgccgcctgccctcggacttcccagggcgcccagggtcctcccaacgcgcctgcacccacacccgcccctgagccacagtgaccttgcattccccgccccctgccacacctcctgcg

SEQ ID NO: 1020767 - DNA, 120 bp, Artificial Sequence
  ENSG00000226363_7 (sequence is synthesized)
tgcccgagtgtcacccttaaataccgctctacacccagagagggacgaatacacctctgaagacagggcaagactaatttcaatgggtcagaaggttcttgcaggcactgttttatttaa

SEQ ID NO: 1020768 - DNA, 120 bp, Artificial Sequence
  ENSG00000226363_8 (sequence is synthesized)
gagtgcctatttactggcaggagtatttgtgtgggaggaagtaggctaagactgctgttgaacttgaagctaaacttgaatgccatttaaaataacaataaaaatatacttaaaacacca

SEQ ID NO: 1020769 - DNA, 120 bp, Artificial Sequence; identical to SEQ ID NO: 977200
  ENSG00000226362_0 (sequence is synthesized)

SEQ ID NO: 1020770 - DNA, 120 bp, Artificial Sequence; identical to SEQ ID NO: 977201
  ENSG00000226362_1 (sequence is synthesized)

SEQ ID NO: 1020771 - DNA, 120 bp, Artificial Sequence; identical to SEQ ID NO: 977202
  ENSG00000226362_2 (sequence is synthesized)

SEQ ID NO: 1020772 - DNA, 120 bp, Artificial Sequence; identical to SEQ ID NO: 977203
  ENSG00000226362_3 (sequence is synthesized)

SEQ ID NO: 1020773 - DNA, 120 bp, Artificial Sequence; identical to SEQ ID NO: 977204
  ENSG00000226362_4 (sequence is synthesized)

SEQ ID NO: 1020774 - DNA, 120 bp, Artificial Sequence; identical to SEQ ID NO: 977205
  ENSG00000226362_5 (sequence is synthesized)

SEQ ID NO: 1020775 - DNA, 120 bp, Artificial Sequence; identical to SEQ ID NO: 977206
  ENSG00000226362_6 (sequence is synthesized)

SEQ ID NO: 1020776 - DNA, 120 bp, Artificial Sequence
  ENSG00000232959_0 (sequence is synthesized)
agagatgcagaaggcaaaatagcttagggtaaaacaacaagaccaggtgactctgaagtaaaattttaaatttaaacaaactttctatatattatgtttaatatggcaagatccattcta

SEQ ID NO: 1020777 - DNA, 120 bp, Artificial Sequence
  ENSG00000232959_1 (sequence is synthesized)
cctcagcaagattcagaagcaaataaagagcaactagaaaagtaaaatatatgagagataaagaattagtatactgaattaataatttagaaaatcatttctactcaccaaggcaacaga

SEQ ID NO: 1020778 - DNA, 120 bp, Artificial Sequence
  ENSG00000213981_0 (sequence is synthesized)
attcattccagggctgctctgcagctgcccaggcagctccgtgggtggccactctgctaacgtgggagcacacgtggcttccatctgatgagcagtctcagggaagctgggggcttcaga

SEQ ID NO: 1020779 - DNA, 120 bp, Artificial Sequence
  ENSG00000213981_1 (sequence is synthesized)
caccaaatgtctatttccctccttgatttgagactcttttggagctcttggagacttccagcagaaacctgagctgccggctgccaagaatcagcggtggatttcttgacctgctcttaa

SEQ ID NO: 1020780 - DNA, 120 bp, Artificial Sequence
  ENSG00000213981_2 (sequence is synthesized)
taccaattgaataacccctttgaaaacgttcacatacatggggtacaaggtggtacctttgtgcatgagactgttctggagacggcttatcacccagcaaatcagtgttggccatctggg

SEQ ID NO: 1020781 - DNA, 68 bp, Artificial Sequence
  ENSG00000213981_3 (sequence is synthesized)
gacggcttatcacccagcaaatcagtgttggccatctgggactcagcgaccctttctacgaggctatg

SEQ ID NO: 1020782 - DNA, 120 bp, Artificial Sequence
  ENSG00000213981_4 (sequence is synthesized)
tttcagcctctccagtggctggtattacaggaacacaccaccatgcctggctaatgcttctctttctataaatgaagacgtgaggccgtgtaagctccaagagagcagggatcttgtttg

SEQ ID NO: 1020783 - DNA, 120 bp, Artificial Sequence
  ENSG00000213981_5 (sequence is synthesized)
tcttggtcaccgtgatatttcagctgctgacccagtgcttgaagcatacaatctggagtctccacaactttcttcatggaaccaccaccaggccccttctgtaggcttcttatggaggct

SEQ ID NO: 1020784 - DNA, 120 bp, Artificial Sequence
  ENSG00000213981_6 (sequence is synthesized)
gaaggtgtctacatggcagcataaaatagtaattaaggactctggagtcactgcccaggctcaaatccctgctgcaaattgcgaggtctttgaagagaaactgaggcccataaaattgaa

SEQ ID NO: 1020785 - DNA, 120 bp, Artificial Sequence
  ENSG00000213981_7 (sequence is synthesized)
tggctcatctcagatcaagtggccagatcaatgaagagaagtgtccttaggtccggctgctggtgtgaagtatgctctggaggtctgacatccactctccctcagactttctaatacggc

SEQ ID NO: 1020786 - DNA, 120 bp, Artificial Sequence
  ENSG00000213981_8 (sequence is synthesized)
gactttctaatacggcaggaattccgtccatgtatactcaagctagagttgccagatgaaatggaggacatggctgggtgcggtggctcagctcggagcagtggctcacgcctgtaatcc

SEQ ID NO: 1020787 - DNA, 120 bp, Artificial Sequence
  ENSG00000213981_9 (sequence is synthesized)
gttcaaaaccagcgtggccaacaagatgtgccagttctggtaaatttcctagcaagcttgaaggaagtgaaggacaactgcaaggaagggcaggatggagcatgcagcccacgtattccc

SEQ ID NO: 1020788 - DNA, 120 bp, Artificial Sequence
  ENSG00000213981_10 (sequence is synthesized)
cagcttggtggggcagaatgcgttcttggctcctgaggaatgggcaggcaacgcacaggggtcctgggaagaaagggagagaatatcctgggagagccatagaccctggcaccctcctgt

SEQ ID NO: 1020789 - DNA, 120 bp, Artificial Sequence
  ENSG00000213981_11 (sequence is synthesized)
ggtccttcatcaggataaatttctaaaagaagaattactggccaaaggattcctcttcagttggaaacagcagcaaagttcacaggtcgtgagtggatgtaaagtggacggaacaggttg

SEQ ID NO: 1020790 - DNA, 120 bp, Artificial Sequence
  ENSG00000213981_12 (sequence is synthesized)
ttgccagtctattggagtaggatggtagatgagcagtcccgttggctaacaggtgtgggtatgcctgttttaaaaattagcatgttgtaggggaatatttctcaaacttttgtcacgtat

SEQ ID NO: 1020791 - DNA, 120 bp, Artificial Sequence
  ENSG00000213981_13 (sequence is synthesized)
ctacctcttaggcattttttactttattcacctgtactactatttaatatttttaaaattcaactgatttttttttttgcttaaatacatgtctttaaaactggaactttattcgccact

SEQ ID NO: 1020792 - DNA, 120 bp, Artificial Sequence
  ENSG00000213981_14 (sequence is synthesized)
gtaaatggaaaaccagtgtcatttgccatatatagaagtgaactatatagtaaatacggtgaaagtgaaatggtatcatcacacttgtgctagattccatttcctatagaaggttctggg

SEQ ID NO: 1020793 - DNA, 120 bp, Artificial Sequence
  ENSG00000213981_15 (sequence is synthesized)
tttcttaaaaggcttgttaaaaagagagatgagtaaatgtgagaggaatttaagacatactagcaccattaagactttctccttaaagtaatctggaggatttaaattgagaattgaaaa

SEQ ID NO: 1020794 - DNA, 120 bp, Artificial Sequence
  ENSG00000213981_16 (sequence is synthesized)
aagtaactttattttacataagaaattatgtaaaagaattatgttatttaatgccacatccatacgtcatcaagagtcaacttggtgaccactagtggcccatgtcccacactttgagaa

SEQ ID NO: 1020795 - DNA, 120 bp, Artificial Sequence
  ENSG00000213981_17 (sequence is synthesized)
acgtgtgttggggtgggaatctgaagtcagaaaaactggagtatgataaccacctcagcacttattagaggccttcacttgggaatgatgacccttccttgtagggttgtagtgagaatg

SEQ ID NO: 1020796 - DNA, 120 bp, Artificial Sequence
  ENSG00000286612_0 (sequence is synthesized)
tttgcaggtttgtgcaaacctcattctggttcttgaaatatgtaaaagaccctcgaagcataattctgtgctattccccacattgagagagtgagatggagctcagttggatgtcacctc

SEQ ID NO: 1020797 - DNA, 120 bp, Artificial Sequence
  ENSG00000286612_1 (sequence is synthesized)
ccctgtttgggacaaagatcacactctgccttgaaacccagtaatcaaaaagatcctggacatggtgccatcctgttctctcaccacaagtccaatggcaagctggagcctaaaagtgac

SEQ ID NO: 1020798 - DNA, 120 bp, Artificial Sequence
  ENSG00000286612_2 (sequence is synthesized)
tgtgcccaagctttcagtgctttttctcctgggagaaactttggaatgagcacatcctctcatgactgaagctgttatttattaaagcagagatgcattgatggattcagcagcagtgga

SEQ ID NO: 1020799 - DNA, 120 bp, Artificial Sequence
  ENSG00000286612_3 (sequence is synthesized)
ccgaagttgagctctgccgcaggatgctgaagaccttgtcagatgtgggcagccagtagacagctgtaaggcaacccttgacctgagagctctgccatggtaattagtgttgtaaatgag

SEQ ID NO: 1020800 - DNA, 120 bp, Artificial Sequence
  ENSG00000286612_4 (sequence is synthesized)
tcaagcttacagaggcatatgctcaaatctaatatagcatcttccatcactatctttgtgttacgatgatcataactgttttcagagtgtgctaaaagtattcttaaagagttacaaagc

SEQ ID NO: 1020801 - DNA, 120 bp, Artificial Sequence
  ENSG00000286612_5 (sequence is synthesized)
agtaacaaagaagctagcaactgcccaccgcctttccccctcacccaaacaacctccaccctaggtgatttcccaaacccatttgaaatagagatgaattcaggtgagtttctataccac

SEQ ID NO: 1020802 - DNA, 120 bp, Artificial Sequence
  ENSG00000286612_6 (sequence is synthesized)
attgtatcccaaaagggaaaaatgttattgaagatccaatggcctgggatgatacaccattgatcattgtaagaaatacttccagaaactgtttttaatctttccgccagagcattagca

SEQ ID NO: 1020803 - DNA, 120 bp, Artificial Sequence
  ENSG00000286612_7 (sequence is synthesized)
attattctttagcccatggtgagtaatgacttgagtttcccagcttctcaatcgataaaacatttaccctaccgctacaaatgtgctcttcgcttagacaagcagaatttttcttccaat

SEQ ID NO: 1020804 - DNA, 120 bp, Artificial Sequence
  ENSG00000286612_8 (sequence is synthesized)
tactctttttttttttagtgtgacctcataaaatatttttaaacatatttcaaggctcttttgtaaaaaaggaaaggaacaatactcctccacgtgcttattttttcccttttccttctt

SEQ ID NO: 1020805 - DNA, 120 bp, Artificial Sequence
  ENSG00000286612_9 (sequence is synthesized)
ttgacaaagaagtcatgaagatttcatagttatttagatagctaagactgctttttatcatctctttcaaacttaagaaatggtttttatcccgccagctgctacattttggagttggcc

SEQ ID NO: 1020806 - DNA, 120 bp, Artificial Sequence
  ENSG00000286612_10 (sequence is synthesized)
agtaataaaacatttctcttcccctctcccctgaacaaagctggttgtccaaattccttcgaaaatcaacaacaacaaaatataataccactcctaaggaggctgatatcttcctccact

SEQ ID NO: 1020807 - DNA, 120 bp, Artificial Sequence
  ENSG00000286612_11 (sequence is synthesized)
ttctctacatgccttataaaactatagcactggctaatggagaacaacataaaacacactgttatcaggctaacaaatagctgtacagaaaattggagattaaagacgaatgtgcacaag

SEQ ID NO: 1020808 - DNA, 120 bp, Artificial Sequence
  ENSG00000263207_0 (sequence is synthesized)
agttcatgtggctgagcagggtctgggatccagagggtgggggttagggggaatctcaccttcacacgacctcctgcagttcagctctaacctgggaaaggaggccttcccgagttgccc

SEQ ID NO: 1020809 - DNA, 120 bp, Artificial Sequence
  ENSG00000263207_1 (sequence is synthesized)
tacttcaccacccaggaccccaggaagttgtctctccagctgcaagaaacatctcttgcctgggtggcctagcctttccctgccttccccagcccaaagcaggagcctgcagcctagggt

SEQ ID NO: 1020810 - DNA, 120 bp, Artificial Sequence
  ENSG00000263207_2 (sequence is synthesized)
tgatcctagttggctggagacagtggggcgtgagaggggctgaagggcagcctggcatcccagaaacctgctttaccttctcaattgtgttaccaccttgttttgtggcttggacaagcc

SEQ ID NO: 1020811 - DNA, 120 bp, Artificial Sequence
  ENSG00000263207_3 (sequence is synthesized)
ccttcccctcctagttctgccactgtaaaatacagggatgatctagttctccatcctgctgctcagtatctcctccagagctgatggtgagctccaggggtctaggagaagggcctgaga

SEQ ID NO: 1020812 - DNA, 120 bp, Artificial Sequence
  ENSG00000263207_4 (sequence is synthesized)
atggcacgtctgagcctgtgattatcccagcctcaagcccccagtggcagtctgttccccccatctctgcccccccgagagcctcctgcaaatctcccaatataatctcccagaatcata

SEQ ID NO: 1020813 - DNA, 120 bp, Artificial Sequence
  ENSG00000245694_0 (sequence is synthesized)
agaatggaaggcagcagatgtttgttgacttcttgctctatatcgggcactgtgctagataccatacacgccatcaacatttaggacagtatgacaaaggagaatgaaagctgtctcttg

SEQ ID NO: 1020814 - DNA, 120 bp, Artificial Sequence
  ENSG00000245694_1 (sequence is synthesized)
agccacagtgactccctctgggcctcacccacctgagatgacatcacgacgcaaatctaggacttacgctcttcatacggatggaatggttggttcacttggctttcagagtgcagacaa

SEQ ID NO: 1020815 - DNA, 120 bp, Artificial Sequence
  ENSG00000245694_2 (sequence is synthesized)
gccattcagtggagggcatgcctcagcctgcactcttctgactcatgacatgacttctccatggagagccaggatttttctcaagtgtaacaatattaattatcaagtcactttaaaaca

SEQ ID NO: 1020816 - DNA, 120 bp, Artificial Sequence
  ENSG00000245694_3 (sequence is synthesized)
ttcccactcttgaaaatatgaagaaaagatgtcctttcagcaataatgggttatggttgattaactgagaaggttgtattaaacgttctctagtagaaatggctaaagagcatgcttttt

SEQ ID NO: 1020817 - DNA, 120 bp, Artificial Sequence
  ENSG00000245694_4 (sequence is synthesized)
gagaagtgtatcatctaggaagaaaatcaaatggagtattggtaattaaattgtaattccatgaaggaaggaagtggtgcaaaagatgaagctaactattcctgtttttctttttaagag

SEQ ID NO: 1020818 - DNA, 120 bp, Artificial Sequence
  ENSG00000245694_5 (sequence is synthesized)
gagctactgtactggctattggaaggaggagattctgaagataaggaggtaaaacctgtttagaaattaaaaatgagttacgatttaaagaaaattcagatgactcattgtgagtgctag

SEQ ID NO: 1020819 - DNA, 120 bp, Artificial Sequence
  ENSG00000245694_6 (sequence is synthesized)
ttctcttgtaggatgccactggaaatgttgaaatgaaaaatattcagccgttggtctttgaaatttcctgtgatgtgtttcaatctagatgcaaagaacatggaaaaatcaaagtgctcg

SEQ ID NO: 1020820 - DNA, 120 bp, Artificial Sequence
  ENSG00000245694_7 (sequence is synthesized)
agtggtttaaatatgttttgggtattcctgtttatagactataatacttttccaattaaaatcctcagttgtcacgcagaagaaggttaagctgtatttgattgccagttttactgaaaa

SEQ ID NO: 1020821 - DNA, 120 bp, Artificial Sequence
  ENSG00000245694_8 (sequence is synthesized)
attttctgctttatttgcacattgatggctctgctgctcagctggccacggccgcccggcgtctgagatagaattgtgttaatatgagaaagggaacggccgatcatgattagcaggcag

SEQ ID NO: 1020822 - DNA, 120 bp, Artificial Sequence
  ENSG00000245694_9 (sequence is synthesized)
acggcatgcagatagcatctggcgggttttctccgtttttatatgaaagcgttcacttgtttgctggtaaacacgaggttttaactttttatctgggtagtggtgaccgtttgtttcact

SEQ ID NO: 1020823 - DNA, 120 bp, Artificial Sequence
  ENSG00000245694_10 (sequence is synthesized)
ctcccctcctttttacttcctattcattagcttttccgtttggaaagctgcatacttgttagcggtagtttggtgtcttgactctgaagctttctcttccagcagaggtgggatctgtat

SEQ ID NO: 1020824 - DNA, 120 bp, Artificial Sequence
  ENSG00000245694_11 (sequence is synthesized)
ccctcccatcctaggttaccaagaagactttttctccccttactttctattgaatttgtgtctttcccaacatttaaacttacactagggataagtttgctcgggttgtttttgacgtag

SEQ ID NO: 1020825 - DNA, 120 bp, Artificial Sequence
  ENSG00000245694_12 (sequence is synthesized)
gactattaaatattctcattttgaaacttcctaaaggtttattggtttgtcatgtctgcaccgatccagtttcgcataactcttaaaatttaaagctttaaagtacggttcgcaattgta

SEQ ID NO: 1020826 - DNA, 120 bp, Artificial Sequence
  ENSG00000245694_13 (sequence is synthesized)
ttgtcaagacatggccctagagcttgttcttcaagttttggctgtacagttgtcattgtttcagtcaagtgcaaaagaggttattcctgtttatttagtgttaatagctatttacagtta

SEQ ID NO: 1020827 - DNA, 120 bp, Artificial Sequence
  ENSG00000245694_14 (sequence is synthesized)
aaactttaaagactcatagaagtaggtctgctgtattttaaagatctcatcattcttgtgggagagacacaacaccaacaccaggaaaggcaacagattgcttctgtcatatcgctttgc

SEQ ID NO: 1020828 - DNA, 120 bp, Artificial Sequence
  ENSG00000245694_15 (sequence is synthesized)
tgttttggagtgtacttaaaggattatgattgataaggctgtcttgccagagaatgttgacacaggtgtgcatcgttatcttaattaagatcctgagaaaatgttgtctataaatggtga

SEQ ID NO: 1020829 - DNA, 120 bp, Artificial Sequence
  ENSG00000245694_16 (sequence is synthesized)
cataagaagggcggcatatttttgtacagttttgcttttggagaatttaattgcacttgaaacctgtctttgagcttccagattttgtgagcactttagcaacagaagttttagagagaa

SEQ ID NO: 1020830 - DNA, 120 bp, Artificial Sequence
  ENSG00000245694_17 (sequence is synthesized)
atgatagtttaatgttaagtgttctggcatgtactaatactacttgtggctttttggcaatgcctgtgtcggctttctttgtgctctacctttgtggaataatggtttctaattttgaaa

SEQ ID NO: 1020831 - DNA, 120 bp, Artificial Sequence
  ENSG00000245694_18 (sequence is synthesized)
gaaaagcataaaatagagcagtattttattaagcaaacacttgttagtgttcagaataagtctgtagaggagggcatgcttaatgtgcagaaacaggaatataataagaggtgttaagtg

SEQ ID NO: 1020832 - DNA, 120 bp, Artificial Sequence
  ENSG00000245694_19 (sequence is synthesized)
tgatgcttccataatacatttggatgctgtcagctaagttcacttctgaactaaggggttcctccaaatgttggctgaaattcatcccaaggctggtctgcaaagtctgcaattcataat

SEQ ID NO: 1020833 - DNA, 120 bp, Artificial Sequence
  ENSG00000245694_20 (sequence is synthesized)
ggagctactgtactggctattggaaggaggagattctgaagataaggaggtaatattatctcttttaaaagaatactttcctctgtaatcctgaatctttattacatgtaagaactttgt

SEQ ID NO: 1020834 - DNA, 120 bp, Artificial Sequence
  ENSG00000245694_21 (sequence is synthesized)
gcagtagacagcaatttctttgaatttggtatatggaaacaattttattttcctctgctaagtttttgagcctgcctcttctagtgccatggactgcattggtagagctgagaaatatca

SEQ ID NO: 1020835 - DNA, 120 bp, Artificial Sequence
  ENSG00000245694_22 (sequence is synthesized)
tttagccatactcagcacccttaaaatagcttctttctgagaattagatctgtgaaggtgtcctgcacagttcttgtagatgtcattttagtttgtggttgacgtgcatgcatttagcat

SEQ ID NO: 1020836 - DNA, 120 bp, Artificial Sequence
  ENSG00000245694_23 (sequence is synthesized)
gttgcttaaccgtcctcattcgcctcccagttctttgttgccttcatttggggggatgtgttttctgctggatgatttactgctagacatgaccaaactctgagtataagacttggtgtt

SEQ ID NO: 1020837 - DNA, 120 bp, Artificial Sequence
  ENSG00000245694_24 (sequence is synthesized)
tggcagctggttccagtgctctgctgagaagtagttgggcccagcctggggcattgtagtgtcctggaggccgggagctcctgcacaggggttcttttcctggttcagagccttaggtgc

SEQ ID NO: 1020838 - DNA, 120 bp, Artificial Sequence
  ENSG00000245694_25 (sequence is synthesized)
ctttccacttttcacgtaatcttttcctaggttggcttgctgcttactttgcagctgttgcagggattcacatggaatggagggctcccttttattgtggattatttctttgataattta

SEQ ID NO: 1020839 - DNA, 120 bp, Artificial Sequence
  ENSG00000245694_26 (sequence is synthesized)
cccatgtgctttttcattttcaaaaacccagtggtgtttaagaatgaaagattcttgaagaacaaaaattgggttaaatttgtatctatcagaaaagattctatcctctgatgctatgta

SEQ ID NO: 1020840 - DNA, 120 bp, Artificial Sequence
  ENSG00000245694_27 (sequence is synthesized)
ggcacattgaatatgcaggctaaattaaaaacagagtaaaacctttttataatatgccaattactatatctaagaatgtttatacaggctgaaattttgtaatggtatttatatctgttt

SEQ ID NO: 1020841 - DNA, 120 bp, Artificial Sequence
  ENSG00000245694_28 (sequence is synthesized)
tcctttttaaggaaaataatatacttttctaggcatcaaaaatatctgcccctttcactaatgctgatgtaccaccttcccccaacccccaacgctaaatttgactggcttaaaaacatc

SEQ ID NO: 1020842 - DNA, 120 bp, Artificial Sequence
  ENSG00000245694_29 (sequence is synthesized)
tgccccctgaactatatctggggaggaatattaataaaacaatgaaggacttcatggtgtctagttatataattaggaaattggttagaaacgtggctaaaaccagtttctttcattaaa

SEQ ID NO: 1020843 - DNA, 120 bp, Artificial Sequence
  ENSG00000245694_30 (sequence is synthesized)
agaactagtgtacatttaaaaacaaaaaccttcaggaaaaagactctttgatctttaagtcaaatagtatttttggttaacacagcaggaaggggaaatataccaatttcagattctttt

SEQ ID NO: 1020844 - DNA, 120 bp, Artificial Sequence
  ENSG00000245694_31 (sequence is synthesized)
atttatgcctaagtagaggttgtaagcagctaaggaagtgattaaaatgtagtctagtaaaaaatggtgctgattacttggaaagcagtttacatttgcaaaaaaattcagtattatgac

SEQ ID NO: 1020845 - DNA, 120 bp, Artificial Sequence
  ENSG00000245694_32 (sequence is synthesized)
cttcaccaacttttacacatcatatacttgggttattacttatggtatagcttgtgtatggaatgcaagggtattttcaaattgactaggtcttgctggtcatcttaaaatatgttacaa

SEQ ID NO: 1020846 - DNA, 120 bp, Artificial Sequence
  ENSG00000245694_33 (sequence is synthesized)
gaaatgtaatattttttaatagaaggaaaatataaatttaatatctgggcaattgagacctttaaacttactttaaaagtatgatcttgatgtatatgatactgttttgtctttgctata

SEQ ID NO: 1020847 - DNA, 120 bp, Artificial Sequence
  ENSG00000245694_34 (sequence is synthesized)
ttaacagaattagaggggtgttctgcaattcaaataccttatatattccaaattttattctctataatggacttttaaaataaaaggtatatgtgcttcaagagggcaaaatttgaatca

SEQ ID NO: 1020848 - DNA, 120 bp, Artificial Sequence
  ENSG00000245694_35 (sequence is synthesized)
tgagctaatttgctaagcatcagattatagaaaagcatccttgattaatttggaactgtgaaagggggcgggtaaaactgttttctgcagaaatttactagtgcagcaaccatttaaatt

SEQ ID NO: 1020849 - DNA, 120 bp, Artificial Sequence
  ENSG00000245694_36 (sequence is synthesized)
aaatgtttgttaacataatagtgatggcattttctcctccccctccttgtggttttgtccaactagatgttacagtggcagttgcactgactgttaagtgtttaaatgatgacaccatta

SEQ ID NO: 1020850 - DNA, 120 bp, Artificial Sequence
  ENSG00000245694_37 (sequence is synthesized)
tgtgaagtgattttgaaatgagagattccagccaagaattacatctgctcccatctccttcaaatcatactctctggcagtacagattatgattgatttgtttgtgacagattgcaggaa

SEQ ID NO: 1020851 - DNA, 120 bp, Artificial Sequence
  ENSG00000245694_38 (sequence is synthesized)
acagtcattgatttttcaatattttaccttaaaattatttacagttgtaaccatggggaggtattttcatgggctgtcagcccctgaaagactaggataatattccctgctctctgacaa

SEQ ID NO: 1020852 - DNA, 120 bp, Artificial Sequence
  ENSG00000245694_39 (sequence is synthesized)
gacaaattacctgtaatgagtgcagtagctgaagggtatacttttattttaaaatatgtcaataaccccagtgactaaacgaatattgatttagcataatgaagcctgagtaacgtgaaa

SEQ ID NO: 1020853 - DNA, 120 bp, Artificial Sequence
  ENSG00000245694_40 (sequence is synthesized)
atgagctttttcaaggggcatggtaaagtctttctttttagctggttgtaagaagcttttgattcttttcagccagctggtaggaatatagaattttataagcaaaccatcaggaatgat

SEQ ID NO: 1020854 - DNA, 120 bp, Artificial Sequence
  ENSG00000245694_41 (sequence is synthesized)
agtgttgtttctgataagcaacatccaaatattttgaccctgcttttagtggtttttttcaaatcttattttgagtcttacttttagtcatagaatagctactgatttgatgcggtcttt

SEQ ID NO: 1020855 - DNA, 120 bp, Artificial Sequence
  ENSG00000245694_42 (sequence is synthesized)
gacttaatatttttacaatttcaatatattttgcattggaatctccagtaatgaatattaaaatatatgtacaatcatttgtagatgatatcaattatattaagacatttcagatgggct

SEQ ID NO: 1020856 - DNA, 120 bp, Artificial Sequence
  ENSG00000245694_43 (sequence is synthesized)
ggctattgtagtatttaatgtgccgtattttatggtagaataattctcagtctctggacatcaagattgctttcagtgggaatgaagattaatttacttcagtcctgattttttaggcat

SEQ ID NO: 1020857 - DNA, 120 bp, Artificial Sequence
  ENSG00000245694_44 (sequence is synthesized)
caatgcatgttttcatttttgtcagacttttaccctcttttaatgtaattctcaacttcttatggatttacttcccaatacataaaatccttcaaaacaagaatgataataatttttata

SEQ ID NO: 1020858 - DNA, 120 bp, Artificial Sequence
  ENSG00000245694_45 (sequence is synthesized)
ctttttataaaaataaatttatttttagtccatcaaggtgtctgaagattttatgcctaggtatctccatatctaacttgataaggaaaataggataaacaatgctggtaatagcaggaa

SEQ ID NO: 1020859 - DNA, 120 bp, Artificial Sequence
  ENSG00000245694_46 (sequence is synthesized)
agtaagtatttgaataagatgtcaaactgatatttcatgtgaacctaactcattttatggtaactaataattatcttatttaaatcaataggtaaaacctgtttagaaattaaaaatgag

SEQ ID NO: 1020860 - DNA, 120 bp, Artificial Sequence
  ENSG00000245694_47 (sequence is synthesized)
taggacacaaaattactgttttatttttttctcaggagtttgcctaagggtgtgacagatgatctctgtcacttgtcttagttgtgtcctgcaataaactggatgctttataaaatacta

SEQ ID NO: 1020861 - DNA, 120 bp, Artificial Sequence
  ENSG00000245694_48 (sequence is synthesized)
gacctgtgatttcgtatgctgtaatatttcatttctccatcacccctccaaattatttcttagtttggagtaaaataataaatgtattatagtcaacatctcttgacccctctttagttt

SEQ ID NO: 1020862 - DNA, 120 bp, Artificial Sequence
  ENSG00000245694_49 (sequence is synthesized)
cagctaaactaagcatgtgtgtttgtgtgttcattttatagttcatgtgtagaactatgtgaattaaatttaagaaacatgtaaagtagaggaaatagttttctggagaaatttttcctt

SEQ ID NO: 1020863 - DNA, 120 bp, Artificial Sequence
  ENSG00000245694_50 (sequence is synthesized)
tttggatattatgcccttttccattgcttttctctgcttgaaagcaaaaaaaagtaccctacccctgttctcctttagggaaaaactattcctataaagtatttttaaatcgtgcaagtc

SEQ ID NO: 1020864 - DNA, 120 bp, Artificial Sequence
  ENSG00000245694_51 (sequence is synthesized)
attgcctagggttagctaaaacatttctttttaaaaaggagaaaatgccctggctttaacattttcttgtatttgtatctattaagataaacagtttactttgatacagtacataccaat

SEQ ID NO: 1020865 - DNA, 120 bp, Artificial Sequence
  ENSG00000245694_52 (sequence is synthesized)
ctacttaattttttttccaggattccttttactatgtttggtctgaccttttatgataacttaatatgggaacaaattagcatataattctattttccatgtgacctcaaccagttgcag

SEQ ID NO: 1020866 - DNA, 120 bp, Artificial Sequence
  ENSG00000245694_53 (sequence is synthesized)
aattgtaccactactttagggggggcaatttgacagtttatgtagactatagcattaattgttcccaaatgttcagtgcatcctggctaatgtgttattgaaggtgttttcacgtaagca

SEQ ID NO: 1020867 - DNA, 120 bp, Artificial Sequence
  ENSG00000245694_54 (sequence is synthesized)
gttagaggaagcacttcacccctattactaagttattaaaatgcctcctaaaggtagcattttaaattagtatacataattgattagtaatttgtcttctcccaagcataaaacagcata

SEQ ID NO: 1020868 - DNA, 120 bp, Artificial Sequence
  ENSG00000245694_55 (sequence is synthesized)
gcagagttaagtgtgaccagtgaagtataagatattagggattgatggtgacaatgatcatagcaactaaatggattttttttttcttttagattcagccgttggtctttgaaatttcct

SEQ ID NO: 1020869 - DNA, 120 bp, Artificial Sequence
  ENSG00000245694_56 (sequence is synthesized)
accaaatatattttgtttagccaaggtataggaaaaataaaataaattgtataggttgacttttttctaaaatgtctttattggattgaatgaatgtttatacctgaaaaaaaaaggttc

SEQ ID NO: 1020870 - DNA, 120 bp, Artificial Sequence
  ENSG00000245694_57 (sequence is synthesized)
tggaatgtggttgcagtacattgattctgaagatggcccagatcttcactcatatcctgatgtcctttagcgtgtcactttgcagctcctcccatgaaacgatcaagtctatttccctac

SEQ ID NO: 1020871 - DNA, 120 bp, Artificial Sequence
  ENSG00000245694_58 (sequence is synthesized)
accttaaaagtgggttggacttatctttatttattcctggagaggacactcttggtgccccacccatcctccctcctccttgctactttagcctacctgaattccaaatgtacctgtgtt

SEQ ID NO: 1020872 - DNA, 71 bp, Artificial Sequence
  ENSG00000245694_59 (sequence is synthesized)
ccccttcgcctttgcctgcagaactggagcaaagtttgtcatcttgatacactagatctttgatgatatca

SEQ ID NO: 1020873 - DNA, 120 bp, Artificial Sequence
  ENSG00000245694_60 (sequence is synthesized)
aagtttgtcatcttgatacactagatctttgatgatatcaataaggaaacatccacaccctttggttaaaagactctgagacttcaaggactgctggctgttcagaagaggctgtggtgg

SEQ ID NO: 1020874 - DNA, 120 bp, Artificial Sequence
  ENSG00000245694_61 (sequence is synthesized)
ttcaaaatcaagaccttgttcctcatatccagaaccaccagctggggtcccgcttccatcagattgaaccacacaggatcacagtggagtctccttcttgagtcttcccaccctggaaac

SEQ ID NO: 1020875 - DNA, 120 bp, Artificial Sequence
  ENSG00000245694_62 (sequence is synthesized)
aggagcctcaattctctgagtcgcctcttctctagggacctgggtggattgacatctctgaccctttgaaattccagtgtaaacctcatgttgagatggtggcatcaaaagagggcagaa

SEQ ID NO: 1020876 - DNA, 120 bp, Artificial Sequence
  ENSG00000245694_63 (sequence is synthesized)
ccttgggtccctgagtgactaaagtgagcacagacaaaggagaatgaaagctgtctcttgtagataggatattttcagccgtcatcaccatggactctttgaaatgtactacttcagaaa

SEQ ID NO: 1020877 - DNA, 120 bp, Artificial Sequence
  ENSG00000245694_64 (sequence is synthesized)
tgctgaacagagtgaacctcagaacagatagcagtggcacctagaagatataatctcaacagcagatgagttattgagggatgattgctgattatggattcctcttcatctctcttaact

SEQ ID NO: 1020878 - DNA, 120 bp, Artificial Sequence
  ENSG00000245694_65 (sequence is synthesized)
tatattccaagctgttaacctagaataaatcctactatatctaattaatgcattaatcaaactttgttttgaatggaaggggggagaatatgttgattaccccggctagtgggatacaaa

SEQ ID NO: 1020879 - DNA, 120 bp, Artificial Sequence
  ENSG00000245694_66 (sequence is synthesized)
atatacctaaagcagaatatctttctccatcatgaataacattaatctctgcagttcttacaagtgaataattattatatagtttgtttcctatttgtctggcttggtatttatccttta

SEQ ID NO: 1020880 - DNA, 120 bp, Artificial Sequence
  ENSG00000245694_67 (sequence is synthesized)
tgagtttccaggtgacaatttgtttcaggaagaattctccagaaacaattttttaagattatcgtcaaattccttaataaagagttgaaagccaaactcactaggtgaaatgcaacaaca

SEQ ID NO: 1020881 - DNA, 120 bp, Artificial Sequence
  ENSG00000245694_68 (sequence is synthesized)
ctaatatgactcatatttatgggaggaaaaagacttgaaagatattcctatgtgtactttaattttctgtaatagtccctctggaatagaatatctcttcctcaaacaaatctattggct

SEQ ID NO: 1020882 - DNA, 120 bp, Artificial Sequence
  ENSG00000245694_69 (sequence is synthesized)
catttcatatacaagaaaaagttgccctaaatggcagagtttcatctctgtaaagaaggctgacatccacttccttcacagaatccctgcatttgggtaattgagtaatgatagattacc

SEQ ID NO: 1020883 - DNA, 120 bp, Artificial Sequence
  ENSG00000245694_70 (sequence is synthesized)
ttgccattgggaaataccttgttgtggcctttgtagcagctataggaagatggaagaattcttttgtatagacaggtctctagcctctttggtgtggacactgtgaaggggtacatctgg

SEQ ID NO: 1020884 - DNA, 120 bp, Artificial Sequence
  ENSG00000245694_71 (sequence is synthesized)
tgagaaggagtgcttagggaaggaactgggaaggtccacaaaggctgatgatgacaaagaatccaagggctatgatgaattcttaagcttagatctcagagtcataaagtaaatttatta

SEQ ID NO: 1020885 - DNA, 120 bp, Artificial Sequence
  ENSG00000245694_72 (sequence is synthesized)
ggctagagagatttccttttttatttttgatcaaactttattttttcagattgttaagttcacatgcagttgtacaaaataatacagagatctttgaacactacccagtttctcctaata

SEQ ID NO: 1020886 - DNA, 120 bp, Artificial Sequence
  ENSG00000245694_73 (sequence is synthesized)
gtaacttcttgcaatatactgtatagcacagcatcacaacctggatactgacattgatgcagtcaagacagagaacatttatatcatgaggaggatccctcattaccgccctttgatatc

SEQ ID NO: 1020887 - DNA, 120 bp, Artificial Sequence
  ENSG00000245694_74 (sequence is synthesized)
ctcccttaaccctggcaaccactagcatgttctccatttctataaatttgcctttataggaatgttatataattgcaattaaagtgtgtaaccttttggggtttgactcacccggcatca

SEQ ID NO: 1020888 - DNA, 120 bp, Artificial Sequence
  ENSG00000245694_75 (sequence is synthesized)
ttttctggagattcagcttatatgtgtcaatagtttgttcccttttttttagttcagtagtattctgtggtacgtgtgtaccacatcactcatcaattcggacttctgggttgtatctgg

SEQ ID NO: 1020889 - DNA, 120 bp, Artificial Sequence
  ENSG00000245694_76 (sequence is synthesized)
tatttgattattacaaatagaagtactatatatatattcgtgtagaggtttctgtgtgaacataaactttcattttcctgggacagatgcccacgagtgaaaattgtgagtcatatggta

SEQ ID NO: 1020890 - DNA, 120 bp, Artificial Sequence
  ENSG00000245694_77 (sequence is synthesized)
attatgtagagtattttttttttgagacgatttgtttatgattttaaaacataaaaatataagttgtagccaaatataaggaaggatttttccacaatctagactttattcttattttag

SEQ ID NO: 1020891 - DNA, 120 bp, Artificial Sequence
  ENSG00000245694_78 (sequence is synthesized)
agaaatacttttgaaaaaattgctttattggcaaacaattcctatgtaaaggaataaaagacgcatatactctaggaaagatgttgcaaagctgacaggcaactttgagaaagatgaggg

SEQ ID NO: 1020892 - DNA, 120 bp, Artificial Sequence
  ENSG00000245694_79 (sequence is synthesized)
cagttttccagtgttactggagacttgacattcaaggatgtattatgatagtttctgaattgatagattctttagcgtttgtcactaccctcaggcctgcagtttttatttgtagaatta

SEQ ID NO: 1020893 - DNA, 120 bp, Artificial Sequence
  ENSG00000245694_80 (sequence is synthesized)
actcatctttacaatgctttgttgagtgctgttgcagaaaatgctcatgtaattcaattatatgcagttaggaaaaagaagtatctttttctagtacatggcccctaaaatgatgacttt

SEQ ID NO: 1020894 - DNA, 120 bp, Artificial Sequence
  ENSG00000245694_81 (sequence is synthesized)
ccacaatgctgaatggaggaaacagctctgtttccatcaaactctggtggaaattatacaaagttatattatgctttatgagacatagtgaggtagtacacaaccatatatgctatatta

SEQ ID NO: 1020895 - DNA, 120 bp, Artificial Sequence
  ENSG00000245694_82 (sequence is synthesized)
ttggggagacccactgaaagaattttcaaggataatttttgctctgattttctatcatgtatattgactttattgattgattgattgagatggagtctcaccccgtcacccaggctgaag

SEQ ID NO: 1020896 - DNA, 120 bp, Artificial Sequence
  ENSG00000245694_83 (sequence is synthesized)
tatattgactttaaaacgttaccggctgggcgtggtggttcacgcctgttatcccagcactttgggagcccgaggcggatggattacctgaagtcaggagttcgagaccagcccaacctg

SEQ ID NO: 1020897 - DNA, 61 bp, Artificial Sequence
  ENSG00000245694_84 (sequence is synthesized)
ggagttcgagaccagcggcgcctataatcccaactactgggaaggctgaggcaggagaatt

SEQ ID NO: 1020898 - DNA, 74 bp, Artificial Sequence
  ENSG00000245694_85 (sequence is synthesized)
cccaagcaatcccgagtagtagggactcaggcacgcaccacgacacctggctaattttttgtatttttggtaga

SEQ ID NO: 1020899 - DNA, 120 bp, Artificial Sequence
  ENSG00000245694_86 (sequence is synthesized)
aggcgtgagccaccgtgccaggcctttaattcttaattgccgccaggattgattggtaaggctgtagaagagttgctgtccattccaagtcttcccatctgaagcaaccaccatgccaca

SEQ ID NO: 1020900 - DNA, 120 bp, Artificial Sequence
  ENSG00000245694_87 (sequence is synthesized)
gccttattctgtcccatggctgttttgtgcatctccaagtgtaccagtgtgaggccctcaaacacacccatgccctctgatgaaataatgttggtcgtgataaccacagggatgtcacag

SEQ ID NO: 1020901 - DNA, 120 bp, Artificial Sequence
  ENSG00000245694_88 (sequence is synthesized)
ccgccgttccacactctaactaattcttattttgttccaacaacaacaatttgaaatgggaagaaccaccccattttagacatttcaaaacgagggcttggatagattatgtaccttgtc

SEQ ID NO: 1020902 - DNA, 120 bp, Artificial Sequence
  ENSG00000245694_89 (sequence is synthesized)
caaggtcacacaaccaaatggcaaggtacggactcaacctagttccatctgcctccagtccaaaacccagagctctcaactgccaccctcattgtctctactagatacgggcttccctgc

SEQ ID NO: 1020903 - DNA, 120 bp, Artificial Sequence
  ENSG00000245694_90 (sequence is synthesized)
ggtaactgttgaggctggaaaacacaggcctgagagaacttttaaatatgaaatgataactctttgcctactgagattcttatttttaaaaacccagaggaagatcatatttatatattt

SEQ ID NO: 1020904 - DNA, 120 bp, Artificial Sequence
  ENSG00000245694_91 (sequence is synthesized)
attcaacattcacgtatgatatttagatttacaaaatgctttatagtgtaacagaatgggcagaaatttttactcgggcttataattgtcttttctttcatattcatttattcctttgat

SEQ ID NO: 1020905 - DNA, 120 bp, Artificial Sequence
  ENSG00000245694_92 (sequence is synthesized)
ttatataatgtgttctctgcttggtcttctgagattacgtacaatggtaacaaatcgaaaataatattaataaaagattattttgtatcactcacagggaaaactgactggggccatgcg

SEQ ID NO: 1020906 - DNA, 120 bp, Artificial Sequence
  ENSG00000245694_93 (sequence is synthesized)
cctctctgttctttagaaacgttatgcgagagaacataatattgtccccagaatactgtctgtaatgccggctatgcttattcgtggtgctttaaaaataaatttaactcctgttcttca

SEQ ID NO: 1020907 - DNA, 120 bp, Artificial Sequence
  ENSG00000245694_94 (sequence is synthesized)
catcaatgttggttttaccaaagtatttattattgataatagaggctaagtacaaaatgtagagaatgtcagctacttgaggcctttgattattaaaaattttattaatgcattaaacaa

SEQ ID NO: 1020908 - DNA, 120 bp, Artificial Sequence
  ENSG00000245694_95 (sequence is synthesized)
ttataaactcagtgcttttcataaaaatcaaagtgaagtttgtaatattttatacaaatagaattattatttaagagaaataacctgtttatgcctaattacagtttttaatcatttcag

SEQ ID NO: 1020909 - DNA, 120 bp, Artificial Sequence
  ENSG00000245694_96 (sequence is synthesized)
tcagttacctatttcttttaagaataaatttagtgggaatatcagttccagtcatgggtaccaaacttttttagtgacagagtacacacaggtatgtaaaacttgtcatttctcatcaaa

SEQ ID NO: 1020910 - DNA, 120 bp, Artificial Sequence
  ENSG00000245694_97 (sequence is synthesized)
tagaggctgctgaatataggcaggtaagaaaagctatgagaaagaattgttttgcagaatatttgtctagttgtcagagcaaggaactgaatttattgacacagaacattttattaagta

SEQ ID NO: 1020911 - DNA, 120 bp, Artificial Sequence
  ENSG00000245694_98 (sequence is synthesized)
aaaaaaatggttcttataacaaaaaaaaaagctaattttacagaaggcagtagttaatatagccgccaataaaataaatgtttctctgaatactttccgaggcattacagtgatttttaa

SEQ ID NO: 1020912 - DNA, 120 bp, Artificial Sequence
  ENSG00000245694_99 (sequence is synthesized)
ctaatatgaagtgatatataataattttaaagtaacatccttgagttttcctattattaattgcttatggaaattgggtttcacgtatgactgagagctaaagcattacagtgagttaga

SEQ ID NO: 1020913 - DNA, 120 bp, Artificial Sequence
  ENSG00000245694_100 (sequence is synthesized)
aaacacaacacaaatgtaaagaaaatgttaggtggtgagtaatctgattcctttttgtttgcctttaagcttagttttttgttttgttttactttgttttaaaccatgtataaaattgtt

SEQ ID NO: 1020914 - DNA, 120 bp, Artificial Sequence
  ENSG00000245694_101 (sequence is synthesized)
gaatttaaaagataagaggattaagtaatttcttttttcctcctaaggataaatgtaggaaaaatctaaacacataggcagattggttgagttttatatctgttatcggccacatttatt

SEQ ID NO: 1020915 - DNA, 80 bp, Artificial Sequence
  ENSG00000245694_102 (sequence is synthesized)
gtgtcccctcgtgggccgaacggacgcggcggtgccccgcgcccgaccagacgtcccgtgggctagggcctgggcctcgg

SEQ ID NO: 1020916 - DNA, 120 bp, Artificial Sequence
  ENSG00000245694_103 (sequence is synthesized)
tcctccaaatgttggctgaaattcatcccaaggctggtctgcaaagtctgcaattcataatggagctactgtactggctattggaaggaggagattctgaagataaggagcaacttcgtc

SEQ ID NO: 1020917 - DNA, 120 bp, Artificial Sequence
  ENSG00000245694_104 (sequence is synthesized)
ttttctcattggaccttgagaacaatgcagagattgcattgtcccccatgtcagagccaggagatcaggggtgcagacgtgtgaagtgacccatcctagatcccaccgctgttcgcattc

SEQ ID NO: 1020918 - DNA, 120 bp, Artificial Sequence
  ENSG00000245694_105 (sequence is synthesized)
tcaagtttgagcttagatcctctgcttccaagcgtgattaatttcactttctgtgtcttactccatgagccctaatgcttctgctgagattcctaattcagtgaaacctgtttaggggat

SEQ ID NO: 1020919 - DNA, 120 bp, Artificial Sequence
  ENSG00000245694_106 (sequence is synthesized)
catctctgttaggcagacagctgctgaaaaggcattcactttccaagcatggattttagattatggccaatcaagactccggcctggaagaacacctgtcagagacgtttttctacaagg

SEQ ID NO: 1020920 - DNA, 120 bp, Artificial Sequence
  ENSG00000245694_107 (sequence is synthesized)
agatggtctctttaatcatatttcattgtacttcagaaaaaggttcgttttaaaatcatcacagaatcactggttggactcatgccatctcagaggaagaaagatcctagaggccatccc

SEQ ID NO: 1020921 - DNA, 120 bp, Artificial Sequence
  ENSG00000245694_108 (sequence is synthesized)
ggactccaggggatggagaatggaaggcagcagatgtttgttgacttcttgctctatatcgggcactgtgctagataccatacacgccatcaacatttaggacagtatggtcagagcaat

SEQ ID NO: 1020922 - DNA, 120 bp, Artificial Sequence
  ENSG00000245694_109 (sequence is synthesized)
ttgatttttatattacagttgaggaaaagagctcacaagaggttaaattacttgcttaaaactcacaaatttagtatatgtcagatccaggactagaactcaagcccatctaacttcaga

SEQ ID NO: 1020923 - DNA, 120 bp, Artificial Sequence
  ENSG00000245694_110 (sequence is synthesized)
cctggcgctaacggtcggtaacggcccgcgcgcgccgcccgccgggggctcgcgccagccacgagggagcgtccgcggcccgcgcgcccgcgcggcggaggagaggtgttaagtgtgatg

SEQ ID NO: 1020924 - DNA, 120 bp, Artificial Sequence
  ENSG00000245694_111 (sequence is synthesized)
gtggctgccagccggccaatgtctaagcgaggcggagcggcccaggcggcccgagcctgggggagcgcgcagccggccagtggcggcctcgccggcggcctcttcccgggctcgcagtag

SEQ ID NO: 1020925 - DNA, 120 bp, Artificial Sequence
  ENSG00000245694_112 (sequence is synthesized)
tcgccggcggcctcttcccgggctcgcagtaggcccgagtcgtcgccgggagctcctgggagcagcgtccccgccctgctcccctcgctcccgcctcttgcggccccacggcccctcagc

SEQ ID NO: 1020926 - DNA, 120 bp, Artificial Sequence
  ENSG00000264968_0 (sequence is synthesized)
gtgccccagttttgcagatgaggagactcggacttaaacctccccagcattaaggcaagaaaggtgtctctgttttttccgaagtgtgcctgcttgactcctttgatttttctctgggat

SEQ ID NO: 1020927 - DNA, 120 bp, Artificial Sequence
  ENSG00000264968_1 (sequence is synthesized)
tcttcatcctccatcaagttgatcgatccctctggatcttgagtgaattctcaataaatgttaactgaactatgtaacggaactgttaccagaaaggggtcccgatccagacaccaagag

SEQ ID NO: 1020928 - DNA, 120 bp, Artificial Sequence
  ENSG00000264968_2 (sequence is synthesized)
aggggaacaacaatagcagaggcctttgttgccctctccgcgaaactgcccagtaacctggcattagacgggtccctggctgacctgataaagaagctccctgtacaaacatcaattaat

SEQ ID NO: 1020929 - DNA, 120 bp, Artificial Sequence
  ENSG00000264968_3 (sequence is synthesized)
gcaggcagcacatcaaagcattgtggagacatgtctgtgcctccctccagaccatcaattctcaactcaggctgctcgttagacatacctgaggagctttcgaaagaaaccagtgcctag

SEQ ID NO: 1020930 - DNA, 120 bp, Artificial Sequence
  ENSG00000264968_4 (sequence is synthesized)
accccatgcacagagattttaatgtaattggtccagatgaagccccagcataactaatctgtaaaagctccccaagtgatttgaatgtgcagggtgttttgagaaccctgccatagaccc

SEQ ID NO: 1020931 - DNA, 120 bp, Artificial Sequence
  ENSG00000264968_5 (sequence is synthesized)
cagtttcctgacatctctatgaagttcagtgacccagactgagtccacgtctcaaataaggttctgactaatgcagagtctaacagaaagattactgaacatgtcatgcactattaataa

SEQ ID NO: 1020932 - DNA, 120 bp, Artificial Sequence
  ENSG00000250608_0 (sequence is synthesized)
agaatctggagtcagctggagtgtgccagcagcaagatggcccttaccagatgctggcaccttgatatttgacttcccagcctccagaactgtgagaaacaaatttattttctttataaa

SEQ ID NO: 1020933 - DNA, 120 bp, Artificial Sequence
  ENSG00000250608_1 (sequence is synthesized)
ttactcagattgtggtgttctgttacagcaacacaaaatggactatgtgaagaaaaccatgttggaatcttgtgctgtcattgataagaaaggatctgagcattaggtcaatcaccaaaa

SEQ ID NO: 1020934 - DNA, 120 bp, Artificial Sequence
  ENSG00000250608_2 (sequence is synthesized)
aactgaaaaatcagtaacaatgatgacagactcttcaaataggatgatttaaattttaggaaattggaagaagactccaagaaacttaacaaggtcctccaatattttccccaaaatgat

SEQ ID NO: 1020935 - DNA, 120 bp, Artificial Sequence
  ENSG00000250608_3 (sequence is synthesized)
tctagtttcatgactttaaatcctcccttaaactgttggttctcaaatatgcacttgtcacttctctcctaaactccagactcatgtattcagctacctacttgacacttctgtgtggat

SEQ ID NO: 1020936 - DNA, 120 bp, Artificial Sequence
  ENSG00000250608_4 (sequence is synthesized)
gtctagtaggtaataatcttagaattattgtgccctgtcaaattcctgctcttccctctaaaatatcttaatactattcagtcttccccatttctgtttatctcagttccttttcaggtc

SEQ ID NO: 1020937 - DNA, 120 bp, Artificial Sequence
  ENSG00000250608_5 (sequence is synthesized)
aaaaacctgagttatctttgattcctctctttctctcacattctagtagtccagttcctttcataatcagatcaattagtaagccctatcagctccatttttaaaatgtaactaggatcc

SEQ ID NO: 1020938 - DNA, 120 bp, Artificial Sequence
  ENSG00000250608_6 (sequence is synthesized)
gcgaccggtgcgggaggcagctaatcagggcggggcttgcagaccgggttgaagtccagggcccaggaaccctagggtaaccgaaagcagcctctgggttgggcctgcggtggggcgggg

SEQ ID NO: 1020939 - DNA, 120 bp, Artificial Sequence
  ENSG00000250608_7 (sequence is synthesized)
ctagaggtgtggccgcgccctaaacctggcgcaaggccggtacctaaaggctcctgggagccaaaagagcaagtcagggaactagctttggttgggttcggtggtacacaaagcacaagg

SEQ ID NO: 1020940 - DNA, 120 bp, Artificial Sequence
  ENSG00000250608_8 (sequence is synthesized)
cctgggttggggttaggaggaaatgagacttgcggcgggtcggggctgaagatgtggcagcgccctgaacctggagaaaggctggtacgtaaacgcctgcgtcgcaatctggagtcagct

SEQ ID NO: 1020941 - DNA, 120 bp, Artificial Sequence
  ENSG00000250608_9 (sequence is synthesized)
ggagtgtcccggcagaatccctttggtcaaggagagggagagagaggtaagggtctggtcttactttttaagcaggaagaagactacaaaccaccatctaccatctgccaggtaatttta

SEQ ID NO: 1020942 - DNA, 120 bp, Artificial Sequence
  ENSG00000250608_10 (sequence is synthesized)
aaccagtccacttaatccccatcagattttccagatgctttgaatgcagagctaaggttgagaaccactgatttagacaaatatactatgggagaaggggaaggaggttccaccagcaga

SEQ ID NO: 1020943 - DNA, 120 bp, Artificial Sequence
  ENSG00000250608_11 (sequence is synthesized)
gagcaaccagctagagccatttggggcttatcacaaaagacttcttgtcagggaaattcacctattgagagacattttggttgtttccaattctgggccattgaaaagaatgctaataag

SEQ ID NO: 1020944 - DNA, 120 bp, Artificial Sequence
  ENSG00000250608_12 (sequence is synthesized)
caaagcccctcttctgctatgaaagtaacagtgggcagatattccctctctggcccttgggtaactgaaaggaggcttataaccaaagcacagccagtgagatgctcctgctcaggatgt

SEQ ID NO: 1020945 - DNA, 120 bp, Artificial Sequence
  ENSG00000250608_13 (sequence is synthesized)
tgattttggagaagtgacacaaggtatatgatcagagttaagggttcagtaggccagtaatgagtgccagtggtgttggttccagtagcacaatggtaagtatccagtttagaaggctcg

SEQ ID NO: 1020946 - DNA, 120 bp, Artificial Sequence
  ENSG00000250608_14 (sequence is synthesized)
ggtggcagcatcctaagcccactatccctagcgagatgctggctgtgcctcaccaaccctcatccctgcctcatccttgttctccagcttcccattaaaactgtgagcttcctaatacct

SEQ ID NO: 1020947 - DNA, 85 bp, Artificial Sequence
  ENSG00000250608_15 (sequence is synthesized)
tctccagcttcccattaaaactgtgagcttcctaatacctttccaataaattaaattttgtcataaatataccataatccatttc

SEQ ID NO: 1020948 - DNA, 120 bp, Artificial Sequence
  ENSG00000250608_16 (sequence is synthesized)
catgttggccaggatggtctcgaactccggacctcaagtgatccggctgccttggcctctcaaagtgctaagatgacaggcgtgagacaccgcacccaatgatttctattgtttctatcc

SEQ ID NO: 1020949 - DNA, 120 bp, Artificial Sequence
  ENSG00000250608_17 (sequence is synthesized)
aatgaatgatttgaattggcaatgagtgacttgaagaaaaggtacatgggtgaaattaatctggtctggaaggtcaaagtataaagaatgcttcccttaggaaatgacactaaaactgag

SEQ ID NO: 1020950 - DNA, 120 bp, Artificial Sequence
  ENSG00000250608_18 (sequence is synthesized)
acagactcaaagttaatgaggtaaaacgtggaggggtggagcggtgggagggtgatgggtagtaacaaggggaaagaagagtgggaaatgcagcgccagtagcctgagatcaaaatggct

SEQ ID NO: 1020951 - DNA, 120 bp, Artificial Sequence
  ENSG00000250608_19 (sequence is synthesized)
ttcttagctctggttggtttggagggtaagaaactaaagaggaggtgattgaaatgcaggtgacacatctcaatggaatattatgatccttgtggagactgcatagtaccatggagcaag

SEQ ID NO: 1020952 - DNA, 120 bp, Artificial Sequence
  ENSG00000250608_20 (sequence is synthesized)
tattatggttgaagatagtagacctgtagttcatacaccaaagaattaaggaatcacgcatgcctattggaacaaaagggtaggtaggtagaatacctggccttgtttttccccctgcgg

SEQ ID NO: 1020953 - DNA, 120 bp, Artificial Sequence
  ENSG00000250608_21 (sequence is synthesized)
cggacatcaggtgtttgtgctatatactgcctcctcccttagagaactgctgcttccccaaatcttgatctggtgggattgccaaccacagctctccactcccctagccacaatgagggc

SEQ ID NO: 1020954 - DNA, 120 bp, Artificial Sequence
  ENSG00000250608_22 (sequence is synthesized)
agaggatccaggcctgaccagtcagaccacatattccaatcagcacagggcaatccatgtgagcacatggctcagactcaggcaggcaggctctgctctgattttgttcatttcaggctg

SEQ ID NO: 1020955 - DNA, 120 bp, Artificial Sequence
  ENSG00000250608_23 (sequence is synthesized)
gagaagagatctttcctcaactccacaaattaccccagtattcttcctgggatggatccttgcccacccatgaatccttttttgttttgctttttgatttattagggctactttctgtat

SEQ ID NO: 1020956 - DNA, 120 bp, Artificial Sequence
  ENSG00000250608_24 (sequence is synthesized)
acatataaggaaaaaattttttactttttaactgttgttttatgaccatagaatacatacatattgtataagattcaaacaataagaaaacacataaagaagaccatttcagagtttcta

SEQ ID NO: 1020957 - DNA, 120 bp, Artificial Sequence
  ENSG00000250608_25 (sequence is synthesized)
tccctgtcacatatttctagttttactaaatgaggtagtctagaacaatgtgatctatgatttctgagagggactagaagattcgagaagatttgctgaggtttgataaggtccaatata

SEQ ID NO: 1020958 - DNA, 120 bp, Artificial Sequence
  ENSG00000250608_26 (sequence is synthesized)
tggctaatttggtaaatgcttcctgagcccgtaaagatatattctctgaagttccagagtgcaatatttatctgttaggcaaagtatatcaattacatttttggcctttgtgctgggtct

SEQ ID NO: 1020959 - DNA, 120 bp, Artificial Sequence
  ENSG00000250608_27 (sequence is synthesized)
atttggagtatagagataatagtatccctatatcataaggttgtcctaaggactaaatatgttaatacatgaaaataacttataatagtgcctgccacacagtaaatatcccccaaatgt

SEQ ID NO: 1020960 - DNA, 120 bp, Artificial Sequence
  ENSG00000250608_28 (sequence is synthesized)
atgttaattgttttcatcatcatcgtcatttttattctctttagatccagatatgcatacttagaagctgacattttggccaggtacggtggcttacgccggtaatcccagcactttggg

SEQ ID NO: 1020961 - DNA, 120 bp, Artificial Sequence
  ENSG00000250608_29 (sequence is synthesized)
ctcgattcgtttcctgcttctaccctcactactctacagtctattgtcagctcagcagccacggtaagcctactttcacttccctgctcaaaactctattggactcttcatctcagagta

SEQ ID NO: 1020962 - DNA, 120 bp, Artificial Sequence
  ENSG00000250608_30 (sequence is synthesized)
aaggtctttccagtggtatacaatatccaatcatatctctccagattgcctaccttcctcccctcactccctccattccggctgcactggctccttgctcttctttgaacgcattaggca

SEQ ID NO: 1020963 - DNA, 120 bp, Artificial Sequence
  ENSG00000250608_31 (sequence is synthesized)
gttccctctaactagaatgctctttctctggatattcatatgtttctctcctcatcaccttcaaatcttttccctcatgtcatcttctcagagagacatattctgaccaccctctttaaa

SEQ ID NO: 1020964 - DNA, 120 bp, Artificial Sequence
  ENSG00000250608_32 (sequence is synthesized)
ctgtagtctttaccaatattctgtactacttattcaccatctctgcttttgtattttcttcttagtatttgctactttccagcatgatctgcttttccctaatattttatgatttatcac

SEQ ID NO: 1020965 - DNA, 120 bp, Artificial Sequence
  ENSG00000250608_33 (sequence is synthesized)
ccattagaatataaggtccatgaaaacacgaaaaatattttctttttttttttttgactgatcccactgcctagaacagtgcttggtgcatagtaattagtcaataaatatttgttggat

SEQ ID NO: 1020966 - DNA, 120 bp, Artificial Sequence
  ENSG00000250608_34 (sequence is synthesized)
gaatgagtagatgtcttgaaagtcaaataggaaggaatatggtgatgtcatacaattttattaaaaaatatatgcatccctagtattctaagaattagcacatagtaaagttatagccta

SEQ ID NO: 1020967 - DNA, 120 bp, Artificial Sequence
  ENSG00000250608_35 (sequence is synthesized)
attttataaactctaaaatcacttttatggtttttagctgctgtttttcaagataaaactccaaacaagtacagttttcagtatttcttatgatatattcatcattatttcaaatgcatt

SEQ ID NO: 1020968 - DNA, 120 bp, Artificial Sequence
  ENSG00000250608_36 (sequence is synthesized)
ggctttatggggcctgcacaatcatctttagataaaaatgacctcttatatttctgggtgactagacacaagccttaattaatttttaaaaagggattctatgcagaagggacagtgttt

SEQ ID NO: 1020969 - DNA, 120 bp, Artificial Sequence
  ENSG00000250608_37 (sequence is synthesized)
ctgcctgtcttctttcacactttgcacacccaggccatctggagtgaaaatgaagtctgcccagagctgctggaagccccagctgccctgctgcccatggagtcctctgaggacgactcc

SEQ ID NO: 1020970 - DNA, 120 bp, Artificial Sequence
  ENSG00000250608_38 (sequence is synthesized)
agagtccctcaactccttggaggagataagcagccaacacagtgttgttcagcagatgccaccgtctgccatgccctggaatttgaaccaccatcttctggagtgactcaaatgcagagg

SEQ ID NO: 1020971 - DNA, 120 bp, Artificial Sequence
  ENSG00000250608_39 (sequence is synthesized)
aagccaggcctgctgctaacgtttctgagaggcggcaagagtataaatggagatccacatatgtataaataaagagtgtgaatcaagctaacaaactgtttaataaaatatgatctaccc

SEQ ID NO: 1020972 - DNA, 120 bp, Artificial Sequence
  ENSG00000250608_40 (sequence is synthesized)
taaacgcctacgtcagaatctggagtcagctggagtgtgccagcagcaagatggcccttaccagatgctggcaccttgatatttgacttcccagcctccagaactattcattaatgatgt

SEQ ID NO: 1020973 - DNA, 120 bp, Artificial Sequence
  ENSG00000250608_41 (sequence is synthesized)
cagaagactgttgttttcaagattgctccccaactaggcttggcgacccttgaaggcagaggacctttctgagttatctttgtaccctgcatagtcctggcacaaaatagcacctaagtc

SEQ ID NO: 1020974 - DNA, 120 bp, Artificial Sequence
  ENSG00000250608_42 (sequence is synthesized)
agtacataaacgcctacgtcagaatctggagtcagctggagtgtgccagcagggtgcatttggatggtaattatagaagcctagaaacctaagggagtcttcagggatgaatctccaatg

SEQ ID NO: 1020975 - DNA, 120 bp, Artificial Sequence
  ENSG00000250608_43 (sequence is synthesized)
gggcttgcggcggggcggggcggggctgaaggtgtggcagcgccctgaacctggagaaaggctagtacataaacgcctacgtcagaatctggagtcagctggagtgtgccagcaggccct

SEQ ID NO: 1020976 - DNA, 120 bp, Artificial Sequence
  ENSG00000250608_44 (sequence is synthesized)
ctgcactgggatgtggaagggctgtgcaagccagcccttgggtccctgatccctgtctcctggcctgtgcccgtctcttctcagcctggctccaactcccattgagaggaagttcttgta

SEQ ID NO: 1020977 - DNA, 120 bp, Artificial Sequence
  ENSG00000250608_45 (sequence is synthesized)
cacatatgatactgcagcccttatgtctaatatttatccataccttctgcaaacagccactgtgtgaccacccttgggcttcccaggggtctgcaaactgacaatacagacaaagggaac

SEQ ID NO: 1020978 - DNA, 120 bp, Artificial Sequence
  ENSG00000250608_46 (sequence is synthesized)
caaggcagaggctcacagactgtagaaatgggcttggggccatctgggcagagacttgtggaatcccagcacgatcactctgggtgctgtgtgaaatggatgaatagcaaggagctgcag

SEQ ID NO: 1020979 - DNA, 120 bp, Artificial Sequence
  ENSG00000250608_47 (sequence is synthesized)
ccaagagcaaatcaacagaagcaccactcaaaatgcctcagtacccattacataaggattcttgtgattaattcttccccaaaatttagagccaagaaaaatccagctctcctactgaga

SEQ ID NO: 1020980 - DNA, 120 bp, Artificial Sequence
  ENSG00000250608_48 (sequence is synthesized)
ttgtagattagagcttctgtttctaatctacaaacaaacaaatgtgtgcaatgtcttttcatgacaattccaactttatcataaggttgtctactaagaaactagtaggcaggtttctct

SEQ ID NO: 1020981 - DNA, 120 bp, Artificial Sequence
  ENSG00000250608_49 (sequence is synthesized)
tgttgtctagaccacctgaaagctcatagctgagtttgcacttatttgcagagtaaactgctcatttatcaatctggcatccaatcacaactttttagctaactgtatgttttcataaac

SEQ ID NO: 1020982 - DNA, 120 bp, Artificial Sequence
  ENSG00000250608_50 (sequence is synthesized)
acttttctcacacagtataaattttaaataaataacaatagcaattaagtagtaacaactcgagactggtatctgactagtggttctttcaccagtgtgtacactggaagttttgttttg

SEQ ID NO: 1020983 - DNA, 120 bp, Artificial Sequence
  ENSG00000250608_51 (sequence is synthesized)
ttttttgatgtttgtacattgtaattgcaggacaggtagtaagaagatttcaaattcacattagctttgctaccactaaattatggtgactgttcctaatttgcaaacaaatgtatgcaa

SEQ ID NO: 1020984 - DNA, 120 bp, Artificial Sequence
  ENSG00000250608_52 (sequence is synthesized)
gcaatctctttttatgattatcccaactttatcataaggttgttatattttaagacatatgaaaagatataaagtataatacagtgaatacatatatatctaactcccagtttaagaaat

SEQ ID NO: 1020985 - DNA, 120 bp, Artificial Sequence
  ENSG00000250608_53 (sequence is synthesized)
cattagcaaatacagctgaagctccatgaattcccctcccaaatcatactcccttcccacccgcagagggaacctctattctgagcctggtgtttatcaccaccaagaattaaaaaaata

SEQ ID NO: 1020986 - DNA, 120 bp, Artificial Sequence
  ENSG00000250608_54 (sequence is synthesized)
cttttactatatatacacaagtatgtaccccttagaaatgagtagtagtactgttttgtatgtctttacactttaagtaaatggtataagttatttcttgtttttgctcaaaattgttga

SEQ ID NO: 1020987 - DNA, 120 bp, Artificial Sequence
  ENSG00000250608_55 (sequence is synthesized)
aatttatgccctttgattctatagctgactttcactgtgagtcattccatcattatttctgtattcattctcctgctgaagtacatttcaggttgttgctattcctctgctgatccccct

SEQ ID NO: 1020988 - DNA, 120 bp, Artificial Sequence
  ENSG00000250608_56 (sequence is synthesized)
gatgtccagagcccaggaaccttagggaaaccataagcaacctctgggttgggcttgcggcggggcggggcggggctgaaggtgtggcagcgccctgaacctggagaaaggctagtacat

SEQ ID NO: 1020989 - DNA, 120 bp, Artificial Sequence
  ENSG00000250608_57 (sequence is synthesized)
attcatttagcaaattttttaaaacaatattcctgtcatgacacattcagcaattatttatttatttatttatttatattatttttagaaacagggtcttgctctgtcaccctggctgga

SEQ ID NO: 1020990 - DNA, 120 bp, Artificial Sequence
  ENSG00000250608_58 (sequence is synthesized)
gtgcagtggtgcaatcatagctgcaacctcgacctcccaggcttaagtgatcctcccacctcagtctgtagaatagctgggactacaggaatacaccaccacaacccagctcattaaaaa

SEQ ID NO: 1020991 - DNA, 90 bp, Artificial Sequence
  ENSG00000250608_59 (sequence is synthesized)
gtcttctcatgctggccccccaaatcactagaagtacaggcatgaggcaccatgcttggctataagcacatttttaatgagcacttagta

SEQ ID NO: 1020992 - DNA, 120 bp, Artificial Sequence
  ENSG00000250608_60 (sequence is synthesized)
catgcttggctataagcacatttttaatgagcacttagtatgtgccacatgctgcagatgtagccacaagcctctgacctcacagacctcatattaaacaagtaaacaaataaggtaatt

SEQ ID NO: 1020993 - DNA, 120 bp, Artificial Sequence
  ENSG00000250608_61 (sequence is synthesized)
ttagatttttttcagtgctacaaaataaaaacagggaaataggagagagagtagagaacaggactttgagaagaaagtctggaatccccaagaaggtgggtgtcagaaaagagatttggc

SEQ ID NO: 1020994 - DNA, 120 bp, Artificial Sequence
  ENSG00000250608_62 (sequence is synthesized)
ttaaatactatggaagaggtaatttataaatattagaatttatttctcagagttctggaggctgggaagtccaaggtccaggtcaaggtgctagcagatttgctgtctggtgggagctgc

SEQ ID NO: 1020995 - DNA, 120 bp, Artificial Sequence
  ENSG00000250608_63 (sequence is synthesized)
tccctctgcttccaagatggcacttttttgctgtgtcctctggaggggaagaaagcttagacgggcaaaagggggcaattatctctctgagacctcttttgtaaaggtattaatccattc

SEQ ID NO: 1020996 - DNA, 120 bp, Artificial Sequence
  ENSG00000250608_64 (sequence is synthesized)
ctgagggctctgccctcatgacttaatcactttcccaaaatctcatctcttaatactacctcaatgaagattaagtttccatatgaattttgaaggggtcacattcaagccacagcacag

SEQ ID NO: 1020997 - DNA, 120 bp, Artificial Sequence
  ENSG00000250608_65 (sequence is synthesized)
agcatgacctagcagaggagacgcaagctctgggtgtgtaagtcccctttgctccatggacttcgtgcttcatgggaagggatgtggctggagggtacccctctacagcacagggcccag

SEQ ID NO: 1020998 - DNA, 120 bp, Artificial Sequence
  ENSG00000250608_66 (sequence is synthesized)
agcacccctcttgccttgggtttagggatagtataggtggtggtggtgaggctacttttgctcattaagaaaagcctctttgaggggtgggaccgagaatgtcatttgaatggaaacttg

SEQ ID NO: 1020999 - DNA, 120 bp, Artificial Sequence
  ENSG00000250608_67 (sequence is synthesized)
aatcataaagatgagtcatacaagccaagacttgggagaagggcattcctaaatgagagaagaggatatgcccagctctcataagctctgaagaagagtcaccaactgtggtgggtggag

SEQ ID NO: 1021000 - DNA, 120 bp, Artificial Sequence
  ENSG00000250608_68 (sequence is synthesized)
cctaattaagaggagaagaatggtaagagacaaggtgagatggtcaggcaggagcagggagcctggaggtcaggtaagggggcttgactttgccatgggtgcaatgggaagcctctggag

SEQ ID NO: 1021001 - DNA, 120 bp, Artificial Sequence
  ENSG00000250608_69 (sequence is synthesized)
gccctgaacctggagaaaggctgaatccctttggtcaaggagagggagagagaggtaagggtctggtcttactttttaagcaggaagaagactacaaaccaccatctaccatctgccagg

SEQ ID NO: 1021002 - DNA, 120 bp, Artificial Sequence
  ENSG00000248445_0 (sequence is synthesized)
taagggtcctcctcccttcaattgtgacatcacagttggttgctgtggaaatgattgtcctgtgacaaaggattgtgacttaagtagaagcagcaaatatctcttaagaaataaagattc

SEQ ID NO: 1021003 - DNA, 120 bp, Artificial Sequence
  ENSG00000248445_1 (sequence is synthesized)
tgtgatccaacaaatacccttggtaataaaaggcagtcaaggcaattcaccataaggaaagagtgtacaagacggaaaaatacaacagagaaagataacaggccgactcacgtgaatata

SEQ ID NO: 1021004 - DNA, 120 bp, Artificial Sequence
  ENSG00000248445_2 (sequence is synthesized)
cagctacttttttaagcccaaattggatcacagaactgtgatgtacaaatggtgttgtgattattggttgccatgagccaaatgaaccatgcagaatgctaattgggcaggaaaccagct

SEQ ID NO: 1021005 - DNA, 120 bp, Artificial Sequence
  ENSG00000248445_3 (sequence is synthesized)
ttcaggtactccagattgaagacgaaacaaaggagaccaaaaggactgtctgaaaaccgtgtgaatgcattcacgctgataaattttttaaaaataataaattcttttcaattactagag

SEQ ID NO: 1021006 - DNA, 120 bp, Artificial Sequence
  ENSG00000248445_4 (sequence is synthesized)
gttgcctcaagacctgaaaatgaatgagcatcatcccttaaagtgttaacacggaagcattaataaaccaagaacaatgagataaatcctgtttgcacatcatttccactgcgtcactct

SEQ ID NO: 1021007 - DNA, 120 bp, Artificial Sequence
  ENSG00000248445_5 (sequence is synthesized)
tggccaatttcatactatattggaaagttttgtctaataagagcctgacctgtgtatcctgtatagattttcgccagcagagggtattgtcctgagtgccagcattttgggggatggtga

SEQ ID NO: 1021008 - DNA, 120 bp, Artificial Sequence
  ENSG00000248445_6 (sequence is synthesized)
actgtatcagctgaggagctatagtctatcagttaggagcattattcctttgtcttggatatacttatgttcaaaagcaatttcttctccctcaagaactcattaaatgtattcaccaaa

SEQ ID NO: 1021009 - DNA, 120 bp, Artificial Sequence
  ENSG00000248445_7 (sequence is synthesized)
aaagtggaggtggctgaggacttctcccattaaaagttcaagttcttcctgatgttaaccacaagatgatgccgacatcaacgattactctttcaacgtaaataaaaacaaagcatagaa

SEQ ID NO: 1021010 - DNA, 120 bp, Artificial Sequence
  ENSG00000248445_8 (sequence is synthesized)
aggcaagcctggaaatgccaacctcccatcatattaattttaatgccagatgctccagcgttccctgatgtacaaagctgctggttgaagtgtgtttttatgttgttatatgaccacagg

SEQ ID NO: 1021011 - DNA, 120 bp, Artificial Sequence
  ENSG00000248445_9 (sequence is synthesized)
cacaaaaccctgcatgtctgcggcagccttttatgagctcttccacagactccctgtgggccttggactgcggaggtgggcatcggcgtacactcagaagacaagactctgggcagccgg

SEQ ID NO: 1021012 - DNA, 120 bp, Artificial Sequence
  ENSG00000248445_10 (sequence is synthesized)
ctttgtgtccataatcctgtgtgcgcctaagtagttcatgatgcaggcctagcagctgttgtaatgtttcatcacattaaaagcaaactatttttgcaaattaaagccttcagtaagttg

SEQ ID NO: 1021013 - DNA, 120 bp, Artificial Sequence
  ENSG00000248445_11 (sequence is synthesized)
tccggctttgggtctttggattgagtgtccccaaagaggccgctgagcttggtgacgctgctcatggagccccggcgcgagtgggtgagctccttctccttgcgctgcaccacagccacg

SEQ ID NO: 1021014 - DNA, 120 bp, Artificial Sequence
  ENSG00000248445_12 (sequence is synthesized)
aggagtaggggcctgttttgtaaattgctgaataggcaagtttcttcaaacttcagtaggctgccagaatcaccctgccctttaatttcaaggcagttttattgcatttgtttattactt

SEQ ID NO: 1021015 - DNA, 120 bp, Artificial Sequence
  ENSG00000248445_13 (sequence is synthesized)
tgctatcaggtttgagatgactcgaggcttttccttgcctgcctcccctcagaacttaagtttgagctgaacatatgaattgtaaatgaacaactgattaatatgcattggcagctcctc

SEQ ID NO: 1021016 - DNA, 120 bp, Artificial Sequence
  ENSG00000248445_14 (sequence is synthesized)
agaaagctctcagattgcccccttttggcatggcctgtttatgttaattagcagtttagagattaaaaaagaagaggaatttacaaagtggataataataaagcagaattgaaaggggtt

SEQ ID NO: 1021017 - DNA, 120 bp, Artificial Sequence
  ENSG00000248445_15 (sequence is synthesized)
cttgccaccaaccctcactcagtcccccgggttctggatgggacttggcttgcgattgctgacagcaattgtctagaagaactgggaagccttttaaacacagaattctgtgaatgaaat

SEQ ID NO: 1021018 - DNA, 120 bp, Artificial Sequence
  ENSG00000248445_16 (sequence is synthesized)
cctcaagacctgaaaatgaatgagcatcatcccttaaagtgttaacacggaagcattaataagtaagtacctttccttttgtaaaggaaataagagagaacatagcttaggtagtgattt

SEQ ID NO: 1021019 - DNA, 120 bp, Artificial Sequence
  ENSG00000248445_17 (sequence is synthesized)
ttgttcataagagtatctcatagtttaattattctgtctatttaagaaattacctgggagttaaaattggtcttggtatgattgatgaatgctggggaggttgctggttcaattcgtttc

SEQ ID NO: 1021020 - DNA, 120 bp, Artificial Sequence
  ENSG00000248445_18 (sequence is synthesized)
aagatcttaatttctcaaaatctgatgaagactattcaattataggaaatgatcgcaaagtatcatattggaaaaaagcagatgctaagtgcggttttttcctcaaggcagtctcaacta

SEQ ID NO: 1021021 - DNA, 120 bp, Artificial Sequence
  ENSG00000248445_19 (sequence is synthesized)
ggtgacatttgccttctgagcaatttttcttctagtctttggtgttcaatattctggtttcaatcatagatgagggaacattaaagttggatgaattctgtgggcttatctactccacac

SEQ ID NO: 1021022 - DNA, 120 bp, Artificial Sequence
  ENSG00000214401_0 (sequence is synthesized)
gtacctccatctgcggaggccgcggcgcccggccccagctgccccggacgtgcggcgacggcacgcagcactgcggcagggggaagccagccctcgctgcggccgaggtgagtctaacct

SEQ ID NO: 1021023 - DNA, 120 bp, Artificial Sequence
  ENSG00000214401_1 (sequence is synthesized)
gcagggcgggccggcgccgcggagcgagaggacgtgagcgaggaactgtttgcactgtgtagtaaagagggaatggccatgagatgtgagtagaagccccctggacagcctccaaaagag

SEQ ID NO: 1021024 - DNA, 120 bp, Artificial Sequence
  ENSG00000214401_2 (sequence is synthesized)
aactgtgagaaaaggttcttcaatcctaaaaatgatggaggaaaaaacagtccctcttcctcagacagtgacacctcaaactgctacagtcacctttgcagcaagcctgaagatgccacc

SEQ ID NO: 1021025 - DNA, 120 bp, Artificial Sequence
  ENSG00000214401_3 (sequence is synthesized)
aggaggcgcggccgccgccgcctcagtcatggctcctcgccgtggccgatgtttttgtacctccatctgcggaggccgcggcgcccggccccagctgccccggacgtgcggcgacggcac

SEQ ID NO: 1021026 - DNA, 120 bp, Artificial Sequence
  ENSG00000214401_4 (sequence is synthesized)
tgacaatttgtatgacttctggatttccagccacattacaacaatgtaacaataaacatttattaattgcttaagccaatttgagttaggttccttatataataaatgaagtcaaaaaac

SEQ ID NO: 1021027 - DNA, 90 bp, Artificial Sequence
  ENSG00000214401_5 (sequence is synthesized)
agagtgagaccctatctctacaaacaaaattttaaattagccaagtgtggtagcatgtgcttacagtcccagctactccagaagctgagg

SEQ ID NO: 1021028 - DNA, 120 bp, Artificial Sequence
  ENSG00000214401_6 (sequence is synthesized)
cagtgagtcatgatcatgccattgtagtccaacctgggcaacagagcgagaccatctcaaaatgaaaagtgataaaaaaataaaaacaccaacatatttcaaatcactcttggaatagtc

SEQ ID NO: 1021029 - DNA, 120 bp, Artificial Sequence
  ENSG00000250602_0 (sequence is synthesized)
atttgaattcatcacctctactgattcccattaataaatgttaatggaatgggcaaggaaatgatccgaccttttgaagatccatggactgcaagcaaatatgacgagtagggtggctct

SEQ ID NO: 1021030 - DNA, 120 bp, Artificial Sequence
  ENSG00000250602_1 (sequence is synthesized)
taatggagggaaaccatcaacagaagactgatttctgaaactttctgaaatatggaaaaacggaaagcggaaagtaaagtacaatatttactcatgcagcaaagcaagggaagccataat

SEQ ID NO: 1021031 - DNA, 120 bp, Artificial Sequence
  ENSG00000250602_2 (sequence is synthesized)
cttgaatataggcatcaacgggggataagaaaacaccgacccgtttgtcagaagtccagtgaggtgctacaggaggagtgggtgagaagtttccgaaaacactagatttaattaaagatg

SEQ ID NO: 1021032 - DNA, 120 bp, Artificial Sequence
  ENSG00000250602_3 (sequence is synthesized)
aggacacttaacatttaaattctatcaagaaatttattttctttgatgtggatgcagccaatttaaatttcatcacaggtgcagaagaaccagaagcaatagaaagaggagcaaatcgat

SEQ ID NO: 1021033 - DNA, 120 bp, Artificial Sequence
  ENSG00000250602_4 (sequence is synthesized)
catcatctagtgcctgtgagctggatttgggtcacctgggtgcctccctgcttcgagaaccaacagtgtggtggtttcaaggacctcggcttctggtttgggaccacaaatatttcctaa

SEQ ID NO: 1021034 - DNA, 120 bp, Artificial Sequence
  ENSG00000250602_5 (sequence is synthesized)
tctctagaaatgctctcagtttacgatctgctttagacacgcactactaagtttatatcaaaggacactctggtttgaaatgtgctctggtatccatcaatgaacatttttcttcatgct

SEQ ID NO: 1021035 - DNA, 120 bp, Artificial Sequence
  ENSG00000250602_6 (sequence is synthesized)
ctctggtatccatcaatgaacatttttcttcatgctcggtagcaatgatggtttaaaactgttcttgccattaataaatctggaataggggcgaggtgcggtggctcacacctgtaatcc

SEQ ID NO: 1021036 - DNA, 120 bp, Artificial Sequence
  ENSG00000250602_7 (sequence is synthesized)
cttatttggaggttcaagataattgaccactaagtctggttctggagaagttgggtttccacatgccttacagagcttgagctccaaagaagaatttgcatgacagtctacttaagagat

SEQ ID NO: 1021037 - DNA, 120 bp, Artificial Sequence
  ENSG00000250602_8 (sequence is synthesized)
ggattccacagacaaagcaattcaagaggcacttgaagctcagcaaaatatggaaataatggatgagttttacattttattttatttttattttttctctttgtttgcctaagttttaca

SEQ ID NO: 1021038 - DNA, 120 bp, Artificial Sequence
  ENSG00000250602_9 (sequence is synthesized)
ttttaaatcacagaattatacccttgctcaactactaatacaagtaagatagattcattttaataatggatagaaaaattaagtaacttgaaaatagatatattacaaaacaatttgcac

SEQ ID NO: 1021039 - DNA, 120 bp, Artificial Sequence
  ENSG00000250602_10 (sequence is synthesized)
acattcacttttttggtctctaaaacttctttttaaaagtgtttaatttattttcataacctggcattctgatatgtgaatgcaattaaataaaatagaacttctttgttttctattaaa

SEQ ID NO: 1021040 - DNA, 120 bp, Artificial Sequence
  ENSG00000250602_11 (sequence is synthesized)
gtggtgtcccggccaggcccagcgggagagtgggaagaaacacaaaagaaggcggcaggatcccatgtgtttctaatccaaagaatatcactgggagactcttggcttttccttcaggta

SEQ ID NO: 1021041 - DNA, 120 bp, Artificial Sequence
  ENSG00000250602_12 (sequence is synthesized)
ctctgttcacatgggcatctgcccgagttggctttgcttctcccttggagacattcagaactgtttgggattctgtcgcatggaaatctactaagccaaaacagagctgggacaactctt

SEQ ID NO: 1021042 - DNA, 120 bp, Artificial Sequence
  ENSG00000250602_13 (sequence is synthesized)
caattacttggaaaaagtttatggctactatggtttcctcttcttcaaggaagatatgccctgtttcttcaactgtacctcaaatattttggtcctaagctcttcccacaccctggtcat

SEQ ID NO: 1021043 - DNA, 120 bp, Artificial Sequence
  ENSG00000250602_14 (sequence is synthesized)
caagtgtaattgtgggacatattccctttcttttgcatttagatagttatgtgggcaacttaccagaggcagagatgaagggcggtctgctcggaaactgttttcagcagaagatggatt

SEQ ID NO: 1021044 - DNA, 120 bp, Artificial Sequence
  ENSG00000250602_15 (sequence is synthesized)
gggactgttaccaacacttgtattctgaaattattggaacaaaacgaaaagccagattaactatgaaaccataagaaatacagaagagagacagtaattgaggctcagggacatcatact

SEQ ID NO: 1021045 - DNA, 120 bp, Artificial Sequence
  ENSG00000250602_16 (sequence is synthesized)
cacttctaagtgtccacacacagattttagtagtttgtaagttgaatctctggagagtaaggagacaaatatgtactgaaaaacaaaacaggataattatgaatagatattgccggatga

SEQ ID NO: 1021046 - DNA, 120 bp, Artificial Sequence
  ENSG00000250602_17 (sequence is synthesized)
catgacactggcccctgtggacaggaacctgaattcactctcaaaagaagaagatttgccaaccttatgactattccaagaattggctccaggctttgaaagtaacactacaagaagaat

SEQ ID NO: 1021047 - DNA, 120 bp, Artificial Sequence
  ENSG00000250602_18 (sequence is synthesized)
attgttggaaaagttcttgggttcctttggtgactacttttaaagacacaacattcacatgcttttaaaacacatcagtcacatcactttatagaaacactctgtacttgtgcaaagaag

SEQ ID NO: 1021048 - DNA, 120 bp, Artificial Sequence
  ENSG00000250602_19 (sequence is synthesized)
aacccatctatggtttttaaaaattggaatccatgaatgactgctgtgccaattaggacgtagagcttcaactgaaaaaatgaacttctctactgctaagctggagcacagataaatatg

SEQ ID NO: 1021049 - DNA, 120 bp, Artificial Sequence
  ENSG00000250602_20 (sequence is synthesized)
caagtatccaaagaggtacctgtgtttaacaatacagagaaagcacaagtgcttaattgacagctaatcttgtcttctacagaacattagaaattctttcaatgttagaattgtagaatg

SEQ ID NO: 1021050 - DNA, 120 bp, Artificial Sequence
  ENSG00000264964_0 (sequence is synthesized)
gcgcttctccgcaccgggatccccagtccctcaggttccgacagaccctcctgtcaggcccattctccgggccccctcagttgcagtgttaagatcaacagtgttaagattaaagccttg

SEQ ID NO: 1021051 - DNA, 120 bp, Artificial Sequence
  ENSG00000264964_1 (sequence is synthesized)
tgatgtgctagccactacgctgaggatatgccgtgtactaaaattcctcaggactcctcacagctgccctgtaaggaagcggccatggccgggttctagcgatgcgaggccgaggctcgg

SEQ ID NO: 1021052 - DNA, 120 bp, Artificial Sequence
  ENSG00000264964_2 (sequence is synthesized)
ggcgctgagtagcctagcgcgtcgccgaggagagctggcacgtgaaccccttgtcgtttgccgtcagaggtgttatgtggtggccctcattctccatgcatggagcagactctaggatct

SEQ ID NO: 1021053 - DNA, 79 bp, Artificial Sequence
  ENSG00000264964_3 (sequence is synthesized)
tggccctcattctccatgcatggagcagactctaggatctgcagttactgtatgatgagcccttctgagtattttgctt

SEQ ID NO: 1021054 - DNA, 90 bp, Artificial Sequence
  ENSG00000264964_4 (sequence is synthesized)
ttcctgccttggcttcccaggtagctaggactacaggcgtgcaccgccacacctggctaatgtcttgcatttttagtagagatggggttt

SEQ ID NO: 1021055 - DNA, 120 bp, Artificial Sequence
  ENSG00000264964_5 (sequence is synthesized)
cctcccaaagtgctggaattacaggtaagtatagtgtatctttccatttatttccaaatttctctcagcactattttttatgtttcaggatatagaacttgcacagttttcttgagttca

SEQ ID NO: 1021056 - DNA, 120 bp, Artificial Sequence
  ENSG00000264964_6 (sequence is synthesized)
tccaaatttctctcagcactattttttatgtttcaggatatagaacttgcacagttttcttgagttcatttttatttcatattcttttttattattttattttaagttccagggtacatg

SEQ ID NO: 1021057 - DNA, 120 bp, Artificial Sequence
  ENSG00000264964_7 (sequence is synthesized)
atggtggtttgctgcactgataaacccatcacctacgtattttacccagtatgcattagctgtttttcctgatgctctccacatctccgccctcccccaacaagccccagtgtgttttgt

SEQ ID NO: 1021058 - DNA, 77 bp, Artificial Sequence
  ENSG00000264964_8 (sequence is synthesized)
cttacccagtaatgggattgctaggccaaatggtacttccagttataaatctctgaggaatcaccacactgtatccc

SEQ ID NO: 1021059 - DNA, 77 bp, Artificial Sequence
  ENSG00000264964_9 (sequence is synthesized)
atacatacccagtaatgggattgctaggccaaatggtacttccagttataaatctctgaggaatcaccacactgtat

SEQ ID NO: 1021060 - DNA, 120 bp, Artificial Sequence
  ENSG00000264964_10 (sequence is synthesized)
ctatttctccgcaacctcgccagcatcagttgtttcttgactttttaataatcactgttctgactggcataagatggtatctcattatggctttgatttgcatttctctgatgatcagtg

SEQ ID NO: 1021061 - DNA, 81 bp, Artificial Sequence
  ENSG00000264964_11 (sequence is synthesized)
gatcagtgatgttgagtttttttcatgtttgttggccgatggaacagaatagagaactcagaataaaactgccatctacaa

SEQ ID NO: 1021062 - DNA, 77 bp, Artificial Sequence
  ENSG00000264964_12 (sequence is synthesized)
aaatataaaaccaaaaactataaaatccctagaagaaaatctagacaataccattcagcacataggcatgggcaaag

SEQ ID NO: 1021063 - DNA, 78 bp, Artificial Sequence
  ENSG00000264964_13 (sequence is synthesized)
ctcaaatataaaaccaaaaactataaaatccctagaagaaaatctagacaataccattcagacaattttaacaaaagc

SEQ ID NO: 1021064 - DNA, 73 bp, Artificial Sequence
  ENSG00000264964_14 (sequence is synthesized)
gtaatatccagcatctacaaacaacttaagcaaatttacaagaaaaaaaaaaccattgaaaagtgggcaaagg

SEQ ID NO: 1021065 - DNA, 120 bp, Artificial Sequence
  ENSG00000264964_15 (sequence is synthesized)
atttacaagaaaaaaaaaaccattgaaaagtgggcaaaggacatgaatagacacttcctatttcatattgttgatgctgttttcatttgtaatttccaagacttcctatcatatagaaat

SEQ ID NO: 1021066 - DNA, 120 bp, Artificial Sequence
  ENSG00000264964_16 (sequence is synthesized)
acaattgatttttgtatattgacatttttgtatattggtttttgtatcctgtaactctgctaaactcagttattagttctggtagcttttttggtggatttcttaggatttttttttttg

SEQ ID NO: 1021067 - DNA, 120 bp, Artificial Sequence
  ENSG00000264964_17 (sequence is synthesized)
ctaatttttgtattttttttttagtagaaatgaggtttcgccatgttggccaggctgacatcagctgaaccactttggcctcccaacgtgctcagattacaggtgtcagccactgcgccc

SEQ ID NO: 1021068 - DNA, 120 bp, Artificial Sequence
  ENSG00000264964_18 (sequence is synthesized)
atgcttgctttttcttcttattgccttatggaacaaattaggacctccagttcaatgctgaatacaacttgtgagagcagacatgcttgccttatttctgatattagagagaaagaatac

SEQ ID NO: 1021069 - DNA, 120 bp, Artificial Sequence
  ENSG00000264964_19 (sequence is synthesized)
tctttctttcattagtgttttatctgtttcattagtgttaataactgttccatcagatattagtgtttcattaataagtacaatgtaagctctaggtcatttttagatgccctttagcaa

SEQ ID NO: 1021070 - DNA, 120 bp, Artificial Sequence
  ENSG00000264964_20 (sequence is synthesized)
gttgaggaagttaccttgtatttctagtttgctgagtgatttttatcatgagtgattttttaattttgtcaggcactttccttcacctcttgtggcattttcattgttttactttttgag

SEQ ID NO: 1021071 - DNA, 120 bp, Artificial Sequence
  ENSG00000264964_21 (sequence is synthesized)
tcttttaatatggtgaattacattgactttcgaatgttaaaccaatcttgcattcctgggacaaaccccaccttgcattgatgtattataattctaatgttactggatttgatttgcaaa

SEQ ID NO: 1021072 - DNA, 120 bp, Artificial Sequence
  ENSG00000264964_22 (sequence is synthesized)
tttctagtttttttgttttctttgttttttttctggtttttggtatagggtttctagcctgttaacatgagctggaaagcatttcttttctttttttcctctgaatttttcttctatttt

SEQ ID NO: 1021073 - DNA, 120 bp, Artificial Sequence
  ENSG00000264964_23 (sequence is synthesized)
ctaattagcatagagttgatattgtttattcctaaaatgtttggtagaattcactacttgggactggagattcctttgttcaaaggattttaaatgcaaattcactttttaaaatagata

SEQ ID NO: 1021074 - DNA, 120 bp, Artificial Sequence
  ENSG00000264964_24 (sequence is synthesized)
caggactattcaggttatctatttcttcttcagatttggtagattgtgtctttcaaagaatttctccatttcactcaaattacagaatttattgcagaatttataaaattctttataata

SEQ ID NO: 1021075 - DNA, 120 bp, Artificial Sequence
  ENSG00000264964_25 (sequence is synthesized)
ttatgagccgttcaatgaccacaggatttgcagtgatgtctactcttctgcatataatattgatcatttttatcttctctctttttttccacctgatcactggctggaggcttattaatt

SEQ ID NO: 1021076 - DNA, 120 bp, Artificial Sequence
  ENSG00000264964_26 (sequence is synthesized)
ttattaatcattttgaaagacccaggttttggtttcatggattttctgtattgttttccagttttctaccttattgatttcagctcttaactttattacctttgttttgcttacttgtgt

SEQ ID NO: 1021077 - DNA, 120 bp, Artificial Sequence
  ENSG00000264964_27 (sequence is synthesized)
ctaattagctcttatttttctagtttcttaacatgggaacctagataattggtttgagtactttcttttctaatattttccttgaagaaactatcttagctgcctcataagttttaatat

SEQ ID NO: 1021078 - DNA, 120 bp, Artificial Sequence
  ENSG00000264964_28 (sequence is synthesized)
gtcatgttttcatttttagcctgttcaaaatactttataatttccctgtgtaatgtcttcattgatacagtgattatttagaagtgtgatgtttaatttctaagtattaggaattttgtg

SEQ ID NO: 1021079 - DNA, 120 bp, Artificial Sequence
  ENSG00000264964_29 (sequence is synthesized)
aggaattttgtggatttctttctgttattaatttctaatttgattatattgtgcttagagaataaacattgtataatcctttcattaacacatcctggtcgggcgcggtggctcacgcct

SEQ ID NO: 1021080 - DNA, 120 bp, Artificial Sequence
  ENSG00000264964_30 (sequence is synthesized)
gtctcaaaaaaaaaaaaagaacacatcctatggcctcaaatatagtccattttgatagatattctatgtgcacttgaaaagcatgtatattttgctattattgggcatgttctataaatg

SEQ ID NO: 1021081 - DNA, 120 bp, Artificial Sequence
  ENSG00000264964_31 (sequence is synthesized)
aatgttaatgtgggaaaattgggttgactttgtccatatgttctgtatccttactgattttctttctatttagtccatacaattttgaggccaggcatggtagctcacatctgtaatccc

SEQ ID NO: 1021082 - DNA, 60 bp, Artificial Sequence
  ENSG00000264964_32 (sequence is synthesized)
taacttgaggttagctgggcatggtggcacgtgtttgtaatcccagctacttgggaggct

SEQ ID NO: 1021083 - DNA, 120 bp, Artificial Sequence
  ENSG00000214407_0 (sequence is synthesized)
agaagcagagataaaacagactaagtacacagaggagtttaaggtttcgtgaatgtaagtgctgagtacagaatggtgctcaataaaagcttgttaattgatggaccacaggtttgtgac

SEQ ID NO: 1021084 - DNA, 120 bp, Artificial Sequence
  ENSG00000214407_1 (sequence is synthesized)
aagacttctcagagtctgattctttcaaggtgggatataagagtaagtaaatggcatggggaaaatctgattgccacagacagaagaatgaaactggatgcctatttctcacaatacaca

SEQ ID NO: 1021085 - DNA, 120 bp, Artificial Sequence
  ENSG00000214407_2 (sequence is synthesized)
aaagcgattcaagattaaagacttaactataccttgactatgaataatagtttcaataaggaagacagaatgagttctgacacgatggttgggagctgtgacaggcagacgaaaaatgga

SEQ ID NO: 1021086 - DNA, 120 bp, Artificial Sequence
  ENSG00000214407_3 (sequence is synthesized)
gccaaatggcatggaggtgtgtcatcactgctggattttaccttgatctacattcagttatctacttcttttcaaaatgctgggcattcattcaagaaacagcatatatgttctgacttt

SEQ ID NO: 1021087 - DNA, 120 bp, Artificial Sequence
  ENSG00000214407_4 (sequence is synthesized)
gaagtaatggatgaactgtcatgtgcagtatatggaaataagttttattaccttcttcccacattaactcatccatccattcaatagccatttattgagaagctcactctgtgttaggca

SEQ ID NO: 1021088 - DNA, 120 bp, Artificial Sequence
  ENSG00000214407_5 (sequence is synthesized)
cagtggtgtcatgatgttggaacagtaacaataactcaaccaaccagggcttgtctgaatacaatcctacagcagcaggagctgtggagatatagaaggcaaggaagaccaggttgtgag

SEQ ID NO: 1021089 - DNA, 120 bp, Artificial Sequence
  ENSG00000214407_6 (sequence is synthesized)
ggaagacgaatttactcccaggaatgttgggattgagagtaatattctccaataatggtggaagacagaacaataaaagcccaccagctccttctgcatggtgggataagagaaaagcca

SEQ ID NO: 1021090 - DNA, 120 bp, Artificial Sequence
  ENSG00000214407_7 (sequence is synthesized)
agggcagaagtgagaaaaataaccatcaccaaactgaaaagaaaacctttataaaaaaactggattgataaatgacctttagtagtggaaagataccattccaatgaagcatgaattgaa

SEQ ID NO: 1021091 - DNA, 120 bp, Artificial Sequence
  ENSG00000214407_8 (sequence is synthesized)
tgaaagctaatttacatttttctttttttttttttcattttcagtgtgttttagcaggtgtattgttctacatggttagtttctttacctctttgagaaaaatgggtcagcttgacacat

SEQ ID NO: 1021092 - DNA, 120 bp, Artificial Sequence; identical to SEQ ID NO: 844094
  ENSG00000214407_9 (sequence is synthesized)

SEQ ID NO: 1021093 - DNA, 120 bp, Artificial Sequence; identical to SEQ ID NO: 844095
  ENSG00000214407_10 (sequence is synthesized)

SEQ ID NO: 1021094 - DNA, 120 bp, Artificial Sequence; identical to SEQ ID NO: 844096
  ENSG00000214407_11 (sequence is synthesized)

SEQ ID NO: 1021095 - DNA, 120 bp, Artificial Sequence; identical to SEQ ID NO: 844097
  ENSG00000214407_12 (sequence is synthesized)

SEQ ID NO: 1021096 - DNA, 120 bp, Artificial Sequence; identical to SEQ ID NO: 844098
  ENSG00000214407_13 (sequence is synthesized)

SEQ ID NO: 1021097 - DNA, 120 bp, Artificial Sequence; identical to SEQ ID NO: 844099
  ENSG00000214407_14 (sequence is synthesized)

SEQ ID NO: 1021098 - DNA, 120 bp, Artificial Sequence; identical to SEQ ID NO: 844100
  ENSG00000214407_15 (sequence is synthesized)

SEQ ID NO: 1021099 - DNA, 120 bp, Artificial Sequence; identical to SEQ ID NO: 844101
  ENSG00000214407_16 (sequence is synthesized)

SEQ ID NO: 1021100 - DNA, 87 bp, Artificial Sequence
  ENSG00000250604_0 (sequence is synthesized)
tctgtgcctggtgagaggctcaggctgcttccactcatggcagaagcttgctctggctaacaaccactatcatcaaagttgtctgag

SEQ ID NO: 1021101 - DNA, 120 bp, Artificial Sequence
  ENSG00000250604_1 (sequence is synthesized)
ctggctaacaaccactatcatcaaagttgtctgaggaagacctcctgttgctgtgactgacgggactcttggtggaagccctattcccatgtgcccatggctgcagctccccaaggaagc

SEQ ID NO: 1021102 - DNA, 120 bp, Artificial Sequence
  ENSG00000250604_2 (sequence is synthesized)
aggacattgttggattctctaagaagctcagaggaagttacttctcactgtggtgccatatgggatttgaagtcgttctactcatgctctgtttttcaataaagctgcttctgcctctgt

SEQ ID NO: 1021103 - DNA, 120 bp, Artificial Sequence
  ENSG00000258478_0 (sequence is synthesized)
gaagaaggtgacaagactagatctcattctctgaaaagcgttttctggcttcttctattgactagaccatatatgaggccacttcctagagtctattgcaccatcgatgctgaatttctc

SEQ ID NO: 1021104 - DNA, 120 bp, Artificial Sequence
  ENSG00000258478_1 (sequence is synthesized)
tgatttggacctcagctctgccaatttcaacctgggaggcagcaccttggccagcagacttagaattctggtgctattgaccaggctccacatgaagactggacagcaggaaaaagctat

SEQ ID NO: 1021105 - DNA, 120 bp, Artificial Sequence
  ENSG00000258478_2 (sequence is synthesized)
cacagctgaggaaagctgcatgttgaacagatgacttaaactcctattttctgattccaagctcaccaaaacaactttctgattataatttagcttctctacaaaaaggaaaagtacaag

SEQ ID NO: 1021106 - DNA, 120 bp, Artificial Sequence
  ENSG00000258478_3 (sequence is synthesized)
tgcaagtcatgctgacaggagagctcaggtcttctgagattttatttcttattctacattagtaaactgacattatggttttctacatcagtgtcttgtagcttgactaatgctggatca

SEQ ID NO: 1021107 - DNA, 120 bp, Artificial Sequence
  ENSG00000258478_4 (sequence is synthesized)
agttgccctttcctagttgacacttgcccctacatgccccagttgccctttcctagttgaaacttcagttatctctgtgtgtatcttcattcaaactgcaggcctctgtgcagttatagc

SEQ ID NO: 1021108 - DNA, 120 bp, Artificial Sequence
  ENSG00000258478_5 (sequence is synthesized)
agtgaacagagcagaaactatcccagaggaggcacttgccttagtgcagcgtcattaaaaaaaggtgtggaagtggatattgagagatgctgtcattaaataacaccttcgccactaatt

SEQ ID NO: 1021109 - DNA, 120 bp, Artificial Sequence
  ENSG00000258478_6 (sequence is synthesized)
aattacatgactttagaaaagtcacaacctcctcaagcctaaaaacccacatctataaaatgggaataatgttgccaaatgaatcccttcaacgtttgttccctttcaaggaagctgcca

SEQ ID NO: 1021110 - DNA, 120 bp, Artificial Sequence
  ENSG00000258478_7 (sequence is synthesized)
cataaaaatgtatgaatcgtgggcaactgaaattctctttttctccaaggcaaacacacaaaactgtatctcaaaactgcaggatatcaggccgggagacatggctcacacctgtaatcc

SEQ ID NO: 1021111 - DNA, 120 bp, Artificial Sequence
  ENSG00000258479_0 (sequence is synthesized)
aagcatcggaggaagagaacgtggtaatattgactccaatccagaagacagtcatcagttaagtaaataaaacaggaacagaacattggtacttacagtaggcatgattttaagataaac

SEQ ID NO: 1021112 - DNA, 120 bp, Artificial Sequence
  ENSG00000258479_1 (sequence is synthesized)
cccaatgagtcatatccttgtataatctcctccccttgagtgttgttggagctaatgagttgcatttagtgaacagaatatggcaaagatggtgggatcgtcacttccgtggttatgtta

SEQ ID NO: 1021113 - DNA, 120 bp, Artificial Sequence
  ENSG00000258479_2 (sequence is synthesized)
gagagtggcccctggctgacagctagcaagaaaacagggacctcagtcctccagcttcaaggaagtgaactctctgaaatcacatacacatggaagaggaccccaaactccagactccag

SEQ ID NO: 1021114 - DNA, 120 bp, Artificial Sequence
  ENSG00000258479_3 (sequence is synthesized)
aaaagaatgtagctgtgtcgacacctagatcacagccttgtgagaccctgagcaggggacccagttaggctgtgcctcaactcctgacctatagaaactgagatgataaatgggtgttgt

SEQ ID NO: 1021115 - DNA, 120 bp, Artificial Sequence
  ENSG00000258479_4 (sequence is synthesized)
tttaagccactaaactgggatgtgttatgaaatgacagaaatttaatacagtctccgtattcagggtggagtgtaagggagtgtgtttaaatctcagctttgctacttattagatgtaca

SEQ ID NO: 1021116 - DNA, 120 bp, Artificial Sequence
  ENSG00000258479_5 (sequence is synthesized)
caagcatcggaggaagagaacgtgggtcttgctgtgtccctaggctggagtgcagtggtgcagtctcaattatgccagatggctctgaggtccaagtaaaagataatatttgcaaccaac

SEQ ID NO: 1021117 - DNA, 120 bp, Artificial Sequence
  ENSG00000258479_6 (sequence is synthesized)
tcactggagttgaccatcaaaactcttttccaggcacactcaggcatcgcagaaaataatatgtattgtggaatccctcacttgatgaataatctagatgatcagaaatgtggcactatt

SEQ ID NO: 1021118 - DNA, 120 bp, Artificial Sequence
  ENSG00000258479_7 (sequence is synthesized)
agcaccctgaatccagcttcctgctatgaatgaatactgagcttgggttggtggaaattgattttcgagataaagaatccagccaggactgtgaagccccagggaatggctgcacttcaa

SEQ ID NO: 1021119 - DNA, 120 bp, Artificial Sequence
  ENSG00000258479_8 (sequence is synthesized)
gtcagaaggagcctgggtccctgaatcatcatgtggaaggctctccacccagttcaatggtgcaatggaccacaagcaggaacttaatttagaatgtgcttattttgttagattttgtaa

SEQ ID NO: 1021120 - DNA, 120 bp, Artificial Sequence
  ENSG00000258479_9 (sequence is synthesized)
ggccattctacagtctgcccagagctgcagcgtaaagaggcattagacggtacatattgttgatttccaggaagttacactgccctactttaaggtgatgctcattagtctgcaaacctg

SEQ ID NO: 1021121 - DNA, 120 bp, Artificial Sequence
  ENSG00000258479_10 (sequence is synthesized)
gatgctgaagaaatccatgtcatagaaggacagaagtcttgtatcctgtgccaactctcattgtttggtggtgattgcctggagtgctggggctagtctgggttctgcaggaaaaaaggg

SEQ ID NO: 1021122 - DNA, 120 bp, Artificial Sequence
  ENSG00000258479_11 (sequence is synthesized)
aaagccacatgtggactccagccccatgcctaccaaccgtcttgtcactgtcactcggagctccttcctgcccagcggatgtgtccaccctctccttcttcctctaatgttcttcctgtc

SEQ ID NO: 1021123 - DNA, 120 bp, Artificial Sequence
  ENSG00000258479_12 (sequence is synthesized)
ttcaaagcaatgcggctgaaactctcgaccaagttctccgcagcttcttcatcttgcggatcttctcgcccggctgcagctcaaagaggtggcacctctgggcaacgcagggccccggca

SEQ ID NO: 1021124 - DNA, 120 bp, Artificial Sequence
  ENSG00000258479_13 (sequence is synthesized)
acgtccccaaactagtggagagcaggcgcgcgccaaggcctgctcctcctccacacgccttcggcggctcaggaggtggggcggcggcgtcttccttggtgccaggcctacgtaagtttt

SEQ ID NO: 1021125 - DNA, 120 bp, Artificial Sequence
  ENSG00000258479_14 (sequence is synthesized)
ccttaaagcctaactgacaattccgcacaggaagcctgtattgctgaaattagaacaaaaggcctatgtaccttaatgcattcatatttcatattttaaataaaaccatggtttcccaca

SEQ ID NO: 1021126 - DNA, 120 bp, Artificial Sequence
  ENSG00000258479_15 (sequence is synthesized)
aaggctgtccattcctacatggtgctcttctgttctgacctcctagtgaatggtgataaaggttaatgactatttggactttaatgtgtgtgcctattgtttcaaagggagaatcatgat

SEQ ID NO: 1021127 - DNA, 120 bp, Artificial Sequence
  ENSG00000258479_16 (sequence is synthesized)
ttaaaagaggcttaggaagacttcatgaatttagttgtcagaaatatgactctcccaaggcttggggtgagttgaaagagacctcaacacaagcccattagcttgatgcaatgtcctgct

SEQ ID NO: 1021128 - DNA, 120 bp, Artificial Sequence
  ENSG00000258479_17 (sequence is synthesized)
tagggcttgcaagagtccagtgtaaaggcaaatgaaagacccaggtgcaaaaatgggtgggcatgtgtttcctttcttccatcagatggggcgtccttactcccagtctttccagatgtt

SEQ ID NO: 1021129 - DNA, 120 bp, Artificial Sequence
  ENSG00000258471_0 (sequence is synthesized)
cttggtgtttcctcggtcttacagctccattgtgctttgtggttctgtgtagtagctctataggaaggaggtcctaatatcatggttggccattgatcttgaccattttcaaaattttca

SEQ ID NO: 1021130 - DNA, 120 bp, Artificial Sequence
  ENSG00000258471_1 (sequence is synthesized)
agatcagagctggtctcctctcagaggagaggagaggtgattttacagaagcagaaccacagactccctactttttgtctctgcttcaggtttaggacccctgtttctctcttcccctta

SEQ ID NO: 1021131 - DNA, 120 bp, Artificial Sequence
  ENSG00000258471_2 (sequence is synthesized)
ttgtcaaggaacgtgagtacttcccagactttagggacaaaatcccaagacagctaagagaagattcaatgggaaagagagtaaaaccggaacagagtgaaaagagccttatggtttcag

SEQ ID NO: 1021132 - DNA, 120 bp, Artificial Sequence
  ENSG00000258471_3 (sequence is synthesized)
cttgaaaattctggatttcacgaagagattttaaaggggcttcagcagtcatatgcatgaaccctgctcccaggaaaacaccagcagaaatacagcccaggagtctgaggactagccggt

SEQ ID NO: 1021133 - DNA, 120 bp, Artificial Sequence
  ENSG00000258471_4 (sequence is synthesized)
gatgacctaataaaaagcagaagttacaacccacttgacactgaggagacagacaaagcaaacccacatcaagggtgtctgttcgcgtttgaaattcatcggcaccagaaagagctaaca

SEQ ID NO: 1021134 - DNA, 120 bp, Artificial Sequence
  ENSG00000258471_5 (sequence is synthesized)
ggctcaagtgatcctcttgcctcagcttcctgagtggctggaaatgcagacacatgccaccgtgcccagcttctacactttttaagaatcacaaaatccacttccattcttcaaaaattt

SEQ ID NO: 1021135 - DNA, 120 bp, Artificial Sequence
  ENSG00000258471_6 (sequence is synthesized)
aaaatccacttccattcttcaaaaatttattatttattattaaaaatctcaaacaaacacagacatatggggataccagcattcccctcctggataccaggcagcttcagccctggcagg

SEQ ID NO: 1021136 - DNA, 120 bp, Artificial Sequence
  ENSG00000258471_7 (sequence is synthesized)
cacgatagaagaaaatacttgttacacatcctcatcaactctcagagggatcctgagccgtagatggaggaaacgcagacggagtaagcacaggatgtttgcttcctgctgcaatatccc

SEQ ID NO: 1021137 - DNA, 120 bp, Artificial Sequence
  ENSG00000258471_8 (sequence is synthesized)
caggtacctacccagctgaaggggatgggatggtacgcctgtgagaagctacaggccaggttggtcaactggggacaagggagttcatggggacactgtgaacacataaaaaaatgaggt

SEQ ID NO: 1021138 - DNA, 120 bp, Artificial Sequence
  ENSG00000258471_9 (sequence is synthesized)
aagacaaaagagccatcaatcacaaaacttaaaaactgagaataatagagtcaaaaggggccagggagaagggaggacaggagcagtgggtaggaagagccaggggaatcattaggtagg

SEQ ID NO: 1021139 - DNA, 120 bp, Artificial Sequence
  ENSG00000258471_10 (sequence is synthesized)
aactggataggaacacaaagtagtggagagtggcttagctttaccatcttacatttcccggccacgcctaagttcagatccgtgtggtgggacaggcagaagtaatactcaccggggcaa

SEQ ID NO: 1021140 - DNA, 120 bp, Artificial Sequence
  ENSG00000258471_11 (sequence is synthesized)
agtggcgtcttctcctcctcttcaatggcatgactaatccaagagctacggatagtcttagttcatgtgcttggggttggtctaatccaaaataggaaagtctatggtagctgcttccca

SEQ ID NO: 1021141 - DNA, 120 bp, Artificial Sequence
  ENSG00000258471_12 (sequence is synthesized)
gctattttgtactggggacaatctggtcctgtctcactcaggacgtttgatctaagccttccataccctctccacctcatcccaagtcttataggttgcaatgctgatacttgaaccacc

SEQ ID NO: 1021142 - DNA, 120 bp, Artificial Sequence
  ENSG00000258471_13 (sequence is synthesized)
cgctttcagagatttggggccacctggaggtaaagaggtggggctgagaggtggtgctggtgctactctgtgggaactagtacccacatgagggaactaccctttcctgtaaccccagaa

SEQ ID NO: 1021143 - DNA, 120 bp, Artificial Sequence
  ENSG00000258473_0 (sequence is synthesized)
ggaatgtagagtggttagctttcttttcaagaatgtatttccatacttcttttgggtttctagaaaagaaggtacatttcctggatttgagctttagccacagagagtatctgggaccag

SEQ ID NO: 1021144 - DNA, 120 bp, Artificial Sequence
  ENSG00000258473_1 (sequence is synthesized)
aaacacaggatctctattaaaagaacacgaaacgtcacttccacacgacctgcaatttctagaatggagagaaagcttcagtaaacattcagtaatagcatgcaacaaaggtgggaaaac

SEQ ID NO: 1021145 - DNA, 120 bp, Artificial Sequence
  ENSG00000258473_2 (sequence is synthesized)
tgaggctgagataaagtaatgacttaatggcacagtaagagaccaagttacgatttcaacccagaaatacttgattccaaagccccaactctactgcatgatatactaagcactattata

SEQ ID NO: 1021146 - DNA, 120 bp, Artificial Sequence
  ENSG00000258473_3 (sequence is synthesized)
tctctacttctgagtagaatgctccaagattttgctgggacaggaagggtataaatagtacatacatacatacacttccatattattttggtgacaataaaattacgtcataaaaatgta

SEQ ID NO: 1021147 - DNA, 120 bp, Artificial Sequence
  ENSG00000258474_0 (sequence is synthesized)
gtttctgaggcttgcagccagtggtcccgttagtctgcacgtctccgagttgccctcccagaggagaaagcatatgctgctgggaccgactgcagctcctcatggatgcacctgccacca

SEQ ID NO: 1021148 - DNA, 120 bp, Artificial Sequence
  ENSG00000258474_1 (sequence is synthesized)
gaaaattgttgttcagtctgggattgctttctcttcccaaagcacaatctcacatgcagtcatgagcccagtccagcctctgggacagaagatttcgtgcttttataaaccaacagcact

SEQ ID NO: 1021149 - DNA, 120 bp, Artificial Sequence
  ENSG00000258474_2 (sequence is synthesized)
tgatgacagtggatttgtcacccagctcagtgtcttttcctgagcaataggaatttcttccatggggaatgaaacctagtgttgtttccctgtctgaatccaggcctttcactgacctgc

SEQ ID NO: 1021150 - DNA, 120 bp, Artificial Sequence
  ENSG00000258474_3 (sequence is synthesized)
caagttttcattccattgtctcactgtcattggctgatctgatctctacattgattaattagtttcaagccccttcatactgatctaataaaattggcttgtttaatttgtgtcaggaaa

SEQ ID NO: 1021151 - DNA, 120 bp, Artificial Sequence
  ENSG00000258476_0 (sequence is synthesized)
atcacagaggggcagacaatgcagtggctgatcagagctttcctgataccatcatgctttttagaggcctctgctctgccagcctgggagtcatcttcaccctcaggctggtagactcca

SEQ ID NO: 1021152 - DNA, 120 bp, Artificial Sequence
  ENSG00000258476_1 (sequence is synthesized)
gtctcttaggtcagaatgggattagagacccgttcctgaaccagtcacacacagcgggtgaaactgctatgattggtttagacttagagactggaatggatgctgtccccagatagcaga

SEQ ID NO: 1021153 - DNA, 120 bp, Artificial Sequence
  ENSG00000258476_2 (sequence is synthesized)
tgactggtaggaagatgaggcaagtttgcggtccattgtcatggatagtggagacaacactgggccagaagtggtaagacctgaatccaagactcagctctgccacttgctaaatgggac

SEQ ID NO: 1021154 - DNA, 120 bp, Artificial Sequence
  ENSG00000258476_3 (sequence is synthesized)
tttgaataaaccatttctctgcacttaagttccttaccaacaaaacgagggaagtggcctacatgcctagatatcaacatttcatgtcacgtagagatctagcatcacaagaatccaagt

SEQ ID NO: 1021155 - DNA, 120 bp, Artificial Sequence
  ENSG00000258476_4 (sequence is synthesized)
catcctctgttgcctttaagaaattagaattaaaggaatcagaattgaagtgaatctgactacactaagcctatcacttgtgacagccatgggaagatatcattggttgctgaggagcag

SEQ ID NO: 1021156 - DNA, 120 bp, Artificial Sequence
  ENSG00000258476_5 (sequence is synthesized)
aagaaaaaaattaaaattcttcaacatttggaaaagaagtgtttgtaaaacttttcacatccattcaccatccggaaaagcaaggttttacagtgaggcctgatgatgtctagagtcacc

SEQ ID NO: 1021157 - DNA, 120 bp, Artificial Sequence
  ENSG00000258476_6 (sequence is synthesized)
atgcatcttggaaaatgacctcctatttatttcttctacaggacaccatggtgttcacctttctacaactttacacttgctgaggacatattgtggaaaattaagagaaatatatatgga

SEQ ID NO: 1021158 - DNA, 120 bp, Artificial Sequence
  ENSG00000258476_7 (sequence is synthesized)
tggccaaggctgtagatggatgtccaagcctttttactggggaatgttttcagaacaaaatgagttacaggttcaagagtgaaacccaacaaatcttggctctttttttctctactaaat

SEQ ID NO: 1021159 - DNA, 120 bp, Artificial Sequence
  ENSG00000258476_8 (sequence is synthesized)
tccaaatcaaaagtatttatggagtgcttttaatgtgccacgcactgggctagagattcataattttgatgggaatctgtgtattcaaactcttttaacgtggaaaccttgcttgtgcaa

SEQ ID NO: 1021160 - DNA, 120 bp, Artificial Sequence
  ENSG00000258476_9 (sequence is synthesized)
ggtcctcccagatcttatcctactttatcaaagcttggctaaatgcaacatgtcttctccccagtgccctgggtctctgtacacgcagtaaagtggtccttagacatatgctgaaatagg

SEQ ID NO: 1021161 - DNA, 120 bp, Artificial Sequence
  ENSG00000258476_10 (sequence is synthesized)
gcttaattttccccatatacgaatgagataaattctactacatgtagccagacttcgatagggagaacacccaaagtcacttaaaataaaactacactttcatttttgcaagccaaataa

SEQ ID NO: 1021162 - DNA, 120 bp, Artificial Sequence
  ENSG00000258476_11 (sequence is synthesized)
catttcctaccaggaaggaaccagagtctttgcagaaatgtatcatttcacatctgggtaaggaaatgtctgagaaggatcagatatattgtgggtcagaaagcaacggagctgtcaaag

SEQ ID NO: 1021163 - DNA, 120 bp, Artificial Sequence
  ENSG00000258476_12 (sequence is synthesized)
tgaactcatgcaacggtatcaaaaggattcaaaagaattcagttgataaaagtcggtatagacccatttcttcccactcttccctgctaagtataactgtaacccctgaaaattactcaa

SEQ ID NO: 1021164 - DNA, 120 bp, Artificial Sequence
  ENSG00000258476_13 (sequence is synthesized)
gagacaaccaaaggagaactctaaacactagtggaagaagattaactgatttgggaccctaagaacaacatagtggcagggtgacactcatgcctcctttcaaaagaacaaggacaccta

SEQ ID NO: 1021165 - DNA, 120 bp, Artificial Sequence
  ENSG00000258476_14 (sequence is synthesized)
gacccagtattttcctacctcagcagagcaacagatggaagcccacgtaggctcattgctctcctggatccatcagcagcccctctgcatcaggcgagcccaacactacctttgaggagg

SEQ ID NO: 1021166 - DNA, 120 bp, Artificial Sequence
  ENSG00000258476_15 (sequence is synthesized)
gaattgcctcctcctcaaaagccttatttgttcatttaattggggcaacatgaaataatgatgtatcattgacagagaacagggggcttaggttctcatcttggtcctagtgattactct

SEQ ID NO: 1021167 - DNA, 120 bp, Artificial Sequence
  ENSG00000258476_16 (sequence is synthesized)
atgcataacctcaacttctttatctgtacattgggaacaataattcttactccacttgttgtgttgaaactgaattatataattcataaattaaaacaccaaattctgataaatgctaaa

SEQ ID NO: 1021168 - DNA, 120 bp, Artificial Sequence
  ENSG00000258476_17 (sequence is synthesized)
aggggaatcactctccttcctcaagcagcaccagcaagaaccagtgggagcccgagaaacaccagacatgttaagtagtccaatgtaacaccacaaagtctctgaaaattaaactgccat

SEQ ID NO: 1021169 - DNA, 120 bp, Artificial Sequence
  ENSG00000258476_18 (sequence is synthesized)
tggaaccatagcctaaaaaagttggccaagacttacgtatgtgataaatctaaacagggtgactgccacttaaaataaaagatttaaagaggaccccagagtctcttaacatactagaca

SEQ ID NO: 1021170 - DNA, 120 bp, Artificial Sequence
  ENSG00000258476_19 (sequence is synthesized)
caccaagaaccaaggaaatgacaactcgaatgagaaagaaaatcacctgacactgcactaagttcaatgttggaattatctgacaaggattttaaattatatttgatcattgaaacaaaa

SEQ ID NO: 1021171 - DNA, 120 bp, Artificial Sequence
  ENSG00000258476_20 (sequence is synthesized)
gagacaggatccttctccccacttcgagcagatcccagcatgaatcctgcagtatggtgatggcaaaagtcagtgcaggaccactgggactcctggagcttctcacatctctgagagcac

SEQ ID NO: 1021172 - DNA, 120 bp, Artificial Sequence
  ENSG00000258476_21 (sequence is synthesized)
tggaacaggagttacacaaatagagatgattgcctctccatcctgacaaagtatgataaagaccaccgaagtgttgtacgcaagaaagcacaggatggctgggatgagtgaactatgtat

SEQ ID NO: 1021173 - DNA, 120 bp, Artificial Sequence
  ENSG00000258476_22 (sequence is synthesized)
cccaggttttacttaggcctcagcatccagtggtaaccctgtcaattctttgctctctctgatcatttgcaagtattgagaggaagacactattttggggttaattagaatcatacagta

SEQ ID NO: 1021174 - DNA, 120 bp, Artificial Sequence
  ENSG00000258476_23 (sequence is synthesized)
cttcgagcagatcccagcatgaatcctgcagtatggtgatggcaaaagtcagtgcaggaccactgggactcctggagcttctcacatctctgagagcaccagcagcagccagctctcctc

SEQ ID NO: 1021175 - DNA, 120 bp, Artificial Sequence
  ENSG00000258476_24 (sequence is synthesized)
tgccgtttgccatgagtggaagcagcctgaggcctcacctgatgcagatgccactgccatgcttctagtagagcccacagaaccatgagccaaacaaacctttcttcttattgtttttct

SEQ ID NO: 1021176 - DNA, 120 bp, Artificial Sequence
  ENSG00000258476_25 (sequence is synthesized)
tcccaacttttgttttagttgggaaataaaggcccagtggagtgttttctccactgtgttgtgacagtgggccatgaacttgcctcatcttcctaatagttatctactacttaatgtccg

SEQ ID NO: 1021177 - DNA, 120 bp, Artificial Sequence
  ENSG00000258476_26 (sequence is synthesized)
aagaaacatatgtattggcttgactaatgttacatttatgttgttaagaaacatgtactcaggggctacatgtgcaggtttgctacatgggtaaatttcataccataggagtttggtgta

SEQ ID NO: 1021178 - DNA, 120 bp, Artificial Sequence
  ENSG00000258476_27 (sequence is synthesized)
agctctggtttccccagctgtaaaattgcaatgataacagcttacctctgaggatagttgtgaagatccttagaatatacacaaagttttcatggaccacacattatgaaacactggatt

SEQ ID NO: 1021179 - DNA, 120 bp, Artificial Sequence
  ENSG00000258476_28 (sequence is synthesized)
cttatcttgttctttcctataatgcccattttgatataaaccaggctccctagtcagtcttgcagaaggtattctcaagaagaacttatatctttggtttatcaacaaatttgcaaagct

SEQ ID NO: 1021180 - DNA, 120 bp, Artificial Sequence
  ENSG00000258476_29 (sequence is synthesized)
gtgttgataatctagagctgagtcttttaacaagttttaacaatatctcaattactatgatgtaggtctcttaataaaatgtaaatgtaaatgtgacagaagtcaacattaggactttta

SEQ ID NO: 1021181 - DNA, 120 bp, Artificial Sequence
  ENSG00000258476_30 (sequence is synthesized)
ggaagggatatagacactcaacattcctctttgttcaggagggtgacatagcacagcttgccacctgtgagctaaccttatctagaacacagcataggaactactgcttgactagaaaac

SEQ ID NO: 1021182 - DNA, 120 bp, Artificial Sequence
  ENSG00000258476_31 (sequence is synthesized)
taatttataaagcttaaggaacttaagggactttcagggactaatttaccatcataaaatatctatctctacgaagaaagaagagagttttaagtacttgaaaataaaaatcttatattt

SEQ ID NO: 1021183 - DNA, 120 bp, Artificial Sequence
  ENSG00000258476_32 (sequence is synthesized)
agagtgctcaattccagtcttcaattacgtaaagaaaaccaataccgtatacctcttggcctgcccatttcaggacagggtggaggaggcagaaggaagtgggagttgcactggggaggg

SEQ ID NO: 1021184 - DNA, 120 bp, Artificial Sequence
  ENSG00000258476_33 (sequence is synthesized)
agagagactagctcttccagctgctcttatgatgaggaaataattacttaatggctaggcaatttgtgaagcagctgctggtggtttggggacccagctgttccaaaaaataaaaagaat

SEQ ID NO: 1021185 - DNA, 120 bp, Artificial Sequence
  ENSG00000258476_34 (sequence is synthesized)
tatccttcccatagtagacaaattagatatgtagtttcaaaataaatgattaattcctactgagaaatgttctttagaatcccttgttgagtaagagtctaaaggattggttaagtttca

SEQ ID NO: 1021186 - DNA, 120 bp, Artificial Sequence
  ENSG00000258476_35 (sequence is synthesized)
atgctcacatttaaaaataaatcttaaaagtatgagaatttgagagaaatctaagctcatcggaaatgtataccaaaccctctacctgatgttgctataattgatagtcattttttttaa

SEQ ID NO: 1021187 - DNA, 120 bp, Artificial Sequence
  ENSG00000258476_36 (sequence is synthesized)
tccctgaggtaaaataaaatcaaacaataacatgccagaacaactgtctcttttttctggctacggagtgtggaacaaaagcaggttccattctttggtggcattggccaggcaagcagg

SEQ ID NO: 1021188 - DNA, 120 bp, Artificial Sequence
  ENSG00000258476_37 (sequence is synthesized)
gtgtctggacagctagggagaaggtgacaatgggatggaaatcagatgctcactcagtaaatatctgtgagcaagtaagtggactagggattttgtgggttttttatgtcatcctcagag

SEQ ID NO: 1021189 - DNA, 120 bp, Artificial Sequence
  ENSG00000258476_38 (sequence is synthesized)
gcatgagggaagaaggtctcagtctatccatcgtgcagatgaaaaaaccaaagcccacatgacttactcacctaagctttcccagtggtgatgtgtggaatcaagttgaaaaggtagaaa

SEQ ID NO: 1021190 - DNA, 120 bp, Artificial Sequence
  ENSG00000258476_39 (sequence is synthesized)
agaggttaaaggaaacacatttggagtctagctgtttgaatcctggatctgccagtgtctgaggttggacaagtgacttagccatcgaggcttcctttccactcagcacagttgtccagc

SEQ ID NO: 1021191 - DNA, 120 bp, Artificial Sequence
  ENSG00000258476_40 (sequence is synthesized)
agaccgtgagctccaattcagtgacagagatgattaactccgtctggcttgaaacgcttgctcatgtactacactttgctacgctgaaagtaacacaggtttgcagaaaaaaaataataa

SEQ ID NO: 1021192 - DNA, 76 bp, Artificial Sequence
  ENSG00000258476_41 (sequence is synthesized)
ggcatagcctactccgtacctaggctgtatggaatagccaattactcctaggctacaaacctgtacagtcttgtgt

SEQ ID NO: 1021193 - DNA, 120 bp, Artificial Sequence
  ENSG00000258476_42 (sequence is synthesized)
tgtaggcaattgtaacacaatggtacttgtgtatctaaacatagaaaggtacggtaaaaatatgctataaaatataaaaaatggcatacttgtgtagggcacttaccatgaatggagctt

SEQ ID NO: 1021194 - DNA, 120 bp, Artificial Sequence
  ENSG00000258476_43 (sequence is synthesized)
cacagggtcaggatcatcaatatcactctcttgtcccacctcttgtcccattggaaagtcttcggggcaaaaacacacacggagctgtcatctcctgtgataacagtgccttcttctgga

SEQ ID NO: 1021195 - DNA, 120 bp, Artificial Sequence
  ENSG00000258476_44 (sequence is synthesized)
ggagctgtcatctcctgtgataacagtgccttcttctggaatacctcctggaggacctgcctgaggctgcttcaaaataacttatttataagtacactctaaaataatgatgaaaaatat

SEQ ID NO: 1021196 - DNA, 120 bp, Artificial Sequence
  ENSG00000258476_45 (sequence is synthesized)
agtatagtatttatttcataagctagtaacatagccatttattattatgtactgcacataattgcatgtgctataatttttttacaattgaaaatacagtaggtttgtttacaccaggat

SEQ ID NO: 1021197 - DNA, 120 bp, Artificial Sequence
  ENSG00000258476_46 (sequence is synthesized)
ttgttcagaaagaaacaggaatcaagagggatgtaattctgactcttttcatggggtggtcattaaacagcctttactcacctttccactctgagtattaacttctgagttgtcagtggt

SEQ ID NO: 1021198 - DNA, 120 bp, Artificial Sequence
  ENSG00000258476_47 (sequence is synthesized)
ctgagcaggacctgggcagcatgttgcattttcagcagttgcaggaggacatctttccataaatttcccctggaaggaaggaaataataacataatctcatcatctgctgattgaacaag

SEQ ID NO: 1021199 - DNA, 120 bp, Artificial Sequence
  ENSG00000258476_48 (sequence is synthesized)
atctgctatattacaaatctgcttagctgaggagcggctctcctggcctgctttcctccagctgtctaaatattacttagttccaaaacctgtcttactcctacttcctccaacaaatcc

SEQ ID NO: 1021200 - DNA, 120 bp, Artificial Sequence
  ENSG00000258476_49 (sequence is synthesized)
gaacttgttttgatgatcttgtattgtcctctgactcattttaaaccaatatttgttccttgagaatgaagatcatactaacaatctctttgtcccctgcagatttcagcatggtgaagg

SEQ ID NO: 1021201 - DNA, 120 bp, Artificial Sequence
  ENSG00000258476_50 (sequence is synthesized)
gaaaaagagtgattgccatctcccatctcttagaatagcatgcttgcctgcagactctgtggccatgtttcaacaactggattagacctctttcaatatcaaatccatatctgatcaatt

SEQ ID NO: 1021202 - DNA, 120 bp, Artificial Sequence
  ENSG00000258476_51 (sequence is synthesized)
tcaagttgttcctgtcccttgggagtggtttgccatttcctgcctatgactgaattcctgctttcttcttatcctcaatagctcatggcacggacattctcgtgtgccttgtccacatca

SEQ ID NO: 1021203 - DNA, 120 bp, Artificial Sequence
  ENSG00000258476_52 (sequence is synthesized)
tgaccctgctatccatttgggtgacctccacactttgtgtttcccactttcatatcacatgagactctcaaggagagagtttcaggatgggtaaagctaagaagtaaaaatagaaaaggt

SEQ ID NO: 1021204 - DNA, 120 bp, Artificial Sequence
  ENSG00000258476_53 (sequence is synthesized)
ggtgaaaattcagtagactagcatacaggttgacagaagaacacatttattttctagtggggagtgatccgtgaagaaagacccgaatcaagaagtctttcagaattctggttttaatag

SEQ ID NO: 1021205 - DNA, 120 bp, Artificial Sequence
  ENSG00000258476_54 (sequence is synthesized)
tttcccaaatttacttattaacatttacattcaagccagagagaaaagagaggaagtcattcaagagaaaattgtcacaagaagagcctatccaatggaaatggccacctcttattgatc

SEQ ID NO: 1021206 - DNA, 120 bp, Artificial Sequence
  ENSG00000258476_55 (sequence is synthesized)
acttaccataggctgggtgtatagggcaagggtccttaagattagctgcatagcagaatcaccaagggaacttttacaaatcctgatgccagggctaactgcagaccaatacaggtggaa

SEQ ID NO: 1021207 - DNA, 120 bp, Artificial Sequence
  ENSG00000258476_56 (sequence is synthesized)
tccaacatatttaaagctacataagtcatttcaatgtgcagctaattttgagagccactttcaatggtgctagagccagctcttattagctcacagaagccaattattaaattttcagta

SEQ ID NO: 1021208 - DNA, 120 bp, Artificial Sequence
  ENSG00000258476_57 (sequence is synthesized)
attctgtaagcgaaacacattggccacagagggaatatttacaccatggaaacttacaaatgctgcaaatcgtttttttatctctctggagaactagtttttaaacatttataaacacac

SEQ ID NO: 1021209 - DNA, 120 bp, Artificial Sequence
  ENSG00000258476_58 (sequence is synthesized)
tggtggccctaaggggtaaacatataacttgctatttaaatctgggcaattttaagacacatagaggggaacaaaacatactggagcctgccagagggtgaggggtgtgaggaggtagag

SEQ ID NO: 1021210 - DNA, 120 bp, Artificial Sequence
  ENSG00000258476_59 (sequence is synthesized)
gtgtgaggaggtagaggatcaggaagaataactaacgggtactaggcttaatacctgagtgatgaagtaatctgcgtaacaaactcccatgacaacacaagtttacctgtgtaacaaacc

SEQ ID NO: 1021211 - DNA, 120 bp, Artificial Sequence
  ENSG00000258476_60 (sequence is synthesized)
atttagtaaaagcttaccctgtatatggacccatgcatggataggacatgctatctgctttctcatgaggagcagaggcacaggtaactttgaggcagggaggttgtggttatgcaaaga

SEQ ID NO: 1021212 - DNA, 120 bp, Artificial Sequence
  ENSG00000258476_61 (sequence is synthesized)
aatatccatgaaagtacaagcctcccagctccatcacatgtccaagactcactggaagtgaggagaacctttgaggcctagaagcgaagacacatagaagcaatgtgtacctagactgtt

SEQ ID NO: 1021213 - DNA, 120 bp, Artificial Sequence
  ENSG00000227014_0 (sequence is synthesized)
gcaactgatgcatcttctaaccaggctgggaacacaacacgcgcacacgcgcacacacacacgcacgcacccaccccacccggctgccggacgcaagcgtaagtcaaggacttgcatgct

SEQ ID NO: 1021214 - DNA, 120 bp, Artificial Sequence
  ENSG00000227014_1 (sequence is synthesized)
agaatcagacagaaaatccagaaaagccacgttatttaacagaaccctacaaggtcagctttgagtcaaagcaggacggagccctgacagcaatgtttgctacggcctccctctgcagtc

SEQ ID NO: 1021215 - DNA, 120 bp, Artificial Sequence
  ENSG00000227014_2 (sequence is synthesized)
ggaggtagatgaggcaaaggtaaaggagaccaaaacagtattttaaagaaaaaatcatttatcttcaaataggctccaaacctaagatggtgtatactgttagaggacaagaacctgctt

SEQ ID NO: 1021216 - DNA, 120 bp, Artificial Sequence
  ENSG00000227014_3 (sequence is synthesized)
ctagccatctttgcgtctccaggacctgacttgtgaccattcaataagagtttgatagatggacagactaatgaatagatgaagatgattagaagccaaaatttctgaatcttcctagca

SEQ ID NO: 1021217 - DNA, 120 bp, Artificial Sequence
  ENSG00000227014_4 (sequence is synthesized)
cccagaacatggcttaacatcaaggaaatgctcactaaatactgtcataatggaatgaatggaaccgatgcctaattgaaaatcattaggctgtaaaccatttccatgttccaatttctt

SEQ ID NO: 1021218 - DNA, 120 bp, Artificial Sequence
  ENSG00000227014_5 (sequence is synthesized)
cgcctcaagagcgagccgaggaggcagaggccgaccaagccggcctctcggcagccccgcccggcgccccgcggagaacgcccgggtgcggctcgagggaagttgtgtcaagtcccacgc

SEQ ID NO: 1021219 - DNA, 120 bp, Artificial Sequence
  ENSG00000227014_6 (sequence is synthesized)
gggaagttgtgtcaagtcccacgcgcggcccgcggagaacccaggggcggcccgcgcgcgtcggcctagcggggagggctgctccgggacacggtgcggcggccgcgggcgagttggacg

SEQ ID NO: 1021220 - DNA, 120 bp, Artificial Sequence
  ENSG00000227014_7 (sequence is synthesized)
agaacagaaatgatagtgtaaccacctgaaaatccttcacctagacttccaaaaccacacccacctcatcaatgaagtctgactctctagaaagaagcaaatgactgaaatcatggtcct

SEQ ID NO: 1021221 - DNA, 120 bp, Artificial Sequence
  ENSG00000227014_8 (sequence is synthesized)
gtgccttgaccaaaataccattcgtcagaacaaaagaagtaggtcagtgaaacggcattagtatatccttcaacaggcaaataagtgatagtgtagtttgcttttgaagtcgctgtgaaa

SEQ ID NO: 1021222 - DNA, 120 bp, Artificial Sequence
  ENSG00000227014_9 (sequence is synthesized)
agttttaggtgaacatcacctacaccacattaaaaatggaatcaagtcattttctttaagaaatggagtttgagatatgagaattcttttgggctttttctacttattggccaattatac

SEQ ID NO: 1021223 - DNA, 120 bp, Artificial Sequence
  ENSG00000227014_10 (sequence is synthesized)
agaccacatgtttccaacaagaccttcaaaggcctcgctcgctatataaaactggctttaaacaatttcctttcccaaagaaggaaataagatatttcggttttgtaaaagaggcaaaac

SEQ ID NO: 1021224 - DNA, 120 bp, Artificial Sequence
  ENSG00000227014_11 (sequence is synthesized)
caggtacaggccacctttcctgctggagagctggcataagtgagtggattcttaattactattttacctgcggggcataattacttacgtggagtgaaataaggagccgtccttttctaa

SEQ ID NO: 1021225 - DNA, 120 bp, Artificial Sequence
  ENSG00000227014_12 (sequence is synthesized)
gtagccttcatagtggaccaacatcaaatcccctcctttggtcttgcgatggcagatgaatggcttctggagaacttcaattttcacttctggttcagggatcaaagccccaatcaaaga

SEQ ID NO: 1021226 - DNA, 120 bp, Artificial Sequence
  ENSG00000227014_13 (sequence is synthesized)
agtgacgaacagagtcaagaccgcgttccacaagaaaagcctcatgttgctgaagcaaggaaagaagtccctacaaaagcagcgaaaggtccctcgacttcatagatttaagaacgtagt

SEQ ID NO: 1021227 - DNA, 120 bp, Artificial Sequence
  ENSG00000227014_14 (sequence is synthesized)
tcaaggcttacggacaagggcttcagacaagttcaggactcccccttcttagaagacgtggcacatttaccaccaactcttttctcaagggtcacgaacctacctttaaagagttaagcc

SEQ ID NO: 1021228 - DNA, 120 bp, Artificial Sequence
  ENSG00000227014_15 (sequence is synthesized)
caaatgccggcctgactggctcttataacgcggccgcctgggaatagcagcctcccattggctattggtgctgtccttcaggcagctctcaagccaatgacgctgcaacgatggaattta

SEQ ID NO: 1021229 - DNA, 120 bp, Artificial Sequence
  ENSG00000227014_16 (sequence is synthesized)
cagcccggtagagccgggcagctgccaagcggcggatcatcccttgtggtcctagagcccggtggatttcagcattcaaccagcgtggattttgggagaggggcggggcgcagagccaac

SEQ ID NO: 1021230 - DNA, 120 bp, Artificial Sequence
  ENSG00000227014_17 (sequence is synthesized)
cggaaactcctccggctgatttatctctgtgaagaaccctgctgagagacgtaggaagagtcccggggccctatgaaatcttcggggttccaggaaagactcgtttactctcgccgttgg

SEQ ID NO: 1021231 - DNA, 120 bp, Artificial Sequence
  ENSG00000227014_18 (sequence is synthesized)
agagcggccccccaagatgccacaatcctaggattttgctattgcttataaactgtaaagactgacatactgcttgagggttcacaaagcgcgttcccgttgcatgaacctcactacacc

SEQ ID NO: 1021232 - DNA, 120 bp, Artificial Sequence
  ENSG00000227014_19 (sequence is synthesized)
cagtaaggcaggttcttttttcccatttaaaagagaagtaaatttacaccaggagatattaactgtcctgcttaaggttgtttggccccgaagcaaatgagctctgccttcaaaccaggt

SEQ ID NO: 1021233 - DNA, 120 bp, Artificial Sequence
  ENSG00000227014_20 (sequence is synthesized)
ctgattcattccacagcaccacgtcatgttatggctgctaataatttatcccttaagttaccttacagggtaaataatgagtttcgacttgcagacttccgctttaaagaagaaatggta

SEQ ID NO: 1021234 - DNA, 120 bp, Artificial Sequence
  ENSG00000227014_21 (sequence is synthesized)
atcatggttacgaattacacagcctcatcgtagtttacattttctagttttacattttttgcctaagttcaaaagtaatgcatgttcattgaagtcattttggaagaaattggaaagcac

SEQ ID NO: 1021235 - DNA, 120 bp, Artificial Sequence
  ENSG00000227016_0 (sequence is synthesized)
aacaaggaattctctctctagcaaaactcttctttaaaaatgaaggcaagtgatatgggaaaccacagcaaattttgatcagaagagtaatatcaactaactccacttggaccgcatgga

SEQ ID NO: 1021236 - DNA, 120 bp, Artificial Sequence
  ENSG00000227016_1 (sequence is synthesized)
aacgaggaaggagaatactacagcaacctggaagccagtgaaaaatgatggcaacactatctaagatggtaaaaaattgacgaagaaaagctcatttcgaactgttgaggagagaaatgt

SEQ ID NO: 1021237 - DNA, 120 bp, Artificial Sequence
  ENSG00000227016_2 (sequence is synthesized)
atttgcagagagagcatgaaaaatcatgaaccactccatgggttttgccttgtgcaagtggaagcaagggaagaagataaagagatgtttttatggggcttctctacttaacacaatcct

SEQ ID NO: 1021238 - DNA, 120 bp, Artificial Sequence
  ENSG00000227016_3 (sequence is synthesized)
gagatttaacacaggatggaaaagaaggcattataaaatttcagtaaggactgtgacctctagagagcagaggctgtatctttttcatttgcatattctgagcatctattacaatgcttc

SEQ ID NO: 1021239 - DNA, 120 bp, Artificial Sequence
  ENSG00000227016_4 (sequence is synthesized)
atacatatatagtgtctcactacatattaatatttattgttcaataaatgaatccatgaactcattttatgtgaaactatggaaagtaggacaatctctcctacaagaaatattgatggg

SEQ ID NO: 1021240 - DNA, 120 bp, Artificial Sequence
  ENSG00000227016_5 (sequence is synthesized)
cctcctgagtacatattccctggtctatagatgaagaaatgaaggttcaagaatactggacatctggactaattaaatgacaactaaatggcagaaatggtatttaagctcaggcctagc

SEQ ID NO: 1021241 - DNA, 120 bp, Artificial Sequence
  ENSG00000227016_6 (sequence is synthesized)
agatgcaaagtcatgggcacatgtcaagaaagacgagatatatcattttttcccacatagatcctggattattactatccttcgaatttatttctataatctctaagtcaggtggaacag

SEQ ID NO: 1021242 - DNA, 120 bp, Artificial Sequence
  ENSG00000227016_7 (sequence is synthesized)
agctataatttattagagtgaaactttggaggtgcatacagtagtcacattattatgttcatctcctacaggaacaacttttgatttcatttcattacattgaaaggtaacttcaaatat

SEQ ID NO: 1021243 - DNA, 120 bp, Artificial Sequence
  ENSG00000227016_8 (sequence is synthesized)
gaaaggagcctttaatgttataaatatgaccatgatgataatcatcactatcatcatctaaggtactcacaatcaataataagcctatacacttagaggtccaaattgaaattaaaaaag

SEQ ID NO: 1021244 - DNA, 120 bp, Artificial Sequence
  ENSG00000227016_9 (sequence is synthesized)
gaagacaagatctaaacttcagacaagctgatgagaaagcctgcttgcttcttccttcatttggacaggaaggtcaaaccatgtaggaaccgtcatcccagctgcaatccctgaccatag

SEQ ID NO: 1021245 - DNA, 120 bp, Artificial Sequence
  ENSG00000227016_10 (sequence is synthesized)
aaaccccaagccagttttctttccttgtttctcgagtcatctttggacttgcttgagatttgccttgttctcccagaaaagctcattatgggagcaataaacctttccatttcctcttga

SEQ ID NO: 1021246 - DNA, 120 bp, Artificial Sequence
  ENSG00000227017_0 (sequence is synthesized)
tggacagcaggcagctggcttctgctccaccatttgctcagcaccaaggcctgggacaacttattggttccttacaaagccacagcagagcacaatcatggaggatccaggattgcatag

SEQ ID NO: 1021247 - DNA, 120 bp, Artificial Sequence
  ENSG00000227017_1 (sequence is synthesized)
aaggaagcagccaagcattggaggtcgacatgcctgtgcccaaatcccacgtgttatgtcctgtgtgggttgacactgggatggctggtgacctgctccttgtgttcacaccctgtgtag

SEQ ID NO: 1021248 - DNA, 120 bp, Artificial Sequence
  ENSG00000227017_2 (sequence is synthesized)
attaggtttcaagagattgtagcctcccttacaagcagattctttattgccttctcgggtcacacacattgataaagtaagcaggcccatgtggcaaggaactgacagtgacctccagcc

SEQ ID NO: 1021249 - DNA, 120 bp, Artificial Sequence
  ENSG00000227017_3 (sequence is synthesized)
aacagctggcaggaactgaggcccttggtctaactgctcagatggaactgaattctgtcaactgcggaatgccttagaggcaggtccttgcccggctgagcttccagatgagcccccagc

SEQ ID NO: 1021250 - DNA, 120 bp, Artificial Sequence
  ENSG00000227017_4 (sequence is synthesized)
cctagctgacacctggactgcagcctcataagagaccctgaagcagaggattctgcagagacacacccagattcctgaggcacagaaactgtgagataataaatgtgtttttgctgttgt

SEQ ID NO: 1021251 - DNA, 120 bp, Artificial Sequence
  ENSG00000267439_0 (sequence is synthesized)
agtgtgagaagggttgagcaacaccaagttagctctttaccggatttaaccaaccgttggggtcccttcatccctaagaggaagactaatgtaaaataacgttgggttccctctcactga

SEQ ID NO: 1021252 - DNA, 120 bp, Artificial Sequence
  ENSG00000267439_1 (sequence is synthesized)
gcactcgctaggtgccaggtatctgttaatctctttgcagacaacacttccttcagaaaacgggaaacttccatttgtcacacgtcttggtccagataaatcccaggaagtagcatcgtg

SEQ ID NO: 1021253 - DNA, 71 bp, Artificial Sequence
  ENSG00000267439_2 (sequence is synthesized)
gaagcactattcctttcttagtttctcatctaatagtttcctgagcaggaaagttcctagttcagaagatt

SEQ ID NO: 1021254 - DNA, 120 bp, Artificial Sequence
  ENSG00000267439_3 (sequence is synthesized)
aatagtttcctgagcaggaaagttcctagttcagaagattatgagtagtatgcactgtaaaaaatgtacatcatgtctaaatactaagcctcgtacaaagctctcaacagatgtttttaa

SEQ ID NO: 1021255 - DNA, 120 bp, Artificial Sequence
  ENSG00000267439_4 (sequence is synthesized)
ccccaacctaagagtgcacatctgtgtgcctagcctgatccaggattcacgtgagggacctgtgtctgtctatcccactagcttaggggcaggatcctttgagcctatccacccactgcc

SEQ ID NO: 1021256 - DNA, 120 bp, Artificial Sequence
  ENSG00000267439_5 (sequence is synthesized)
ctggcaccaggctgctgggctgggacccactacccatcccacctcctcatcctcaggcagcgggggcaggggtgagctgggagagcattcacgctcgcgcacagaggggctgttgcgcat

SEQ ID NO: 1021257 - DNA, 120 bp, Artificial Sequence
  ENSG00000267439_6 (sequence is synthesized)
ccaggcgcggcagattgggtacagtggcgtgttctcgctgaactgggccaagtccacgctccggtcgaacagcttgatcacatatgtgtctgggaaggtggggatgggaggtgtgtgagc

SEQ ID NO: 1021258 - DNA, 120 bp, Artificial Sequence
  ENSG00000267439_7 (sequence is synthesized)
atccttgcataggcccttggctccttaccgaccctctagggccactgtctactcactggatcgctgcggccctccctcagccagcccatcatccatctccctcctcttcttcctccgctg

SEQ ID NO: 1021259 - DNA, 120 bp, Artificial Sequence
  ENSG00000267439_8 (sequence is synthesized)
gtgggggaagcgggcagatggcctgcgtagggagagggagtgtcaggactggggtaggagctgggagcctctagtcagctggctgggaccctgccaccttaccttttgccagtggctgcg

SEQ ID NO: 1021260 - DNA, 120 bp, Artificial Sequence
  ENSG00000267439_9 (sequence is synthesized)
atggagcagtccctgtggggaaagacagttgaccctcagacaaacgcctgtgcaaaaccctgcagagggcaccctggggatactggtatcaaacctgagatgctcacatgaaccccactt

SEQ ID NO: 1021261 - DNA, 120 bp, Artificial Sequence
  ENSG00000267439_10 (sequence is synthesized)
gcctcttgggccttttgtcccacccatacccatgggggtctaggtggcaaccacggggggacctaagcttctcctgccacagggtctttgtacaggtggagtggtccgggccacgatgga

SEQ ID NO: 1021262 - DNA, 120 bp, Artificial Sequence
  ENSG00000267439_11 (sequence is synthesized)
taaggaaagaagttaccaaccacgaactctcaactccaaatccaatcagaaaaactcacttattgtgggtgtctgagggtgttttcccagcttcctcatccagacgctccctagaggcag

SEQ ID NO: 1021263 - DNA, 120 bp, Artificial Sequence
  ENSG00000267439_12 (sequence is synthesized)
aagagatctctcagctcagggttccagggccccagagaaggaaggcaccgagcagcctccccattaagcaccttcctccccaagtcagcctgtggggtcccacccaatccacccaggatc

SEQ ID NO: 1021264 - DNA, 120 bp, Artificial Sequence
  ENSG00000267439_13 (sequence is synthesized)
agagggcccaacccaccagggtgcccggccctgtgaccccacgctggcctacctgtccatgtgactcttctccagcagacactgcaagacagcatccagttggttccgggctttggccat

SEQ ID NO: 1021265 - DNA, 120 bp, Artificial Sequence
  ENSG00000267439_14 (sequence is synthesized)
ctccagctctggggcaagagaggacccagcaggagtcagctcccaggccccagctaggtgggcagctgactgggccagggaagggcgtgcgtgtcctctgccctggccaatctcagagcc

SEQ ID NO: 1021266 - DNA, 120 bp, Artificial Sequence
  ENSG00000267439_15 (sequence is synthesized)
aggcccaggcagcctgaaagggtgcaacaggcagagatggctggagtgatgcccagagctctgagttccagagctgtcccacgtgattgctctgtgacaggagacaacacttccttcaga

SEQ ID NO: 1021267 - DNA, 120 bp, Artificial Sequence
  ENSG00000267436_0 (sequence is synthesized)
tgccgtcatctctttatttgctgccagcagagtccaccaagcctgccgggcagccctgctgcccaccacggtggggtccaggcccagcccaccaccccgtggctgtctcctccaggctcc

SEQ ID NO: 1021268 - DNA, 120 bp, Artificial Sequence
  ENSG00000267436_1 (sequence is synthesized)
agccgtcctgagggggccctggcagtgtctggagacccccaggctggaggtgaggggtgaactggactgagctcagggttagggttcccccagacccttctgggattcctacttcctgtt

SEQ ID NO: 1021269 - DNA, 120 bp, Artificial Sequence
  ENSG00000267436_2 (sequence is synthesized)
ccttgcaagtccctggcgggcatccctgctgccctcacccgaccccacccccgggagctgggtgaggatggagggtgggggtccagagaagagtgaggggcagtgggggcttttccccaa

SEQ ID NO: 1021270 - DNA, 120 bp, Artificial Sequence
  ENSG00000267436_3 (sequence is synthesized)
gcttttccccaaggccctggggggccttcttgggtgccgtgggggcaggcgccggggacccccaccacgcgccgggcaccccgcgtcccgctctcttacggccgcgccctcacccacgtc

SEQ ID NO: 1021271 - DNA, 120 bp, Artificial Sequence
  ENSG00000267437_0 (sequence is synthesized)
gcggaccatgctggcaccttaccttggactttccagcttccagaactgggttcaacaggatggtcttgggatcctaggcatcatggagggctgaagaaacatcaaggggagccccagaaa

SEQ ID NO: 1021272 - DNA, 120 bp, Artificial Sequence
  ENSG00000267437_1 (sequence is synthesized)
taagctgagagccatgactaaaggccttgccacactccttgcattcatagggtttttctccagtgtgaattcgctgatgttgagtcaactgtgaaccacgaataaaggctttcccacatt

SEQ ID NO: 1021273 - DNA, 120 bp, Artificial Sequence
  ENSG00000267432_0 (sequence is synthesized)
gccaccgtcccatacttgtccacctcgggcatgttcatgtcgtcgatgaagtagacgagcttcttagtgcctggcggcccgtagttcctccccgatttcttctccagcggcttctccagc

SEQ ID NO: 1021274 - DNA, 120 bp, Artificial Sequence
  ENSG00000267432_1 (sequence is synthesized)
acccctagagagggcagagggtcagctgcccgcctgcgcctcctgagccagagcctgttaggtagggaggggcgctacctgcttccccggaggacagaaggtgggacctggctgggatcc

SEQ ID NO: 1021275 - DNA, 120 bp, Artificial Sequence
  ENSG00000267432_2 (sequence is synthesized)
aagtttaccaaagccctaccctccagcactccaaggcaggactcgcctcacttctggcgcctcctgctgcctcctccatacctcattgccatctggctctgccctcaacacgccctgaag

SEQ ID NO: 1021276 - DNA, 120 bp, Artificial Sequence
  ENSG00000267432_3 (sequence is synthesized)
gaagctgttctccctgagtgatggagatgcgcctagctcccaaatgcaatgggaactcttctgtccttggcttgactctgggtgccatcctactgaggtgatcagcccgccttggcctcc

SEQ ID NO: 1021277 - DNA, 120 bp, Artificial Sequence
  ENSG00000267432_4 (sequence is synthesized)
gtgctgggattacaggagtgagccgctgcgcccggccctggatgccttttatgaaccaccaggctgaacccttctctggatcacgtttgctctggagacacacaggtccctggagcgggt

SEQ ID NO: 1021278 - DNA, 120 bp, Artificial Sequence
  ENSG00000267432_5 (sequence is synthesized)
gacacacctgagatttgccgctgcccgcattcccgacgatgaacacggagtggcggacctgcagcagctcctccagctgcaccaccttcagcacgaagctgtcctccgcctgcagcttga

SEQ ID NO: 1021279 - DNA, 120 bp, Artificial Sequence
  ENSG00000267432_6 (sequence is synthesized)
gctgtcctccgcctgcagcttgagctccacgatgctctgcttgatgatctggggagacatggatgaggctggtagagacagggtttcaccatgctagcaaggatggtctcgatctcctga

SEQ ID NO: 1021280 - DNA, 120 bp, Artificial Sequence
  ENSG00000267432_7 (sequence is synthesized)
aggcgtgagccaccacgcccggcccccagatggacttttatcactcagcagaattctctggagatgcacccaggctgttgcaggaaccagctttgggaccctggagggcaagagctcaat

SEQ ID NO: 1021281 - DNA, 120 bp, Artificial Sequence
  ENSG00000267432_8 (sequence is synthesized)
agctcaatggcaccacaccacccttcggtgcttggaacgttgcagagaggcaaggagggtctatctggcgtgtgaggtcacaggaaagctgacgagccagtcacccgacgtgaccccgag

SEQ ID NO: 1021282 - DNA, 120 bp, Artificial Sequence
  ENSG00000267432_9 (sequence is synthesized)
gccgcaggcaggggactttacctgcacggcaatcacagacaagacttccactgagatgcgattaaactcgtcaaagcagccccaggctcccgtctgggccaggcccttgtagatatttcc

SEQ ID NO: 1021283 - DNA, 120 bp, Artificial Sequence
  ENSG00000267432_10 (sequence is synthesized)
acaggactggaaagggcgagatggagaaaggaagagctgggagggtgacagggagggcgggcgctgcaggggcctccccctgcctcttcggctgtgttttctcttcccaaagcttgctca

SEQ ID NO: 1021284 - DNA, 120 bp, Artificial Sequence
  ENSG00000267432_11 (sequence is synthesized)
ggccccggtgcattggagccttccgcaggccagcaggcaggtcagcttactgcccagggtaacaccgtggagggctggacacgaggaagagccatcctttcacccttgcctcccagaccc

SEQ ID NO: 1021285 - DNA, 120 bp, Artificial Sequence
  ENSG00000267432_12 (sequence is synthesized)
caaaggcgtgtggagggtactgcaccgattcctgcctctaaatcaccagtcggtggccctgctttggggacagttacctgcagtgggacatcgggatccagctcaaaggagggcacttta

SEQ ID NO: 1021286 - DNA, 120 bp, Artificial Sequence
  ENSG00000267432_13 (sequence is synthesized)
tctgtccagggcaggaacttttttgtgtcaggatcaatgtagtagtcaaaaatcgttccctgcgaggggaacttgatagtcttgaattcgttgatccaccatttactgaactccactcga

SEQ ID NO: 1021287 - DNA, 120 bp, Artificial Sequence
  ENSG00000267432_14 (sequence is synthesized)
taatccacaagctgttgagacacagaagtaaaaatcagggcccagctaagcaggatgctgagagaccctgtgtgggtggccgggccccccaggtgcatcacctggtcctggaacatggcg

SEQ ID NO: 1021288 - DNA, 120 bp, Artificial Sequence
  ENSG00000267432_15 (sequence is synthesized)
ccaccgaaggcccagaagcaggtgaacacgaagtacagctcgtacagctccctgggggagtcggggggcacggtcttctccgtgagcaggcactccagcaggtacagaatcgtttggatc

SEQ ID NO: 1021289 - DNA, 120 bp, Artificial Sequence
  ENSG00000267432_16 (sequence is synthesized)
accgtgatctccggcactggcgtgatcttcttgaacccaaagcgcaacttgtccaggcacgtgggcaggtacttgtcaaagaggatcatcaggttggccttctccgactgcaccttgcgc

SEQ ID NO: 1021290 - DNA, 120 bp, Artificial Sequence
  ENSG00000267432_17 (sequence is synthesized)
ctctcgatccagctgctcaccaccctgggggtgacaggaggcgccgatgacacagccgctgctctgggtctgccagtgtccctgccttggtcactccttggaggtgtccagttcctgcct

SEQ ID NO: 1021291 - DNA, 120 bp, Artificial Sequence
  ENSG00000267432_18 (sequence is synthesized)
tggcccacgctgccttcgtttctggctccctcttctctgctcccatagggtgtccccctgaggactccacgatcctgtctttttcctgtccccgtgtctcagcagctcctacccaggctt

SEQ ID NO: 1021292 - DNA, 120 bp, Artificial Sequence
  ENSG00000267432_19 (sequence is synthesized)
catttcagttccccggacattgtctttgcctaccctgaaaactcccacacatggtacagtgggtaggatggtggtgctacaaaagaatgtccacccagaacccagaatgtgccctgattt

SEQ ID NO: 1021293 - DNA, 120 bp, Artificial Sequence
  ENSG00000267432_20 (sequence is synthesized)
ggagaaagggcattagcagatgtcatcaaggatcttgagacaagatcatcctggatttagggtggaccctgaatccaatgactgtgtccttataagcaaatgggaaatttggacacagac

SEQ ID NO: 1021294 - DNA, 120 bp, Artificial Sequence
  ENSG00000267432_21 (sequence is synthesized)
ggaccgccgagagcccccaggagctgggagagaggcctgggacaggttctcccgcagagcctcagagggaaccagcactgcctactccttgacttctggcctccagcactgggagaggat

SEQ ID NO: 1021295 - DNA, 120 bp, Artificial Sequence
  ENSG00000267432_22 (sequence is synthesized)
aaatgtctgttgtttgaagctgccccattagtggtcattgtttcagcagctggagaatgctgtataagcaggcaagtgttgctggagaagccggcacagaggcacccaggctcagcagct

SEQ ID NO: 1021296 - DNA, 120 bp, Artificial Sequence
  ENSG00000267432_23 (sequence is synthesized)
cctggccctgtccccatagggaacattccacttggtatccctctcaaaccctggccacactgtgctgcctgcctcccagcagagggtctcacttcccacgcagagagcaaagaagtgcac

SEQ ID NO: 1021297 - DNA, 120 bp, Artificial Sequence
  ENSG00000267432_24 (sequence is synthesized)
cagcatgaactccggaaacttaattttctctgcctatagacttgcatgcacctgaaaacagccatgcctgcatcccatggccaaacatcattcttgtctcgacaaatactacaaagcttc

SEQ ID NO: 1021298 - DNA, 120 bp, Artificial Sequence
  ENSG00000267432_25 (sequence is synthesized)
cagccacgtgtccaagcccgaaaatatgcctctggaatcaatatcaagtcttccatttctccagatttcagatatttcttaaacccatcccttcctctctgatccctagaggcccccatc

SEQ ID NO: 1021299 - DNA, 120 bp, Artificial Sequence
  ENSG00000267432_26 (sequence is synthesized)
ttgctggcatgaccagctgcttttccctcgtcacattggaaagggacacttgcaccttggcccagcatcagcgccttcccgtcaggagcagcctccgcctttatgctctggccaggagaa

SEQ ID NO: 1021300 - DNA, 120 bp, Artificial Sequence
  ENSG00000267432_27 (sequence is synthesized)
cccgaccactgcccatccggcaatgccccactccccaccatgccctgtgaacgcgggttcttgtctggtgtgcttctctgttttcaccccttagaggcagcctgaccctttggatggcag

SEQ ID NO: 1021301 - DNA, 120 bp, Artificial Sequence
  ENSG00000267432_28 (sequence is synthesized)
cccaaacttcaatcacctgggaagacttcccacctccacagaggccaagacctcccttcccacaccagcccttgttccctggcactttgtgcaaacatccgtttgctcagctgccctgcc

SEQ ID NO: 1021302 - DNA, 120 bp, Artificial Sequence
  ENSG00000267432_29 (sequence is synthesized)
tcgtgtcactgtgaatttacaccatttattcccaggtctctcaccccttcactgctgtgacactggtgcctggtgagggcctgatacacagtttgtgacatgaatgatgaatgaatatgc

SEQ ID NO: 1021303 - DNA, 120 bp, Artificial Sequence
  ENSG00000267432_30 (sequence is synthesized)
ttctcagcccttttctttcttgcgtggagaggagagggagtcctctaaggcgggatgggggcacgtctagcaggccggaggctttccctcaagacatctgtgtctctctaggccccacct

SEQ ID NO: 1021304 - DNA, 120 bp, Artificial Sequence
  ENSG00000267432_31 (sequence is synthesized)
gggccaatcagaaggactcgtcccatctacacctgggattccaggtggatgttaagtcccttccagggagatccaacttcagatttcacttttctaaaatccaggaggcggatgtggact

SEQ ID NO: 1021305 - DNA, 120 bp, Artificial Sequence
  ENSG00000267432_32 (sequence is synthesized)
gcgtggccctgacagtgaacatgggctgctggtcccatcctcagcctcaggagggggcccccagattgtggggctcagatccaagctggggaggggagaccctctgcaggcctagggtcc

SEQ ID NO: 1021306 - DNA, 120 bp, Artificial Sequence
  ENSG00000267432_33 (sequence is synthesized)
aaaactcagggttccatcccccttgccttcccgtcttgcaagaggctgctgcagcctggagctccgaggtatccccttcccctccctggcctcctgtgagccgacgatgtcctgtgcagg

SEQ ID NO: 1021307 - DNA, 120 bp, Artificial Sequence
  ENSG00000267432_34 (sequence is synthesized)
ctctaatgactgatgggaccgggccaatcccctgctcccctcccaaacccacctggacactgcttgtaccccaccccatgctgaaccatgagggaggtgctcacccctgtgcggagtccc

SEQ ID NO: 1021308 - DNA, 120 bp, Artificial Sequence
  ENSG00000267432_35 (sequence is synthesized)
cagttcggggcaatcttaacaactgaaattgagagagggtcacctccagggcaggggctggggcaggacatttggggctgcgtctgtccaccctggaagtctttccagagggaccacctg

SEQ ID NO: 1021309 - DNA, 120 bp, Artificial Sequence
  ENSG00000267432_36 (sequence is synthesized)
agggggatgctaccagcaagtgggggccctggcacctcctctccagtgccattcacaggtatccagagatctggagtttactgtggggcctcggaggacagggtgctaggatctgcttct

SEQ ID NO: 1021310 - DNA, 120 bp, Artificial Sequence
  ENSG00000267432_37 (sequence is synthesized)
ataaaagaagactctgggtccctcctccggaccccggccgcgtaccttgtagtccatctgctcggagcagttgaagacgtagaccatggtgcccagggctctgcccaggtccttggtcgt

SEQ ID NO: 1021311 - DNA, 120 bp, Artificial Sequence
  ENSG00000267432_38 (sequence is synthesized)
ctcagtcttgccggtcccagcggggccggcaggggctccacccatgatgagatggagggactgggtcagggtgatatagcacctgcaagtgaccacaggtaagcgtgtgtgccagcgacc

SEQ ID NO: 1021312 - DNA, 120 bp, Artificial Sequence
  ENSG00000267432_39 (sequence is synthesized)
gggattacaggcatgagccccaggagacacatgggagagggcagaaaaccttcaggtgtgaaggaggaaccacaaccgtggagcagaggcagcccaggtgcctttcccacctgtggcatt

SEQ ID NO: 1021313 - DNA, 120 bp, Artificial Sequence
  ENSG00000267432_40 (sequence is synthesized)
cagggaggtgggcactgctacgacaaccagagtctgctcatgagggtccataaaacatgaccccaactcagcaggcccacagaggggtgcaggaactctcccaaggccacacagccggtg

SEQ ID NO: 1021314 - DNA, 120 bp, Artificial Sequence
  ENSG00000267432_41 (sequence is synthesized)
ctagaacaaggacacagtggtagaactgaatgtgaacacaggtccacctgacgcaaatgcccagtccttccagcctccacagctgacctccaagtcggacagttccaagaatcatgcgga

SEQ ID NO: 1021315 - DNA, 120 bp, Artificial Sequence
  ENSG00000267432_42 (sequence is synthesized)
agggacccaccaagagcacatgtgagttactcagggacgggcctcacctgtcagtgagtggggtgatgaccagccgcggcgtgttgcccagatactcataggaatactggatttgggcat

SEQ ID NO: 1021316 - DNA, 120 bp, Artificial Sequence
  ENSG00000267432_43 (sequence is synthesized)
cgcagatgttggcaaagcagtgtcgcttctcttcgtcccagcgatgccggagctgggcctgccaggtgaaggcctgagaactctccacctgcaggatgagccggagctcttgttgccagg

SEQ ID NO: 1021317 - DNA, 120 bp, Artificial Sequence
  ENSG00000267432_44 (sequence is synthesized)
tggaatacaagagctagggctgcctaaggaaggccagcatgcctccaaggccggtcccctgctgcccagggaaccctccctggccctctttccccctccagcacccacatccaactgtat

SEQ ID NO: 1021318 - DNA, 120 bp, Artificial Sequence
  ENSG00000267432_45 (sequence is synthesized)
ggccaccctcagtggaatctcgctacagaatggcacttccaatgggcgggcaccgctcatctgactgctgtgtgttgctcaccaggggtgagtccgggcaaggaggttaggaggcagctg

SEQ ID NO: 1021319 - DNA, 120 bp, Artificial Sequence
  ENSG00000267432_46 (sequence is synthesized)
cagccagcaacagagtcagtgccccaggaagaggaagtggcagggtctgaagtccctgaatgcactgccctgaacccggtgtccccttgcccttcccctggcccctgggacaggggcgct

SEQ ID NO: 1021320 - DNA, 120 bp, Artificial Sequence
  ENSG00000267432_47 (sequence is synthesized)
catgccttggccacgatcattttggccaccacgtcccgtgcgtgcacatcgatggtgcagatggtcatgatcttcatcctgtcgccagcgttgaggttccccatgagcagcgtgatgagt

SEQ ID NO: 1021321 - DNA, 120 bp, Artificial Sequence
  ENSG00000267432_48 (sequence is synthesized)
acgttcagctggctaatctgcgggggagagtgccttcgatgagacaccacgggtgcccacatgcactggggggtcttgtggctgggtgcccacagctgcatagggaacaccaccatgctt

SEQ ID NO: 1021322 - DNA, 120 bp, Artificial Sequence
  ENSG00000267432_49 (sequence is synthesized)
ttgtttacagtaatgaaaaacaagagcgccctcggtaggccccagccaggcactggtttcaccagggtgcggccctgatgggacacctggcagtggctagcatggacgtagtagaaggaa

SEQ ID NO: 1021323 - DNA, 120 bp, Artificial Sequence
  ENSG00000267432_50 (sequence is synthesized)
attcaaggccacgagagagggtggatgagaagcaaaaacagctgactttaacgccatccagagtctgtatatttttacatataaatcaattatacacacacagagtaacaggttgcataa

SEQ ID NO: 1021324 - DNA, 120 bp, Artificial Sequence
  ENSG00000267432_51 (sequence is synthesized)
gggccctgcagtgtcatgcttgggttgtggaattacaggtaaattctccttcttttcaagatgatcttttgtttccatatttctaaccaaggacattttttttttaaagactctcagtag

SEQ ID NO: 1021325 - DNA, 120 bp, Artificial Sequence
  ENSG00000267432_52 (sequence is synthesized)
catctgccaattttcaggcgagaaatcaaagtacatatttctgaaggtgtctgttactcgtggggagaggtgcctggggctgtggtgcgtggctgttatttggcctgtggaaacgacggt

SEQ ID NO: 1021326 - DNA, 120 bp, Artificial Sequence
  ENSG00000267432_53 (sequence is synthesized)
tttgcggggctcagcctccgagaagaagccgctccaggtactcgcccggcaggtttcagaaggatacacgggcccatgcacctgctttttaaacaagttttaaaaacgtaactaactaca

SEQ ID NO: 1021327 - DNA, 120 bp, Artificial Sequence
  ENSG00000267432_54 (sequence is synthesized)
cactagtaacacacctgctttttgttataatctctgatagcgttttcatagccttcctccagcctggcaaatgccaggcccacctcggtcgtccaccagatctgggtgcaagtcagggcc

SEQ ID NO: 1021328 - DNA, 120 bp, Artificial Sequence
  ENSG00000267432_55 (sequence is synthesized)
acctgaaagtacataccccccattgcccacgcagtgagcgatcgctggcgcctgctaacgcagacattcctgctgaaagcttagatggttttccaggggaccacagttaacagcggagcc

SEQ ID NO: 1021329 - DNA, 120 bp, Artificial Sequence
  ENSG00000267432_56 (sequence is synthesized)
catgaacgcaaagaaactcgccccttatctcagccacgaggcgccgccgagcccccacccgcctcagacctgggctgggtagtccaggatccactgctccctcggcttctcttcgtaggt

SEQ ID NO: 1021330 - DNA, 120 bp, Artificial Sequence
  ENSG00000267432_57 (sequence is synthesized)
caccacggcctctgggatttcgtgccggagggtagagcacattcggtccagcactcgattcagccacacttccacctggggacgggagccacggtgaccaatacagccatgtgtgcctgc

SEQ ID NO: 1021331 - DNA, 120 bp, Artificial Sequence
  ENSG00000280005_0 (sequence is synthesized)
ataaactcagtatcattttttgatatcaaatttagttatcaatttagtactagaaccaaattacttcacaaaccatagtctgttgtgaccaacacccctggcagaaaatttagagtagct

SEQ ID NO: 1021332 - DNA, 120 bp, Artificial Sequence
  ENSG00000280005_1 (sequence is synthesized)
ccacaccccgaaatgtcaccagagcccgagtctgaggtgggtccacagctctcacccagatctcttgtctccaccaaaaagagcacttgcctggctatcatgttctgttactgtttgtaa

SEQ ID NO: 1021333 - DNA, 120 bp, Artificial Sequence
  ENSG00000280005_2 (sequence is synthesized)
aggaaaaatagaatagaaatgcaacactaaattgcccgtgtcactgagtagaaagtgtgccaattatagtgcagatcaaagttgatttttaataaaaggcttgtgtttaggctttgataa

SEQ ID NO: 1021334 - DNA, 120 bp, Artificial Sequence
  ENSG00000280007_0 (sequence is synthesized)
caaggggaaggtatatatttaaaattcctccccttcattttcttcttcaaacgaatcagtccccacttcttcataatccttctccagggcagctaagtcttccctggcctcagaaaattc

SEQ ID NO: 1021335 - DNA, 120 bp, Artificial Sequence
  ENSG00000280007_1 (sequence is synthesized)
tccttcttccatcccctctcccacataccaatgcacaaaggcccgcttggcgtacatgaggtcgaacttgtggtcgaggcgggcccaggcctccgcaatggccgtggtgttgctgagcat

SEQ ID NO: 1021336 - DNA, 120 bp, Artificial Sequence
  ENSG00000280007_2 (sequence is synthesized)
gcagacggcccgctgcaccttggccaggtctcccccggggaccacggtcgggggctggtagttgatgcccacctgagggacacagaaagaggaggagccacagaagaagatacaagtcag

SEQ ID NO: 1021337 - DNA, 120 bp, Artificial Sequence
  ENSG00000280007_3 (sequence is synthesized)
ccagaggataactcaggatgggacatcttggtcacttggcatggcttcaagtcatggtcaggggcgtgggagtggggctatgggatgcaacaggcgggatgggactggggaagccagcag

SEQ ID NO: 1021338 - DNA, 120 bp, Artificial Sequence
  ENSG00000280007_4 (sequence is synthesized)
gtggcaagggagaagctgaagagaaagtggaagcaggcagggcaacagagcaaaaacccatctctaccaaaaaaaaaaaaaaaattagccaggcccggtggctatgcctactagtcccag

SEQ ID NO: 1021339 - DNA, 120 bp, Artificial Sequence
  ENSG00000280007_5 (sequence is synthesized)
gctgaggtggaaggatcacttgagcccatgaggtcaaggctgcagtgagctacagtggttccactgcactccagtggcagggacacagcaagaccctgtctcttaaaagcaaaacaaaaa

SEQ ID NO: 1021340 - DNA, 120 bp, Artificial Sequence
  ENSG00000280007_6 (sequence is synthesized)
gcaaaacaaaaaaaaaagtagatggggaagggctgggcaatcaaaggctagagaaggaggacagggctggtatagggggctcagcaagtaggcaaatgagagtcacgagcgacattagga

SEQ ID NO: 1021341 - DNA, 120 bp, Artificial Sequence
  ENSG00000280007_7 (sequence is synthesized)
gcgggtgggaggtgtctggtacatgtgtatgtgtaacagggaaacgcattctagattcaaagctgttcaaaagtgtactctctcccaagtggtcatctgaagttcctcttagttgtgttg

SEQ ID NO: 1021342 - DNA, 120 bp, Artificial Sequence
  ENSG00000280007_8 (sequence is synthesized)
cgagtaaatttaaggaagtttccctgccaagagtgaaaactgttggaagaggtcacagggatattccagagcaataaataaagagagccgaaaggccccgggatggtgttggcgttaacc

SEQ ID NO: 1021343 - DNA, 120 bp, Artificial Sequence
  ENSG00000280007_9 (sequence is synthesized)
aggctctaggtttttgggaattggggcttcttagaagaaaagcagggtctccaatccaagaaggttgttgaaggtcttgccaagttctggcagcatggcaggtctcccaggctcagccca

SEQ ID NO: 1021344 - DNA, 120 bp, Artificial Sequence
  ENSG00000280007_10 (sequence is synthesized)
gacccgtcttacagtggtgctgctatcctggaaatctctcttcttcccaacacacgtcccaaaccaaagccaaccccaggaaccatgggaaactgggacaagtctaatgtggcaaaccgt

SEQ ID NO: 1021345 - DNA, 120 bp, Artificial Sequence
  ENSG00000280007_11 (sequence is synthesized)
gacattacttatgagaactatagtgatgtcctcagccacctctcccactgagaccaccacattttaatcgccagtctcttaaatccatagctttaaaatgcacatcctcctgaggggctg

SEQ ID NO: 1021346 - DNA, 120 bp, Artificial Sequence
  ENSG00000280007_12 (sequence is synthesized)
gtgtgggaatggcagccagctgtgtggcaacatgggtagccaggcagccactggacccacagcagccgtcattcctcttaggcacaggtggcatcttggaggtggaggtgatactgggag

SEQ ID NO: 1021347 - DNA, 120 bp, Artificial Sequence
  ENSG00000280007_13 (sequence is synthesized)
aggggcaaagtggggaagggaaaggcaatgtatatgaatttggccacatcacatacattgctagaactgagccgactgccataaaccttgtgcctgggccaacctgttctcctctaagtg

SEQ ID NO: 1021348 - DNA, 120 bp, Artificial Sequence
  ENSG00000280007_14 (sequence is synthesized)
ctaacatctcttgacctgagtcaagtggggacaagtactgttggagagaatgcaagaagatgaagtttagcagcatcctctccagggaacatacttttcttagcttatgctaatgctacc

SEQ ID NO: 1021349 - DNA, 120 bp, Artificial Sequence
  ENSG00000280007_15 (sequence is synthesized)
ataatgatccttcaggacataactccagagcttctgctttaaggagagagaatgaggggacatttccgctttgttaatttccccatcacccaccatgtctctcattcattctcttttttc

SEQ ID NO: 1021350 - DNA, 120 bp, Artificial Sequence
  ENSG00000280007_16 (sequence is synthesized)
cccattcattctcctactagctggttgtttgtttccatttgaaaaagaaaaaagaatttcattttttggaagaccttgactggttttgccaggatgattagaactgtcacataaaaaata

SEQ ID NO: 1021351 - DNA, 120 bp, Artificial Sequence
  ENSG00000280007_17 (sequence is synthesized)
ggcatagtcttggggggaaattatatatgtagctagaaggatagcagtgaaaaggaatgctacactcctcactcagcagaacagccaggtcaaagcctcagacccatgcagggcagctat

SEQ ID NO: 1021352 - DNA, 120 bp, Artificial Sequence
  ENSG00000280007_18 (sequence is synthesized)
gaggccagcacgcagctggtgcctcacacttgtaactcccgccaagaaaactgaggcatgctcatctcttcacctccagcaactgagacaaaccctgacacacaataggtaccagtaaaa

SEQ ID NO: 1021353 - DNA, 87 bp, Artificial Sequence
  ENSG00000280007_19 (sequence is synthesized)
aactgagacaaaccctgacacacaataggtaccagtaaaacctctgaatgattgaaagcatgactaggatgctttgagaggctgagg

SEQ ID NO: 1021354 - DNA, 89 bp, Artificial Sequence
  ENSG00000280007_20 (sequence is synthesized)
ggggaaaaatacaataaaaaataaaaaaagaaatcctgactacagggcagtagttaatgtgaatgtggtagctgttatgatggcagaat

SEQ ID NO: 1021355 - DNA, 120 bp, Artificial Sequence
  ENSG00000280007_21 (sequence is synthesized)
gtagttaatgtgaatgtggtagctgttatgatggcagaatctgacaaaagaccatgggtggagtggctgagctgttcatgtgcacagccaggctgcttgcctgccggtccagctcagagg

SEQ ID NO: 1021356 - DNA, 120 bp, Artificial Sequence
  ENSG00000280007_22 (sequence is synthesized)
ggtgacttctaccattcagcattcctggtcctggggccccagggtctaccctcgctattttgtatctccccactgactctctgagcctggcattttccagactgcgggcacttggttacc

SEQ ID NO: 1021357 - DNA, 120 bp, Artificial Sequence
  ENSG00000280007_23 (sequence is synthesized)
accagccacacggcttgctggtttttgcttactcctggttaatggcaatggaaaatagcaatcatagaacaactataaaagtatcttattactccaaattgattaagatgtgcaggatag

SEQ ID NO: 1021358 - DNA, 120 bp, Artificial Sequence
  ENSG00000280007_24 (sequence is synthesized)
atattttaagttttcaaaataaattgggagaacacagctttttgttagagagaggcatcatactcctctggcaactggaataatttggttaactctaaaattaaaatggccacaaaatca

SEQ ID NO: 1021359 - DNA, 120 bp, Artificial Sequence
  ENSG00000280007_25 (sequence is synthesized)
ttggttaactctaaaattaaaatggccacaaaatcatgctgtacaaagaagtgtaaaatatccattaaaactaactttaggttggaggccaggcgcggtggctcctgcctgtaatcccag

SEQ ID NO: 1021360 - DNA, 61 bp, Artificial Sequence
  ENSG00000280007_26 (sequence is synthesized)
ctgcactccagccttggtgacagagcgacactccgtttcacaaaaaaaaaaaaaaaaaaaa

SEQ ID NO: 1021361 - DNA, 120 bp, Artificial Sequence
  ENSG00000280007_27 (sequence is synthesized)
ccgtctcaaaaaaaaaaaaaaaaacaaaactaacgttaggcaaattgaaccaaatcatgaacaccaaaagcactgtacttcaggtgagtagatttgggccaataccaaatcattacttgt

SEQ ID NO: 1021362 - DNA, 120 bp, Artificial Sequence
  ENSG00000280007_28 (sequence is synthesized)
ccaaatcattacttgttgctcagtaaacaaaaccaaaggtgattaaccaattaatcaatttaaaatagcaccaaacttttctaaaatggcctaaacagacaaaactttgacagcacttgt

SEQ ID NO: 1021363 - DNA, 120 bp, Artificial Sequence
  ENSG00000280007_29 (sequence is synthesized)
gtctcaaccaaagctgaattccattcatgttacatttggttgaagtccccctccccttatcatcacataaagcctgaagcgcccatggaattgcatatccttggtcacctccctctgctt

SEQ ID NO: 1021364 - DNA, 120 bp, Artificial Sequence
  ENSG00000280007_30 (sequence is synthesized)
ctctagtcctctctccccttcctaagtcatcagctctcaccttgaagcctgtgggacaccagtctacaaactggatggtcctcttggtcttgatggcagcaatagcgacattcacatcct

SEQ ID NO: 1021365 - DNA, 120 bp, Artificial Sequence
  ENSG00000280007_31 (sequence is synthesized)
tgggcaccacgtcgccccggtagagcatgcagcaggccatgtacttgccatgtctcgggtcgcacttcaccatctggctgttgggctcaaagcaggagctggttatctcggccacagaga

SEQ ID NO: 1021366 - DNA, 120 bp, Artificial Sequence
  ENSG00000280007_32 (sequence is synthesized)
gctgttcgtgataggctttctcggcagagatgatgggcgcgtaggtgaccagcgggaagtggatgcgggggtagggcaccaggttggtctggaactcagtgaggtccacattgagggccc

SEQ ID NO: 1021367 - DNA, 120 bp, Artificial Sequence
  ENSG00000280007_33 (sequence is synthesized)
cgtcaaagcggagagaagcagtgattgaggacacaatctgactgatgaggcggttgaggttggtataggtagggcgctcaatgtcaaggttcctgcggcagatgtcatagatggcttcgt

SEQ ID NO: 1021368 - DNA, 120 bp, Artificial Sequence
  ENSG00000280007_34 (sequence is synthesized)
tgtccaccatgaaagcacaatctgaatgttccagtgtggtgtgggtggtcaggatggagttgtagggctccaccactgcagtagagacctggggggctgggtagatggcaaactccagct

SEQ ID NO: 1021369 - DNA, 120 bp, Artificial Sequence
  ENSG00000280007_35 (sequence is synthesized)
tggatttcttgccataatccagggagaggcgttccatcagcagagaagtgaagccggagccagtgcccccaccaaaactgtggaaaatcaggaagccctgcaggccagagcaagcatctg

SEQ ID NO: 1021370 - DNA, 120 bp, Artificial Sequence
  ENSG00000280007_36 (sequence is synthesized)
tctagggagagcaggacatgagaagaaatcatgaagacaagtttccgagaacaccccacagtaaaaaagccagaccgcccactctgtctgcctcatatttttttgtggatgaaatcaaaa

SEQ ID NO: 1021371 - DNA, 120 bp, Artificial Sequence
  ENSG00000280007_37 (sequence is synthesized)
cagctttgaagaagtaaggaaacaaaaggagttgtattgatctttggaggagtggctaaaatatgggatggggccaggcacagtgactcaatgcctgtaatcccagcagtttgggaagct

SEQ ID NO: 1021372 - DNA, 120 bp, Artificial Sequence
  ENSG00000280007_38 (sequence is synthesized)
gaggcaggaggatccattgaggccaggagttcacaaccagcatgggcaacatagtgagacctcgcatctacaaaaaattttaaaagttaactgggcgtggtgatgcacacctgtagtccc

SEQ ID NO: 1021373 - DNA, 120 bp, Artificial Sequence
  ENSG00000280007_39 (sequence is synthesized)
tgggaggatcacttgagcccaggagctcatggctgcagaaatctatgatcacaccactgcactctggcttggatgacagagcaagtctctgtctctattttttttaataggatgacaagc

SEQ ID NO: 1021374 - DNA, 120 bp, Artificial Sequence
  ENSG00000280007_40 (sequence is synthesized)
tttttaataggatgacaagctgcaggggcacacgcctctaggtacatgaaggtttcagcccagtaacttggttgaacagggaatgagagtttcagaaccacagtggatggtgactttgcc

SEQ ID NO: 1021375 - DNA, 120 bp, Artificial Sequence
  ENSG00000280007_41 (sequence is synthesized)
ctttgagggccccaactccttgcccactttccctgctcttgtcatttgattttgtgggaactgctgccgacacacttcaacccaaccttggaaggtgactcagggcaccaatttcagaaa

SEQ ID NO: 1021376 - DNA, 120 bp, Artificial Sequence
  ENSG00000280007_42 (sequence is synthesized)
gaaaggtacatggagccagaaagcctgagttctaatatcaactttgccatttcttggttgtaagaacttgagcaagttactgaacctctccaaacttctgttcctttttttttttttttt

SEQ ID NO: 1021377 - DNA, 120 bp, Artificial Sequence
  ENSG00000280007_43 (sequence is synthesized)
attacaggcatgcgccaccatgcctggccacttctgttccttcttagtgaaaatggggacaatagaaaatcctcataaggttattgtgacaattaaataaaatagcataacatgctgagc

SEQ ID NO: 1021378 - DNA, 120 bp, Artificial Sequence
  ENSG00000280007_44 (sequence is synthesized)
aacatgctgagcaagggcctgatacgttgtaagcacggatgtcagctctcaccagagaattcatagaatcacaggattttcccactgggtgtgatttgaacttttggggaccacagacag

SEQ ID NO: 1021379 - DNA, 120 bp, Artificial Sequence
  ENSG00000280007_45 (sequence is synthesized)
ctttgaggccaatgaccctgacaagccctcctctaaacagaaaaagtgaatatatgcaaaagtttggcacccttacctcccagggaaagaacatgtgatcaggtccaagcttttccatta

SEQ ID NO: 1021380 - DNA, 120 bp, Artificial Sequence
  ENSG00000280007_46 (sequence is synthesized)
tacagataagcaaatggaagcttaaataaataaagtgacacaacctacaactcaagagctttgtagtccaactgagttcaaaccccagctctgccactttttagctgtgtgacccaggct

SEQ ID NO: 1021381 - DNA, 120 bp, Artificial Sequence
  ENSG00000280007_47 (sequence is synthesized)
aagatattgaaccaccctggccctcaatttcttcatctgtaaagcacaggaaggacacctcctaagtctaattattaaggattaaatgaaggaatgtgcttaacatctgtaatggcactt

SEQ ID NO: 1021382 - DNA, 120 bp, Artificial Sequence
  ENSG00000280007_48 (sequence is synthesized)
gtaagtgcccaaatgtatcaacaatctcttcctctcctcttccaagttaaatgctttgttaacctgtgtttccgaccagcagagacctcatcctgccttatacccggaaccttccccaga

SEQ ID NO: 1021383 - DNA, 120 bp, Artificial Sequence
  ENSG00000280007_49 (sequence is synthesized)
tactaacagagagtatcaatgagtatgagtagggcctcagcctggaacacagtctatgatgccaacacagaggaaggggcatcacccctgtgcatgcttcttacagaatttaagcagaaa

SEQ ID NO: 1021384 - DNA, 120 bp, Artificial Sequence
  ENSG00000280007_50 (sequence is synthesized)
ttcccaaaccttaggagctccatcctatagccaggggtcagatgcctctccctagcctgatcaaagaggcatggggccaagcctgtccactccagcctgacccacccgtcccctgccctc

SEQ ID NO: 1021385 - DNA, 120 bp, Artificial Sequence
  ENSG00000280007_51 (sequence is synthesized)
ctgatcttaccagcttccgtatgcggtccagcaccaggtcaatgctctccttgcccaccgtgtagtggccccgggcatagttgttggctgcatcctcctttcctgtgatcagctgctctg

SEQ ID NO: 1021386 - DNA, 120 bp, Artificial Sequence
  ENSG00000280007_52 (sequence is synthesized)
gatggaagagctggcggtaggttcctgcccgaacctcatcttccaagagaggaagaccattaggtcctactgcccaggggagaagcctccctccctaccacactaccgcaggaccccttc

SEQ ID NO: 1021387 - DNA, 120 bp, Artificial Sequence
  ENSG00000280007_53 (sequence is synthesized)
cgttctcccctacctataaaactccatggaggtttgaagccagaccacctcgtaatgaatctgcaaaaggctaagagaattcccgggtagctcagggactaacagagccaaggcctgtgg

SEQ ID NO: 1021388 - DNA, 120 bp, Artificial Sequence
  ENSG00000280007_54 (sequence is synthesized)
gtggctcatgtgggcggtgagaagcaggctgccctgctggctagaaccctaaaaagacttagctttacaaagctcatcgaacatcgccgggcccagtggctcacgcctgtaatcctaaca

SEQ ID NO: 1021389 - DNA, 64 bp, Artificial Sequence
  ENSG00000280007_55 (sequence is synthesized)
gccaggtgtggcagcgtgcgcctgtagtcccagctactcggaggcctgaggcaggagaatctct

SEQ ID NO: 1021390 - DNA, 120 bp, Artificial Sequence
  ENSG00000280007_56 (sequence is synthesized)
gttagccaggtgtggcagcgtgcgcctgtagtcccagctactcggaggcctgaggcaggagaatctcttcaacctgggaggcagaggctgaggtgagctgagatcttgccactgcactcc

SEQ ID NO: 1021391 - DNA, 86 bp, Artificial Sequence
  ENSG00000280007_57 (sequence is synthesized)
ccactgcactccagcctgggcaacaagacagagcgaggctccatctccaaaaaaaacacaacagcaacaaaacttgggccgatttt

SEQ ID NO: 1021392 - DNA, 120 bp, Artificial Sequence
  ENSG00000280007_58 (sequence is synthesized)
tcgaacaccaacgccaattgcctctcctcccttccaccttgactcctccaggtttcccttttgttttttctttcatgctgcaaggtgtaccaacaatttttttttttttttttttttttt

SEQ ID NO: 1021393 - DNA, 120 bp, Artificial Sequence
  ENSG00000280007_59 (sequence is synthesized)
ctggggttacaggtgtgagccaccgcgccgggccaaggtgtaccaacaatttaacttaagtccttttgcattaaaatattctagggacatggagaaagattcaggatgatctgcccagaa

SEQ ID NO: 1021394 - DNA, 120 bp, Artificial Sequence
  ENSG00000280007_60 (sequence is synthesized)
atctgcccagaacctagacccccaagagttgtcccacccctcaactccacctcatggtggcaataatatatgtcaggcattagacatattttagaataatgggaagcaaagctatgttcc

SEQ ID NO: 1021395 - DNA, 120 bp, Artificial Sequence
  ENSG00000280007_61 (sequence is synthesized)
aagtcatagaggagcaagagccctagagaggcctttaaggggtctctgctcacttccaagggtccacacaaagcggatacagagcagatcaagacacatcaggccccaactatgtcacct

SEQ ID NO: 1021396 - DNA, 120 bp, Artificial Sequence
  ENSG00000280007_62 (sequence is synthesized)
cttctcttcggggttcctctactccctgcagaaaaatcatctgtgcagtggcccaggaggtaacctgcactttgtgcattggtgcaaagcatccagggggtggagcatctgccctctgtt

SEQ ID NO: 1021397 - DNA, 120 bp, Artificial Sequence
  ENSG00000280007_63 (sequence is synthesized)
gcccctagacattggtgtccaggcatatacttcgtgcccagtcctctttgcagaactgtccatctctggcttgaggagccaggcttggagctggggaaatcctgatattcaactgagagt

SEQ ID NO: 1021398 - DNA, 120 bp, Artificial Sequence
  ENSG00000280007_64 (sequence is synthesized)
tgacccaggggtcagaaacaggggaagtggcactactgggggatagtgtgggaaggggagatctgcctagacacaaggcagaattcctgtgtttcctaaacctgaatgaacctcattcca

SEQ ID NO: 1021399 - DNA, 120 bp, Artificial Sequence
  ENSG00000280007_65 (sequence is synthesized)
gaactccagcggcccctggctgtgaagcaatgtgcctgctgtgataggcccctttgtgtgtaagatgctgtgaggttatacccaccccgagggcagactcagaaacctatacttagggaa

SEQ ID NO: 1021400 - DNA, 120 bp, Artificial Sequence
  ENSG00000280007_66 (sequence is synthesized)
attgctcacttaggggtgtcttataatttctaaaattatttggattttcttatccttagtatttagtagcgatgtgaccattttgacctggtgccgcaggttttggggttgaagtgggag

SEQ ID NO: 1021401 - DNA, 120 bp, Artificial Sequence
  ENSG00000280007_67 (sequence is synthesized)
gcattttgttctgcatagagtcttgatcactgtcatgagattccccgagactgtggggaccccaaggagctgacagatgtcacgtggggtgggaggctgcggttgcaccatccccacctt

SEQ ID NO: 1021402 - DNA, 120 bp, Artificial Sequence
  ENSG00000280007_68 (sequence is synthesized)
ccagctagagacgctgcttccttagctactgtgggccaatgcctctgcagtttcgagatgttctctgtggaggggaactccgcccccactcacccactacagtaggctccagatctatca

SEQ ID NO: 1021403 - DNA, 120 bp, Artificial Sequence
  ENSG00000280007_69 (sequence is synthesized)
tgacggcccggggcacatgcttcccattgccagtctcgctgaaaaaggtggtgaaggagtcatcatcgttgatcttgctagcttgagcatcaaaagtgccgtctgcctggatgccgtgtt

SEQ ID NO: 1021404 - DNA, 120 bp, Artificial Sequence
  ENSG00000280007_70 (sequence is synthesized)
ccaggcagaagagctcccagcaggcattgccaatctgaactcccgcttggcccacgtggactgatatgcattcccgctgtggggagagggaagcaacgaggtcagagagtctgggccccc

SEQ ID NO: 1021405 - DNA, 120 bp, Artificial Sequence
  ENSG00000280007_71 (sequence is synthesized)
agcatgcctttgccctacatccccataacattcaccttgcaggccagccaggccccagccccccattgccagttggcgttgaggctgcaggtgccccagctctatagcagctggaccagg

SEQ ID NO: 1021406 - DNA, 120 bp, Artificial Sequence
  ENSG00000280007_72 (sequence is synthesized)
acttagatccaaagaagacacagctgttttgtgctttgctctaaaggttgcttcccagggttgaccttttataccaggaaagaaaaaaggagggtggttgcaaagatgaagcaaggggct

SEQ ID NO: 1021407 - DNA, 120 bp, Artificial Sequence
  ENSG00000280007_73 (sequence is synthesized)
aattccaaaccacaagattcctgcactggtgaagaaggcccaaggaagaactggcgatcatggcagaaactctccttcagcctacgcccacacaaggcagcattcacagctgctcctgac

SEQ ID NO: 1021408 - DNA, 120 bp, Artificial Sequence
  ENSG00000280007_74 (sequence is synthesized)
atcatggttaccaatgtagaaataaaggattatttattaccccaagagaggatggggagggtataaattaggcccttcctgcacgctgaacaattggaaaatctttgcagccccatagcc

SEQ ID NO: 1021409 - DNA, 120 bp, Artificial Sequence
  ENSG00000280007_75 (sequence is synthesized)
tgccccttgcctatgccaggccaagtgttaagtaaagctgatgtgaagccacaattgcctgattggtattcgtactaacagcttaagatggggagtgcactgatgggaatgtaaattggt

SEQ ID NO: 1021410 - DNA, 120 bp, Artificial Sequence
  ENSG00000280007_76 (sequence is synthesized)
gcagtttggagatttctcaaagaactcagaactaccatttcactcagcaatcctgttactgggtatatatccaaaagaaaatcatcctaccaaaaagacacctgcactcacacgttcatc

SEQ ID NO: 1021411 - DNA, 120 bp, Artificial Sequence
  ENSG00000280007_77 (sequence is synthesized)
acagcactattcacaacagcaaagacacggaatcaaccaggtgcccagcaatggtagactggatacagaaaatgtcattcatatacaccatggaatactacgcagcccccaaaaaagaat

SEQ ID NO: 1021412 - DNA, 82 bp, Artificial Sequence
  ENSG00000280007_78 (sequence is synthesized)
gcaggaatagaaaaccaaataccacatgttcttataagtgggagctaaacatgggtactcatggacagaaaaatggcaagag

SEQ ID NO: 1021413 - DNA, 120 bp, Artificial Sequence
  ENSG00000280007_79 (sequence is synthesized)
agctaaacatgggtactcatggacagaaaaatggcaagagtagacactgggcactactggagcggggagggaagaagcgggcaaagattggaaaactaactattgggtactatgctcatt

SEQ ID NO: 1021414 - DNA, 120 bp, Artificial Sequence
  ENSG00000280007_80 (sequence is synthesized)
acctgggtgacaggattaatcgtaccccaaaccttggcatcacaatatatacccatgtaagaaatctgcatatgtactccctgaatctaaaataaaagttgaaattattaaagaaaaagg

SEQ ID NO: 1021415 - DNA, 120 bp, Artificial Sequence
  ENSG00000280007_81 (sequence is synthesized)
ggggtggggagagagacagtgtgtgtgtgtgtgtgtgcacgtgcacacgtaggcgtgatagactcatcctcccacccacaccctgccctggggaagcagtggcccacacaaggcgacact

SEQ ID NO: 1021416 - DNA, 120 bp, Artificial Sequence
  ENSG00000280007_82 (sequence is synthesized)
gtgcctggggcagccgcctgagcccagcaggaagcatgtgccaggtctgtgggtttctatttttacccatgacctgccctggcattttccagctccgggtaacccaagccaggggcagag

SEQ ID NO: 1021417 - DNA, 120 bp, Artificial Sequence
  ENSG00000280007_83 (sequence is synthesized)
cctccagagggcacggctgggcacagaagccagtagagtccacgtcaaagtgtggggctcctggagacgtggaagaaattctgggcatggagagcagggcagctgccctgagtagcatct

SEQ ID NO: 1021418 - DNA, 120 bp, Artificial Sequence
  ENSG00000280007_84 (sequence is synthesized)
tgcggggtcagagcatcaggaccattgccccctagttcaattttacaactgtgcccccactctagtcctgtctctgtgctacagctgagcgacacctggtccttgccttgagggaggatg

SEQ ID NO: 1021419 - DNA, 120 bp, Artificial Sequence
  ENSG00000280007_85 (sequence is synthesized)
agcacaggggtgagcgtggggcagcccgacgggggtcgcaacccgctggatctccgtgagcctggtggctagggaggggattcacccacagagctgcccacggccccaggttcccatgtt

SEQ ID NO: 1021420 - DNA, 120 bp, Artificial Sequence
  ENSG00000280007_86 (sequence is synthesized)
gccttctcaatttacttgctgtgctgtgtggcctgggctgagttactgagcctctcctcatctgaaaagtgtaagttagccacagttgttgatgctgtcttgccattatcattttcatta

SEQ ID NO: 1021421 - DNA, 120 bp, Artificial Sequence
  ENSG00000280007_87 (sequence is synthesized)
cggtactacctggtagcatttttctgcaccgggaagtagcacacgtagagggagctctcaggtccctgctcctctctcctttattgtggggtctattctctgcctccatctgagggctca

SEQ ID NO: 1021422 - DNA, 120 bp, Artificial Sequence
  ENSG00000280007_88 (sequence is synthesized)
attcaggcctaaggaaagcagcatctgcatccagaaaccacccacaaccagcgagttatccacccagaccacggcgtcacattcagcatgtggctgtgacttcccagggaggtgtggaag

SEQ ID NO: 1021423 - DNA, 120 bp, Artificial Sequence
  ENSG00000280007_89 (sequence is synthesized)
ctgaggggacactggagaggcccgaggggggcctgatcctatgtattttccttctaagtgacagtgtcctctgtggtcctaaccctcagccttctgggtctgtcgccccctcaccaccac

SEQ ID NO: 1021424 - DNA, 120 bp, Artificial Sequence
  ENSG00000280007_90 (sequence is synthesized)
cgcatcccgaccaccctctagtcctgcctacagtgctgcccggcccccagcctgctctcacttctggaacattctggggctttccagggaggacgcagggatattttgggaaaatcgaag

SEQ ID NO: 1021425 - DNA, 120 bp, Artificial Sequence
  ENSG00000280007_91 (sequence is synthesized)
atcatgggaggaagagtcaaggatttgggggacctgaaaaccactagcatggtgacaacgtctttagcctcttttaatgccctcattaatctcacactaatacatatgccagtcttttac

SEQ ID NO: 1021426 - DNA, 120 bp, Artificial Sequence
  ENSG00000280007_92 (sequence is synthesized)
aaaatgtctgtctctttctctctcccccgcccccgtcgtgcaaacacacacaccccttagaaagagctatttttcctattgaactagctcataagaataattggaggcataaaatagact

SEQ ID NO: 1021427 - DNA, 120 bp, Artificial Sequence
  ENSG00000280007_93 (sequence is synthesized)
cagaaatgactgacagattcataggtgctctcaaaagtgaaaagtagctacaccaatcaagagagaaggaagatccctgctaacaggaactgggctccttggagagacggaggcgtccag

SEQ ID NO: 1021428 - DNA, 120 bp, Artificial Sequence
  ENSG00000280007_94 (sequence is synthesized)
gtccagggtggggagtgtgctagatgagcctggaatgtcgcatagcgcctggaggcacggaggctaaccaaggggctgcccaagcacctgaagaggctcctgctgcctaagatgagacaa

SEQ ID NO: 1021429 - DNA, 120 bp, Artificial Sequence
  ENSG00000280007_95 (sequence is synthesized)
cctgagcctcacaagtactgatggcagcatttgagtgaagcaggatgcaagatgaaaacccacaagtcctcaaagaaaacccccagagaaaaactcatttgtccctatccagacagcccc

SEQ ID NO: 1021430 - DNA, 120 bp, Artificial Sequence
  ENSG00000280007_96 (sequence is synthesized)
gttagttagagaaggctcttttttctttaattgaagaatgtctgctaagcaatgtggaccgaataatagattatcaaatattgccctattccatcttctaattacgtgattgatttggac

SEQ ID NO: 1021431 - DNA, 120 bp, Artificial Sequence
  ENSG00000280007_97 (sequence is synthesized)
aagaacgccaacaccattaggtgaaagactgatggggaactggatcttcgccgagagccaaagaaccactgttatagtcacaaggggggacgtaactaccagggtcgccagcctaaggcc

SEQ ID NO: 1021432 - DNA, 120 bp, Artificial Sequence
  ENSG00000280007_98 (sequence is synthesized)
gcgatcaatctcagcatcgctaactgtgggccaacccgacatcgaggacctcctgatgggacgcaatgtgacacacacaccaccagtgaggacttcttctcaaaaatactcagccctcat

SEQ ID NO: 1021433 - DNA, 120 bp, Artificial Sequence
  ENSG00000280007_99 (sequence is synthesized)
cactgagccctgtagattcagtttccacttcacaggaaacacagggatcagagggttaattaagttcagtgatatcagagaaaacaaaatcaatccagaaggtgagacatcctacagggc

SEQ ID NO: 1021434 - DNA, 66 bp, Artificial Sequence
  ENSG00000280007_100 (sequence is synthesized)
aaaacaaaatcaatccagaaggtgagacatcctacagggcagctggtccagcctttttttttctta

SEQ ID NO: 1021435 - DNA, 60 bp, Artificial Sequence
  ENSG00000280007_101 (sequence is synthesized)
cctggcccagccttttcaactcatgagaaatgaagagctgggaggggctgtcccatgtca

SEQ ID NO: 1021436 - DNA, 120 bp, Artificial Sequence
  ENSG00000280007_102 (sequence is synthesized)
tcatgagaaatgaagagctgggaggggctgtcccatgtcaaaggaactaaggcaccaccaagcaccaccacacgcatcatggggactctgactgaattcttgtttgaacaaatcaaaata

SEQ ID NO: 1021437 - DNA, 120 bp, Artificial Sequence
  ENSG00000280007_103 (sequence is synthesized)
tttgggggacaaataaactgatttgctttgttcagcgtattcataaaaatgtggttaagtatgaaaacatccttattttttagagttgcatccgaagcatttagaggtaaaatgtcatga

SEQ ID NO: 1021438 - DNA, 120 bp, Artificial Sequence
  ENSG00000280007_104 (sequence is synthesized)
cgtctgtactttaaaatccttcccaaacacagcaaataacagatggaaaaatcattcttcttcttaaatctagataataggtatatgggtggcatatcactctacttttctgaaggctta

SEQ ID NO: 1021439 - DNA, 120 bp, Artificial Sequence
  ENSG00000280007_105 (sequence is synthesized)
aaatttttcatagtaaaaagcaaaaatcataataaagaagacagagaaagaataggagcacggactgccctctccagaacccccttatcctgggccattgcacgcagtcacttactcaaa

SEQ ID NO: 1021440 - DNA, 120 bp, Artificial Sequence
  ENSG00000280007_106 (sequence is synthesized)
taataattgactacgcgcctacattgctagggctttgaagttccatgaagaaatcacaagtgaaattcaaagctgcacgaggcttcatggcactgtgaggtccgtgcccagccccagcac

SEQ ID NO: 1021441 - DNA, 120 bp, Artificial Sequence
  ENSG00000280007_107 (sequence is synthesized)
tctgcaggcctcttgcacctgctcctagcagggaggaggagcagcccacagctcccgcatcgagctcccggctcaggcactgagctcgactcctgcagccatgctgccccattaccctcc

SEQ ID NO: 1021442 - DNA, 120 bp, Artificial Sequence
  ENSG00000280007_108 (sequence is synthesized)
ccagccttcggcctggaagttccacagagcagacccagtgctgaagcccgtgggacgcatcctcacgtctaagaaaaggcatccttctatcataaccagggatgttatatcggctccgaa

SEQ ID NO: 1021443 - DNA, 120 bp, Artificial Sequence
  ENSG00000280007_109 (sequence is synthesized)
catttaggataccagagctgggccagtcaagggcatccttctatcataaccagggatgttgtattggctacaaacatttacgataccagagctgggccagcctcatggatcacctaatat

SEQ ID NO: 1021444 - DNA, 120 bp, Artificial Sequence
  ENSG00000280007_110 (sequence is synthesized)
gattccctctccattattttacagatgaaactgctgagctcagagaggaaaagggacaaattcagtatgtcacagcactgcagcagcaaaagagcctggaccagaatccagggctgctga

SEQ ID NO: 1021445 - DNA, 120 bp, Artificial Sequence
  ENSG00000280007_111 (sequence is synthesized)
cccgggcctgacttctttcttttaggccacatggcctcctgcctcacttgcagctctgaactcccagggccctggggtgtgcccacatctgcgccaatgcaagaccaagttcggatagca

SEQ ID NO: 1021446 - DNA, 120 bp, Artificial Sequence
  ENSG00000280007_112 (sequence is synthesized)
gaactccaaacaggaaatgtctcttgtgcagagcgaaatggcgaatggctcatggggcggcctctttgaaaatgggtcatctttctctgacagaaccagaagtccgcttctcagggccca

SEQ ID NO: 1021447 - DNA, 120 bp, Artificial Sequence
  ENSG00000280007_113 (sequence is synthesized)
cgtgtgcagctggggttgggggcaaggggaagctgacccagcagaggatatttaagtcatgtgcccgctccaaactcatatttcagattcctctgtctagccaatcagagcacatgcctg

SEQ ID NO: 1021448 - DNA, 120 bp, Artificial Sequence
  ENSG00000280007_114 (sequence is synthesized)
tcactcacactgctcctgtctctctcagttctattttcaatctgggcttgtagagctcagacaagttctgtcctccttggtccctgtgaggggagggggtcccttgtttgctgcagaagc

SEQ ID NO: 1021449 - DNA, 120 bp, Artificial Sequence
  ENSG00000280007_115 (sequence is synthesized)
ctgtcccacccaacttcttctggggggtgaagaggagggaggtggagggaccaaggaggtcccttcctcatgaaaagcatgccacttctcacacagacctcacgctgggatagctacaaa

SEQ ID NO: 1021450 - DNA, 120 bp, Artificial Sequence
  ENSG00000280007_116 (sequence is synthesized)
aggcacctactcatttctacagcaaatctttttgtgtggttgcattcgagacagcattgtgaggttactgggctaactctcattcatccttcaggtatccagttaattgtcacttcctaa

SEQ ID NO: 1021451 - DNA, 120 bp, Artificial Sequence
  ENSG00000280007_117 (sequence is synthesized)
ggaaagtctgcaaaaccccaagccagcatagggccctgccatgtgctcccccatccccttcattcctgtcattgtaatcatcacaccgtattatagctgcctgttcattttcgcaccttt

SEQ ID NO: 1021452 - DNA, 120 bp, Artificial Sequence
  ENSG00000280007_118 (sequence is synthesized)
ctagtagagaacgtaagctctgtgagggcaaggaacctttgtttcactcaaggaatccccagtaccgagcccggtgcttgaatgtagcaggtgctcaattaacacagggaggactggaat

SEQ ID NO: 1021453 - DNA, 120 bp, Artificial Sequence
  ENSG00000280007_119 (sequence is synthesized)
gaaaaccttccctgaggggctgcagtccatccaacaaggacagcggccagggcctaagaagtgtacgggtcaagtgcagagggagttccaaggagaaggagacatcttctagcttggttt

SEQ ID NO: 1021454 - DNA, 120 bp, Artificial Sequence
  ENSG00000280007_120 (sequence is synthesized)
cctaaaggaggaatattcgcagggaccctgaagaaggcagccggccaagatgatctggggcagttcaggtggatgcaggagcagtgtgaacaagaggcagtaaaacgcagggtggttccc

SEQ ID NO: 1021455 - DNA, 120 bp, Artificial Sequence
  ENSG00000280007_121 (sequence is synthesized)
gcacactgcccagtctgtccggagcgcaggctgaggaagggcagggccaatgagacatctgggccacctgtgaacactccgcctggggagccactgccctgtgagccaaggcccctcgct

SEQ ID NO: 1021456 - DNA, 120 bp, Artificial Sequence
  ENSG00000280007_122 (sequence is synthesized)
gggaggcatgagcccagtgcctgtgttttgcagagcatcaataaaagaaattctagaactttgcagcccttttataattttgctgcaagaagcccttttttttttacatcattcttatat

SEQ ID NO: 1021457 - DNA, 120 bp, Artificial Sequence
  ENSG00000280007_123 (sequence is synthesized)
tctattttaatagtagtcatttccttttgctttgttctcagaggactaagataagctaatcaccatccttggcaaaaggagactttgaagccttaaaaaggctgtcttgtgatactattt

SEQ ID NO: 1021458 - DNA, 120 bp, Artificial Sequence
  ENSG00000280007_124 (sequence is synthesized)
ccaagtatcacaagacagtaaaagtggcatatcatctgggagaggggccgacgtggaccacagtgtgtgccctgtgaaagcctggcaccacccacactccctgaccacctgtgctctcat

SEQ ID NO: 1021459 - DNA, 120 bp, Artificial Sequence
  ENSG00000280007_125 (sequence is synthesized)
gccccagttgctgtcaggaagcatgtgattacaccgaattatctctagttgtcaggctgggataaaatagatcacatatatcttaggacctaggtcagggatggcaagtgaaaagcaggc

SEQ ID NO: 1021460 - DNA, 120 bp, Artificial Sequence
  ENSG00000280007_126 (sequence is synthesized)
ccacagtgtcacagaggggtaattaaagtaaggacagatgtggctcctgaagggctgctgaattctctctgctcagaactcttcgatcatagggcatatttgagatcactcataacaaag

SEQ ID NO: 1021461 - DNA, 120 bp, Artificial Sequence
  ENSG00000280007_127 (sequence is synthesized)
aatagatagcaagccagacacagcaaaaacaaagtcggcctaaattcactttagcgagtgaaggtggctcgcgagaggggctcagatgataggcactgcagttagggcagcaacagagct

SEQ ID NO: 1021462 - DNA, 120 bp, Artificial Sequence
  ENSG00000280007_128 (sequence is synthesized)
cacaggaggccagctctggccatgaggccatctgctaaggagacttccagcataagaggccggagggcgttgaaggcctgggctgtggctggcactggggcaggtgcaagagacacttag

SEQ ID NO: 1021463 - DNA, 120 bp, Artificial Sequence
  ENSG00000280007_129 (sequence is synthesized)
gagtttcaatccgatgcacacagtgcctgctccatctcctgctctcttctgcagcttattatctgagagaactcctaacaggaagacactgcaggggaaatgccaaccacaaaggccaca

SEQ ID NO: 1021464 - DNA, 120 bp, Artificial Sequence
  ENSG00000280007_130 (sequence is synthesized)
gatagtgctgtccgtcccttgcggcttgagggaaaaggagcatttggtctgcttcctccccccgacagtgccacatcctcctgcccacccccatcactggcccgctatccaccagctatt

SEQ ID NO: 1021465 - DNA, 120 bp, Artificial Sequence
  ENSG00000280007_131 (sequence is synthesized)
tcccccaccaaaattatttttaactttcatctccctttgaaggtcactaggagaaagcacattcaacagtggcattaacccccaccccaagctctgtatgggcctgacccaaggctgggg

SEQ ID NO: 1021466 - DNA, 120 bp, Artificial Sequence
  ENSG00000280007_132 (sequence is synthesized)
gctcccaatggactcaccaatccagcagctctgccccagccgctgccctgtgagccaaggcccctcactcggaggcatgcgcccagtgcttctcgggaaacctgccttttgtgatgggag

SEQ ID NO: 1021467 - DNA, 120 bp, Artificial Sequence
  ENSG00000280007_133 (sequence is synthesized)
gggaggaggaggcagcagtgacctgcagcccctgggagcccacacagtgctctgaggtcagaatacacctatcaactccacagagcttggccatgcctgtctacatggggagactgcaga

SEQ ID NO: 1021468 - DNA, 120 bp, Artificial Sequence
  ENSG00000280007_134 (sequence is synthesized)
aggctgcaggcagaagggtgtccatttggcccccagaaccctctaactgcccatttttgcagggagacgggctccttcgtgctctccagtcctaacggaatggagttaaagaagccgtgt

SEQ ID NO: 1021469 - DNA, 120 bp, Artificial Sequence
  ENSG00000280007_135 (sequence is synthesized)
tgcagatgttcccacctccccataaaccacagaaaacttctctgtgccctggtatcattggcatgggcttggcttagggcacctggccaggattctccataccacttcccaaaaaaggtg

SEQ ID NO: 1021470 - DNA, 120 bp, Artificial Sequence
  ENSG00000280007_136 (sequence is synthesized)
tcatagtctgagttcccagagagctgcgtgctagaacactgggaatggatgggaatggtctgctgtgggagtagcctgccggtcccagcacgggcaggtggctcaggacagaggctctgg

SEQ ID NO: 1021471 - DNA, 120 bp, Artificial Sequence
  ENSG00000280007_137 (sequence is synthesized)
tgcccagcagatgtaaactccagcccctacgcagcttcttaccagctgtgtcactttaggctccaggacagaaatgctaaagggtattggtggtaccgtgcagtgggtagctggggagaa

SEQ ID NO: 1021472 - DNA, 120 bp, Artificial Sequence
  ENSG00000280007_138 (sequence is synthesized)
ggggttgggggtaagttcacagaggaaaaatgctcatctgcctagcagctagagaaatgcatttaaaaatacacttaaggattagttacacttttcttgcccagagcctacagaaattcc

SEQ ID NO: 1021473 - DNA, 120 bp, Artificial Sequence
  ENSG00000280007_139 (sequence is synthesized)
aaatcgaattctccttaacaccaaggtcacctcccccaaacccccaccagggagggaagtgaaggggacaggacagcagcctgaaacttaatccttagaagaaatacagtcatttttgta

SEQ ID NO: 1021474 - DNA, 120 bp, Artificial Sequence
  ENSG00000280007_140 (sequence is synthesized)
agggtgagattctaggggtctaggtttatagatgtgtcattttagccttttacaaatgagccaaatgatattttaaaagtttctgtgagtgtaaaatgttcaacaaaaaatattagccat

SEQ ID NO: 1021475 - DNA, 120 bp, Artificial Sequence
  ENSG00000280007_141 (sequence is synthesized)
caagacagtgcaacgcacacaagttaaatgttctagatagaacctactagacaaaattgagtgtttcaaaataaatgaaaggtggtcgcatttcaaaatatttaaccataggttttcagc

SEQ ID NO: 1021476 - DNA, 120 bp, Artificial Sequence
  ENSG00000280007_142 (sequence is synthesized)
taaacacccaaattcttaagcacgttcaaaataaagttttgctgtttgaattgttgatttaccaggcattgtcagaaacacgtctgtggatcacacattcaagcttgtgcacagggctgg

SEQ ID NO: 1021477 - DNA, 120 bp, Artificial Sequence
  ENSG00000280007_143 (sequence is synthesized)
gttaagatcctcgacacgcccctgtaaacatcctctgggctccactctgtaccacaatggcattcagatccaaattaaagcatgcaagggaagcacttggaaaatcctaaaacactagct

SEQ ID NO: 1021478 - DNA, 120 bp, Artificial Sequence
  ENSG00000280007_144 (sequence is synthesized)
acctgctagatattataaatattaaatatcaattctagagtatgcagcctagcatttgcttcaaaattatggagggagggaataaatgaagtgagacaggtcagaagttggtaattattg

SEQ ID NO: 1021479 - DNA, 120 bp, Artificial Sequence
  ENSG00000280007_145 (sequence is synthesized)
aacttagatgatgtatataatcgctaattataccatttgctctccgtttgcatatgtttgaaattccctaccataaaaagtttaaaaataatgaaatctaagtggagtcttggaaatttg

SEQ ID NO: 1021480 - DNA, 120 bp, Artificial Sequence
  ENSG00000280007_146 (sequence is synthesized)
aattataaccctcttcatttcgcaggtaaaacaaacacatccagagaggttaagtgaccttcctgaagtcacacagctagctgcagagccaggagtcaaaattctgaactggcagctccg

SEQ ID NO: 1021481 - DNA, 120 bp, Artificial Sequence
  ENSG00000280007_147 (sequence is synthesized)
ggccctttgtgtggcctcataccagggtcctcaggcagaaataggttcctgtggccaccctccctaatattcccaagttctttcagttcccaggggtgtctgggagcccgctaggaggag

SEQ ID NO: 1021482 - DNA, 120 bp, Artificial Sequence
  ENSG00000280007_148 (sequence is synthesized)
ggagggtgctgacaaaactgaagctggaaggctagagctccgggggagccaggaggccctgggcacgggccaaacgtaacagggcggggcggagggggttctcgcctgctttctggatca

SEQ ID NO: 1021483 - DNA, 120 bp, Artificial Sequence
  ENSG00000280007_149 (sequence is synthesized)
ctgacacctggagcaagcctgcccagggaacccgaccttggccatgacataggcttattctgccctcactctgcccccaatctttccagcccatctccctactgctgaaagatcaggggt

SEQ ID NO: 1021484 - DNA, 120 bp, Artificial Sequence
  ENSG00000280007_150 (sequence is synthesized)
ccaggagggattcctgggattctgggctttgggaaagtggactgggggcaaatgttaaccaccaggggcactgggggcggagagggggaccctagaaagaggaactgagtgtttgcagcc

SEQ ID NO: 1021485 - DNA, 120 bp, Artificial Sequence
  ENSG00000280007_151 (sequence is synthesized)
gcccctcagtaagatccaggggcgggggcagggaagggagcagccgcgatccccctaagccagggtaggaaacaggtcgaaggtcccctggcctttggaagcagagacttcttactccca

SEQ ID NO: 1021486 - DNA, 120 bp, Artificial Sequence
  ENSG00000280007_152 (sequence is synthesized)
aagtccttcgactctgaccgctggaaagacttgggagctgctgagtgcgcccggaggaccccgccgcgctggggctgtgcgtgcagcaaacccaagccgctggccaggcttgcgagaaag

SEQ ID NO: 1021487 - DNA, 120 bp, Artificial Sequence
  ENSG00000280007_153 (sequence is synthesized)
acctccacgcgtggggggaccgtggcgccctaggtcctctgtcacattccgggccctgtcacattaggctgggttcggagacgtgactgcatctggccccccagtcgccccggcccagac

SEQ ID NO: 1021488 - DNA, 120 bp, Artificial Sequence
  ENSG00000280007_154 (sequence is synthesized)
cacccatccagaatccccggactcgcccttctctccactctgtccacaggctgcccatctggggaccccagaatctcgcccccttctccgtcgggctccccagggcctccctccccctcg

SEQ ID NO: 1021489 - DNA, 120 bp, Artificial Sequence
  ENSG00000280007_155 (sequence is synthesized)
tctgcacgcaaagctcccttaggtccctttaaggaacaactggcccctggtctctatttcccccatacgataaagggcaccgggtgttcccgcccgagggtgcggactcctcgaccctga

SEQ ID NO: 1021490 - DNA, 120 bp, Artificial Sequence
  ENSG00000280007_156 (sequence is synthesized)
actgccacccccagaaggccttgagccctgcggctccaggaagacgggtccgtgcgcctccgcgtagactcggctctcggtcctacgcctgccgcgcgcccgcagcccgcctggccccgg

SEQ ID NO: 1021491 - DNA, 120 bp, Artificial Sequence
  ENSG00000280007_157 (sequence is synthesized)
gaagcctcaccatcgctgccgctgtcctcgcccgcgcacctctcagctgggcctgcccgccccgactgctccagatacagccgcctccgccgttgtgacacaccgggagggggggacgcc

SEQ ID NO: 1021492 - DNA, 120 bp, Artificial Sequence
  ENSG00000258294_0 (sequence is synthesized)
atgcttcaagtacaaaccagagctgaggattttgaatagactccatttagtttctcttctggaggcccaacccacacaatcctaatttctctgcctcttaagttgatgccataaccaagt

SEQ ID NO: 1021493 - DNA, 120 bp, Artificial Sequence
  ENSG00000258294_1 (sequence is synthesized)
acagaattggaaggttaggttaaggctgttcactgggactgaataatccctaaaagtctctagtaattctatgattagatgattctaattattcctaaataaatgttcctatattggcaa

SEQ ID NO: 1021494 - DNA, 120 bp, Artificial Sequence
  ENSG00000258294_2 (sequence is synthesized)
catcaacaatttggaatgatttttgcttacctgtgacacccagaaaaaaacaacgttcacaattttacacagaaatcagtgacatgcgtggaaagaaaatggaacagaaggtagaaacct

SEQ ID NO: 1021495 - DNA, 120 bp, Artificial Sequence
  ENSG00000258294_3 (sequence is synthesized)
tgatgttaggcaaattagtttatctctctgtgctactattttctcaaaagtaaaatgtgagttgcaatgtagtttgtttaactcgaaaattttgagatttgaatataacattcaaacgct

SEQ ID NO: 1021496 - DNA, 120 bp, Artificial Sequence
  ENSG00000258294_4 (sequence is synthesized)
aagatgtgtacctgacacagaataaatgctcaataacaataatctcttttttaaaaatgcacaaaatgtagaaagcaatacattgaattccattctttaaaacgagcacatatctaaatg

SEQ ID NO: 1021497 - DNA, 120 bp, Artificial Sequence
  ENSG00000258294_5 (sequence is synthesized)
ctgagtaatttcttacggagaccttacagatacagttcttttttctattgtttccccggaattattcagaaaagcattttctttaagcaagttctaatggctgtcactatgatttaaagc

SEQ ID NO: 1021498 - DNA, 120 bp, Artificial Sequence
  ENSG00000258294_6 (sequence is synthesized)
tttctacagaatctttcacatagggtatgcctgcctaaattactttggacctagttttagataaacttccataacaagtgttgaataaatgcatgagtaaataaagtaaagcaaaacaga

SEQ ID NO: 1021499 - DNA, 120 bp, Artificial Sequence
  ENSG00000212766_0 (sequence is synthesized)
atgatggaaacagccaccatgttgtgaggacactcaattagccttgtggagagacccacatgggtgagaaactaagggctgccaccaacagcccacatccacttgccagctctgagagca

SEQ ID NO: 1021500 - DNA, 120 bp, Artificial Sequence
  ENSG00000212766_1 (sequence is synthesized)
aatagatcctgcaggcctagtcaagcctcatttgactgacgcctcagtcaacatcttgactgcaagcccatgcaaaacactgagccagaaaccacccacccaagaagctgtgaattcctg

SEQ ID NO: 1021501 - DNA, 120 bp, Artificial Sequence
  ENSG00000212766_2 (sequence is synthesized)
ccacgcctgcccgtttgcgcttactgaacagaggtcctcaggaacgtggtgagacaaagagaaaggagggcgttttcgccaccctcttgctaatgcttcaataactccccattgccctaa

SEQ ID NO: 1021502 - DNA, 120 bp, Artificial Sequence
  ENSG00000212766_3 (sequence is synthesized)
tgagctcaccatcagagcctgattaagacctttggaggccctaaaattataagacccactatctccatcaatgtaattaaaaaaaaaacaactttaaatggaactttaccaaaaagccga

SEQ ID NO: 1021503 - DNA, 120 bp, Artificial Sequence
  ENSG00000212766_4 (sequence is synthesized)
agaccatttcctacaactatggcttgtctgagtcctgagccagcagagctcaggccacagcacctgcacccgttttctgctgctgcacacaagggctctgtgcattccgcatccagttag

SEQ ID NO: 1021504 - DNA, 120 bp, Artificial Sequence
  ENSG00000212766_5 (sequence is synthesized)
gagattgctcctgcgctggggagttggtgttaggacagaagatccaagacgcgtttcagagagcccctcttcttgggcctgcgattcctcacctggaagggagaagagtggacttcctgc

SEQ ID NO: 1021505 - DNA, 120 bp, Artificial Sequence
  ENSG00000212766_6 (sequence is synthesized)
aaaaagcctgtgagctctggaatcagatggaactggatatgaatttccatttagtgcttgttggattaaatgtgatgctagtaagtacacttgcctagttgctgctcaagaaatggagct

SEQ ID NO: 1021506 - DNA, 120 bp, Artificial Sequence
  ENSG00000212766_7 (sequence is synthesized)
attattatttacatcataatttgaacttcattcattcaacccataccgatgagcagccacaggccctccttccacagggcttaccttcagaaagttccacgtgtcccttactttctggta

SEQ ID NO: 1021507 - DNA, 120 bp, Artificial Sequence
  ENSG00000212766_8 (sequence is synthesized)
ggcacattcatgggcacgtaccatgctaaggaccagggacctggagatgaagacagtcctgtccactgaggggttcacatctttccataaaacgttctgacccccctgtttctttcttct

SEQ ID NO: 1021508 - DNA, 120 bp, Artificial Sequence
  ENSG00000212766_9 (sequence is synthesized)
ggcttgtctgagtcctgagccagcagagctcaggccacagcacctgcacccgttttctgctgctgcacacaagggctctgtgcattccgcatccagaagatcttagattagtaagatcat

SEQ ID NO: 1021509 - DNA, 120 bp, Artificial Sequence
  ENSG00000212766_10 (sequence is synthesized)
cagcaggagcctggaaagcagctgaagccctggagggtgcctggcacacagaatcttgtgctgagcccggagcacaatgggagcgggctggcggggtgggttcacagctggactgggagc

SEQ ID NO: 1021510 - DNA, 120 bp, Artificial Sequence
  ENSG00000212766_11 (sequence is synthesized)
agcagacatacaggccgtaggcacagacatataaagacagtcatgcagattgcaggatgcctgagagcacagactctcacatgcacaaatacgtgcatgatcgccagtgtgcatccagac

SEQ ID NO: 1021511 - DNA, 120 bp, Artificial Sequence
  ENSG00000212766_12 (sequence is synthesized)
agccccacatgcatgcacacgcatgcacacatgtgatgtgtacatagatggacacatgtctatgcccacaaacactgcagagacacagaagtgtctggcaaggaacactattttgtcctc

SEQ ID NO: 1021512 - DNA, 120 bp, Artificial Sequence
  ENSG00000212766_13 (sequence is synthesized)
aattttctgccagtgagagtctactgactccatctctgaaatgtctctacttattgtccctcttctccacctgcaccacatccctagtccctgaaactcccaccgagacccctgggcaat

SEQ ID NO: 1021513 - DNA, 120 bp, Artificial Sequence
  ENSG00000212766_14 (sequence is synthesized)
gcagcctcagtaaggaggcctccattctggaagggcttcccaggcccagagaagggagaaagtaatttggaaccacccaagtattggtgatgccaggcctcaccctaccctggggatatt

SEQ ID NO: 1021514 - DNA, 120 bp, Artificial Sequence
  ENSG00000212766_15 (sequence is synthesized)
tgaatctcaaaaagggagcatgggaatctgacaaagcacttgcatgtataaagaactcctccaaatcaacaaggcaaaaacctcattagatacataggcaaaaacctcagaagagccaca

SEQ ID NO: 1021515 - DNA, 120 bp, Artificial Sequence
  ENSG00000212766_16 (sequence is synthesized)
tcacaaaggagcacctccaaatggccaagaagcatatgaaaatatgttcaatctcattagccaacagggaattcaaattagaactacaccaggatggctgaaagtgcaaagactgacaat

SEQ ID NO: 1021516 - DNA, 120 bp, Artificial Sequence
  ENSG00000212766_17 (sequence is synthesized)
atcaagggctggtggggatgcagaacaactggaactctcctatgcactgcggaaggggtaaattaataccgcccctttggaagaacagtttagaagcatcactaaagctgaatatattca

SEQ ID NO: 1021517 - DNA, 120 bp, Artificial Sequence
  ENSG00000212766_18 (sequence is synthesized)
gttatctgggtatcaagcaaatctgaccacatcacctccccactgcttaaaaccctttcctacaggatgaagttgaaatcacttgacatcccatataaggcccttgactgtctggcatca

SEQ ID NO: 1021518 - DNA, 120 bp, Artificial Sequence
  ENSG00000212766_19 (sequence is synthesized)
gccatagtctggcctcaggccctggcatggagtcccctggactcagtgctctggctgagggcctccaggatgaagataccctgtgcaaagcctcacacttttgctgttgctgggctcact

SEQ ID NO: 1021519 - DNA, 120 bp, Artificial Sequence
  ENSG00000212766_20 (sequence is synthesized)
gtgtgaaattccctcctccctccttccaccttccctatgctgaactgccactcctccatcctccatggccagctaagccaacacctccccacttcctcctgacaacccaggcacagccac

SEQ ID NO: 1021520 - DNA, 120 bp, Artificial Sequence
  ENSG00000212766_21 (sequence is synthesized)
tgacctgtcccatggctgtcacagccctttcttgggctctcaatggtatcattgtcacctgtgtgctcatgagcctctgccactcaactccaagcacatcaaataaagagctcaaaacat

SEQ ID NO: 1021521 - DNA, 120 bp, Artificial Sequence
  ENSG00000212766_22 (sequence is synthesized)
acagaggtcctcaggaacgtggtgctccactggaggctgcaggtggattatcttgtttaatcctcacaacttcctaatgagagcccctcttcttgggcctgcgattcctcacctggaagg

SEQ ID NO: 1021522 - DNA, 120 bp, Artificial Sequence
  ENSG00000212766_23 (sequence is synthesized)
acaactatggcttgtctgagtcctgagccagcagagctcaggccacagcacctgcacccgttttctgctgctgcacacaagggctctgtgcattccgcatccaggtgtgcccctcctctt

SEQ ID NO: 1021523 - DNA, 120 bp, Artificial Sequence
  ENSG00000212766_24 (sequence is synthesized)
ctggaggattctttttcaggctgtcccagagactttgcagcacagcatccttgctctatttcttcctgcaacatctctgctgaagctctattgcttttggcaactcttccgtctattttg

SEQ ID NO: 1021524 - DNA, 120 bp, Artificial Sequence
  ENSG00000212766_25 (sequence is synthesized)
tggtttaggtgtctcctacttttactaaaaatggaatttgtgtttttatcgctcaagtcctttttgcttttggattacttccagaaaatgaagggagggttactaactttatgccatctt

SEQ ID NO: 1021525 - DNA, 120 bp, Artificial Sequence
  ENSG00000212766_26 (sequence is synthesized)
caccaaaagtcaattacacaagatacaagaatgttcatagtagagccgtttgtattagtcataaactggaaaccacccaaatgcccatcagtgtggctccctttgaagaactgccttggg

SEQ ID NO: 1021526 - DNA, 120 bp, Artificial Sequence
  ENSG00000212766_27 (sequence is synthesized)
tccaggatccagcctcccgatcaccgcgctagtcctcgccctgcctgggcttccccagagacgggagcttgggtgggggaccctggacccgaagccaaggctgaactggtgtgccaagcc

SEQ ID NO: 1021527 - DNA, 120 bp, Artificial Sequence
  ENSG00000212766_28 (sequence is synthesized)
cagggagcaaccaagtccccaactctttccctgcccttcccgcaggctgagcagaaaaccaggaaatggatggactccacctccgcagccacgcctgcccgtttgcgcttactgaacaga

SEQ ID NO: 1021528 - DNA, 120 bp, Artificial Sequence
  ENSG00000287640_0 (sequence is synthesized)
ggcggaggagagcggttcattttttccataggcatgctgtgtgtgccagctgaggtctttaatgtaaaccctcctgtgctccgacctaaacaatgagcgtaattatgggctgtcttaccc

SEQ ID NO: 1021529 - DNA, 120 bp, Artificial Sequence
  ENSG00000287640_1 (sequence is synthesized)
ccttcagacacagggattggggtcggccctccacagggtcctgcaggaggtcttgtttctgagtcaggggggcctctgtttaaccagagcagacccaactctgcggggcaaagttgacat

SEQ ID NO: 1021530 - DNA, 120 bp, Artificial Sequence
  ENSG00000287640_2 (sequence is synthesized)
accagcataattacacgtaggttgaccatatttactgcaactctgttgttctagaatttcaaacaaaggctgaaccctaggaaaacacaccactaagaagaagcagattgtcctgagtga

SEQ ID NO: 1021531 - DNA, 120 bp, Artificial Sequence
  ENSG00000287640_3 (sequence is synthesized)
tttattgaagaacaaaagtgagggaaagaaaaagaagagaattatcagagactcacacatacttccctttcctcctgtctggcctaaggagaacaaccagtgaccaccgtgttccctccc

SEQ ID NO: 1021532 - DNA, 120 bp, Artificial Sequence
  ENSG00000287640_4 (sequence is synthesized)
tccccaacggaaaggcctcaaaacactgacattttgctttttcagagacacgtctttatgcagccacatcagatcccaaaaatccatctagactcactggaagaaagcaggcggcggcag

SEQ ID NO: 1021533 - DNA, 120 bp, Artificial Sequence
  ENSG00000287640_5 (sequence is synthesized)
ggtcagggggagagagctctcctcttcccttctgactcacttcactcactccccactgccccctccatgacatgcacctacatttcatacagatattttccaaatgaacagaaacctaac

SEQ ID NO: 1021534 - DNA, 120 bp, Artificial Sequence
  ENSG00000287640_6 (sequence is synthesized)
caaggctggaatttggctttagagaagccagaagaacaggtcagatatacttactggcaggggagataccatgaccgcaaaggtggttttccgaggatgaggcttatccatttcacactg

SEQ ID NO: 1021535 - DNA, 120 bp, Artificial Sequence
  ENSG00000287640_7 (sequence is synthesized)
gatgtgctgaccccctgcaatttccccaaatgtgggaaacctgactgcataatttgtggtagtggggaactgcattcatgctttaaaaataataataataaaaatttgttttagaaagtg

SEQ ID NO: 1021536 - DNA, 120 bp, Artificial Sequence
  ENSG00000287640_8 (sequence is synthesized)
acttccctgccagagttccaaggcagggtcatgagattcctaattcaaagtctcgtcagggtggtcatctgctctgctcgttgcctagtactcagagagatacatactccagggccaggt

SEQ ID NO: 1021537 - DNA, 120 bp, Artificial Sequence
  ENSG00000287640_9 (sequence is synthesized)
ggtgccacgcagatgacaaaataacaagtgattgggctaattagcctatttacaatcataaaattgtgaaagaacctttcgcaaaactacagatgtttttagtgttcagaaagtctgaaa

SEQ ID NO: 1021538 - DNA, 120 bp, Artificial Sequence
  ENSG00000287640_10 (sequence is synthesized)
aagaacacagaattgggataggatttggatcctaccagatgttcacagagggaaagtcctgctaaatggaaaattccaaatgtggccagttagaaactctgtgggctgaaagcccctcta

SEQ ID NO: 1021539 - DNA, 120 bp, Artificial Sequence
  ENSG00000287640_11 (sequence is synthesized)
caatcctggatagttcctagtgacatcacttgaggtctccaagcctgagcaaaggacaggatctgagcctagatgccctaagatgggatggggcaccctggaaagaacaaggagtggaac

SEQ ID NO: 1021540 - DNA, 120 bp, Artificial Sequence
  ENSG00000287640_12 (sequence is synthesized)
tgttcagcagttcaccagagacttatgtcagcaccttgactcaggccaggtgtatgatatcccagacaaagaagggaggtatagaagaaaagcaatagaaaatgtcctagacatttacca

SEQ ID NO: 1021541 - DNA, 120 bp, Artificial Sequence
  ENSG00000287640_13 (sequence is synthesized)
aactgtctacaagaagagcagcctcctctttcgtgggcatcttgccccctaactctgattttgcagttctagcacaaaaaaaatcatagttacccatccttctgccagagaaaagggctc

SEQ ID NO: 1021542 - DNA, 120 bp, Artificial Sequence
  ENSG00000287640_14 (sequence is synthesized)
atgaactgaactggacagtttccccctccctctgattggcccaaggattggcatgagactgaacagggaaactaggattttccccaacaggaaaaaaaaaaaaaaaaaaaagcattttat

SEQ ID NO: 1021543 - DNA, 120 bp, Artificial Sequence
  ENSG00000287640_15 (sequence is synthesized)
gctctgatcacatgaaccaataaacacccagccctcctttcttcttaagctggtcccagtgataattctaccacgtacaaccagtggatttgtgactaataaaggaaatacgtggaattc

SEQ ID NO: 1021544 - DNA, 120 bp, Artificial Sequence
  ENSG00000256292_0 (sequence is synthesized)
accaagtgttctgcctgagcagggcactggcaaccggggtggagctgcaagagcctttggccccatggagggactgctggctgccggcttcttcacttcagctccttctggagatgacca

SEQ ID NO: 1021545 - DNA, 120 bp, Artificial Sequence
  ENSG00000256292_1 (sequence is synthesized)
agtctgtggtggtgcctgaagatttaagcaaggcccaggtcatgctgggtttcatggggagatgatggtattgcgttgtttgttttcataataagcaagcaggatgtgaagaggggaaat

SEQ ID NO: 1021546 - DNA, 120 bp, Artificial Sequence
  ENSG00000256292_2 (sequence is synthesized)
gaagtcatcaaaaggtttttgttcttcccaaattgaagaataacaaaatccgtgaaaattacgaattgatttaaaaagtctaaaaaaacctgaagtcaccccaggtcttcaaaaccttag

SEQ ID NO: 1021547 - DNA, 120 bp, Artificial Sequence
  ENSG00000256292_3 (sequence is synthesized)
cctgaagtcaccccaggtcttcaaaaccttagaaacactgaatttggcagcaaactataagaatttgttggcttatttcttttctttctctttctctttccttccttccttccttctttc

SEQ ID NO: 1021548 - DNA, 120 bp, Artificial Sequence
  ENSG00000256292_4 (sequence is synthesized)
cttcttttcttcctttcttccttcgtttcttccctccttgctttttcttttcttttattttcttcctaaagatagagctactcaaaaaataactagaaagagagaaacccactgattgga

SEQ ID NO: 1021549 - DNA, 120 bp, Artificial Sequence
  ENSG00000256292_5 (sequence is synthesized)
ttcaaggtgtgtttatgggtcaatgtgtgtttaaggctgatattcaaaaagcaacatagtcactagaaaatagcaaaagttctatcctacaggttcatcaggacaaagacaaaaattcct

SEQ ID NO: 1021550 - DNA, 120 bp, Artificial Sequence
  ENSG00000256292_6 (sequence is synthesized)
gaagaaataaacaatctcaatgaacctagtaaagccacatccacaagcataggccaagtcacacatgacagagaatgacagatctgatccctgtctacagccagggaagtctgacaccct

SEQ ID NO: 1021551 - DNA, 120 bp, Artificial Sequence
  ENSG00000256292_7 (sequence is synthesized)
cgcctggcccccttcttgatagtaacactgtggggggcagagaggggtgacttggactaggatacgtaaagtgaatccggaaaagagacaacctggatgatcaagcaggaactgatttaa

SEQ ID NO: 1021552 - DNA, 120 bp, Artificial Sequence
  ENSG00000256292_8 (sequence is synthesized)
aggaattgatgtctgctgctaaggtggacttcatttcccagcctcctttgtggctaggtgttgtcatgtgactgcgttctagccagtggacaatggtagtatgaagccctgagggctgag

SEQ ID NO: 1021553 - DNA, 120 bp, Artificial Sequence
  ENSG00000256292_9 (sequence is synthesized)
accacatctgcctggttttctgtggcagctgcagcatcaacactggctcttcgaagagtagcagctgatgaacattactccggcaaacaattttctctgctaggaactggataaatgcaa

SEQ ID NO: 1021554 - DNA, 120 bp, Artificial Sequence
  ENSG00000256292_10 (sequence is synthesized)
aggaaggaggggagagtgtgtcagacggggaccctgccctactggagcacacgcatcaccacctgggttaggacggcctcacccgtcccctggaccttcaccttatgtcccagagaggag

SEQ ID NO: 1021555 - DNA, 120 bp, Artificial Sequence
  ENSG00000256292_11 (sequence is synthesized)
acatctgctagagcaaagaaaattcattgtcatataaaacaaacaagaaaacacacacacacatgtgcacacacacatacagaaagcaaataaaacattgttagatgatgtaaattgtca

SEQ ID NO: 1021556 - DNA, 80 bp, Artificial Sequence
  ENSG00000256298_0 (sequence is synthesized)
cactatgaaaacatcactaagacacgaaggtgctggtggactgagaaggttttggggaatgtctgtctcagatctcatga

SEQ ID NO: 1021557 - DNA, 120 bp, Artificial Sequence
  ENSG00000256298_1 (sequence is synthesized)
gccccaaatccacatcctggcaatcggtacccccacgggtgacagtccagcatcccacagccaagaccctaccatgccggaccactggacgtcccctcctctgccaacaccatgccacgc

SEQ ID NO: 1021558 - DNA, 120 bp, Artificial Sequence
  ENSG00000256299_0 (sequence is synthesized)
cactttagcagcagtagttttttgggaggcttatagctttgtcatgtaaaacaggggacttaaacagaggttgctttttctcgatttggtagaaaacatgttgtatttgatttttgcaga

SEQ ID NO: 1021559 - DNA, 120 bp, Artificial Sequence
  ENSG00000256299_1 (sequence is synthesized)
cagggtgaaatcagcaaaatgtgcagtgtggcaggttctgtaggacgaatgacctggcttctccaaccaagggagccaaagcacattctgggtcacagatcatggaggacagagaggatc

SEQ ID NO: 1021560 - DNA, 120 bp, Artificial Sequence
  ENSG00000264131_0 (sequence is synthesized)
tcccagtatcagaaggagtgaaaatccagaacttttactgaacttgaatttcaatgtgaacagcaagatttgaatagaaacactttactttgacaacaattaaaattattcataccatga

SEQ ID NO: 1021561 - DNA, 120 bp, Artificial Sequence
  ENSG00000239377_0 (sequence is synthesized)
gcccctggaacctcccaccagcccagcacagctctcacagcctcagcgccccaggtcgggcagtcagaagcagaccatgccacagatgaacatgggaacagttagctgtgaagccttggg

SEQ ID NO: 1021562 - DNA, 120 bp, Artificial Sequence
  ENSG00000239377_1 (sequence is synthesized)
tgctcaaagggccgaaggaggacccatctccacaccttccacatgtagatatcctcaacgttcttcacagaggggatgcccgcaccccgccccaccgagttcgcggctgctgtgcccatc

SEQ ID NO: 1021563 - DNA, 120 bp, Artificial Sequence
  ENSG00000239377_2 (sequence is synthesized)
ttcctagagaggagttctccgccacacccgacaccacacacttccaacttctgcggtgcttccctctcacttatctccacccccaatccttatccccgctcgtttaatcacacatttatt

SEQ ID NO: 1021564 - DNA, 120 bp, Artificial Sequence
  ENSG00000283906_0 (sequence is synthesized)
atgaaaaacctgtggttcttcctccccctggtggcagctcccagaagggtcctgtcccaggtgcagctgcaggagtggggcccaggactggtgaagccttcggagaccctgtccctcaca

SEQ ID NO: 1021565 - DNA, 120 bp, Artificial Sequence
  ENSG00000283906_1 (sequence is synthesized)
attggatacatctattatagtgggaggagctactacaccccgtccctcaggagttgagtcaccatgtcaatagaaacgtccaagaaccagttttccctgaagctgagctctgtgaccgca

SEQ ID NO: 1021566 - DNA, 120 bp, Artificial Sequence
  ENSG00000283907_0 (sequence is synthesized)
gggctctgagagctgcggggaagggtgaaggtggaagatggaggccttgtgtggaggggtccttggtagaagaccccagaaaaggtgttggttgatatagacagcaggacggtggccatg

SEQ ID NO: 1021567 - DNA, 120 bp, Artificial Sequence
  ENSG00000283907_1 (sequence is synthesized)
gaagtcagaatccactaaggagtgtgtaacaactcacctgccgaatcaactagccctgaaaatggatggcactggagcatcaggcccatacccggccatcgccagcagtcaatggaatgt

SEQ ID NO: 1021568 - DNA, 120 bp, Artificial Sequence
  ENSG00000283907_2 (sequence is synthesized)
tcttggggccgaaacgatctcaacctattctcaaactttaaatgggcaagaagcccagctagctcagtcggtagagcataagactcttaatctcagggttgtggattcgtgccccatgct

SEQ ID NO: 1021569 - DNA, 120 bp, Artificial Sequence
  ENSG00000283907_3 (sequence is synthesized)
gggtgccagatgaagagaatttgacaagttgatcctaaaagtcatgtggaaatgaaaaggatgcagaataacctagcaatgttgaaaaagtaaaataaagttggaggacttccagttacc

SEQ ID NO: 1021570 - DNA, 80 bp, Artificial Sequence
  ENSG00000203498_0 (sequence is synthesized)
ggagatgctaaatttgatcacttggttaaggtggtgaatgcatgtgattttgacctggagaagattatttttaaaaataa

SEQ ID NO: 1021571 - DNA, 120 bp, Artificial Sequence
  ENSG00000203498_1 (sequence is synthesized)
agattgagaccatcctggctaacacgatacaacctttcagtcagcatgagtcccaagggaagatgacttggagcggagcctcagcgcatccacaatggtcgtagggcatcaatatatgag

SEQ ID NO: 1021572 - DNA, 120 bp, Artificial Sequence
  ENSG00000203498_2 (sequence is synthesized)
gtttaaccagctttgagacctgggcctgagtctgtctaaggctgaggctcttgcctcatgttggaaaaccagctacattggaaaacctcctgcatatcctccacagcatttgtgatctct

SEQ ID NO: 1021573 - DNA, 120 bp, Artificial Sequence
  ENSG00000203498_3 (sequence is synthesized)
tccctgagctcacagaagcacccagcaaatgcttacaaatgactaactgaagggcaatgacttgagcacagctgctgaatatgtgaatgaagaaatgactacagccagttcctgacttgc

SEQ ID NO: 1021574 - DNA, 120 bp, Artificial Sequence
  ENSG00000203498_4 (sequence is synthesized)
aacagttccacttacgattttttttcctttacaatggtgcaaaagcagtaggtattctctacacatctcagcatatggggatatgtctgatatccccatcctaaattgaaaataccataa

SEQ ID NO: 1021575 - DNA, 90 bp, Artificial Sequence
  ENSG00000203496_0 (sequence is synthesized)
gtgactctcgggcagagacagtggtggggcagccacggcagcgtcaaaagtctgagccagctggaggacaagttcgagcatcttaaaatg

SEQ ID NO: 1021576 - DNA, 120 bp, Artificial Sequence
  ENSG00000203497_0 (sequence is synthesized)
gatgcccgcagtccggggcgttggggagggcgcggctggacctgcggggctacaagaaggcagccggacccccgcaccgcaggcccggacctgacaggaccgcgacccccacgcctccgc

SEQ ID NO: 1021577 - DNA, 120 bp, Artificial Sequence
  ENSG00000203497_1 (sequence is synthesized)
gcctccgcccccgccccctcccatcttgcggctgcctccgaggagggatgggggagagggcgcagtcttcccgagcgtgtgagccgcgcctactgggtttcatcatgttgtccaggctgg

SEQ ID NO: 1021578 - DNA, 120 bp, Artificial Sequence
  ENSG00000203497_2 (sequence is synthesized)
tcctgggctcaagcaatcagcccacctctgcctcccaaagcgttgagattacaagcgtgagccaccattcctggaccctcgtagtttttctggagcctcgtgatttgatatgatcttcct

SEQ ID NO: 1021579 - DNA, 120 bp, Artificial Sequence
  ENSG00000203497_3 (sequence is synthesized)
acctggcattatttcatctgagtccctgtcctagcccttctgcccattagactgtaaccttgtttagggaaagacctgtgtcttactcatctgtgattttgttgttgttgttgttttgag

SEQ ID NO: 1021580 - DNA, 87 bp, Artificial Sequence
  ENSG00000203497_4 (sequence is synthesized)
gttggggtcaagccatcctcccacctcagctttccaagtagctgagactacaggcctgtgccaccacacccagctagttttttgtat

SEQ ID NO: 1021581 - DNA, 120 bp, Artificial Sequence
  ENSG00000247228_0 (sequence is synthesized)
gactccagtcctgctgggatcacgtccgcctctagaaaaacaggtggcgtagcaggtgggcagcacgttgccatgatgtgccgtggcccggccgtggctggcgtgatcccaccagagtga

SEQ ID NO: 1021582 - DNA, 120 bp, Artificial Sequence
  ENSG00000247228_1 (sequence is synthesized)
gctggagcagatctgcaccatgggccaagtttctcagaaaatacatagcttcctgtgggctgcagcctaatgcccacgttcctctcggggaagaccaaaggttattcaaccagggcaaag

SEQ ID NO: 1021583 - DNA, 120 bp, Artificial Sequence
  ENSG00000247228_2 (sequence is synthesized)
gacagccttgcaaaccaactacgtcctccttctggagtttgtgtgacccctggcccctgagcccacaccctctcggagcggggttccaactccgtggaagctctgctgagatgcagacag

SEQ ID NO: 1021584 - DNA, 120 bp, Artificial Sequence
  ENSG00000247228_3 (sequence is synthesized)
gaaaataagaaggcagaagatggtctgcaaaggataaaaacaggtgcatctaagaatgagaaaaatggctcatgaagaaatgtgtaactctccaagagatgcagacactctgctcagaga

SEQ ID NO: 1021585 - DNA, 120 bp, Artificial Sequence
  ENSG00000247228_4 (sequence is synthesized)
agtcaagaaccataaacaactcttcatgtttcatggacaaagggaaggcaaaggcatacaaaaatactcagttgtcttgaaaagtgtactggtagtgatcagggctacaaaggcgagccc

SEQ ID NO: 1021586 - DNA, 120 bp, Artificial Sequence
  ENSG00000247228_5 (sequence is synthesized)
tgtactgacaatggaggagccttacaactcagcaccttaaattgttggcctgaagtggtggcggggagggaggcgctgacggagagacccatggctcaccacttattgcgtgtacacaag

SEQ ID NO: 1021587 - DNA, 120 bp, Artificial Sequence
  ENSG00000247228_6 (sequence is synthesized)
gcctggggcaagcctcacaagtctaccatttcttccactcaactgtgcttctcctgaatccatgtgcctgaaatgacatatgcaagatggctttggaggggtgcaaatgctacgtgtttg

SEQ ID NO: 1021588 - DNA, 120 bp, Artificial Sequence
  ENSG00000247228_7 (sequence is synthesized)
gccccttaactcaggcctgaaacagtcaaatcaaatgcccaactcaaagcacttgttaaagaactgaggaaaactttgctccttctgaatgacaacacgggccaccgagaagatacctgc

SEQ ID NO: 1021589 - DNA, 120 bp, Artificial Sequence
  ENSG00000247228_8 (sequence is synthesized)
aactaggagcaactgcgataaagcttcacttacgcatgacttccatgacccggtggcgcagaaaggtgcggctgctctggagggctccaaaacgtttcaggtccaattcccaaacgtttt

SEQ ID NO: 1021590 - DNA, 120 bp, Artificial Sequence
  ENSG00000247228_9 (sequence is synthesized)
ctgagggataaccatgtaccatccattcggcaaggtacctatatagacagagggcacgtgttggggctcaggtgtgagatttgagaaaattaatattctacaaatcgagaacaaacagaa

SEQ ID NO: 1021591 - DNA, 120 bp, Artificial Sequence
  ENSG00000247228_10 (sequence is synthesized)
tcaaaagatcctaaattgccatagaccagctgaatagttttgggcactttccttaacttttctggaagaaacgaacatgggtctgtgtactgctctcaaaagactactatgaggatttta

SEQ ID NO: 1021592 - DNA, 120 bp, Artificial Sequence
  ENSG00000247228_11 (sequence is synthesized)
actgctctcaaaagactactatgaggattttaccccagatgataagattccctaggaggtatttaacatagaagccagccagacacattggctgatgcctgtaatcccagaactttggga

SEQ ID NO: 1021593 - DNA, 72 bp, Artificial Sequence
  ENSG00000247228_12 (sequence is synthesized)
gaggcaggagattggtctctacagaaaaaaaaaagtttcaaagtgagccaggtggctcacacctgtaatccc

SEQ ID NO: 1021594 - DNA, 120 bp, Artificial Sequence
  ENSG00000247228_13 (sequence is synthesized)
aggggtgcaaatgctacgtgtttggaagagcagaggaggcctgcagctctcagtcacctgtctccatcttcggaggagggcgtcgcgaccaatgaaatccatgccctaagaaagaaagga

SEQ ID NO: 1021595 - DNA, 120 bp, Artificial Sequence
  ENSG00000247228_14 (sequence is synthesized)
aacgccgagtcatccagcgacactcagaccctcggcacagagagcagcaccgtgggaagggtcccctggtgtcactgcaatggggcacagccgcctcctcccacaaccctgccagctttt

SEQ ID NO: 1021596 - DNA, 120 bp, Artificial Sequence
  ENSG00000247228_15 (sequence is synthesized)
gccagaaatgaaggctatgggtcctgtcttcagtgaaacactgaacgctctcggaaagctcccatcattcttgcatcgctactgccaccaagacggtggcaagggaggaggctaactttc

SEQ ID NO: 1021597 - DNA, 120 bp, Artificial Sequence
  ENSG00000247228_16 (sequence is synthesized)
aaatgcatgcaacggcagagttcctgaatgagagcttttctggcttcagtaccaatgatcacagaaggaacatcttcctgatgcaagcttagatggaagtcaatgaccctggcagtgcta

SEQ ID NO: 1021598 - DNA, 120 bp, Artificial Sequence
  ENSG00000247228_17 (sequence is synthesized)
cgtggtgagcacaaaatgctatgacaggtaattgcagagagaaaaaagcacccaactctgtaaagccaagtccagtcacccattcacaagagtccaaaatccttcaaatctctagggaca

SEQ ID NO: 1021599 - DNA, 120 bp, Artificial Sequence
  ENSG00000247228_18 (sequence is synthesized)
gaagacaaacgtgctgcccagaatgagctgagacacaaggcaaacccttggaaatgacacatggatgaggaggctgtggttgtccctccttattcctgctggatttgcagccacggctct

SEQ ID NO: 1021600 - DNA, 120 bp, Artificial Sequence
  ENSG00000247228_19 (sequence is synthesized)
ggatctggggcatctactggcctcccctgttcactcaagaggccactgcctctcaggagtccagaatgctctgatatctgacaccggtggtcaggaagttatgctgccctctcctcttga

SEQ ID NO: 1021601 - DNA, 120 bp, Artificial Sequence
  ENSG00000247228_20 (sequence is synthesized)
acagctaagatgcttggacactagacagaggcaaagcagttatgccagaagcaggggagagtcattcactgtcagatctgtctgttcaaagagctcacattagaccaatcacagaaaacc

SEQ ID NO: 1021602 - DNA, 120 bp, Artificial Sequence
  ENSG00000247228_21 (sequence is synthesized)
accagactcacacagcttgtatttgaatgaaccaggagagacttcaaggatcaactctaaagtgctagaagagaaatctgtgtttggggcactgaataaacaagtgatgtcctagaagat

SEQ ID NO: 1021603 - DNA, 120 bp, Artificial Sequence
  ENSG00000247228_22 (sequence is synthesized)
caacaccccatcagtcttaggagtatgaccctattcatggacaaggggtttcaatggacagcctgagtgctcagccccccatcctcctctcctagcaagacaagcagtctgttgctcaga

SEQ ID NO: 1021604 - DNA, 120 bp, Artificial Sequence
  ENSG00000247228_23 (sequence is synthesized)
gggggaaactgatgtcatttaacaggaggtcaggatttctggttctacttcaacaaacagtgcataattttggacacagcatcagatttcctgacttcttacaaaggacagctaattaaa

SEQ ID NO: 1021605 - DNA, 120 bp, Artificial Sequence
  ENSG00000247228_24 (sequence is synthesized)
aacgtgtcaatctgtagtaattagttggagattaacaagggcagaagagaatccaagtcttaaaactctatgtgggatacatttctgatgaagcttctatttgactaatatactgtgatg

SEQ ID NO: 1021606 - DNA, 120 bp, Artificial Sequence
  ENSG00000247228_25 (sequence is synthesized)
atggcactattcgattttaaactatggagacagcttttattatttcgatttggatcctggtaagtggtgatactgctatgtaacagttaaagcacaaatgtattgccatagttaaggttg

SEQ ID NO: 1021607 - DNA, 120 bp, Artificial Sequence
  ENSG00000205791_0 (sequence is synthesized)
ggctacgcaagaccttcagttccggattaggaggccccgccccccggcccgagggaggggcggagagacccgctcctgcgacttagggcgatgccaccttaaagggcttgacctcctcga

SEQ ID NO: 1021608 - DNA, 120 bp, Artificial Sequence
  ENSG00000205791_1 (sequence is synthesized)
agccagaactgcggaagaggatggagaaagaaacgctagatagacccaggattcgaacccacaacagcttggatgcaaagctcattttgaattctgaagagctgggagtttagcagtgga

SEQ ID NO: 1021609 - DNA, 120 bp, Artificial Sequence
  ENSG00000205791_2 (sequence is synthesized)
cgaccaaacaaaaaaataccagaagacggtgaaagcagcagctggaaatgagagaaaaattaagaaatagaaaatgctgtttcatgtattagggagtgcacatctttaaagagaagtgaa

SEQ ID NO: 1021610 - DNA, 120 bp, Artificial Sequence
  ENSG00000205791_3 (sequence is synthesized)
gaacctttttggctaggcgctttctggggaccttggcagttatcaacaagtcactctgaaactaacagaaggtgaggagggagtaatccagaaaggaaactgccatttttgctagggcaa

SEQ ID NO: 1021611 - DNA, 120 bp, Artificial Sequence
  ENSG00000205791_4 (sequence is synthesized)
gaaagtagacctagcaatgcaatgccatcaaggagttagctggctctagcgttctccgaactttgcaactcattttatattacattgtctgcgtcaagaaatttcaagtaaatgccttga

SEQ ID NO: 1021612 - DNA, 67 bp, Artificial Sequence
  ENSG00000205791_5 (sequence is synthesized)
tacattgtctgcgtcaagaaatttcaagtaaatgccttgagattttatatgtataaaatgtagtctc

SEQ ID NO: 1021613 - DNA, 120 bp, Artificial Sequence
  ENSG00000205791_6 (sequence is synthesized)
agaagtgtcaagttgactaaatgatttttaagtcccttccactctactatatcacaataatttcccctattttaccttatttaattttcacaacaaccctgcagcctgtaagtaggtgac

SEQ ID NO: 1021614 - DNA, 120 bp, Artificial Sequence
  ENSG00000205791_7 (sequence is synthesized)
tcctccatggtcagcaggtggtcagtggtcgaactatttaggactatctgatgctctttcctctgctcaccattgcaatacaatgagaaaaatgcaaatgaatctaagtacagtgttctc

SEQ ID NO: 1021615 - DNA, 120 bp, Artificial Sequence
  ENSG00000205791_8 (sequence is synthesized)
tgggaatatgaagatagaactaaaaactgcctgagagatcagggcaggcttctagaaagttgtgtctaactagtcttgaggtttacataaaccacaccaggctgatgggactgggaaggg

SEQ ID NO: 1021616 - DNA, 120 bp, Artificial Sequence
  ENSG00000205791_9 (sequence is synthesized)
cccactaagcagtgagaccattcccttttggagagtccttgcatcccctcccagatttcctctttgaggggaaggtgagagaggaggtaaaaggggtgaggaatggagaataactcattc

SEQ ID NO: 1021617 - DNA, 120 bp, Artificial Sequence
  ENSG00000205791_10 (sequence is synthesized)
tggttcttgtttccccttttccacataaaagtatatttgtcttgtgttccatacaccagtccatactgatgtgatggtgttttttatgcttccttttgaataaacatttcattcttaaaa

SEQ ID NO: 1021618 - DNA, 120 bp, Artificial Sequence
  ENSG00000205790_0 (sequence is synthesized)
cccttagcgcagaagccccgcccacctagactgagccccacgttgctgccaaggctccacccactcccccactctcctcccgctcggtcccccaagcctggctggctccactcactctag

SEQ ID NO: 1021619 - DNA, 120 bp, Artificial Sequence
  ENSG00000205790_1 (sequence is synthesized)
cacccttcactgctgcctcctcagggaatgcttggccccagcgccttaggaaggagcctgctagggccttcagcactcagcggtttcttctacgcaatttctcagtttcaaataaagccc

SEQ ID NO: 1021620 - DNA, 120 bp, Artificial Sequence
  ENSG00000205790_2 (sequence is synthesized)
gtctgcggggcaatttcggccatccagacggtgaccggggcacccgcgatggccacctgagggacacagcagacagatgggggcagagagagagagagaaacaggcgtcgggtcctacag

SEQ ID NO: 1021621 - DNA, 120 bp, Artificial Sequence
  ENSG00000205790_3 (sequence is synthesized)
ccagcatcagccgctgtcccggggccgccctggagcccgtgaggagcgctcatgcacatggggccggcaaggaaggggccctcagaccgcgtggcccccgtggacggtgcgtggcatggg

SEQ ID NO: 1021622 - DNA, 120 bp, Artificial Sequence
  ENSG00000205790_4 (sequence is synthesized)
cccgtggacggtgcgtggcatgggggtgggcagggcgccacaggcgggcaggtgcggcccctccccgccgccgcagagggccgggtcccactgcccgtctgcctcctcctcctcctcatc

SEQ ID NO: 1021623 - DNA, 120 bp, Artificial Sequence
  ENSG00000205790_5 (sequence is synthesized)
tgccgccggcctggggcccccccgccgctctgcacaccatgccccacctctgcccatccgaggccggggtcccgggctcagcctcccacagagagctgctggcggggttttgtgcagccg

SEQ ID NO: 1021624 - DNA, 120 bp, Artificial Sequence
  ENSG00000205790_6 (sequence is synthesized)
gatgccatcctgcggtcggcggtggcgggcaatgaggaggggggctcggccccgtggggctgctgcagggagaaacagccacgtggcaaggcccctgccgaggcgcctccccgggcgtct

SEQ ID NO: 1021625 - DNA, 120 bp, Artificial Sequence
  ENSG00000205790_7 (sequence is synthesized)
ctccctcttggatgaaaagtggctcgctggaagccccctgtccttccaggccctgctaaccctgcctgctatctggggatggctggacagatccagcagccatcttgctctgccacctcc

SEQ ID NO: 1021626 - DNA, 120 bp, Artificial Sequence
  ENSG00000205790_8 (sequence is synthesized)
caggtgagtggctctgggagccacgtcccctctgagggcgtcagtttgcccatccctaataaagggacattaacaggaagaggacccattttctagagggcacaaggaagaaaaagacgg

SEQ ID NO: 1021627 - DNA, 120 bp, Artificial Sequence
  ENSG00000205790_9 (sequence is synthesized)
gtgcccaggcatgtgcaagggcacaaagaatggctggtgccatcgccgttgtcactaccagccacatccccaccaccgccactgccacgatttcaatgctggtgtcccctctgaagtccg

SEQ ID NO: 1021628 - DNA, 120 bp, Artificial Sequence
  ENSG00000205790_10 (sequence is synthesized)
tgctgagatcactactgcggccttcaagcgactgatccatggggcccactcatgtgaatgggatgaggggcccttataaaagggcctgatggagggaggccacggcttttccgctccttg

SEQ ID NO: 1021629 - DNA, 120 bp, Artificial Sequence
  ENSG00000205790_11 (sequence is synthesized)
caacccctctgccgtgtaggaagcagcacagggcctctctggagggttgctgaccaggcaacctcgtgggaacagagagcagccctccccgacacagccctgccttggccttggacctcc

SEQ ID NO: 1021630 - DNA, 120 bp, Artificial Sequence
  ENSG00000205790_12 (sequence is synthesized)
caaaggggccgagatgatcgccatcaccaccgtcgtcatcaccagtgtcagcacaacttgtctctgtccctgcagggcgcagcccagagctgagcagcaaagcatacatccccttttgtt

SEQ ID NO: 1021631 - DNA, 120 bp, Artificial Sequence
  ENSG00000205790_13 (sequence is synthesized)
ctaaaagggcgcctcattgagcctgcgtcaccccagccagaagtgcccttctgcgggtggtattccagagccgctcccatgccctgcacccacacggcccagggctcccttcccgagacc

SEQ ID NO: 1021632 - DNA, 120 bp, Artificial Sequence
  ENSG00000205790_14 (sequence is synthesized)
caaaggacccagagcaacagggaggagttgttaccatttggtttttcagggccccttcgaaccgaagccctcgctgacaggagcccctgccgtcaatcacaaccacggcgtagcccaggg

SEQ ID NO: 1021633 - DNA, 120 bp, Artificial Sequence
  ENSG00000205790_15 (sequence is synthesized)
aggccagtgtgttgagccgcaagtacttgatgcctttgaaggagttattcaccagctgcacctgtggggaggtgagggccagcagtccagcacgagatgccgggcaggacgggcctggca

SEQ ID NO: 1021634 - DNA, 120 bp, Artificial Sequence
  ENSG00000205790_16 (sequence is synthesized)
ggggagatgccggtgggctggggaccgggccgggctggggcctcagagcctaatgaaagcacctgtgccccggaggctctggatggacacctgggagtggcaaggcgggaggggcccata

SEQ ID NO: 1021635 - DNA, 120 bp, Artificial Sequence
  ENSG00000205790_17 (sequence is synthesized)
ctcgggaccctgctagggagggggaagggccactgtcaggctctttctcagctgggccactgccccagtcctgcctggaacaactactctggcatgatggacattggggtggctccttct

SEQ ID NO: 1021636 - DNA, 120 bp, Artificial Sequence
  ENSG00000205790_18 (sequence is synthesized)
cgggtggggccatctgggcactgcggggtgctgagaagccactccaggccaggagaactcgcagtggtgatgaaccacaaagtacccagacatcgccccgtatcctctgtggggacagag

SEQ ID NO: 1021637 - DNA, 120 bp, Artificial Sequence
  ENSG00000205790_19 (sequence is synthesized)
ctgctctgggtaagatgtgcgcctaagatggtccaactgccaatctgctgcctgcttttgacccctgctccaggaattgggcccagggcccatggccacctccataccaacctggagact

SEQ ID NO: 1021638 - DNA, 120 bp, Artificial Sequence
  ENSG00000205790_20 (sequence is synthesized)
aggggacttcctagaggaacaagggagagtcagcaggcggagggggaaggggaggccatccaggaagggcggggagcgtgcaaacgggcacagagaaaggagggtgaggggccccgagga

SEQ ID NO: 1021639 - DNA, 120 bp, Artificial Sequence
  ENSG00000205790_21 (sequence is synthesized)
ccctgtgtagtcagggcaggcggggtgggctggggcaccaggcaggtagccggggagcctcctctggttgactgttctacagctggcacttgagtggggatggggagtcctcgggtggat

SEQ ID NO: 1021640 - DNA, 120 bp, Artificial Sequence
  ENSG00000205790_22 (sequence is synthesized)
ggtggggtgggggcctggggagcaggtgtgcactcacctgggggcctccatatacaaagaggacggtggggtgcttcttccctggctgcaaggcgtggggcttgtagatcatgccgtaga

SEQ ID NO: 1021641 - DNA, 120 bp, Artificial Sequence
  ENSG00000205790_23 (sequence is synthesized)
gccgcacatccgagcgcgtgtggaaatggaagatctctggaggaacataatccggggggcagcctgcgggagacagggcggctatctggctgcccggggaagccacatccagctgacacc

SEQ ID NO: 1021642 - DNA, 120 bp, Artificial Sequence
  ENSG00000205790_24 (sequence is synthesized)
cttgttctcctgcccaccccaagccttggagggtggaccaaagcaccccctcttttcctgggcttcccgagagttgataattgaaaaaaacgtttttttttcattaaataagatttgtac

SEQ ID NO: 1021643 - DNA, 120 bp, Artificial Sequence
  ENSG00000259555_0 (sequence is synthesized)
agagacctggctggcctccagaggggccaccagagatgggcctgtctcctttgcactgggggagaacctagagaaacgcctgtgtgcccagggtcctggcctccctcgccgatgcctgct

SEQ ID NO: 1021644 - DNA, 120 bp, Artificial Sequence
  ENSG00000259555_1 (sequence is synthesized)
ttcacacccctaggcctggctggctcacactgcattcattccctggcagagacgggctggatcagaaggcttcggagatcagcagaggctctggagttggaaatgtgggcagcaacgggc

SEQ ID NO: 1021645 - DNA, 120 bp, Artificial Sequence
  ENSG00000259555_2 (sequence is synthesized)
atgctgacgtcagtgacccagtttgtcaaggccctgtcaatggtgtacctaacgtgcaggctaatcctgtgtcaagccaaccccgacacctgcaaccaagcacgcctgcacctgtcccca

SEQ ID NO: 1021646 - DNA, 120 bp, Artificial Sequence
  ENSG00000259555_3 (sequence is synthesized)
cacctgtccccaagactcagcaggcacacacagctctctccacagagcactccttggctttcctgggtttctttttaacagccctaatttcaagcgggggtgtgtgtgtgtgtgtgtgtg

SEQ ID NO: 1021647 - DNA, 120 bp, Artificial Sequence
  ENSG00000259555_4 (sequence is synthesized)
tgtgtgtgtgtttcccccttttaatatttttgtgctatttatagtgaccagttaatcagggtgggtaaaagtactgaagatgagaagcggcgtgggctggcttaggggcaggcatgctct

SEQ ID NO: 1021648 - DNA, 120 bp, Artificial Sequence
  ENSG00000259555_5 (sequence is synthesized)
agaagggaagaaagcctcttttctccaaccatccataagaaagtcaatcaaccaataagccggccatgtgctcagtgcagggcaagaaactaggaagggcaagaaagtttaaggatgaca

SEQ ID NO: 1021649 - DNA, 120 bp, Artificial Sequence
  ENSG00000259555_6 (sequence is synthesized)
ggcagatctgggtacagagcctgggccagctgtttgacactggccaagtcagtgaacctctctgagcttcgctttgaaagcctccttattgtaaatgggggttctactaaaagccacttc

SEQ ID NO: 1021650 - DNA, 120 bp, Artificial Sequence
  ENSG00000259555_7 (sequence is synthesized)
acaggattccagggagggttagcagtaatgtatgtcagctcccagcagagcacctgatgtgtgattggagcttaatgaacactggtgattataataactggtcctgcctggctccttccc

SEQ ID NO: 1021651 - DNA, 120 bp, Artificial Sequence
  ENSG00000259555_8 (sequence is synthesized)
tggtgaggtcttcagaagagttcagggtgggtgccggctcagccagggatgcaggagaccagtacttctcaatctagaatgtgcacacgaaccaccagggattggttaaaaatgcaggct

SEQ ID NO: 1021652 - DNA, 120 bp, Artificial Sequence
  ENSG00000259555_9 (sequence is synthesized)
ccaatatgtctccgccagagatcctggctcagtcagaaagggtggtcccacagtgttgcccacgtggttctcacttagccagcagggccccaggctgcacattaatgattgggaaccaat

SEQ ID NO: 1021653 - DNA, 120 bp, Artificial Sequence
  ENSG00000259555_10 (sequence is synthesized)
gaattaggtgatgctgacctacagaatgatttaacctaagtaatagcgtgatcgaattaacgttttagaaagtgaaatctgagagtcctatagagctgtgcttctcaaactgcaatgggt

SEQ ID NO: 1021654 - DNA, 120 bp, Artificial Sequence
  ENSG00000259555_11 (sequence is synthesized)
ctgggaatctcctggggacctggttaaaatgcaggtttggagctagcaggtctggattggggcctgagactctgcatttccgataagctcgcaggcgatgccggtgctgctggtccaaga

SEQ ID NO: 1021655 - DNA, 120 bp, Artificial Sequence
  ENSG00000259555_12 (sequence is synthesized)
actacaccagaagaatatctcatgtcctatattccatttgtttgcatttctcttcttttcttggcacagtgtgattctggggctgttcctgctcttttctctgtgggctaactaatggaa

SEQ ID NO: 1021656 - DNA, 120 bp, Artificial Sequence
  ENSG00000259555_13 (sequence is synthesized)
gttcctgctcttttctctgtgggctaactaatggaatgccagcgcttctccttgagaatgcagcgagtggaaagcaatctcaaaacggtcaggttcggtggctcaagcctgtaatcccag

SEQ ID NO: 1021657 - DNA, 120 bp, Artificial Sequence
  ENSG00000255173_0 (sequence is synthesized)
ccggggcattatccagctcctccagaagctgcggccgccgggcgccgggccggagctgaggcctgcttccccaggctcgtcctcggtctcgcgttgctgacgcagccggcgtagggcgct

SEQ ID NO: 1021658 - DNA, 120 bp, Artificial Sequence
  ENSG00000255171_0 (sequence is synthesized)
tcaccctcctgagtagctgggattacagagtgaagccaaaggcacaggaagcacagctggaatggggacataggaacgcgggggctcccatgagttgaccggacaactgagagatggcaa

SEQ ID NO: 1021659 - DNA, 120 bp, Artificial Sequence
  ENSG00000255171_1 (sequence is synthesized)
aaagttaattttggcaaatttctgagaaatgaaaagacgtatcaacaagaaatttcatttctaagaggacaaaatatgctatgttttcgtgaatccatgattcgacctgaagaagaagga

SEQ ID NO: 1021660 - DNA, 120 bp, Artificial Sequence
  ENSG00000255171_2 (sequence is synthesized)
aagaactggacatccagatgagtacattgatatcgaagaaaaaaagaggagggagcacacaggtgagcaggtgcaggaaccagccggacaatttgccgccagcaggaatgaactccaagc

SEQ ID NO: 1021661 - DNA, 120 bp, Artificial Sequence
  ENSG00000255171_3 (sequence is synthesized)
agggagaagtccaagcttcctcatgaagaggatcacatcaagagtgaagccaaaggcacaggaagcacagctggaatggggacataggaacgcgggggctcccatgagttgaccggacaa

SEQ ID NO: 1021662 - DNA, 120 bp, Artificial Sequence
  ENSG00000255171_4 (sequence is synthesized)
taaagaggcaattaaggtaaaatgagataatacggcagaccccactcaatatgattgatacttataagaagaaagattatgacacacacagagattgagaggggacactgtgaagataca

SEQ ID NO: 1021663 - DNA, 120 bp, Artificial Sequence
  ENSG00000255171_5 (sequence is synthesized)
gggagatggcagctgtctgcaggcccaggagaaaggcctcagaagaaaccaaacctgctgacaccttgattttgaactctagtctccagaactgtaaaaaaataaatttctgtcatctaa

SEQ ID NO: 1021664 - DNA, 120 bp, Artificial Sequence
  ENSG00000255171_6 (sequence is synthesized)
aagaaatagccaatttgccaagcctagctcatgcgcctacagcgttactacagagcatgaggaaagaaaatatttgaacttgcgtattttttagtggtaggctatgttgttataaagtct

SEQ ID NO: 1021665 - DNA, 120 bp, Artificial Sequence
  ENSG00000255171_7 (sequence is synthesized)
ctcatatggagagcacgcaaaatatgtcaactttgcactataatgttaaaagaatacacaattccagaagtcatctgtgatatgtcatgccaggcacatagtaggtacacagtttttggc

SEQ ID NO: 1021666 - DNA, 120 bp, Artificial Sequence
  ENSG00000255171_8 (sequence is synthesized)
gatgctaaaaagatcgaaagcatgcagtgtctcttgattcataagaagcaaagaaagccaactgcctgcactcagcaaggaccagagagagttgtggctcactatctgcaaaagctgcag

SEQ ID NO: 1021667 - DNA, 120 bp, Artificial Sequence
  ENSG00000255171_9 (sequence is synthesized)
tttttgatattccaatccccagtggggaatctgccagagtgaagccaaaggcacaggaagcacagctggaatggggacataggaacgcgggggctcccatgagttgaccggacaactgag

SEQ ID NO: 1021668 - DNA, 120 bp, Artificial Sequence
  ENSG00000255171_10 (sequence is synthesized)
cttacagtcatgatggaggatgaaagggcagcaggcacatcacacggccagagcaggagcaagagagagaaagtgcagctgcaaatttgagcacagaacctgcaagaacctcttgtgttc

SEQ ID NO: 1021669 - DNA, 120 bp, Artificial Sequence
  ENSG00000255171_11 (sequence is synthesized)
gcaaatttgagcacagaacctgcaagaacctcttgtgttccattgcctcccagatgccctagacttgttgaatgaagccacggacccttgccgtgagtgttacagctcttaaggtggcgc

SEQ ID NO: 1021670 - DNA, 120 bp, Artificial Sequence
  ENSG00000255171_12 (sequence is synthesized)
gtttcttccttctggcgggttcgtggtttcgctggctcaggagtgaagcagcagaccttcgagctcatatattaaaatcctgaccccgagtacttcagaatgtgactgaatatggagaca

SEQ ID NO: 1021671 - DNA, 120 bp, Artificial Sequence
  ENSG00000255171_13 (sequence is synthesized)
aaccagccggacaatttgccgccagcaggaatgaactccaagcaggccccactgcagtatccagagctagtccatcaggctctaaatttttaaacgtgtaagtttcagaatcacagaaat

SEQ ID NO: 1021672 - DNA, 120 bp, Artificial Sequence
  ENSG00000255171_14 (sequence is synthesized)
gaacagctaaagctttgaagcaacgagactttagatcctctctcctcattcctattttcctcatcatatcaacctttttaagaagcagaagaatgatgaaagagatggggccaacactct

SEQ ID NO: 1021673 - DNA, 120 bp, Artificial Sequence
  ENSG00000255171_15 (sequence is synthesized)
cagaggtgagaaaaacagctgagcactgtggaggcggaagatacagagagctccattgcagccacagtgatggatggcatcgatagagaaaatcccacaaaagagcttgacttttctcat

SEQ ID NO: 1021674 - DNA, 120 bp, Artificial Sequence
  ENSG00000255171_16 (sequence is synthesized)
gaatctgcagtttcttccgaaaaagtgaaattttatcaaatgttgagacccagaaaagttatctgtagacttcagcctttgcaaaaaaatggaagaaacaattgagaagcagacacagaa

SEQ ID NO: 1021675 - DNA, 120 bp, Artificial Sequence
  ENSG00000255171_17 (sequence is synthesized)
gtcaaactttttcaataagctaaattggaagaaagggcttagcacacggtgtttcctaatctttcctgccaaccatttatttaagctcagatcttgggaagcccatctaagggcttccaa

SEQ ID NO: 1021676 - DNA, 120 bp, Artificial Sequence
  ENSG00000255171_18 (sequence is synthesized)
agagaaaatgctacttatcaagaatcatgcctttcctgttgcagagtagaagtaaacaaaatcaagaaatctccaatgctcacacaattttaacaggtttggccaatacaacagagacgt

SEQ ID NO: 1021677 - DNA, 120 bp, Artificial Sequence
  ENSG00000255171_19 (sequence is synthesized)
gaaaaccaacagatgtcccccaccaatccaggaatgagtgaattcttgctctatcaggacctgtgagacttccctcaagagctggttgttaaaaagagcctaggacctcttccctctctt

SEQ ID NO: 1021678 - DNA, 120 bp, Artificial Sequence
  ENSG00000255171_20 (sequence is synthesized)
gcttcctctcttgccttgtgatcttcacatcctgactctccttcaccttccactctgagtggaagtttcctgaggctctcgcaagaagcagatatcggcaccatgcttcttttacagtct

SEQ ID NO: 1021679 - DNA, 120 bp, Artificial Sequence
  ENSG00000255171_21 (sequence is synthesized)
tcatagtcctgagaacaagagtgtcatctgtcaagattctggaaatttaaataattctatgccaactctgatggattcaaagtgatctgaagacagacaaaatggatgccccaactccca

SEQ ID NO: 1021680 - DNA, 120 bp, Artificial Sequence
  ENSG00000255171_22 (sequence is synthesized)
gaattcagactggaaaagattgaaatatctgtgtagttcatatatctgaaacactgacttcatctcactcatgagaattcaacagttatgctaaagattgtgttatgggagctcctagag

SEQ ID NO: 1021681 - DNA, 120 bp, Artificial Sequence
  ENSG00000255176_0 (sequence is synthesized)
gacaaggaaactaggagtaggagaagctacacattttgcccaaagcctcccattatataagcttcagagtcagaattggaacccaggcctgttggcccaaatcccacgttccttcgactg

SEQ ID NO: 1021682 - DNA, 120 bp, Artificial Sequence
  ENSG00000255176_1 (sequence is synthesized)
tactgcactgaggctaggggcgggcacttctctagcctcttcctctttctttctggagggaatgcggtagggagctgtagatcagctaatctcatccctttggggttctggtgagtataa

SEQ ID NO: 1021683 - DNA, 120 bp, Artificial Sequence
  ENSG00000255176_2 (sequence is synthesized)
gctccagggagtttgggagggcttggcagtagtggattcctcttcccacacccaccctgcctcctgggaaaccggagctcagcccctaggacctggggtgtcacattcttccccatgctc

SEQ ID NO: 1021684 - DNA, 120 bp, Artificial Sequence
  ENSG00000255176_3 (sequence is synthesized)
ctccttaggaaccttatccagctttcatcctcagaccctagtgtcccaccctaggctctgtctgccctggtgccctgtgctcccctgccctttccactctgattcagagtgactcagagt

SEQ ID NO: 1021685 - DNA, 120 bp, Artificial Sequence
  ENSG00000255176_4 (sequence is synthesized)
actggtctgggagtccaatagatgattctaatccgtgctctaccacttagctggctaagagatcttagctcctaaatatgttggtgttctcacctataaaatgggtataaatgcacctgc

SEQ ID NO: 1021686 - DNA, 120 bp, Artificial Sequence
  ENSG00000255176_5 (sequence is synthesized)
ggttcttagtagatggcagctcttgcggtgaggattactgcctagcctactttgttgttgttgttgattttgagacagagtctcgctgttgtcgcccaggctgggttgcaatggtgtgat

SEQ ID NO: 1021687 - DNA, 77 bp, Artificial Sequence
  ENSG00000255176_6 (sequence is synthesized)
ccccaaccccacacctggctaatttttgtatttttggaagaggtgggatttcactctgttggccaggctggtctcaa

SEQ ID NO: 1021688 - DNA, 69 bp, Artificial Sequence
  ENSG00000255176_7 (sequence is synthesized)
cccccccaaccccacacctggctaatttttgtatttttggaagaggtgggagcctcctcagcctcccaa

SEQ ID NO: 1021689 - DNA, 120 bp, Artificial Sequence
  ENSG00000255176_8 (sequence is synthesized)
cctactttggtcttttcttggactgaccccaaatttaggacatctcccttctttaactcttcctttcccatgatttgttcctaaagatggtggtttaaggccgccttcttcaggaagccc

SEQ ID NO: 1021690 - DNA, 120 bp, Artificial Sequence
  ENSG00000255176_9 (sequence is synthesized)
tcctgggattaacccagcccatttttcccatctctcatccttcccccttacttactatcttttcatttccttttagcacatgattgttgagccagatatattcacaaataacaataataa

SEQ ID NO: 1021691 - DNA, 120 bp, Artificial Sequence
  ENSG00000255176_10 (sequence is synthesized)
aggcagatggtgatacagaagaatgtgagcacagaggaaggagcaaagaaatcggcaatcaaggaaggctttggagaggagatagcatttggtctagtcttagatgataagtaagctctt

SEQ ID NO: 1021692 - DNA, 120 bp, Artificial Sequence
  ENSG00000255177_0 (sequence is synthesized)
tggatccagtggatgcagtcgtagtggctgttgtggtcagctctgtgaggatccagtggacgcagtcgtagtggctgttgtggtcggctttgtgaggatccaggtcgtccccggagttga

SEQ ID NO: 1021693 - DNA, 120 bp, Artificial Sequence
  ENSG00000255177_1 (sequence is synthesized)
cgttgtagttgaagcacatgttgaacctgcctgtctggtcttcgttcttgcaggtcagccccgtctccaggctgcaggtcagcacctgcccgacctggtcgatgcttacctcggggtagt

SEQ ID NO: 1021694 - DNA, 120 bp, Artificial Sequence
  ENSG00000255177_2 (sequence is synthesized)
tctccgcccggcactctatgctctttggtgcccagcacatcttgcccccagcagccctgatgttttcaaaagtttccatgtccccgcctgcaacccctgaggttgggaagtccacgtcaa

SEQ ID NO: 1021695 - DNA, 120 bp, Artificial Sequence
  ENSG00000255175_0 (sequence is synthesized)
aatcaaggggagggtagatatgttctacctcttgacatgtagtatgaacataaagtggatttttacttgctaaagtagaaagaagatcccaacatttgatgagaaaatatacagaagatg

SEQ ID NO: 1021696 - DNA, 120 bp, Artificial Sequence
  ENSG00000255175_1 (sequence is synthesized)
tggatctctcttttgggcagatgaaagtatattgagtttacacatggtgacagtacagatttgtttttaattacaaaagaacatggctactgcctttgaattctcaacattcagcgtggt

SEQ ID NO: 1021697 - DNA, 120 bp, Artificial Sequence
  ENSG00000255175_2 (sequence is synthesized)
cagcagtagtaaacctggcaatttgagggcaacccaagtaatagcagcaacagcaacaacagaccttaatcaagcaattaatatgtgccatgtctcttgctagacattttaacaagagtt

SEQ ID NO: 1021698 - DNA, 120 bp, Artificial Sequence
  ENSG00000255175_3 (sequence is synthesized)
tttaaggcataggtcacatgtctgactcacagctgcgatgtggtggatccaaatctctctgaggccaaatactgcccagctcgaatgaacgctatgctccatgcctgaaacaactgctcc

SEQ ID NO: 1021699 - DNA, 120 bp, Artificial Sequence
  ENSG00000255175_4 (sequence is synthesized)
agccctcagaaaagagtctcccattcaactgaagtctgcatatcagattcccgtgggataattcataaaggctccttgaagttaattctgggtatatcctgaaatagagggtctcctctg

SEQ ID NO: 1021700 - DNA, 120 bp, Artificial Sequence
  ENSG00000255175_5 (sequence is synthesized)
ttttttcttctttttttccacaactgaggagacactagtgcctacttatctcaataatgggatttctctttgatgcaattgcagtttttactaggcctttcaataaatatgttgaatatt

SEQ ID NO: 1021701 - DNA, 120 bp, Artificial Sequence
  ENSG00000255175_6 (sequence is synthesized)
agcccacaatcaaggggagggtagatatgttctacctcttgacatgtagtatgaacataaagcacagttgattcctgagctgtgatgactttccactgaccatactactgcaatgatgtt

SEQ ID NO: 1021702 - DNA, 120 bp, Artificial Sequence
  ENSG00000255175_7 (sequence is synthesized)
attctgggccaaacttcggaatcaattcttgtctgctgcctgattcaattatttttaatgcaccctgtggatttttacttgctaaagtagaaagaagatcccaacatttgatgagaaaat

SEQ ID NO: 1021703 - DNA, 120 bp, Artificial Sequence
  ENSG00000255175_8 (sequence is synthesized)
tgcactgtggcaggtggcagtatagatttttgtgaagcagcagtgtgctgtgatatgagtagcagatgaagaaggaaggaaatgaagtcactcaattcttatatggcataattactctta

SEQ ID NO: 1021704 - DNA, 120 bp, Artificial Sequence
  ENSG00000255175_9 (sequence is synthesized)
tatttggaatcaacatgtggaatttctagattttctctagttaagaaatttgaaaatggcctgactagattattttggcttgaggactctcaggagattcacttcagattttgttcatta

SEQ ID NO: 1021705 - DNA, 120 bp, Artificial Sequence
  ENSG00000255175_10 (sequence is synthesized)
cgagatcacaccactgaactccagccctggcaacagtgtgagactttttcaccaatgtaatgaaattatttttgacaccagtgatgtttcctttgaggaagttcccgcttttacaataac

SEQ ID NO: 1021706 - DNA, 120 bp, Artificial Sequence
  ENSG00000255175_11 (sequence is synthesized)
acaataacaataactagaaccataataatgagtagacagactggacattatttatttggtctgggaaagcactgcttaacataactcctctgtatatgcctgaaatgtaaccatgaaaca

SEQ ID NO: 1021707 - DNA, 120 bp, Artificial Sequence
  ENSG00000255175_12 (sequence is synthesized)
acatcaaggatcaaactcttgaaattttttccttatgctctttttcactagaccctttccattgcctttcctttggctgttcttacttttcttagcctcaatagttaccttccatttagc

SEQ ID NO: 1021708 - DNA, 120 bp, Artificial Sequence
  ENSG00000258203_0 (sequence is synthesized)
accttacagtttggctttttgtgtatcccccgagaggaggagttcatcagtcaggagtccctggggggcagggctaaggggccaccacgggaaggaggctcaggtggctgactccgctcc

SEQ ID NO: 1021709 - DNA, 120 bp, Artificial Sequence
  ENSG00000258203_1 (sequence is synthesized)
cctgctggctctgccctgacactgtctccatggaatccagggctccagttctaatcatggagctcagaaccatcaagagctgatgagagagacaaatgctccttaaaggcagaaagctac

SEQ ID NO: 1021710 - DNA, 120 bp, Artificial Sequence
  ENSG00000258203_2 (sequence is synthesized)
taaagtgaaatgggaagatcatttctgtataaaaatacagacatttcttcaaaattcttgattctgttactctgcccccaaaatgccaaaggaaaacataaacacatcttgaaagactgt

SEQ ID NO: 1021711 - DNA, 80 bp, Artificial Sequence
  ENSG00000258203_3 (sequence is synthesized)
aaatgccaaaggaaaacataaacacatcttgaaagactgtctgaacggagcccaaccaacagaagctgagtgtcactgat

SEQ ID NO: 1021712 - DNA, 120 bp, Artificial Sequence
  ENSG00000258203_4 (sequence is synthesized)
accttacagtttggctttttgtgtatcccccgagaggtagagaatataggaccttctgagccccaaagaggacatggggcactgatggcaagagaccagctttcttctagcagagattgg

SEQ ID NO: 1021713 - DNA, 120 bp, Artificial Sequence
  ENSG00000258203_5 (sequence is synthesized)
gcctgaggaagagcccagagcttaatgcaagcccctgaatgggagcatggagactcagacaaggcccgtggaagttctttgggggaccatatcgctcaaaaggaaggtctgtttggggac

SEQ ID NO: 1021714 - DNA, 120 bp, Artificial Sequence
  ENSG00000258203_6 (sequence is synthesized)
cagtttggctaagaactcgccagctggatcggcctccccgatccctggccagggccgcagcagtgaccaaccgtccctggccaaagctgctctacgacggccggcagtgcccactccccg

SEQ ID NO: 1021715 - DNA, 120 bp, Artificial Sequence
  ENSG00000258203_7 (sequence is synthesized)
ggggactcccggaccccagccaggaagagcagacaccacgtctgagcctggagctagacagtccccccacagcaggcagcttgcaccgtttagtctcggctccctccgtcctctgtggct

SEQ ID NO: 1021716 - DNA, 120 bp, Artificial Sequence
  ENSG00000255178_0 (sequence is synthesized)
aaaggaaactgaagaaggtcaatctagaatgatacttgctggatggattgaaaaagtgaagctttagcagcaagtagaaaaactgaagcatcagttgcagtaactcatccattgagtgaa

SEQ ID NO: 1021717 - DNA, 120 bp, Artificial Sequence
  ENSG00000255178_1 (sequence is synthesized)
aaggttcttcccatgtccctactctcagaaatgcattctgaaatttcgaagaaacaagacattacacaagtacatggcttcactaccaaggggaagggcaaaagaccatctttgatttaa

SEQ ID NO: 1021718 - DNA, 120 bp, Artificial Sequence
  ENSG00000255178_2 (sequence is synthesized)
ttccaggcttcagtgtctaattctgtggcaaagatagctcatgaattctttgttcctctgccaagcgcaacagggataagtagccttgctctgggaatatgagtttgatgattgggttgc

SEQ ID NO: 1021719 - DNA, 120 bp, Artificial Sequence
  ENSG00000255178_3 (sequence is synthesized)
atgaaccctggaagcctggaatattcatctattttcacattcttctgtccctcctgactgcagcactccccaaacctacatggaagagctaaaatcaattctggtaaatctcatcaactt

SEQ ID NO: 1021720 - DNA, 120 bp, Artificial Sequence
  ENSG00000255178_4 (sequence is synthesized)
ctaggacactgtggtagatttccttcagtttaatctctagcattaactggaagaaacattttcttactcagtcactacatttgtcaagaaataatgctatggttgaacactgcacgaaat

SEQ ID NO: 1021721 - DNA, 120 bp, Artificial Sequence
  ENSG00000255178_5 (sequence is synthesized)
gatagagattaacagtagcacaatactagacatttcttttttgctattctacttaatgcctgatgtaacctcatgaggtggatgttgtactcctgactttagagataagaaaactgaact

SEQ ID NO: 1021722 - DNA, 120 bp, Artificial Sequence
  ENSG00000255178_6 (sequence is synthesized)
aaataacttacttacagttacatagtcaagaaatggagatggcaagagttcaggcctaggtttgtctgattgcaaatactacatcctttctattgcttcactttgtttggctttaaagct

SEQ ID NO: 1021723 - DNA, 120 bp, Artificial Sequence
  ENSG00000255178_7 (sequence is synthesized)
gttaaatgagaatgaccataataccccagagaacttctgtgaggattaaatggatatgcaaaagctctcgacataatacctggctcaagacatctggggaggcattcaactgggacctgc

SEQ ID NO: 1021724 - DNA, 120 bp, Artificial Sequence
  ENSG00000255178_8 (sequence is synthesized)
aggattcgctttcaatgtggctcacccacatggccaggagtgcagaccaggaccagctgtttctctccacatgggtttcttcaaggacttcttgggcttcttcagagcatgccagctgga

SEQ ID NO: 1021725 - DNA, 120 bp, Artificial Sequence
  ENSG00000255178_9 (sequence is synthesized)
tttcgtgagtaagcatcttaagagacaaaaaatggaggctgccagtttaataaagcctgtgccagaaactggtacagcatcacttcctccatactctttcagtcaagcagtcatagggcc

SEQ ID NO: 1021726 - DNA, 120 bp, Artificial Sequence
  ENSG00000255178_10 (sequence is synthesized)
cagattcaaggagaaacgcataatccctaccttttgatagaaacaattttcacttgaaaactttgggggtatgttttaaaagtattacatctcccaaacctcctggcagtcaatgccaga

SEQ ID NO: 1021727 - DNA, 120 bp, Artificial Sequence
  ENSG00000255178_11 (sequence is synthesized)
gccaggatttaactgcaggtttatttgatgacaaagcccattttacaaagactaaaacagacctgaagagaaatatagcaggtttaagtaatttcccatggggaaatgaaaactctgaat

SEQ ID NO: 1021728 - DNA, 120 bp, Artificial Sequence
  ENSG00000255178_12 (sequence is synthesized)
ccaaagtccttaaattagctactacactatggttcacaagatgaaatgcactggtgcatggcagtgcatttttaaattgtgatgctttctatcaataaactctttgtaagtaaaagtaaa

SEQ ID NO: 1021729 - DNA, 120 bp, Artificial Sequence
  ENSG00000255179_0 (sequence is synthesized)
ggaagctgtatgttggtctttcccatggtggacactggaactaaagctgcaaccaaaaacatggggtgatttcagacttttcccaggaatggatattaaattttatgagatgattttaga

SEQ ID NO: 1021730 - DNA, 120 bp, Artificial Sequence
  ENSG00000255179_1 (sequence is synthesized)
gcatctgccggatgattatgttgtttttttctttgacctattactgatggacaatattaataaatgtgctactaataagtgaatattatattccaagaataaaatctgcacaatatagtc

SEQ ID NO: 1021731 - DNA, 120 bp, Artificial Sequence
  ENSG00000255179_2 (sequence is synthesized)
aagacttttatatctatctctaaaatgtcattctgggaattataacttggacatcaagttccttacactctggttgccctttattggttatccttcttttttctttttaatgggccaatc

SEQ ID NO: 1021732 - DNA, 120 bp, Artificial Sequence
  ENSG00000255179_3 (sequence is synthesized)
aagcacactatgtaactaagatgaaagctctttaagagcacaggtctttgttttatttgctgatttatttactaagatcctagaagtatgcctgatacattattcgtattcaataaatac

SEQ ID NO: 1021733 - DNA, 120 bp, Artificial Sequence
  ENSG00000276718_0 (sequence is synthesized)
aaggactcacatgcatcctcaccccaaaccacttaaacaattatgattaggctatacaaaactagaatggattcttgctccttggcaatctgaagtagggagacaaaccatagaggcaag

SEQ ID NO: 1021734 - DNA, 120 bp, Artificial Sequence
  ENSG00000276718_1 (sequence is synthesized)
aagtaaaagatgaaagactctgcaacaacatttggatggggttcagggacatccaggatggcatcaagacatctcatctggggctatcctttgactcaactcaaacaagtcctctgccat

SEQ ID NO: 1021735 - DNA, 90 bp, Artificial Sequence
  ENSG00000276718_2 (sequence is synthesized)
ccagaattcccacatgttgtgggagggactcaggggaggtaactgaatcatggggcccatctttccggtgctattctggtgatagtgacg

SEQ ID NO: 1021736 - DNA, 77 bp, Artificial Sequence
  ENSG00000276718_3 (sequence is synthesized)
catgagatctgatgggtttatcagtggtttctgcttttgcttcttccgccgccatgattctgaggccttcccagcca

SEQ ID NO: 1021737 - DNA, 120 bp, Artificial Sequence
  ENSG00000280767_0 (sequence is synthesized)
ggtctctctatagtggcctcacggtctccagccaggagctcgatctttgcttctgcacaaacattaccgagaaacgtctgcaaaccccgggcgcccggctcccacatcacaggcgctgcg

SEQ ID NO: 1021738 - DNA, 120 bp, Artificial Sequence
  ENSG00000280767_1 (sequence is synthesized)
cctcagaacacaacttgtttctgccgatccaccccccaccgccgcctccccgggcacctcgccacgcaggacgctccgggcttcccacagcacacaggccaggacgtcagggtctcgtga

SEQ ID NO: 1021739 - DNA, 120 bp, Artificial Sequence
  ENSG00000280767_2 (sequence is synthesized)
attcctggctggaggtcctgcgccagcgccctccttgtgagaacactttcgctctgcaaactctcagagcccccacctgctcccgcctcccgtctgtcctggttcttgggaccccggagc

SEQ ID NO: 1021740 - DNA, 120 bp, Artificial Sequence
  ENSG00000280767_3 (sequence is synthesized)
cttctctgtccagacctcccaggtcctgacgggaatccggataaactccttggggcgaaggtgttaacggcagggcccctgtctaatgtatttcgccacccagataaaatgagtgttttc

SEQ ID NO: 1021741 - DNA, 120 bp, Artificial Sequence
  ENSG00000261572_0 (sequence is synthesized)
cccgactcccagcggcggagaaggcgccgcgtcgcacccagggtggctgggttggcagcctggcgggcggcgcggaggagagggcgcaggggtccttctggccgtcttccgctccccctc

SEQ ID NO: 1021742 - DNA, 120 bp, Artificial Sequence
  ENSG00000261572_1 (sequence is synthesized)
ccggcctttacttctgtcaggccccgcctggcccaggcccgcagcctgtttccttccacctgggcgggtcgggggctgcgggcattggggccccttaaggaaacccaggcctccagggac

SEQ ID NO: 1021743 - DNA, 120 bp, Artificial Sequence
  ENSG00000261572_2 (sequence is synthesized)
tccgccgctccaggactcggcgcggagggaatgactgagcgacgaccgaggcagggggtgatgtggtacctcgaatgctgtggaaatggcaggaatgatgacccggccggaccttagacc

SEQ ID NO: 1021744 - DNA, 120 bp, Artificial Sequence
  ENSG00000261572_3 (sequence is synthesized)
cgagatcgatgagaggccgccagcactgcccgggagacggcccgctcttctccccctcctgctgcggccgccgccagagcccggtgttatttcctgcccctcctgtcgggaacaatttga

SEQ ID NO: 1021745 - DNA, 120 bp, Artificial Sequence
  ENSG00000261572_4 (sequence is synthesized)
ggaaccaacttaatcgcttggctttgagggcgcgacgcttccaggcgctctccgcggctctgtcccgcggaccggtggagcctgggtgacggcgcctgggccggaggaggggagatgttt

SEQ ID NO: 1021746 - DNA, 120 bp, Artificial Sequence
  ENSG00000261572_5 (sequence is synthesized)
ggggtccctggccaggatgaatcagcgtaaccgtcccgtcaccctcggggaaaaaaaatgtttcaagaaggcttgaagggtgtgatttgtgtaatgttaactttaggacaaatgagctgt

SEQ ID NO: 1021747 - DNA, 120 bp, Artificial Sequence
  ENSG00000261572_6 (sequence is synthesized)
gctttcctggcatgggaaggggatgggggtcctcatttagtgaggcagtttgtaacagggtcagggaagaactgagctcggctgcgtgcgtttatcggctgtatgacccagagcgagtgg

SEQ ID NO: 1021748 - DNA, 120 bp, Artificial Sequence
  ENSG00000261572_7 (sequence is synthesized)
ctccttctattttgtgaaagggtagcaagaaacattttatctggaagccaccaaaagaaaaggaaataatctttggctataaatcgagggtatctttgattcacagtgaaggcatttctg

SEQ ID NO: 1021749 - DNA, 120 bp, Artificial Sequence
  ENSG00000261572_8 (sequence is synthesized)
ctgatctgttccaagacaggttaaaaacgagatcagaagggacattttcttcacagtgtcttatcaagtgtgctgagaagaaagcaaaaacgacaatctaataaaataaaacaaggaatt

SEQ ID NO: 1021750 - DNA, 120 bp, Artificial Sequence
  ENSG00000261572_9 (sequence is synthesized)
agtgtcttttaagtctagggcctagccaggaagacctccaggagtaaaagttaaggcttcaaaagcatggcaaagatgtagatttggagagattccatccatgtgcatttggtaagcacc

SEQ ID NO: 1021751 - DNA, 120 bp, Artificial Sequence
  ENSG00000261572_10 (sequence is synthesized)
ttgggctggtgggtaaattcttaaaatttaaaatatagcacttctccctggagcagtagttctcaaagtggtccttggaccaacagcaggtaagttccctgggaacttatcaaaaatgca

SEQ ID NO: 1021752 - DNA, 120 bp, Artificial Sequence
  ENSG00000261572_11 (sequence is synthesized)
aggtctcaagccccacccccagaccctctgaatcagaaactctgagggtggagccaggaagctgtgtttgaacaagccctccaaaagacactgatgcatgctgaagttagctgctgcttt

SEQ ID NO: 1021753 - DNA, 120 bp, Artificial Sequence
  ENSG00000261572_12 (sequence is synthesized)
agagaaactgttaatgagtttggggaaataagagatacatacatgaaatggctggaggagactcaagcattatgcatgacatttagtgaacgtaaaagacggagtctagacaactttatt

SEQ ID NO: 1021754 - DNA, 120 bp, Artificial Sequence
  ENSG00000261572_13 (sequence is synthesized)
tccataatattaacaaaggacaatcctctcttaaaattcctggggtcagatgaatttctaaattcagattttgtttttcaatttagaaaggtaaaatgtgcatgtaccatatattacata

SEQ ID NO: 1021755 - DNA, 120 bp, Artificial Sequence
  ENSG00000261572_14 (sequence is synthesized)
atacctttggtaaggtctggggtgacactctaatatactaattttctgcaagggaaatcatgaatgacataagtgtatgcttggattatctactgcaatgtaataaatgttcacaaaata

SEQ ID NO: 1021756 - DNA, 120 bp, Artificial Sequence
  ENSG00000225579_0 (sequence is synthesized)
caagaactaaccagagattcaaaagcagaataatgttgggaccccagagaagtattcttggcttttctcagaaggaagaaactgtgtgatgtgaggaataatatcctctacagcatctat

SEQ ID NO: 1021757 - DNA, 120 bp, Artificial Sequence
  ENSG00000225579_1 (sequence is synthesized)
atggcatcggaagctctcagaagaataactacttgctctcatcttgatccataggaattgaccagctgaccagctggctaagtacccaaatgtgtgtggtgagggtgagacttaaaaaca

SEQ ID NO: 1021758 - DNA, 120 bp, Artificial Sequence
  ENSG00000225579_2 (sequence is synthesized)
gagctcaacatctgaaatctagaaaaatttggtgccagtgttcttcatacgaagttagtgatgcgctgccagtattgcaacagcatcctcctgggacacatttctaatgcttcacagcag

SEQ ID NO: 1021759 - DNA, 120 bp, Artificial Sequence
  ENSG00000225579_3 (sequence is synthesized)
gaactgtttctggcagcttggtgaaccaagaaaggcaatattcttctgggaaacattgccttgagagacacaacatgaattacaacatcatgatgtattcagccagatgtctgcaagaca

SEQ ID NO: 1021760 - DNA, 120 bp, Artificial Sequence
  ENSG00000225579_4 (sequence is synthesized)
gaaaatcacgtgactgagcaaggcatgtgaatgttcttaaagggggagaaatagaaaagaaaaaccaaacatgcatcagatatttcctttttgcatcacattattcccaatcatatggat

SEQ ID NO: 1021761 - DNA, 120 bp, Artificial Sequence
  ENSG00000225579_5 (sequence is synthesized)
gccttatgtttataacttgccaattatgaatttcccctcatgtatattaaacttaaggatcactataattttaatcttgttaacaaatttgctgtttgtctatatctatttaggagatta

SEQ ID NO: 1021762 - DNA, 120 bp, Artificial Sequence
  ENSG00000225579_6 (sequence is synthesized)
gcatccagggctcattaggtatctgttaggatggttgttagggcatagtgagaaattattttttggcactcacaacaaatgtatatggatatacatttagtttcttgggatcctagtcca

SEQ ID NO: 1021763 - DNA, 120 bp, Artificial Sequence
  ENSG00000225579_7 (sequence is synthesized)
cacaattggcaatctcacgctcagtatattaatacatattcactaaataatcatagtgtagtttgtagtttctcagttgcacagaaatggttgggttctttcagggatccttacttgaag

SEQ ID NO: 1021764 - DNA, 120 bp, Artificial Sequence
  ENSG00000225579_8 (sequence is synthesized)
ataaggatcagagcactattaaggaaagggaggataatcctgaagtgtgggaggggatggtcatggatttacctatttttactatttgttttatttactctatttctaacaacccaatca

SEQ ID NO: 1021765 - DNA, 120 bp, Artificial Sequence
  ENSG00000225579_9 (sequence is synthesized)
cttctccagtggcaaaggcctttggcatttggtaggcacccaatgcataattgctgatgaaagaatgaattctattgccagggcatccatttcattttctctgcagccacaccatcagca

SEQ ID NO: 1021766 - DNA, 120 bp, Artificial Sequence
  ENSG00000225579_10 (sequence is synthesized)
tggcaactgccccgacagcacattcttttcatgattgttttaaatttcttatgctattttccgtaaggtagtggtctatataatttttagtcatgcactcctattaattaagttttgtgc

SEQ ID NO: 1021767 - DNA, 120 bp, Artificial Sequence
  ENSG00000225579_11 (sequence is synthesized)
agtctctaaatacatattttacaaataagatattctgttgctttataaaatatagttaatcagaagaatgagattgttaataacaattctaataattatttctccattttcatggactgt

SEQ ID NO: 1021768 - DNA, 120 bp, Artificial Sequence
  ENSG00000225579_12 (sequence is synthesized)
ctgtcttgctaaccttccttgtacactgtattctggagaaccttggctgttgaaagcataaaggaagaagaatgcagtttttgccttggggagcttacatcttatctggtataccagata

SEQ ID NO: 1021769 - DNA, 120 bp, Artificial Sequence
  ENSG00000225579_13 (sequence is synthesized)
aacacaatgaaggacaacacaacggtaaacaaggtcatatgtatctatcttcgtcacagtcaaggtggcccctgtatggtggaaaaggtcactcctttagtgggaaattagcaaatattt

SEQ ID NO: 1021770 - DNA, 120 bp, Artificial Sequence
  ENSG00000225579_14 (sequence is synthesized)
agagtgtattaatctaagcaaacattggtttatgcttggcaattgagaatcagtcctgtcaaaaccgggtgagctgcaattttggcattccattgtctggaagaggaagaataattacaa

SEQ ID NO: 1021771 - DNA, 120 bp, Artificial Sequence
  ENSG00000225579_15 (sequence is synthesized)
ggttggctgattcctgttcccccactttctaaggaatcagttcaaccacatgttttctcattgtcaactttatataaatagacttcccttggctattgttggtctttcgaagaaggattg

SEQ ID NO: 1021772 - DNA, 120 bp, Artificial Sequence
  ENSG00000225579_16 (sequence is synthesized)
aatcttgttgaagtttctttcttacagacatagaaaatgctggtagccataacactccaaactatttttctggatcttaatttgactagggagagagaaggtcatttttgtttaaacagg

SEQ ID NO: 1021773 - DNA, 120 bp, Artificial Sequence
  ENSG00000225579_17 (sequence is synthesized)
aacggtaaacaagcatgtgaagaaggtccttgttcccccttcgccttctgccgtgattctaagcttcctgaggcctccacagccgtatgcaaatgtgactcaactgaacttctttctttt

SEQ ID NO: 1021774 - DNA, 120 bp, Artificial Sequence
  ENSG00000225579_18 (sequence is synthesized)
ataaattacctagttcttggggagtgtttttatagcagcttgagaatggactaatacactttattagtcattcaacctctctaagcctccatttgcttgtctgtaaaatggaagtaataa

SEQ ID NO: 1021775 - DNA, 120 bp, Artificial Sequence
  ENSG00000225579_19 (sequence is synthesized)
cgtcttcttcatggagtctttattattagtattagaggatccaatgaatggaaaacacctggaatagagctgggttcctgtgcatgcttaccaaaagtcctttctcttctcctgcaaatc

SEQ ID NO: 1021776 - DNA, 120 bp, Artificial Sequence
  ENSG00000225579_20 (sequence is synthesized)
tttgaatgtctatcttgattaattcttgttgtatttatattacatgtttgaactacaggcattggaatcaaacttcctaagtactcatcttctctggaataccaactagtaaccaagtaa

SEQ ID NO: 1021777 - DNA, 120 bp, Artificial Sequence
  ENSG00000225579_21 (sequence is synthesized)
tcatcttctctggaataccaactagtaaccaagtaacttagtaaactatgactcagtttgtttatctgtaaattaaaaataggccaggcgcgatggctcacacctgtaatccagcacttt

SEQ ID NO: 1021778 - DNA, 120 bp, Artificial Sequence
  ENSG00000225579_22 (sequence is synthesized)
tgagatggcaccactgcactccagcctgatgacacagctaaactccatcttaaaaaaaaaaagagtagtatcaccccaaggagttgtggagactaaatgaaatgtttacttctttaagga

SEQ ID NO: 1021779 - DNA, 120 bp, Artificial Sequence
  ENSG00000225579_23 (sequence is synthesized)
tgtggagactaaatgaaatgtttacttctttaaggagtagccattttgttatgattttcacccttggacttgtgttttcaccattggacttgtattttaatagagtttaaaacatagtgg

SEQ ID NO: 1021780 - DNA, 120 bp, Artificial Sequence
  ENSG00000225579_24 (sequence is synthesized)
tatgtttccatttttatgtgttgcttttgttttattgaggactatcagagatttctgaaatttttctgtttaatgaagatttaaattgctacgaacacctactaacctccctgcccagtg

SEQ ID NO: 1021781 - DNA, 120 bp, Artificial Sequence
  ENSG00000225579_25 (sequence is synthesized)
cctctattcctttgcagaacagctatcttgctttgtcaattatgtgtttcaagttgtatctgtcaatcacagaaacctgccttcttggccacagtgatttgtccatgggtggaaatagct

SEQ ID NO: 1021782 - DNA, 120 bp, Artificial Sequence
  ENSG00000225579_26 (sequence is synthesized)
aacccaaagtagaccagtgagttgtttttcttagaatgttaacttgagtcagttcctgcaggcaaagctgtgagttattagaccccaggacacaagatgaccatattccctgcagtgtaa

SEQ ID NO: 1021783 - DNA, 120 bp, Artificial Sequence
  ENSG00000225579_27 (sequence is synthesized)
aacaagtcaatctgaacacgacttcagaattacagagagtggggccaggatgttctgataccatttggtctctggttctagccacttctttgaccaagctgtactctgtccttcatttgg

SEQ ID NO: 1021784 - DNA, 120 bp, Artificial Sequence
  ENSG00000225579_28 (sequence is synthesized)
ctacttgacacctccatgaaattctcttggtagcatgttccatttcaattgggcttctctcacttgtgatgtgtcaaataacacagaaaaattttggtatgttaatgattgttacagaag

SEQ ID NO: 1021785 - DNA, 120 bp, Artificial Sequence
  ENSG00000225579_29 (sequence is synthesized)
acaaggtggagcctgctattttattctaatattattatattataacattataagccatctttatgttttaagtgcccttcatgcacattacttttaatgaccatgtaatatttcatcata

SEQ ID NO: 1021786 - DNA, 120 bp, Artificial Sequence
  ENSG00000225578_0 (sequence is synthesized)
gccacaaccttgatgctttacgtgctcatagatctttctctgagtttaggggaaaatgtagtgatcactaaaaacaaaacagagctcactttcttaatgggcttccaaattgggatgaca

SEQ ID NO: 1021787 - DNA, 120 bp, Artificial Sequence
  ENSG00000225578_1 (sequence is synthesized)
ggatgacaggatgaagccagagacttaagcatataactgggcttcatccaacacacctgacagacaaagccctgggtccaaaatggctcatcggggtcaggcgcggtggctcatgcctgt

SEQ ID NO: 1021788 - DNA, 120 bp, Artificial Sequence
  ENSG00000225578_2 (sequence is synthesized)
cagcctaggcaataaagcgagactctgtctcaaaaaataaaatacattaactgaataaattttttttttttgagaaggaatatcgctctgttgcccagggccttcccgtctcgcggcccg

SEQ ID NO: 1021789 - DNA, 120 bp, Artificial Sequence
  ENSG00000225578_3 (sequence is synthesized)
gcctccctcacccggaagtgctggtcccggtactggctcagctccacgtaggagtcgctgcgcagcgccttcaggaggccacccgacatagtgcagagaagcggaccacaatgcggcgac

SEQ ID NO: 1021790 - DNA, 120 bp, Artificial Sequence
  ENSG00000225570_0 (sequence is synthesized)
gcagagattgtgtaagaagaaaacagaagaaagcctaggagagaatcctgaggaaaaccaaagatttaagggatgagcaaaagagaaatctgcacagtaactcataaagagtggtcgaag

SEQ ID NO: 1021791 - DNA, 120 bp, Artificial Sequence
  ENSG00000225570_1 (sequence is synthesized)
aggtaaagagaaaacaagagcatatggtgtcatacaagccacattgtctctatggtggtgccttgggtctgcatttcagccagcacaaaggagaaagaagaaggtatagacacatcactt

SEQ ID NO: 1021792 - DNA, 120 bp, Artificial Sequence
  ENSG00000225570_2 (sequence is synthesized)
tattttaatgacaagatccaggagttgttctcgtcactgtcactcacatcccattggccaaaacttaatcacatggtcatatgcagctgcaatgtgacaggaaatgtagtcttttttcag

SEQ ID NO: 1021793 - DNA, 120 bp, Artificial Sequence
  ENSG00000225570_3 (sequence is synthesized)
aatgactgttaccctaggtaaaatttggagatattctttctgtgagagaaaaagagagtacagctaatgggagataactagtggctactgtcatatcacttgacgtctttcaaatctttg

SEQ ID NO: 1021794 - DNA, 120 bp, Artificial Sequence
  ENSG00000225570_4 (sequence is synthesized)
ccagtgtgcagttgtacttttggtaagaagaggaagctcaagatttgactttttctcccataatgaccctcattttgggggtcagaaaggaagcatggacattcactcatctctatatga

SEQ ID NO: 1021795 - DNA, 120 bp, Artificial Sequence
  ENSG00000225570_5 (sequence is synthesized)
aggaaatgtggaaacaatcacaggatgcttttacagacctataagtgccattgtgacagaattaggcccgcaaatccaattgtcacctaaactgcatgcatcccagattctgccagatac

SEQ ID NO: 1021796 - DNA, 120 bp, Artificial Sequence
  ENSG00000225570_6 (sequence is synthesized)
atcacagtgacattctgcatcgtgttcatttatattcaggagccaatactccctgaaagatctggctatttcccatctcccactacacagttaccatggtaaataaccaaagatacttct

SEQ ID NO: 1021797 - DNA, 120 bp, Artificial Sequence
  ENSG00000225570_7 (sequence is synthesized)
ggagaaggctgggagaaagatttacaggaagtacttctgatgatatcacaaggtccttcttcaggttacctggcttcctctatattcaatgtttggaaataaactcaagtttcagaattg

SEQ ID NO: 1021798 - DNA, 120 bp, Artificial Sequence
  ENSG00000225572_0 (sequence is synthesized)
aaattctgaaaggttgcctcatcgctggaaatatgtgtaatgttggagcaatgctagattataaaatttatcgttaattaataatgaaacacacaaagattgagcagttgttgtcatcag

SEQ ID NO: 1021799 - DNA, 120 bp, Artificial Sequence
  ENSG00000225572_1 (sequence is synthesized)
aaacatctaccaggaacttacagggggtcatgagatagctctacagcaaacaagaaagagaagaaatgcttcttgccctggcagaattataagtgggcacacttgctatgttatacaata

SEQ ID NO: 1021800 - DNA, 120 bp, Artificial Sequence
  ENSG00000225572_2 (sequence is synthesized)
ttaggcatgcagtagaaaaaaacaaggaaccatacaaatcaccaggtgtctggtcacaaactctggcagagcttcacaccaagcaggcaagctacaagatttggaacaacacagcttata

SEQ ID NO: 1021801 - DNA, 120 bp, Artificial Sequence
  ENSG00000225572_3 (sequence is synthesized)
gatgaaagttaaaggcatttaatttacttgaaaacagaggaagaaaggaccaacacataaaagaacattcattttgagggatgagcaattcaattgagttcaagggtagagcaatggtga

SEQ ID NO: 1021802 - DNA, 120 bp, Artificial Sequence
  ENSG00000225572_4 (sequence is synthesized)
cttctcagccacctgctatcaatttgacatgtattaagcacacgactgggttaataaaagtgggagtttgggttaaaatgccctttgagaggccctgaaaaaatgtttgtctaagaaagt

SEQ ID NO: 1021803 - DNA, 120 bp, Artificial Sequence
  ENSG00000225572_5 (sequence is synthesized)
tgaaactatggaagaaaaggtggtcaacttcagagacatagatgtaactcctgcaacgtgcttcaacatggtttagccaagcggaaactttttcttcctagtgtatgctctttaacgtat

SEQ ID NO: 1021804 - DNA, 120 bp, Artificial Sequence
  ENSG00000225572_6 (sequence is synthesized)
ttaagatgtccttaacatctttcagaaatctacttttctaccaatattatatgggttaatatttttcatagataaagcacaaatagtagagggctaattttcagactatgctgcatttat

SEQ ID NO: 1021805 - DNA, 120 bp, Artificial Sequence
  ENSG00000225572_7 (sequence is synthesized)
gaagcaaagcaaacctcatctgctttcatgacttgaatggaggagaatggttagagactattaaaagaggagaggagaggaaagaagaggcaagagcaagaacatacagcagactggctg

SEQ ID NO: 1021806 - DNA, 120 bp, Artificial Sequence
  ENSG00000225572_8 (sequence is synthesized)
ctccaacttggcagtggtctctctagttcctggagtcctgtccatgaatgaggttggacttgcagccaccagccattgccagtggagaggcagcgccagactcctaccagcactcacatg

SEQ ID NO: 1021807 - DNA, 120 bp, Artificial Sequence
  ENSG00000225572_9 (sequence is synthesized)
ggtggcaatggaatgaagtcaccacatttagcaaagggtgatggcacatttcttgggtttgctatgggagtaaccttctgtttaaatgtattacacagagctcatctctaacaaaatcat

SEQ ID NO: 1021808 - DNA, 120 bp, Artificial Sequence
  ENSG00000225572_10 (sequence is synthesized)
tgaccataaagtctttaaaactgaagtaacgatggggcagagagaggcagtatttaatatcaaaaagccacatggttgttacaattttaggcaagcttaagcagaaattgtatatgtaag

SEQ ID NO: 1021809 - DNA, 120 bp, Artificial Sequence
  ENSG00000225572_11 (sequence is synthesized)
gaataaaatgtcaatgttactttcagtttgaatttctaccactgaaattttaattcaatccaaaatattcctctgcacatgagtcaggcagaatgaccaaatgttgatgctgcgtgatga

SEQ ID NO: 1021810 - DNA, 120 bp, Artificial Sequence
  ENSG00000225572_12 (sequence is synthesized)
tgatgtccatagcctggacctcttcccatctggctccttggattacctcacagcccttcctaggtacccagaatgtttgctctttggttataaggccagatgaatgagcaaaaactccca

SEQ ID NO: 1021811 - DNA, 120 bp, Artificial Sequence
  ENSG00000225572_13 (sequence is synthesized)
cctaaatctgtagcatgcggacaaccaaatgaatagatatttgattctactcacagatatcaaactaaatatgttaaattctaaagagagctatttcaacactctcaatcttcaaaatgg

SEQ ID NO: 1021812 - DNA, 120 bp, Artificial Sequence
  ENSG00000225572_14 (sequence is synthesized)
aaaagctgcttctgtacttatgtaaaatataatatgctatgttatactatttgttacttcacaaagtttttaacacatcattttaacacctccaagtctataaatgtatactgcagcaga

SEQ ID NO: 1021813 - DNA, 120 bp, Artificial Sequence
  ENSG00000225572_15 (sequence is synthesized)
agccatattgagcatatataatcaaaatcgaatcctatattcctgcagctctcaccaccatcaaagcttgccatctggagaaaacacagggcgaccgtggcctacagatagatgcttaga

SEQ ID NO: 1021814 - DNA, 120 bp, Artificial Sequence
  ENSG00000225572_16 (sequence is synthesized)
gaatccaaccttcatcctgagcatgagggtgttggcgtttggaaaagaggaagaaggggaagcaggcaaatgtgggcttggagagtgacaatgctaatgaaatagggtaaataacaagct

SEQ ID NO: 1021815 - DNA, 120 bp, Artificial Sequence
  ENSG00000225572_17 (sequence is synthesized)
tggaagtgaagaccaggccagtttcctagaacacttttccattctgtatcttgagactatggagacaggaagtggagagagcagataaatccatgacactgtactctccgggatcagctc

SEQ ID NO: 1021816 - DNA, 120 bp, Artificial Sequence
  ENSG00000225572_18 (sequence is synthesized)
ctgccattccgactgccctaatatcctttcctgcctcctctctcttctagtattgctctcagatcatgctggatatgcttaatataaactgaatttatcatcttctagagattccaatat

SEQ ID NO: 1021817 - DNA, 120 bp, Artificial Sequence
  ENSG00000225572_19 (sequence is synthesized)
cgactttatgtcaataacctcccaaatgcctgtattttgttctgaagtttcctcggggcagtattttcagctctctattggccataccacttggatgaataaaaagaacgtcaatctcca

SEQ ID NO: 1021818 - DNA, 120 bp, Artificial Sequence
  ENSG00000282692_0 (sequence is synthesized)
tttcagcagtcactttaactaaaaagtctttgctatttgagattttatcttcttgtctgttaaaaaactgtttggcaccttaatttgcatgaatcgatttccagtcgctcaaatccagtt

SEQ ID NO: 1021819 - DNA, 120 bp, Artificial Sequence
  ENSG00000282692_1 (sequence is synthesized)
tgtgcaatgacaagctggtgtggctgaaacggcagttgctcaagagcattagaacagccttcaccatgtgggtttacatggacagcacggtcagcagacagtgagacgggcgcttgtcca

SEQ ID NO: 1021820 - DNA, 120 bp, Artificial Sequence
  ENSG00000282692_2 (sequence is synthesized)
ctcgtctgacaccgtggggccataggaggcagcgactgagaaggtcagtcccattaaaaatgccctttggctcatctggaagctgtatctctggtcatgcaccatgccagccacgccagc

SEQ ID NO: 1021821 - DNA, 120 bp, Artificial Sequence
  ENSG00000282692_3 (sequence is synthesized)
tcccacatgcacacaggtggctggcacgcagctctgcacctcttactgttgggagctcagaagcctctctctgtggtggtttttcatctcgggataattgaacccagctgggaagtacca

SEQ ID NO: 1021822 - DNA, 120 bp, Artificial Sequence
  ENSG00000282692_4 (sequence is synthesized)
ggaccagagaatctctgctgcataatatcaccaccccgtggcaactcacaaagcaagattttcaccgagaatcgcacatagaaataatttcacatctgcttctggaaagattttcaccga

SEQ ID NO: 1021823 - DNA, 120 bp, Artificial Sequence
  ENSG00000282692_5 (sequence is synthesized)
gaatcgcacatagaaagaattccacatctgcttctggagcacatttccctctaaagagaggggcagagcgacttcaccgtctgtcgtcatctggtggtggaaaccacttctaggtttgaa

SEQ ID NO: 1021824 - DNA, 120 bp, Artificial Sequence
  ENSG00000282692_6 (sequence is synthesized)
ggtgagttattcatgctggaatttcgtgatctctgtggggactgtggcttattcattggagcttgaatatttttcagggtttgctttggtgtgattatacatataaagatatgtctagaa

SEQ ID NO: 1021825 - DNA, 88 bp, Artificial Sequence
  ENSG00000204670_0 (sequence is synthesized)
tgcatctgtaggagacagagtcaccgtctcttgccaggctagtcaaagcatttacaactgcacctaagttcctgacctatagggcatc

SEQ ID NO: 1021826 - DNA, 120 bp, Artificial Sequence
  ENSG00000204670_1 (sequence is synthesized)
taagttcctgacctatagggcatccagtttgcagagggggatgccatctcagttcagtggcagcggatatggaagagatttcactctcactgtcagcagcctgcagcctgaagattttgc

SEQ ID NO: 1021827 - DNA, 120 bp, Artificial Sequence
  ENSG00000287050_0 (sequence is synthesized)
agagttccttaatgaggagttgggagaggaaggatcctcattattccctcttcgctacctcctctctacaaccccattccaaagcgactgaccttcaacagaatgtatttctataaagat

SEQ ID NO: 1021828 - DNA, 120 bp, Artificial Sequence
  ENSG00000287050_1 (sequence is synthesized)
aaaaacaacgaaactcccaagacgtctatatttggaatatacagggaaaactaggaatttaatagctgagttcacgtcctgccaacaaaacttagaaggaatcaacaaacttcaagttca

SEQ ID NO: 1021829 - DNA, 120 bp, Artificial Sequence
  ENSG00000287050_2 (sequence is synthesized)
agggggcctggaactcctgagaagtgaaaggaccagccctatctcagatggtgcgggtttcttcgccctgacctctgccatgtttgcttggagccccagagctcatccttcaaggccttt

SEQ ID NO: 1021830 - DNA, 120 bp, Artificial Sequence
  ENSG00000287050_3 (sequence is synthesized)
ttaaaaatagcacagcctctgtcaagccttcttgaaaaattaaattttttattgtaaaaactttcaaacatataaagaatgtgaaagaataggcaattatctgtatactcatcacccaca

SEQ ID NO: 1021831 - DNA, 120 bp, Artificial Sequence
  ENSG00000287050_4 (sequence is synthesized)
ttcaataattaacattttgccgtcttagcctcatctacctatttctactgaatcatatgaaactcacttgcagacattgtgatatagaacaccaaaatccataaacatgtgtcgcctaaa

SEQ ID NO: 1021832 - DNA, 120 bp, Artificial Sequence
  ENSG00000287056_0 (sequence is synthesized)
actttggtggaggcttatcatgatcgactaggacaattttctagcatgtctgcaccgaatctcttcccgatagaattgaaggtgaactcagggcagcatggagtgcccacctggcctcct

SEQ ID NO: 1021833 - DNA, 120 bp, Artificial Sequence
  ENSG00000287056_1 (sequence is synthesized)
cccagtgtgtctgcgtctccgcttagtctccgaatggacagtaagaacacctgtgctacccgtgagcagccagcacaatgtattctgacatcaaacagctccttagaaagtctgggaacc

SEQ ID NO: 1021834 - DNA, 120 bp, Artificial Sequence
  ENSG00000287056_2 (sequence is synthesized)
ctgccatgagacgtcatgcaaatccagttgagagtcctttgtctcttatgattctaaacaaaagtaccaccttcttcagggaaagtggaattgacccaccctgtgaccggcaagtgcccg

SEQ ID NO: 1021835 - DNA, 120 bp, Artificial Sequence
  ENSG00000287056_3 (sequence is synthesized)
ctggagggcaccttccctggggggtagtttagttttcctttcaatgccgtgaacagtttcacttccgattaagcaccaaagcaaaagatatacagaaatagttcatttggaagaggatgg

SEQ ID NO: 1021836 - DNA, 120 bp, Artificial Sequence
  ENSG00000287056_4 (sequence is synthesized)
agtcaaatcagctgtttttctttttattatacttactataatttaaaaaaatcctaaatgaaggcgacatggagagatttcctcctgttagggacgggcctgacatcgcgcatctcaggt

SEQ ID NO: 1021837 - DNA, 120 bp, Artificial Sequence
  ENSG00000287056_5 (sequence is synthesized)
cttctgtgcaggcagaatccacggcgaagacgtgccttgttcatcacctgtgcagagaacgaagaaagcaaccttcatgcttccctttctcactagaaaaacaaaagcatgagtctggaa

SEQ ID NO: 1021838 - DNA, 120 bp, Artificial Sequence
  ENSG00000287056_6 (sequence is synthesized)
tctatgcaacgtgatattgttttagaaactgcggaaatttctgtttctattctggggtgttttccaagcaccacgatggtagcacaacgctcacctgccccagcttgattcgtcagattt

SEQ ID NO: 1021839 - DNA, 120 bp, Artificial Sequence
  ENSG00000287056_7 (sequence is synthesized)
caccagctcactgcacaggatgcataggtggtgcacaacagcgtgtgcagcttactgcttataaatcaactagcttgctcataagacaccgttactgcagactttttaatctctcttacc

SEQ ID NO: 1021840 - DNA, 120 bp, Artificial Sequence
  ENSG00000287056_8 (sequence is synthesized)
ctacccctgggaaaaggactggtaagtgtaacgttcatgaagtatcttgcataggcaaggatttactcaaatgccaaactcaacttaaacctgagtttttcaatgctaagcattgggagg

SEQ ID NO: 1021841 - DNA, 120 bp, Artificial Sequence
  ENSG00000287056_9 (sequence is synthesized)
attaacatgcttgcccttcatactaagagaaatattcactttctctagggatgaggagtggttagcagaaggaaatcaaacttttctggaaatgatttcagcatattcatcttgtaagaa

SEQ ID NO: 1021842 - DNA, 120 bp, Artificial Sequence
  ENSG00000287056_10 (sequence is synthesized)
tgtcttctgatataatgcttaaaaaaacaagtgaatgtgagagttgctttacacaattccccctgggttttaggaatttcaccaaatacagtctggggacctggagtctttctgcctggt

SEQ ID NO: 1021843 - DNA, 120 bp, Artificial Sequence
  ENSG00000287056_11 (sequence is synthesized)
cagtcctggaggtggaatctggaaacagccttggatcgcagccttccactgctgggctcggccctccattgggtccccccttcaccccacgccctttcccagaggcctcctgcttctgga

SEQ ID NO: 1021844 - DNA, 120 bp, Artificial Sequence
  ENSG00000287056_12 (sequence is synthesized)
accggaaatgttcattttggtggggccgtgattggtgggctcagagccagaatttcccatctcaactgccctttgaaagacaacggcaagagggacccaggtgacatggaacagagctgt

SEQ ID NO: 1021845 - DNA, 120 bp, Artificial Sequence
  ENSG00000287056_13 (sequence is synthesized)
gtgcctgccagggagaaagtctatgtacaaggaatgctgtgagccatctccgcttccagtgggcaagaccagaagtcacctgaactgtgaacctggtgggtcctctggcctctgcctctc

SEQ ID NO: 1021846 - DNA, 120 bp, Artificial Sequence
  ENSG00000287056_14 (sequence is synthesized)
agccactcttttgtgaagagtaaatgaaacagcttctgcacagagcccagcgctatgctgggtgcatcatacacatttcagaaaatgtaccctgaccacagcatgagccatggtgcccac

SEQ ID NO: 1021847 - DNA, 120 bp, Artificial Sequence
  ENSG00000287056_15 (sequence is synthesized)
agaaaacacagagtgtgcccggtgggaccttcagaaatgggcggagtcccctttgcctctccccagtctctgcatccgttcccattgggcgtgttatcggatgaacgcagagggctgaag

SEQ ID NO: 1021848 - DNA, 120 bp, Artificial Sequence
  ENSG00000287056_16 (sequence is synthesized)
cgctctggcttttcattgtgggtttttgagccaatgtaaagacatttgttcccatggaccctggattttcagagacacccagatatcaggagcggcacagctggcgttctgtggaaagtc

SEQ ID NO: 1021849 - DNA, 120 bp, Artificial Sequence
  ENSG00000287056_17 (sequence is synthesized)
ataccaattatttatgatctaatgcttttagattagaaaaatcaacaatatcacatctggggaaatagttgttatggtccactgtgtgataaaaaatacaaatgatccaagatcctaaga

SEQ ID NO: 1021850 - DNA, 120 bp, Artificial Sequence
  ENSG00000268257_0 (sequence is synthesized)
gaaagcacacaccatgctggaaaggagagagaaggaaaaacccactcctagccacacaatggtggatcttaatatccaatgaaaagaaaaaattctaatctaggtcacacacaataaccc

SEQ ID NO: 1021851 - DNA, 120 bp, Artificial Sequence
  ENSG00000268257_1 (sequence is synthesized)
aatataaaatgaacaagacatgatcaagcaaatcaaagaaaaatgtacatcaataaatatgttaagacatgttcaatgttactggtgatcaaggaatttcaaatcaagaccaaaatggta

SEQ ID NO: 1021852 - DNA, 120 bp, Artificial Sequence
  ENSG00000268257_2 (sequence is synthesized)
taccatttacaaccatccctctggcaaaaattaaataccaagtgtcagccatgaggtggctcagagctctcctgtattgctagtgaaatgttaactggttcaacaactatgtaagtcagc

SEQ ID NO: 1021853 - DNA, 120 bp, Artificial Sequence
  ENSG00000268257_3 (sequence is synthesized)
aggacattatgtcctaaaattgaacattcgtgtgccctatgacctagttactccactcaggtctatataaaagagaaaaccatgcacatatggaacatgcacagcagaaaatgtgaaaga

SEQ ID NO: 1021854 - DNA, 120 bp, Artificial Sequence
  ENSG00000268257_4 (sequence is synthesized)
atatctcatgctcttcagaagagcaaaaacctggaaatgaccaaaggcccatcaacagaagagtggataaattaacttcagcagatccacacaaaatatcacagcagtcagaaggaataa

SEQ ID NO: 1021855 - DNA, 120 bp, Artificial Sequence
  ENSG00000268257_5 (sequence is synthesized)
accacagtgaaaaacaacaatacggttgatttttagtaatattactgttatcacttaagtcccaaaaagttacacataggaagataacttagttgcaaacacacagattttttttttttg

SEQ ID NO: 1021856 - DNA, 120 bp, Artificial Sequence
  ENSG00000268257_6 (sequence is synthesized)
aatgattactcctagcgaaaagtgaaagaggaaagagtaaaacagatagtggttactgccaagatcctagatttttgttggaaacagtgctcgctacattatacaaaacaactaattttt

SEQ ID NO: 1021857 - DNA, 120 bp, Artificial Sequence
  ENSG00000268257_7 (sequence is synthesized)
taaaaggaaaaaggttagtctatggattaacacatggctcactgtacgtgccatgagctcgggatgatagctgatccaatcccatatacacctgaagtcttggggcaggggcggaccacg

SEQ ID NO: 1021858 - DNA, 120 bp, Artificial Sequence
  ENSG00000268257_8 (sequence is synthesized)
agtcagcgcgcccccacagcaccaggctgatggccccgtggttcttctgcctgcaagcaaaagtcagccacgatcatccttctccatctgcaacacccagggtcttttctaaaacttttg

SEQ ID NO: 1021859 - DNA, 120 bp, Artificial Sequence
  ENSG00000268257_9 (sequence is synthesized)
cccagtcggctcagccaaaaggacacagaagccctgcagaggctctgaaaccaagctgccatggctcccagttcgacatcatgtcaccggagcctgcacagatgaaccaagcttgcaaca

SEQ ID NO: 1021860 - DNA, 120 bp, Artificial Sequence
  ENSG00000268257_10 (sequence is synthesized)
cgggaggaacctaagcgctggactgaggagcgggactgaaataagaagcgcacaccacatggcaagatccaggatccaatcagatagagccctggtgtcatctaattgcaagatccaatc

SEQ ID NO: 1021861 - DNA, 120 bp, Artificial Sequence
  ENSG00000268257_11 (sequence is synthesized)
agaacacacctcattaccttatggtattgccagactatcaggagagaccataaatcagataaaaacatgagttgtatccaaaactcaaccaggtatcatcttaaatatccaacagaattc

SEQ ID NO: 1021862 - DNA, 120 bp, Artificial Sequence
  ENSG00000268257_12 (sequence is synthesized)
cagctcccgcgcctggacagctcccgcgcctggacagctccgcgcctggacagctcccactgtcccgcccgcagtgggcgtgtctgggaggcactgagcaggggcgggggtgggctcagc

SEQ ID NO: 1021863 - DNA, 120 bp, Artificial Sequence
  ENSG00000268257_13 (sequence is synthesized)
ggtgctgaggtacccgcctagggagatgcgcagctggaggcgcatgagggctggagacgcggaaggcgcatggggcgcagcaggctcacggggtatgcagggtacagggaggcgcgaagg

SEQ ID NO: 1021864 - DNA, 120 bp, Artificial Sequence
  ENSG00000268257_14 (sequence is synthesized)
ggggaggcgcgaggggggaggcgcgtggggcgcagcaggcgcacagggcatgcagggtacagggaggcgcgaggggggaggcgcgtggggcacagcaggcacacggggcatgcagggtac

SEQ ID NO: 1021865 - DNA, 120 bp, Artificial Sequence
  ENSG00000268257_15 (sequence is synthesized)
agggaggcgtgaggggtgaggcgcatggggcacggaggatgccgggtggtacaggggataggcagagaggcacaggggtggggaggtatggggcgcggaggggcatgaggaggcgagggg

SEQ ID NO: 1021866 - DNA, 120 bp, Artificial Sequence
  ENSG00000268257_16 (sequence is synthesized)
cgcggcgaggcggcgggcagaaggcaccgggagccccatgaggcgcaaaaggtgcggggaggcacggcggccgaggaggcgctgaggaccggggaggcgcaagaggcccaggatgcgcgg

SEQ ID NO: 1021867 - DNA, 120 bp, Artificial Sequence
  ENSG00000268257_17 (sequence is synthesized)
ggtcctggggaagcgcgagaggcctaggagtcgtgggggacatggggaggtgcaggggacccagggaggctcgaggggccaaggaggcgcggaaggctgcagttggggaggggagagaat

SEQ ID NO: 1021868 - DNA, 120 bp, Artificial Sequence
  ENSG00000268257_18 (sequence is synthesized)
ggggcgggtgggggatggggggcggccgctgcaggaaaagggatgcggtgtttcctggcaagttcagaagccaagcccccaacctcgtaacctgttcacacatagggtgacccctctgtg

SEQ ID NO: 1021869 - DNA, 120 bp, Artificial Sequence
  ENSG00000268257_19 (sequence is synthesized)
tcaagagcccctacgggtccctcataatgtgcgggtcacgtcctgaaaaggaggcagaaaaaggccctggaagcgggaagggagtgacccagccgcacggccacgctggcggccactgca

SEQ ID NO: 1021870 - DNA, 120 bp, Artificial Sequence
  ENSG00000268257_20 (sequence is synthesized)
gcagcccagtggccaagggcgacaccggcgagaggccgcagagaaccgcggcctcccagacaagggccaggcagggactgcgggctgccgccaccacgccaggcccccagtcagctccca

SEQ ID NO: 1021871 - DNA, 120 bp, Artificial Sequence
  ENSG00000268257_21 (sequence is synthesized)
agacctgtccccaacatgccaggcctcggcctcccagcactgcagaccccaagctccaggttcacgcggctgcccgccggaacccctaagactcgccggcagagcctccttagaaccaca

SEQ ID NO: 1021872 - DNA, 120 bp, Artificial Sequence
  ENSG00000268257_22 (sequence is synthesized)
acacacctcattaccttatggtaataagcttatgcttataaaacccgacccagccgccagcttggggagacaggtttgacctttcctcctgtctcgtcgcagtgcagtccactctctcca

SEQ ID NO: 1021873 - DNA, 120 bp, Artificial Sequence
  ENSG00000268257_23 (sequence is synthesized)
gcaaaaaccctgcgctttggtgtttggctttccctggtgcacaggcaggcgggtccactttggtttggtgacactctaggccatgctcacacactcaccaggcctaccaggacacattca

SEQ ID NO: 1021874 - DNA, 120 bp, Artificial Sequence
  ENSG00000268257_24 (sequence is synthesized)
ccaggccctccaaaccatgctcacaggaaccaccaggctgcacacaagggccctccacacaccacacttggccacacccccggggccgcaccttgaggttctccagaatccgcagggacc

SEQ ID NO: 1021875 - DNA, 120 bp, Artificial Sequence
  ENSG00000268257_25 (sequence is synthesized)
tcggtgccagccaggccacaccacccagcactccaagctacactcactagacccacccggaaaaacaggccacacctctgagtgctccagatagcgcttgccagacccctccagaccaca

SEQ ID NO: 1021876 - DNA, 120 bp, Artificial Sequence
  ENSG00000268257_26 (sequence is synthesized)
ctggccaggctgcacctcggagccctctaggccacgctctcaagggtaccaccatgccaggctgcaccaggccctcacgtgctgctcagtcaggccaccaagtcgcattctgcaggccca

SEQ ID NO: 1021877 - DNA, 120 bp, Artificial Sequence
  ENSG00000268257_27 (sequence is synthesized)
ccaggtcgcacctccaagcccaagcaagcccatggtgatttggcctccttgaagccacaaagcctggtgatcctgacttcacaggcagccctcctgcctaccgcagcggccacagcaatt

SEQ ID NO: 1021878 - DNA, 120 bp, Artificial Sequence
  ENSG00000268257_28 (sequence is synthesized)
atattattgccatggcaattagaacctacaaggcaaacagagaacccttcctgtcctacttcccgatgtgctcaagcaagtcttcctctctcccctgcaccacccacttagcgtttcctt

SEQ ID NO: 1021879 - DNA, 120 bp, Artificial Sequence
  ENSG00000268257_29 (sequence is synthesized)
caacatatactattcacgctattttgccaaattaaaaaaaaaaatactcatccaattttttaacctccagcttctctatttatatggatactctttttaaaagatttttattttcttgct

SEQ ID NO: 1021880 - DNA, 120 bp, Artificial Sequence
  ENSG00000268257_30 (sequence is synthesized)
accaccaacacactccttggctacccttcttgtcccctgaactggctgttcccccagagagacacacagctcactccctcaactcaaggtctttacttacgtgtcacattctcagtgaca

SEQ ID NO: 1021881 - DNA, 120 bp, Artificial Sequence
  ENSG00000268257_31 (sequence is synthesized)
cttaccctatttaatatcctcacacacacacccgagcccccagtactcctgattacccttcctttccttttctgtagcagtcatcacagtttaacatactacttagccattgcttttttc

SEQ ID NO: 1021882 - DNA, 120 bp, Artificial Sequence
  ENSG00000268257_32 (sequence is synthesized)
atctgtctcccaccctactaaaatgtaagctccatgaaaaaaagagattcttgcctgttgtagtgactgattcaattccagtacctaaaccggtgcctacatatgactgatagtcaaata

SEQ ID NO: 1021883 - DNA, 120 bp, Artificial Sequence
  ENSG00000268257_33 (sequence is synthesized)
ttataaataaacattaactgttggctatgttttaatataatgtacacatataattttagatgatttaaccaagtaaataagaagaaaatacactataaattattgaaccatacccacaca

SEQ ID NO: 1021884 - DNA, 120 bp, Artificial Sequence
  ENSG00000268257_34 (sequence is synthesized)
cacagtagattgttccagcatatttgccacaataaacaatgctaccaaaaaccttttgtacaaatatctacatatagtactacttcttctatccgtttgagtcacaaaagattatgtgaa

SEQ ID NO: 1021885 - DNA, 120 bp, Artificial Sequence
  ENSG00000268257_35 (sequence is synthesized)
tatacgttttaaaatgttaacaggtattgccagactatcaggagagaccataaatcagataaaaacatgagttgtatccaaaactcaaccaggtatcatcttaaatatccaacagaattc

SEQ ID NO: 1021886 - DNA, 77 bp, Artificial Sequence
  ENSG00000279175_0 (sequence is synthesized)
caggtttaagtaactccccacccccaggtgctggggttagtgatgtgtctgggcttgaatggctctgtccatttggt

SEQ ID NO: 1021887 - DNA, 120 bp, Artificial Sequence
  ENSG00000279175_1 (sequence is synthesized)
tagtgatgtgtctgggcttgaatggctctgtccatttggtgctgtgttcactgagccaagttgagtgcgtgtggggtcctgtgctgggccctgggattcggggatggataagtgacttcc

SEQ ID NO: 1021888 - DNA, 120 bp, Artificial Sequence
  ENSG00000279175_2 (sequence is synthesized)
ctgctatgcaggatttgatttatgttcctcctggatgtctgcagtgccacccacccctgcctttgctgctttgctgccaaagacccccaggctgttttggccttggtggggcgagggctg

SEQ ID NO: 1021889 - DNA, 120 bp, Artificial Sequence
  ENSG00000279175_3 (sequence is synthesized)
gctgctgcatgtcttccaggtttcagattgagaagaaggccacattgaggggcatggggtggactgatgggaaagctaattagcatcctttggggcaaagtacaactatggggcaaaata

SEQ ID NO: 1021890 - DNA, 120 bp, Artificial Sequence
  ENSG00000279175_4 (sequence is synthesized)
caactaagaacaggaaggagctgaggaataaatgcctctccccgacttccctgatgtgggcttctgagaccatggctcatggagatgggctgcatggctgatcatcagctgggttttctt

SEQ ID NO: 1021891 - DNA, 120 bp, Artificial Sequence
  ENSG00000279175_5 (sequence is synthesized)
ctgaagccatagccagctcatgcacctgcctcacctcccttcccctccctgttgctcgtctagggtgccctcccctcacccccaaacccctgccaaagaaaaggcatcagcagtgagctt

SEQ ID NO: 1021892 - DNA, 120 bp, Artificial Sequence
  ENSG00000279175_6 (sequence is synthesized)
tgtcctggctctgtttttcagggaacctgggccagaatcatggtccccaaagatgaccatgtgataatccctggagccattgactatcatcttacatggcaaagggacatggtgggtgta

SEQ ID NO: 1021893 - DNA, 120 bp, Artificial Sequence
  ENSG00000279175_7 (sequence is synthesized)
gttagtgaccttgcaatgaggaggtcatcctggatgatccaggcgggcccagtgtgttcgctagtgtctgtataagagggacatggggagctttgactgcccatgaacatggcagcttga

SEQ ID NO: 1021894 - DNA, 120 bp, Artificial Sequence
  ENSG00000279175_8 (sequence is synthesized)
ccctggaggcaaggtggtagcttctggctctgaagatggaagaaggggccatgcactaatggatgcaggcggcctctgcctctagaagtggaaaagacaaagaaatggattctccactag

SEQ ID NO: 1021895 - DNA, 120 bp, Artificial Sequence
  ENSG00000279175_9 (sequence is synthesized)
agaacccagaaggaaccctggagcctccagaaggaaccagccctgctgacacctggattttagcccagtggaacagattttggactttgacctctaggactgcaagagaatccactgagc

SEQ ID NO: 1021896 - DNA, 120 bp, Artificial Sequence
  ENSG00000279175_10 (sequence is synthesized)
cgttggaagcccctgggtttgtgttaatttgttacagtagccacaagcaactaacaccatcctgttctccaggctgctgcctccagctgcagctggcgtgccctggccactggggccagg

SEQ ID NO: 1021897 - DNA, 120 bp, Artificial Sequence
  ENSG00000279175_11 (sequence is synthesized)
cagggtgggttttgatacctgcagcggcagcatccttggccatttcctggaagggccagttgccagacactgagatgcctgttactgcaactgtcccaccagcctggagcacgtgtttct

SEQ ID NO: 1021898 - DNA, 120 bp, Artificial Sequence
  ENSG00000279175_12 (sequence is synthesized)
ggagacaggcaaattctggaaggctccacctgctctcagactgcaggttgcgtctcaaagcaggctggcagacattttccactcttgatcaatcattttccaaaataagcatagacacag

SEQ ID NO: 1021899 - DNA, 120 bp, Artificial Sequence
  ENSG00000279175_13 (sequence is synthesized)
caacccggagagcagcttcggtttggctgtcggtggcgtgttagttactgtagtggtggcacagaggcgatatacgttaaatattagttctcactgactatagccttttaaacagagcag

SEQ ID NO: 1021900 - DNA, 120 bp, Artificial Sequence
  ENSG00000279175_14 (sequence is synthesized)
cgtgtgggtggcagcaggtgagttggctatactgagcttgggctgcccttggttgattcttgtttgtcaggcatgcagggggctctctgtgcgtccaggcatattccctgtctggatttg

SEQ ID NO: 1021901 - DNA, 120 bp, Artificial Sequence
  ENSG00000279175_15 (sequence is synthesized)
cttgtgttcatggattttcagcacctcctttcttctggtttgggaatgagtcaggtcctcactacacaaggccagagcagtatgcgtgtgtgggtaggggtgagcaggtgtcattccctg

SEQ ID NO: 1021902 - DNA, 120 bp, Artificial Sequence
  ENSG00000279175_16 (sequence is synthesized)
cctcccctcctccttcactgccccagccaccctgaccaccttgctgttctgaggacacactgagccagtgcccactgggcatcaggtgaaaggggacatcccacaagcccaccctcactt

SEQ ID NO: 1021903 - DNA, 120 bp, Artificial Sequence
  ENSG00000279175_17 (sequence is synthesized)
ctgacaccaatggcaagttcaggatctccaacactgccctgaggtttggtcatttgctagagggactcccagaacccacttaaagctgtcaccctcacagttacagtttctgatggtgaa

SEQ ID NO: 1021904 - DNA, 120 bp, Artificial Sequence
  ENSG00000279175_18 (sequence is synthesized)
gggatacacatgaaaatcagccgagggaagagttgcccagggcagagttgaacgcacccacacagcacctccattgtcctttcaccatggggtcataggcagcgttactctcccggtgat

SEQ ID NO: 1021905 - DNA, 120 bp, Artificial Sequence
  ENSG00000279175_19 (sequence is synthesized)
gtgggacaatgcgcatgcagtattgccagccggggaggtcatctgagcctccgtgtccagagtttctgctggagctcacttgcatgggtgtggctgactgtccacatggctcatctgtct

SEQ ID NO: 1021906 - DNA, 120 bp, Artificial Sequence
  ENSG00000279175_20 (sequence is synthesized)
ccagcccctccagcagctggctgatagagtgcaacccaaagccccctccctgaatgacatagttactccctggctggcccgagggccccaggtaagcagaggtactttatctggcagggc

SEQ ID NO: 1021907 - DNA, 120 bp, Artificial Sequence
  ENSG00000279175_21 (sequence is synthesized)
atttcggagcttaggagatcacctcccaggggctgaggtcacaggcccaacctctctgtgggcaaggttaggttcattatcacgtacctggtctttggactttcaaaggcccatgcctgg

SEQ ID NO: 1021908 - DNA, 120 bp, Artificial Sequence
  ENSG00000279175_22 (sequence is synthesized)
agctgtcttcaacacttctttcagttttctctcaatgcttcctccttggagacgtatttcctgcccctgtcactccatcactctcctcctaaccccagttactttttctttgctgggctt

SEQ ID NO: 1021909 - DNA, 120 bp, Artificial Sequence
  ENSG00000279175_23 (sequence is synthesized)
gctgctgcctggagtcatttcctatttactagtttgtttttggtctttctcctcccctagaatgtaatcttatgctgtgagggaccatgaccattctcttcccagctaaatccccagggc

SEQ ID NO: 1021910 - DNA, 120 bp, Artificial Sequence
  ENSG00000279175_24 (sequence is synthesized)
tggagttgtgctgcacatgcagagctaattcatccttgatagatagtaagagaaccgatgggggtctgtgtcagcagcaccaacatgaggttcacaccagcgtctcccaagatggcatgc

SEQ ID NO: 1021911 - DNA, 120 bp, Artificial Sequence
  ENSG00000279175_25 (sequence is synthesized)
tcccaagatggcatgcggcttagagacaagacagatgtggttgctttttgttgttgttgttttgtgttgttgttttgagatagggtcttactctatcactctatcacccaggctggagtg

SEQ ID NO: 1021912 - DNA, 65 bp, Artificial Sequence
  ENSG00000279175_26 (sequence is synthesized)
agctgggcttacaggcgtgagccattgcatgcccagccagatgtgtttttttttttttttttttt

SEQ ID NO: 1021913 - DNA, 120 bp, Artificial Sequence
  ENSG00000279175_27 (sequence is synthesized)
tttttttttttttttttttgctctaccccaaacctgtgagatggcagggaggaggctctgggaagagggggtgagggttggggtaaacctgtggattggatgctgatgtaggtggtccca

SEQ ID NO: 1021914 - DNA, 120 bp, Artificial Sequence
  ENSG00000279175_28 (sequence is synthesized)
tggtcccaggtgctcccttgggaggagatggacagtccggatggtgcagacaaaacacctccatccacattacctgcgtaattctctttgctttccagaacatcctttgtgtactgtgga

SEQ ID NO: 1021915 - DNA, 120 bp, Artificial Sequence
  ENSG00000279175_29 (sequence is synthesized)
ctgtgatgatctaatgctagtggattacatctaagtaggccttagtagaagccacctcccagtggttcctcggaggcatttggtccagaagcagatgattttagtgcaaagcacagaccg

SEQ ID NO: 1021916 - DNA, 120 bp, Artificial Sequence
  ENSG00000279175_30 (sequence is synthesized)
tatgcaggcctgagcagatcaggggacagacagatctggctgacatcctgatccgctggctgtggtggtgtggccattgcttgtagccacattgcagtcttgaatgtcccccttggaaat

SEQ ID NO: 1021917 - DNA, 120 bp, Artificial Sequence
  ENSG00000279175_31 (sequence is synthesized)
gggggacatttccaaggatgcctgcctggtcctctagttttctctttctctgttctctgtcatctgcacttttttcctcttgtcttgattgcttgtcctgtctcccctagtagacacccc

SEQ ID NO: 1021918 - DNA, 120 bp, Artificial Sequence
  ENSG00000279175_32 (sequence is synthesized)
ctctgacctctgctgcctcaggactgttgctgtataaaatattgtgagatgccctctgctcctgtttaaaaaaaaaaaaaatccttagctctgggtaagctaggcactgagaatgaggcc

SEQ ID NO: 1021919 - DNA, 120 bp, Artificial Sequence
  ENSG00000279175_33 (sequence is synthesized)
agtcattcaaaacttgtctctgagcattgattatactcatgtattatactgttaaggggtgaaggtcggctctagggtcagcttcctggatttaaatcccaactcagattaaagtgggag

SEQ ID NO: 1021920 - DNA, 120 bp, Artificial Sequence
  ENSG00000279175_34 (sequence is synthesized)
aataatagcaccaacgtgacaacctcaaagtgtcatttgtaaggataatgttagatcatacacttgatcacccgttagcagtgtaagggcagtgtgggaacatgagcatgaacagggcag

SEQ ID NO: 1021921 - DNA, 120 bp, Artificial Sequence
  ENSG00000279175_35 (sequence is synthesized)
cccagaagggagttgaatggacagatgggcaatgccagtttggaagtgggtgcatgcatccggtgggttcaggagcctggaagacttatccaaaagtcatctttgctggtgtttcttcct

SEQ ID NO: 1021922 - DNA, 120 bp, Artificial Sequence
  ENSG00000279175_36 (sequence is synthesized)
gtgtattttctctaaccttctccagcagtgacctgaattacttatgggtgaacactgaatgctgcccaggcaactagaggtttatagatgagatactttaaatttttaatgattcttaaa

SEQ ID NO: 1021923 - DNA, 120 bp, Artificial Sequence
  ENSG00000279175_37 (sequence is synthesized)
agagggagtggctattcttatgctttccagaatgaatagccaagggaaacctgtacagttgccatataaggagaaacctagacctggccttagcctctaggtcctggtgcagattcttag

SEQ ID NO: 1021924 - DNA, 120 bp, Artificial Sequence
  ENSG00000279175_38 (sequence is synthesized)
cacgtagcgcctaaaacctttgcgatttcctgagtgataggagcgtcttttgttattcataatgagatctgggtttatgctaacgaggtgactcagggtgggggctggccccagagtaac

SEQ ID NO: 1021925 - DNA, 120 bp, Artificial Sequence
  ENSG00000279175_39 (sequence is synthesized)
caacacaggattagagggttgggtctatcagtcctacccacccccagcctctgggtggggtggagaggggctggagagtgaatcaaatcaccaatagccaatgatgtaatcagtcacact

SEQ ID NO: 1021926 - DNA, 120 bp, Artificial Sequence
  ENSG00000279175_40 (sequence is synthesized)
tacataatgaatcctccgcaaaacccatcaacagtggggttcagagagctttggcgctgggaaacacacatggaggtgctggagggggacacgcagggagagggcatggaagccccgcct

SEQ ID NO: 1021927 - DNA, 120 bp, Artificial Sequence
  ENSG00000279175_41 (sequence is synthesized)
ggggacacgcagggagagggcatggaagccccgcctccctccccgaaaactctgtcctgtgcagtgtttcttattaattacactgtccctgagttctttttttttttttgagacggagtc

SEQ ID NO: 1021928 - DNA, 120 bp, Artificial Sequence
  ENSG00000279175_42 (sequence is synthesized)
ctgtgcctgagttctaacctttatagtaagttggtaatcctcagtaaaatgcttttctgagctctgtgtgttctgccaaatcactgaacctgaggtgagggccctgatttgtaatcagtg

SEQ ID NO: 1021929 - DNA, 120 bp, Artificial Sequence
  ENSG00000279175_43 (sequence is synthesized)
ggaagaggctcaagtagcctgggagccccatctgcagctggtgtctggaatgaagtcaatttggtgggactgagccctcagcctgtggggtcaactgtagctagtgttagaatcagactg

SEQ ID NO: 1021930 - DNA, 120 bp, Artificial Sequence
  ENSG00000279175_44 (sequence is synthesized)
gcctgtggggtcaactgtagctagtgttagaatcagactgaactctaggacaccccattggtatcagataatcagagaattgctgttggaattttcatgtgcgtccgtgtgaagagacca

SEQ ID NO: 1021931 - DNA, 120 bp, Artificial Sequence
  ENSG00000279175_45 (sequence is synthesized)
cagaggcctgacaggaatgacacgttgggtgtcagaaaaaaaacacagaaaactccctaagcagattggttgaaagcaggctgactgcatgtcatctgggggtgcgtctccccccaagag

SEQ ID NO: 1021932 - DNA, 120 bp, Artificial Sequence
  ENSG00000279175_46 (sequence is synthesized)
caggtttcacatctcattccccggttgattggacaagacccttcctgtctttaagttctgttttcttcctccctttgtctctccgaagaaaatcagctgcatgaaaacgatcctctgggc

SEQ ID NO: 1021933 - DNA, 120 bp, Artificial Sequence
  ENSG00000279175_47 (sequence is synthesized)
agaaattggtgctgttggagccgcacagaggtgccctcccgtgccccctggcccccaccgggccgtgtctcctcctgcctgttgcaatcagccctcgtccgactctttttggaagtgatt

SEQ ID NO: 1021934 - DNA, 120 bp, Artificial Sequence
  ENSG00000279175_48 (sequence is synthesized)
aaaacataactgtcatagctctgggggagacaggctgcagatcctgattataattcagaaggatctaaagaaaaagtaattttttaaaaaaattctggttaaagccaaagctcataagac

SEQ ID NO: 1021935 - DNA, 120 bp, Artificial Sequence
  ENSG00000279175_49 (sequence is synthesized)
gtgtgtgatggagtggtatgcaagagcacaattaatgtatgtcctagacatctgcccacaggattcagggctggcaaatgagtgcgtccctaaaaataatgactagtgctatctttaaaa

SEQ ID NO: 1021936 - DNA, 120 bp, Artificial Sequence
  ENSG00000279175_50 (sequence is synthesized)
tagcagattaagatggatggcctgggaagtacagtggcagcgtgtgctgtggtatccaggaataagttgtacctcctcggggtggcagtggaactgggccgtgaacagcttttgcttccc

SEQ ID NO: 1021937 - DNA, 120 bp, Artificial Sequence
  ENSG00000279175_51 (sequence is synthesized)
agagaggactgccatggcctgctgcatggaatttgattttaatctgtttgttatttttgggtttggtcttggactgggtttgaaatccagatgtgacttttttttttcttttttcagttt

SEQ ID NO: 1021938 - DNA, 120 bp, Artificial Sequence
  ENSG00000279175_52 (sequence is synthesized)
tctttatagcagcaatgttgtatcttgtgtgtttcctaacaagactgagctctgagcaaggcagcctctggaaccaaatgtctgcaggcccaggagacctttctagaaagttcataggtg

SEQ ID NO: 1021939 - DNA, 120 bp, Artificial Sequence
  ENSG00000279175_53 (sequence is synthesized)
aaaaaaaaaaaaaaaaaagaaagttcataggcggttctgcagtttgagccccttctgtgggtctgtgcctgctttagccgcttgagatatggcattgaacaaaacacaggccccgcctgg

SEQ ID NO: 1021940 - DNA, 120 bp, Artificial Sequence
  ENSG00000279175_54 (sequence is synthesized)
ggccccgcctgggagaagctgccaggccagctggggagacagacctgataagtgaaaatgagatcgcgtggcctgcatgctccgaagaagactaaggcaggaaacaggactattttctcc

SEQ ID NO: 1021941 - DNA, 120 bp, Artificial Sequence
  ENSG00000279175_55 (sequence is synthesized)
cgactgaattgtcctggtatccttgttaatatcagttgactgtgacttgagacttatcttggacacccctttctgttccgtgggtctgtgtctgccttgatgtcagtcccacagtttcga

SEQ ID NO: 1021942 - DNA, 120 bp, Artificial Sequence
  ENSG00000279175_56 (sequence is synthesized)
cgactggagctttgtagtcaggtgtgaaacagtggagtgtgggtcctccagttttgttcatctttttcagattgttttggcaatccaggagtcctttgaatttacatatgcattttattt

SEQ ID NO: 1021943 - DNA, 120 bp, Artificial Sequence
  ENSG00000279175_57 (sequence is synthesized)
caatccaggagtcctttgaatttacatatgcattttattttattttaattattaatattattattattttttagatggagtcttgctctgttgctggagtgcactggtgcaatctcggct

SEQ ID NO: 1021944 - DNA, 120 bp, Artificial Sequence
  ENSG00000279175_58 (sequence is synthesized)
tacaggcgtgagccattgcgcccggcctatatatgcatttaagacctgcttgtcaagttctttagaagccatctggatagtgattaatttgtaaaaatgatacttattatctttttgaac

SEQ ID NO: 1021945 - DNA, 120 bp, Artificial Sequence
  ENSG00000279175_59 (sequence is synthesized)
tgattaatttgtaaaaatgatacttattatctttttgaactgccaaagtaatatatgctgctgaaaacctggaagacagaaaaatccaatagaaggcagggctaattttttttttttttc

SEQ ID NO: 1021946 - DNA, 120 bp, Artificial Sequence
  ENSG00000279175_60 (sequence is synthesized)
catgtatgtcccttcaggcttctctgtgtttttcatttttcctacacaaatttggaatcattccagagctagtaagcatctagggccacatttggactagtaccttgggataaattagag

SEQ ID NO: 1021947 - DNA, 120 bp, Artificial Sequence
  ENSG00000279175_61 (sequence is synthesized)
ctggaattgccgggtcatatagtgtgcacagggctagggactgacttattttcctttctgaatgaagactctgaggtctagagaggttaaatgagtgactcaaggtcacacagctaaaac

SEQ ID NO: 1021948 - DNA, 120 bp, Artificial Sequence
  ENSG00000279175_62 (sequence is synthesized)
tctggtggagctgggtcttaatgcagaccctacatattcatgccatgctgtatttatacaggcatgtacaccagcgggtcgggattttagggggtgttttaaaattctgcctgcaaaacc

SEQ ID NO: 1021949 - DNA, 120 bp, Artificial Sequence
  ENSG00000279175_63 (sequence is synthesized)
agtagctgggactacaggtgtgcactgccccacctggctaatttttaattttttttgtagagatggggtctcattttgttgcccagggtagtctcaaactcctgggctcaaacactcatc

SEQ ID NO: 1021950 - DNA, 120 bp, Artificial Sequence
  ENSG00000279175_64 (sequence is synthesized)
aagtgctaggattgcaggtgtgagccgctgccccaggcaaacccattttaaagccatgagccaaaaattataaaagacatgcaaaatattatgagtagtcacttatctagtatttgcggc

SEQ ID NO: 1021951 - DNA, 120 bp, Artificial Sequence
  ENSG00000279175_65 (sequence is synthesized)
aatattatgagtagtcacttatctagtatttgcggcatctctcaggcttggggctttgctgggagctctgagggggtggaagaggctctgtcactggccttacctggctgtcaagggctg

SEQ ID NO: 1021952 - DNA, 120 bp, Artificial Sequence
  ENSG00000279175_66 (sequence is synthesized)
agtgtttggtggagggaagacgtctgcagcctgggaggctgcgggtcagaaggaggtcagccggggagctgggaggatcgtggggaacccgtggtggaaatcagcatggcgagagagtgg

SEQ ID NO: 1021953 - DNA, 120 bp, Artificial Sequence
  ENSG00000279175_67 (sequence is synthesized)
aagcaggcagaggagggctttgaagaccaaaaagggtagttaggattgctgctctgtgtgtctgtaaacttggtgttgtctctcgaatttaaatgacatgctttgaaaacaaaaaaacaa

SEQ ID NO: 1021954 - DNA, 120 bp, Artificial Sequence
  ENSG00000279175_68 (sequence is synthesized)
acaaaaaccaaacccataaaatctcactaagtggccagagcaagttcccggggggtggcgcatagatgcagcggtctgggttctgtggctgggggagttggcttggggtccgtggctggg

SEQ ID NO: 1021955 - DNA, 120 bp, Artificial Sequence
  ENSG00000279175_69 (sequence is synthesized)
tcagtcttcaagagccaccctgggtggcactccaggtctcttggtctggggggaataccctgaccccagcggtttcacggcctcctccccactcagcctgggggagagtccagggtcggc

SEQ ID NO: 1021956 - DNA, 120 bp, Artificial Sequence
  ENSG00000279175_70 (sequence is synthesized)
cctgtccccctccccccactcctgtcactatcagtcccctgtgctcagcttactggcagggttcctcctggctgtcccctctgcctccagcgctctttcctcaggtgtccacgcagctcg

SEQ ID NO: 1021957 - DNA, 87 bp, Artificial Sequence
  ENSG00000279175_71 (sequence is synthesized)
ctgcctccagcgctctttcctcaggtgtccacgcagctcgtcctcacccttttctgtctctgctcagatgccgcctgaggctcccaa

SEQ ID NO: 1021958 - DNA, 88 bp, Artificial Sequence
  ENSG00000279175_72 (sequence is synthesized)
tcccaggctcaagcgatcctcctgccagcgagcttgttacaattcctgcaccaacacggcaaagatacattgttactaagtaaggccc

SEQ ID NO: 1021959 - DNA, 61 bp, Artificial Sequence
  ENSG00000279175_73 (sequence is synthesized)
acattgtacattgttactaaagccttgcaccaacatggacacatcattactaactaaggcc

SEQ ID NO: 1021960 - DNA, 120 bp, Artificial Sequence
  ENSG00000279175_74 (sequence is synthesized)
atacatcccattactaactatggaggtgctttattcagatatcctcagtgtcacctgttctcctttggccgtctcagggttcctcccaggacaccacattgcattcagtcctgaggcttc

SEQ ID NO: 1021961 - DNA, 120 bp, Artificial Sequence
  ENSG00000279175_75 (sequence is synthesized)
tctgggctctgacagtttctcagactttccttgtttctgttgaccttgacagttttgaggattactgctcagagagtttgtagactgtccctctgttggggtttgtctgatgctttcttc

SEQ ID NO: 1021962 - DNA, 120 bp, Artificial Sequence
  ENSG00000270419_0 (sequence is synthesized)
ccccggagcgcgcctgcgtggggcgggggcggcagccgactaggggctgggtctggccgtttagggccgggtcttggcccgtcgcccacggtgcggagggctggtgggctttccttggcc

SEQ ID NO: 1021963 - DNA, 120 bp, Artificial Sequence
  ENSG00000270419_1 (sequence is synthesized)
gtcgggcccgccacggcgcgggtcttggctgcggggcggaggtggggcgggagagccgaggataagagtttgaggcttttcgaggcgcgtgccgcggcgtccgcctctgcgggactctgc

SEQ ID NO: 1021964 - DNA, 120 bp, Artificial Sequence
  ENSG00000270419_2 (sequence is synthesized)
gccgggcgccctcggccggcgcgcccggctcccgctttgtcgccgagggaagcacgcgcgacgcccctcccgtcgccgccgtggcttctttcggtgttcgtgatttgctgagaggctgga

SEQ ID NO: 1021965 - DNA, 120 bp, Artificial Sequence
  ENSG00000270419_3 (sequence is synthesized)
cgcgtgcgcacccacggggcggcgggcgggcgtggggggtccgggccacgcgggcgacgcgcctctagggaagcgatcttgttgcaccttcccgttattctgaaagcaaatcgtagccag

SEQ ID NO: 1021966 - DNA, 120 bp, Artificial Sequence
  ENSG00000270419_4 (sequence is synthesized)
acccgagcgcagcggcttagcaaataataaggggagcgtcagtcgtgctcgaaatgcttccttcgcgatggcgtcagtgttccgtgagggaatgaagccgcagtaggaaataaagaggct

SEQ ID NO: 1021967 - DNA, 120 bp, Artificial Sequence
  ENSG00000270419_5 (sequence is synthesized)
gtgcgcgtagtctgaaaagcagaagtcaacatttttacagatgaagaaagaatacggaggcaagaggtctttctctgcagtttggtggatttccaacatttagacttgtttggaagaatt

SEQ ID NO: 1021968 - DNA, 120 bp, Artificial Sequence
  ENSG00000270419_6 (sequence is synthesized)
tcctcagctgcaccaatgaagtccttgatctatagaagtcggcagtccctaaatctacgtctgcattttgttgcaaatcctttataacattccattaaaataatgcagagttatttaata

SEQ ID NO: 1021969 - DNA, 120 bp, Artificial Sequence
  ENSG00000233851_0 (sequence is synthesized)
cccaacactaagttagagagaaacccactttaaaagaatgagctgaagatggtcagggctggggctggggtagaactcaaaaggaggctcgaaaaactgtctggtgaacagaaaagattg

SEQ ID NO: 1021970 - DNA, 120 bp, Artificial Sequence
  ENSG00000233851_1 (sequence is synthesized)
cacacagagaaatcagagaaagaaaatcacttgaccttgacagggtgtagcgtaagccagagggatgctgggacccagagccggcctctggcactcctactgggcagggctcatgctggc

SEQ ID NO: 1021971 - DNA, 120 bp, Artificial Sequence
  ENSG00000233851_2 (sequence is synthesized)
tttctctgccttccaaggtaggttcaggtccagggtcaaaaaagggcttgccaagttcctctgcaagcttcattctgaacttccagtgtttttctgacaggaagagtaataagatatggg

SEQ ID NO: 1021972 - DNA, 120 bp, Artificial Sequence
  ENSG00000233851_3 (sequence is synthesized)
taagacaaagccctgtctgctggagctctagcagcagaattaagaaaagaattagttggggttttaattcgcactcttgctgggaacactaccttaggaggaaaaaggtcttcataaagg

SEQ ID NO: 1021973 - DNA, 90 bp, Artificial Sequence
  ENSG00000233851_4 (sequence is synthesized)
aaaggaaatttagtttcattcttctgaatcaatgtcactcagcttcagtaacacgtaggatcactggctagttttgatctgagactttta

SEQ ID NO: 1021974 - DNA, 120 bp, Artificial Sequence
  ENSG00000233850_0 (sequence is synthesized)
gttgaggctgagggaggtcacttcggcttcgcgacaccgtgagcgcttatcaggagttctcagtaggaagcgctttcctgcagcctcaggcagagaccgtgcgtgcaaggcgggaccgac

SEQ ID NO: 1021975 - DNA, 120 bp, Artificial Sequence
  ENSG00000233850_1 (sequence is synthesized)
aatctcggtgaccagcatctcgtaagaatgataaccatcagtaaccgggaccccaaaccttctcatcaaggcacctctcgggtcaccattactttaactttgaatttgggtctccttcat

SEQ ID NO: 1021976 - DNA, 120 bp, Artificial Sequence
  ENSG00000233850_2 (sequence is synthesized)
ttttccgctggatgcgttaatgtgcgcgacccacagctccaggcggcggtttcctggcggaactggaccaccgccacaggctgggggtctgcagtgggggatgggaccggccgcggccgc

SEQ ID NO: 1021977 - DNA, 120 bp, Artificial Sequence
  ENSG00000233852_0 (sequence is synthesized)
aacttctgaagagagtctctcaagagtgacttactatacatgttgaagtgctctgatggaaggaacagaaacctctgaaaggaagccgtcaaagtaggaactgccaacaaaaatgtgtta

SEQ ID NO: 1021978 - DNA, 120 bp, Artificial Sequence
  ENSG00000233852_1 (sequence is synthesized)
gcctaataaaaagcacctgtctggaagccatggcacctgatgtttctgaggtgtcacaggaatagagtagaatcacgaaaagagagagaacctcctcgcatccggcagcacacctaacgt

SEQ ID NO: 1021979 - DNA, 120 bp, Artificial Sequence
  ENSG00000233852_2 (sequence is synthesized)
tcattggcacagtggcctcatcagcacctctgacgtgatctaactatccctgtcttcttgtttccttcaagtccttctggaatctcctttctaagatgggagtaaagatacaaaggaaat

SEQ ID NO: 1021980 - DNA, 64 bp, Artificial Sequence
  ENSG00000233854_0 (sequence is synthesized)
aggcttttcttcttggagctgaaacaggcgcactggcgagggttgtgaggaaaggtttgcagcc

SEQ ID NO: 1021981 - DNA, 120 bp, Artificial Sequence
  ENSG00000233854_1 (sequence is synthesized)
caggcgcactggcgagggttgtgaggaaaggtttgcagccccctgccttggtctgctatagccagtgacacgatcaataccagggtgagcagcagaggaagctcagggaagattatgaag

SEQ ID NO: 1021982 - DNA, 120 bp, Artificial Sequence
  ENSG00000233854_2 (sequence is synthesized)
atgaggtcttctttgataacatgtcaaggagttacatttgacatagccctgttatttttaccacaggaatttgcctgagttctgatcaatgctaaaaacaccatttaacagtgccctttc

SEQ ID NO: 1021983 - DNA, 120 bp, Artificial Sequence
  ENSG00000233854_3 (sequence is synthesized)
ctgcctgggaagcccacaaagatttcgcttttcacttattactcatcaaactgactctggttcacagtggaaaagagaagaaaagctgatggagaaatggcagtgaagaaggagaacaaa

SEQ ID NO: 1021984 - DNA, 120 bp, Artificial Sequence
  ENSG00000233854_4 (sequence is synthesized)
atgtcagagcaatacttttgagcgactatatccttttcattaaagtcagtctatagacgtgaagccaacagggaccctcaggcctgtgcatcaggatggtgggctgcctaagtcctctgg

SEQ ID NO: 1021985 - DNA, 120 bp, Artificial Sequence
  ENSG00000233854_5 (sequence is synthesized)
ggacagcagtgccagaaggagtattggacacagtgacccgactgtatgagatgagaaaaaacaaaaacaggaggtccgcagtactgatgaactaatctgtcactcacaagctcaggtctg

SEQ ID NO: 1021986 - DNA, 120 bp, Artificial Sequence
  ENSG00000233854_6 (sequence is synthesized)
caaaccaacgatcagaaactgattaactgtgtaattgaattgaattgaaaatcatcccatgaataacaatccatcctaccttcaaggggttaggaagctaactacaggtaattgctatca

SEQ ID NO: 1021987 - DNA, 120 bp, Artificial Sequence
  ENSG00000233854_7 (sequence is synthesized)
gaaatctgatttgatttccaaaaattgtgtgaatgaaccaagtttcttcatcttgatatactaggcagggagtttgttcttccaagtactagactgcttaattgcttgcttgggggagga

SEQ ID NO: 1021988 - DNA, 120 bp, Artificial Sequence
  ENSG00000233854_8 (sequence is synthesized)
gaaatcctaggggaaaggcatatatgagcaatttctactctgtgaagccagcgctgtgtcctgagctggatcatggccagaaacagaaaagtctactcttccctacagtggaagcaactg

SEQ ID NO: 1021989 - DNA, 120 bp, Artificial Sequence
  ENSG00000233854_9 (sequence is synthesized)
tggatatttcatcctaggagtgaatgaaaaaacctaaagctcatacttcatgggaatctttcaatattctgactgaaaactggttatttgctcctccaacccaaagccatctaggaacag

SEQ ID NO: 1021990 - DNA, 120 bp, Artificial Sequence
  ENSG00000233854_10 (sequence is synthesized)
cactcagaacaggaaaaaaaaaagacaaaaataataattattccaaaacgtatttgagcagaaacaaacacaaacatttgcattattaaatgggcttgttcacacctgctgagtagatat

SEQ ID NO: 1021991 - DNA, 120 bp, Artificial Sequence
  ENSG00000233854_11 (sequence is synthesized)
aagacgatatttaagacaagagctaaaaaataaaccatccctttctggttttgagtgacagcagagcaataaaaattattttcacattcttttccctattgttagaagtaatcatttgag

SEQ ID NO: 1021992 - DNA, 120 bp, Artificial Sequence
  ENSG00000233854_12 (sequence is synthesized)
taaatacacttatctgtgctgtaactattgaaatgaatccacttcaaatatgtataccacctttcttttttatatttctagatatggtttcaatatagactttctgacttttatggtata

SEQ ID NO: 1021993 - DNA, 120 bp, Artificial Sequence
  ENSG00000226004_0 (sequence is synthesized)
ggatacacacctacctaccgagagacctccaaacagagacatcaacacagaaacctccgcagagataaccagatctccatatgcaaacccatgtaaaaagaaacctagagaaacagatgc

SEQ ID NO: 1021994 - DNA, 120 bp, Artificial Sequence
  ENSG00000226004_1 (sequence is synthesized)
ccagatgaagaggggtttccagacagattcttggctgacgtttctgtcagtggtgtgaaaggacatttacccagattctatagatattttggttatgcactcaacaaacctacaatgaaa

SEQ ID NO: 1021995 - DNA, 120 bp, Artificial Sequence
  ENSG00000226004_2 (sequence is synthesized)
agatgtagaataggagagctgaaaaagcctccacttccagtggctcttagagtgtaattagtccaagggacagcaagctgccttctagcagaatcgttgtgatcccaaagcccacatgac

SEQ ID NO: 1021996 - DNA, 120 bp, Artificial Sequence
  ENSG00000226004_3 (sequence is synthesized)
tggggcctctctctggtcctttatacagtaattaatatttaaaagatctcgctaaagccctgtcaagtcctgaagcaagattttgaaaaataaaaaaactcataaaacacaaaatagaac

SEQ ID NO: 1021997 - DNA, 120 bp, Artificial Sequence
  ENSG00000233858_0 (sequence is synthesized)
agcccacgttcactattgaacacaacggaagggggaattattgtgcttcttgctttgattcccaagctggtgttgtctgagcctgtctggcatgtgctctgcctgccctgacttctgacc

SEQ ID NO: 1021998 - DNA, 120 bp, Artificial Sequence
  ENSG00000233858_1 (sequence is synthesized)
ccaggaggagcattcaaggagccaaggaatgggtccaggcattgtgctagtatctagccatggcaagatgctagatctaaccatgacgagagcagctaagatcggactgtacctgagtga

SEQ ID NO: 1021999 - DNA, 120 bp, Artificial Sequence
  ENSG00000233858_2 (sequence is synthesized)
gcccattgaatcctccaccagcaccacacggggtttctattgtttgtctcagctgcagcaacataatatgagacaagggccaagaactgcagaactgtgcacggtgtttagaagaggctg

SEQ ID NO: 1022000 - DNA, 120 bp, Artificial Sequence
  ENSG00000233858_3 (sequence is synthesized)
cgagctgctgctctgcagagttgggaggtgctttcgggctctgcaggctccctgcaggcccttgctgactgtccatggcctgcacctgccctacctgctgagctgccccatcagctgctc

SEQ ID NO: 1022001 - DNA, 120 bp, Artificial Sequence
  ENSG00000233858_4 (sequence is synthesized)
ctggctgtggtttcctgaggggtcccgtctgcatcggctgccctgtgtcctgacactatggtgggtttgcaagtggcaaagtccagggaaggagactggggagcatggccatgggtcatc

SEQ ID NO: 1022002 - DNA, 120 bp, Artificial Sequence
  ENSG00000233858_5 (sequence is synthesized)
cggggggcacggagggttccggctcccgcccaggtccacctgcttcatcagcagtggtcaccaagattgcataaccaggacgatgacaacgctgagagctctgttgcagttaaagactta

SEQ ID NO: 1022003 - DNA, 120 bp, Artificial Sequence
  ENSG00000233858_6 (sequence is synthesized)
agaacaacttgtgcctgctgactaatacattttatcacccaggcagcgtcaggactctgagagcctctcacatgctgctgtcatctgagcgagacctcaagatttgtcatcgagcaggct

SEQ ID NO: 1022004 - DNA, 120 bp, Artificial Sequence
  ENSG00000233858_7 (sequence is synthesized)
gacccttgcctgaatggacctcacattcttgaggcagggagagatctgcaatcagcatgatcgatcagcgattttcataagacgttagaagtcatcagagcttaggaaacagggtgagga

SEQ ID NO: 1022005 - DNA, 120 bp, Artificial Sequence
  ENSG00000233858_8 (sequence is synthesized)
agtaggggaggagccggaagggcccccatttaaaacaaggtggccaggataggcctctctgtaggggtgacattgaagaaatggtgggagagggtgtgaggtgcacatctctgagggcag

SEQ ID NO: 1022006 - DNA, 120 bp, Artificial Sequence
  ENSG00000233858_9 (sequence is synthesized)
agtgttctggagacaggaaaccatctgtgcaaaggccctgtggtgagagggtgctaggagctagcaagcccagtctactcaacacagccatcattttaaaacctcggtgagccctgtccc

SEQ ID NO: 1022007 - DNA, 120 bp, Artificial Sequence
  ENSG00000233858_10 (sequence is synthesized)
ttatcttctgaaccccctcccacagaagcggatgtcactgagagtgaaagctgcagtgtagggtggcctcctctgcacaccggccctggccctctgacctcttctaccccatgatggtcc

SEQ ID NO: 1022008 - DNA, 120 bp, Artificial Sequence
  ENSG00000233858_11 (sequence is synthesized)
cctgtcagctgggtctagagtggaccgtcggggcagacctggaaggggaaggctgtcaagttcctgctcccctgtgacatacagcaacacatttgtttccccctggattctggggatcag

SEQ ID NO: 1022009 - DNA, 120 bp, Artificial Sequence
  ENSG00000233858_12 (sequence is synthesized)
caacatgtgcgggtgggggcagggcagtcctgctgctctgggatgggctgccccctcagggaggactggccagctgggtggctctgctcctggagagtgaccggccatttgctgggtgga

SEQ ID NO: 1022010 - DNA, 120 bp, Artificial Sequence
  ENSG00000233858_13 (sequence is synthesized)
tggggtgactgtcctgagagcttggcaccaccagaagtgtagtccacgcagcccttcacaggtggctcagggtgcccagcggggcaagaggtggccctcaagctaagcttgagcttaagc

SEQ ID NO: 1022011 - DNA, 120 bp, Artificial Sequence
  ENSG00000233858_14 (sequence is synthesized)
tccctgtgggagaagacgactgaagcctggccaggctgggccatctccccagcagccaccagggcttgctgtgagatgtgggagccatgctagggtcctgccccggggatgttggtaggc

SEQ ID NO: 1022012 - DNA, 120 bp, Artificial Sequence
  ENSG00000233858_15 (sequence is synthesized)
atggtgggaagcagtgcaattatggatattttctggagataatcatcaacaggatttgctgatggaatggacctggaatacaagaagaaaaggaatcaaggatggctctgaggttcgggg

SEQ ID NO: 1022013 - DNA, 120 bp, Artificial Sequence
  ENSG00000233858_16 (sequence is synthesized)
cttgagcaacttggatgggggtgctgctgagtcaggtgggaggggagcaggctcaggggatgcggactccatttgaagtggccgcgttggagatgtctgtggacatccacgtgaaatgct

SEQ ID NO: 1022014 - DNA, 120 bp, Artificial Sequence
  ENSG00000233858_17 (sequence is synthesized)
gagtggccagctggacatgtggatctggtgtccagggggaagtttgggctgcagatacagatttcaccaggacatatttttagtgatgcatagactgaccaggctcgaaagaagcacagg

SEQ ID NO: 1022015 - DNA, 120 bp, Artificial Sequence
  ENSG00000233858_18 (sequence is synthesized)
gtgtgcagccccattctggtaagcgtgtctctgcctttactgaggtgtctccactgcatccttgatttaatggaattcaactgaaccatcattgagcatctgttgtatacgatgtactct

SEQ ID NO: 1022016 - DNA, 120 bp, Artificial Sequence
  ENSG00000233858_19 (sequence is synthesized)
ggaggcataaaaactattgggagaaatgaggaagtaaataagtaatattgatataattcttctattaataagaatcaatttatctgaaaacaaaaagtctcttaagcatttgaataaaat

SEQ ID NO: 1022017 - DNA, 120 bp, Artificial Sequence
  ENSG00000233858_20 (sequence is synthesized)
agaaagcctttattaacatatgaaaataaatccatacccataaataaaaatctgcacactcacgggtgctgaccagtatatcctagctcaccagcacagtgggctgggtgtggagaaggt

SEQ ID NO: 1022018 - DNA, 120 bp, Artificial Sequence
  ENSG00000233858_21 (sequence is synthesized)
gggcattcagctttcacatcaggcagagggagccttggagcggagggtgctggctcaggactgctggccaagcccatggtggagtcaggccggcctgcagttggacactcttgactgatt

SEQ ID NO: 1022019 - DNA, 120 bp, Artificial Sequence
  ENSG00000233858_22 (sequence is synthesized)
aaacattaataggcaattctaacaaaaacagagaggatggcaactccataggaaggagggccacatgtgggggtgaattccaagtcaaacattttccccaaagaatttgttgttaaactt

SEQ ID NO: 1022020 - DNA, 120 bp, Artificial Sequence
  ENSG00000233858_23 (sequence is synthesized)
ttaattttgagataactgaagattcacatgtagtggtcagatataatatagcatgatcttctgtgccttttacccagttttctccgtcataacatctgcaaacgtagcactatattacag

SEQ ID NO: 1022021 - DNA, 120 bp, Artificial Sequence
  ENSG00000233858_24 (sequence is synthesized)
tatctcaaccagtgtataaatgcatacactcaccagtgtcactggggttcctccagtctcagttcatttgtgtgcatttattttccgtaactgtatcactgctgtagagtaggatggcca

SEQ ID NO: 1022022 - DNA, 120 bp, Artificial Sequence
  ENSG00000233858_25 (sequence is synthesized)
ccttgacagtcaagaggcagaacagctccacacgagggttcctgtcttccttgctcctggaaccattaatctgctctccgtctctataattttatcctttgagactgttacataaacaaa

SEQ ID NO: 1022023 - DNA, 120 bp, Artificial Sequence
  ENSG00000233858_26 (sequence is synthesized)
accacacagtaacctcacaaggcatttttgcactcagtaaaatgcccttgagacccattcacgttgctgtgtgtatcagagcccgttcctttccatagctgagccgtgttcctggtgtgg

SEQ ID NO: 1022024 - DNA, 120 bp, Artificial Sequence
  ENSG00000233858_27 (sequence is synthesized)
acacaccactgtttaatcagtcatcgtcgaaggacggctgccttgtcccccattttcgaccattacaaatgaagcttccatgagcattcatgtacaagtttctttgtgaacttaagcttt

SEQ ID NO: 1022025 - DNA, 120 bp, Artificial Sequence
  ENSG00000233858_28 (sequence is synthesized)
taagctttcaagaaattaaaaaagaaatgttttcaaatgcttgagcaaatagccaagatcccagggcaccgtgggaaagtgtggaagtgaggattttttttttttttttgagatggagcc

SEQ ID NO: 1022026 - DNA, 120 bp, Artificial Sequence
  ENSG00000226007_0 (sequence is synthesized)
acccatagtaccccattccttgctgcaatgtaattacaagtgtgctcctggtggtctttaactgaagggcactgactgggtactggtgaagttccccgcaggaactgagtcagaccccat

SEQ ID NO: 1022027 - DNA, 120 bp, Artificial Sequence
  ENSG00000226007_1 (sequence is synthesized)
ctcagggccctgcagaagataggtgcctgctctaaggcgtggaccctcgcgacagccctggcccgtcttgacgggcgagggttactgtacttgtcccaatcgtacagatgagaaagctca

SEQ ID NO: 1022028 - DNA, 120 bp, Artificial Sequence
  ENSG00000226007_2 (sequence is synthesized)
gactcagggccagcaaccccggtcccagcggagcgcccggcacgcgccgacacttcagcaccagtcgcggtggccaccactgtgcgcggagatggctgcgacgcgtgcgcagatctcgat

SEQ ID NO: 1022029 - DNA, 120 bp, Artificial Sequence
  ENSG00000226007_3 (sequence is synthesized)
cccaaactccctcctgccagaatctggacccgaatccacccattgcccattttccgctgccgctggagagaatctctgaggtccccaggacagcctgcctgcacggaagagatgcctcct

SEQ ID NO: 1022030 - DNA, 120 bp, Artificial Sequence
  ENSG00000226007_4 (sequence is synthesized)
caattaaatgctgttttccatgaccgtctctgttcttcccatacgcgaatggcaggcatccagatctccaagaatagaggattaggagagactccaccacctatgtcctcacagttaatt

SEQ ID NO: 1022031 - DNA, 120 bp, Artificial Sequence
  ENSG00000226007_5 (sequence is synthesized)
atcgatttgtgtcacttgcccattttctcacttcctgtttgtgtgtcaaggagtattaataaatctttgcctatttaaagatactagccttggattttcaaatattgcatattttgacat

SEQ ID NO: 1022032 - DNA, 120 bp, Artificial Sequence
  ENSG00000226007_6 (sequence is synthesized)
gttgtattttttccatataactttctattgaatttctttttccatatgataggtggtgaaggtttagcccagtaaagcagagaggttaagaggttagactgggggctctggagccagacc

SEQ ID NO: 1022033 - DNA, 120 bp, Artificial Sequence
  ENSG00000226007_7 (sequence is synthesized)
tatgtagatctgagtcctggctctggcacttgaaagccgtgtgaccttggttaagatacttagcccctctctgccaaatggagaaataagggcacctaccccgtagggtagttgtgtgag

SEQ ID NO: 1022034 - DNA, 120 bp, Artificial Sequence
  ENSG00000226007_8 (sequence is synthesized)
tacacaagttaatacacttcaatcactagcaagaaagtgaatgtcaagctgtatttgttcaggcagccatatggtagccccacctcattagtaaactgaggtattgaagtatcttctttt

SEQ ID NO: 1022035 - DNA, 120 bp, Artificial Sequence
  ENSG00000226007_9 (sequence is synthesized)
tctttcagaaaatatttgtcaagcaccttctgtgttctaagaactgttctagagctttgcatgctatggaggtctagaaattcacattatggtggcaggtgacagacaatacaaagaggt

SEQ ID NO: 1022036 - DNA, 120 bp, Artificial Sequence
  ENSG00000226007_10 (sequence is synthesized)
aaagcaatttcatatagtgataacctagggaggcgtgctaaaaggagccaaggtgtagtggtgactggaaggtgaccagggaaaccactgtagggtttctaactgatgagatctgtgaca

SEQ ID NO: 1022037 - DNA, 120 bp, Artificial Sequence; identical to SEQ ID NO: 907474
  ENSG00000226007_11 (sequence is synthesized)

SEQ ID NO: 1022038 - DNA, 120 bp, Artificial Sequence
  ENSG00000226007_12 (sequence is synthesized)
gcgattaagtgcagacccccatgttgctcttgagcctgagcggcttcagggagccatgtttgttactggcgggcgccggcctcactgagcatgtgcagccctggccgggcggcctcaaag

SEQ ID NO: 1022039 - DNA, 120 bp, Artificial Sequence
  ENSG00000226007_13 (sequence is synthesized)
tgacatcacagggcggttcctgaagtggacgtagttgtaagagctagttattttagacaatgcctctgggatcagggactctaatctggaaataggtagtgggagaggtcggtgatgctg

SEQ ID NO: 1022040 - DNA, 120 bp, Artificial Sequence
  ENSG00000226007_14 (sequence is synthesized)
tctcggggtcagagacctgagctatatggggttagagaggggccctgggcaggcgagtctctggggagtgtggtgagaatccttgtgtaagatgctgggaggaggtggggtcagggctgg

SEQ ID NO: 1022041 - DNA, 120 bp, Artificial Sequence
  ENSG00000226007_15 (sequence is synthesized)
ggtccgtgggccgacgggttgggggatggccagcgtcagggatcagtagtagagattctatgtgccctgatcgccagtagaggttttaaatacagagtattcatgagtttagcaatgtta

SEQ ID NO: 1022042 - DNA, 120 bp, Artificial Sequence
  ENSG00000226007_16 (sequence is synthesized)
ttcgcctctcataatttaaataatttgaagttttcccccagtaactagtgtcttagaagtcatgaaaatttcagaaaatgacaggtcttctgagttcgtgatgggagttgggcagcagtc

SEQ ID NO: 1022043 - DNA, 120 bp, Artificial Sequence
  ENSG00000264673_0 (sequence is synthesized)
tctcattagggaaagatgatatgcatatgcacacatgtaaagaggagtgacagtaattagccaaaagctctgtggacataattgcctctgatgaagtgctgactgatgacatcagacagt

SEQ ID NO: 1022044 - DNA, 120 bp, Artificial Sequence
  ENSG00000264673_1 (sequence is synthesized)
aggctattgacagtgtaccccggggaaagctaaatgcaaaagagaagcgaactgcctcatgaagtgagatcaggattacagggtcagaaatgtggagagggtgattcagatggacaaagg

SEQ ID NO: 1022045 - DNA, 120 bp, Artificial Sequence
  ENSG00000264673_2 (sequence is synthesized)
ggtaacatgaaggcaggagctgtgaaggcctttgaaggtcaggccagttgtaataaaactatttcacattgtcaggtatcttgcgatggttgccaaacatttttctatggtttgcataaa

SEQ ID NO: 1022046 - DNA, 78 bp, Artificial Sequence
  ENSG00000264673_3 (sequence is synthesized)
ttttctatggtttgcataaatacatatctattttatttatgtatttatttattttatggttcgctcttgttgcccagg

SEQ ID NO: 1022047 - DNA, 69 bp, Artificial Sequence
  ENSG00000264673_4 (sequence is synthesized)
cccagctcactagttgggattacagggtcccttgaagcccaggccaaatggccctgctgtggccttgcc

SEQ ID NO: 1022048 - DNA, 120 bp, Artificial Sequence
  ENSG00000283125_0 (sequence is synthesized)
caggagtcagtccacctggaacttctgcctccagtgcactgagtctgcacggaccaccagggctgacactgccttacttaatatgggggtgggggaagtccctgcgatatataatggtct

SEQ ID NO: 1022049 - DNA, 120 bp, Artificial Sequence
  ENSG00000283125_1 (sequence is synthesized)
caatttaaattctgtgctgtttttattttagctgtgtaatttggaaacttcaaataaaaagcctgaaaggaaagttggactatttaagcttacacagactctattaatgctatatggtta

SEQ ID NO: 1022050 - DNA, 120 bp, Artificial Sequence
  ENSG00000283125_2 (sequence is synthesized)
ttaaaaatatgaaagtttatttaacatctaaggaaaggtacttaattagagggacactcaacaagaagaattgaggatctaagtaaatagtccccatctgctcctggtcctaccacctgg

SEQ ID NO: 1022051 - DNA, 120 bp, Artificial Sequence
  ENSG00000283125_3 (sequence is synthesized)
cgattacttcctcttcttctctgatagattttagccaaccaattttgttttatttgtgcaagttgagaggccacctgttatggaatatacttccacattaaacaaagtgaacatttccta

SEQ ID NO: 1022052 - DNA, 120 bp, Artificial Sequence
  ENSG00000283122_0 (sequence is synthesized)
ggcctcactctccgggcgggtgctggacggacggacggacggggcagccgtgctcacagctcagcagcgcggggccttggcgcgcggggcgcttccccgggtcgccgtcatggccgcgga

SEQ ID NO: 1022053 - DNA, 120 bp, Artificial Sequence
  ENSG00000283122_1 (sequence is synthesized)
cggaggtggcacgcccgagcggcctcgcctgagctccgggggtcgtcgccccgcagggtaggtgtttgggtgctcgcggctgcggcgggcgggctgggggcagcggtggccgtgcattgc

SEQ ID NO: 1022054 - DNA, 120 bp, Artificial Sequence
  ENSG00000283122_2 (sequence is synthesized)
ctgcgaggacggcgctgggttcgcggccgcgaggagggtgtgcctttgccgcgccgcctacgtgcgggtccgggctccgcggggccgggtgcgggaccccgcagatcgtcacccgcaacc

SEQ ID NO: 1022055 - DNA, 120 bp, Artificial Sequence
  ENSG00000283122_3 (sequence is synthesized)
caggcagccccaccgcgagtgccgccggaccccctggacgccgctgccagaggcgttcgcgcctatctggtatgaggtccacagacccgattcttacaacctggcgctctaacctcgcca

SEQ ID NO: 1022056 - DNA, 120 bp, Artificial Sequence
  ENSG00000283122_4 (sequence is synthesized)
acgggccaggaaaaaaacagaacaaggaaaagaagaaaaagtctgttccaagtaataatgggactagacagtaactgtttgcactttcgtctcttatggaaaatatgattattttgatgc

SEQ ID NO: 1022057 - DNA, 120 bp, Artificial Sequence
  ENSG00000283122_5 (sequence is synthesized)
tttagtattacagactgtatcagacatactcttaaaagtatttaaaaacgtggggtcctaaaaatttcctagatcgggacagctgataatgcgacttctgttagtctccgcatccaactt

SEQ ID NO: 1022058 - DNA, 120 bp, Artificial Sequence
  ENSG00000283122_6 (sequence is synthesized)
tcagggcggaatggggatttctaccttttactgaatatactcctgtaattttgaatattttttctcatcaaatgtgttactttcatgttttaggaaaccaataaaaatcaaaaatagaaa

SEQ ID NO: 1022059 - DNA, 120 bp, Artificial Sequence
  ENSG00000283122_7 (sequence is synthesized)
cacccagcttaggtcctccttcttccaggaatcctcctctaacccctccctcccaggcaggatcggaggcccctcccgggtgctttctggggcctcactgaggtcctggtcccctaagtc

SEQ ID NO: 1022060 - DNA, 120 bp, Artificial Sequence
  ENSG00000283122_8 (sequence is synthesized)
ctcccccgcagcccctccgcgtattaacccaccggtctcgctgggctcagagattgcttacttagcacatggtaagtgattaatactgtttaatgaccgagggaaaagataaaatgttct

SEQ ID NO: 1022061 - DNA, 120 bp, Artificial Sequence
  ENSG00000283122_9 (sequence is synthesized)
ctgatgtttcacgcttttcgctctgaagttaaatagtggtaaatttatatgcgcttagataagaacatttaacagttaaggatctggaaaagttgacgacgtccgatgtccgtgtttcct

SEQ ID NO: 1022062 - DNA, 120 bp, Artificial Sequence
  ENSG00000283122_10 (sequence is synthesized)
gatccagcagttgcacgcctgggtattcatccttaagaacaatgtttttcagaatttgaagtccattttagtgggtcgtaaagtcatttaaatggatgatcagaatttgtaaaacacaga

SEQ ID NO: 1022063 - DNA, 120 bp, Artificial Sequence
  ENSG00000283122_11 (sequence is synthesized)
cggagaatagaacatcagtgtctctcaggtcataggggtgttcgctttatgaatctctctccccctcctcagtttcatacatacacaaatgtgtgtcatgatgtaaaacgtcattcctta

SEQ ID NO: 1022064 - DNA, 120 bp, Artificial Sequence
  ENSG00000283122_12 (sequence is synthesized)
gtatgagtcatggacaaaaaagtttgaaagccactgccctagataaattttaatacatgtccacaagcagacgtgtacaagaaggttgactgtaatggcagaaaactggatgccgccttc

SEQ ID NO: 1022065 - DNA, 120 bp, Artificial Sequence
  ENSG00000283122_13 (sequence is synthesized)
ttgaaccaaaaaaaaaaaaagttgccggagaatgctgtgtgatatcttctatgtaaaattcagaacctggtggagcaaagctgttgtttagggatgcatgtataggcattaaaagtagta

SEQ ID NO: 1022066 - DNA, 120 bp, Artificial Sequence
  ENSG00000283122_14 (sequence is synthesized)
aagaaaaaaagtcaagctaatggtcatctcctagtggggaggagagggtcaggggctcagagatgctggaaatgctttatcgcctgacctgtgcaatggttacatgggtgtttgctttgt

SEQ ID NO: 1022067 - DNA, 120 bp, Artificial Sequence
  ENSG00000283122_15 (sequence is synthesized)
aactctttgttaaatgatacacactgggtttgaatgttacatttccccccaaatatgttaaaatatgggtgttgcaaactgaagaagcctgagtctagggctctccgtctgttattctta

SEQ ID NO: 1022068 - DNA, 120 bp, Artificial Sequence
  ENSG00000283122_16 (sequence is synthesized)
tttcctggcttctttttagaaaaaaaaaatcttgctcagggaggagtacctagggaatttatcagtaatgttttatttcataaattccatggtggacataccagtattcattaaattatt

SEQ ID NO: 1022069 - DNA, 120 bp, Artificial Sequence
  ENSG00000283122_17 (sequence is synthesized)
ctttatgtattcttataacttaatttataatatttcaaaaagcatttaggagaaaacatcatttggtgtgtttgctttcccaaaagtcacatttacatgttttgtacacaactggaatat

SEQ ID NO: 1022070 - DNA, 120 bp, Artificial Sequence
  ENSG00000283122_18 (sequence is synthesized)
tttatatagtaattttagctaaaatcaaattttgttatgaaaaacgaaatactaaaaagtatataaaaatcacagaactttacagactttcagcgttttaaaatgctaacatattgtatt

SEQ ID NO: 1022071 - DNA, 120 bp, Artificial Sequence
  ENSG00000283122_19 (sequence is synthesized)
tacctcaataatttctgttcctcagttctttcaggccacatttttagtgctcaatagcctcatatgactttaatattttattatattttattatgttatatattttacattatacattat

SEQ ID NO: 1022072 - DNA, 120 bp, Artificial Sequence
  ENSG00000283122_20 (sequence is synthesized)
agaacagaatatttccatcattgcagaaatttatattggaaaacattctggatacaaatatttgttatatacttgcagatattaaactgtagacattaatccttatgctttttgtcttaa

SEQ ID NO: 1022073 - DNA, 120 bp, Artificial Sequence
  ENSG00000283122_21 (sequence is synthesized)
ttaagatactctactattaatgaaatgtattctgaatatttttctaagaatttttaagtttatgttttgtccacattttgttctttaatttacctgagacatgtatatattgagatgtat

SEQ ID NO: 1022074 - DNA, 120 bp, Artificial Sequence
  ENSG00000283122_22 (sequence is synthesized)
tttatgttatgagatcaagcttaattaattttcagattcccacatgaaaaggtaattgtcccaatatcagtgattagcagtgccacttctgtcacatacagtacccagatatgtttgggc

SEQ ID NO: 1022075 - DNA, 120 bp, Artificial Sequence
  ENSG00000283122_23 (sequence is synthesized)
ttatttccaggctgttaatcctggtttatttgtcatttgaaaatactgcagattttcatttactgctgctttctatgtagtatattgttcagttctaagaatttaagattttttcattgt

SEQ ID NO: 1022076 - DNA, 120 bp, Artificial Sequence
  ENSG00000283122_24 (sequence is synthesized)
gatattttttcttcccctaagagatttgtagaaagtagtctagttccaatgtggaaggttttgtgagttatccttttgttactgatttctaatttgcactgtagttagcatacgtgtcaa

SEQ ID NO: 1022077 - DNA, 120 bp, Artificial Sequence
  ENSG00000283122_25 (sequence is synthesized)
ggccaacaattctttgaaattcgagaattgctttatggttttaactgctccttgtatcatcaagaataatttgtactcacagacttttgaggcaatgtatgtaggtgtgtgtatatatat

SEQ ID NO: 1022078 - DNA, 120 bp, Artificial Sequence
  ENSG00000283128_0 (sequence is synthesized)
acggcagcccgtctcccgttaggagccggggaggcaaggtccagcgtacggtccgggggaaccttaactgtcgtttctgtgcctggacagtaggttggagagtggggtctgaatgagcta

SEQ ID NO: 1022079 - DNA, 120 bp, Artificial Sequence
  ENSG00000283128_1 (sequence is synthesized)
cagtagtgaacgccgacggcttgtgttgagggcaggaaagggtgcacacagctccggcaggtgcttccgcgagaaaggtgactgatacaacaacgtagaggaccctgcaatgtggagagg

SEQ ID NO: 1022080 - DNA, 120 bp, Artificial Sequence
  ENSG00000283128_2 (sequence is synthesized)
catgaaactggaggtccagtgccgtgagttaacaatcaagacgtccatacaggagatgcattggtggatgggtgaagagatgataaaacgaaaagcccagaggagaaatgaggatgcaaa

SEQ ID NO: 1022081 - DNA, 120 bp, Artificial Sequence
  ENSG00000283128_3 (sequence is synthesized)
gagaaagaaaaaaaccccaaccagagagctgcaaggatatcaggaagagggagcgtccggggacggagcagagcgcgcttttccgaacgccttactccgggctggggctgctttctgcaa

SEQ ID NO: 1022082 - DNA, 120 bp, Artificial Sequence
  ENSG00000283128_4 (sequence is synthesized)
gcccgtgcggtgcacgtgaggaggctttccttgcggtggtgaaatcaaacacacctaaggcgtgagtcctccagactttcctcacctgggcagcttggccccggccacctgtgcctcgcc

SEQ ID NO: 1022083 - DNA, 120 bp, Artificial Sequence
  ENSG00000283128_5 (sequence is synthesized)
cggagaaactccaacgtgcagggcgctgatggacgagatagagcacgacatcaccaaggctcggcagaagaagaccaaggtgggatccttccgaatcaatcccgatgggactcaggagag

SEQ ID NO: 1022084 - DNA, 120 bp, Artificial Sequence
  ENSG00000283128_6 (sequence is synthesized)
gagaaagatccccctagctcagtcggaggcgttcctaacggatcttttggagaaagtctgtgagcgaatgaacgactacaagcttgaggaagaccctgtgacgaaggagagaactttcaa

SEQ ID NO: 1022085 - DNA, 120 bp, Artificial Sequence
  ENSG00000283128_7 (sequence is synthesized)
gagattcgctcctaggaaaggagacaaaatataccaagaatttaaaaaattgtatttttattctgatgcttacagacctttgaaatttgcgtgtgaaactataatagaagagtatgaaga

SEQ ID NO: 1022086 - DNA, 120 bp, Artificial Sequence
  ENSG00000283128_8 (sequence is synthesized)
tgaaatatcctcacttatcgcccaggagacacactatctagctgacaagctgtgcagtgaaaaatcaggtactgtgtctgatgtaacatgtgctcgctgctcgcacaccctctctctctc

SEQ ID NO: 1022087 - DNA, 120 bp, Artificial Sequence
  ENSG00000283128_9 (sequence is synthesized)
actcagccttgcagcgtcttgtttgcagaccgagcctcgctgcctctgcgatccacggctctgacacaggatcccccgtctccgctgaatcagaaacgacagcatgtgagagaaaacaga

SEQ ID NO: 1022088 - DNA, 120 bp, Artificial Sequence
  ENSG00000283128_10 (sequence is synthesized)
taaacagaaaccacagggctgtgtggccttcctctttgtactttctttcctctatatattaagtgaattcaaacattcttgatttccagttaaggagaaaattcttgttcagaattagaa

SEQ ID NO: 1022089 - DNA, 120 bp, Artificial Sequence
  ENSG00000283128_11 (sequence is synthesized)
gactccaaagcactttctttttaaaaactttgagagagaggatttttccatcctggaccagggaaggagaccctcacttcatggcttgagtatctgctacagcagcagaagatctgtgtg

SEQ ID NO: 1022090 - DNA, 120 bp, Artificial Sequence
  ENSG00000283128_12 (sequence is synthesized)
aaacttctgctaatcatactgagctctaggagtgccgttctgctggtcgtagagaggagtaaagtcacacccaaaggtcaatgtctgcattttatgtttgcatgttgtctttcatgataa

SEQ ID NO: 1022091 - DNA, 120 bp, Artificial Sequence
  ENSG00000283128_13 (sequence is synthesized)
gaaaaattttgtctcttgtttataccgtgtttgtctccgtttatgattcattttgaaaatctgttggttgacatcatgacaaaccctgcgtttttttataggtgaagctgaggagtacat

SEQ ID NO: 1022092 - DNA, 120 bp, Artificial Sequence
  ENSG00000283128_14 (sequence is synthesized)
gaaacttaaattaacctttgcagattttgataaatcaagcttgacaatagaggatttaattctgtattgaggaaaaaagcgaagacatttcataaacaaaatagggatttcataatgtat

SEQ ID NO: 1022093 - DNA, 120 bp, Artificial Sequence
  ENSG00000283128_15 (sequence is synthesized)
gctgcttattttataacagtgtatgtgcacatatgcaagcgcagtggctgtctgataagaactggatttgaatcctcaaatacttgattgcctataaatttaaggaaatacatggcaaca

SEQ ID NO: 1022094 - DNA, 120 bp, Artificial Sequence
  ENSG00000283128_16 (sequence is synthesized)
tttagtggaatgtgtaaaaactaatgaatgctttaatttatagtaaacaataattatattggcctctcaaacaccattctgagtttaagtggcttagaaagttgatttattattgcatca

SEQ ID NO: 1022095 - DNA, 120 bp, Artificial Sequence
  ENSG00000283128_17 (sequence is synthesized)
ggtgttaaaagatgacactagtgattgcgttttgtttcgctccaaactcttctggcttgtttgtttttcttctaaacgttttttttttggctcacatttagtgtgttgagtttactacta

SEQ ID NO: 1022096 - DNA, 120 bp, Artificial Sequence
  ENSG00000283128_18 (sequence is synthesized)
aataatctaccattcttctacaggaatggaaaaagagttgggacctggtgggaaattatcttttggccacacttaatatacaaagtctagtaacaatcactcccggaaatttctttatct

SEQ ID NO: 1022097 - DNA, 120 bp, Artificial Sequence
  ENSG00000283128_19 (sequence is synthesized)
ctgttacatttgcattcaatggaatctgactttaatgattaaaaatgtcagggtatggtctacaccagtttctaaaaagagattctcattgtctttggtgacaatcaagtgggtaggatg

SEQ ID NO: 1022098 - DNA, 120 bp, Artificial Sequence
  ENSG00000283128_20 (sequence is synthesized)
ctacaaatcccccccccaacccccccgacccaaaactctttgccatattgttacttagttgcttaaaaagcacattatgtgtttaaatcattctcctgactcttcagcaggaaacaattc

SEQ ID NO: 1022099 - DNA, 120 bp, Artificial Sequence
  ENSG00000283128_21 (sequence is synthesized)
ttaaatttaggaaaatttaccaaagctaaggggaagggctttccatgccccctccccacctaaactctgattaaaagttagtgagttaatgtcacttaattacttgggtgcttctttttt

SEQ ID NO: 1022100 - DNA, 120 bp, Artificial Sequence
  ENSG00000283128_22 (sequence is synthesized)
gtcttgtctgtggctgcttaagtctgatggctcctacataacccagcgaactcgcacccgagctgacacacgatggaaatagaactgaataataattaacactattttccagtagggtag

SEQ ID NO: 1022101 - DNA, 120 bp, Artificial Sequence
  ENSG00000283128_23 (sequence is synthesized)
gacaattgttatttaaaacatagtccctatagctttatttaaacgtatctagttaaggttaatttggcatttaaagtagtaaatcaggaacattctcctaacttggattttcttgggaaa

SEQ ID NO: 1022102 - DNA, 120 bp, Artificial Sequence
  ENSG00000283128_24 (sequence is synthesized)
tgcactaaacaggacaattattcctgaaaacctagtgaccttcacaggaacatggcgggacctgtgacactaagtaagcttcagtgaaaactgttcacggtcgtaaccgtagaagtgttg

SEQ ID NO: 1022103 - DNA, 120 bp, Artificial Sequence
  ENSG00000283128_25 (sequence is synthesized)
ccaaatctgtttccatactctctttgatcatcatcaaacattctcaaatgtaggcaatgctaacactaattatagaaattaagaaaatgtgggctcctgtttgtaactaaacggacgtgg

SEQ ID NO: 1022104 - DNA, 120 bp, Artificial Sequence
  ENSG00000283128_26 (sequence is synthesized)
ggaggtgcacctcctgtcactgaggggtgcctttcatggacagtgatgctttgctttgaatggagagggcgaggaaccttgacttacagtgactatctaaggttgtgataaatatggcat

SEQ ID NO: 1022105 - DNA, 120 bp, Artificial Sequence
  ENSG00000283128_27 (sequence is synthesized)
ttcaggtttttttcttggatttcccattaaaaatagtcttgtatcttgcaaatttttaatatctcatgacttgtgtattttttctttccagaattttttccagatcaaacttgccaaact

SEQ ID NO: 1022106 - DNA, 120 bp, Artificial Sequence
  ENSG00000283128_28 (sequence is synthesized)
catgtaaatattcgtagcttacaaagttactgattcaacctgtatttgagtgataacacctaaaccactggatttcttctggcttcaggaagtcttaggtttccctgtgggccactgtta

SEQ ID NO: 1022107 - DNA, 120 bp, Artificial Sequence
  ENSG00000283128_29 (sequence is synthesized)
ggttgtgctgcttttgctaatgaacaatgagatagagtagctactcactttagcatcctcctagccaccttggtgccttgtaagtcacatttattgaccaaaaccaaaataaaacaagtc

SEQ ID NO: 1022108 - DNA, 120 bp, Artificial Sequence
  ENSG00000283128_30 (sequence is synthesized)
atggggaggaaacaaaaacaaaaacaaaataaaagaaacaaggcaacattatagggtgagagaacgtttctcagagttgatgaaaagctgcctaattctatgtccaaaaaaaaatccctg

SEQ ID NO: 1022109 - DNA, 120 bp, Artificial Sequence
  ENSG00000283128_31 (sequence is synthesized)
gaaaaacacggggtggggtgtgtaatgcttattaaaataatgaggagagaagacttgtttgaggctgcatggtttcaaattgttcttttatgagatggttggtttgggtctccatgaaga

SEQ ID NO: 1022110 - DNA, 120 bp, Artificial Sequence
  ENSG00000283128_32 (sequence is synthesized)
cattgtgtggtcgaagatgtggtttgcgagtgcccatggcaggattcccactgcggagactcctgtacatcgggtatgaggcagcacattgcgtgcaatgcattctggtcttttttcctc

SEQ ID NO: 1022111 - DNA, 120 bp, Artificial Sequence
  ENSG00000283128_33 (sequence is synthesized)
cctccagaagaggctccatttatgtgttaggctttaagaggctgggcgtaccaaaaggaagtctctgaaacgcagtcctgtcgaacacctctggagttgattcttctgatatcacaggag

SEQ ID NO: 1022112 - DNA, 120 bp, Artificial Sequence
  ENSG00000283128_34 (sequence is synthesized)
ttcttcctatcactgtatattattgggtgcgagcccccggtccttcctctatgaggaggcagtggagggaagagttgaacctcttctcgcacacacacctgagactccctggctctctct

SEQ ID NO: 1022113 - DNA, 120 bp, Artificial Sequence
  ENSG00000283128_35 (sequence is synthesized)
gtgggccacaggatgggcttcagttatggcgagtaataattttgttatcgcggtttttacattgatttggaacatggtgttacacaaaatgctgaaattgaaaaagacaggatgagtcac

SEQ ID NO: 1022114 - DNA, 120 bp, Artificial Sequence
  ENSG00000283128_36 (sequence is synthesized)
ctttgccctgtctcctcttcaagtctgatcctaattgaacggagagtgcaaactgcacgccaagatttgcagaacaaaggcctccccgcccacgagttcctcatggccttgcctcagtcc

SEQ ID NO: 1022115 - DNA, 120 bp, Artificial Sequence
  ENSG00000283128_37 (sequence is synthesized)
ccgaaatcccgctgttagcctccctcactagaataaggcattagcacagaagccaacgttgggggaaaagaaaatcaatacagcgtggaagagaaagcaggaagccatggagggaggaag

SEQ ID NO: 1022116 - DNA, 120 bp, Artificial Sequence
  ENSG00000283128_38 (sequence is synthesized)
agactgaggctccggctggaaggacttcgtttgtgataagagcagagaggaaaagcagcaagaaagaaaagtcgctgtacactttgggtctggacatcaaagaaacaaaggaaatgctta

SEQ ID NO: 1022117 - DNA, 120 bp, Artificial Sequence
  ENSG00000283128_39 (sequence is synthesized)
gattcagagtggcacgtgtgtagaaaaaagtcctgctttcctgtcttgggggacaccactatcatcccatgtaagtgaccagtgctccccaagtggccctctcctggcatttcactgaga

SEQ ID NO: 1022118 - DNA, 120 bp, Artificial Sequence
  ENSG00000283128_40 (sequence is synthesized)
cacaagctccctgaaagctggggcttacctgaccatgtgccccctgcactcccagggctgagacctgcgtctggtccctgctagacacccagcgagggttgacagcatgagcgaatgagc

SEQ ID NO: 1022119 - DNA, 120 bp, Artificial Sequence
  ENSG00000283128_41 (sequence is synthesized)
ttctccgtctgcccgtaagtgtgatggacaccttctcctacagccacccgtttcacacatcaggcaaacgtctgtcaagtccactcctgaaaatcctggtattttctctacttctctatg

SEQ ID NO: 1022120 - DNA, 120 bp, Artificial Sequence
  ENSG00000283128_42 (sequence is synthesized)
ataattttaatgtttccttgaggcagtattcttgcaccggaaagcagcatgaatgaggacttggaaagcccccgcttgcctacgaaggcgtcatggaaggatgtggcattggacaggtga

SEQ ID NO: 1022121 - DNA, 120 bp, Artificial Sequence
  ENSG00000283128_43 (sequence is synthesized)
tgcagtcacagcctcgccctaggccactccgggtctctgctgccaggctacgaggagcagagaaacacaggtcctctagcgcagatactttctccatgcaagtcttgaacttctgaaagt

SEQ ID NO: 1022122 - DNA, 120 bp, Artificial Sequence
  ENSG00000283128_44 (sequence is synthesized)
catccatgtgggttaaaataaacttcttccaaactcctgtgaatattgataattgatcttctcttatgaattatgaatgttcttaatgacatctcaaatggtaaatcctttccaaaaggc

SEQ ID NO: 1022123 - DNA, 120 bp, Artificial Sequence
  ENSG00000283128_45 (sequence is synthesized)
tttcagtttacctcacccagctccatcagaggactcactatctatggcagctatggccttatgaaatgtatttctcaaataataagacttgaaagtagaaatgactccatgatctatggg

SEQ ID NO: 1022124 - DNA, 84 bp, Artificial Sequence
  ENSG00000283128_46 (sequence is synthesized)
gaatggatgttgtgtgagcaggcatgaaaacaacattcaggccaggcatggtgcctcacgcctgtagtcccagtactttgggag

SEQ ID NO: 1022125 - DNA, 88 bp, Artificial Sequence
  ENSG00000283128_47 (sequence is synthesized)
caacattaatctccttgtacatctccagtagagatcttgggtgaccaggtgcactgtcaataagtagcaatattttggaaagaatcat

SEQ ID NO: 1022126 - DNA, 120 bp, Artificial Sequence
  ENSG00000283128_48 (sequence is synthesized)
gtgcactgtcaataagtagcaatattttggaaagaatcattttcctaagaagtaagtcttaacagtgggcttaaagtattcagcaaaccatactgtacacagatgtgccgttatccaggc

SEQ ID NO: 1022127 - DNA, 88 bp, Artificial Sequence
  ENSG00000283128_49 (sequence is synthesized)
cgttatccaggctttgctggacgtaatccttaagagccctaggatgtttggattggtaaaattggcttcaacttaaagtcaccagctg

SEQ ID NO: 1022128 - DNA, 120 bp, Artificial Sequence
  ENSG00000283128_50 (sequence is synthesized)
acaagagagtgagcctgacctttgaagatttgaagccagttattgacttctctccagccatgaaagtcctagaaggcatcttcttccaatagaaggctgtttggtctacactgaaagtct

SEQ ID NO: 1022129 - DNA, 120 bp, Artificial Sequence
  ENSG00000283128_51 (sequence is synthesized)
gttgtttagtggagccatcttcattgacggtcttagctagatcttctaaagaacttgctgcagcttctccatgagcacttgttatttcaccttacacttttatgttatggagacggcttc

SEQ ID NO: 1022130 - DNA, 120 bp, Artificial Sequence
  ENSG00000283128_52 (sequence is synthesized)
tatgttatggagacggcttccttccttaaacctcatgaaccaacctctgccagcttcaaacttttcttttgcagcttccttacctcccttggccttcacagaattgaagagagttagggc

SEQ ID NO: 1022131 - DNA, 120 bp, Artificial Sequence
  ENSG00000283128_53 (sequence is synthesized)
ggctgcagggaatgttgtggctggcttgatcttctatccaaagcactaaatctcgctccatatcagcaaggagcttgtgtcactttcttagcagttgtgtgttcactggcatagcacttt

SEQ ID NO: 1022132 - DNA, 120 bp, Artificial Sequence
  ENSG00000283128_54 (sequence is synthesized)
taatttccttcaaaaacttttcctttttattcacaacttggctaactggcacaagaggcccagctttcagcctatcttggctttcaccatggcttcctcactaagcttaatcatttctag

SEQ ID NO: 1022133 - DNA, 120 bp, Artificial Sequence
  ENSG00000283128_55 (sequence is synthesized)
cttttgattgaaactgaaagataatgtgacccttcttttacttgaacacttacaggctgtggttgggtttcaatgttgttgaaacccaacattgtttttgtgtctcagggaatggggagg

SEQ ID NO: 1022134 - DNA, 120 bp, Artificial Sequence
  ENSG00000283128_56 (sequence is synthesized)
ccccaggagagggagggagaccagaaacggccaatcagtggagcagtcagaacacacacaacgtttatccattaagttcatcatcttatatggtgccgttcatggcaccccacgacaatt

SEQ ID NO: 1022135 - DNA, 120 bp, Artificial Sequence
  ENSG00000283128_57 (sequence is synthesized)
tcaaagatcactgatcacagatcaccatgagagatatcataataatgacaaggtttgaaatattgtgaaaattaccaaagcgtgacacaggacaaaagcgagcatgtgctattgggaaaa

SEQ ID NO: 1022136 - DNA, 120 bp, Artificial Sequence
  ENSG00000283128_58 (sequence is synthesized)
ctattgggaaaatggtgctgatagacttgcttgacacagggttgccacaaaccttcaatttgcaaaaacgcactctctgtgaagcacgataaagtgggctacaagaaaatgaggtctgcc

SEQ ID NO: 1022137 - DNA, 120 bp, Artificial Sequence
  ENSG00000283128_59 (sequence is synthesized)
tgcctctgtgcgctgtacatgaaaacaagcctaattttcaagagaccttggcagtggctgtttgtttttgtgactgttgaggtttttttgtttttgagtttcatcttgtttttaaataaa

SEQ ID NO: 1022138 - DNA, 120 bp, Artificial Sequence
  ENSG00000283128_60 (sequence is synthesized)
ccacgagcaaagcttattacacggcttgggacaaatatatgggtcaaaaaatcaccccaaaacatgaaagaactttatacaaaggggatccacttgggagggcttagacccagcaccacg

SEQ ID NO: 1022139 - DNA, 120 bp, Artificial Sequence
  ENSG00000283128_61 (sequence is synthesized)
aggtttccagttgtgttcagcctcatttcacatctaatgactgttctgagactgcatgttggccttaccattggaagagaacaatgggagtcagcacttaatcattttgtagtggtgaat

SEQ ID NO: 1022140 - DNA, 120 bp, Artificial Sequence
  ENSG00000283128_62 (sequence is synthesized)
acagagcagagctgagcgtgttctgagcatgctctgagcatgttctgagcgtgttctgaatgtgttctgaatgtgttccgagcctgttctgagcgtgttgagtgtgttctgagcatgttc

SEQ ID NO: 1022141 - DNA, 120 bp, Artificial Sequence
  ENSG00000283128_63 (sequence is synthesized)
caagcatgttctgagtgtgttctgagcctgttctgagcgtgttctgagcatgttccaagcatgttctgagtgtgctctgagcatgttccaagcatgttccaagtgtgttctgagcctgtt

SEQ ID NO: 1022142 - DNA, 120 bp, Artificial Sequence
  ENSG00000283128_64 (sequence is synthesized)
gtgagcatgttataaacatgttctgagtgtgttctgagcatgttccaaacatgttccgagcaagttgtttctaagcatgagcatgttctgagcatgttctgcgtgtgttctgagcatgtt

SEQ ID NO: 1022143 - DNA, 120 bp, Artificial Sequence
  ENSG00000283128_65 (sequence is synthesized)
ctgagcgtgtttcgagcatgttctgagcatgttctgggtatgttctgagtgtattctgagtcggttctgagcgtgttataaacatgttctcagtgtgttctgagcatgttctgagcatgt

SEQ ID NO: 1022144 - DNA, 120 bp, Artificial Sequence
  ENSG00000283128_66 (sequence is synthesized)
taagtgtgttctgagtgtgttctgagcatgttccaagtgtgctctgagcatgttctgagcgtgttctgagcatattctgatcatgttctggctttcatgggccatgtgcgtgaggaagaa

SEQ ID NO: 1022145 - DNA, 120 bp, Artificial Sequence
  ENSG00000283128_67 (sequence is synthesized)
aaatagaaatcagaaactttgaaatgtcaagcttaaactttacatggaatttaaaattaaagctgggtcaggatgattcttttaaaccctccaaaaatcagttcccaagttctatatgtg

SEQ ID NO: 1022146 - DNA, 120 bp, Artificial Sequence
  ENSG00000283128_68 (sequence is synthesized)
gacaaggaattaattttgatagaggccatttgagtcagctaccaccatcatcatcctgcatcaacaaatcaggacaggattcagtggctgctaagagcaggcatttccccctacgctcat

SEQ ID NO: 1022147 - DNA, 120 bp, Artificial Sequence
  ENSG00000283128_69 (sequence is synthesized)
gggtctgtaggtccactgcagttcggctgacctaagcgtgagctcagtggggcggttttgctgcaggggtgcagggtgggttcaggtctgcattacgtgtgttcatcctggagtccagga

SEQ ID NO: 1022148 - DNA, 120 bp, Artificial Sequence
  ENSG00000283128_70 (sequence is synthesized)
tacctggagcatgctctcttcatagccaatcaccacagcatgaaagtaaagccaaagacatctgcaaatatttcattgaccaaagcaagtcacatagccaagctcaacatcaaagagcat

SEQ ID NO: 1022149 - DNA, 120 bp, Artificial Sequence
  ENSG00000283128_71 (sequence is synthesized)
gggaaagcatacttcatcacaaagaaggggtcaaggggaggagagaagtgattaccggctgagaaatagataccctatatataaatatatatagttatatctcaaagatattgtgagttc

SEQ ID NO: 1022150 - DNA, 120 bp, Artificial Sequence
  ENSG00000283128_72 (sequence is synthesized)
taacgtgcacgcgcactcgtgcggcgcccgcgagccctcacttcctacaacccgagaccctccggacccgcgaccccggacccccgtccccttctccgcgcccggctgggcagcgggcag

SEQ ID NO: 1022151 - DNA, 120 bp, Artificial Sequence
  ENSG00000283128_73 (sequence is synthesized)
cgccggaccctgatgggctctcggcccttactgcccctgcgccttgcggccctgagaacaagacgtgagcaggacggatagcgcccggcactcatgtctgagtttgcattttgagcagtg

SEQ ID NO: 1022152 - DNA, 120 bp, Artificial Sequence
  ENSG00000179818_0 (sequence is synthesized)
cctcgtttgttcaggggctgccggccagggcttcaggacgtttctgcggctttccccgcgcggcctgggctcccgcggctgcttttcgggcccatgggcgcagccactgcgccaggctca

SEQ ID NO: 1022153 - DNA, 120 bp, Artificial Sequence
  ENSG00000179818_1 (sequence is synthesized)
aggggggcggccccgtcagggcccgccatcttggaaggccttttttgccggttcttcccgctgaggaagtgtcgctcaagacgctggcctatgagttgtgatttctgccttttccccttc

SEQ ID NO: 1022154 - DNA, 120 bp, Artificial Sequence
  ENSG00000179818_2 (sequence is synthesized)
ctccttgggctaagccagaccagaaagggccccgtgcgcaacgtgcttcacaatctctcagggaaagcggctaacgtggcgctactccgcctcccctgttccttacccttggggcggccg

SEQ ID NO: 1022155 - DNA, 120 bp, Artificial Sequence
  ENSG00000179818_3 (sequence is synthesized)
ccatgtttcctgaacacaaaatggcgacacgtggttagcattcgtcgccaacgagaaattggggtcggcccgaaagctctagaatgcacccctcttcctccccggggccttccacctccg

SEQ ID NO: 1022156 - DNA, 120 bp, Artificial Sequence
  ENSG00000179818_4 (sequence is synthesized)
cgagttttatgacttaaaaaagcccacaggctggtctgaaggtcggaggcctaattttaacgcgttttcctccctttaatttgaaacgggaacgcgaatgactgtaaaatgtgggcacaa

SEQ ID NO: 1022157 - DNA, 120 bp, Artificial Sequence
  ENSG00000179818_5 (sequence is synthesized)
tatttaatctctcgcctttttaaagcttaatagtggataataggggggcagtatcaagggataatttgggtccccacagtaccaaagcatttagaaacctctgtttaatttaaggaatga

SEQ ID NO: 1022158 - DNA, 120 bp, Artificial Sequence
  ENSG00000179818_6 (sequence is synthesized)
gataagttactgcttttctagacttcctagcatgggctgttgtgctggagagaacgagagctacgaagagactacagtgcctctgactttttcataggacagttggccgaggaagacaaa

SEQ ID NO: 1022159 - DNA, 120 bp, Artificial Sequence
  ENSG00000179818_7 (sequence is synthesized)
cataaagatgaagtgcttaattcaaggtcacacaatgtcggggatggacctccagatttccttactgacctgcattatcttgtggatacctgagtgaattccacaccacccattttatag

SEQ ID NO: 1022160 - DNA, 120 bp, Artificial Sequence
  ENSG00000179818_8 (sequence is synthesized)
atgaaaccactgagacatggagcaattgactgagtagtcactgccccacccctgcctggagcctcacacatgactcgcctcctctcagtgaccacaggtgagacgtggtcttgtaacaca

SEQ ID NO: 1022161 - DNA, 86 bp, Artificial Sequence
  ENSG00000179818_9 (sequence is synthesized)
taagaatgtgactttggagccagcctgctaggggctgaattctgactcagccatttactaactgtgtgacctcacaacctctgctt

SEQ ID NO: 1022162 - DNA, 120 bp, Artificial Sequence
  ENSG00000179818_10 (sequence is synthesized)
acaggcgtgagccactgcgcccagccttgtattttttttcagtttgggtagctgtccctaattcatttgttaaaggagaagcaagagcaagaacctttaatctgttctcctcttccctaa

SEQ ID NO: 1022163 - DNA, 120 bp, Artificial Sequence
  ENSG00000179818_11 (sequence is synthesized)
tctgttctcctcttccctaatttgaaagtagcttgttattttgaatatcactttctctgaaatagcacatctccatctcagagaatggatttaatgtttggatacagccaaaagtcattt

SEQ ID NO: 1022164 - DNA, 120 bp, Artificial Sequence
  ENSG00000179818_12 (sequence is synthesized)
cattaccaaaccatggggtgaatataccatgtaaagcagtttgggatcagaactcacagtctgaattgtaagtgatgagactgctgtctctctgctacagcttcttggctggctctgaag

SEQ ID NO: 1022165 - DNA, 120 bp, Artificial Sequence
  ENSG00000179818_13 (sequence is synthesized)
gctctttgaaggcagatcctaacaaggggactgctttgaagggccattgttcatttggaatgataaagtctatgttgttcaaaaaacaaatgcttgtagcaggtattttttcactccaga

SEQ ID NO: 1022166 - DNA, 120 bp, Artificial Sequence
  ENSG00000179818_14 (sequence is synthesized)
ctgagaatattggtgggatattgataaggggtactgaatggtaataaacatgtgctctagctctgtgctagtcagcttatttcagaactctagtttgattcagtttcttgcctctgactc

SEQ ID NO: 1022167 - DNA, 120 bp, Artificial Sequence
  ENSG00000179818_15 (sequence is synthesized)
aaaatggagggagagtgatttttacataagagaacacacccacatatccttttggcagcagctacctgccagagatgttgaagaagagtagccaacctttacacagcagatattgtgtgc

SEQ ID NO: 1022168 - DNA, 120 bp, Artificial Sequence
  ENSG00000179818_16 (sequence is synthesized)
cagtcatagtcctaagtataataccttacatgtataaacttcttataaggttggtgctctgtaccgaattgaatagtatcccccaaaattcatgttgtcccagaacctatgaaagtgatc

SEQ ID NO: 1022169 - DNA, 120 bp, Artificial Sequence
  ENSG00000179818_17 (sequence is synthesized)
gggcggcgaggcgaggcctgcggagcggaggaagacaaacataaagatgaagtgcttaattcaaggtcacacaatgtcggggatggacctccagatttccttactggtgagacgtggtct

SEQ ID NO: 1022170 - DNA, 120 bp, Artificial Sequence
  ENSG00000179818_18 (sequence is synthesized)
tgtaacacagtggttaagaatgtgactttggagccagcctgctaggggctgaattctgactcagccatttactaactgtgtgaccttaggtggagtctcactctgtagcccaagctggag

SEQ ID NO: 1022171 - DNA, 74 bp, Artificial Sequence
  ENSG00000179818_19 (sequence is synthesized)
ttgtcccttggtgtgggattgcttccagtacctctgtgtgtaacaaaagctgcaccattcaagtcccacagttg

SEQ ID NO: 1022172 - DNA, 120 bp, Artificial Sequence
  ENSG00000179818_20 (sequence is synthesized)
tgtgtgtaacaaaagctgcaccattcaagtcccacagttgccctgcgaaacctctgtatatgaaaagttggccctccatgtacatgggtttcccatcctgtgagtactgtatttttgatc

SEQ ID NO: 1022173 - DNA, 120 bp, Artificial Sequence
  ENSG00000179818_21 (sequence is synthesized)
ctcatttggttggaaaaaatctgcatataagtggacctgtgcagttcaaacccgtgttgttcaagggtcagctgtatatttacagttgttatattgtcttgataaattgatcctctgtca

SEQ ID NO: 1022174 - DNA, 120 bp, Artificial Sequence
  ENSG00000179818_22 (sequence is synthesized)
ttatgtaatgatgttctttgtcttgttttacagtttttacttagtctgttttaagtatagctacccctgctctctttggtttccatttgcctgaaatgtctttttctagcctttcacttt

SEQ ID NO: 1022175 - DNA, 120 bp, Artificial Sequence
  ENSG00000179818_23 (sequence is synthesized)
cattctatgtgtgttcttaaatgtgaagttaatcttcataggccacatatagttgggtctgtttttaaatttttgatagtatccaacctaatgggtgtgaggtgataattctttgtggtt

SEQ ID NO: 1022176 - DNA, 120 bp, Artificial Sequence
  ENSG00000179818_24 (sequence is synthesized)
tctctaatgattagtgatgttgagcatctttacatatgattgttggccatttgtgtcccttctttggagactattcaaagtcctttacccattttaaaaatgaaggcatttgccctttgt

SEQ ID NO: 1022177 - DNA, 120 bp, Artificial Sequence
  ENSG00000179818_25 (sequence is synthesized)
tttgccctttgttgttgagttgtaggaattttaaaaatatattctggatagtaaatccttttcagatataagatttgcaaatgttttttcccattctgtgggttgtcttttcactctttt

SEQ ID NO: 1022178 - DNA, 120 bp, Artificial Sequence
  ENSG00000179818_26 (sequence is synthesized)
ttttttttttgagacaaggtcttgctctattatcactggagtacaatggcgtgaatgtggctcactgcagtctcgaccttcctggctcaagggatgctcccacctcagcctcccaaatag

SEQ ID NO: 1022179 - DNA, 120 bp, Artificial Sequence
  ENSG00000179818_27 (sequence is synthesized)
tcagcctcccaaatagctgggactatagacacatgtcaccacatctggctaattttttattttttgtagagatgagatttcaccatattacccaggctgttcttgaactcctaggctcaa

SEQ ID NO: 1022180 - DNA, 120 bp, Artificial Sequence
  ENSG00000179818_28 (sequence is synthesized)
acaggtgtgagccactgcacccggctgccttttcactcctaattgtatcctctgttgcacagaaatttttaagtttgatgtagtcccatatgtctccttttttttccccatgctttttat

SEQ ID NO: 1022181 - DNA, 120 bp, Artificial Sequence
  ENSG00000179818_29 (sequence is synthesized)
cttttttttccccatgctttttatgatttctagcatctttttgtgggcttattgtgcttgtatatcttctttggagaaatgtctgttcaattcctttgcccttttttgaatggggttgtt

SEQ ID NO: 1022182 - DNA, 120 bp, Artificial Sequence
  ENSG00000179818_30 (sequence is synthesized)
tggtttttctgttgtggaatatttaaatttctctatgtatcctcaatgttaagccatactagagatatgcttttcaaatattttcccccattctgtgcatcaccttttttactctgctga

SEQ ID NO: 1022183 - DNA, 120 bp, Artificial Sequence
  ENSG00000179818_31 (sequence is synthesized)
aagtgctgtttgatgcaaaaaagtgtttaattttcatgaggtccaatatatctattttttcttttgttgcctgtgccttgggtgttatattcaagaaatcattgacaaatccaatgatat

SEQ ID NO: 1022184 - DNA, 120 bp, Artificial Sequence
  ENSG00000179818_32 (sequence is synthesized)
gctcttctacactcttaaaaattatagacaaccccaaataacttttatttagtggttttaacaatatttaccatgtctgaaatatgataaacattaaaattagtattttggaaaaatgcc

SEQ ID NO: 1022185 - DNA, 120 bp, Artificial Sequence
  ENSG00000179818_33 (sequence is synthesized)
tgataaacattaaaattagtattttggaaaaatgccatattagaaactgatgatttaaaagtaacaacaatgaatccattacatgtgaacatactgtttttttgtttgtttgtttgtttg

SEQ ID NO: 1022186 - DNA, 120 bp, Artificial Sequence
  ENSG00000179818_34 (sequence is synthesized)
caacatactttttataaaaacagctgtcttctctaaaacaacaaaaaaatgtagataatagtagtatcattttatagttttgcaactctctttaatgtttggcttaatagaagatagttg

SEQ ID NO: 1022187 - DNA, 120 bp, Artificial Sequence
  ENSG00000179818_35 (sequence is synthesized)
gattctcgtatctgtttttgtattcagtctgttgtgtatgttgttttgattgaagtagatgaaggaaatccagctacatacagatttggagttggaaaaaatagtattttaataaccttt

SEQ ID NO: 1022188 - DNA, 120 bp, Artificial Sequence
  ENSG00000179818_36 (sequence is synthesized)
ttagatcatggtggatactcttctttgttatgtcatcaaaattagacaaatggcagtttctgaaaaattagttgtaatgtgtgtaaaaaattagttgaatccatatcagtgaactcatac

SEQ ID NO: 1022189 - DNA, 120 bp, Artificial Sequence
  ENSG00000179818_37 (sequence is synthesized)
aggctggtcttgaactcctcacctcaagcgatcctcccgtcttggcctcccaagtgtcaggattacgggcatgtgctatcacacccaacctgatacattgcctttataaatttttttttc

SEQ ID NO: 1022190 - DNA, 120 bp, Artificial Sequence
  ENSG00000179818_38 (sequence is synthesized)
attgcctttataaatttttttttctttattctaaaaaccagaaaaaacaaaactggatacatgtgcagaacatgcagaccaagtgtgttggggacttgagatgcgtacatgagtgtgatg

SEQ ID NO: 1022191 - DNA, 120 bp, Artificial Sequence
  ENSG00000179818_39 (sequence is synthesized)
agggaggaggacctggttgatagaagaatttatctcgtagtcttaacatccactgtaattccaaactttgaggacgatagagatcagtgggctttgactgcccagcatgcagtctccatt

SEQ ID NO: 1022192 - DNA, 120 bp, Artificial Sequence
  ENSG00000179818_40 (sequence is synthesized)
gttgtcctcaagaatgttccatgtgcacttgggaagaatgtattttctgctgctgttggatggaatgttctttatgtctgttagtttcctttggtctaaagtgtagttcaagtttgatgt

SEQ ID NO: 1022193 - DNA, 120 bp, Artificial Sequence
  ENSG00000179818_41 (sequence is synthesized)
caagtttgatgtttcctttttgattttctggctttattgaaagtggactattgaagtctcctactattattattattatggaaatggagtcctgctttgtcacccaggctggagtgcagt

SEQ ID NO: 1022194 - DNA, 86 bp, Artificial Sequence
  ENSG00000179818_42 (sequence is synthesized)
cccacagttgccctgcgaaacctctgtatatgaaaagttggccctccatgtacatgggtttcccatcctgtcacagaattttccac

SEQ ID NO: 1022195 - DNA, 120 bp, Artificial Sequence
  ENSG00000179818_43 (sequence is synthesized)
catcagcattctcagacagcacctccggttagggacagtatctgaccgtccgacatccctgcagcccccatgtgtcacacagactcagcctcaggtagatggtttccgtagatggtggct

SEQ ID NO: 1022196 - DNA, 120 bp, Artificial Sequence
  ENSG00000179818_44 (sequence is synthesized)
ttctttggacccttgacatcaaccagttactatttgctcagcaaggcccacattttcccggtgaagccacagaaccacagggagaaacccatggacttcgcctctctctctaggggacca

SEQ ID NO: 1022197 - DNA, 120 bp, Artificial Sequence
  ENSG00000179818_45 (sequence is synthesized)
gatgtgcagaggtaatgaataccagggaatcaggaaaccactggatcagttctttgagccacagaacaacactcatcccagcagctgggaagctatctgcaaaagtccatctgcagaaag

SEQ ID NO: 1022198 - DNA, 120 bp, Artificial Sequence
  ENSG00000179818_46 (sequence is synthesized)
ggcttcctggtcttgcgtgtggctgggccatttctctggatgcaggtttttcattatacagtcttctcaaagaaccacctgctctcaacaccttctcggtgactccatttcccctcctct

SEQ ID NO: 1022199 - DNA, 120 bp, Artificial Sequence
  ENSG00000179818_47 (sequence is synthesized)
gagtccggcaaagttttaaaatgatgacgtattttattaactctaacggcactggcgggtgactgaaaatactagtgctgtgtatgcgggatagacattattttcctgccctacatgagg

SEQ ID NO: 1022200 - DNA, 120 bp, Artificial Sequence
  ENSG00000179818_48 (sequence is synthesized)
cttatgctgctgagggccatcttgccaccctgagggaaacgctgcctgagaatgaaacaagcataagtaaaagctgagctgtgagatggagcaagatgaaggccacatgacatctttgga

SEQ ID NO: 1022201 - DNA, 120 bp, Artificial Sequence
  ENSG00000179818_49 (sequence is synthesized)
tctttggagcacctggatctaactgtgccttaagctagtctaaccctgaacatttcatcatttcattgacatgagcccaggttttctttttttttggatggagtcttgctctgtcgccca

SEQ ID NO: 1022202 - DNA, 120 bp, Artificial Sequence
  ENSG00000179818_50 (sequence is synthesized)
agtgccataaattttatatagttctccttgcaaaatgtggatcagcctttctcagcaaatcctttgtcataaagtgctgaattgtaagtttgtcatgagaatcacatgagatcatgcatg

SEQ ID NO: 1022203 - DNA, 120 bp, Artificial Sequence
  ENSG00000179818_51 (sequence is synthesized)
tgaagaacctggcattatcctcctcatagaaaaaaaccagtaaatattaactacaggaagcaaggaaggagtggggtgaggggaagaagaaggggtactgatttaaaagaaccctggagt

SEQ ID NO: 1022204 - DNA, 120 bp, Artificial Sequence
  ENSG00000179818_52 (sequence is synthesized)
cctaaggataatctaggaaccctcagacccaatccgatacccctattctaaatgctcctagtgccctgtaccttcccctcataagccttcattatcattgtaatgatatgtttatgtaat

SEQ ID NO: 1022205 - DNA, 120 bp, Artificial Sequence
  ENSG00000179818_53 (sequence is synthesized)
attttgattaatgtctctccttcactgacctagcagttctagcagggcagtgattttgctgtgttgcatccccagcacctagtctggtatgtggcattcagcatatgtttattgaatgaa

SEQ ID NO: 1022206 - DNA, 120 bp, Artificial Sequence
  ENSG00000179818_54 (sequence is synthesized)
tggccatgtggttattcagatcctccttgattattggggttaggattgtggcagaagtggcaaaatcagggagagtagtccctgtcccctctgtatcttatacactgcccacactcccaa

SEQ ID NO: 1022207 - DNA, 120 bp, Artificial Sequence
  ENSG00000179818_55 (sequence is synthesized)
cacacatacacatacagagaattttgtctcaattagataattaacttctgcttggttgtaaaccaaaccactggttcttaaactttcattggatcattttattgaagaattaaatagtgt

SEQ ID NO: 1022208 - DNA, 120 bp, Artificial Sequence
  ENSG00000179818_56 (sequence is synthesized)
ggttctggcctaatgtctggaaagccttgcagaggagtggattaggtctttgtgataaacaggcagccttccctgctcctgtgtctttataaaatctatttaactggagtagtccaccct

SEQ ID NO: 1022209 - DNA, 120 bp, Artificial Sequence
  ENSG00000179818_57 (sequence is synthesized)
ccctcaggctcttacaggaatatgttggaggctgtaggaaggtgggaaaccgagagggaaaggactgggccgctggagacttcactcattccctagcaagaaacaaaagcagtaaaaggt

SEQ ID NO: 1022210 - DNA, 120 bp, Artificial Sequence
  ENSG00000179818_58 (sequence is synthesized)
ggcccgaggacaacctgaagctcactccttcagcacttttggctggaggtcacttgttggagccccactcagagctcagcacaccaccccaccagcagcctcctcctcccagctgaggct

SEQ ID NO: 1022211 - DNA, 120 bp, Artificial Sequence
  ENSG00000179818_59 (sequence is synthesized)
gcatttcatcccttcccccagcctgctttccctgagataggggagtgtttcccagggcccatgtgacttccactggcaagtgacgattaccaatggtttactagtcagtgaaactaccaa

SEQ ID NO: 1022212 - DNA, 120 bp, Artificial Sequence
  ENSG00000179818_60 (sequence is synthesized)
aggcttttgtgctgtagtaatccttttcctgtttaaaactctggggattttctaatgttgccaatagtttttcaagtcagcaattactgtgtggattatgtaatggctcggtattaaaaa

SEQ ID NO: 1022213 - DNA, 120 bp, Artificial Sequence
  ENSG00000179818_61 (sequence is synthesized)
gacatcaaccagttactatttgactcttctgcagaaccccatgttgacccctgctttgaggtggcagagttaacactactcttcgttataagctctcgtctggggcaactcagaagaacg

SEQ ID NO: 1022214 - DNA, 120 bp, Artificial Sequence
  ENSG00000179818_62 (sequence is synthesized)
aaaaggggcacagtgatgacagtacactttgatacaaccattctcccaagagacgcgatgacgagtatgtgcgtgactctggagggaaagggtctacatctgtctctgcttgtgcctcgg

SEQ ID NO: 1022215 - DNA, 120 bp, Artificial Sequence
  ENSG00000179818_63 (sequence is synthesized)
atgggttttacagtagacgtaccactgaccccgcctcttcaccagaatgttgatgctcaaagaacaggaaccccagaaccccagggaggtaaggaagaagagcacagccaggatcagaag

SEQ ID NO: 1022216 - DNA, 120 bp, Artificial Sequence
  ENSG00000179818_64 (sequence is synthesized)
tggtgattcactgtccaaactactggctggaggagagctcgtggtggtcatctcttcccaactatggcagtggctatggcctaacagctggaggcaggaacagggcagtgacaagaatca

SEQ ID NO: 1022217 - DNA, 120 bp, Artificial Sequence
  ENSG00000179818_65 (sequence is synthesized)
gcaactgcataggggcctcatcaatttccagtcctccatccagaagaggacaggacatgctcaagctgccccaaagagaaaggacaaaggagaggaattctgagatgcaagtccctatgg

SEQ ID NO: 1022218 - DNA, 120 bp, Artificial Sequence
  ENSG00000179818_66 (sequence is synthesized)
aagaggggacagagttaaattccagcagtccaacagactatggctagagccatagtcttctcttacctgtatctttaacgttcagcttactattggttccttattatctcctgttagtga

SEQ ID NO: 1022219 - DNA, 84 bp, Artificial Sequence
  ENSG00000179818_67 (sequence is synthesized)
tgtatcctaccaagtgtgttggggacttgagatgcgtacatgagtgtgatgtttcctgctgaaagcacaggtgagacgtggtct

SEQ ID NO: 1022220 - DNA, 120 bp, Artificial Sequence
  ENSG00000179818_68 (sequence is synthesized)
tgaccttagttccctgagcacatgctgttgagtaatcctgcctggaccagtacttccctcaccctagacttcaccttcagttcccctttataccacctgctgaagctgccagccagcctt

SEQ ID NO: 1022221 - DNA, 120 bp, Artificial Sequence
  ENSG00000179818_69 (sequence is synthesized)
ttcgaccaccctccctcccccaggggtgtttggcttctcagaccccagcctgagctagtgcccttggcttcctagggtcttgccaggaaagcaaaggagaacatgcataccgccaaagag

SEQ ID NO: 1022222 - DNA, 120 bp, Artificial Sequence
  ENSG00000179818_70 (sequence is synthesized)
ttaggctgattttagccttaataatctgcttctgtgatcctgtatgtgggaagcctagaaatttctctgtgatcctccttcctggatcactaagagacaagtcaagacataggtccattc

SEQ ID NO: 1022223 - DNA, 120 bp, Artificial Sequence
  ENSG00000179818_71 (sequence is synthesized)
taccacctgtgttaatctgggccttgttgagaccatttaaagaaaggcgtgatgctagaagtaaggtccaggcctcctgcacactgtttcaaggctgtgaccatagtcagatcctgttgc

SEQ ID NO: 1022224 - DNA, 120 bp, Artificial Sequence
  ENSG00000179818_72 (sequence is synthesized)
ttgagtccaaagagtttaaaatagtgttggaaacctcctagggaaaaaacaaaaaacaaaacaccacatcttcctgggtaaggaagtgacatgtgctgactagagcaggaggggtagcca

SEQ ID NO: 1022225 - DNA, 120 bp, Artificial Sequence
  ENSG00000179818_73 (sequence is synthesized)
aggctccaagttctattctggacctgttgttgatttgaggtgtgacattcagcaatctgagctgatgttctgtagctctgattggtttctcatcttctgcagagagagtgaaagaggctg

SEQ ID NO: 1022226 - DNA, 120 bp, Artificial Sequence
  ENSG00000179818_74 (sequence is synthesized)
tgcttgcaggggaaaaggtgaacactggtctcctgtcctttaggagagcttcaccattacacgtcctgcctctcatttgaatttccaggcttttttagagtctcgctctattgcccagat

SEQ ID NO: 1022227 - DNA, 68 bp, Artificial Sequence
  ENSG00000179818_75 (sequence is synthesized)
atttccaggcttttttagagtctcgctctattgcccagtaagcgattctctcacctcagcctcccaag

SEQ ID NO: 1022228 - DNA, 66 bp, Artificial Sequence
  ENSG00000179818_76 (sequence is synthesized)
ccaggcttttttaaatgcagaaaccgcccgcccccagagttaatatggaaacccagcaatgttgtt

SEQ ID NO: 1022229 - DNA, 120 bp, Artificial Sequence
  ENSG00000179818_77 (sequence is synthesized)
cccgcccccagagttaatatggaaacccagcaatgttgtttatgttttacttgaattcgtttcatcagaattgcattccttttaacagtgtgattagatcagctcttagaggggatggca

SEQ ID NO: 1022230 - DNA, 120 bp, Artificial Sequence
  ENSG00000179818_78 (sequence is synthesized)
gcttcagtagggtttaggaaaggaaaggaatatttgtgtggggcacacactttggctttgatagcttgaggataccaggtacatgataatttagatggataacagaaacttgtgtccctt

SEQ ID NO: 1022231 - DNA, 120 bp, Artificial Sequence
  ENSG00000179818_79 (sequence is synthesized)
gagagccaggcatgtattagatgctttcatacattatttaattgtaatacaaaccaataaagtattcccattttttgcacatgggcaagctgaaagtcaaagaagttatgtaacttgccc

SEQ ID NO: 1022232 - DNA, 120 bp, Artificial Sequence
  ENSG00000179818_80 (sequence is synthesized)
taggtgagacgtggtcttgtaacacagtggttaagaatgtgactttggagccagcctgctaggggctgaattctgactcagccatttactaactgtgtgaccttaggtggagtctcactc

SEQ ID NO: 1022233 - DNA, 120 bp, Artificial Sequence
  ENSG00000179818_81 (sequence is synthesized)
agaaaggggttattgagggaacctacactgttctagctgcaccccatgcccttctcagaggaaagcctggcattgattagatactgggccagactaatactggcagcagagccagtgata

SEQ ID NO: 1022234 - DNA, 120 bp, Artificial Sequence
  ENSG00000179818_82 (sequence is synthesized)
gtaacctgcctaccagaggagccttccactgggttggcaattttgatctgggccccggacatctggcggatctcattaatgttggcgccttggcgcccgattatgcagccaattaagtta

SEQ ID NO: 1022235 - DNA, 120 bp, Artificial Sequence
  ENSG00000179818_83 (sequence is synthesized)
gggtttaacaaggctaagaagtacttatcctgtattacatgaaggaaatgaaataaaaagactgcagccccactcccagctactcagtgaggtggtagctaggaaaacaagctcagggct

SEQ ID NO: 1022236 - DNA, 83 bp, Artificial Sequence
  ENSG00000179818_84 (sequence is synthesized)
accaagtgtgttggggacttgagatgcgtacatgagtgtgatgtttcctgctgaaagcacaggtgagacgtggtcttgtaaca

SEQ ID NO: 1022237 - DNA, 120 bp, Artificial Sequence
  ENSG00000179818_85 (sequence is synthesized)
tcctggaatgccacaatggccccaccttagccaggcagctgtgatgagaggtgttgacccaactgcctctctgctggctcactgaatcaggtggaaggggctggggacagcacagtcttg

SEQ ID NO: 1022238 - DNA, 120 bp, Artificial Sequence
  ENSG00000179818_86 (sequence is synthesized)
cattgtggttggggacctgggccatccagaggcaggactgtccaaaggcagggtactgctgggattccgccaggcactgggtgatgcatggcatagggagctgaagagggacaggctctt

SEQ ID NO: 1022239 - DNA, 120 bp, Artificial Sequence
  ENSG00000179818_87 (sequence is synthesized)
ggccaggaaaaacagccccagagccacaggtgtgccatcgagtcttcctcctctcccatccttaatcactcctgtttggtgacagcacacagctaggcctggagcccagcaaagagcccc

SEQ ID NO: 1022240 - DNA, 120 bp, Artificial Sequence
  ENSG00000179818_88 (sequence is synthesized)
tgggtcccagaggaagttgttctgggggctggagacaatcacaaatgccaggtttgtgagccccagactctggttcatagcaagaggcagacttgtgaacaaaccaccagatcacaccgt

SEQ ID NO: 1022241 - DNA, 120 bp, Artificial Sequence
  ENSG00000179818_89 (sequence is synthesized)
gaagagagggacacagagggaagatggccacatgaagatggaggcagagattgcagttatgctgctgcaaactaaggaatggctctggccctccaaggattgctgataaccaccagaaac

SEQ ID NO: 1022242 - DNA, 120 bp, Artificial Sequence
  ENSG00000179818_90 (sequence is synthesized)
tagaagagacaaggaaggattcttccctagagccttcagagggagcatggccctactgacacctggatttcaaacttgtagcttcctaaactgcaagagaataaatttctgttgttttaa

SEQ ID NO: 1022243 - DNA, 120 bp, Artificial Sequence
  ENSG00000179818_91 (sequence is synthesized)
ctgttgtggaggtcccagagggaactgtatggacagacacagcccgaagggccatctgcctcaagccacagcagcacagaattctaaagattgtggggaaggatggggccaaggggacca

SEQ ID NO: 1022244 - DNA, 120 bp, Artificial Sequence
  ENSG00000179818_92 (sequence is synthesized)
ttgctgcgcaggaccccttgaaaaaaaatgaggacccgtcttttttaggtcacaagattgcgccaacccttacatggtccttaaaaaaaaaaccttctgacactgcagtagtgaaaatga

SEQ ID NO: 1022245 - DNA, 120 bp, Artificial Sequence
  ENSG00000179818_93 (sequence is synthesized)
cgggggggaggggcggcgaggcgaggcctgcggagcggaggaagacaaacataaagatgaagtgcttaattcaaggtcacacaatgtcggggatggacctccagatttccttactgtact

SEQ ID NO: 1022246 - DNA, 120 bp, Artificial Sequence
  ENSG00000179818_94 (sequence is synthesized)
ctcttccgggggggaggggcggcgaggcgaggcctgcggagcggaggaagacaaacataaagatgaagtgcttaattcaaggtcacacaatgtcggggatggacctccagatttccttac

SEQ ID NO: 1022247 - DNA, 84 bp, Artificial Sequence
  ENSG00000179818_95 (sequence is synthesized)
gctcaccattcatcctcccaagtagctgggactacaggggaccagatgtgcagaggtaatgaataccagggaatcaggaaacca

SEQ ID NO: 1022248 - DNA, 120 bp, Artificial Sequence
  ENSG00000179818_96 (sequence is synthesized)
caggtgtgagccactgcacccagccctcaggttttccctttttttacccctccttttgaaaatttgatgtggaattttgccacctgcagccagaagagttttaactaatcagtgccataa

SEQ ID NO: 1022249 - DNA, 120 bp, Artificial Sequence
  ENSG00000179818_97 (sequence is synthesized)
gtgagccaccgcgcccggccttaaccacttttaagtctttacattttggtagtcttaggtatattcacattttgtgcagcagatctccagaactttttcatcttgcaaaactgaaactct

SEQ ID NO: 1022250 - DNA, 120 bp, Artificial Sequence
  ENSG00000179818_98 (sequence is synthesized)
gtacatgggtttcccatcctatgtctgtcccgggctccagttttgtggttccacctgagacctttccacctatatgctttacaggtcacagaattttccacactccttgacagaggtgct

SEQ ID NO: 1022251 - DNA, 120 bp, Artificial Sequence
  ENSG00000179818_99 (sequence is synthesized)
ggacaattcccctccgagatgttgatccgcgcgccactctcctcgcggatcctcttaaccgactcccctttcttcccaatgatgcttcctacttcctttccgtgcataagaagccgaatg

SEQ ID NO: 1022252 - DNA, 120 bp, Artificial Sequence
  ENSG00000179818_100 (sequence is synthesized)
ttctttggacccttgacatcaaccagttactatttgccagagacagactcccagactcggccagaggctgatgccaactccttccagctctcacggtaaccatgaggcccctgcgtgttt

SEQ ID NO: 1022253 - DNA, 120 bp, Artificial Sequence
  ENSG00000179818_101 (sequence is synthesized)
gtccccggcgtccgggcgccctgcatggatcccccaccccagctcctgctccccggcggcggccggtgggcagaaagaccgaaacccactcacggccgcctgccgaatcgcggctctgct

SEQ ID NO: 1022254 - DNA, 120 bp, Artificial Sequence
  ENSG00000179818_102 (sequence is synthesized)
gtttgtggggcgtgctagaaacgtggtcctaaaaagaatggcgtccatttacataatgctttgtttgcgtttcgcaagtttctttcggttaaagccacagaaaccccacctcctgccctt

SEQ ID NO: 1022255 - DNA, 120 bp, Artificial Sequence
  ENSG00000179818_103 (sequence is synthesized)
acacgacgacagaaacatcttaccagtcagaggaccatgagaaatagattcaaggagcattccacgtgcaagtgagtcttggccccatctgcctttggattttagccgtgaactggaagg

SEQ ID NO: 1022256 - DNA, 120 bp, Artificial Sequence
  ENSG00000179818_104 (sequence is synthesized)
tattggaaagaagaccctcagaaatagcttaatcaaaatccctgcgtctgaaccaagtgccttatttctctgtgggcctcaagcttcgctgacatctgtggagcacactgtcctaacagg

SEQ ID NO: 1022257 - DNA, 120 bp, Artificial Sequence
  ENSG00000179818_105 (sequence is synthesized)
agtgctgtctgatttcccaacgctctgcaaaacaaacagcctggaagggtggctggtggaaggtggtttttagagagagacttgtagataacaggaaagtgaaggctgtaaggaaggttg

SEQ ID NO: 1022258 - DNA, 120 bp, Artificial Sequence
  ENSG00000179818_106 (sequence is synthesized)
taattaaacagcacatggaaacacaatcacattattgtcccattccatagggataatgatgaccacttcagtgggaaaaggagaggttttaagtcattagggactatgggccacctttta

SEQ ID NO: 1022259 - DNA, 120 bp, Artificial Sequence
  ENSG00000179818_107 (sequence is synthesized)
atagtaaatacattttgttttagctacatatatcttcatggatatgtgtactggattatgatgaaaaatgtctttcttactatgagtacagtaaaaaaaagcaactttttttttttgagg

SEQ ID NO: 1022260 - DNA, 71 bp, Artificial Sequence
  ENSG00000179818_108 (sequence is synthesized)
tatgagtacagtaaaaaaaagcaactttttttttttgaggcagagtcttactctgtcacccaagctggagt

SEQ ID NO: 1022261 - DNA, 120 bp, Artificial Sequence
  ENSG00000179818_109 (sequence is synthesized)
ggcatgagccactgtgcccggccaaaaaaaggcaactttgaatgctgctcatctgcagttaaagagcactgccaggcctgatattcaaagccatcgaggcagaagcaattgctgaggaag

SEQ ID NO: 1022262 - DNA, 120 bp, Artificial Sequence
  ENSG00000179818_110 (sequence is synthesized)
ggtaagtcatttaccttctttgtccctcagtttcatctcggttaagtagggataatgatagcacctattttatagggttattgtgaggaataaatccaagtaaaatgcttagaatagtaa

SEQ ID NO: 1022263 - DNA, 120 bp, Artificial Sequence
  ENSG00000179818_111 (sequence is synthesized)
ctgaaacatagcactcattaggaatgctttaattttcatttatttgagtattaaaggttgaattttcagaggtattttggacctttgtattttttctttaaatcacttattcatgacttt

SEQ ID NO: 1022264 - DNA, 85 bp, Artificial Sequence
  ENSG00000179818_112 (sequence is synthesized)
acctttgtattttttctttaaatcacttattcatgacttttgaacttttttttttcttttagagacagggtcttggtttgttgtc

SEQ ID NO: 1022265 - DNA, 90 bp, Artificial Sequence
  ENSG00000179818_113 (sequence is synthesized)
tgggttcttgcagcccagactggtcttgagctttggcctgaagtgctcctcctgccttggcctctcaaagcattggggttacaggtgtga

SEQ ID NO: 1022266 - DNA, 120 bp, Artificial Sequence
  ENSG00000179818_114 (sequence is synthesized)
cctgccttggcctctcaaagcattggggttacaggtgtgaagcactgcaccttgcctacacattttttccaataattttttttattaatttgtaagagttaacatgtcgactatcatata

SEQ ID NO: 1022267 - DNA, 120 bp, Artificial Sequence
  ENSG00000179818_115 (sequence is synthesized)
taacatagaattgttcccattttgtcatttcctttcaactttgtctatgtagctttttttctgtgtgcaaattttacatttttaggtagtcagaaaatctcttcccttgtaattttttct

SEQ ID NO: 1022268 - DNA, 120 bp, Artificial Sequence
  ENSG00000179818_116 (sequence is synthesized)
gctactagaccaatgtttagaaaaaagcgtgcttccccacctcaaaattataaaaatagttacttgttctttttgagtactgtgtgtgtttaaatctttaatctttaaatttaaatcttt

SEQ ID NO: 1022269 - DNA, 89 bp, Artificial Sequence
  ENSG00000179818_117 (sequence is synthesized)
tgtgtgtgtttaaatctttaatctttaaatttaaatctttgatccatctggtatttattttgatatgaagagagtggttgggatctggc

SEQ ID NO: 1022270 - DNA, 120 bp, Artificial Sequence
  ENSG00000179818_118 (sequence is synthesized)
aataataaaataaaaaaaaaaaagaaagtgatcttacttggaaataaggtctttgcacatatgatcaagttgagatgaagttgtactggaaagtctgtctagtgactggtgttgtcataa

SEQ ID NO: 1022271 - DNA, 120 bp, Artificial Sequence
  ENSG00000179818_119 (sequence is synthesized)
ctgtgcccagctaatttttgtattttatttttttagtagagacaggattttgcactgttaggctggtctcgacctactgacctcatgatcgcccgccttgacctcccaaagtggtgggat

SEQ ID NO: 1022272 - DNA, 120 bp, Artificial Sequence
  ENSG00000179818_120 (sequence is synthesized)
tgggattacaggcgtgagccaccacttccagccaagtaggacatttctttgagtgattttcttagaaggggggcatgagtggtactttcaaagtctttttatgtccaatttctttttaac

SEQ ID NO: 1022273 - DNA, 120 bp, Artificial Sequence
  ENSG00000179818_121 (sequence is synthesized)
cttcgtgtatgaatgatattgtggttaggtttagaattcttggaatactagtcctagtctcgacaaagtctaagtagctttccagtgttttgagtttctggtgatacagatgagaagtcc

SEQ ID NO: 1022274 - DNA, 120 bp, Artificial Sequence
  ENSG00000179818_122 (sequence is synthesized)
aatgggattttttttccttgtgagacgtggtcttgtaacacagtggttaagaatgtgactttggagccagcctgctaggggctgaattctgactcagccatttactaactgtgtgacctt

SEQ ID NO: 1022275 - DNA, 120 bp, Artificial Sequence
  ENSG00000179818_123 (sequence is synthesized)
aaagtggatcccttcaacagcccctgcacagccccaagtcaggcctccagcccttggactcacagatgtcctctgtagacgactggatgtcctcccgtgctaccctttacccctgcagcg

SEQ ID NO: 1022276 - DNA, 120 bp, Artificial Sequence
  ENSG00000179818_124 (sequence is synthesized)
cctcatgtaagtagaatcatagagtatttgtccttttatgtctggttctttcacttagcataatgttttcaagattcatccatgttgtagcatgtgtcagaacttcattgctttttacgg

SEQ ID NO: 1022277 - DNA, 120 bp, Artificial Sequence
  ENSG00000179818_125 (sequence is synthesized)
ctgaataatattccattgtgtaactgtaccacatgttcatctgttcagccatgcgtgggcgcttgggttgtttcttcctttcagctattgcaaaccaataatgctgctgtgaacatgggt

SEQ ID NO: 1022278 - DNA, 120 bp, Artificial Sequence
  ENSG00000179818_126 (sequence is synthesized)
gcgcaaatatctgtttgaatccctgctttcagttcttttgggtctatacctaaagaagtggaattgctgcatcatatggtaattctatgtttaacttcttggggaaccaccatatcattt

SEQ ID NO: 1022279 - DNA, 120 bp, Artificial Sequence
  ENSG00000179818_127 (sequence is synthesized)
tccacagtggctgtatactactttacatacccactggcaatgcacacagattccagtttctccacattctccccattgtggcaggggttttaaacctcttcatcacgggtgcacccccgg

SEQ ID NO: 1022280 - DNA, 120 bp, Artificial Sequence
  ENSG00000179818_128 (sequence is synthesized)
agactagggcagtgcctggcacattgtaggtgcttgataagtatttgttggatgaatgaatgggaggccttggcctcagagcagctgtacctgggcactctcctacctgaaggtggcacc

SEQ ID NO: 1022281 - DNA, 120 bp, Artificial Sequence
  ENSG00000179818_129 (sequence is synthesized)
cagtcagtaagtgtcctacccacacagggtccaaagaccttcccattccagtccctgttcagctctgagacaaccatcctttatttgttatttatttatttattgaaacagggtttcact

SEQ ID NO: 1022282 - DNA, 85 bp, Artificial Sequence
  ENSG00000179818_130 (sequence is synthesized)
ttatttgttatttatttatttattgaaacagggtttcactgtggtgacagcctcgaactcatgggctcaagtgatcttcccacct

SEQ ID NO: 1022283 - DNA, 120 bp, Artificial Sequence
  ENSG00000179818_131 (sequence is synthesized)
ggggcgtggagggtagggagccccactccttcctgtttattgtcctgctttgctcctgcagggttcagtgcggtgtgcttgcttcagggtacacccaggagacgctaatgggtgataatg

SEQ ID NO: 1022284 - DNA, 120 bp, Artificial Sequence
  ENSG00000179818_132 (sequence is synthesized)
agggtgtcccgccccaatacctatacttgtcaataattaaccatgatttcctaggttctgggaggaggtagtggcacctggcctgccctggctggtttagctcatggggcacctctggcg

SEQ ID NO: 1022285 - DNA, 120 bp, Artificial Sequence
  ENSG00000179818_133 (sequence is synthesized)
tagccattccaaggtctctgtgtgcttccaggctgttctagggatgggtacctcccaaggcataagggaacttgagaactgacctttacccatgttcctgatcctagccagagacagact

SEQ ID NO: 1022286 - DNA, 120 bp, Artificial Sequence
  ENSG00000179818_134 (sequence is synthesized)
atcctggtaaatttttgaaggcaggaggcatctcttatatcctgtagtgatgagcataatacgagttgttcaataaatacacatttggcaaagatgagagaggtggagagagaaagaggt

SEQ ID NO: 1022287 - DNA, 120 bp, Artificial Sequence
  ENSG00000179818_135 (sequence is synthesized)
tcctctgctgaagaagtgtgattacttttgggttttgtctacctcatgtggtacccatttctagcagggaatttcttccacttgcagaccaagtgtgttggggacttgagatgcgtacat

SEQ ID NO: 1022288 - DNA, 120 bp, Artificial Sequence
  ENSG00000179818_136 (sequence is synthesized)
gcctttcccaatcagggagccgcactgggtggccggcaccaccagcctcagggtgaccgggggcctgctggccgcggtactgttggtcatggagctgttgatatcttcctccagcttgtc

SEQ ID NO: 1022289 - DNA, 90 bp, Artificial Sequence
  ENSG00000179818_137 (sequence is synthesized)
gactccatctcaaaaaaataacaaataaagcccctgaagggaggcttctctgggctgcaggtgacccagcccccagaggaacaataaatg

SEQ ID NO: 1022290 - DNA, 120 bp, Artificial Sequence
  ENSG00000179818_138 (sequence is synthesized)
atgactttggggtaacaaagtcatgactcaaagtagtcttgtcagggtggaaaaaagaagacattttacaagggaaaatgtaacattttatatttgggttcactaaaatgattcgttcaa

SEQ ID NO: 1022291 - DNA, 120 bp, Artificial Sequence
  ENSG00000179818_139 (sequence is synthesized)
atacatagtggaggagcgtgggggcccaaggggactggttttccatgggttccttatggaccaagagtgtgaagatcaggagagcccccacacatgggaggcaaggacctagcacaggga

SEQ ID NO: 1022292 - DNA, 120 bp, Artificial Sequence
  ENSG00000179818_140 (sequence is synthesized)
gggccgcagcctttctccatccccgcttcttgggccaactgcccgtgtgtggggtgcagctctcagatcccagccaagtaggaattccccaggcaggtcaccaagaggaagggggtgtgg

SEQ ID NO: 1022293 - DNA, 120 bp, Artificial Sequence
  ENSG00000179818_141 (sequence is synthesized)
gggcagagcagtggtgacgatgcaggggctgttagccagaggagaggtgaatttatatagctgaaaagccaccaaagatgagagagggaccgttctttatgtccagcaggccacgtttga

SEQ ID NO: 1022294 - DNA, 120 bp, Artificial Sequence
  ENSG00000179818_142 (sequence is synthesized)
ggaggctggctggggtcccatctgagatgagtgccggtgtggtgcggagttccctgccaaaggagggtctacacagtctcaagatggcctctctgccagggtacacctcagaagggatct

SEQ ID NO: 1022295 - DNA, 120 bp, Artificial Sequence
  ENSG00000179818_143 (sequence is synthesized)
tagaggctgcgtatgaaggtggcccgagggcgcctaatgtcccttcccaagaagttgatgattaccatggatgaggagtcagtaggagagaaagtgtccttgtccaggcagctgggagga

SEQ ID NO: 1022296 - DNA, 62 bp, Artificial Sequence
  ENSG00000179818_144 (sequence is synthesized)
agtaggagagaaagtgtccttgtccaggcagctgggaggagtggttaaaagggagatggctt

SEQ ID NO: 1022297 - DNA, 120 bp, Artificial Sequence
  ENSG00000179818_145 (sequence is synthesized)
acctcatctccacaaaacattttttaaaaaattagcgaagtgtggcaggaggctcaggtgggaggatcacatgagccctagatgtcgaggctacagtaagccctgatcacacaactgcac

SEQ ID NO: 1022298 - DNA, 83 bp, Artificial Sequence
  ENSG00000179818_146 (sequence is synthesized)
gatgtcgaggctacagtaagccctgatcacacaactgcactccagcctgggccgcagagtgagaccctgtctacataaatgaa

SEQ ID NO: 1022299 - DNA, 120 bp, Artificial Sequence
  ENSG00000179818_147 (sequence is synthesized)
ccatttgtatgtcgtattttgggaaatgtctgttcaagtcctttgatcattttaaaactctggttatttgttttcttcctactgagttgtttgagtttcttatctacactttagatcata

SEQ ID NO: 1022300 - DNA, 120 bp, Artificial Sequence
  ENSG00000179818_148 (sequence is synthesized)
gagtagccgggactacaggttggcattcttcttgtttcgtctcctcctcctttccctggatgatcttatttcctccctggtctttaaccatcacctgcaggctgacagctcccaaatctc

SEQ ID NO: 1022301 - DNA, 120 bp, Artificial Sequence
  ENSG00000179818_149 (sequence is synthesized)
cttattaatagtttaccacaattaagtgttcatttttagtctagaagggacaggcgtttattgtgcattggccagtgccagcacatccgatgcaaggcagttcaccgtattctatcttta

SEQ ID NO: 1022302 - DNA, 120 bp, Artificial Sequence
  ENSG00000179818_150 (sequence is synthesized)
cctccagccagaagccagaaacaggcacttccaagcaatgtatcttacccatattgtagatagtaacaatttgacctcatatgctggtgaccctgcactgctgttaggagatcacttctt

SEQ ID NO: 1022303 - DNA, 79 bp, Artificial Sequence
  ENSG00000179818_151 (sequence is synthesized)
atgctggtgaccctgcactgctgttaggagatcacttcttggttctctgagaaatgtaagaaatgtgttggggttggta

SEQ ID NO: 1022304 - DNA, 120 bp, Artificial Sequence
  ENSG00000179818_152 (sequence is synthesized)
gaactatcaggaaatggtgtgaggaggggagccacatatgaatttcggctttataaaggggtatggagagcacagcggttagaagtcaggctggtcatgagctggtcctgcccctcacta

SEQ ID NO: 1022305 - DNA, 120 bp, Artificial Sequence
  ENSG00000179818_153 (sequence is synthesized)
gccctgagactttctatgcctcagtttcaacaactgtaaaatgggagtagaatacagctcctgtctcatagcattgtcatgaagattacatgaggcagtgcacgtcacagaattttccac

SEQ ID NO: 1022306 - DNA, 120 bp, Artificial Sequence
  ENSG00000179818_154 (sequence is synthesized)
ttctgttttgagttccaacctgggatgcttctgtgggaaccacctgttcctggctctgttgatctttggatttccccagcccttcagtccctttcagttttgaaatgaaacctaccccag

SEQ ID NO: 1022307 - DNA, 120 bp, Artificial Sequence
  ENSG00000179818_155 (sequence is synthesized)
agggcgaggtcaggttacgaagaggactttgacagctcaccttgggttgtttttttcccccagagctgtctagtgtgtgactgtgtgaggtgtgaggctcagcaggctgtgatacagatt

SEQ ID NO: 1022308 - DNA, 120 bp, Artificial Sequence
  ENSG00000179818_156 (sequence is synthesized)
gtctgggcttggcctccataaagcctctcacatgtgctcatggcaaagacttcaggacttctctcctccgtccactccttcaagaaccttgtgagcaccagacacattcacacatacaca

SEQ ID NO: 1022309 - DNA, 120 bp, Artificial Sequence
  ENSG00000179818_157 (sequence is synthesized)
ccggccagcattgctttccttaatcacattctcagtgtcagaagactgccagtgagtgtatgggaattgtttcaggcttgttacataggctttacttagagctggagagttgatatagag

SEQ ID NO: 1022310 - DNA, 120 bp, Artificial Sequence
  ENSG00000179818_158 (sequence is synthesized)
agatataatagaaatttatttaaaacaaaaaatggctgtggccagttcttcttctaaagaggggtggcttaattcatattcataggggaaaaaattattccattccctttaccactacag

SEQ ID NO: 1022311 - DNA, 120 bp, Artificial Sequence
  ENSG00000179818_159 (sequence is synthesized)
aatggtggtagtgagtgaaagttcaaaacttctttttgttcctcggtgctgatcaagggtagaaagggtagaacctggagtggatggttcatactatgggtgactccagctatgggtcat

SEQ ID NO: 1022312 - DNA, 120 bp, Artificial Sequence
  ENSG00000179818_160 (sequence is synthesized)
tggaagtcagagaaaagggagtggagagctaagttgttttgaataatgtaagggggatttctctcccgccctaatacacaaacacaatgtgagaagcatttgaagaggataaaggggcca

SEQ ID NO: 1022313 - DNA, 120 bp, Artificial Sequence
  ENSG00000179818_161 (sequence is synthesized)
gaggataaaggggccaagcagtgtggtaataacccctcagtcttttcataccttcaggaaagtctgatgggcacacagtgttttgagtgagtgcatatatgtgtgtgtgtgtgtgtgtgt

SEQ ID NO: 1022314 - DNA, 120 bp, Artificial Sequence
  ENSG00000179818_162 (sequence is synthesized)
gttttctgtttgataaagcatggaaaagggggactgagtcctgtatctgggacagcttagagcagaggaagagatccgcctcaggaggtgagaagtgagtgagataagaagtccagcaag

SEQ ID NO: 1022315 - DNA, 120 bp, Artificial Sequence
  ENSG00000179818_163 (sequence is synthesized)
aaatggagtcagagccaaagggactatgaagagcattagctcctgggatttgcagaaattctgggaaggcctttggacttctcatagaacttgggatagggaggttcagggagtttttaa

SEQ ID NO: 1022316 - DNA, 120 bp, Artificial Sequence
  ENSG00000179818_164 (sequence is synthesized)
aacatgcccaaggacagggtggttgtagctgatatctgattgctgtagtgctgtgtaactcatacagtgtttaacagtggtccccaagatcctgctctgtgtatgcttcaggaaccatca

SEQ ID NO: 1022317 - DNA, 120 bp, Artificial Sequence
  ENSG00000179818_165 (sequence is synthesized)
tgttattcctctctctattcagactccaaagggggacagcaaacttcccaacaaaggactttgttatactcttcctgccttatgagttacacagaacctgaggatgctagttaaaaaagt

SEQ ID NO: 1022318 - DNA, 120 bp, Artificial Sequence
  ENSG00000179818_166 (sequence is synthesized)
cggagagctgcagcctcctcagccacaccattgctgagtaggatatatcattaggggtaaagaggttgggcaaagtcttacacaaagtcttgggacttgaagactgctctcagcaaggac

SEQ ID NO: 1022319 - DNA, 76 bp, Artificial Sequence
  ENSG00000179818_167 (sequence is synthesized)
cacaaagtcttgggacttgaagactgctctcagcaaggacctaagcaaaataaatttagtgcaatcatggcttact

SEQ ID NO: 1022320 - DNA, 120 bp, Artificial Sequence
  ENSG00000179818_168 (sequence is synthesized)
agcctcttgagtagctgagactacaggtgcataccaccatggccagatcatttttttttttttttgtagagaccaagtctcgccaggttgcttaggctgatctcgaacttctggtgctca

SEQ ID NO: 1022321 - DNA, 120 bp, Artificial Sequence
  ENSG00000179818_169 (sequence is synthesized)
agcagccctcccgtgttagcctcccaaaatgctgagattataattgtgagccaccacacttggtcttaagcaaatattaactccaatcactatcctaagccaaggtgtctgagcagctga

SEQ ID NO: 1022322 - DNA, 120 bp, Artificial Sequence
  ENSG00000179818_170 (sequence is synthesized)
aaggaaggaagcaaaaggcctgaaggataagatgagacaaggctgaagcaggatcattaaatcataaacctggagcacctggatagtgagtagagtgaaaacaagctcagggctcccact

SEQ ID NO: 1022323 - DNA, 120 bp, Artificial Sequence
  ENSG00000179818_171 (sequence is synthesized)
gagtttaagacagcaattcccagctttttcaaatatgaagcattttttaaccaatccgttttttaattcttaaattcttgacattacagaactaaactgaaatttattaacattccactc

SEQ ID NO: 1022324 - DNA, 120 bp, Artificial Sequence
  ENSG00000179818_172 (sequence is synthesized)
ttacatttcttatcgacaaacagaaataaaattcatgagccaaaaaacccaaaacaaaactaaaaacagggaaaagcttataaaactaaatatggatcccagcattaacagctgaacaga

SEQ ID NO: 1022325 - DNA, 120 bp, Artificial Sequence
  ENSG00000179818_173 (sequence is synthesized)
gaatgtgatttttaaattcttagcggatgataaagttgtgtagaaactgaacacttacaaattatttaaaacctggaatcactgaccagaaattacacagttggatcatgggagaacagc

SEQ ID NO: 1022326 - DNA, 120 bp, Artificial Sequence
  ENSG00000179818_174 (sequence is synthesized)
caagtttcattttcagaaaatgtaattgatgggaacctcagtgactctggatgaataagatgctgttgagtggctctgacttgggccagccgtgcttctcacaggaccttggagaccaag

SEQ ID NO: 1022327 - DNA, 120 bp, Artificial Sequence
  ENSG00000179818_175 (sequence is synthesized)
gtcactgtgatctcaggttcagggggcaagtcctctccacacagccctagttggcctcacagctgaaaatgtctcccttactgttggactcctttgttcacccacatgagtttgtgaata

SEQ ID NO: 1022328 - DNA, 78 bp, Artificial Sequence
  ENSG00000179818_176 (sequence is synthesized)
ctcactttgttgcctgcactggtctagagcctgggattacagatgtgagccaccaccccgaactgatttttttttaac

SEQ ID NO: 1022329 - DNA, 120 bp, Artificial Sequence
  ENSG00000179818_177 (sequence is synthesized)
acagatgtgagccaccaccccgaactgatttttttttaacgtgaatgtaaaagtccatccagggcaaagataagagtcaagaggcccagaggaatgggactgaagtgtcaggggccaagg

SEQ ID NO: 1022330 - DNA, 120 bp, Artificial Sequence
  ENSG00000179818_178 (sequence is synthesized)
gataggagaagggagacaggagatgcccagaaggatgtagccttggggaacatcgcggcttctgtgtctggtgctgtagtgaaagaaccaggaggggatggcgattggcctagtggtttg

SEQ ID NO: 1022331 - DNA, 120 bp, Artificial Sequence
  ENSG00000179818_179 (sequence is synthesized)
ctgtgtttcagaactcctcctcccaatgccttcccctcactcaggccagacttctcacgcattcccacccctgcatcttcgttccggctgttccctgatcccttttccgggagcagcatt

SEQ ID NO: 1022332 - DNA, 120 bp, Artificial Sequence
  ENSG00000179818_180 (sequence is synthesized)
cctactcctccttcctaacccaaggtggctcatctctcaaagcccagaggaaggtgcacatcctctgcagggctttctccacagttctaagccccctctctgccaggccccagaccccac

SEQ ID NO: 1022333 - DNA, 120 bp, Artificial Sequence
  ENSG00000179818_181 (sequence is synthesized)
aaggcaaggctggggtggacagcattgcatagtatgtgttgtgtactgtgcgacaggacgcctcttcagctccagccagagcaggctgagagtctgcccactaagtgacctcccagtcct

SEQ ID NO: 1022334 - DNA, 120 bp, Artificial Sequence
  ENSG00000179818_182 (sequence is synthesized)
ttcccactctcctggctcacagtgagacgtgtgcacagctggaaccacaaatgtcccaatgggtgtgatcaaagcagacacagcaaggtgacacctggcccagcagggcagcagttaggg

SEQ ID NO: 1022335 - DNA, 120 bp, Artificial Sequence
  ENSG00000179818_183 (sequence is synthesized)
ccccctagaaaggggtctcatggttctcttgtcccccaccatctggattaaagggtccccaggtcctgaagaggagctggtactgctatcagaacccagggcagcgcctgtggtctgctg

SEQ ID NO: 1022336 - DNA, 120 bp, Artificial Sequence
  ENSG00000179818_184 (sequence is synthesized)
catgaacgagggtctgggaagttgtcatcccacttccagtgtgggctccctcctgctcagcactgctgggctggggacacagacctgagttatagagcctttgtaggtgttcccacatgg

SEQ ID NO: 1022337 - DNA, 120 bp, Artificial Sequence
  ENSG00000179818_185 (sequence is synthesized)
atgtgctggtttgggaggccttgacctaccccagagggcagcccctcatgagcagattccattctgggcatacttgtgtctctctgagcgaggggagtgctcactgctgccttctcagct

SEQ ID NO: 1022338 - DNA, 120 bp, Artificial Sequence
  ENSG00000179818_186 (sequence is synthesized)
gctaagcagaggggttgctggggaggaccattccccctgttagctaaactacccactgccatgtgtcctgggcctcatgtagatagagttgcccatgcaggaagcaggctcagctatgaa

SEQ ID NO: 1022339 - DNA, 120 bp, Artificial Sequence
  ENSG00000179818_187 (sequence is synthesized)
tctacctgagggcagagctttctgcacttgtgtcttttgattgggattcatattagacgccttgcttacttgttcatgggcaggcatatatggatgggcacatctgtgtcccactcaaca

SEQ ID NO: 1022340 - DNA, 120 bp, Artificial Sequence
  ENSG00000179818_188 (sequence is synthesized)
gtctgacaggccccctgctctgagtctccataagtcaaggatgactgcttccttctctgaggtattccccctgtcccgacagtgagtttttattactgcttgccacatagtctgcgtttt

SEQ ID NO: 1022341 - DNA, 120 bp, Artificial Sequence
  ENSG00000179818_189 (sequence is synthesized)
aagtctggccattccaaacttcccctccaaattcgatgagccgtcttgccaactgtgattgcacaatgccgagacgggtgagcagaaacggttgtgcttacgtaggtgtgtggttctttg

SEQ ID NO: 1022342 - DNA, 120 bp, Artificial Sequence
  ENSG00000179818_190 (sequence is synthesized)
tgatttctgtggctaacactgccatctgcttcatgtccagggctgggttccatgtctgtctgagctcttcaccacctcgtctacagcagtctgtgacccaaggtagtaattgcttaataa

SEQ ID NO: 1022343 - DNA, 120 bp, Artificial Sequence
  ENSG00000179818_191 (sequence is synthesized)
ggctcatggtctcaggcgccagaaagttgtattcatctttctatcctggacctgcacaggaagtcagtgccccatatgcatttgttgaatggaaggaattttaaacttcttgaagtttcc

SEQ ID NO: 1022344 - DNA, 120 bp, Artificial Sequence
  ENSG00000179818_192 (sequence is synthesized)
ctttcttactagttctatatctcagcccagcccagagctgagcccataacagggctgatgggttggccaatggatggaactgctgaaaagtttcctaagtctaagtggattttgatcccc

SEQ ID NO: 1022345 - DNA, 120 bp, Artificial Sequence
  ENSG00000179818_193 (sequence is synthesized)
aaggacacaaagaaacccaaaggcttgacacaaccaagtatctggagtgactgttggtgaaaggccagggcccatcacatgtgagccatgatcatggggccatgggaaggggatttagtg

SEQ ID NO: 1022346 - DNA, 120 bp, Artificial Sequence
  ENSG00000179818_194 (sequence is synthesized)
gaactgggggagaagtagttccccctcagaaaagtgaggtgctgtccagaataagggaagcagaagttgctggacaagcagaactgttgaccaccgcacatgagaatccctcaccttccc

SEQ ID NO: 1022347 - DNA, 120 bp, Artificial Sequence
  ENSG00000179818_195 (sequence is synthesized)
acctccacaccagtgcccgcttaggccctccaggtcagccctcattcacagaactgtgtaattactgctcccctaccctcccccattcctcagattcctccaccaattttaatttcaaca

SEQ ID NO: 1022348 - DNA, 120 bp, Artificial Sequence
  ENSG00000179818_196 (sequence is synthesized)
caccatctccctgcctgccacatccagcccagcccagctcagcctagctgggcccgagcaggaggtggcagctttgcccaaaaggctgccctgctctgaggcctcctgccttctggtccc

SEQ ID NO: 1022349 - DNA, 120 bp, Artificial Sequence
  ENSG00000179818_197 (sequence is synthesized)
tccctgagagtcccaggccaaatcctcacctgctcttcacagaattccctatgccctagggaacagaactcaggccagtgctgaaatccccatttgcttcttcctacttctgccttttca

SEQ ID NO: 1022350 - DNA, 120 bp, Artificial Sequence
  ENSG00000179818_198 (sequence is synthesized)
aaaccagctcttctttttactttgctcttggccaaatcctgcaaaaatgtgttcatggggaggccactagaacttgagcatccagtacaagacgctccaatgagaaaaagacagaaatac

SEQ ID NO: 1022351 - DNA, 69 bp, Artificial Sequence
  ENSG00000179818_199 (sequence is synthesized)
tccagtacaagacgctccaatgagaaaaagacagaaatactcagggttccagccagggattgcctgagc

SEQ ID NO: 1022352 - DNA, 120 bp, Artificial Sequence
  ENSG00000179818_200 (sequence is synthesized)
gagcgggtgcgcgcgggcgggcacgtggggccctttcgtccccggcgtccgggcgccctgcatggatcccccaccccagctcctgctccccggcggcggccgacttcctagcatgggctg

SEQ ID NO: 1022353 - DNA, 120 bp, Artificial Sequence
  ENSG00000179818_201 (sequence is synthesized)
ttttcttttcttgtagtgtccttgtctggctattgttcacgagcatgttgttcaatttctttgtatttgtgaaattttccaaaattctttttattatttctagtttcataccattgtggt

SEQ ID NO: 1022354 - DNA, 120 bp, Artificial Sequence
  ENSG00000179818_202 (sequence is synthesized)
ccagaaagagggaggaatttgtccaagctctcccagtgagctgatgccagagccaggactagaactcaggtctcccaattctcagcacagtgtgattttccttgcagaatgttgatgctc

SEQ ID NO: 1022355 - DNA, 120 bp, Artificial Sequence
  ENSG00000179818_203 (sequence is synthesized)
aacccaagagtggtgattcactgtccaaactactggctggaggagagctcgtggtggtcatgtacgtgtgtgcatgtgtgtgtgtctatatttgagtggggcaagggaggggattgggga

SEQ ID NO: 1022356 - DNA, 120 bp, Artificial Sequence
  ENSG00000179818_204 (sequence is synthesized)
caggtgtccccaaccctagtctgtggctcattaggaacaggttgcccagcaggaggtgagtgagtggtgggcgagtgagcaaagcttcatctgtgtttttacaaccatcactcgcattac

SEQ ID NO: 1022357 - DNA, 120 bp, Artificial Sequence
  ENSG00000179818_205 (sequence is synthesized)
cactcgcattactgcccgagctgtgcctcctgtcagatcagcgcagcattagattctcataggagtgggaactctattgtgaactgagcaagtgagggatctaggttgcatgcttcttat

SEQ ID NO: 1022358 - DNA, 120 bp, Artificial Sequence
  ENSG00000179818_206 (sequence is synthesized)
cactactgcactccaccctgggccacagagcgagactcatctcaaaaaaaaaaaaaaatgatgttgatctcttggatcccccgggaagggtcttggggacccaggagtccagggatcata

SEQ ID NO: 1022359 - DNA, 120 bp, Artificial Sequence
  ENSG00000179818_207 (sequence is synthesized)
atttgagagccatggcctatacgaccatgggtactaatagcacatgcctccagcaccctccatcagcctccctcggcctcattttcctcagttgtaaagggaggcctgggcaggctctgt

SEQ ID NO: 1022360 - DNA, 120 bp, Artificial Sequence
  ENSG00000179818_208 (sequence is synthesized)
gacatcaaccagttactatttgctcctgcaaccaccgctgtactttctgtctctatgaacttgactactctagacacctcatccagagacagactcccagactcggccagaggctgatgc

SEQ ID NO: 1022361 - DNA, 120 bp, Artificial Sequence
  ENSG00000179818_209 (sequence is synthesized)
accttaggggaccagatgtgcagaggtaatgaataccagggaatcaggaaaccactggatcagttctttgagccacagaacaacactcatcccagcagctgggaagctatctgcaaaagt

SEQ ID NO: 1022362 - DNA, 120 bp, Artificial Sequence
  ENSG00000179818_210 (sequence is synthesized)
aggacggagagcagtaagcgtgctggttcttcttttggtctgtttagcaacttcccatgacttttgagcaaggaacaggtgtaaccccttgcaccctgaggtgtgcagttgactacatat

SEQ ID NO: 1022363 - DNA, 120 bp, Artificial Sequence
  ENSG00000179818_211 (sequence is synthesized)
gcctgtggcctcaaggccatgtagaaattgtccctggttcagccaaagcaaattcaaaaccaaaagcaaattcactgaccacgggggaaagagtaggagatattaaacaagcagctctgc

SEQ ID NO: 1022364 - DNA, 120 bp, Artificial Sequence
  ENSG00000179818_212 (sequence is synthesized)
cagggaggagttgtgcctccccaggatctgtttcctatgtattgaaataagaggaatcccatccagattctgtggaggtttccttccatccttcttatgtccctttttcacactgtcact

SEQ ID NO: 1022365 - DNA, 120 bp, Artificial Sequence
  ENSG00000179818_213 (sequence is synthesized)
ggggattaagtttccaacacatgaactttggtggatgcattcaaaccacagcaccagggttcctactatgtcacctccagaggcacccagagaggaaggttttgagttaatcacatcata

SEQ ID NO: 1022366 - DNA, 120 bp, Artificial Sequence
  ENSG00000179818_214 (sequence is synthesized)
gctgggattacaggcattagccaccacacctagccttctaacaggcttttcaaccatatattgtgattttacctgtgtaggagatagatggtagcgtctgtcttttacagttgacaaccc

SEQ ID NO: 1022367 - DNA, 120 bp, Artificial Sequence
  ENSG00000179818_215 (sequence is synthesized)
gagaaagggctttcttaacccacaagtgtacaggccttgaaggctcatgacttagggtcattgtcacccattcattcagtcaaatctggaaagcattcaaaaaataattaaaaaatcacc

SEQ ID NO: 1022368 - DNA, 120 bp, Artificial Sequence
  ENSG00000179818_216 (sequence is synthesized)
tctggggaaaagtctggtgtcaggttcagaaaggatttgtttcatatccagagccatgtctgggttgtgttctctgctatccaagaacccgagggctctcattcagcctcaagggctatg

SEQ ID NO: 1022369 - DNA, 120 bp, Artificial Sequence
  ENSG00000179818_217 (sequence is synthesized)
ggcggcgaggcgaggcctgcggagcggaggaagacaaacataaagatgaagtgcttaattcaaggtcacacaatgtcggggatggacctccagatttccttactgaataaaaactcttgg

SEQ ID NO: 1022370 - DNA, 120 bp, Artificial Sequence
  ENSG00000179818_218 (sequence is synthesized)
agctgaaaagagcctttgaagtaattttatgcagtctccttgtctccagcctgccatccaattacaggaatgttttctatcattctcctgacaaatgatctttcaagttctctttgaata

SEQ ID NO: 1022371 - DNA, 120 bp, Artificial Sequence
  ENSG00000179818_219 (sequence is synthesized)
tgacaaatgatctttcaagttctctttgaatacctccattaataggggagctcatcagttcttaggacatcgttgttgaaaagctctcattgatttgagacggagtcccactctgtcacc

SEQ ID NO: 1022372 - DNA, 120 bp, Artificial Sequence
  ENSG00000179818_220 (sequence is synthesized)
gggagagcgtctccagcatgaccaggcaaatctgcttgacacactcggtgacagactgcggcacgccagcgatggtgatggcccgctcggtggagttgggcagcatatcccccgccacct

SEQ ID NO: 1022373 - DNA, 120 bp, Artificial Sequence
  ENSG00000179818_221 (sequence is synthesized)
cagggaagcttctcgggggaggagcagcaccggcagggaggccgaggggcagcagtgcggacagggagtcaggtgacgtgaaaggaaaggggaccagatgtgcagaggtaatgaatacca

SEQ ID NO: 1022374 - DNA, 120 bp, Artificial Sequence
  ENSG00000179818_222 (sequence is synthesized)
ctcagggctcccactgattgtacattatggtgagacgtggtcttgtaacacagtggttaagaatgtgactttggagccagcctgctaggggctgaattctgactcagccatttactaact

SEQ ID NO: 1022375 - DNA, 120 bp, Artificial Sequence
  ENSG00000179818_223 (sequence is synthesized)
ctctcagaatgaaaagggagtgaaatttcccgtgatctttccacaaatgaccagcttggggagtgggagaggaagtgctgcagtgcctggggaaggggccctggaacagttcctggaaat

SEQ ID NO: 1022376 - DNA, 120 bp, Artificial Sequence
  ENSG00000179818_224 (sequence is synthesized)
ggagaggggtggatagggtggagacaatgctcatggagtgcagtatggggcctacccagagttgcttggccacccctctgcctctgaatcaggggtgatcaatgaaggaaaattactgca

SEQ ID NO: 1022377 - DNA, 120 bp, Artificial Sequence
  ENSG00000251131_0 (sequence is synthesized)
tttcgccaagccgaggtctcttggttgcggcactgcttctggctcggtgcctgtattttctcggtgcctacagcgcccaggtcgccgatctgagggcttcggagtaccggccgggcgcgg

SEQ ID NO: 1022378 - DNA, 71 bp, Artificial Sequence
  ENSG00000251131_1 (sequence is synthesized)
aatgtagacttaggtgtaacatgtaccggtttagatctgacagagatatcacaattgtaggattgcatctt

SEQ ID NO: 1022379 - DNA, 120 bp, Artificial Sequence
  ENSG00000251131_2 (sequence is synthesized)
tagatctgacagagatatcacaattgtaggattgcatcttttagcaagggctttgactcctgagtctaaaaaggtcactaactcccgctaaattgagagcaattgaagcctcatcttcag

SEQ ID NO: 1022380 - DNA, 120 bp, Artificial Sequence
  ENSG00000251131_3 (sequence is synthesized)
agacatggcgccagaaattaagactattcaaaccctctagtcccagggactattgaagaagaagtgggtgtgtaagcttataaggtctagatctgtcacccaggctggagtacagtggca

SEQ ID NO: 1022381 - DNA, 120 bp, Artificial Sequence
  ENSG00000251131_4 (sequence is synthesized)
ctccacctcccaggctcaagtgatcctaccacctcagcctcctaagaagctgggactatagatgtgcaccaacacgcatggctaatttttgtattttttgtagacaccgtgtttcgccat

SEQ ID NO: 1022382 - DNA, 120 bp, Artificial Sequence
  ENSG00000251131_5 (sequence is synthesized)
tcaaactcctgagctcaagcagtctgcctgcctagaccgcccaaagtgctgagtttacaggtgcgagccaccacagccagcctataaagtaaacgtgaatatctaaggaacactgatgca

SEQ ID NO: 1022383 - DNA, 120 bp, Artificial Sequence
  ENSG00000251131_6 (sequence is synthesized)
acgtgaatatctaaggaacactgatgcaagaccagcatgtgggaccccatgtaagattaacaatgttttcatggatcattaacccattcttattaaaaaaattatgaaagattatgaaaa

SEQ ID NO: 1022384 - DNA, 120 bp, Artificial Sequence
  ENSG00000251131_7 (sequence is synthesized)
agcaaggtttgtaatttcttctttctaggattggttctctgtaatttttgcttatttttaaattctctctttgtcttttgctctgagaacgatgttaccgatgtgtttgctttccatgtt

SEQ ID NO: 1022385 - DNA, 120 bp, Artificial Sequence
  ENSG00000251131_8 (sequence is synthesized)
tacttgcattttagcctttatttttttaattttgattttatttaaatgttatgtattttttttctactaattttgagcgtctcagcttcctgcttctttacttacattctctcaggatcc

SEQ ID NO: 1022386 - DNA, 120 bp, Artificial Sequence
  ENSG00000251131_9 (sequence is synthesized)
ggggagccgagctcggtctcagtctccctgctgtcaggtgccaggttgtgtctggtggctctccttcgtatgcggagctgatggttttgcatcagcgcttttgccagtagagccgactag

SEQ ID NO: 1022387 - DNA, 120 bp, Artificial Sequence
  ENSG00000251131_10 (sequence is synthesized)
cgttttctcagttacggcaccgttcttagcgcccagtgtgacgtttcccattcgccaggtccttatgttctctgtgctgtcactttcttggttctcgcaccgctagtatctgctaaagaa

SEQ ID NO: 1022388 - DNA, 120 bp, Artificial Sequence
  ENSG00000251131_11 (sequence is synthesized)
cttcctaaaccatgttttactgtgcagaacggtgattgcacggagccgctgtacgcactagtaatttcatagcaccgttagctggcgctttttctgtcacaacacattaaaacgggttaa

SEQ ID NO: 1022389 - DNA, 120 bp, Artificial Sequence
  ENSG00000251131_12 (sequence is synthesized)
cacaacacatttaaacggagtgggttcattcctccgaagaggatgtttaggcgtggaagcaccgctgtttcccaagagcacggtttctctctggcagcaccacttatggcaccaaaacag

SEQ ID NO: 1022390 - DNA, 120 bp, Artificial Sequence
  ENSG00000264672_0 (sequence is synthesized)
gcctgattgtcctctcctttccttaccttcagcaccaagaagtttccggtcccggtacagatcagtgaggaagaggctattgacaagtgtggatttgcccaggccagactctcctgagag

SEQ ID NO: 1022391 - DNA, 120 bp, Artificial Sequence
  ENSG00000264672_1 (sequence is synthesized)
gagagaggacagaggcaccaaatcagaagggacccttctctgggctgtctgatagtctgcagagacacagctgcttccgtgctctaggagagagggactccttggagatctgatctcact

SEQ ID NO: 1022392 - DNA, 120 bp, Artificial Sequence
  ENSG00000264672_2 (sequence is synthesized)
agtagtcgtaattctttggatgggctcagtttgtactgcttcatcctttgggtaagacaaaatcctacggggaactctgactccttgggggttctggaccttggatggtgggtcatcttc

SEQ ID NO: 1022393 - DNA, 120 bp, Artificial Sequence
  ENSG00000264672_3 (sequence is synthesized)
taagatttgtgattgtaagttattcttctggtcttgaaaactcaactgatgagtagatttggcatctgggattgatgaagcatgatggccgacctcgcgccctgacttgctctcactgcc

SEQ ID NO: 1022394 - DNA, 120 bp, Artificial Sequence
  ENSG00000264672_4 (sequence is synthesized)
tgtctgcttgaagcatgggaagccagtgtctgagtcttctggctctttagatggggagaggaatggcgggatgattctgttcttggtccagtctcgggtccccgaggagtgggtactgca

SEQ ID NO: 1022395 - DNA, 120 bp, Artificial Sequence
  ENSG00000264672_5 (sequence is synthesized)
tagtgtccaggtcctgactggagggagacagatcgagggtagtctgatgctgaatggggagtggtgggatgtgcagcttctgatcttcggtgggaagggttcagggagactgcagcactt

SEQ ID NO: 1022396 - DNA, 120 bp, Artificial Sequence
  ENSG00000264672_6 (sequence is synthesized)
cgatggcttgaggcaagaacgtacccatgtccctgctgaggggatgtgttagtagtaacctcagaccctctctgtgctgaaaccgctaccttggccccaggtttatttgtcttgaccatc

SEQ ID NO: 1022397 - DNA, 120 bp, Artificial Sequence
  ENSG00000264672_7 (sequence is synthesized)
tgatagattgtgcccttctgagtagatcccgtattttactggctggcttgtattcaggatcctaatgatgcctgaatatttaccctgttttaaagctgctgtttcttgggctcccacaaa

SEQ ID NO: 1022398 - DNA, 120 bp, Artificial Sequence
  ENSG00000264672_8 (sequence is synthesized)
ggtttcactttctccttagccaggagaagtgccccaaatttctaatcccttaagccaggaccttggtagccctgaggtgtgatgggagactctggacagaaccacctgttgacctatcca

SEQ ID NO: 1022399 - DNA, 120 bp, Artificial Sequence
  ENSG00000264672_9 (sequence is synthesized)
ccctcctttactctcccgagattctagaaattctcaggactcatccagagaaggaatcagccagaagatcctatgaagacaagatcaaaccaaacacgctgtgttcgccccagttttaat

SEQ ID NO: 1022400 - DNA, 120 bp, Artificial Sequence
  ENSG00000264672_10 (sequence is synthesized)
aagaaatctgactgaaaacaaatggttgaatgtgctgctaacagagagggccaaacgatgatgtctattgtggcagctgaacaaagtgagacttacagaactggaactgctgccctgaca

SEQ ID NO: 1022401 - DNA, 120 bp, Artificial Sequence
  ENSG00000264672_11 (sequence is synthesized)
gggggtcagagactcattcagagagcaagactctggtctctgccctgcttcagcacccaaatctttagggagctggctggtgggctgccaggcagttaggcctatggagagctgctgtca

SEQ ID NO: 1022402 - DNA, 120 bp, Artificial Sequence
  ENSG00000264672_12 (sequence is synthesized)
aaccaggacactcaaactcaggccaggagtccgtctatgatccaattccaatcagtctgacaagtcactctgatccagcacgattatcctatgcacatgttttttaaagaacaaaaaagg

SEQ ID NO: 1022403 - DNA, 120 bp, Artificial Sequence
  ENSG00000264672_13 (sequence is synthesized)
aagtttcgagttggtatgtgtgttttttaaagacacaaaccacatcctctttctattcaattaaattcaagggaaaggaattttggtctttataatcaagggcgattataaccaacagtg

SEQ ID NO: 1022404 - DNA, 120 bp, Artificial Sequence
  ENSG00000264672_14 (sequence is synthesized)
ggcgattataaccaacagtgtgtcatggaaatgcaaaatgactacagagcaattgacagcagcatcttctgtattctctccatattaaacctgttctttttttttttttgagacggagtc

SEQ ID NO: 1022405 - DNA, 120 bp, Artificial Sequence
  ENSG00000264672_15 (sequence is synthesized)
cgtgcctggcctaaaactgttcttatgctgactctatcacttattgaatcaaagttggcattaatttcactttatagtttaattaactataaacactaacattttaaaaattaagcaact

SEQ ID NO: 1022406 - DNA, 120 bp, Artificial Sequence
  ENSG00000264672_16 (sequence is synthesized)
ttgtctaaattggagtctttgtcattaatgtgtatttagacactggtaaatgtttttaagtctgcttctgttgtctataaacatgacttttgatctacaaacatctgatatttcattacc

SEQ ID NO: 1022407 - DNA, 120 bp, Artificial Sequence
  ENSG00000261431_0 (sequence is synthesized)
cacacttaggaagaacgggctttgggagaggaccgctggcccgagagtggaaccttgcacgcactgggcgttgaagcagtgctttctggattaaatacgaaatactgatgtcacaagcta

SEQ ID NO: 1022408 - DNA, 120 bp, Artificial Sequence
  ENSG00000253220_0 (sequence is synthesized)
gggggaagagaaaagcctcatcaccacttcttagagccaagttacccagggcaaggaaagggcattgagtcctggggatggtgggtacttacctccctatctgcaagatctttaaacagg

SEQ ID NO: 1022409 - DNA, 120 bp, Artificial Sequence
  ENSG00000253220_1 (sequence is synthesized)
aacagtcacccaaagttgcagatacaagaaggctcacccatccctaggacacattgcccagaagtggcaggtgttggtaagctggcttcatggtccagatggaaaagtttatccttctct

SEQ ID NO: 1022410 - DNA, 120 bp, Artificial Sequence
  ENSG00000253220_2 (sequence is synthesized)
ctctccctagagcacgggacaaagctcatgtgccaggacatgacatgtagctgactggtcaactctgtgccatttaactccatggatacttactttacagaccagaatctgggaacacca

SEQ ID NO: 1022411 - DNA, 120 bp, Artificial Sequence
  ENSG00000253220_3 (sequence is synthesized)
agaatccaactccaactcctcccttcatgggagtgcagagtcaagtgtgagagaccaaaaaggcagaaagtttcattgtaaagagaaatactcagatgagggagtacaaaggatgtgagg

SEQ ID NO: 1022412 - DNA, 120 bp, Artificial Sequence
  ENSG00000253220_4 (sequence is synthesized)
cagtatggaaaggattcctggaaaagaatattttgagctgtttggaaagatgattaaaaacaacaaaacaaagaaatggacagaggacttaaagtcaagaggcttaaagtcaagaaaggg

SEQ ID NO: 1022413 - DNA, 120 bp, Artificial Sequence
  ENSG00000253220_5 (sequence is synthesized)
caaagcacattcaggaacttgaacatagttccttggagagttggggaatttcagtttgacaatgactcctgtcatcacaaaggaaagaaaggctcgtgacaagacaaacaagtgtacaaa

SEQ ID NO: 1022414 - DNA, 120 bp, Artificial Sequence
  ENSG00000253220_6 (sequence is synthesized)
aggggaagaaagaagtcaggggctggctaacagtctctagctgttcctggattacaattagcatagggactaatgattttgtgtgttggtggaattatgtttccttcgtgggtctgtgcg

SEQ ID NO: 1022415 - DNA, 120 bp, Artificial Sequence
  ENSG00000253220_7 (sequence is synthesized)
atcactgcaaagtgcaacgaacataagaagtctcagggggtgtggaagcctgcaaactacacttcataggctgtgatcagctgccttctggttgggctctgccagtgaaaagccttggga

SEQ ID NO: 1022416 - DNA, 120 bp, Artificial Sequence
  ENSG00000253220_8 (sequence is synthesized)
caggactcaaatgctggagggaaggagaagtttgattttgcattgttttggttttgttttacccctgctttcacaaatgcctccccgagtggtgacacatcagcggaagtgcaacttctg

SEQ ID NO: 1022417 - DNA, 120 bp, Artificial Sequence
  ENSG00000253220_9 (sequence is synthesized)
gccccctgcacagcttcagggaccatctgatagcagtaacagcaactgcacctccagaagatcagaagcacatgcaggctgggcttctgtcaaaggctgggaagagctccctggcctctg

SEQ ID NO: 1022418 - DNA, 120 bp, Artificial Sequence
  ENSG00000253220_10 (sequence is synthesized)
agtttctcccttctcccttttactcttctacctcttccaaaagattgtaaccaactccctgtattaaatccctctctgctggaaatacctccagtgcaatctactttcttaactgagcac

SEQ ID NO: 1022419 - DNA, 120 bp, Artificial Sequence
  ENSG00000253220_11 (sequence is synthesized)
tgatgggtacaccatttaatgcacaaggagaccgaggtacagagaggttaagtaacttgtcccaaggcaaacagctaggaagtaacataaagcacagataaagaaaaagaaaaaaaacaa

SEQ ID NO: 1022420 - DNA, 120 bp, Artificial Sequence
  ENSG00000251139_0 (sequence is synthesized)
gcaagacaagcacggcctgttattacgaaagctaaagaaggaaataaaaggctttttgccactgaaataatccagaagactcttcaccttactggactcagctaaccacaaagtaagccc

SEQ ID NO: 1022421 - DNA, 120 bp, Artificial Sequence
  ENSG00000251139_1 (sequence is synthesized)
tgaagcaagagaccacaccaggagaagagagcacaactgaacagcagagaggatcaaatgtcctttcacagtagccagagctggccccaagctatgcaggcactttcctcctccgagggc

SEQ ID NO: 1022422 - DNA, 120 bp, Artificial Sequence
  ENSG00000251139_2 (sequence is synthesized)
tgagaaactgcacgcagagaagcaagtttaggatatcaatgaagacaaacacacctgcaagagttaacagagctacagaagacagatctgataaccacggcagtaaggatagcagcagga

SEQ ID NO: 1022423 - DNA, 120 bp, Artificial Sequence
  ENSG00000251139_3 (sequence is synthesized)
cctaccttacagggttgctgaaggtactaatgagttaacccatcagaagcttagcagcacctggctctgtctgctgctctcatcactgctctgttcctaagcctggccgtgtccaggctg

SEQ ID NO: 1022424 - DNA, 120 bp, Artificial Sequence
  ENSG00000251139_4 (sequence is synthesized)
tggctaccacctcggtcagctaccacagccctgctttgtggcagacacctggaccctgaaggagaaactagctccggaagcactttctcatgactctgcttaataaaggaataaatagta

SEQ ID NO: 1022425 - DNA, 120 bp, Artificial Sequence
  ENSG00000253227_0 (sequence is synthesized)
atggtggctttagagattccattaccggccagctacatttaaggggccattcaacagtggcagggagggaagagccacagctctggagagcactcttttcttctggtccattattttccc

SEQ ID NO: 1022426 - DNA, 90 bp, Artificial Sequence
  ENSG00000253227_1 (sequence is synthesized)
ctctggagagcactcttttcttctggtccattattttccctgaagagacccctgacgcctaaagagacggtatcgctctgccagctgacg

SEQ ID NO: 1022427 - DNA, 120 bp, Artificial Sequence
  ENSG00000253227_2 (sequence is synthesized)
cagcctccagagtagcttggactacagccctgtctcagtgtggcctgctcccagaactgtttctcctgacttctcatttcaccaagaagacatggactcagaaaaatgaagagagaaaca

SEQ ID NO: 1022428 - DNA, 120 bp, Artificial Sequence
  ENSG00000253227_3 (sequence is synthesized)
agagaccaagtttcagcagccactaagctgtcaaggctctttaaaaatctgattcctggccaggcacgggggcgcacgcctgtcaccccagtactttgggaggctgtggtgggcagatca

SEQ ID NO: 1022429 - DNA, 120 bp, Artificial Sequence
  ENSG00000253227_4 (sequence is synthesized)
attcaacagtggcagggagggaagagccacagctctggagagcactcttttcttctggtccattattttccctgaagagacccctgacgcctaaagctgtctgtgtccccactgtgacaa

SEQ ID NO: 1022430 - DNA, 89 bp, Artificial Sequence
  ENSG00000253227_5 (sequence is synthesized)
ttttttgtagagatggggtctcactatattccccaggatggtctccaactcctggactcaagcaatcttcccacctcagactgttcatt

SEQ ID NO: 1022431 - DNA, 120 bp, Artificial Sequence
  ENSG00000253227_6 (sequence is synthesized)
attcaacagtggcagggagggaagagccacagctctggagagcactcttttcttctggtccattattttccctgaagagacccctgacgcctaaagagatggggtctcactatattcccc

SEQ ID NO: 1022432 - DNA, 89 bp, Artificial Sequence
  ENSG00000253227_7 (sequence is synthesized)
cccctgacgcctaaagagatggggtctcactatattccccaggatggtctccaactcctggactcaagcaatcttcccacctcagactg

SEQ ID NO: 1022433 - DNA, 120 bp, Artificial Sequence
  ENSG00000253227_8 (sequence is synthesized)
agcagcacctgatttccaagccaaataagacatcacatggaaatataaccatgtcattgccccatgcaaaattatctggtgattctccattgcctagagaacaaaattgatgtctcctaa

SEQ ID NO: 1022434 - DNA, 120 bp, Artificial Sequence
  ENSG00000253227_9 (sequence is synthesized)
gcaagaacaacaaggctctttctgatttaacaattgcccccagttcttccccaaaccccgccctcatttaatattccagccatatgcatctatggtggcttcctgaatacagccagctcc

SEQ ID NO: 1022435 - DNA, 120 bp, Artificial Sequence
  ENSG00000253227_10 (sequence is synthesized)
tgcatacttccctaatgctaaggtccatgccatcaaacttaggaggttggatcaacttgcacttgaatttctggaacacaagcatgcaaaatgcagaaactggctgtaccctggtgacag

SEQ ID NO: 1022436 - DNA, 120 bp, Artificial Sequence
  ENSG00000253227_11 (sequence is synthesized)
gggaaaaggcgtccctcccatgggtggatcagaaatcaagggctctgccgctgctctttgagggtagtgggtaagagtgtggtccttgaacagaatcaaacctggcctaactcttacttg

SEQ ID NO: 1022437 - DNA, 120 bp, Artificial Sequence
  ENSG00000253227_12 (sequence is synthesized)
gtctctgaactcccatttctctatctgggggagggaaatggtaagaacacccctaaactgttagaggaaggaatgtctggcatatagcaggtgctcaataaatgtccattcttattagaa

SEQ ID NO: 1022438 - DNA, 120 bp, Artificial Sequence
  ENSG00000253227_13 (sequence is synthesized)
tttctggaagaaacaggcaatggttccctgaaataccactggactgtcacaagcatttcagttgggtttcatgcactgtctgaagagattgatccaagcaccttggatacatccgtagct

SEQ ID NO: 1022439 - DNA, 120 bp, Artificial Sequence
  ENSG00000253227_14 (sequence is synthesized)
caacattaaaaggccaaggttatatcttccactcccatccttcccctccagagcccccctcggtggaaatgacagagtcaggtaagacaccttcctgggggaaagcatatctgcactcag

SEQ ID NO: 1022440 - DNA, 120 bp, Artificial Sequence
  ENSG00000253227_15 (sequence is synthesized)
ggaacatgttcaagaattcagcctctgcctcttcaggccttatatgatgtatggattacagtataaaaagatcaaatatctggaggcacaggacttggattctaatcttggatcctaatt

SEQ ID NO: 1022441 - DNA, 120 bp, Artificial Sequence
  ENSG00000253227_16 (sequence is synthesized)
ctggccctgttggttaccagctgtgtgatcttggctaagtcacctaccctctgtaagcctcaaattcctcatctgtaatatggaggacctacctcacaaatcagatgatgagagggagaa

SEQ ID NO: 1022442 - DNA, 120 bp, Artificial Sequence
  ENSG00000253227_17 (sequence is synthesized)
tgtttgggggtatagccatactatacagtatggctcaggcctaaggttcttgaatttgcttgtttttcctcttggcctattttactacaggttaaaaatctgttatctggccaggtgcag

SEQ ID NO: 1022443 - DNA, 88 bp, Artificial Sequence
  ENSG00000253227_18 (sequence is synthesized)
agtcaaggtgggtggatcacttgagatctcaagtttgagatcagcctaggcaacatggtgaaaacctgttctacaaaaaatacaaaaa

SEQ ID NO: 1022444 - DNA, 120 bp, Artificial Sequence
  ENSG00000205231_0 (sequence is synthesized)
agccaggcggaaccctgggccgcggagcgcgacagctcccctctgtgcctgcagagcccggcgcccacagctggcccctctctcggagcagcggggcatggccatgtgtggatcctgccc

SEQ ID NO: 1022445 - DNA, 120 bp, Artificial Sequence
  ENSG00000205231_1 (sequence is synthesized)
ctgccccatgaggccgactgacttccttgggtatggggcacccgtcccagggaggccttggccttggagagcctctccagctgtacagcgtcagcctctctccagctgcacagcgtcagc

SEQ ID NO: 1022446 - DNA, 87 bp, Artificial Sequence
  ENSG00000205231_2 (sequence is synthesized)
cgtcagcctctctccagtgtcagcctctctccacctgcacagcggctgggagcagcagcctctccacctgcacagcgtcagcctctc

SEQ ID NO: 1022447 - DNA, 62 bp, Artificial Sequence
  ENSG00000205231_3 (sequence is synthesized)
gcgtcagcctctctccacctgcacagcggctgggagcagcagcctctccaccggcacagcgg

SEQ ID NO: 1022448 - DNA, 86 bp, Artificial Sequence
  ENSG00000205231_4 (sequence is synthesized)
gcgtcagcctctctccacctgcacagcggctgggagcagcagtctctccacctgcacagcggcacctgcacagcgtcagcctctct

SEQ ID NO: 1022449 - DNA, 120 bp, Artificial Sequence
  ENSG00000205231_5 (sequence is synthesized)
agcgtcagcctctctccacctgcacagcggctgggagcagcagcctctccaccggcacagcggcagcctctctccacctgcacggcagcagcctctccaccggcacagcggcagcctctc

SEQ ID NO: 1022450 - DNA, 120 bp, Artificial Sequence
  ENSG00000205231_6 (sequence is synthesized)
gcagcagcctctccaccggcacagcggcagcctctctccacctgcacggtggcagcctctctccacctgcacagcggctgggagcagcagcctctccacctgcacaacagcagcctctct

SEQ ID NO: 1022451 - DNA, 120 bp, Artificial Sequence
  ENSG00000205231_7 (sequence is synthesized)
ccacctgcacagcagctgggagcagcagcctcgcagggttgctgcaaagatggagtttccacatgtaatgtcaggacagcacccgccacacactgcgcagtctgcagggctgtggtgatg

SEQ ID NO: 1022452 - DNA, 120 bp, Artificial Sequence
  ENSG00000205231_8 (sequence is synthesized)
gtgactgtgggggtgacgggaggcagagagctcagggacagctcaggataggcgggaacacaagcacatgtgaaaagcaaggcgatcgccaactctgaggaaaacaaatgggcaccaccc

SEQ ID NO: 1022453 - DNA, 120 bp, Artificial Sequence
  ENSG00000205231_9 (sequence is synthesized)
ggggaggccgggcagctctgccccaaacatcattcgtgccgggatgatatggacagggcagcgtgtggaagacaagcccctttcaccgtccacggggaatttctgcactggaagctccag

SEQ ID NO: 1022454 - DNA, 120 bp, Artificial Sequence
  ENSG00000205231_10 (sequence is synthesized)
aagcagcagcatcaggtgctttttggaaacaggcagttagaaagcggaagcacagcacccacccccccacccaggaaactgcctccgtctcttctgctgcagaagaagcagcagctggaa

SEQ ID NO: 1022455 - DNA, 120 bp, Artificial Sequence
  ENSG00000205231_11 (sequence is synthesized)
gaggcagccaggtgctgatttcatcgtaagcctgaggcctcctttgggcttttctaactttatgtccttatgatgttcacaaataactaaataagttgtgagctgttatttcttgtcatt

SEQ ID NO: 1022456 - DNA, 72 bp, Artificial Sequence
  ENSG00000205231_12 (sequence is synthesized)
aactaaataagttgtgagctgttatttcttgtcattgaaattaaaggtgtttttttttttaatttttttgcg

SEQ ID NO: 1022457 - DNA, 120 bp, Artificial Sequence
  ENSG00000205231_13 (sequence is synthesized)
gtgagccaccgccccggactgaaatcaaaggtttcttaagcagctgcccgctgtgtgtgtggtgaacccggggcctgaatgcaggtgggacgcagcctcccaagcgccgggagccgctgg

SEQ ID NO: 1022458 - DNA, 120 bp, Artificial Sequence
  ENSG00000205231_14 (sequence is synthesized)
ctcctcacgcctgtcgatctagcaaatgtgctttggagtctctgacggacgcgattctgaatccagaaggaaagcgtctcactccgagatgctgactgacgtgtcctttatagcggtggg

SEQ ID NO: 1022459 - DNA, 120 bp, Artificial Sequence
  ENSG00000205231_15 (sequence is synthesized)
acttgggaagccggtgacgcccggtgtggaggacggttgtgacgcccctcggtggggacacggtgtaaaggcggcgtggaaacttggtgcacgaccttacaataaattgtaaaataagcg

SEQ ID NO: 1022460 - DNA, 120 bp, Artificial Sequence
  ENSG00000205231_16 (sequence is synthesized)
ttttacctggtgagatgaaaagaccggcaggagacggcaccccggtaggatgaacagaagagacttttaaacctgaagaaatcatccaaaaagcgaccacatgttagtgtcctgctgcga

SEQ ID NO: 1022461 - DNA, 120 bp, Artificial Sequence
  ENSG00000205231_17 (sequence is synthesized)
gttctccccccagaatccaagcttggccacgtggggccctaggaaggtactgacattgttcgaagagctggtgcctcccggccggaggccgctgtcaaaggacgcacgacctgtgggctc

SEQ ID NO: 1022462 - DNA, 120 bp, Artificial Sequence
  ENSG00000205231_18 (sequence is synthesized)
aagcagccgtccgtccaggacttgctctgcggaggcagacctggtcccaggccacggagctcgtcccagggctgcccagccctcccaccccaccgggtacacacaccgttccccggcctg

SEQ ID NO: 1022463 - DNA, 120 bp, Artificial Sequence
  ENSG00000205231_19 (sequence is synthesized)
gcctggacccgagcctctcgcacggtggcgctggggtccgggacccgcagagcaggctcagcctggccccaccctacccgatccctgtccagtcccctccccagcctcctcctctcctga

SEQ ID NO: 1022464 - DNA, 120 bp, Artificial Sequence
  ENSG00000205231_20 (sequence is synthesized)
gcagcctcccgaggggacccgcaggcagggcgtaggagggcggggccgagcccactggaccccagctggtggccgccggcgcttcttacctgcccagcccacaaggtcctgggagcctgg

SEQ ID NO: 1022465 - DNA, 120 bp, Artificial Sequence
  ENSG00000205231_21 (sequence is synthesized)
gccaggaaacaacagtggtgacctggcaaccgtctcctggcaacccccacccagccggaacccagaggtgagcttgggttttcggaggatggggaggggctgctgagtggcggggccagc

SEQ ID NO: 1022466 - DNA, 120 bp, Artificial Sequence
  ENSG00000205231_22 (sequence is synthesized)
ccgggaagccgggctgagggctgaggctggagaagggcacagcttcatgggcacagctgcctcccagtcactgctgggactgcctgagcctgagccccagttgctgcccctccgcccggc

SEQ ID NO: 1022467 - DNA, 120 bp, Artificial Sequence
  ENSG00000205231_23 (sequence is synthesized)
cctcccaggatggtccctgagccgtctctcaggccccacccatgctcagcaccccaggacctggcccgggccaggctctgcgtgcaccctggtgatgttggctggatacacggctgccga

SEQ ID NO: 1022468 - DNA, 120 bp, Artificial Sequence
  ENSG00000205231_24 (sequence is synthesized)
tccctgagcattctctgtgcttcacgtggtcgggtccctgttctcactccacagcggacgaggtgccactgtgcccccctctgcaaacaggaaccgggggctccacaaagtgagtgcccc

SEQ ID NO: 1022469 - DNA, 120 bp, Artificial Sequence
  ENSG00000205231_25 (sequence is synthesized)
ccagagggggactcacatctatcggtccaaactgcacctttctgtaagcccctcgctgtgtcacagacctcggccaaagtgaagcattccgcaggggtttgggccgtgaggaacagcctg

SEQ ID NO: 1022470 - DNA, 120 bp, Artificial Sequence
  ENSG00000205231_26 (sequence is synthesized)
cccgacacctgacttgaacactctgcggggaaaaacaccgaggaacatcacgattaccttctgcgggaacaagggccaaacaaacggcctcatcctgaagccgtgtggcccgggccgctc

SEQ ID NO: 1022471 - DNA, 120 bp, Artificial Sequence
  ENSG00000205231_27 (sequence is synthesized)
ccacccatacctataggcaccccagcccgtaggcggcagtgggctctggcatccagctggtcccccacctctgcaggtgtttgcaatgtacccgtgttgatgtaaggctgccctttctcc

SEQ ID NO: 1022472 - DNA, 120 bp, Artificial Sequence
  ENSG00000284694_0 (sequence is synthesized)
gaaattaaacaggagagatgaatcagctaaattggatttacttatatagatcaaatggccacagcccaactagtaggaaaatgggcctaactggtgccaagaaggaacgagcttattcca

SEQ ID NO: 1022473 - DNA, 120 bp, Artificial Sequence
  ENSG00000284694_1 (sequence is synthesized)
agggatctcgatttaaagaaggagaaggaaaagggcatgaggaatcaacaccagcattcagggtggcaaatgattgagaagatagttcccattggctcccaggtggcaagtgactgagaa

SEQ ID NO: 1022474 - DNA, 120 bp, Artificial Sequence
  ENSG00000284694_2 (sequence is synthesized)
gttagctcccattggctcccagtggctcccagaggtggcatgtgactgaaaagtcatctccagatgggccccagacaaggcatgtggctgagaagacagctctcattggttcccaggtgg

SEQ ID NO: 1022475 - DNA, 120 bp, Artificial Sequence
  ENSG00000284694_3 (sequence is synthesized)
cacatgactgaaaagtaaactcccattggtttccagatgtggtcatgactgagaagtcagctcctattcactcccgggtggctcatgactgagaagtcagctcccattggtttctggagg

SEQ ID NO: 1022476 - DNA, 120 bp, Artificial Sequence
  ENSG00000284694_4 (sequence is synthesized)
tggctcgtgactgagaggtgtcctgagaggggccaccccacctctgtccctccaccagagtgggccattttccccatgatctctaggaaaccaccaggactgtcctttccaggctctgtc

SEQ ID NO: 1022477 - DNA, 120 bp, Artificial Sequence
  ENSG00000284694_5 (sequence is synthesized)
cctctgcaggtggaggggagcctcaccctgtgggcttaaaggtggtgccgattctttgctacgtcccattgagcagtgaaatccacgtccctccccttgggcatgcagagtgaggtccgg

SEQ ID NO: 1022478 - DNA, 120 bp, Artificial Sequence
  ENSG00000284694_6 (sequence is synthesized)
agctcccaggcaggatcattagaggcctggaggctgctgcctgggcctcccgttagacctacccttggagtcccggctcagcgggaagccagacgccatgcagtggagctcatgacccgg

SEQ ID NO: 1022479 - DNA, 120 bp, Artificial Sequence
  ENSG00000284694_7 (sequence is synthesized)
gcagtgccacaccctgagggtgcccagccattggagagaccctggaggctgcagtcgtggggagagagcaaggtctggggacgccagggctcggatgtggaactgaggtggcccagctgg

SEQ ID NO: 1022480 - DNA, 120 bp, Artificial Sequence
  ENSG00000284694_8 (sequence is synthesized)
ccccatccaccagggacagccccccagccaagccccgcgcgaatgtctgaccaacaaaatcatgagcaaaatcacacgtctgctgtgagtcgctgcgtgtcagcgtgcttcgttgtgcag

SEQ ID NO: 1022481 - DNA, 120 bp, Artificial Sequence
  ENSG00000284694_9 (sequence is synthesized)
cagaagttctccagaaccggagcccagactccaagcgtgcacgggggattaaagaattaaagcgaaatccctgaagataaagatggtaaacaacacatcctgggtcacccctccttctat

SEQ ID NO: 1022482 - DNA, 120 bp, Artificial Sequence
  ENSG00000284694_10 (sequence is synthesized)
tctttttttcccccagtaaatgtcatgcttcaagggagtataactaaggaaagctcaaagtaataatatcagaaatctgcttccttttatttcttctgacattttattgtgatatgtaat

SEQ ID NO: 1022483 - DNA, 120 bp, Artificial Sequence
  ENSG00000284694_11 (sequence is synthesized)
tggaagaagacgaaacctctgatgggtatatttagttcgttgtgttggtgagtgtttcaaaggtgggtcctctgcggctctcattagcatcaagtatgcaaatcttcaagttgctcctta

SEQ ID NO: 1022484 - DNA, 120 bp, Artificial Sequence
  ENSG00000284694_12 (sequence is synthesized)
atgagcacagtcacgctataggcatgtgacatatccgtatctaggactgggcatctcgtgaatgggtctcatgtcataaacctggaacttagccccaacagaaacacatgcctagctatg

SEQ ID NO: 1022485 - DNA, 120 bp, Artificial Sequence
  ENSG00000284694_13 (sequence is synthesized)
gcggctgctcagccagcacagccccacttctgttcactcccaacgggggctcatgactgagaagtcagcccccattggttgacttcagcaaatgtgagccctcagcaagtgtgagccatt

SEQ ID NO: 1022486 - DNA, 120 bp, Artificial Sequence
  ENSG00000284694_14 (sequence is synthesized)
tcacatgctaccacttctgggagcgtctgacaggctttatcctagagaagccttgtccaagggaacaccaagctacgaatgagttcctggctgtcattttcaacccaggcaaagataatc

SEQ ID NO: 1022487 - DNA, 120 bp, Artificial Sequence
  ENSG00000284694_15 (sequence is synthesized)
tcatgtccttgcatgtctcagcaggcggcccttgttcctccaagcatggctcagtctctcactggggaaccagggcacgcttgctcctgactggctggtgggatgcgctgcaggccctct

SEQ ID NO: 1022488 - DNA, 120 bp, Artificial Sequence
  ENSG00000284694_16 (sequence is synthesized)
ggtctctggctctctgcttgtctttgttattttggctttgttgtcatttttaatggtaagtgtctctgagcactatctctccaagatcacactgagcttgccatgtcctctggtaaggga

SEQ ID NO: 1022489 - DNA, 120 bp, Artificial Sequence
  ENSG00000284694_17 (sequence is synthesized)
gaaggtgattgtggtctgatgttctggattcatccaatcagtgtcccccaacctacccgcctactaacctaagccatctgagccaaatcagcctccattagccacatccactggcagtgc

SEQ ID NO: 1022490 - DNA, 120 bp, Artificial Sequence
  ENSG00000284694_18 (sequence is synthesized)
tacccacgcagcatgtgtcaggttatttgtctaactgagacctatcaggcatccccagtgtggcacacaagctctacactggaagttcactggtaaaaggagagatgaggttgtcctccc

SEQ ID NO: 1022491 - DNA, 120 bp, Artificial Sequence
  ENSG00000284694_19 (sequence is synthesized)
atgtggcttaactcctagggtgccagacagccaataaacaagtaaatcaattcataagcaagataaatgcagatagtgaagactgctgtgaagaaaataaaatggcaaagctaatgtggg

SEQ ID NO: 1022492 - DNA, 120 bp, Artificial Sequence
  ENSG00000284694_20 (sequence is synthesized)
aagcccagggtgtggggaaagactatttggtggggaagtcagggagggcttcaccaagaggtgactctaagtcctgcgtgacagaaagaaggcagccattcagcggtgtgaggacccaga

SEQ ID NO: 1022493 - DNA, 120 bp, Artificial Sequence
  ENSG00000284694_21 (sequence is synthesized)
catccaggcagagggcatggccagtgccaaggtcacgaggtaagaatgaacttggagcatttgagaaacagcagggtccacgtgtctgagcaagtgggggagccgagggattgccttcca

SEQ ID NO: 1022494 - DNA, 120 bp, Artificial Sequence
  ENSG00000284694_22 (sequence is synthesized)
ctatttgaggttcagctcaaaatcctccttagattgccttttcctgacgtctcctgctaagaggttctgcctgccctgaccctgaccccagtgaccctccaacattttaccttttctatt

SEQ ID NO: 1022495 - DNA, 120 bp, Artificial Sequence
  ENSG00000284694_23 (sequence is synthesized)
tgcttggcaacttttatcaatttccaggccaccttaactatgtgtttatcagttcactctctgtttctcctgctggagtatatgctttgtagggaaagtcatctctgcctttttcgcagc

SEQ ID NO: 1022496 - DNA, 120 bp, Artificial Sequence
  ENSG00000284694_24 (sequence is synthesized)
catatccccagtgcctcttacagttcagggtacctggagtgtactcaagaaataattgttgaatgaacaattcaccacacctatcgtgagctattcacaaagcagtggtactggcatcac

SEQ ID NO: 1022497 - DNA, 120 bp, Artificial Sequence
  ENSG00000284694_25 (sequence is synthesized)
cagcgtggatctgtcacatctggagagaatttaagtctatttacatttatctttgggcctggaggacattgtatacactcacacacacacacacacacacacagatacaaataacagtta

SEQ ID NO: 1022498 - DNA, 120 bp, Artificial Sequence
  ENSG00000284694_26 (sequence is synthesized)
cgacaagcacaatcatacttgcctgtgagctctttatgtgccagatttgtctgagaagttaatcaactcatgtataaagatgttaatgtcaacaagaaaaaaacaaataatcccataaaa

SEQ ID NO: 1022499 - DNA, 79 bp, Artificial Sequence
  ENSG00000284694_27 (sequence is synthesized)
tgttaatgtcaacaagaaaaaaacaaataatcccataaaaaaagtgggattattaaaagaaggcatacaaacaaaccaa

SEQ ID NO: 1022500 - DNA, 120 bp, Artificial Sequence
  ENSG00000284696_0 (sequence is synthesized)
ggagccagtcttcccaaggtgaaatcctaactttgccacttactagccatgtgaacttgggcaagtgacctaatcctctgcatttcatctctaaattggggagaatagaagcatctactt

SEQ ID NO: 1022501 - DNA, 120 bp, Artificial Sequence
  ENSG00000284696_1 (sequence is synthesized)
catgtagtagccaggattagaagagctttttacatgctgcaccaatactgggtctagctgcagcttggctgggtcgcagaggctgaagagggagctaagcctggagagctggtagagatg

SEQ ID NO: 1022502 - DNA, 67 bp, Artificial Sequence
  ENSG00000284696_2 (sequence is synthesized)
cttggagccccactgtagaaagactgctgatatcccagaattccaaggtggatgtgcagatgagatt

SEQ ID NO: 1022503 - DNA, 120 bp, Artificial Sequence
  ENSG00000284696_3 (sequence is synthesized)
tgatatcccagaattccaaggtggatgtgcagatgagatttccagtgacacccagcagacttcacgcagaagattcaggaccacggccagcacccacactgccttccgtaaacactgagc

SEQ ID NO: 1022504 - DNA, 120 bp, Artificial Sequence
  ENSG00000284696_4 (sequence is synthesized)
taaataaacctagagccttggtgatgagatcagcactgcctttgtaagttggttttctcaacaaacatcaactgaacatctactaaacgtaagagcactctggctgtcaactgaaaacag

SEQ ID NO: 1022505 - DNA, 120 bp, Artificial Sequence
  ENSG00000284696_5 (sequence is synthesized)
cagcagcagcagcagcagcagcaacaccaccaccaacaacaacgacaactgttgcatatataactgaagatccacagagtccctctttccagtgttagttgctacaaggagtgagagaat

SEQ ID NO: 1022506 - DNA, 120 bp, Artificial Sequence
  ENSG00000284696_6 (sequence is synthesized)
gaagatctgacctcaaggaatacaagagttttgttcaaagttccaagactaagctattagaagggagggagggcctggtgccatgtcatctctgaccaagagaattggattaatggaaga

SEQ ID NO: 1022507 - DNA, 120 bp, Artificial Sequence
  ENSG00000284696_7 (sequence is synthesized)
ggaaaattgccacagcactttgcaaattctcccatcatgaggtggagtgcatttcaggctggctttgtgacttgctttggccaataatataaatgacactggcaggtagctgtccaaggg

SEQ ID NO: 1022508 - DNA, 120 bp, Artificial Sequence
  ENSG00000284696_8 (sequence is synthesized)
agagattgctgaagcttggtggcggtgatggttgtgcattggcagtgaaggtccagaagtttctccagttcttaagagagaggaatccctggctcaagagaatggagtcacttgcccagg

SEQ ID NO: 1022509 - DNA, 120 bp, Artificial Sequence
  ENSG00000284696_9 (sequence is synthesized)
gtcatccaactgagctggtgccctttgcactccccaagctgcttctctctgggtttggtaaaggttttttgtctttacgagaaacagagatggagcctcactgttgtcaaggctggtctc

SEQ ID NO: 1022510 - DNA, 120 bp, Artificial Sequence
  ENSG00000284696_10 (sequence is synthesized)
aaactcctggtctcaagcgatcctcccaccttggcttcccaagacaccagttcttttatttcatcctccccaaatctctgagctcggacttctattctggggtgaatttggggtaatcgt

SEQ ID NO: 1022511 - DNA, 120 bp, Artificial Sequence
  ENSG00000284696_11 (sequence is synthesized)
gacaatgacaacagacaaaattactgatgctgggagcagcaagttgggtttggaggtcattgctaagctgtaaaagaagtgatttgactataaactttggctgggcctccctgaacggga

SEQ ID NO: 1022512 - DNA, 120 bp, Artificial Sequence
  ENSG00000284696_12 (sequence is synthesized)
tcacataccacaatggaacctctgacaggaaaggtggcttccctcatgccccatcgtactttttcatcattctttagaaccatggaggagttcaaataccagctcagacacttccttgct

SEQ ID NO: 1022513 - DNA, 120 bp, Artificial Sequence
  ENSG00000284696_13 (sequence is synthesized)
agatgacctcagaaggaggaacgtgccgtgacgagagaaggctgaatgtttgctgcctctggaggaagtgagagctgctcaaaggtggtgaccacggtaataatgcagactttgaggctg

SEQ ID NO: 1022514 - DNA, 120 bp, Artificial Sequence
  ENSG00000284696_14 (sequence is synthesized)
gtgaacttgggcaagtgacctaatcctctgcatttcatctctaaattggggagaatagaagcatctacttcatgtagtagccaggattagaagagatggggccacttgagggaaaagacc

SEQ ID NO: 1022515 - DNA, 120 bp, Artificial Sequence
  ENSG00000284696_15 (sequence is synthesized)
tacccaagggcacataatctgtacatgagagagagccagatgtaacagactgagtactggacttggggttaaacagactgtgaatctttccaccccattggcaagttaccttggacaagt

SEQ ID NO: 1022516 - DNA, 120 bp, Artificial Sequence
  ENSG00000284696_16 (sequence is synthesized)
gatgagtagatgttcaaaataggggttcatttgcttctttgctctttggctcccacctttttttcaactgccccaaatctctttctgctcaccttttcttgttccatggggtctttacac

SEQ ID NO: 1022517 - DNA, 120 bp, Artificial Sequence
  ENSG00000284696_17 (sequence is synthesized)
caccgtgttagcatgtgtttctgctacatggttacttcttttctagaagcaagtgagtgagggagggcccagtgggcagctcagaactcagtaataaaaccacacagaatccatctcaaa

SEQ ID NO: 1022518 - DNA, 120 bp, Artificial Sequence
  ENSG00000284696_18 (sequence is synthesized)
acttactagccatgtgaacttgggcaagtgacctaatcctctgcatttcatctctaaattggggagaatagaagcatctacttcatgtagtagccaggattagaagagagcactctggct

SEQ ID NO: 1022519 - DNA, 120 bp, Artificial Sequence
  ENSG00000284696_19 (sequence is synthesized)
ttgttaccactcactttccagataaggagagatggggaggctcagggaggtgaatggatttgcctgaggccactggtcagtgactgagctgggataggaattactttctctggtctcttg

SEQ ID NO: 1022520 - DNA, 120 bp, Artificial Sequence
  ENSG00000284696_20 (sequence is synthesized)
atctcacctctttgtctcactctttctgctgcatctcagttgcttctgcgtctggccagacccaaaaacaaatcatgtaattgagttggaatgtgggtgctggggcccgggagacaatgt

SEQ ID NO: 1022521 - DNA, 120 bp, Artificial Sequence
  ENSG00000284696_21 (sequence is synthesized)
tttctgcttttcaatctgttcttaatttattaaagtgatgaaataaggaagaggcccagaagggtggatgttttccatcagtgagtcaggggaacatgcagaggcagaaggtcaggagga

SEQ ID NO: 1022522 - DNA, 120 bp, Artificial Sequence
  ENSG00000284696_22 (sequence is synthesized)
agctgctgttgctccagcagcttcacccactctggccaagtccccacagatgtgctggtgggggagaccttcttagagctgccccaagagtaaaataaaccagaaaagagcaagccctac

SEQ ID NO: 1022523 - DNA, 120 bp, Artificial Sequence
  ENSG00000284696_23 (sequence is synthesized)
cctggatagaatgtgatgaatgtatattcttaatgagaagtggaaataatttgtggttgagagctgtgcctcagatcagagtgacaggatacatggctaggctatattttccagcagatt

SEQ ID NO: 1022524 - DNA, 120 bp, Artificial Sequence
  ENSG00000284696_24 (sequence is synthesized)
attttccagccaaatggtgtagcagaggacttccaggaatttgttcttgttctgtatcaaaggtgaagagttcgtagccttcaaggaaacaagaaaccatgggatggagtgaaggaaggt

SEQ ID NO: 1022525 - DNA, 120 bp, Artificial Sequence
  ENSG00000284696_25 (sequence is synthesized)
ggcctggaaccagctgctgagcctctctgagccccagtttcctcgtctctaaaatggggctgatctcctctccctcagactgttgttgcaggaattaaaacaggttcttggagccccact

SEQ ID NO: 1022526 - DNA, 120 bp, Artificial Sequence
  ENSG00000284696_26 (sequence is synthesized)
tgaggatccaggtgtggagccagtcagccaagatgggccctggagggcctctcctcacccagggaaggggagtggtttaaggagtttggctgtataatcaatcagacctgagttcaagtc

SEQ ID NO: 1022527 - DNA, 120 bp, Artificial Sequence
  ENSG00000284693_0 (sequence is synthesized)
aagagcactacctcgcacactgcgcatgcgccacctcgggtggcctcaaggttgctgtcgggagttgggtttgagagaacaccaccactaatgggaagactgccccctgaccggcacatg

SEQ ID NO: 1022528 - DNA, 120 bp, Artificial Sequence
  ENSG00000284693_1 (sequence is synthesized)
gcctcagcattcatccacagatgctcctcaaattgttttaaaaacagctttttttaaaagctgtttgtctatgaagattaaatgagttaataatataagcaaagcactttgcatggctac

SEQ ID NO: 1022529 - DNA, 120 bp, Artificial Sequence
  ENSG00000284693_2 (sequence is synthesized)
gggcggggctggcgcaccgtctctacagcaacgccttagccagagggtgctcaggttttcgggaccgcgcgtggcgctctcagatgacgtcacacacccgcggcgcttgcgtgacgtaag

SEQ ID NO: 1022530 - DNA, 120 bp, Artificial Sequence
  ENSG00000284693_3 (sequence is synthesized)
aaaaaacaaaaaaaccccagcttttgtccagaggttgctttttgtgggtctgtacgctgaggccaagttctatgtaagcagagccctcccacctcacctccaaacaatgcctctaaacca

SEQ ID NO: 1022531 - DNA, 120 bp, Artificial Sequence
  ENSG00000284693_4 (sequence is synthesized)
tcacaatctgaaaggaaaataaatccctttcttcaatggtgacctgaagctagccaaggaccgggtgctggcaggtggcctgcgagactgggtcggatcccgggttactgtctgaggagg

SEQ ID NO: 1022532 - DNA, 120 bp, Artificial Sequence
  ENSG00000284693_5 (sequence is synthesized)
gatgccgtgctgtaagggttggggagccagtgtctggcttccttgtcaccacaagacctgtggtttccagctctgtctgcatccaggtcccactaaccaacagcaggagagaaaacagtt

SEQ ID NO: 1022533 - DNA, 120 bp, Artificial Sequence
  ENSG00000284693_6 (sequence is synthesized)
gtgcacacaggcggacgcgcacacgcgcacctggccccccagacgtgcacagccctcagaggaagtggagcaccagatgttctgggtttcctgttcgacgcttccacagctggtcgagtc

SEQ ID NO: 1022534 - DNA, 120 bp, Artificial Sequence
  ENSG00000284693_7 (sequence is synthesized)
tgtggttgtggtttgtctgtctcgggctcatgtgagagacaaaagctgggctgacgggaaacctcttctctcggcccccactccccagctctgactgattaggaaacctggcaggtcaga

SEQ ID NO: 1022535 - DNA, 120 bp, Artificial Sequence
  ENSG00000284693_8 (sequence is synthesized)
ctgaacccccaactcccatccctgaggagcagcccctgggctgatgatcaggacttacagaacctggggcgatggaaacctctacaaatatcccatttagaaagaccgccagccctgcca

SEQ ID NO: 1022536 - DNA, 120 bp, Artificial Sequence
  ENSG00000284693_9 (sequence is synthesized)
acagaatgaaacggaggccaggttgctatggtctctactccaatgcctgacattgagccgctgctgcaaaacactcagcacatgaaggaatgaatgaggaacagagaacttcacctttgg

SEQ ID NO: 1022537 - DNA, 120 bp, Artificial Sequence
  ENSG00000284693_10 (sequence is synthesized)
gggttgggtgtacaagccccaactgggccccaagtcccataaatagctttggattccaacatacaagcatttgacgcagcgaggtgctgccgacttgctctgtgacttggagcaagtcat

SEQ ID NO: 1022538 - DNA, 120 bp, Artificial Sequence
  ENSG00000284693_11 (sequence is synthesized)
ttagcctctctgggcctggtgtcctcatctgcagaatggagatgataatatctacttcacaaaggtgtgaaggccctgtgagacaccgcatgtggatttcctcgacattgtttgcccatc

SEQ ID NO: 1022539 - DNA, 120 bp, Artificial Sequence
  ENSG00000284693_12 (sequence is synthesized)
gtaactgctccagagaggctgggctcccttttctcgttgcaacactgctgtttatttcaggagatactctaaaagggaagcaagctaaaacaaagaacaaccaaaaacactgatcccggg

SEQ ID NO: 1022540 - DNA, 120 bp, Artificial Sequence
  ENSG00000284693_13 (sequence is synthesized)
acaactgcccggcaggacagcagagcaagggtacttggtgctcttcgttggggggatgttgggagaaggggctggagccatcccagggtctccaggctctggaagggagcaccccatgtc

SEQ ID NO: 1022541 - DNA, 120 bp, Artificial Sequence
  ENSG00000284693_14 (sequence is synthesized)
ctcctctgggtgtggaatagggtgagtgtcttaggggtggagagagaacaggcagagtgtgctctcaccccttagctctgtagtgattttaatgattaaggctactgttcggtctgcatt

SEQ ID NO: 1022542 - DNA, 120 bp, Artificial Sequence
  ENSG00000284693_15 (sequence is synthesized)
tggacctgagcaacagggacccctgcccagaggtccatccttcagcagcgtgcactgcatccccctccactgcagctgactctatgagatgaagcatctgtcgctcagtgtagccatcag

SEQ ID NO: 1022543 - DNA, 120 bp, Artificial Sequence
  ENSG00000284693_16 (sequence is synthesized)
gtccactgcccctgaaatatgactgactaggttcaaatgttgactctgacacttagaagctgtgccaccttggggcaagttacttcatctctctgtgccttactttcttcctttataaaa

SEQ ID NO: 1022544 - DNA, 120 bp, Artificial Sequence
  ENSG00000284693_17 (sequence is synthesized)
tgggtaaaataataaccacaccatcggttgtctatgaagattaaatgagttgataatatatgcaaagcacttagcatggctactggcacaagggtcagtaaacgttaactgttccacaca

SEQ ID NO: 1022545 - DNA, 120 bp, Artificial Sequence
  ENSG00000284693_18 (sequence is synthesized)
ctcccacccactcctgcccgtccgtcttctgccatgggatgatgcagtaagaaggccctcgccagatgctggcgccttgatcttggacttctcagccttcagaactagaacaccaccact

SEQ ID NO: 1022546 - DNA, 120 bp, Artificial Sequence
  ENSG00000284692_0 (sequence is synthesized)
aggagtgtgcatcacaaacacagccaatcccaggctgctctgtctggggaccgtcagaggacactgccctcttgcctggtacagaaggagacagtgattgtttagctgtgggtaaggcac

SEQ ID NO: 1022547 - DNA, 120 bp, Artificial Sequence
  ENSG00000284692_1 (sequence is synthesized)
aaactctggcatgtgaaggagtctctgaagttagcacccttctaagaatccaaactctacaagcagaggttaccaagcacagaggcgtggcacccaagatcacacaggtaacacacacgt

SEQ ID NO: 1022548 - DNA, 120 bp, Artificial Sequence
  ENSG00000284692_2 (sequence is synthesized)
ggggacacacacacctgcggctgcttccaacagctgtgcccaacctcagaggatgaagacgattcacatttgaggctcttcagaataatgtgcctggctctaaggcagctttcaaagagg

SEQ ID NO: 1022549 - DNA, 120 bp, Artificial Sequence
  ENSG00000284692_3 (sequence is synthesized)
acattcagcctgctatggctgtgaagatattcaacccgatgtcatccactgtgaggcagaggttctggcattttgaggacaaagcagccgggattctgtcacctcgctctgcatacacca

SEQ ID NO: 1022550 - DNA, 120 bp, Artificial Sequence
  ENSG00000284692_4 (sequence is synthesized)
gcatttaatgcaagcggaaggagggcccgggaaactcatgctgtgacctgataaatggcatgcagaggagtgtgcgattttctcaggccagccgtggggagctgtcagagccgtccaaat

SEQ ID NO: 1022551 - DNA, 120 bp, Artificial Sequence
  ENSG00000284692_5 (sequence is synthesized)
tcaaacagagcagcactggctgtggggagcgaggcccattctggcctgaactggaatgtggggaaggtccaccagcccttgctttctcccagctgccagttcctctcctgcccctgagtg

SEQ ID NO: 1022552 - DNA, 120 bp, Artificial Sequence
  ENSG00000284692_6 (sequence is synthesized)
gagtgaaacgattcctgcgcccaaaagggattttaaaaacagctcgagaagctgaaagcaagatacaacagacagttccactcaatttgctgccttcagcccggctgcgtactggaaaca

SEQ ID NO: 1022553 - DNA, 120 bp, Artificial Sequence
  ENSG00000284692_7 (sequence is synthesized)
tttcagaaatggaaatgcaagcttctggcagcagtcgcttttcctgttgcgctgacttgtcgcttcgtttgctaccttgtatacagacagcaaaggggccgcgggcctcgggtcagcctg

SEQ ID NO: 1022554 - DNA, 120 bp, Artificial Sequence
  ENSG00000284692_8 (sequence is synthesized)
atgtgctgtgtatgtgtgtgtgagtgtgtttgtgtctgtgagtgtgtgtgtgtgagctgagtcaactgagggacttgttctcagcacctcattcccttgctttcaagtggatcctgcctt

SEQ ID NO: 1022555 - DNA, 120 bp, Artificial Sequence
  ENSG00000284692_9 (sequence is synthesized)
cactttgtggcccaagccagatttggcaacggggaacaagccacctagaagctcaggcaagtccttcctgctgagaaaaggcttggacccctccaggacctgtgatcaaaccaccggtgt

SEQ ID NO: 1022556 - DNA, 120 bp, Artificial Sequence
  ENSG00000284692_10 (sequence is synthesized)
tacactggctaacgtgatggacgtacaagccgtgcaattgcacaaggcccctagaagggcctctggcacggtttaatgcttcgctatggccatcttgaaattcactttttttttttaaat

SEQ ID NO: 1022557 - DNA, 76 bp, Artificial Sequence
  ENSG00000284692_11 (sequence is synthesized)
ttgttatattacccaggtattaagccgagtactgattagttacttttcttgatcctgtccctcctcccaccctcca

SEQ ID NO: 1022558 - DNA, 120 bp, Artificial Sequence
  ENSG00000284692_12 (sequence is synthesized)
tagttacttttcttgatcctgtccctcctcccaccctccaccctctcaaaggccccagcgtgtgttgttccccttcacgtctccatgtgctctcatcatttagctcccactttcagtgag

SEQ ID NO: 1022559 - DNA, 120 bp, Artificial Sequence
  ENSG00000284692_13 (sequence is synthesized)
ctaaggatgatggcctccagctccatgcatgttcctgcaaaggtcatgatgtccttcttctttatggctgcataatattccacggtgtataggtaccacatttaaaaaatccagtctacc

SEQ ID NO: 1022560 - DNA, 77 bp, Artificial Sequence
  ENSG00000284692_14 (sequence is synthesized)
ttcatggtgcagtgaacataggcgtgtatgtgtctttataacagaatgatttatattcctttgggaataggtctagt

SEQ ID NO: 1022561 - DNA, 120 bp, Artificial Sequence
  ENSG00000284692_15 (sequence is synthesized)
ataacagaatgatttatattcctttgggaataggtctagtgacggggttgctggtttgaatggtagctctgtttttaggtctttgaggaattgccatgcagtcttccacaatggttgaac

SEQ ID NO: 1022562 - DNA, 120 bp, Artificial Sequence
  ENSG00000284699_0 (sequence is synthesized)
ttgttagagggctcttaagtcatcctttctccttctgaactagccgttgctcatctgctcatgtctgtggctgcagcaattaatgccagtttcaggtctcgctttgtcacccaggctgga

SEQ ID NO: 1022563 - DNA, 120 bp, Artificial Sequence
  ENSG00000284699_1 (sequence is synthesized)
gcgcagtggtttgatctcagctcactgcagcctcgacttccccaggctcagataaggagaccaagatgtgaagaggaaaggtgaatgctaaggtggagccaggcctgcaacccaggtctc

SEQ ID NO: 1022564 - DNA, 120 bp, Artificial Sequence
  ENSG00000284699_2 (sequence is synthesized)
ctatctcctggcccaggcttttgcctcctgccacgttgcctactgtgagcagttgggtcccgaggaaagagaagagcagagaggagtgtgagtgcataagcctgaagatagagggtacag

SEQ ID NO: 1022565 - DNA, 120 bp, Artificial Sequence
  ENSG00000284699_3 (sequence is synthesized)
acctgttatgaagattttgacaagtaatttcatcttctcagagcctaacttcccagctataacataagaaaaagaggaccttcttatagtagacacagacccaacaggagcagagtggta

SEQ ID NO: 1022566 - DNA, 120 bp, Artificial Sequence
  ENSG00000284699_4 (sequence is synthesized)
cctgacctggcacagagtaggcgctcggaatcctgtgtccagtgacttgaatatccatcagactggatgttagagctgtggggatgtggcactcaccctggaactactactagttgctat

SEQ ID NO: 1022567 - DNA, 120 bp, Artificial Sequence
  ENSG00000284699_5 (sequence is synthesized)
gcagcccattcccatctctgtgaacaacctgaattgtccaccttccttcaatctaaaaattctactcatccatcaaggagctcaatgccctgagtatgtgaggagagggctgctttggag

SEQ ID NO: 1022568 - DNA, 120 bp, Artificial Sequence
  ENSG00000284699_6 (sequence is synthesized)
ttggacagacttgagttcaagtcctggctcttccatgtggtactcatgtgacgtaggccaagtcatataactttcttgagcttcagtttccataaaatggcaaacacatggtgctcatta

SEQ ID NO: 1022569 - DNA, 120 bp, Artificial Sequence
  ENSG00000232812_0 (sequence is synthesized)
attctccttaccaaactctacaaataatcttctgtcttaagagcacccaggatgtgttttcattggaattagctagccctgggaaagacagtccctccagagttagcaacaccccaagat

SEQ ID NO: 1022570 - DNA, 120 bp, Artificial Sequence
  ENSG00000232812_1 (sequence is synthesized)
gtcaaagataaaaatgcaaaaattaaaactccatgattaacacaactttgaagtccttctcacttgtctttagatgaagggcaacatcattgcaacaagtcacactttgagaactcaaga

SEQ ID NO: 1022571 - DNA, 120 bp, Artificial Sequence
  ENSG00000232812_2 (sequence is synthesized)
gaatatgtttgttctgaaaatccaggaattattgccaacccatggttgtctccatatgtcttgggaaaaataggaaaaggattttttgagttggtgatttgaatccaagacacaaagatt

SEQ ID NO: 1022572 - DNA, 120 bp, Artificial Sequence
  ENSG00000232812_3 (sequence is synthesized)
caggctctggtaaaaagattgtataggctatattggctgacataaaagagacataaaaggcacacaatgaaatcttaataaatgtattggatgttgcagcattaactgatgagccagaca

SEQ ID NO: 1022573 - DNA, 120 bp, Artificial Sequence
  ENSG00000232812_4 (sequence is synthesized)
gagctagagaaagtctttgagaccattgattgcaaatatttgagtttacaactgagcaaatggagaaaagagaagtgactcgtcagtccaacaagtggcagaatcagaaccagaccccaa

SEQ ID NO: 1022574 - DNA, 120 bp, Artificial Sequence
  ENSG00000232812_5 (sequence is synthesized)
tgcttgggtcttctgtccctcctggcaccaaagtcacctatcataagtaacttgagtttcagaggggaaggaaaagactacaatgtcccagcactgttccagacactttttaggggactc

SEQ ID NO: 1022575 - DNA, 120 bp, Artificial Sequence
  ENSG00000232812_6 (sequence is synthesized)
caagacaccttgtgtaatgcctattttaagtagctggaagattctatagcatgggaaaagcccactgaaggcaaaagtaaacattacctattgtggtcctggaaaagaaaatcatctctc

SEQ ID NO: 1022576 - DNA, 120 bp, Artificial Sequence
  ENSG00000232812_7 (sequence is synthesized)
atttatctcctggagctgtttgacgaacttgtgccctggttttactttgggagccacctttctctttcaggtgctgtctcagtggaatagtcaaccaatgtatcctacattttggaccag

SEQ ID NO: 1022577 - DNA, 120 bp, Artificial Sequence
  ENSG00000232812_8 (sequence is synthesized)
cagaaggaagtaatgagaacagaaaacaaataagaagtgagttggagggagaaggagactttagcatcttcctgaaatcaggaagaaagtttcaagaataaagtaatccatagggtcaaa

SEQ ID NO: 1022578 - DNA, 120 bp, Artificial Sequence
  ENSG00000232812_9 (sequence is synthesized)
aggatgtgttttcattggtacggtaagacatgcagacatggaaatgaccatcatggaggaagaagtttgttatactcacagattgccagacacaggaggcacagtagaccatgcagggcc

SEQ ID NO: 1022579 - DNA, 120 bp, Artificial Sequence
  ENSG00000232812_10 (sequence is synthesized)
acagggaaatactagggtttgtcagaggcagagggaatgaaatggagaagcagccaagagtctttattgtggtttctgcaggaaagagccatcaggaagggaattagctagccctgggaa

SEQ ID NO: 1022580 - DNA, 120 bp, Artificial Sequence
  ENSG00000232812_11 (sequence is synthesized)
taaaaagattgtataggctatattggctgacataaaaggtaagagcaagaatgcagaggatttctatcaacataaagaagagtcaaaggtatgcgacttgtttgagtacaaagattctga

SEQ ID NO: 1022581 - DNA, 120 bp, Artificial Sequence
  ENSG00000232812_12 (sequence is synthesized)
agcagaggtactgcaactccttagcatttgcagaagcaaagacttgacagtgaaaattaattgtcataaaaatttttaaggtaaaataaaaagaatactggaacactcataaaggcaaaa

SEQ ID NO: 1022582 - DNA, 120 bp, Artificial Sequence
  ENSG00000232811_0 (sequence is synthesized)
aaaggtagatgcaatatatttattaggatttatttaaccaaacattgatgattactacgtgtcaggtactattccaagtatttataaatataactaatttaatctcttcttcttccagtc

SEQ ID NO: 1022583 - DNA, 120 bp, Artificial Sequence
  ENSG00000232811_1 (sequence is synthesized)
tttaaaattaactaaaatcatttttttaaaaaagaggccacaattttttcttttctgtttatactacttcctaagtacttagctagaccttctagatgtctggatatctggccactcttt

SEQ ID NO: 1022584 - DNA, 120 bp, Artificial Sequence
  ENSG00000232811_2 (sequence is synthesized)
tggttcttcatatatgccatgctctcttgtgccttagaacctttaagtttgctgtttcccctgctgggaaagttattttaatctgtcccttttcttatttaattcctgctttttcttcag

SEQ ID NO: 1022585 - DNA, 120 bp, Artificial Sequence
  ENSG00000232811_3 (sequence is synthesized)
atctcagttcaaccatcatctttgaggcaaaaatttcaacttctttatctaaagacaagtagagggctacaatagcatattacagaaattttaagagctgtgcttaatccactttgctca

SEQ ID NO: 1022586 - DNA, 120 bp, Artificial Sequence
  ENSG00000232811_4 (sequence is synthesized)
ccttgaatctctagtcctcagatagtggttcttattttccatgaaatgaggaaacattgaagggtaatggggaatggcttaggttatgttttaaaaggatcactctgactgttttactga

SEQ ID NO: 1022587 - DNA, 120 bp, Artificial Sequence
  ENSG00000232811_5 (sequence is synthesized)
gatgaaagtaggggcacaaaagtggaataagaaagataacttatgaggctaccaataatccaattcagggctgatgatagcactgacaataaaaagtggtcatatttggagtattttgaa

SEQ ID NO: 1022588 - DNA, 120 bp, Artificial Sequence
  ENSG00000232811_6 (sequence is synthesized)
agcagaaccaacaaaatttgtattgggtgtgaggtgtgagagcaaggagtaaagcatgacttcaagattttgcctgagcaactggtaggatgcggttgtcatcagctgaaatgagaaaac

SEQ ID NO: 1022589 - DNA, 120 bp, Artificial Sequence
  ENSG00000232811_7 (sequence is synthesized)
ctgtgggtgcagctagtttgagggaagagcaagatttctgtcttgaacataggtttgagatgtctatttagacatccaatagagatattaaataggcagctggaattcaagaaagcctgg

SEQ ID NO: 1022590 - DNA, 120 bp, Artificial Sequence
  ENSG00000232811_8 (sequence is synthesized)
aaataaaagataaaaactgcaagttggcagtacattgatagtacttaaagccatgaaactggatgagatcaccaagagagtgagtataagcaaagaggcaaaccgtggactgagtcctca

SEQ ID NO: 1022591 - DNA, 120 bp, Artificial Sequence
  ENSG00000232811_9 (sequence is synthesized)
tgtggtctttcagaagtgaaatgaaagtatatcaaggagaaaaggagtcaggacaaatagctggtctctaaatcaatgtcattaaaaattttaaaaacaaaaccactcacttaaaagctc

SEQ ID NO: 1022592 - DNA, 120 bp, Artificial Sequence
  ENSG00000232811_10 (sequence is synthesized)
tacagggtataacagctagataagacacatagacctagatttaatactgctttagaaaaaccagtggtaaaaaacgttttgaggccaaattggtaaatttagctttagtattagagatga

SEQ ID NO: 1022593 - DNA, 120 bp, Artificial Sequence
  ENSG00000232811_11 (sequence is synthesized)
aaacactgaaagggaaagctcaaggttgctgtttttttttttttttttaaaggtatgttctcactctgtcaaccagactggaatgcagtggcatgttcacagttcactacgaccttgacc

SEQ ID NO: 1022594 - DNA, 66 bp, Artificial Sequence
  ENSG00000232811_12 (sequence is synthesized)
atttttggcaaagatggggtctattgccattgcccagccgaactcctggcctcaagtgatcctcct

SEQ ID NO: 1022595 - DNA, 120 bp, Artificial Sequence
  ENSG00000232811_13 (sequence is synthesized)
tggcctcaagtgatcctcctgcctcagacttccaaagtgtaaggattacaggagatacataaataacggttggcatttgggaggcctcaaccattcctgaggtactggtggtggcagttg

SEQ ID NO: 1022596 - DNA, 120 bp, Artificial Sequence
  ENSG00000232811_14 (sequence is synthesized)
gttgcaagtatcttttgctgcactgaaggaggcaatgatgacgctggtacagatttcacttcagcatgggctggaatctgtaaatgatgcccagaaggcaaaactggagacttcacagtc

SEQ ID NO: 1022597 - DNA, 120 bp, Artificial Sequence
  ENSG00000232811_15 (sequence is synthesized)
actggaagactctgggtattaactacaataaaagatgagtctttttgtgttgagggaggaacagcaaatgtttgcatggtgagtccatcaattttcacaccatgactctgaactttagaa

SEQ ID NO: 1022598 - DNA, 120 bp, Artificial Sequence
  ENSG00000232811_16 (sequence is synthesized)
actgatgaagaaaaatttccagttcccacagaagtaactctacctttttctgatgtatctactgttcttgtaagaaaatagtttgaagaactggctggctgaaaaatgggcaattgaact

SEQ ID NO: 1022599 - DNA, 120 bp, Artificial Sequence
  ENSG00000232811_17 (sequence is synthesized)
gatgcacttgtggaagagctggaaatctgagtctgaaaagtaacttgaactggttttcctgtattccctttcaaagcatcagacatgactgaagattgaactagtggtataagatttcca

SEQ ID NO: 1022600 - DNA, 120 bp, Artificial Sequence
  ENSG00000232811_18 (sequence is synthesized)
gaagacttaggaattggaagtaattgcagaagattttttccatccgagccaatcgtctgaactacttggtacatgcagcctgaaacacttaaaagaacattgagtaaataaatacaacat

SEQ ID NO: 1022601 - DNA, 120 bp, Artificial Sequence; identical to SEQ ID NO: 800802
  ENSG00000232817_0 (sequence is synthesized)

SEQ ID NO: 1022602 - DNA, 120 bp, Artificial Sequence; identical to SEQ ID NO: 800803
  ENSG00000232817_1 (sequence is synthesized)

SEQ ID NO: 1022603 - DNA, 120 bp, Artificial Sequence; identical to SEQ ID NO: 800804
  ENSG00000232817_2 (sequence is synthesized)

SEQ ID NO: 1022604 - DNA, 63 bp, Artificial Sequence; identical to SEQ ID NO: 800805
  ENSG00000232817_3 (sequence is synthesized)

SEQ ID NO: 1022605 - DNA, 120 bp, Artificial Sequence
  ENSG00000232814_0 (sequence is synthesized)
tgggcagtgtgggatggagacatcctgactgtggaccgcgatggcgatggccggggcctcacacacagaacagcggctgatactccactggcattttggaacagctctgttcttctacaa

SEQ ID NO: 1022606 - DNA, 120 bp, Artificial Sequence
  ENSG00000232814_1 (sequence is synthesized)
gttctcacacatactgggccaagttggatcaccagggagtggcgtcttcatggaatagcattttgggtgcactgctcagtggcattcaatatattcaccttcaccgccgaccagctccag

SEQ ID NO: 1022607 - DNA, 120 bp, Artificial Sequence
  ENSG00000232814_2 (sequence is synthesized)
ccccccaaccctcagcaacagccattgtactttctgtttctatgaatttgatgacttcaggggcctcgtatgtgtggaatcacagaatccgaccttttgtgactggcttctttcactcag

SEQ ID NO: 1022608 - DNA, 120 bp, Artificial Sequence
  ENSG00000232814_3 (sequence is synthesized)
cagaatgccctcaagggtcatctaggtggtagcaggtgataagagttccttctttttaagaccgaataaaggctgggcaaggtggcttacacctgtcgtctcagcactttgggaagccga

SEQ ID NO: 1022609 - DNA, 120 bp, Artificial Sequence
  ENSG00000222041_0 (sequence is synthesized)
cttcttagtcgtgtgtacatcattgggaatggagggaaataaatgactggatggtcgctgctttttaagtttcaaattgacattccagacaagcggtgcctgagcccgtgcctgtcttca

SEQ ID NO: 1022610 - DNA, 120 bp, Artificial Sequence
  ENSG00000222041_1 (sequence is synthesized)
gatcttcacagcacagttcctgggaaggtggagccaccagcctctccttgacaagcaaagtggatcagcaaaggctgcagtcaccagcatcttttccaaccttaatgaactgtatcctca

SEQ ID NO: 1022611 - DNA, 120 bp, Artificial Sequence; identical to SEQ ID NO: 969665
  ENSG00000222041_2 (sequence is synthesized)

SEQ ID NO: 1022612 - DNA, 120 bp, Artificial Sequence
  ENSG00000222041_3 (sequence is synthesized)
agatggttaaactcatttttccctgctctgctcctctaaatacaactaagtaccttggaaactattcagcagacaatgataaagggctctgaaagctagaagaaaaggtgtacttgcaag

SEQ ID NO: 1022613 - DNA, 120 bp, Artificial Sequence
  ENSG00000222041_4 (sequence is synthesized)
aagtttcaaattgacattccagacaagcggtgcctgagcccgtgcctgtcttcagatcttcacagcacagttcctgggaaggtggagccaccagcctctccttgggcaaagaggcagagg

SEQ ID NO: 1022614 - DNA, 120 bp, Artificial Sequence
  ENSG00000222041_5 (sequence is synthesized)
actggggccggagcagccgagagatttcaggagaataactgggagatgaaacaggaagctctatgacacacttgatcgaatatgacagacaccgaaaatcacgactcagccccctccagc

SEQ ID NO: 1022615 - DNA, 120 bp, Artificial Sequence
  ENSG00000222041_6 (sequence is synthesized)
acctctacctgttgcccgccgatcacagccggaatgcagctgaaagattccctggggcctggttccaaccgcccactgtggactctgaggcctctgcatttgcgggtggtctgcctgtga

SEQ ID NO: 1022616 - DNA, 120 bp, Artificial Sequence
  ENSG00000222041_7 (sequence is synthesized)
cttcacagcacagttcctgggaaggtggagccaccagcctctccttgccctagcagatgctaatccagcgtgcgtcctgacagaggttgaagggggcttctcaagtcccaggtccagctt

SEQ ID NO: 1022617 - DNA, 120 bp, Artificial Sequence
  ENSG00000222041_8 (sequence is synthesized)
ggtgtggttcagctactcaagagacatctgctgctaatggatgagcagtcaacctggacgcaggaaatcattttttatttgggtgaatacaatattctccttttgttttcacttttccta

SEQ ID NO: 1022618 - DNA, 120 bp, Artificial Sequence
  ENSG00000222041_9 (sequence is synthesized)
atcgaggttcaaaagaaaaatttggtctttacatgtgctaaaaagaaaaaaacaaaaagactcatttcatctttatatgggatgggatccgtgctctggtgggctacagagtgtgtctct

SEQ ID NO: 1022619 - DNA, 120 bp, Artificial Sequence
  ENSG00000222041_10 (sequence is synthesized)
gtgtgggtccctgtactccgtgcgaggttggcggccgagccacggttcccatgtgagcaggacagcacagtctcacctcacacagagaacctcgcccgaacatggaactttcacccacgt

SEQ ID NO: 1022620 - DNA, 120 bp, Artificial Sequence
  ENSG00000222041_11 (sequence is synthesized)
tgccattttcccgctccctttccctcctttgaggttcacactcgtctctccaaattaaaatttacaaagagaggagatggaggctcccaagtggccacaaagtcacattttatgtgagac

SEQ ID NO: 1022621 - DNA, 120 bp, Artificial Sequence
  ENSG00000222041_12 (sequence is synthesized)
ctttttgcctcatttgctagttattgaacaaaggtgactctgaacctagcagaagcacgggttcaacacacagttcagaaaaacaggaaccatcaattcataagaacttaaagaaaaaaa

SEQ ID NO: 1022622 - DNA, 120 bp, Artificial Sequence
  ENSG00000222041_13 (sequence is synthesized)
atggtaagttttctaagttttcttttcgtctcccatatacgctgggctgtgctggaatcaccaacaggcacagaaaaaatgacaacaaaacaacaacaaaacccccaagaatatcctgtt

SEQ ID NO: 1022623 - DNA, 120 bp, Artificial Sequence
  ENSG00000222041_14 (sequence is synthesized)
acccagggtccttgcagagagattgatctgccagcagtggcatcagcagcaatagtagcagcagcaaagccctggacagtcctggcccccagtccacaacttagacacagcacatggcct

SEQ ID NO: 1022624 - DNA, 120 bp, Artificial Sequence
  ENSG00000222041_15 (sequence is synthesized)
aattcacccacagaagcagccactgtgaagccctgtgtctccccagactccatccagtggcataaggagacccaggccctgcagcttcctccccatcatggaaggctgtccatctacaga

SEQ ID NO: 1022625 - DNA, 120 bp, Artificial Sequence
  ENSG00000222041_16 (sequence is synthesized)
gtttccaaacataataagcactaaggaaacaacataacatgatatgccgaaaaaaaaaatcacaattaaatcaaaatgaaacatcaaaaaatgtccaagtaaaccacaggaaggcaagaa

SEQ ID NO: 1022626 - DNA, 120 bp, Artificial Sequence
  ENSG00000222041_17 (sequence is synthesized)
aaaagaaacaaaagtgtaataaacaaaaggatcaatcagagaacaaataataataaaatatcagacttagtcctaatatatcaataattatcttaaatgtaaatgttctaaatgcatcca

SEQ ID NO: 1022627 - DNA, 120 bp, Artificial Sequence
  ENSG00000222041_18 (sequence is synthesized)
ttaaaatgcagagattggcagagtgtattacaaaacatgacccagctatgtgttgtttacaagaaactcacttcaaattcaatgatataggtagactgacagcaaattgatggaaaaagt

SEQ ID NO: 1022628 - DNA, 120 bp, Artificial Sequence
  ENSG00000222041_19 (sequence is synthesized)
tataacgtgtaaacattagtcagaaggaagcacaagtggctatgttaacatcagaaaaagcagacttcagagcaaagaaagttactataggcaaagagggaaattacataataacaaaaa

SEQ ID NO: 1022629 - DNA, 120 bp, Artificial Sequence
  ENSG00000222041_20 (sequence is synthesized)
gagtcagcatgagtcatctcgttccaatgagaatgaaggctgagacaagcggtgcctgagcccgtgcctgtcttcagatcttcacagcacagttcctgggaaggtggagccaccagcctc

SEQ ID NO: 1022630 - DNA, 120 bp, Artificial Sequence
  ENSG00000222041_21 (sequence is synthesized)
agcaacatggacaggacaacccagcctcccgggtcccaggaggacttggcatggctgaggacacccaagaggaaccaccagcctatccctgaaaaagcaaagacactttggggaacagaa

SEQ ID NO: 1022631 - DNA, 120 bp, Artificial Sequence
  ENSG00000222041_22 (sequence is synthesized)
tcagagatttcaagaagacgctctatccgaaaaccaaagaagaagtgtcaaagctgttgtaaatgtttaaaagaatagccaccttgattgcattttgagtgaattgtgaattccctctcc

SEQ ID NO: 1022632 - DNA, 120 bp, Artificial Sequence
  ENSG00000222041_23 (sequence is synthesized)
ctgggtcttcctcattcttctacatcctccccatttctgtactgaatttatagcagactgaatttggaagttgatttgaatgtttaaatatatgagacactctttgttactttggaatga

SEQ ID NO: 1022633 - DNA, 120 bp, Artificial Sequence
  ENSG00000222041_24 (sequence is synthesized)
gtaaggcattaattcttttacgttttgatttttaaaggttttatagaaaattgcatgtttcatcaggaaaaaagttatctagttctactcaaaataacatcttatggaaactttcagagt

SEQ ID NO: 1022634 - DNA, 120 bp, Artificial Sequence
  ENSG00000222041_25 (sequence is synthesized)
ttcaccagacaaaatgccccaggctttggctttgcagctggtgtctacagctgagcctagtccttgaagtaatcatgactcagcttattcaaaataaactcttcaagaattgcaaactct

SEQ ID NO: 1022635 - DNA, 120 bp, Artificial Sequence
  ENSG00000222041_26 (sequence is synthesized)
tgcgtcctggtgaggacactgcgtttctttcagactttgaagatctgtcgttttagaaaagtggctgcctctgtcaccagccccatggttactgtcctttagtgtgactgtcaggaggtg

SEQ ID NO: 1022636 - DNA, 120 bp, Artificial Sequence
  ENSG00000222041_27 (sequence is synthesized)
tttctcagtccttcgttgtaagaatgtagatgccggttgcaccttctgttgtcttggaagagactgcagtgcttggctggaaaataagctgctcgggactcctctgagaagccaaagtga

SEQ ID NO: 1022637 - DNA, 120 bp, Artificial Sequence
  ENSG00000222041_28 (sequence is synthesized)
agctcagagatggaaaatttgggcagttgtctggacattaggagttgagtcacctcctacccatgaggaacaagcctgtggggggactgatattatcacttctgtcatcaagaaataagg

SEQ ID NO: 1022638 - DNA, 120 bp, Artificial Sequence
  ENSG00000222041_29 (sequence is synthesized)
aaatgaaacacagacagtgatgacagctggaagttggccaatgtcctgttgtcatattgccctcagcctagggactggcctgtggctcactgaccctgtctcccactctccacctctcat

SEQ ID NO: 1022639 - DNA, 120 bp, Artificial Sequence
  ENSG00000222041_30 (sequence is synthesized)
cagcaactggacctggtgcacctggtctacctcatgtccagtgttttccgcagtacctgactggtatccccacccttggttgttgtgtggtgagctcgtccctatgttggcaagttactt

SEQ ID NO: 1022640 - DNA, 120 bp, Artificial Sequence
  ENSG00000222041_31 (sequence is synthesized)
aattcctaggtgtcccgccttcctcactgtaaaatgagaaaagtcatagcacgaatgtcatgagtccttgtgaagattttatgattagcacacaagttacaaggagacacgataactgtt

SEQ ID NO: 1022641 - DNA, 120 bp, Artificial Sequence
  ENSG00000222041_32 (sequence is synthesized)
acgtacgtactcattcgttcggaaatataacagacagcttagtatctccacccgggtccctctgccctgtgggaatccataaagaattgattctcatcccccagaagtgagatcccgctt

SEQ ID NO: 1022642 - DNA, 120 bp, Artificial Sequence
  ENSG00000222041_33 (sequence is synthesized)
gcagataaacattctccaacaattattaagagttggattgctctaccttcatttaattccttggtgctttactatttgaatctagaatattcttgaagtctgaaagatggatagaaaaga

SEQ ID NO: 1022643 - DNA, 120 bp, Artificial Sequence
  ENSG00000222041_34 (sequence is synthesized)
gttgttctcaagactcctaaataaagcatttcccctgtgtgggcgacccctgggtcccatgtggggtcagtgtttgggtctctctgagaggatcaggaaggctgctcttccaggaagggc

SEQ ID NO: 1022644 - DNA, 120 bp, Artificial Sequence
  ENSG00000222041_35 (sequence is synthesized)
agcgcatgccctgtgacctccatgtccctccattacatctcctcagagtaaggcccaatgccactgactcatgggggaaccacaggcagcaaatggccagagctcacacagagggatgag

SEQ ID NO: 1022645 - DNA, 120 bp, Artificial Sequence
  ENSG00000222041_36 (sequence is synthesized)
tgcacttcacctgcagtgtgactcagcaggccaacagatgctatcagggaagagcactaaaaaccaaagggtggctggctgcgtctcagcatctgtccgcgagaaacacgatgccatggt

SEQ ID NO: 1022646 - DNA, 120 bp, Artificial Sequence
  ENSG00000222041_37 (sequence is synthesized)
tattttgtgattttggtggtaggctgctggtcaggtgtctccaagcaagttggtcaaaatgggaacagttgtttctctgggcgggcaggggtcaaggctggtctggaaaaggccgaggca

SEQ ID NO: 1022647 - DNA, 120 bp, Artificial Sequence
  ENSG00000222041_38 (sequence is synthesized)
gctgcaccctcttgagccactggccagcacctgtgccctgtctggggctttcctctgcccacaggagacccttctccatgcaggtgctgcgtggcaccaggcatgagtctgaagttcctt

SEQ ID NO: 1022648 - DNA, 120 bp, Artificial Sequence
  ENSG00000222041_39 (sequence is synthesized)
ctgccacaagcaccctcgttatttgtgattgtgcaaaaaaggaagtctctgccaagaaactaactgaatgttagtgcctgttctcaggactttccataaccctgctctactaggattcct

SEQ ID NO: 1022649 - DNA, 120 bp, Artificial Sequence
  ENSG00000222041_40 (sequence is synthesized)
ttcaccctctttgaaagcagccaaagggttaagtcatcccaggtgcatctcaaagcagggctgcgagcagcaggagtttgagctttgttgcaattagaagttgagtgtgagaaaggacat

SEQ ID NO: 1022650 - DNA, 120 bp, Artificial Sequence
  ENSG00000222041_41 (sequence is synthesized)
tcaggcacagcttatctttgaatacacatgcaggagtatcaggagcagttagagataaacagctggctaataaacacatgaaaagatgctcagcatcattggtcattagggacaggcaaa

SEQ ID NO: 1022651 - DNA, 120 bp, Artificial Sequence
  ENSG00000222041_42 (sequence is synthesized)
tcaaaaccacaatgagactctacttgactcccattaggatggcgacaacacaaacaaacaaacaaaaaagaaggtaatcagtgtggatgaggatgtggaaaagttggaaacttcagacat

SEQ ID NO: 1022652 - DNA, 120 bp, Artificial Sequence
  ENSG00000222041_43 (sequence is synthesized)
tgccgttgagaatggaaaatgatacagctgttttggaaaacagtttaatgtttccttaaaaagttgaatagagaattagcatatgacccagcaattccatttttatgtttgtaccccaaa

SEQ ID NO: 1022653 - DNA, 120 bp, Artificial Sequence
  ENSG00000222041_44 (sequence is synthesized)
gagatggaaactcatgcccaaagttacggaggacccagcaaccatctcctgcagcccctggaaacctcttgactcttctgtgatgtccccagtgatccagcagccctggccttcttttga

SEQ ID NO: 1022654 - DNA, 120 bp, Artificial Sequence
  ENSG00000222041_45 (sequence is synthesized)
gtcgtggtgcattatgccttcctggttttcatttaattgggcaccacgctgcctttcaagacgccttaaaggaaccaacaaccaaatccaagagagctggacagaccattgaacacacag

SEQ ID NO: 1022655 - DNA, 120 bp, Artificial Sequence
  ENSG00000222041_46 (sequence is synthesized)
taggctgtgtctcgtggctttcgttgtctggtgcctcaaagaaaacaccagaaagattgtttctaagctagagccaccccagattgcttaaagtgcaaagctcactgctgttgggggtac

SEQ ID NO: 1022656 - DNA, 120 bp, Artificial Sequence
  ENSG00000222041_47 (sequence is synthesized)
ccttgtgagacactggaaagctggttttaccgtggccctatgaagaggaagactgaaatttagacagtaatacctttactaggattggaaaagatttggttaatgacagccctgttattt

SEQ ID NO: 1022657 - DNA, 120 bp, Artificial Sequence
  ENSG00000222041_48 (sequence is synthesized)
tatcagggaaacttaacatgcctgtgtttcgtagtgaacaggatatctagggttgagaattactgcgaacactgttatgttgtcacgtgagctggggctccatggtgatgcaccctgggc

SEQ ID NO: 1022658 - DNA, 120 bp, Artificial Sequence
  ENSG00000222041_49 (sequence is synthesized)
tcccagaacaatgtgaagcactgagatgccctgcacctgggcctgggtcagaatcctggtagaggggtctttggcaaggacaggagaggacctccttgggattggactcagctgagcagc

SEQ ID NO: 1022659 - DNA, 120 bp, Artificial Sequence
  ENSG00000222041_50 (sequence is synthesized)
ttgtcccacttcacagatgaagagcttgggggccctgtggatgtgtaggagagtcggccttcctttttataggccttttgctgagctcagaggacagagcagaagacaaagccgaaagca

SEQ ID NO: 1022660 - DNA, 120 bp, Artificial Sequence
  ENSG00000222041_51 (sequence is synthesized)
acactcagggagtacaccatgtgaagactggacttaaacagctacaccaccagaagccgagagagaggctggaacatagccttccctttggagccctagcagatgctaatccagcgtgcg

SEQ ID NO: 1022661 - DNA, 120 bp, Artificial Sequence
  ENSG00000222041_52 (sequence is synthesized)
atccctcggtacaaaatggttcaatctgtctacctcctttcacattccaccaagatattccaaggcccagggttcctttgaccacctcacacctaacaagttccctcactgtctctcact

SEQ ID NO: 1022662 - DNA, 120 bp, Artificial Sequence
  ENSG00000222041_53 (sequence is synthesized)
ctcccctgaagattctaagctgcctctgtcctgctaaaactgtagacctgagaatgaagtaaggtgcttcaggtgaggcttgatcagcccagagcagaaaggggccacctcctcccaccc

SEQ ID NO: 1022663 - DNA, 120 bp, Artificial Sequence
  ENSG00000222041_54 (sequence is synthesized)
tataagaccctattagtgcaccttggagccctttgcttggctggtggctacaatacacttctgttaatgacggaattccataacatttttccccattaatttctgctacaaaacacaaaa

SEQ ID NO: 1022664 - DNA, 120 bp, Artificial Sequence
  ENSG00000222041_55 (sequence is synthesized)
ctggcggctcatcaatattagacacctgcaggaacagcaggtcagccaagccaaagagtaagagtggccctgtctgtgactagacgcttcttcagggttgcctcaacaccggagtggcgc

SEQ ID NO: 1022665 - DNA, 120 bp, Artificial Sequence
  ENSG00000222041_56 (sequence is synthesized)
tggtggtctccacccactcccagtgtacgctggcgtctaggaagccatgtgtgtgatcggccctgaattaggggcaaaacttttagttctcagatgaactgtcgtgggtttattcagtga

SEQ ID NO: 1022666 - DNA, 120 bp, Artificial Sequence
  ENSG00000222041_57 (sequence is synthesized)
taactagacagccaggccaacatggagttgattcatccatgcaaaacctcccagacaaggcctttcagtggagaactggaattcagggtcttctcagctttggccagaagccaaaggtag

SEQ ID NO: 1022667 - DNA, 120 bp, Artificial Sequence
  ENSG00000222041_58 (sequence is synthesized)
agtgctggctgggagagctgcaaggagatggcatatgctgccgatgaaggtgttctccaggaattttcagttagaagttttgatcattgttcatttggcctcaggatgaacatcatgaat

SEQ ID NO: 1022668 - DNA, 120 bp, Artificial Sequence
  ENSG00000222041_59 (sequence is synthesized)
ctggcgtgactcactggggtttgctgcaggaagataggggcgaaatgtcctcatcctgcctatagaagccagctccttattttaaatcccatcctgcttgactatcaaagtcagacagag

SEQ ID NO: 1022669 - DNA, 120 bp, Artificial Sequence
  ENSG00000222041_60 (sequence is synthesized)
gttttaaaaattggagtgtcttttccgcgttgactgattttggctctaagagatgtcgctggtcatttcagagtgactgaacctcccctctaacagatcccgggaattgttttcaggaaa

SEQ ID NO: 1022670 - DNA, 120 bp, Artificial Sequence
  ENSG00000222041_61 (sequence is synthesized)
ggtaaaaggcagccttttctgtcacaacacaacgctgagccggcagcctggctctgtcaggatctggggctccagcgcccgagaagcccagcctcgccggcggccaagttcaccgcgagg

SEQ ID NO: 1022671 - DNA, 120 bp, Artificial Sequence
  ENSG00000222041_62 (sequence is synthesized)
ccacgcgctgcctgcgctgcgctcccggacccgcaccgaccgcagcgcgcgccgccggtgcttctcccaccccagcctggaagctgcctccctccgcctatccctgcaggataagaagcc

SEQ ID NO: 1022672 - DNA, 120 bp, Artificial Sequence
  ENSG00000222041_63 (sequence is synthesized)
cgaggaggcggagcatggaactcgacagttaaaacatttaagagagaaaacctagtgtcttgctggcctgaaatcgagtacgcagcccggggtgatcagggtctcccggcccggatgtgt

SEQ ID NO: 1022673 - DNA, 120 bp, Artificial Sequence
  ENSG00000222041_64 (sequence is synthesized)
gagacttgcttcccctgggcaataggcgatacgatgctttaggaggaaggtatctctccctcctaagccccggaggggagaacttccaaagacagaaaaccacagggttcctggcacaga

SEQ ID NO: 1022674 - DNA, 120 bp, Artificial Sequence
  ENSG00000222041_65 (sequence is synthesized)
gctttccctttatcagctaaagcagaatcttttctggccttaacctggccccttcctctaactgtaggcagagaggcagacagaaaagcacttgctgaaacacaaagttttgttctgtcc

SEQ ID NO: 1022675 - DNA, 120 bp, Artificial Sequence
  ENSG00000222041_66 (sequence is synthesized)
gacttgagtaacagcaacatggagccacaccggtgagggcagggagagggtgctggttctgagccaactttgcatggaaggcccagcagaccacgctcattacttacagccagcatcatc

SEQ ID NO: 1022676 - DNA, 120 bp, Artificial Sequence
  ENSG00000222041_67 (sequence is synthesized)
ggggaactccggcacagacctgtagtcagtgccccacagcgccccagccttctctcccgacaggagtggccaggacagggagcagaaggtgactgctgtgctgcctggagctcttctgtc

SEQ ID NO: 1022677 - DNA, 120 bp, Artificial Sequence
  ENSG00000222041_68 (sequence is synthesized)
cggaggcttagtgaaactagagaaactcagtggacacactacaagacttcagagatactttttgtaaacccaggaagaatcaaagatatgaaacatgcagtaggcactcactaaatgtta

SEQ ID NO: 1022678 - DNA, 120 bp, Artificial Sequence
  ENSG00000222041_69 (sequence is synthesized)
attttcttcctttttaaatatatgcattatgatagttaaattaatgactgcacgactggaagaatacacactctaatgattcttttccctaaaataaatgtgtccactatttgctgtcta

SEQ ID NO: 1022679 - DNA, 120 bp, Artificial Sequence
  ENSG00000222041_70 (sequence is synthesized)
taacagcaacatgggcctgttgagaaggccctccaaacctttggttccagggtctggcaaggggaatctgtcatcattcattgcaaactacacctccacccactgggctgaagacctgtg

SEQ ID NO: 1022680 - DNA, 120 bp, Artificial Sequence
  ENSG00000222041_71 (sequence is synthesized)
cttcttctcttccctcctttgtgacagagtggggaaagatggggactgagggaaaggagagtagaaactcagtcccttgagagatgggagctgatgggaaggaggtagaaacttggtcct

SEQ ID NO: 1022681 - DNA, 120 bp, Artificial Sequence
  ENSG00000222041_72 (sequence is synthesized)
ttagccaggaggctctgcaggcattcaggcctgatctaccatgtaaggtgatttctttctttttggaaagctcccatttcatggggtggacaggtccaaggactgctctggaccacttgg

SEQ ID NO: 1022682 - DNA, 120 bp, Artificial Sequence
  ENSG00000222041_73 (sequence is synthesized)
tgatcacatgggccgaagtaggggtagaggaccccaaattgaatgtgtggaggggactctgaagcaggtgtgaatgccaggagaggtgggaggaaggacaagggtggtgcatcaagacca

SEQ ID NO: 1022683 - DNA, 120 bp, Artificial Sequence
  ENSG00000222041_74 (sequence is synthesized)
cagaagccggcccggccagccttcccacaaagttacttgaactgagctctccataagtacacatgcgcacacacccaagaataaactggacaaatggcagcagaaagagaaagaacagaa

SEQ ID NO: 1022684 - DNA, 120 bp, Artificial Sequence
  ENSG00000222041_75 (sequence is synthesized)
aagagagctgatgaatacatccataatcagcactaacacagccctggaaagaaaagcaaaaagaaaaggcaagcgctgtggtgtgcagctcttattgtctaataaaagaaaatataccaa

SEQ ID NO: 1022685 - DNA, 120 bp, Artificial Sequence
  ENSG00000222041_76 (sequence is synthesized)
cactcaaaagccttcatttctataactaattctggagtttacagaagcaaaaatcaataggctcaaaactccattcctttattcacttggctcagactggcttggggcagcacctctgag

SEQ ID NO: 1022686 - DNA, 120 bp, Artificial Sequence
  ENSG00000222041_77 (sequence is synthesized)
cccaagccagaaattgccaaaagggggttcctgtcggaatcttggagctcatcccccaaacttgagattactgagcaagtgagcaagatgtctctgtctggtccaggaagatgtcagccc

SEQ ID NO: 1022687 - DNA, 120 bp, Artificial Sequence
  ENSG00000222041_78 (sequence is synthesized)
actgacaaaactaccgaaccatgttcctggttgaggatacctgaaggtcgacatttatctgggatcttttgctgctgctttggtatgacttctatcaagatagctttcgacgagaataac

SEQ ID NO: 1022688 - DNA, 120 bp, Artificial Sequence
  ENSG00000222041_79 (sequence is synthesized)
cacagttcctgggaaggtggagccaccagcctctccttgccctgactgttacgtgctagctggctgtctcatctcctcgaggtgtcctgcgtgcctgctgatggggatgattccaatgac

SEQ ID NO: 1022689 - DNA, 120 bp, Artificial Sequence
  ENSG00000222041_80 (sequence is synthesized)
taaaaggtacctggccttctccatgcccagctttacatccagtagaggctcaggccaccctcgatggcagcctgcccgctgcgggcctgcttgtctgctcaaagcagaggttgacttgcg

SEQ ID NO: 1022690 - DNA, 120 bp, Artificial Sequence
  ENSG00000222041_81 (sequence is synthesized)
cccaggttgcattccagaagtcctggcctgctttctccacatggttagcttcgagcagtgagcttgggagcagcctttctgcgagttctgccagacaagcaaagtggatcagcaaaggct

SEQ ID NO: 1022691 - DNA, 120 bp, Artificial Sequence
  ENSG00000222041_82 (sequence is synthesized)
gatggtcgtcttaacagagccttgctctgttgttgctcgtgatcagcacctggcatctgctgccaaagactctgcccacatcagagactcttgatgtctgtccggaacagacaagcaaag

SEQ ID NO: 1022692 - DNA, 120 bp, Artificial Sequence
  ENSG00000222041_83 (sequence is synthesized)
atgcttagggagacagttcacagatatatatgtacttcacagggcacaatttaatccataaatcaatcatggatcactgctaaagaaaacaaaatatgctgccactaatttgccaccacc

SEQ ID NO: 1022693 - DNA, 120 bp, Artificial Sequence
  ENSG00000222041_84 (sequence is synthesized)
ctgtgagcatgattggatgatgtttattttgattaggagattgctccatttataaatcttcaatacatcctgtccccctaaaacggcatctggatcttttgagggttaaaaaaaaaaaaa

SEQ ID NO: 1022694 - DNA, 120 bp, Artificial Sequence
  ENSG00000222041_85 (sequence is synthesized)
ccgcaaagccacgtgctctgtgaggccaacaggagccccgccgggtggaccagctggaatctcagagagcgccgactctgaaaatacccggctctgcagaagcacgctgggcccaggggg

SEQ ID NO: 1022695 - DNA, 120 bp, Artificial Sequence
  ENSG00000222041_86 (sequence is synthesized)
agtgcttcctaaggtccgtcttttctattgtattcattttaatgggtgcatagccgtatctcgttgtgattttaatgtgcatctccctagtgactaataatgatgggacgcttttcatat

SEQ ID NO: 1022696 - DNA, 120 bp, Artificial Sequence
  ENSG00000222041_87 (sequence is synthesized)
acttgtttgtcattcataactcttccttggtgaaatgtctgtttagatattttgtccattttttttatttggattgtttgatttcttattattgagttttgggagttctttatgtattgt

SEQ ID NO: 1022697 - DNA, 120 bp, Artificial Sequence
  ENSG00000222041_88 (sequence is synthesized)
ggatacaagttccttattaggtgtatgatttgcaaatattttcttcaagcctgtagcttgttctttcattttcttaacaatgtcttttgtttttaatttcaaagaaatccaatttgtcaa

SEQ ID NO: 1022698 - DNA, 120 bp, Artificial Sequence
  ENSG00000222041_89 (sequence is synthesized)
tattttcttttacagattatgcttttgatgtaagaaatctttgcctaacctaagtcacaacaatattctcctagaagctgtagaaatttcaatctgtaatgatcaattttgaactcgttt

SEQ ID NO: 1022699 - DNA, 83 bp, Artificial Sequence
  ENSG00000222041_90 (sequence is synthesized)
catagttccaccatgttgcccaggctggtttcgaattcctgagctcaggccatccacccgcctcggcctcccaaggtgctagg

SEQ ID NO: 1022700 - DNA, 120 bp, Artificial Sequence
  ENSG00000222041_91 (sequence is synthesized)
ctcaggccatccacccgcctcggcctcccaaggtgctaggattgcaggcgtgagccaccatgcccgacccagaacttatttttaaatatggtgtgaggcatggagcaaagtttacttttt

SEQ ID NO: 1022701 - DNA, 120 bp, Artificial Sequence
  ENSG00000222041_92 (sequence is synthesized)
tacatgtgtttacccaattgttccctcaacatttgttgaaaagacatttctccactgcattgttttatgtctttgtcgaaaatcagtgtatttttggactcttgattctaacgttccatt

SEQ ID NO: 1022702 - DNA, 120 bp, Artificial Sequence
  ENSG00000222041_93 (sequence is synthesized)
gatgtttgtcttgatttatttttttggccttgaaacaacaatttattttcatctctcatgatattggaggttggccaggttcagctgggcaattcttacttgggttctctcatgcatttg

SEQ ID NO: 1022703 - DNA, 120 bp, Artificial Sequence
  ENSG00000222041_94 (sequence is synthesized)
cagttggatgatggctggagcagcaatctggaggctcaaggaggctgaaggccacatatgactccttcatttccatatctagcacctcagtggagtaggctggaacagctggggaatgat

SEQ ID NO: 1022704 - DNA, 120 bp, Artificial Sequence
  ENSG00000222041_95 (sequence is synthesized)
tgagcttctaattctctccctacctcctatctatgtgtctagttttcacttcttcacagtacggcattctcaggaaagtcagacttcttagtagtggcttaccctagaatgacttttcca

SEQ ID NO: 1022705 - DNA, 120 bp, Artificial Sequence
  ENSG00000222041_96 (sequence is synthesized)
aaagcacatgtttcaagagacccaggcagaagctgcaaagtttcctgtgacctagcttacacatcctatagtttcttttgccatattctgtaaggaaagcaagttgctatggccagacca

SEQ ID NO: 1022706 - DNA, 120 bp, Artificial Sequence
  ENSG00000222041_97 (sequence is synthesized)
ggttgcttctgtataagcaatgccaataatagaaggctccactgtcctgattaatgtagctttataacaagtctcaaaatcaagcaatgttagtccttcaactttgttcttcctttacaa

SEQ ID NO: 1022707 - DNA, 120 bp, Artificial Sequence
  ENSG00000222041_98 (sequence is synthesized)
agttgttttgactgtgctaggtcccttccatttacattcgaattttagaatcagtttgtcaatttctaccaaaaagaaagcccttatgaaattttgatcaagattgcattgaatttatgg

SEQ ID NO: 1022708 - DNA, 120 bp, Artificial Sequence
  ENSG00000222041_99 (sequence is synthesized)
atcaatttaatgagaacttacaattcaaattattttaagatcaatttggtgaaaatttacaccttaaaaatattgagtcttttgacctatgaacctacttaggttttctttaatttattt

SEQ ID NO: 1022709 - DNA, 120 bp, Artificial Sequence
  ENSG00000222041_100 (sequence is synthesized)
tagcaattacattataattctcaatgtatagatctttctatcttttatcacatttgccctattttatacgttttgacccattataaatggtatttttaaaatttcaatttccggttgttc

SEQ ID NO: 1022710 - DNA, 120 bp, Artificial Sequence
  ENSG00000222041_101 (sequence is synthesized)
tttgcaagtatatagaaacataattgatttctgtacattagccttatattctatatttttgctaaagtcacatttttagttctagtagtctttttttcataggattttctgcatacacac

SEQ ID NO: 1022711 - DNA, 120 bp, Artificial Sequence
  ENSG00000222041_102 (sequence is synthesized)
tcatgtcatctacaaataaagatggcttttcttctttatttccaatctcaatctcttttgtttccatttcttgctgttgcactggatagcaccttcagtacaatgttgaatttgtgagag

SEQ ID NO: 1022712 - DNA, 120 bp, Artificial Sequence
  ENSG00000222041_103 (sequence is synthesized)
tttctgatcttaagaggaaaacactcagtctttcaccattaagaatgatgttacctataggcttttcatagatgttcccttagcaggttgaagaagtttccatctattcttagtttgcta

SEQ ID NO: 1022713 - DNA, 120 bp, Artificial Sequence
  ENSG00000222041_104 (sequence is synthesized)
gactttttatcaggaacgtttgctgagttttatcaaatttttttctgcatctattgagacatgcaatcttctagtgccatcattttacaagctcaagtgaagtgtagggcacttaccttt

SEQ ID NO: 1022714 - DNA, 120 bp, Artificial Sequence
  ENSG00000222041_105 (sequence is synthesized)
ctttacgtcctactatcctctctgtttataatataattgcttaaatattttctctgcatatatttaggatcacattagatagttataatttttacttcaactgtcaacataatttagaaa

SEQ ID NO: 1022715 - DNA, 120 bp, Artificial Sequence
  ENSG00000222041_106 (sequence is synthesized)
agtccagtgaagaaggaaagtctattatacataccaatatttttgcttactattatgttaatatgttctttcttccttactgatgctccaatattccttcctttactgtttgctttttgt

SEQ ID NO: 1022716 - DNA, 120 bp, Artificial Sequence
  ENSG00000222041_107 (sequence is synthesized)
ttagaaaacttttttttagctgttcatttatagtatgtctgctggtgacagatacttttagttttccctctcctgagaatgcctttatttccattttattcctgaaggacctgtgattgg

SEQ ID NO: 1022717 - DNA, 120 bp, Artificial Sequence
  ENSG00000222041_108 (sequence is synthesized)
ggtggggctgtggtattttaagtggtgtttggctagagtggagcggttattgcccaaagcttttctgtcttgctgggctgccactgtccagctccttaggctggagagagcaggcttttg

SEQ ID NO: 1022718 - DNA, 120 bp, Artificial Sequence
  ENSG00000222041_109 (sequence is synthesized)
ttggggccttcttggtctcatttggaatttctgagttcagtttcttcaactatatatctgggatatacaagacagaaagaaaccagggcactctccaccatgttgttcctccagtctcaa

SEQ ID NO: 1022719 - DNA, 120 bp, Artificial Sequence
  ENSG00000222041_110 (sequence is synthesized)
gatctctagacagtctgtcttctctccatctttcagagtcttcttgtgcatgttttttatataacatctacactttttagtggcgcttagcagaagcaatgggacaagtatgtctactgc

SEQ ID NO: 1022720 - DNA, 120 bp, Artificial Sequence
  ENSG00000222041_111 (sequence is synthesized)
agctttctggaagagaagctcctcatttctttttttggatacatttcaaaagaagttgcaaatatatgaccctacacatttcagtatgcatatcattaactacagctcaacattagttta

SEQ ID NO: 1022721 - DNA, 120 bp, Artificial Sequence
  ENSG00000222041_112 (sequence is synthesized)
tatttttctttttcttgtgtgagatgaaaactatacatacattgccatcaggctttgcccaggcatcagaactcactagacagcagaatatacatctttgagaggaaccacagaaatgta

SEQ ID NO: 1022722 - DNA, 120 bp, Artificial Sequence
  ENSG00000222041_113 (sequence is synthesized)
atgtgcatgctaaggcttttacctgaacatcaaaatggaaacatcagagtattcatattagagagcaaccttacaattataatggatgtggtaaggctttttaaaaaatcaatgttcaaa

SEQ ID NO: 1022723 - DNA, 77 bp, Artificial Sequence
  ENSG00000222041_114 (sequence is synthesized)
aatggatgtggtaaggctttttaaaaaatcaatgttcaaagacatagaatcaaccaaaatggccatcagatactatg

SEQ ID NO: 1022724 - DNA, 68 bp, Artificial Sequence
  ENSG00000222041_115 (sequence is synthesized)
cactgagaacacatggaaccagggagaggaacaacacacactgaggcctgccactgcaggtgggggtt

SEQ ID NO: 1022725 - DNA, 120 bp, Artificial Sequence
  ENSG00000222041_116 (sequence is synthesized)
gaacaacacacactgaggcctgccactgcaggtgggggttcaggggagggagagcatcaggaaaatagctaatgcatgtcaggcttaataagtaggtgattggctgataggtgcagcaaa

SEQ ID NO: 1022726 - DNA, 120 bp, Artificial Sequence
  ENSG00000222041_117 (sequence is synthesized)
gcacacgtttacctatgtaacaaacctacaaatactacacatgtaccccagaactaaaagtaaaataaaagaaaacaaatttcaaaaaataaaaagaaaattctaggtacattgaaatat

SEQ ID NO: 1022727 - DNA, 120 bp, Artificial Sequence
  ENSG00000222041_118 (sequence is synthesized)
tgaaatatgcaattcttacgtgcaccatttgatgagtaccacccacccctctgtcaagatacagaactcatccatcaccccacaagttccttcttcctccttcacagtctaatcccttcc

SEQ ID NO: 1022728 - DNA, 120 bp, Artificial Sequence
  ENSG00000222041_119 (sequence is synthesized)
ccagccacctcgcggggacaaacattgttttgttttgtttttttacacctcctagattagtttcatcttttctagaatgcagtatgaatagaagggatatcatgcactcttttctgtctg

SEQ ID NO: 1022729 - DNA, 120 bp, Artificial Sequence
  ENSG00000222041_120 (sequence is synthesized)
gcttctttgtttcagcctaatgtttttcatatttagcaagttttataagtcatttgtttctgttgctgagtagtattccgttgtgtgcatataccacagcttgttgatccattcttctat

SEQ ID NO: 1022730 - DNA, 120 bp, Artificial Sequence
  ENSG00000222041_121 (sequence is synthesized)
tgatggatatctgagctgtttccaggttttggctagtatgaataaagccaaagagagccattttaatttggggcatttaaaaaatggtgtgaataaactttcatctgaacacagggttcc

SEQ ID NO: 1022731 - DNA, 120 bp, Artificial Sequence
  ENSG00000222041_122 (sequence is synthesized)
gtggtaataatgtttgaaaatatcacctccagctctgacgtgccgagtttgtaattttcgtaaatgatataaaaagtcatttcttcatccattcatttgttcactcaacccttatttagt

SEQ ID NO: 1022732 - DNA, 120 bp, Artificial Sequence
  ENSG00000222041_123 (sequence is synthesized)
gggcctattccctgtgccaggaatcattcaaggctcagtggggaagagaacaaatgtaagtaagtcggcctggtgcagttgacatgctagtgagggaaaagacaaaaacatcagttagtg

SEQ ID NO: 1022733 - DNA, 120 bp, Artificial Sequence
  ENSG00000222041_124 (sequence is synthesized)
aatacctgttatgacggaaaagaagccaggtaagtgggtagggcattacagttggtccagaggtagtcagggtgtcattttagctctggaagtagggagaggaacttagggagatggtca

SEQ ID NO: 1022734 - DNA, 120 bp, Artificial Sequence
  ENSG00000222041_125 (sequence is synthesized)
tctggaagtagggagaggaacttagggagatggtcaggggagggacttatatgatttggatctgtgtccccactcaaatctcacaccaaattataatccccaatgctggaggtggggcct

SEQ ID NO: 1022735 - DNA, 120 bp, Artificial Sequence
  ENSG00000222041_126 (sequence is synthesized)
tgctttaacaacatcccccttggtgttgtcacagtgacagtaagttatcacaagatctggttgtttaaaagtgtgtagcatgtccctctgtctctcttcctcctgctctggtcatgtgaa

SEQ ID NO: 1022736 - DNA, 89 bp, Artificial Sequence
  ENSG00000222041_127 (sequence is synthesized)
tgtccctctgtctctcttcctcctgctctggtcatgtgaagatgcctgctctggctttgcattctgccatgagaaaaagtttcctgagg

SEQ ID NO: 1022737 - DNA, 120 bp, Artificial Sequence
  ENSG00000222041_128 (sequence is synthesized)
ataagaagagcaggatttcaccggcttgagatggtcgtcttaacagagccttgctctgttgttgctcgtgatcagcacctggcatctgctgccaaagactctgcccacatcagagactct

SEQ ID NO: 1022738 - DNA, 120 bp, Artificial Sequence
  ENSG00000222041_129 (sequence is synthesized)
tgatgtctgtccggaacaggccaggacactctcatccacgttgctctcattggattggctcattaaccctttcttctatccccttctcactctttttttttcaaagccacacttatgctc

SEQ ID NO: 1022739 - DNA, 120 bp, Artificial Sequence
  ENSG00000222041_130 (sequence is synthesized)
tgttatcccctttctctcgatgttaaatgttactgttccatgtggaatgtttaatatagcatttatatattgattaagttaaggacactgctgtgtatggtttgcaatattgactgactt

SEQ ID NO: 1022740 - DNA, 120 bp, Artificial Sequence
  ENSG00000222041_131 (sequence is synthesized)
gcagagtggcttgagcctgagtgctcacagctctgactaccagttgaacaggacgtactaaggagaatcacttccttgggaactccatgtaacttgtggcttttgtgattgaaatagcat

SEQ ID NO: 1022741 - DNA, 120 bp, Artificial Sequence
  ENSG00000222041_132 (sequence is synthesized)
cagtaaaagtctgaccctgtggaaagacacaaatgtgcgtggacctggctatgtctgactttgtgctgctcaggacactctctgtaaccaaaagtgagagagcctggaagacctcagggg

SEQ ID NO: 1022742 - DNA, 120 bp, Artificial Sequence
  ENSG00000222041_133 (sequence is synthesized)
aggcagcagagcctcaccatcagtttgctgcatggaaggctgtgtgcctctatttccctgctatttgttgaactcccttgagctccggtccttcctaagtgagagagatgataccaatag

SEQ ID NO: 1022743 - DNA, 120 bp, Artificial Sequence
  ENSG00000222041_134 (sequence is synthesized)
caccaacctgagagggctggggagatgtttgaaggaaagcttggctggggagctgtagctggcctgtggtacatgcttggtaactggtggccaggagacccgggtgtgtgtcctgggact

SEQ ID NO: 1022744 - DNA, 120 bp, Artificial Sequence
  ENSG00000222041_135 (sequence is synthesized)
tgggaaggtggagccaccagcctctccttgtcctggaggctggaagtgcaaaaggaaggtgtcggcaagatcgtttttttctgagagctctctccttggcttgcagatggcagcctgctc

SEQ ID NO: 1022745 - DNA, 120 bp, Artificial Sequence
  ENSG00000222041_136 (sequence is synthesized)
acactcagggagtacaccatgtgaagactggacttaaacagctacaccaccagaagccgagagagaggctggaacatagccttccctttggaggtagcctggcccggtgggcactgtgat

SEQ ID NO: 1022746 - DNA, 120 bp, Artificial Sequence
  ENSG00000287928_0 (sequence is synthesized)
agccacttagctttgaaactgaattttaacaatgttccaaaaggagaaataaggtatagcatctcactacaaatcctccatctcaaaacatggggcctggagtggccccccaagacccta

SEQ ID NO: 1022747 - DNA, 120 bp, Artificial Sequence
  ENSG00000287928_1 (sequence is synthesized)
cccctaaaacaaactggctgtggatatggtgacagattagaaagttaaacccttcacctccatgaaagaatctggaatggagcaaacccatcatttacctaagaaggcagaaggtgagac

SEQ ID NO: 1022748 - DNA, 120 bp, Artificial Sequence
  ENSG00000287928_2 (sequence is synthesized)
actgatgcctgtctctatgaagggcacagagaagtcgaccacctccgatcgttcctcattgatgatggctacagaggagtttgatgacttgcccaagctcccacggtaagtgacttgaag

SEQ ID NO: 1022749 - DNA, 120 bp, Artificial Sequence
  ENSG00000287928_3 (sequence is synthesized)
ctgagcagtctgactccagagcttggactcctacccaccactctgcactgcttctctgacaatgaaggagtaagacatgttccttttcctccaaggacagtctagagggaaaagacacta

SEQ ID NO: 1022750 - DNA, 120 bp, Artificial Sequence
  ENSG00000287928_4 (sequence is synthesized)
tccatcgacaataataggctttggtaattactctaatatccactatccattgacaagttaggctttggtaattactgtaataaaagatataaataaagtactccggcattcagagtagaa

SEQ ID NO: 1022751 - DNA, 120 bp, Artificial Sequence
  ENSG00000287929_0 (sequence is synthesized)
gcctctctagagcatgctgggaggatgggcaccagagccgcctccccagagcgtgctgggaggatgggcaccagagccgcctctctagagcatgctgggagacggacaccagtacatctc

SEQ ID NO: 1022752 - DNA, 120 bp, Artificial Sequence
  ENSG00000287929_1 (sequence is synthesized)
caaggactgcacttcccccgactcccaccccattccctcacccacccccaacccggagactagaggaaagtctgtccaaagatgactgtggaatagggaatgccatggttctctgcaggt

SEQ ID NO: 1022753 - DNA, 120 bp, Artificial Sequence
  ENSG00000287929_2 (sequence is synthesized)
cccccacactatggggggttaagtcagcaagtagggaaaacagtcaagacgaggagatggagaaacagagaggcaggagagaaacagggggctgacaaagatggaggggccattgtgttg

SEQ ID NO: 1022754 - DNA, 120 bp, Artificial Sequence
  ENSG00000287929_3 (sequence is synthesized)
catggccgtccccatgctgcagggccagcctgcacaagaagagatgacaatcagatggacatccacacccaaagcaagtcaggaggactggcatgcccctgtctccccagcaccccattt

SEQ ID NO: 1022755 - DNA, 120 bp, Artificial Sequence
  ENSG00000287929_4 (sequence is synthesized)
gtagccttttctcaggttgagtaaatagttctgtattaggaaaggccctcttgcctccacaactccttccccaccttggtgacatcattcatcgtggttctgccacttcctagaccctgc

SEQ ID NO: 1022756 - DNA, 79 bp, Artificial Sequence
  ENSG00000287929_5 (sequence is synthesized)
gcttatttgaatttgcgggactccctgtgatttcatctctgaccaatccgcactcctggctcactggcttccccaaccc

SEQ ID NO: 1022757 - DNA, 120 bp, Artificial Sequence
  ENSG00000287929_6 (sequence is synthesized)
tgaccaatccgcactcctggctcactggcttccccaacccatgaagttttccttaaaaactctgctcccgaaatgctcagggagactgatttgataacaataaaactctggtctcccgca

SEQ ID NO: 1022758 - DNA, 120 bp, Artificial Sequence
  ENSG00000256888_0 (sequence is synthesized)
gaagaatacggtttctgagaatttccactctgaattcacattccgttcagtgttatcgccaccctgtggatttcttgggtaatgaaactcagaccgggaaatgaaaacggggattttcag

SEQ ID NO: 1022759 - DNA, 120 bp, Artificial Sequence
  ENSG00000256888_1 (sequence is synthesized)
taaatcggttccagtaaatctctgctgctcttgtgggcgccctcttttgagcaccggaggaatgagcaccgttcttcattcttttggttttgtaaagttgtagagctgcgttcataacta

SEQ ID NO: 1022760 - DNA, 120 bp, Artificial Sequence
  ENSG00000256888_2 (sequence is synthesized)
cctcgctggctttgagcacaacccaggaagaagtttgaaaccaagaaaatggtggttgggaagaccaggatgcgcaatggcaagtgctgacaactctggaatacacagtaggcacccaat

SEQ ID NO: 1022761 - DNA, 120 bp, Artificial Sequence
  ENSG00000256888_3 (sequence is synthesized)
aattaaagctgtctgtatctgctgatcatccacaatttagacgtcctatactacattccaattgagggcaagcggggtacgtgtcctgaatttatagaatcttttgacacaaagcaagag

SEQ ID NO: 1022762 - DNA, 120 bp, Artificial Sequence
  ENSG00000256888_4 (sequence is synthesized)
agccacagtcaagactcaagtcaaaagaaatttagaccccatctgggcaaacaggcctctaagcaacaatctaagatttccacctattgttctggcattccttgtataaatgattatgac

SEQ ID NO: 1022763 - DNA, 120 bp, Artificial Sequence
  ENSG00000256888_5 (sequence is synthesized)
tgcagagatcttaggaagtgctgtggtacctttagatgtggcctgaggtgcatacatcctcttatgattggccctgtatttttcaattcacctccacaatccaaggcataaatattggat

SEQ ID NO: 1022764 - DNA, 120 bp, Artificial Sequence
  ENSG00000256888_6 (sequence is synthesized)
ggagaaatggattcagatggaggcatcattgagcttattcttgactcatctcagtccaaacattactctgtcaatcgttgttcttaaaatctgcatattaaaagctcagcatcaactatt

SEQ ID NO: 1022765 - DNA, 120 bp, Artificial Sequence
  ENSG00000287922_0 (sequence is synthesized)
catatcttcggttttggaagactagtggggaaggcagctggtgatctcgtcacgatagatgagatgagaagtgtgacatcctgccggggcatattccaggtggacagcactagtgaaggg

SEQ ID NO: 1022766 - DNA, 120 bp, Artificial Sequence
  ENSG00000287922_1 (sequence is synthesized)
agcacacgaagcccttggaaatcggaaggctgaagcaaaagcttggactgagagtaggaggaaggaagttgcttgttattttgaataagcaagcttcatgaataaaatgctgacctactg

SEQ ID NO: 1022767 - DNA, 120 bp, Artificial Sequence
  ENSG00000287922_2 (sequence is synthesized)
tctgctctccacactgctacactggttagcacactgtaattgcaaaacactttgctagagccttttgccgaatttccctcaaaagaggcaagttttgatttttttttttttttgtcaagc

SEQ ID NO: 1022768 - DNA, 120 bp, Artificial Sequence
  ENSG00000287922_3 (sequence is synthesized)
atataccctccgatttagctgttcaccatctttgtaatctactgggactgtgatgtaacctctggcatctaagattcttcaggcttgttaataaccaccagctacagctgagagaaaagc

SEQ ID NO: 1022769 - DNA, 120 bp, Artificial Sequence
  ENSG00000287922_4 (sequence is synthesized)
aagaatgcaaggtttggatagataatggcagtggaaggaaggagctgggaagataattaaaacaatgacattctaaggtagctgaagtttcccttttattgaaaatatttgagaatcttt

SEQ ID NO: 1022770 - DNA, 120 bp, Artificial Sequence
  ENSG00000287922_5 (sequence is synthesized)
aggatctccaattttctgctctcagtaatttttctcaacaaattattccactactgcctcacggaagcataaaccactgtctccagtgcttggagaaatcacaaaatttcaaaaaacagc

SEQ ID NO: 1022771 - DNA, 120 bp, Artificial Sequence
  ENSG00000287922_6 (sequence is synthesized)
cagccacaatcattgttttcaaaaaatgtatgttaaaattaatttatagttaagtttactttttaccctttatatcagaagaggccatttattatttatttatttcagaattatttcttt

SEQ ID NO: 1022772 - DNA, 120 bp, Artificial Sequence
  ENSG00000287922_7 (sequence is synthesized)
tttttattgtatgtatttatcatgtacaacatgatgttttgaagtaagtatacattgtggaatggctaaatcaagctaagcatatgcattacctcacatacttatcttttttttgtggtg

SEQ ID NO: 1022773 - DNA, 120 bp, Artificial Sequence
  ENSG00000287922_8 (sequence is synthesized)
agaacacttaacatctactctcatgtttgagttccttatgtatgttagatattaactccttatcagatatagtttgaaaatactttctaccttttgttgtctgtgttggcaattttcaag

SEQ ID NO: 1022774 - DNA, 120 bp, Artificial Sequence
  ENSG00000287922_9 (sequence is synthesized)
ctgtgttggcaattttcaagaatacaatacattgttattaactatagtcatcacattgtacaatcgggtctcttgaatttattccttctgtctaactgaaattttgtatcctttgaccaa

SEQ ID NO: 1022775 - DNA, 120 bp, Artificial Sequence
  ENSG00000287922_10 (sequence is synthesized)
actctctacatctatgagttcagctttgtctattatacacacaagtgagatcgtgtagtgtttgcctttctcttcctggcttatttcaatcctgcagttccatccatgttgtcacaaatg

SEQ ID NO: 1022776 - DNA, 120 bp, Artificial Sequence
  ENSG00000287922_11 (sequence is synthesized)
cttcatcatgtagatgcaccacattttaaaaaatcctttcatccattggtggacactgagattatttccatatcttggtttggaacaggaattaaaggaaattaaagaatgtgtaagcag

SEQ ID NO: 1022777 - DNA, 62 bp, Artificial Sequence
  ENSG00000287922_12 (sequence is synthesized)
attaaagaatgtgtaagcagaaactcagctgcatgtaagaaaacccagttcccccccagaaa

SEQ ID NO: 1022778 - DNA, 76 bp, Artificial Sequence
  ENSG00000287922_13 (sequence is synthesized)
aggtcactcgacagataaactcaagtatgtctcaattaattgaataactgtctttgtttctcgctcctgtaatatg

SEQ ID NO: 1022779 - DNA, 120 bp, Artificial Sequence
  ENSG00000287922_14 (sequence is synthesized)
taattgaataactgtctttgtttctcgctcctgtaatatgcttcctcctgcacagatctccccctgccccacgaaatgcttaaaaggtaacttaactttttgttcagggctcagtccctt

SEQ ID NO: 1022780 - DNA, 120 bp, Artificial Sequence
  ENSG00000287922_15 (sequence is synthesized)
ggatgttaaaccaactgggccggtgcacctaaataataaatatccccctgaacctcatcagtctctctgattccttgtcaatcccactacaggttattgtgaacaatactaaaatcaaca

SEQ ID NO: 1022781 - DNA, 120 bp, Artificial Sequence
  ENSG00000287922_16 (sequence is synthesized)
tggaattgtagacatctcttcaacatactgatgtcaattcctttggatatataccagtcgtgggattgttggatcatatggtagttctatttttaattgttgaagaaacttcatactgtt

SEQ ID NO: 1022782 - DNA, 120 bp, Artificial Sequence
  ENSG00000287922_17 (sequence is synthesized)
ttctataacagttgtactaatttatgttcccaccaacagtatgcaaaggttcccttttctctatatacttgacagtgacagagcaggggcactgtcatcttggacaaacactgtcacttt

SEQ ID NO: 1022783 - DNA, 120 bp, Artificial Sequence
  ENSG00000287922_18 (sequence is synthesized)
aagttccagctccatttttagcctcatgaatttcaaggaaatcacttctcttctaacagcaagcagccagaaagagagacagtaaaacacagataagacagctggagcacagagggagag

SEQ ID NO: 1022784 - DNA, 120 bp, Artificial Sequence
  ENSG00000287922_19 (sequence is synthesized)
caatgggccccagtaaaacagtgggccctaataagcacattcctttccctttaggtgcactaagataggaaagccaaaatcagacttggagggtatgcctgtagcttcaggaagatgtat

SEQ ID NO: 1022785 - DNA, 120 bp, Artificial Sequence
  ENSG00000287922_20 (sequence is synthesized)
cagacttggagggtatgcctgtagcttcaggaagatgtatgggaacagacaaaaactctctctccaagataagtatgacaaagaggcacagaaacagtccaagcctctgataagctctcc

SEQ ID NO: 1022786 - DNA, 120 bp, Artificial Sequence
  ENSG00000287922_21 (sequence is synthesized)
tgccctgaacccttaaaaactcttagtctgtaagagagagtgcctctgacctaactaggccagaagcccctctcaggttgattcttcaaaataaagctgcctttgactgttaagccacta

SEQ ID NO: 1022787 - DNA, 120 bp, Artificial Sequence
  ENSG00000287923_0 (sequence is synthesized)
gagaggcctgaaggccagcaagcagcctgagaagggcatcgcagctgttggaagagaaagggctggctggacagagctcagctcgtgcttgaggagggagcaaggagtcaagtgtgctga

SEQ ID NO: 1022788 - DNA, 120 bp, Artificial Sequence
  ENSG00000287923_1 (sequence is synthesized)
tgtcctgatttggaaaatactgagatggtgagaaacaaagctggccagctggtggggccacagcatggaggtcctcaaatactcggatgcagagtttgaaccgatattcttatctgtgct

SEQ ID NO: 1022789 - DNA, 120 bp, Artificial Sequence
  ENSG00000287923_2 (sequence is synthesized)
gaattacgactggtcaaagtgtacactacaaaattcttaatgcttcagcaatctttactaaccactttttttcttctacttgtaaagccaaagagggacaagaaagggctagaggaatgt

SEQ ID NO: 1022790 - DNA, 120 bp, Artificial Sequence
  ENSG00000287923_3 (sequence is synthesized)
ctctagaatcaaagtcaagacctccagattctagtactacctgtgttgctacttaattatatgaacttgtgcaaatcttgttattcatctgtagtttaactttgcatttgcaacacgaga

SEQ ID NO: 1022791 - DNA, 120 bp, Artificial Sequence
  ENSG00000287923_4 (sequence is synthesized)
tggtaaaaccgatacataactcagtatttctttaaaaaaaaatggaaacaataaatgcacaaaacccaaaagttagcatttagggatatcaagactactgttgtcatcactgtgattctg

SEQ ID NO: 1022792 - DNA, 120 bp, Artificial Sequence
  ENSG00000287923_5 (sequence is synthesized)
caagttctccagaaaaattcacgttaggacatatagatgcagggctaccttcagccatccatccattcaactctgccccaggcgcccaaactgcacgctttgtggagcttatattctaac

SEQ ID NO: 1022793 - DNA, 120 bp, Artificial Sequence
  ENSG00000287923_6 (sequence is synthesized)
ggggaagtataattggttgctagggctgccatagcactgcagactgggtggtttaaataacagaattttattttttacaattctggaggccagaagtttgagatcaaggtgtcagcaggg

SEQ ID NO: 1022794 - DNA, 120 bp, Artificial Sequence
  ENSG00000287923_7 (sequence is synthesized)
gtcctccctctatgagtgtatgtccatgtgcttatgtgtgtgctaatctcttcatagaaggacaccagtcgtattggaagaggggctacacatatgacctcattttaccccaattccctc

SEQ ID NO: 1022795 - DNA, 120 bp, Artificial Sequence
  ENSG00000287923_8 (sequence is synthesized)
tccaaaggacctatctccaaacacagtcacagtctgaggtactgggtgtgagatcatatgaatttttcagggacacaaatttggcccataacagagagataaataataaacaagtaaaca

SEQ ID NO: 1022796 - DNA, 120 bp, Artificial Sequence
  ENSG00000287923_9 (sequence is synthesized)
aataaggaataaatggaataacatgaagcagacttgtgtgagtggaattgctatagagcgaagaatgcaaacaccacctggctttgaaagacagagtggactgtccctgcaggagagcag

SEQ ID NO: 1022797 - DNA, 120 bp, Artificial Sequence
  ENSG00000287923_10 (sequence is synthesized)
caatggaggtgtcgcaagatgagacaagctctgtgtgtttgagactgagcatgcaccagttggaaggcttggtttgggtccctgcagcttaggggcacagtgcaaaagtgtctgaaccac

SEQ ID NO: 1022798 - DNA, 120 bp, Artificial Sequence
  ENSG00000287923_11 (sequence is synthesized)
ttctatcaaaagggcccctggctagagctgctgagggtgtccatgcctccaggagagtctgcctctgggaagtggccggcttagatggtgtcctcagacagactgggggtgcctcccatc

SEQ ID NO: 1022799 - DNA, 120 bp, Artificial Sequence
  ENSG00000287923_12 (sequence is synthesized)
cattcccaagaggagctcagcacggcagggctgaaagaaggaagggcatggctgcagcacttgttcctgatgatggatgctccaaagatccaggaccctgagtgagaacaatgtggaaca

SEQ ID NO: 1022800 - DNA, 120 bp, Artificial Sequence
  ENSG00000287923_13 (sequence is synthesized)
taataccaggcagagttgtgaagacaaagaaatagaagacaagtccatgatctcctagagcttctctcttggtttaagagacaagaaaaagttacttgaacacatatgatgaatgcaaat

SEQ ID NO: 1022801 - DNA, 120 bp, Artificial Sequence
  ENSG00000287923_14 (sequence is synthesized)
gatactggactccatcgtgcagacaaccttctttagtgagaaaatgcacaactgacttccaatcagctaacatttcttccctgcttgagtcatgactgagttatttgagagaaaacttct

SEQ ID NO: 1022802 - DNA, 120 bp, Artificial Sequence
  ENSG00000287923_15 (sequence is synthesized)
ttcttttctatagttattttgcttaaaatcatcatcaaagactatgttttgttttttttctactctctttgaaagtatggacacttacgttgagtgtttggtgctaagttagatagccac

SEQ ID NO: 1022803 - DNA, 120 bp, Artificial Sequence
  ENSG00000287923_16 (sequence is synthesized)
attcctatttttttcaaatcttctttccttatttctttctctttattccaaaccttgtcagagttgctacaaaattaattgaactctcagttaagtagagctaatattaatctagttctt

SEQ ID NO: 1022804 - DNA, 120 bp, Artificial Sequence
  ENSG00000287923_17 (sequence is synthesized)
accattttaggatattcgttaaaggaattaagtacatttgggaaggagttttatttaacctgaaaatggcttgaaaattacatcctattattgttgtgttattgtatgtttttccaacca

SEQ ID NO: 1022805 - DNA, 120 bp, Artificial Sequence
  ENSG00000287923_18 (sequence is synthesized)
gtatggtttctgactttcaacacattttatgtgaaatgttttgcatggaactaattattctcaacaacaaattcctaatccagtatcagccattcactgggtacctaagcaagaaggttt

SEQ ID NO: 1022806 - DNA, 120 bp, Artificial Sequence
  ENSG00000287923_19 (sequence is synthesized)
tatgctctctaaaactaaaattgcatcgaatctaccttttctcattagggcagagtttaaaaaatgaacataaagatgtgttcaaagaaaagctcatttaaaataaatattttgtgcaaa

SEQ ID NO: 1022807 - DNA, 120 bp, Artificial Sequence
  ENSG00000287923_20 (sequence is synthesized)
atgcttattttgtgtacatttgatcagattgttggagaaattatatcccttcctcagggcctctgtagtagccaagatggtttacttcatttatcagtattcaaatctgacatttggagg

SEQ ID NO: 1022808 - DNA, 120 bp, Artificial Sequence
  ENSG00000287923_21 (sequence is synthesized)
ctgagcatttagagagaaatacccatggcctggatttcacatctctcccagccaatgaagccaggtttaaaaaaatggaaaaagaaaaacaagaaaaatgtttagtagctagcattaaat

SEQ ID NO: 1022809 - DNA, 120 bp, Artificial Sequence
  ENSG00000287923_22 (sequence is synthesized)
caagttttacctgatggacttgaaaggatagttttaataaagtaaaggtcagagaatgcatataattctcttcctccttctttttgttaattgtttgaactttttactctgtaaaaacat

SEQ ID NO: 1022810 - DNA, 120 bp, Artificial Sequence
  ENSG00000287920_0 (sequence is synthesized)
ggcgtgagccaccgcgcccggccagaatgagatttttaacacgagcaggaagcactccatgtaaacctactgtttaattggatattgtactcaaaggtgcttctctaaatgagccagtga

SEQ ID NO: 1022811 - DNA, 120 bp, Artificial Sequence
  ENSG00000287920_1 (sequence is synthesized)
atgagccagtgaaaacccaagtgggcgttggataatacttaacagatagggttgcatagtttcagtgtaacggtgcctctgtgggttacagcaccatggtcaaaactggaaaaatagttt

SEQ ID NO: 1022812 - DNA, 120 bp, Artificial Sequence
  ENSG00000287920_2 (sequence is synthesized)
cttagaaacgaataaaggcaaactatgggaaaatggtcatggaaggctctctcactaagaagaagaaaactcagaatgtcttgttattagcaacatagatctccaactaaagggcttact

SEQ ID NO: 1022813 - DNA, 120 bp, Artificial Sequence
  ENSG00000287920_3 (sequence is synthesized)
catccctgcacttgtgatgtctgcatggagatggtgagtacagggtcacctttgagttctctgtcattgtcatatttttgctgtgctgcttccagaatctttttcatcatgtaatcagag

SEQ ID NO: 1022814 - DNA, 120 bp, Artificial Sequence
  ENSG00000287920_4 (sequence is synthesized)
atagtgattaggtctgggtggttattgatcatttggggaaaatagacttactttaatccttcttcagaatggattcccacagataaggttttcatctggacttatttttactgagtgaaa

SEQ ID NO: 1022815 - DNA, 120 bp, Artificial Sequence
  ENSG00000287920_5 (sequence is synthesized)
gtgccattttcaagaaacccccaaagctttatattttagaataagtgaggcccatctatgggaaaagaaagccacagaagacactgaaaaaccacatgacccggtgttaaatcaagaaaa

SEQ ID NO: 1022816 - DNA, 120 bp, Artificial Sequence
  ENSG00000287920_6 (sequence is synthesized)
gcgtctggtaggcatgggaaagcctgtttaagcttcgaggtcactttctgcatctcagctcctgtttattttctggaccttggtcagcgtcttcttgacagtgtaatttctgcaatgcag

SEQ ID NO: 1022817 - DNA, 120 bp, Artificial Sequence
  ENSG00000287920_7 (sequence is synthesized)
ctggactttgtgacccataatcaaacccagaaagccttcagcaatcccatctgggtgaggggctccattttgtttggttgaaatgaaaaagttaaacctccatccagacatgcctctttg

SEQ ID NO: 1022818 - DNA, 120 bp, Artificial Sequence
  ENSG00000287920_8 (sequence is synthesized)
caggcccaatgactcttccaccagcaggacacttcgtctttgaataggcttctcattttccagacaagctcaggggatctgcatcctccagtaaaatttctgtctgcacaaaattgcctt

SEQ ID NO: 1022819 - DNA, 120 bp, Artificial Sequence
  ENSG00000287920_9 (sequence is synthesized)
ttagtggtgatttataactcaataaaatgacatctcaaaaaggagaattggtttgagtctataactgatgtgatttatgcatgttttagttttggaatacacagaatttatgcaatggag

SEQ ID NO: 1022820 - DNA, 120 bp, Artificial Sequence
  ENSG00000287920_10 (sequence is synthesized)
agaggtctctgtgatgtgatgtgcagatgtacatccacagaactcatgacaaggagggaggtgcaaatgtcctcaggcatcctctaagcacagacctccctgggttctaatacaaagaat

SEQ ID NO: 1022821 - DNA, 120 bp, Artificial Sequence
  ENSG00000287920_11 (sequence is synthesized)
attcttactgagctcagcctcaagcagagggcttcatgattttctgggtatcagaaacatccatggaacttgctaaaattatacattcctgggctccaccctagaacccatgaactagat

SEQ ID NO: 1022822 - DNA, 120 bp, Artificial Sequence
  ENSG00000287920_12 (sequence is synthesized)
tcattaagaatggggtggggtccagggatctgtagtttaacaatctctacaggtggttccagtcacatacttgagaaaccactccaagttgagaaacacttgtagtttgtaatcattcac

SEQ ID NO: 1022823 - DNA, 120 bp, Artificial Sequence
  ENSG00000287920_13 (sequence is synthesized)
tgccaatgaactatttgctgtaaaaaggggaagggaacaaatgctttttaaatgccttctttgtgtcaagcattgttgctagacaatctaagtctatgtttttttttttgtttaaatctt

SEQ ID NO: 1022824 - DNA, 120 bp, Artificial Sequence
  ENSG00000287920_14 (sequence is synthesized)
gcaacagtccaataagatgggtattattatattcattttgcacaggagaaattggaggttcagagaggttaagaaatattagcaaacagcaagatagagatttgaacccagacctttctg

SEQ ID NO: 1022825 - DNA, 120 bp, Artificial Sequence
  ENSG00000287920_15 (sequence is synthesized)
gattgggccaaatattttcgagtttttaatatgttacccttagatctactgagagacattgtgagaaatttctttgttttctatccccccctctcagctttatcgaagcatatttgacaa

SEQ ID NO: 1022826 - DNA, 120 bp, Artificial Sequence
  ENSG00000287920_16 (sequence is synthesized)
ataaaaattgtatatagttacagtgtacaacatgatgctttgatatacatatacattgtgaaataattaccacaaccaagctaattgaaatatctgtcacctcacaccatgaccgtctat

SEQ ID NO: 1022827 - DNA, 120 bp, Artificial Sequence
  ENSG00000287920_17 (sequence is synthesized)
gtgtgtgtgtgtgcgtgttgagaatatttaagatctactgtggtagcaagtttcaagtatatattaaatacagtatttttaaccatgtcaccatgttatttattagattcccaaaacttg

SEQ ID NO: 1022828 - DNA, 120 bp, Artificial Sequence
  ENSG00000287920_18 (sequence is synthesized)
ttcatcttgtaactgaaaatgtgtactctttgaccaacatctttccaatcctcccagtcccccaacccctggtaagcacagttctactttctgcttctatgagtctgtcttttttagatg

SEQ ID NO: 1022829 - DNA, 120 bp, Artificial Sequence
  ENSG00000287920_19 (sequence is synthesized)
ttgtctttctgtgcctggcttatttcactcagcataatgtcctccaggttcatccacattgtcacaaatgacaggacttccttcttcttcaaggctgaatagaattccattgtgtaagtg

SEQ ID NO: 1022830 - DNA, 120 bp, Artificial Sequence
  ENSG00000287920_20 (sequence is synthesized)
ggctgaatagaattccattgtgtaagtgtgtgtgtgtgtgtatgtgtgtatgtgtgtgtgtgtatcacattttctttatctgctcatgtattagtagaatcaacacttaggttgattcta

SEQ ID NO: 1022831 - DNA, 120 bp, Artificial Sequence
  ENSG00000287920_21 (sequence is synthesized)
tattagtagaatcaacacttaggttgattctatatcctggctattgtgaataatgttgtaatgaacatggaggtgcatagaactctttgaggtactgatttcatttcctttggatatata

SEQ ID NO: 1022832 - DNA, 120 bp, Artificial Sequence
  ENSG00000287920_22 (sequence is synthesized)
ttgtatttttaaattttgaggaacctgcatgctgtgttccataacgactataccagctaatatggtttggctctatgtctctacccaaatctcatgttgaattgtgatcttcagtgttgg

SEQ ID NO: 1022833 - DNA, 120 bp, Artificial Sequence
  ENSG00000287920_23 (sequence is synthesized)
gggaggggtctggtgggaaatgttggatcatgggggtggatttcccttttgctgttctcgtgatagtgagtaagttctcatgagatctggttgtttgagagtgtgtagcacttccccctt

SEQ ID NO: 1022834 - DNA, 120 bp, Artificial Sequence
  ENSG00000287920_24 (sequence is synthesized)
tgagatctggttgtttgagagtgtgtagcacttccccctttgctctctccctctcctgttccagccatataggatgtgctggcttcccttttgtcttctgccatgattctaagtttcctg

SEQ ID NO: 1022835 - DNA, 120 bp, Artificial Sequence
  ENSG00000287920_25 (sequence is synthesized)
cagtcttaggtagttctttatagcaatgtaagaacgaactaatatatcagtttacattcctaccaacagtatacgtgggttcccttttcccatatcctcacaacacttattagtgttttt

SEQ ID NO: 1022836 - DNA, 120 bp, Artificial Sequence
  ENSG00000287920_26 (sequence is synthesized)
ttttcccatatcctcacaacacttattagtgtttttgatgatagccaactggggtaagatgatatctcattatggttttgatctgtatatccctgatgattagtgatacggtttggctgt

SEQ ID NO: 1022837 - DNA, 120 bp, Artificial Sequence
  ENSG00000287920_27 (sequence is synthesized)
ccacccaaacctcatcttgaattgtatctcccataattcccacatgttgtgagaggaatctggtgggaggtaattgaatcatggggacgggtctttcccgtgctgttcttatggcagtga

SEQ ID NO: 1022838 - DNA, 120 bp, Artificial Sequence
  ENSG00000287920_28 (sequence is synthesized)
gtgagtaagtctcacaagatctgatggttttgtaaagggcagttccactacacaagctctcttgcctgctgccatgaaagacgtgcctttgctcctcctttgccttctgcattgactgtg

SEQ ID NO: 1022839 - DNA, 120 bp, Artificial Sequence
  ENSG00000287920_29 (sequence is synthesized)
aggcctccccggccatgtggaatgtttcccaggagcactctccacaaacttccagcatgccaatctccatctcaaaatttgcttctctgggaatgcaacctgtggtgttgctcaatcaaa

SEQ ID NO: 1022840 - DNA, 120 bp, Artificial Sequence
  ENSG00000287920_30 (sequence is synthesized)
ctgttcctgtagacacattacacccacgttaggtgtgtgatggactgaattgtgacccccaccccaaattcatgttgaaactttaacaccaaggaactccaaatgtgactgtgtttagag

SEQ ID NO: 1022841 - DNA, 120 bp, Artificial Sequence
  ENSG00000287920_31 (sequence is synthesized)
atagggtcttcacagaagtaattaagttaaaatgaggtcacatgggtgggccctaatccaatatgacaggagtccttataagaagaggagatgaggacacagccacccacagagggaaga

SEQ ID NO: 1022842 - DNA, 120 bp, Artificial Sequence
  ENSG00000287920_32 (sequence is synthesized)
agccacccacagagggaagaccacacagggagaagatgaaggtctacaagtcaaggagagaggcttcaggagaaatcaaccctgcagacaccttatcttggacttccagcctccagaact

SEQ ID NO: 1022843 - DNA, 120 bp, Artificial Sequence
  ENSG00000287921_0 (sequence is synthesized)
aggagaactccgtctccgggcctcttcctcgaagttgcaaacctgggtctgtatcagcaggcagggcgggagggggtggctggacgcctcactgcgtgcgctccccgaggctgctgtgac

SEQ ID NO: 1022844 - DNA, 120 bp, Artificial Sequence
  ENSG00000287921_1 (sequence is synthesized)
aatggtaagaagatggaccagtgaacgggaaacatgacgtgagggggtcttacttttgcagctcgctgcccagggctggtagccatagtagccagtgatgcgcaggatccgctcctcgat

SEQ ID NO: 1022845 - DNA, 120 bp, Artificial Sequence
  ENSG00000287921_2 (sequence is synthesized)
ggacgtgagccccaccggcccgctggtgagatcctccacggagcgcgaccatttcagatcctccttaatcgcctcgtccaccaccaagtacttgagctgccggagctgggggctgatgtc

SEQ ID NO: 1022846 - DNA, 120 bp, Artificial Sequence
  ENSG00000287921_3 (sequence is synthesized)
ccgggggctgacgtccggtgacctcctcatgccactgcggtcgcaggcgccacgggcagcaaaactacttggaaagaaagaaacctggttccatgctcagcatgccaagtgaataaatgg

SEQ ID NO: 1022847 - DNA, 120 bp, Artificial Sequence
  ENSG00000287921_4 (sequence is synthesized)
cgtttcataggcaacgctgagacacaaaatgtattatctattacgctgtggggatctctcagtcagacctggtcctcagagagcttactttcccactgatgatgcaattacgaaatcagt

SEQ ID NO: 1022848 - DNA, 120 bp, Artificial Sequence
  ENSG00000287921_5 (sequence is synthesized)
tctctcttcatagatttccattttaaaagcttctcatctttttccttaccaccccactgcccccgacggccgaaaggcattctcttcagactacctaatcacctttcctaatattatttt

SEQ ID NO: 1022849 - DNA, 120 bp, Artificial Sequence
  ENSG00000287926_0 (sequence is synthesized)
acactgtgtgcttctacacacccaggctgaacaccccatgggaggccctccactttagcaccttgacaagaagggtggggacactgggatcaggcccagccccctggccccaaaccgtgc

SEQ ID NO: 1022850 - DNA, 120 bp, Artificial Sequence
  ENSG00000287926_1 (sequence is synthesized)
aaccccagctggaggatgaggagatgctgggcttgggtgggggaatcaggggtgtaaaggggcctgctcacccctcagcttggcttaaaggctcaagaggtcaaaggcttaggctgcccc

SEQ ID NO: 1022851 - DNA, 120 bp, Artificial Sequence
  ENSG00000287926_2 (sequence is synthesized)
tcaggaaggcgcccgggcccagccagacactcaccaggacaagggccagtgtgacgagcaggaggcccaggatgaggagagccacggcatagcaagggatggaggcgtccagcggactgg

SEQ ID NO: 1022852 - DNA, 120 bp, Artificial Sequence
  ENSG00000287926_3 (sequence is synthesized)
agacttcagggctgggggtgcctggagcagagcaagaaggccatggccaggcggggccctgcctcccagacttctgagaaggcagaatctgggctcagaagaacccaggtctgagccctg

SEQ ID NO: 1022853 - DNA, 120 bp, Artificial Sequence
  ENSG00000287926_4 (sequence is synthesized)
ttggtcaaagttctgcagaggtctgaggatgaagttcagctggggggtcaggagaggatgaagagggtcacagctctaccaaagtcttgtccagtcatcccccatcttcccgaggcctct

SEQ ID NO: 1022854 - DNA, 120 bp, Artificial Sequence
  ENSG00000287926_5 (sequence is synthesized)
tcctcgaccccccacttcatcccgccacttcacccatctcgtcagctgcccttgaagtgcccagaactcagggctggttttgtcctccaaagccttggtgtagggctggaccaggatctg

SEQ ID NO: 1022855 - DNA, 120 bp, Artificial Sequence
  ENSG00000287926_6 (sequence is synthesized)
cagccaaacttcatacagcaccagctctgccttctcccctagagtgatgggggtggaggtggcatcagcctgcatcccctctcctggaagccctggagtgggacacacacccaagctctt

SEQ ID NO: 1022856 - DNA, 120 bp, Artificial Sequence
  ENSG00000287926_7 (sequence is synthesized)
atgctccatccaggggtcagctgccactggtctaaaaaccaaatttcttgctgcctgtttttgtgtggcccatgaattaagaatggcttttacatgtttaaatggttgaaaacatggaaa

SEQ ID NO: 1022857 - DNA, 120 bp, Artificial Sequence
  ENSG00000287927_0 (sequence is synthesized)
aatctctcctttgatgagactgtggctgatgctctataccagtgatccatggattccctgcttgattacacagaacagggcaggaaattatccaacttgcaagagaatgctagctgaaaa

SEQ ID NO: 1022858 - DNA, 120 bp, Artificial Sequence
  ENSG00000287927_1 (sequence is synthesized)
tcgtcccatcttatggaaaaccggtagaaaatccaggaggtgaaatggagaacatgttcaactggagaattctatttcttatgcatgtcaaatatgtttccttctcctgcactagctgtt

SEQ ID NO: 1022859 - DNA, 120 bp, Artificial Sequence
  ENSG00000287927_2 (sequence is synthesized)
ccttctgctggaagaatatttatatgactggctaaacttactgttcagatctgagagtaaatttgcatttctcagagagttagttcctgaccacccaactcaaagtactaacactctatc

SEQ ID NO: 1022860 - DNA, 120 bp, Artificial Sequence
  ENSG00000287927_3 (sequence is synthesized)
tagtccttttcttgtttgtttttcatgtttattttatttcccaccactagaatctaagctttttgagagccggcactttgtccatctgggtcactgaatcccaatgagttattcacagat

SEQ ID NO: 1022861 - DNA, 120 bp, Artificial Sequence
  ENSG00000287927_4 (sequence is synthesized)
gtttttagtacatagtaggtgaaatgcatagataatatttcaactaagaaagtgaacagaagaaagttggtcattgacttattactagtagctcactactctctatgtatgaagacatca

SEQ ID NO: 1022862 - DNA, 120 bp, Artificial Sequence
  ENSG00000287927_5 (sequence is synthesized)
cttactgatggttatgaagcagatgctcaataatttttttttaataaacaggagggcaaggagccaatgtcgtttgtagtggagggtagtcatggacactgagagtatgttttagacaca

SEQ ID NO: 1022863 - DNA, 120 bp, Artificial Sequence
  ENSG00000287927_6 (sequence is synthesized)
atttatcaatggccagcctcaggctgagataaaatataacagagtttgccaaggtctttcatgcccaggcagtcagtgctcacatgttccctgtaactgcctgggtacctttccctgagt

SEQ ID NO: 1022864 - DNA, 120 bp, Artificial Sequence
  ENSG00000287927_7 (sequence is synthesized)
catcagtcctgtgtcttaattcttttagtagcacctgcattctgctcctttaaccttccatcaatcagctcttatatactgtacatctctttctcaagaagccttgtgcaacgcatggtg

SEQ ID NO: 1022865 - DNA, 120 bp, Artificial Sequence
  ENSG00000287927_8 (sequence is synthesized)
ctgacttcttatgaaaccaggataatgaagcaaattagaatgtattttaacatcactctcccttgtttgctgtccagctaatgaacagtggactggctgaagaaagaccagcatgaagca

SEQ ID NO: 1022866 - DNA, 120 bp, Artificial Sequence
  ENSG00000287927_9 (sequence is synthesized)
gaaaaattgtttggtgaaaaattcaagaatgggccaatatccattaaaagattgaaagaggagatgttttgggtccacctccactggggacagaaattccattctgccaacaccccctcc

SEQ ID NO: 1022867 - DNA, 120 bp, Artificial Sequence
  ENSG00000287927_10 (sequence is synthesized)
atatccattgtctgaaagaggcactgctgttgagtcataagtaggctccagtggcccatgttgaccctttgaaattcccatgggactgtcaattctatctattctgggagcagccaacca

SEQ ID NO: 1022868 - DNA, 120 bp, Artificial Sequence
  ENSG00000287927_11 (sequence is synthesized)
tagctaattacaggcctgtggtattagtggaacaagcttcagctttttacattggcttgatggagaactgagtagatataaaagtgttacatgtttttctgtaatcataataacgtaatc

SEQ ID NO: 1022869 - DNA, 120 bp, Artificial Sequence
  ENSG00000287927_12 (sequence is synthesized)
ttgtttcataatcattaataattcctaacatttattgaagagttaatatgtgttgagtatttttgtaagtgcttaacatgcagtttttaaaattttaactcctttttacagaaaaggttt

SEQ ID NO: 1022870 - DNA, 120 bp, Artificial Sequence
  ENSG00000287927_13 (sequence is synthesized)
acagaacgccagaggggtaggtgattttgccagagctcttttaggtaataggaaacaaagccataaatttgatcccagctagtttgaccccatagtccaagcattaatccctgaaccaca

SEQ ID NO: 1022871 - DNA, 120 bp, Artificial Sequence
  ENSG00000287927_14 (sequence is synthesized)
ctagctctggcaagggtataaatgagcagtgattactaactgacttaaaacacaataggaattatccccagtgaattccaacatataaagggacactaattcttgccatagaaaatctat

SEQ ID NO: 1022872 - DNA, 120 bp, Artificial Sequence
  ENSG00000287927_15 (sequence is synthesized)
tagaaaatctatttgataagtatgaacaagaattccaaggttatcaaaaataatttctaatagtttaattctttaaaagaaatggtgtatctcatggacacaggaaggggaacatcacac

SEQ ID NO: 1022873 - DNA, 120 bp, Artificial Sequence
  ENSG00000287925_0 (sequence is synthesized)
gctatgaagagttctgtaggtgacacaaaaggagtttttaaaaggtagagatgtatagagaagttctcatcaaaacctcaagctatgtggagttttcccattgactaacgcttaagatat

SEQ ID NO: 1022874 - DNA, 120 bp, Artificial Sequence
  ENSG00000287925_1 (sequence is synthesized)
attggagtcaaatgctcataaaatgctcatcaatgcttataaaatattaagagttgaaatggactctctgttcatgcagatgatgagaccgaaacagagagcttccaggaggatcaatgc

SEQ ID NO: 1022875 - DNA, 120 bp, Artificial Sequence
  ENSG00000287925_2 (sequence is synthesized)
cattcaatgagcttgctgctgtactcccctctacacaatatggatatatcccatcccagcccgagactggccatactagttctagtaactgaggctttcctcctactttctctgacgcca

SEQ ID NO: 1022876 - DNA, 120 bp, Artificial Sequence
  ENSG00000287925_3 (sequence is synthesized)
aagcaaatttgattttgcaagtgagtgccctcacattttaaagctctgctgagatttagaaaggcactcagcagtcatcattcatcatgaagtcactccctcccaggccacgtggctgac

SEQ ID NO: 1022877 - DNA, 120 bp, Artificial Sequence
  ENSG00000287925_4 (sequence is synthesized)
cccagactttctattaactgcacaagcctgggcaacacatggatatttggctctgtagtgaagcaaatttaaattcttggtctccttcctctcctccagaagtatctcactgtgcacttt

SEQ ID NO: 1022878 - DNA, 120 bp, Artificial Sequence
  ENSG00000287925_5 (sequence is synthesized)
gggggaaccttttggttcccccacaattttcaaggatgacttggtagtaaacgaacttatggctggttactgagactttctactgcttgaatttcccagaaggttctctgcaaagttact

SEQ ID NO: 1022879 - DNA, 120 bp, Artificial Sequence
  ENSG00000287925_6 (sequence is synthesized)
catatatataataatagaaaacgtgtcaattaaaaaaatatttgattttcttcagtcctcattagagaaccaagttttctctcatattcgataagaatcttggaagtgggccctggactc

SEQ ID NO: 1022880 - DNA, 120 bp, Artificial Sequence
  ENSG00000287925_7 (sequence is synthesized)
tcatttctgcagcatctcccaaccatctctcaagaaaacaccaggctccctactcccattgcacctgtacctggaccttgtggaccctccagaagatgaagtccaatccagaaagccgtg

SEQ ID NO: 1022881 - DNA, 120 bp, Artificial Sequence
  ENSG00000287925_8 (sequence is synthesized)
atcatgccacttctaagatgctaatgatcctgggagttttagccttttgttgcctgctgctgcggtgtttgaaccattccagtaagccagcaactttgcagggacaaggacagagcatgc

SEQ ID NO: 1022882 - DNA, 120 bp, Artificial Sequence
  ENSG00000287925_9 (sequence is synthesized)
aaagcatggagggaaagtaggagtgtttgtaccatgagtctctgcacacccctcatcttggctatagtagactggaccacagatggacactgtaccatgcagattacttcttccaggaac

SEQ ID NO: 1022883 - DNA, 120 bp, Artificial Sequence
  ENSG00000287925_10 (sequence is synthesized)
ttggattgagaccaagagactcatggcatcctcttctggctgcaagacttatatttttatatttaggcaatagaagaggggcagcagatgcctaccttgtggaacagaggaaggcaggca

SEQ ID NO: 1022884 - DNA, 120 bp, Artificial Sequence
  ENSG00000287925_11 (sequence is synthesized)
gttcacagagaaagaggactagacagtcggacagaggggagcaggcttgggagcttcgtggagccaatgtccatctctgtccttcctttccactcgatgctcctgagtccctgccttcaa

SEQ ID NO: 1022885 - DNA, 120 bp, Artificial Sequence
  ENSG00000287925_12 (sequence is synthesized)
cccccgcttgtttgcttaaactggtttgagtttgtttctgctgtttgaaaaacaacaacaacaaaaccccaaacaaaacaaacatcaaacaaaaaccaaaacaaaaccattaactcactc

SEQ ID NO: 1022886 - DNA, 120 bp, Artificial Sequence
  ENSG00000287925_13 (sequence is synthesized)
tagctgggattacaggcatgcaccccataccagctaatttttgtatatatatataaatttttttttaagtagagacagggtttcacaatgttgcccagtctggtctcgaactcctggcct

SEQ ID NO: 1022887 - DNA, 120 bp, Artificial Sequence
  ENSG00000287925_14 (sequence is synthesized)
caaattatccaactgccttggcctccctaagtgttgggattacaagagtgagccactgagcccggccccactttgtacatgaaccagaagagcagtcactctgaaagacacctaagtcat

SEQ ID NO: 1022888 - DNA, 120 bp, Artificial Sequence
  ENSG00000287925_15 (sequence is synthesized)
agccacatctctagggaattttcaacacgaaactctctatagaaggcaagttggaaagctagcttggcaggtgtattgtcaaaaattattgaaccgctaaatggagatggttaccagcac

SEQ ID NO: 1022889 - DNA, 120 bp, Artificial Sequence
  ENSG00000287925_16 (sequence is synthesized)
attacagaagactcaatgtacaacgtatggcttcatgttggtccaaaattctaactatatcagtcaagaaaaggatgaaatctcaagtatggatgtgacactttatacctgccatacata

SEQ ID NO: 1022890 - DNA, 120 bp, Artificial Sequence
  ENSG00000287925_17 (sequence is synthesized)
gaatgttcaatccgtatgaccttacttgatgtagaattaaaggaaaagttaccaagaatgagatctgagagcttagcaagtcctcctaagctatagccatgataactcatcatacaagga

SEQ ID NO: 1022891 - DNA, 120 bp, Artificial Sequence
  ENSG00000287925_18 (sequence is synthesized)
aaataagtgaattcaaagaaccaaaagcagctgccattagattacagggaactttcaaacaaaagatatatcataggaagtcaggtgagaagctgtcaactgggcaggcagtgatgagaa

SEQ ID NO: 1022892 - DNA, 120 bp, Artificial Sequence
  ENSG00000287925_19 (sequence is synthesized)
ttgccaagagcgactgatatttctagaatctggctcttaaaataataaggctggaggagacatgaacaccatgggaaagtgtattcagccccactcctatgtgaatgtagcttcagagca

SEQ ID NO: 1022893 - DNA, 120 bp, Artificial Sequence
  ENSG00000287925_20 (sequence is synthesized)
agttaccttcaacgaggagcagcacatcctgtaaacagataccgtgtctcttgggtacttacgtgcaaatagacatatcagcttttccctaatgcaggcagtctcttggggatagttttg

SEQ ID NO: 1022894 - DNA, 120 bp, Artificial Sequence
  ENSG00000287925_21 (sequence is synthesized)
taacatgtaaaaatagatataatttgaaaccatagtcctaaaagtaaggtattttagttgcaggaggagaagagagaagacaaaagtaacctattgcaagtggctgtacgttccatagaa

SEQ ID NO: 1022895 - DNA, 120 bp, Artificial Sequence
  ENSG00000287925_22 (sequence is synthesized)
gtagttgtatacctcagtgtttcccactgaaagtagctgtaacaattcatgctttaattcattaatcgataatttaatctctggctctggaaagtggaaaaagtctgtgaaagctggtcc

SEQ ID NO: 1022896 - DNA, 120 bp, Artificial Sequence
  ENSG00000287925_23 (sequence is synthesized)
tacttaaatggagatttggagttttcgtttgtcccggattagtcaagatacaagtagaaatccttacacctgccaatacccacaaaggcatctatgttttcacacaggcccctctaatta

SEQ ID NO: 1022897 - DNA, 120 bp, Artificial Sequence
  ENSG00000287925_24 (sequence is synthesized)
gggtgcgcccagcggcggcggcggcgggcacggtcggcacggcgaggctcagagctggggcggaggagcgagcgagcagcggcgagcgcctcacggccgggagcggagcgagagagagac

SEQ ID NO: 1022898 - DNA, 120 bp, Artificial Sequence
  ENSG00000287925_25 (sequence is synthesized)
tgaaggcagaattctgcctgggtaccacctgccaggagaagaggaggctgacaaacgcgcgccggagcaatttataggcacccaaggcacagaggaaggggagccgctttggcatctcat

SEQ ID NO: 1022899 - DNA, 120 bp, Artificial Sequence
  ENSG00000287925_26 (sequence is synthesized)
tgcagcatctgctctgctcatcccactcagagagagtttggcattactctgacaatgtgggatttttttttttttttcggcctctctttttttctctctctgcacatggatgaacagtga

SEQ ID NO: 1022900 - DNA, 120 bp, Artificial Sequence
  ENSG00000287925_27 (sequence is synthesized)
gattctgaatactcccttgctgaaccaagcgatggcaggtcctgctggacccacctggggaagggagacagctgtgcgacagctttcagagctcaagggtcacacctaaatccccgattt

SEQ ID NO: 1022901 - DNA, 120 bp, Artificial Sequence
  ENSG00000287925_28 (sequence is synthesized)
ccccactgccagcagccccagttggagggtggaggtgaaggttgaaaggagggtggctgagttgacagtttctttgctagctcctctacaatcagtgcttcaggtgttttcaaaatgcca

SEQ ID NO: 1022902 - DNA, 120 bp, Artificial Sequence
  ENSG00000287925_29 (sequence is synthesized)
ctgttaacagaaggagggccttttagaattttccagatggtagatgtgattttcttttaacctgatggttttcctcctctgccttgtaaatgaataagatgttgccccaagaacagtgag

SEQ ID NO: 1022903 - DNA, 120 bp, Artificial Sequence
  ENSG00000281357_0 (sequence is synthesized)
tttacacgccccagccggcgaccggttccatctggctcgggccactctgacacctttagtttcggcaagggatattggggtggcgaaggggaggcgggggcccgaaggcttcggaaaacg

SEQ ID NO: 1022904 - DNA, 120 bp, Artificial Sequence
  ENSG00000281357_1 (sequence is synthesized)
atgggggagggggcagaggatacccgtcgaagcccccccctcccccaacatttcgatattggaatcactttccttcttcctcgggccagcctttgctctgtcccctcaggtcaactcaag

SEQ ID NO: 1022905 - DNA, 120 bp, Artificial Sequence
  ENSG00000281357_2 (sequence is synthesized)
gtagacagtgtggcgactggagaggtcggggaacaagctttgtttcagctaaggggaaaacaagcgttcacaggagtcccctgacacctcccactcggaagatagctaacgggggtcctg

SEQ ID NO: 1022906 - DNA, 120 bp, Artificial Sequence
  ENSG00000281357_3 (sequence is synthesized)
ccaacccttcccatccaacttccatctgaaaaggattttctgctaaagttgggtccatggccatccagcacctgtaaggccggcaggagcgtctgccctctactcagttaaagcctgaag

SEQ ID NO: 1022907 - DNA, 120 bp, Artificial Sequence
  ENSG00000281357_4 (sequence is synthesized)
tcgtttcctttcgatggcccttaggaggcccaaaagaggggcgacagaacatgatgttgacacgggctgggcgcccccagaagcccgggaacaaacgtttctactttccaggtccactgg

SEQ ID NO: 1022908 - DNA, 120 bp, Artificial Sequence
  ENSG00000281357_5 (sequence is synthesized)
tgtttggtgtacccatgtgactaatttgtccaaagagagaaactaggaatattccagttggtgactgaccccttagttgggttcctagagtgagtttgatgtggaggagcccaaaatgac

SEQ ID NO: 1022909 - DNA, 120 bp, Artificial Sequence
  ENSG00000281357_6 (sequence is synthesized)
ctgcagtgaagttggagtgtgagcaagaaataaacttttgttttttaattttctgaggttttggaagttgtagattataactgcataacctatcaatattgatatgtttcaattcttaat

SEQ ID NO: 1022910 - DNA, 120 bp, Artificial Sequence
  ENSG00000281357_7 (sequence is synthesized)
aaatcatttcaatgagatgacaactcaaaatcttatagtatcatccagaaacatgtagaacagatttaaaaatacacagtactgagattggcaggttgagaagaagacacatatgaaggg

SEQ ID NO: 1022911 - DNA, 120 bp, Artificial Sequence
  ENSG00000281357_8 (sequence is synthesized)
taacttctttggaaagaagcagctatgcacagtacttaagaatgaaatttccatgtcccgttaatacatctgaaacagttttactttctatcccaaactttaatgatcctagaaagctgg

SEQ ID NO: 1022912 - DNA, 120 bp, Artificial Sequence
  ENSG00000281357_9 (sequence is synthesized)
tgtttaatgaataaattcttcactaagcttatgtggtgagggtctggtggtgaaaagtactttttcaactagatatattagaatgacaacagcaaagcaagaatgtggtagggtcacata

SEQ ID NO: 1022913 - DNA, 120 bp, Artificial Sequence
  ENSG00000281357_10 (sequence is synthesized)
aaggagtcgtgatctgtgggaaattattttttatgattctccaagatggctgtacatataagcataaaagtcaataaacaagtgcctaacctttagctctaaattaacttttgagcgctt

SEQ ID NO: 1022914 - DNA, 120 bp, Artificial Sequence
  ENSG00000281357_11 (sequence is synthesized)
tgaatgcctggcacaaaaatatttaggggtttggcgccatctggtggccaaatatcaacttttcagcttctcttttatgactaagaagtgaattactctgcactttccaataaacactat

SEQ ID NO: 1022915 - DNA, 120 bp, Artificial Sequence
  ENSG00000281357_12 (sequence is synthesized)
taataaataaaattatttaaaatgttgatttccagaacttgagaagacaaatcaaagacagatttctgttatgttacctattgttatatgacagaatttcagtcttgagtaggttctttt

SEQ ID NO: 1022916 - DNA, 120 bp, Artificial Sequence
  ENSG00000281357_13 (sequence is synthesized)
atacttgcatttgatttatttatgaaagcattatagacataaatctgctatctttttcttaatacaagagaagactctttccccaaaagaaattagacgtgctcaataaaatctaaattt

SEQ ID NO: 1022917 - DNA, 120 bp, Artificial Sequence
  ENSG00000281357_14 (sequence is synthesized)
attttttcacaattctgtaaaagattgagctaggggtgcgtgtgtgtgtgtgaatatcagaatttattttaaaaatgcaagagggagaggggaaggagctggtagtgacattgttaattg

SEQ ID NO: 1022918 - DNA, 120 bp, Artificial Sequence
  ENSG00000281357_15 (sequence is synthesized)
atctctaaccattttgccagtgtttctgtctaagcacttctgtctccactgaggtcagaaaaaagggaaatagactgaaatcaacatcgcatccacaagggtttatgaagtatcctgcat

SEQ ID NO: 1022919 - DNA, 120 bp, Artificial Sequence
  ENSG00000281357_16 (sequence is synthesized)
gtgtggagcatcattacagatttctgtgaatagaccagaagccgacctttacagtgtgtttgggtgcagaaaaccttggctgacatactcaaggctgaaatgcagtcagcggaaatggaa

SEQ ID NO: 1022920 - DNA, 120 bp, Artificial Sequence
  ENSG00000281357_17 (sequence is synthesized)
acacttcaactctgcccctgtggcaagaatggcttcccttcagacaatctggccagattctttatggacccaatgggaggtacatactcggggcattgcgtttatgtttttcctgaccta

SEQ ID NO: 1022921 - DNA, 120 bp, Artificial Sequence
  ENSG00000281357_18 (sequence is synthesized)
cctgctccttagagctacatcctaagactgctgcttgtgtaaaacctttcagaactatgcatcattgatctagccataatcacactgatctgttggcttttcactaaactttacttaagt

SEQ ID NO: 1022922 - DNA, 120 bp, Artificial Sequence
  ENSG00000281357_19 (sequence is synthesized)
gaaaactaaccctctccttcctgtttggggttatgattgactgtatgtcttttgaatggtgtgaagatgctggctgtgaaactggaacactgctttttaaatgtctttaaaagaaggaaa

SEQ ID NO: 1022923 - DNA, 120 bp, Artificial Sequence
  ENSG00000281357_20 (sequence is synthesized)
gaaaaatgtgtaccctcaactaccacagagcaagataaaagaaaataacgacagcatgcactgagtcggcaatgttgacctttagaaattttttttagaacatctcaacagtttgaaaat

SEQ ID NO: 1022924 - DNA, 120 bp, Artificial Sequence
  ENSG00000281357_21 (sequence is synthesized)
gactttctcttttatttttcccaagtttattcttttttgaatataagaatttcataagagtgcattttaatttattgatgcaatttttcaactatgctacacacgtatttatagagagcc

SEQ ID NO: 1022925 - DNA, 120 bp, Artificial Sequence
  ENSG00000281357_22 (sequence is synthesized)
tcttaaatatttttgttttttagaaaacaaacatgtcactttctgcctgagatatagaactaggataggtaaataaaaagaataggaaacaagaggccataaggacattaaaaattggtc

SEQ ID NO: 1022926 - DNA, 120 bp, Artificial Sequence
  ENSG00000281357_23 (sequence is synthesized)
ctagcaaggtatgggcatgagatctagtatagagtgttaccagctcttactttccatctcatcatgctcccaaatcacttagactctgttgagcaggtatatatgaagttaagctttaca

SEQ ID NO: 1022927 - DNA, 120 bp, Artificial Sequence
  ENSG00000281357_24 (sequence is synthesized)
cacaatatgcaggtaacaagttatacaaatgcatagaaacaaaaaccatgttaggtgtcttttatgtgggcagcactggtttcagatgctaagcctttactatacatgtctataatttta

SEQ ID NO: 1022928 - DNA, 120 bp, Artificial Sequence
  ENSG00000281357_25 (sequence is synthesized)
tgacactagggtagtataagtacttagtaatatttatggtcctcactcatttctccctgcacattccatgcatgtaggtaatttttctacaacaaatagcttattcttttataaggaatg

SEQ ID NO: 1022929 - DNA, 120 bp, Artificial Sequence
  ENSG00000281357_26 (sequence is synthesized)
ggaatggaaaggggtaattatcatttagttgcttggtactgtacttttatgtatgcaagggcagacctcttgccccacctttcaaaacagcattcctaaacatcacagtgcacccagagc

SEQ ID NO: 1022930 - DNA, 120 bp, Artificial Sequence
  ENSG00000281357_27 (sequence is synthesized)
tgctgaacgagggcatgtgtgctgacccgaattattagcacatccatctgtccagcaacactatgaaatattttccatttttcacattacacatcttttatgtgaaaacacacacaccca

SEQ ID NO: 1022931 - DNA, 120 bp, Artificial Sequence
  ENSG00000281357_28 (sequence is synthesized)
taatggcagctttaatcaacagggtagctgtggataagaattaacattgaccataatgatttcctttcacgtgttaatctaattctaaaattagtaacaataaaatagtgtggttaaata

SEQ ID NO: 1022932 - DNA, 120 bp, Artificial Sequence
  ENSG00000281357_29 (sequence is synthesized)
aatattttaaaaatcttgattcctttcccatttttctccagatccttcctttctaacattcaaccttgtttataaaggttgttatataaagaaatactgcctgttggttataaaaatggt

SEQ ID NO: 1022933 - DNA, 120 bp, Artificial Sequence
  ENSG00000281357_30 (sequence is synthesized)
ctggttgcgtgtaagtaaaggcagatgagtcactttgccattatcctaggtgagttcaataaataggttagagattatgcaggaatcaaaacagtggctctaatacatcagcccaaatga

SEQ ID NO: 1022934 - DNA, 120 bp, Artificial Sequence
  ENSG00000281357_31 (sequence is synthesized)
attttttagcagcagattagtctgttatgcaacaatcaactgtggctctagctaaggaaacaagttttatttcataatgcgaggattgacttctgatacccagaaaagagtgaaataaag

SEQ ID NO: 1022935 - DNA, 120 bp, Artificial Sequence
  ENSG00000281357_32 (sequence is synthesized)
tgaatagaccagaagccgacctttacagtgtgtttgggtgcagattctagaggatgtctgtgtgcctttctcccctttcaaacgatagggaagatatactgagtcctgtcttcagctagg

SEQ ID NO: 1022936 - DNA, 120 bp, Artificial Sequence
  ENSG00000281357_33 (sequence is synthesized)
ggatgccctggcctccttcctatcttcaaagcctgcaagagtgggctgagtccttctcactccaccctcttcttttgtgtaccttttccacttgtaaggacccttgtaattgcattggat

SEQ ID NO: 1022937 - DNA, 120 bp, Artificial Sequence
  ENSG00000281357_34 (sequence is synthesized)
tcacctggataacccagactgatctccctattttaaggtcagttgattaacaaactttttgctatgtaatttaacataggttctaggaattaggatgtggtggaaaggtatttttgcacc

SEQ ID NO: 1022938 - DNA, 120 bp, Artificial Sequence
  ENSG00000281357_35 (sequence is synthesized)
agtcgcaaatgacttagttatcagtttcattttattatcagaaatcaactcattttgttatcaaagttatttgctattctttgctacttcattcaaaactggaatcctgagtagtgctca

SEQ ID NO: 1022939 - DNA, 120 bp, Artificial Sequence
  ENSG00000281357_36 (sequence is synthesized)
tttggacataaagccccatggttctacccacttgctttggttgtactattgagagcagaaacttcaaatccaggatctgttgtcctctagggagtcctgtaattcattctgcttcttcct

SEQ ID NO: 1022940 - DNA, 120 bp, Artificial Sequence
  ENSG00000281357_37 (sequence is synthesized)
atttcagcaccaccccagcagggtacaacctacacacagcagccctcccacctcacttagagtttctatagactatgccccatgttttcagcctctgccttaaacatttatttgctctaa

SEQ ID NO: 1022941 - DNA, 120 bp, Artificial Sequence
  ENSG00000281357_38 (sequence is synthesized)
gcttctaaagggtaacctgtgtcttataaagtccctttacggcttatcttagtgctgaggacggggtaaaccctctggaccctgtcttgctgtgatctacaagtgacaatacaaaaccac

SEQ ID NO: 1022942 - DNA, 120 bp, Artificial Sequence
  ENSG00000281357_39 (sequence is synthesized)
accctctttttagacaaaatttaggcatttaaaaataatagtttatagatttctagctatgtaagatgatttattgagtgattaaaagcaatcttatttatgataagttaaaaaaatcag

SEQ ID NO: 1022943 - DNA, 120 bp, Artificial Sequence
  ENSG00000281357_40 (sequence is synthesized)
gattcatcttctatacatttctgctcacagttagaatctgaatgtcctgtcatctgtgtaggctcaaggaattagctactcagagaacccagaaatggccaggagcccttggaagaacag

SEQ ID NO: 1022944 - DNA, 120 bp, Artificial Sequence
  ENSG00000281357_41 (sequence is synthesized)
tctctctgtgaccccattagcttcgagtcccagtttccctggaaaaagtagggtgaggtgtctgacattttattgagataaattttctggaatagggttcactccaagtagaacttccct

SEQ ID NO: 1022945 - DNA, 120 bp, Artificial Sequence
  ENSG00000281357_42 (sequence is synthesized)
gctcttaggtttattaagtttcctagatatttggggaaggaattctagatgtcttgcggtcattttctcattctgcaagttctgctgaaatccagcatatcaaggaacagttggaagcac

SEQ ID NO: 1022946 - DNA, 120 bp, Artificial Sequence
  ENSG00000281357_43 (sequence is synthesized)
agtatgtctaagagggagttttgaaaatacatagaggaatttagaaagaagttttaggacacgaattacaaacttcaactagttcctaacttttttggggctgtttttgaatgaaaagtt

SEQ ID NO: 1022947 - DNA, 120 bp, Artificial Sequence
  ENSG00000281357_44 (sequence is synthesized)
gtgatggatttctagtacagtcatgcactgcttagtgatgggaatatattttgagaaatgtgtcattagatgatttcatcacacgcactttatacaatgtacttacacaaacctagatgg

SEQ ID NO: 1022948 - DNA, 77 bp, Artificial Sequence
  ENSG00000281357_45 (sequence is synthesized)
tatagcctactacacacctaggctatgtggttgtactgaatgctgtaggcaattgtaatacaatggtaaatatttgt

SEQ ID NO: 1022949 - DNA, 120 bp, Artificial Sequence
  ENSG00000281357_46 (sequence is synthesized)
aatttctaaggcctttgttattctctttatcacagcattgtactcattttcttcttagtacttagaaacgtctataattgttttacttctttgtttaccattaaatgtctgtatccttta

SEQ ID NO: 1022950 - DNA, 120 bp, Artificial Sequence
  ENSG00000281357_47 (sequence is synthesized)
aaggaagaggtccctatgaagtggtgatggtccatgaggaagaggcctggaaatctaagcagggcttccagctccctgcttcctgtctaagtccaggtacttaccccacctataggtgag

SEQ ID NO: 1022951 - DNA, 120 bp, Artificial Sequence
  ENSG00000281357_48 (sequence is synthesized)
caggtctgctagaaacagattctctcagatattgtctatctgcgaacatcttaatttctccttaatttttcaattagttttagtggatgtagaatttttggttgatagtctttctttctg

SEQ ID NO: 1022952 - DNA, 120 bp, Artificial Sequence
  ENSG00000281357_49 (sequence is synthesized)
ggtgatttcaattttttttttgttttttttgtctttgactttcaatatgtgtctaagatgtgaatctctttgaatttatcctgcttgggttttgtggaggttcttggataaatgttaaga

SEQ ID NO: 1022953 - DNA, 120 bp, Artificial Sequence
  ENSG00000281357_50 (sequence is synthesized)
tttatgcttttcatcaaatttgggaatgtttgtgaattttttgaacatttttctgcctgttgtttctcctttccttcaaagattcccattaagtgtatgttagtatgcttgatcatgtcc

SEQ ID NO: 1022954 - DNA, 120 bp, Artificial Sequence
  ENSG00000281357_51 (sequence is synthesized)
cacagatctctgaggttctgttcatttttattcatttaaaaaaattctggccgttgtattgaataatattaattgacctgtctttaagttcacagattctttcttctgtctgttcagagc

SEQ ID NO: 1022955 - DNA, 120 bp, Artificial Sequence
  ENSG00000281357_52 (sequence is synthesized)
tagtgctgagtagtatttaaaatagctgatataatatatttttcaagttagtccagcgttttggctttctcagggatagtttcaattggccacttctccctgcacatcccccatggtata

SEQ ID NO: 1022956 - DNA, 120 bp, Artificial Sequence
  ENSG00000281357_53 (sequence is synthesized)
tgtactatgctctcttgcttctttgcatggcttataattttctgttgaaaactagacatctaaaataatataatgtagtgactcaaaaatcagattctctccaggatttattgttggttt

SEQ ID NO: 1022957 - DNA, 120 bp, Artificial Sequence
  ENSG00000241954_0 (sequence is synthesized)
ctacaggggacaccaaacaatgagttttataagatttatctcaaagacacctgatgagttcaccaggaaggagatgctagcaaaaccccattgtgcatgttgcagggctggggaggcccc

SEQ ID NO: 1022958 - DNA, 120 bp, Artificial Sequence
  ENSG00000241954_1 (sequence is synthesized)
cttagttgcctccaggtcttcccagggtgacgagggggcactttttttgcataatttggaacagtatgaaaatgaggagacttacagggtgcgaacattccagataggtacaggggagaa

SEQ ID NO: 1022959 - DNA, 120 bp, Artificial Sequence
  ENSG00000241954_2 (sequence is synthesized)
actggtgaaggccctggttccagcctttctgggtagaaccatctcctcctatgccacctgtttgggcccctcctgggactttatcaccgtgccagacttcatggaggaactgtttaccag

SEQ ID NO: 1022960 - DNA, 120 bp, Artificial Sequence
  ENSG00000277246_0 (sequence is synthesized)
ctgttagactggggcacggtcaccttattgtgggagttataggtaagaaaaattagagagcagcttattttgggggccaggataataacaagttatttttaaaaggtcttggaaacttgc

SEQ ID NO: 1022961 - DNA, 120 bp, Artificial Sequence
  ENSG00000277246_1 (sequence is synthesized)
taagtctgactgcgtcattttgtagtaagacaatgaggaaatgggaactcgtcagagggtaactgggtggtgcctgtaaaagtgaagatgtgcttctccctcagcaggcatttgctggga

SEQ ID NO: 1022962 - DNA, 120 bp, Artificial Sequence
  ENSG00000277246_2 (sequence is synthesized)
aacccttgcagacgttacaagcacagttgtagaaaatatctattagagcactgtttgtaactgaaaaatgtttcattcatactttgaatgtaaagaataaaagtgaatgaaaaaatggaa

SEQ ID NO: 1022963 - DNA, 120 bp, Artificial Sequence
  ENSG00000241956_0 (sequence is synthesized)
aggtaaaatgccagagatcactcatgtaagaagggaattgaagcaccttgaaaaggataagaaaacttcaacattacaacgatgtttcatatcattaggctcaaattaagtaaataacag

SEQ ID NO: 1022964 - DNA, 120 bp, Artificial Sequence
  ENSG00000241956_1 (sequence is synthesized)
aatcctaagctgatgacacatcctgggtttgcactaatcataatttgcaatctccatcattgtcatcagaacctttttgcctagcaacattcctgctgctgcttctgttccgaccctctg

SEQ ID NO: 1022965 - DNA, 120 bp, Artificial Sequence
  ENSG00000241956_2 (sequence is synthesized)
ggtgcaactgaaggaggaggcagtcaaaaggaaaaacacaaatatctccaagatggcacttacaaaaagcaacaacaatgacaaagtataaatacaaacacacaccttgaagtttatgtt

SEQ ID NO: 1022966 - DNA, 120 bp, Artificial Sequence
  ENSG00000241956_3 (sequence is synthesized)
cttactcaaatgcaagcatcaacaatggcctactgtcagcaagttaaatggctggggctgtttcagtctcccattacatgaagcacagaatcttctggagaggaaagaagaaaccatgtc

SEQ ID NO: 1022967 - DNA, 72 bp, Artificial Sequence
  ENSG00000241956_4 (sequence is synthesized)
aagcacagaatcttctggagaggaaagaagaaaccatgtctagacaaggtgctggaaagacccagggaagac

SEQ ID NO: 1022968 - DNA, 120 bp, Artificial Sequence
  ENSG00000241956_5 (sequence is synthesized)
ggagcaggttgttccgtttccatgtagttcagtgattttgaacaattctttcacttaaaaaaaaatgaagacacaacaaatatgacataatgagaccaatcatgaattacggttggtgat

SEQ ID NO: 1022969 - DNA, 120 bp, Artificial Sequence
  ENSG00000241956_6 (sequence is synthesized)
aggtggagttttgctaagttagtctctgtagttttcagttttctttttatctctcaaaatgctcaattgaaagagtaataggacatggaagcatttatttaataaataatttcaactaaa

SEQ ID NO: 1022970 - DNA, 120 bp, Artificial Sequence
  ENSG00000241956_7 (sequence is synthesized)
cagaggctgtgggagcagcatcaagcaagacttcgggcagtgattctaactattgcctatgaacaccgtggctgggacgactttgacgaggcaatttattacttacgcatagaacactgg

SEQ ID NO: 1022971 - DNA, 120 bp, Artificial Sequence
  ENSG00000241956_8 (sequence is synthesized)
ctgtgctgaaactgggagcgcaaacagccccttgttttctaatttagagacttgcatcttttcgacactcaacagtatcaagacactctgctactacagattgatttccaccatcaacac

SEQ ID NO: 1022972 - DNA, 120 bp, Artificial Sequence
  ENSG00000241956_9 (sequence is synthesized)
aatcttcctgccttggcctcccaaagttctgagattatatggatatatgaagtctgggggtaagacctgcagtaatttcccttaagatactacagaatttccaaggacttgaggaataat

SEQ ID NO: 1022973 - DNA, 120 bp, Artificial Sequence
  ENSG00000241956_10 (sequence is synthesized)
ggaataattgcactcttgaaagagcctatgaaaaaagaagagacttgggaaatttaacagaagttcactttccaccactgcgcaaactaaggaaaaacttaaagcagtaaatagctgcgg

SEQ ID NO: 1022974 - DNA, 120 bp, Artificial Sequence
  ENSG00000241956_11 (sequence is synthesized)
aaaaacttaaagcagtaaatagctgcggttggcaaagctgttttggctcaggagcagctatcaggccttgataaggtccacaagtctgctgttctaaaatcaaaaaaaaaaaaaaaaaaa

SEQ ID NO: 1022975 - DNA, 120 bp, Artificial Sequence
  ENSG00000241956_12 (sequence is synthesized)
aagacccagggaagacacagatttgttcctttctccaccatgcctcactatgtgtcaccaaacttaattcagcatcagtgctccaaatactccatcctacaattagagaaaccactgaat

SEQ ID NO: 1022976 - DNA, 120 bp, Artificial Sequence
  ENSG00000241956_13 (sequence is synthesized)
gatatcctccacccaaatggtaatgaagattggagaaagtgacgcccatgcatagcggagaagtggattgcagatataacaaggagcacagtaaactgagatgtaaaacaccttattcaa

SEQ ID NO: 1022977 - DNA, 120 bp, Artificial Sequence
  ENSG00000241956_14 (sequence is synthesized)
caacgaggatgctgactcaaaagcaaaagttgaagcacattatgaatgaatgtcaaaagggaaaaatctaaagctaacataaaagagtgcaactacatcaaattggataaggaatagtat

SEQ ID NO: 1022978 - DNA, 120 bp, Artificial Sequence
  ENSG00000241956_15 (sequence is synthesized)
tttatagccaattaatgaatatttaaaggacatcaacctcatctctttgaaacacatatgaacatagttgagctagagggtgacatgatgtatatatttaatccagaggcatttttgtta

SEQ ID NO: 1022979 - DNA, 120 bp, Artificial Sequence
  ENSG00000241956_16 (sequence is synthesized)
aaatttttcaacagttttaatcacatgtatttagtgattcatataattgctaaattataatctaaccaaatagccagaagtaacttttatatcatttgttacataatcataattggccag

SEQ ID NO: 1022980 - DNA, 120 bp, Artificial Sequence
  ENSG00000241956_17 (sequence is synthesized)
attattgcaaactcacaagtttatgaatgattactgtaaaagaatttgaattggtcaattataaagaacaatgcatcccttaattaatatttattttaataaaattcatcactccagaaa

SEQ ID NO: 1022981 - DNA, 120 bp, Artificial Sequence
  ENSG00000241956_18 (sequence is synthesized)
tctctatggtcggcgcctccttcttggcctagcataggcgcctcagcagcgaatgcggcttgagcctcagcattccgccacaggccgtggttcagccgccgcagctggcgcgcgccgtac

SEQ ID NO: 1022982 - DNA, 120 bp, Artificial Sequence
  ENSG00000241956_19 (sequence is synthesized)
agctgcctcagctgctcaaaggacatgtccagcagctggcccaggtccacaccgcggtaggtgaacttgcggaagatccgctgcttcttctcctctacctctgccatcttgccggatcct

SEQ ID NO: 1022983 - DNA, 120 bp, Artificial Sequence
  ENSG00000241956_20 (sequence is synthesized)
atatgatctctgccacaactattgaactctgtcatcatagcataaaagtagccagagacaacacatacacaaatgagcatagctatgacccaatgaaacattatttactaaaacaggtag

SEQ ID NO: 1022984 - DNA, 120 bp, Artificial Sequence
  ENSG00000241956_21 (sequence is synthesized)
tgggccagatttgccaattattgtactataatggatacactttctctcacaagagaattctaccataggtaataattttatatttgtatatttgtgcaatgatgccaaaacgtaaatgaa

SEQ ID NO: 1022985 - DNA, 120 bp, Artificial Sequence
  ENSG00000241956_22 (sequence is synthesized)
cagaaatgtttaaaaaacatgatgttttttaaacattgttaaaaaacaagaccaaagcataatgtttaagaaatgtgaatgtatatttccatctttaaaggcatttgaatacagtacatg

SEQ ID NO: 1022986 - DNA, 120 bp, Artificial Sequence
  ENSG00000241956_23 (sequence is synthesized)
aaattcaaaacctcagttgtgaattcgctatttaccaatgacaaggtttaagttcttcagtggccatgagtaagttaagtttgtcatcactttttgccctggtgtagtattttccaaata

SEQ ID NO: 1022987 - DNA, 120 bp, Artificial Sequence
  ENSG00000241956_24 (sequence is synthesized)
gtaaatgctcaattcacatgtacattaaagtaaatactaagaaaaccctcacatgtaactagacacaattctattcatgtatctttgaaatcaactggagacattatcaattaatgcaaa

SEQ ID NO: 1022988 - DNA, 120 bp, Artificial Sequence
  ENSG00000241956_25 (sequence is synthesized)
acatgctcccagacctcactggcattaccttcttcatctcctgggctgctcactcctgattcccccaacttctacagaatcttctggagaggaaagaagaaaccatgtctagacaaggtg

SEQ ID NO: 1022989 - DNA, 120 bp, Artificial Sequence
  ENSG00000241956_26 (sequence is synthesized)
ctggaaagacccagggaagacacaggtgagctaagaaagcagtagaaactgggtaattaaaagtcaacataatggctggaaacttgttcaaggagatataaaaagaaagaaaaaccaaaa

SEQ ID NO: 1022990 - DNA, 120 bp, Artificial Sequence
  ENSG00000241956_27 (sequence is synthesized)
gaaatataacaagtaaatcgcaatctaccttgcacagaatcttctggagaggaaagaagaaaccatgtctagacaaggtgctggaaagacccagggaagacacagggaaatcatctttcg

SEQ ID NO: 1022991 - DNA, 120 bp, Artificial Sequence
  ENSG00000241956_28 (sequence is synthesized)
ggaatcccagtgattcaagatgcattggagagaaatacagactgaagataattggttacccatctagaaagagatatatgaagtctgggggtaagacctgcagtaatttcccttaagtta

SEQ ID NO: 1022992 - DNA, 120 bp, Artificial Sequence
  ENSG00000241956_29 (sequence is synthesized)
ctgatcgtggagcctctccaggactacaggctcttcctcagcggctgccaagctcctcttagggaagccggggaacttctgaatgcccaagtataccctgctggaggcacaggaatcctc

SEQ ID NO: 1022993 - DNA, 120 bp, Artificial Sequence
  ENSG00000241956_30 (sequence is synthesized)
agccgctactggtcaccactgtaaatctttctgctgttttttataaccacaaagtatagcacaatttctgtctgctttcatgcacctaaaactattgtggtttttgcctttcccggtctc

SEQ ID NO: 1022994 - DNA, 120 bp, Artificial Sequence
  ENSG00000241956_31 (sequence is synthesized)
attagctaaaacaaagagttgataaaggcacaggccctttctcaagaaacaaaatgttgtctgtcttctttctgcagtgaaacagaatgtaaagtccagaaataaacgtgtaattaaata

SEQ ID NO: 1022995 - DNA, 120 bp, Artificial Sequence
  ENSG00000241956_32 (sequence is synthesized)
tcttatgagcaaatatcctaaaattcagattgttaaaatgacgtgaagaaaaaatgaacaggaaactgatgcagaggccacaaagaatattcaaacacaaattttccattttcaaaaaat

SEQ ID NO: 1022996 - DNA, 120 bp, Artificial Sequence
  ENSG00000241956_33 (sequence is synthesized)
gacactgctccaggaccctgtggatatgaggctggataattgattctctacttccaacttactcatgtgcatttgatacctctaacaaaaggagtaaatttttcacaattcaatatgacc

SEQ ID NO: 1022997 - DNA, 120 bp, Artificial Sequence
  ENSG00000241956_34 (sequence is synthesized)
gttccaaacacgtcatggccagagtccagatctccatcagggctgatcgctattcacctatcaagtcttggtttcaaacacgctcgtgaagccttcgtcctctctcagtacctggcacat

SEQ ID NO: 1022998 - DNA, 120 bp, Artificial Sequence
  ENSG00000241956_35 (sequence is synthesized)
accggtattatggtcatttcagcccgttgtgttgtcatctttttctgcttttcttttgtctacccactaggagcagagcctgatgaggcatttgaatacagtacatgaaattcaaaacct

SEQ ID NO: 1022999 - DNA, 120 bp, Artificial Sequence
  ENSG00000241956_36 (sequence is synthesized)
atttaccaatgacaaggtttaagttcttcagtggccatgaacattatcaattaatgcaaagatcctgggctttcaatccaaagaagcttacctctctgctccagatgctcatcttgctgg

SEQ ID NO: 1023000 - DNA, 120 bp, Artificial Sequence
  ENSG00000241956_37 (sequence is synthesized)
ctgtgtgtctccagaatcttctggagaggaaagaagaaaccatgtctagacaaggtgctggaaagacccagggaagacacagatttgttcctttctccaccatgcctcactatgtgtcac

SEQ ID NO: 1023001 - DNA, 120 bp, Artificial Sequence
  ENSG00000241956_38 (sequence is synthesized)
gtgcagagtatcattgcagcgcttttccagggagtaacgtgctgcactggttcagggctttgtctttattcacaacacattcatgtgcctcagcatgggggcagctgcactgttgcctgc

SEQ ID NO: 1023002 - DNA, 120 bp, Artificial Sequence
  ENSG00000241956_39 (sequence is synthesized)
cagcctgtcctctttgactgccgaatgaaccaaaggataactctccattcgtgagagagagtgagctacagaggaagaaagaccacgcaaaagggagggggagagaggggggcgaagagg

SEQ ID NO: 1023003 - DNA, 120 bp, Artificial Sequence
  ENSG00000241956_40 (sequence is synthesized)
tcatccagttgctggaaaacaaactcaggtctcccactggttctacattatgggaaatcatctttcgggaatttatctaagaagaacttcttatgatgaagtctcactctgtcacccagg

SEQ ID NO: 1023004 - DNA, 65 bp, Artificial Sequence
  ENSG00000241956_41 (sequence is synthesized)
tggtcctggcctttttttggtcctgcaaccttcacctcccagtttcactcttgttgcccagactg

SEQ ID NO: 1023005 - DNA, 120 bp, Artificial Sequence
  ENSG00000241956_42 (sequence is synthesized)
tgcttcacgggcttgtaggtgatggagaactcgcccaggtcgtggccgatcatctccagcttgatctccacctggttgaaggtcttgccgttgtagacgcccaccctgctgcccaccatc

SEQ ID NO: 1023006 - DNA, 120 bp, Artificial Sequence
  ENSG00000241956_43 (sequence is synthesized)
tgagaaacggtgaattacgtgaggtgaacctcgtatttatgtgaggaaagctctgcactggttttgattctcacattttaattagctgatacattaaaaacaatataagtaatttttccc

SEQ ID NO: 1023007 - DNA, 120 bp, Artificial Sequence
  ENSG00000241956_44 (sequence is synthesized)
ttccgggaaacctcaacttggagtaacgctggattacgtgagctaaacctcgtaattatgtgagaaaggctaagtattggttttgtttcccacatttacgtgaggaaattgaggcacaat

SEQ ID NO: 1023008 - DNA, 120 bp, Artificial Sequence
  ENSG00000241956_45 (sequence is synthesized)
gttaagtgtcacaaggtcaagtaactagtaaggggcaggccaagatagaaatctgtttgcagaactcttgtgcttaatgactaagaagcgtgcgcagatgcaagggccagacagggaaac

SEQ ID NO: 1023009 - DNA, 120 bp, Artificial Sequence
  ENSG00000241956_46 (sequence is synthesized)
aagagatccatttgtaccaatagcatggaagattgactttgtttcagggaatcgcgttttttcataaaaacttcgggattaacccacctcacatattttctccaaagttatagttatgta

SEQ ID NO: 1023010 - DNA, 120 bp, Artificial Sequence
  ENSG00000241956_47 (sequence is synthesized)
cacctcacatattttctccaaagttatagttatgtattggatttaagaatagactgaacctgggctccccactgcacaagataaaaaactgatagaggctgggcacggtggctcacgcct

SEQ ID NO: 1023011 - DNA, 89 bp, Artificial Sequence
  ENSG00000241956_48 (sequence is synthesized)
gggagaccaaggtatatcctgggcaacatggtgaaaccctaactctactaaaaatacaaaatcagctgggtgtggtggtgggtacctgt

SEQ ID NO: 1023012 - DNA, 120 bp, Artificial Sequence
  ENSG00000241956_49 (sequence is synthesized)
ccaccgcatgttatctaagttgttcatataccaatactaagagctactgaaattcttccaaaaaatcaaaatcatttcccctttgatttgctagttttccctcttggtaaataaagattc

SEQ ID NO: 1023013 - DNA, 120 bp, Artificial Sequence
  ENSG00000241956_50 (sequence is synthesized)
attttttagtaataactgacctgccctaagggttcaccactttcttctgatctcaaatcttgtgctaggtctttaggttacaattcatgaaactaaaaaataaacaaaaaaattctctta

SEQ ID NO: 1023014 - DNA, 120 bp, Artificial Sequence
  ENSG00000241956_51 (sequence is synthesized)
gtgtgaaacggcccctctttgtttcactcttggctctatggaaatggtctttgtatgaaatctggaatccattcccagtataaaggcaagctgactggcaccaagtctatgaagctgaac

SEQ ID NO: 1023015 - DNA, 120 bp, Artificial Sequence
  ENSG00000241956_52 (sequence is synthesized)
atttattcagtatacttagccaaaacaactcacttatcagggaaaaacaatcatctgggactgcaaattggttttccatgttgattatagtgacattaagtagaaatgacttcagtttcc

SEQ ID NO: 1023016 - DNA, 120 bp, Artificial Sequence
  ENSG00000241956_53 (sequence is synthesized)
atgtttaattgttatctagtcccctcctgatcataagtagaaattataccaactcttattcaaatatcaagaaaaagctttttagaaattattaaaggaagtgtctacaagtacacaagt

SEQ ID NO: 1023017 - DNA, 120 bp, Artificial Sequence
  ENSG00000241956_54 (sequence is synthesized)
atatacaatcaaaaaagacaaaaaattacatttggacattgctatttgacctattttcttcatctaaatggtacccaatagaaaaatgtaaatttatgcttcaagataatatggagggct

SEQ ID NO: 1023018 - DNA, 120 bp, Artificial Sequence
  ENSG00000241956_55 (sequence is synthesized)
cacagaatgaggcttcagatcattttaatcaattattctttattaaggcaatttaataggagaaaagactaaatgttatttcttgtgcttcacagatgtattccagatgaatatacattt

SEQ ID NO: 1023019 - DNA, 120 bp, Artificial Sequence
  ENSG00000241956_56 (sequence is synthesized)
aaaaatatacaaagaataaacacagacaagtagaatacctttgattacacagctacaaaaatctgaccaccttgaaatactgtgtcagggttagcaaacttcctctgtaaggccaaatag

SEQ ID NO: 1023020 - DNA, 120 bp, Artificial Sequence
  ENSG00000241956_57 (sequence is synthesized)
attaattcattccacgaatcaccaaaggatatatgaagtctgggggtaagacctgcagtaatttcccttaagataaggcagaaggatccagctgagaaccctactccaatggctgttctt

SEQ ID NO: 1023021 - DNA, 120 bp, Artificial Sequence
  ENSG00000241956_58 (sequence is synthesized)
cccctctcccagtcctgttccttgaagggatcctttctcaaccctctctctcattatttttctttctaggtctcctagtggtcaccaacatattttacttttaggagccaaagttcagat

SEQ ID NO: 1023022 - DNA, 120 bp, Artificial Sequence
  ENSG00000241956_59 (sequence is synthesized)
tttctcaaccctctctctcattatttttgtctcctagtggtcaccaacatattttacttttaggagccaaagttcaggtatttttcttccaatggaataaattaattttgtggtaaacgc

SEQ ID NO: 1023023 - DNA, 120 bp, Artificial Sequence
  ENSG00000241956_60 (sequence is synthesized)
ttagtcttatttcacaaacggtacagaatatatagctcaggtctctgaatcaaattaatcaaaatataacctactctcaagcgagtcctaacttatggcagtaatagagttgtagaagat

SEQ ID NO: 1023024 - DNA, 120 bp, Artificial Sequence
  ENSG00000241956_61 (sequence is synthesized)
ccctatgaaatggacatactctaaccagagctctgagtttattatgtgcccgaggctgttcatgtgttgtcttacttaatcctcatagcaaacatttgaagtagccaacaggaaaatgag

SEQ ID NO: 1023025 - DNA, 120 bp, Artificial Sequence
  ENSG00000241956_62 (sequence is synthesized)
gcttagagtgactaagaaatgtgcccagggttgtacatctagcaaatagcatggataagatatgaaccaaagcagcttaacttcagagcctacacacttaatcactgaactcctctgtct

SEQ ID NO: 1023026 - DNA, 120 bp, Artificial Sequence
  ENSG00000241956_63 (sequence is synthesized)
cctgagaaatggaagtaaccttcaaataatcatatgctggtgaatgaaaaataaaatccattatctactttctgagttacttggccacccttttggaaggtgaatagggattagttttgt

SEQ ID NO: 1023027 - DNA, 120 bp, Artificial Sequence
  ENSG00000241956_64 (sequence is synthesized)
tggttttacaaattcataaaaagaggcctccatgaaagttttgaaataagtctttgttcatctgtgtgctggcccaggtaaaacaactgttattgttttggtgtacttaaataggacatg

SEQ ID NO: 1023028 - DNA, 120 bp, Artificial Sequence
  ENSG00000241956_65 (sequence is synthesized)
tgtgttgatctaaaatatacacttagattcagtacttagatctgagctagtgagcttttcattgtatggtgaatgactttttcacaattaattgctaatgagatcctccattgcgtagaa

SEQ ID NO: 1023029 - DNA, 120 bp, Artificial Sequence
  ENSG00000241956_66 (sequence is synthesized)
aatattcagaataaaacttcaaaattttaatgagtaaaagtgaccaacgtttgacctgttttcatagacacataattgaacaataagtagctatcctaaaataatcatggactccaatgg

SEQ ID NO: 1023030 - DNA, 120 bp, Artificial Sequence
  ENSG00000241956_67 (sequence is synthesized)
gagtgtggttgaaatgataattactatattacactgattgattaaggttgtgaaaagttattagtgcgagggtgaagggtcacaaatttacgttgtccttagtttaatttgaattctgtc

SEQ ID NO: 1023031 - DNA, 120 bp, Artificial Sequence
  ENSG00000241956_68 (sequence is synthesized)
taagatatacctaaatattttagaaatatgaaaatataatgcaatgcagttttaaaaattatgtactacttaatgtactgctattttttattttttttggattcggggggtacatgtgaa

SEQ ID NO: 1023032 - DNA, 120 bp, Artificial Sequence
  ENSG00000241956_69 (sequence is synthesized)
agtttgttacatgggtatattgtgtaatactggggtttgggcttctattgaacccatcacccaaatagtgaatatattatcattatccaataggtaattttgcaaccctttcccccatct

SEQ ID NO: 1023033 - DNA, 120 bp, Artificial Sequence
  ENSG00000241956_70 (sequence is synthesized)
ttccctcctttctttgggagttaccaatgtctattgtttctgtctttatgccagaagtaatgagtacccaatgttttaacccccatttataagtaagaacatgtggtatttggtttcctg

SEQ ID NO: 1023034 - DNA, 120 bp, Artificial Sequence
  ENSG00000241956_71 (sequence is synthesized)
ttgctgtgttaatttgcttaggattaagacctccagcttcatctgtgttgctgcagaggatatgatttcattctttttatggctgaatagtattccatggtatatgtgtgccacatattc

SEQ ID NO: 1023035 - DNA, 120 bp, Artificial Sequence
  ENSG00000241956_72 (sequence is synthesized)
tttatccaatccactgttgataggcacttaggttgattccatgattttgctattgtgaacactgctgggatgaacatacaagtgtggttgttttttttatataacaatgttttttctttt

SEQ ID NO: 1023036 - DNA, 120 bp, Artificial Sequence
  ENSG00000215112_0 (sequence is synthesized)
cagggtagggctccagctaagccacgtaggcactacgatgggcaacagaaaggttggtttctgggcaattcagagaaaccaaggacagctacccccagaactcagagtagccaactgggc

SEQ ID NO: 1023037 - DNA, 120 bp, Artificial Sequence
  ENSG00000215112_1 (sequence is synthesized)
tgctcacaggagatgccttaactgaaaggtgatcagactccacaggagacccagagaagatgtggagggagctcagaggctgtcctggaggagacgtggagacagctcagaggctgtccc

SEQ ID NO: 1023038 - DNA, 120 bp, Artificial Sequence
  ENSG00000215112_2 (sequence is synthesized)
gaggctgtcccagagaagacgtggagagctcagaggatgtcccagagaagacgtggagagagttcagaggctgtcccggagaagacgtggaaagagctcagaaactcagagactgtcccg

SEQ ID NO: 1023039 - DNA, 120 bp, Artificial Sequence
  ENSG00000215112_3 (sequence is synthesized)
gagaagacatggaaacagctcagacgctgtctgcaagaagatgtggagagagttcagaggctgtcgttactgctgcacttggctgtttttctttggataattattgcaatcaattttagt

SEQ ID NO: 1023040 - DNA, 120 bp, Artificial Sequence; identical to SEQ ID NO: 841509
  ENSG00000215112_4 (sequence is synthesized)

SEQ ID NO: 1023041 - DNA, 120 bp, Artificial Sequence
  ENSG00000215117_0 (sequence is synthesized)
gatgtacactaagcgaccctcagctgtgtgggaccagccctgccaacttccatcgtgggctcagctgcagctgccacctgcacacggtgcggggaagcagtgatggcaacctttcaccgt

SEQ ID NO: 1023042 - DNA, 120 bp, Artificial Sequence
  ENSG00000215117_1 (sequence is synthesized)
gcccacgccaccagcagcgtgaaacccagggccagacgtcaccaggagcctaattcaggcgattggcctggcagctacagggcgggaactcgctgctcagccatcggatttaggctgctg

SEQ ID NO: 1023043 - DNA, 120 bp, Artificial Sequence
  ENSG00000215117_2 (sequence is synthesized)
cacagtccccagcactggcgacctcgttctctgggcgcagggcaaggaagagaggaccccagttgggagggtggtgcactcggagacctgaaggccctctgggaccagccttgccagcct

SEQ ID NO: 1023044 - DNA, 120 bp, Artificial Sequence
  ENSG00000215117_3 (sequence is synthesized)
ccgccttgggttcagctgcagctgtcatctgcatatggcgcgcggcagcagaggtggcaactctcaacgctgcccgagccaccagcagcgcggacccctggccagatgccccagcagcgc

SEQ ID NO: 1023045 - DNA, 120 bp, Artificial Sequence
  ENSG00000215117_4 (sequence is synthesized)
ctaattcgggcggccggcccttcagctgcaggaggggggaaccagtggctcagccccatgtaggcggctgcacagtgcccagcactcaagacctcgcgctcaaaagagggcacaggagga

SEQ ID NO: 1023046 - DNA, 120 bp, Artificial Sequence
  ENSG00000215117_5 (sequence is synthesized)
gcagctgcagggggcagcgtcgttaggcgggccctgagacagctgggaccgcgcgctcggctctagggagctcggccagtccacaggcgtctcagcagcagctgccacctgcatgcggtg

SEQ ID NO: 1023047 - DNA, 120 bp, Artificial Sequence
  ENSG00000215117_6 (sequence is synthesized)
ccggcgagtgctcggctcagggcggtttctggccacacgcagtttctggccacgcgcaaggcggttgccttttgaggtcccatgggcgctggggcccaactgctctgctccgtatattat

SEQ ID NO: 1023048 - DNA, 120 bp, Artificial Sequence
  ENSG00000215117_7 (sequence is synthesized)
ttattctccgagaggttggagacgtccttgtccgagaagttggagggtccctgtctgaggtctgggccagactgccttgctttctggtgctgggccggatgggggccgggtgggggctgg

SEQ ID NO: 1023049 - DNA, 120 bp, Artificial Sequence
  ENSG00000215117_8 (sequence is synthesized)
gctgggggaagggcgagggcgagttgtggcgtctctgaagccaatagctgggccatgaagatgatcttggctgtggagagccagaagggccaggtgcgcctgagctcctggagtagtaac

SEQ ID NO: 1023050 - DNA, 120 bp, Artificial Sequence
  ENSG00000215117_9 (sequence is synthesized)
tgcatcttctctgacccctggtaccagactccagatgaggatgtcgggatgatacacaaagctgcgtccaggggaacgcgtgggagctgcagctgaggctcccgctgaagagaaaagacc

SEQ ID NO: 1023051 - DNA, 120 bp, Artificial Sequence
  ENSG00000215117_10 (sequence is synthesized)
agtctgaaatctacaagaacagagaattcttccaaatcaacatgaaaatacctctaaaactgggcaaagtactttttccagctctgcaagtcacctatgcacataggaaaaaaatactta

SEQ ID NO: 1023052 - DNA, 120 bp, Artificial Sequence
  ENSG00000215117_11 (sequence is synthesized)
atgtgtccgataagagaaggactttaatttaaaaaaggaataaaatgccgttttctgtcctaagtttgtgaagatgaggagcagtgatatttacacttctgcttaaagttaagttgctga

SEQ ID NO: 1023053 - DNA, 120 bp, Artificial Sequence
  ENSG00000215117_12 (sequence is synthesized)
tgacttttcaaaaagacaatttggtggatggttccacatttggcctgtgccaatggctgcccagaagtggtaacttttctggtgcacagaaaatgccagcttaacatctgtgacagtgaa

SEQ ID NO: 1023054 - DNA, 120 bp, Artificial Sequence
  ENSG00000215117_13 (sequence is synthesized)
aacaagacacctctaacgaaggctataatgtgccaagaagatgtgaaactattctgctagaccttggtgctgatccaaatattaccgatgtctatggcaacactgctctccatatgctgt

SEQ ID NO: 1023055 - DNA, 120 bp, Artificial Sequence
  ENSG00000215117_14 (sequence is synthesized)
ctataatgagaatatgtcaatggtagcaagactgttttcacacaagacaaacatcgaagtgaaaaacaatgtagagcaaccaatgttattttcaaaatatttgaaatccacttgttttaa

SEQ ID NO: 1023056 - DNA, 120 bp, Artificial Sequence
  ENSG00000215117_15 (sequence is synthesized)
cattgacatatgtaagggtcagtttttgctatttggaagcttaagcaatccctgaataaaaataatttgaaataatggtctaagattttaccttaaatactaatatctttaaaaaagtat

SEQ ID NO: 1023057 - DNA, 120 bp, Artificial Sequence
  ENSG00000215117_16 (sequence is synthesized)
tagagagtatggctttcttttatgcatttatggtagatatttgaatttgttataggtaaaacttttgttttcaatttttttttgactgaagtatttttttttctttctaagtagtgtaca

SEQ ID NO: 1023058 - DNA, 120 bp, Artificial Sequence
  ENSG00000215117_17 (sequence is synthesized)
attaagccaacgtgtaaaatttaggagacctgcaaaaatctgtatttcaggctcctcttaaatagtgaaatctggtttcccttgagcccatattactgtttggtgtgctatgaagaggct

SEQ ID NO: 1023059 - DNA, 120 bp, Artificial Sequence
  ENSG00000215117_18 (sequence is synthesized)
gtagcttcacgcaaagtctgtggtctccagtttgccattgtgcccacctagggacttactcaggtcataccctttgcctctgtaaatattttagttaacaactcctgtcatatagtatat

SEQ ID NO: 1023060 - DNA, 120 bp, Artificial Sequence
  ENSG00000215117_19 (sequence is synthesized)
tttggtaaagatttcaaggttttcaagacagttgatagttatttataatatatagcctatattttgtattaattccttaataatgggtttgacttttagaatttagaagttgttttttaa

SEQ ID NO: 1023061 - DNA, 120 bp, Artificial Sequence
  ENSG00000215117_20 (sequence is synthesized)
ataatgatttttctttatatataccataaataataatcacattggaatgcctataggcctttttaggttaattatggttatatttggataggttatgcatattgcagaacacattttatc

SEQ ID NO: 1023062 - DNA, 120 bp, Artificial Sequence
  ENSG00000215117_21 (sequence is synthesized)
tttctcctcagcattgtctctgaaaatggaagtgatttagtggcttttattatgctaaaataacccatatagttcagctagaaattgtattgataagccattgcatttgtatttctgata

SEQ ID NO: 1023063 - DNA, 120 bp, Artificial Sequence
  ENSG00000215117_22 (sequence is synthesized)
ttttgccaaaaataaaaaataattttaagtagcaatgaaaatggaaaccagaataaaaatggattaatgcattttaagaagtagatttgcattagggtcctaggattataaatatcatta

SEQ ID NO: 1023064 - DNA, 120 bp, Artificial Sequence
  ENSG00000215117_23 (sequence is synthesized)
aaattgagaataaaatttcatactgaactttgtaacagctaaaattctgtgactctgtaataggagaaacccaatggaccatttaataataagcaatcaaaattcatttgaagcctatct

SEQ ID NO: 1023065 - DNA, 120 bp, Artificial Sequence
  ENSG00000215117_24 (sequence is synthesized)
cttttaatttagagaccatttccttagtgatctacttggagcaggagcacctgactttggcagctgggatcctgggcccattgatagaaaataatcaagtgagtttgtatcacttggagg

SEQ ID NO: 1023066 - DNA, 120 bp, Artificial Sequence
  ENSG00000215117_25 (sequence is synthesized)
aaacctctacctttattggaaagctttaaaaactgtaatcctgaaactttaattcctcaaatgttaatattgccacaaaacctattgtcaaataaggattaggcaaagttcaagacattt

SEQ ID NO: 1023067 - DNA, 120 bp, Artificial Sequence
  ENSG00000215117_26 (sequence is synthesized)
cttgaatactggacatataattcacagttttataatatttctcaaacatagatgatcataggatcttcctattcaggtacagtctttaaattctggcaaagtaaatattctttggaatac

SEQ ID NO: 1023068 - DNA, 120 bp, Artificial Sequence
  ENSG00000215117_27 (sequence is synthesized)
agtttaagaagtactactctagaggtaataatttagatcattgatttaataaaaatacttaaagtatttactactatgtcatagggtttgaggataaacagataaaagatacagcagctg

SEQ ID NO: 1023069 - DNA, 120 bp, Artificial Sequence
  ENSG00000215117_28 (sequence is synthesized)
ccctcaagaatctgttggtttagatagaaatcaataaaattattacaatataccatgtgaaatgctgtgctagaaacaaagattattgaaaccagtgactgtttcaaatcatttttggag

SEQ ID NO: 1023070 - DNA, 120 bp, Artificial Sequence
  ENSG00000215117_29 (sequence is synthesized)
ctgaccagagttaatgtgagtcagaggccggatgttttcaagtggaggaggagtgcatgggaaagcacagaggagtgagaaggaagggacagattttatttgctttctattttatgtgtt

SEQ ID NO: 1023071 - DNA, 120 bp, Artificial Sequence
  ENSG00000215117_30 (sequence is synthesized)
taagttcataagaccttatataaggtattcagttcagctgacaaatatgtaattttatgaattataaattgtttttgccattttacaggatggcctcataccacttttacttgccataac

SEQ ID NO: 1023072 - DNA, 120 bp, Artificial Sequence
  ENSG00000215117_31 (sequence is synthesized)
taaaagaagacagcaaatggtataatttttactaacaaaaaatgcaaatgtaaatgcagttgataaaggtttagtcatttttttaaagtgagtgttgttctagagtcgtaacattcaagt

SEQ ID NO: 1023073 - DNA, 120 bp, Artificial Sequence
  ENSG00000215117_32 (sequence is synthesized)
tggaaatattaagttaatcagcagattagcttatatttattggattatagtggaaaatatcaaaacaaatcaccagttaggtagaaaagcaattacttggactgggcaacataaagaaca

SEQ ID NO: 1023074 - DNA, 120 bp, Artificial Sequence
  ENSG00000215117_33 (sequence is synthesized)
aacatatgtatatgataggatttatattctcttattatattggctgatgttatttacaatctgatgtttttgtcacattatcttctattagtaaagggttttgtattagttttataaaat

SEQ ID NO: 1023075 - DNA, 65 bp, Artificial Sequence
  ENSG00000231542_0 (sequence is synthesized)
tgtttttgttttttttgagacagggtcttgttctgctgtccaggctggagtacagtggcacaata

SEQ ID NO: 1023076 - DNA, 120 bp, Artificial Sequence
  ENSG00000231542_1 (sequence is synthesized)
gtatccaagactacaggaaccaaagaaagatcttgcattttctaatgaattctgagcccacagtacaactcatctttggaaatcactgctccagaatccaaagcatggtgctcaggtact

SEQ ID NO: 1023077 - DNA, 120 bp, Artificial Sequence
  ENSG00000279920_0 (sequence is synthesized)
acactttgagcctgccaaagtgcctttttttgtgcctttcacataaagactatgacacagctaagctattcatgtactaataaatacctgccctgagctgtgtgaccacggacaccaccc

SEQ ID NO: 1023078 - DNA, 120 bp, Artificial Sequence
  ENSG00000279920_1 (sequence is synthesized)
tataatgtggccagtgtgtaggaactctgcaggctcagatcattccagacatacatgcagatgttggaactcccttgcacagtgactcatgatcccaaggctgagtgctgagggcaggat

SEQ ID NO: 1023079 - DNA, 120 bp, Artificial Sequence
  ENSG00000279920_2 (sequence is synthesized)
catcttccgaggctatgactcagcacctccaggcccttggaccctggagaatgacagccacacagatgcatgtggtccacagtaacacaaagtaccagagcatggaggaggcaccacgcc

SEQ ID NO: 1023080 - DNA, 120 bp, Artificial Sequence
  ENSG00000279920_3 (sequence is synthesized)
acggtgatgggctcgagtgcaggccctgctgctggagttgctgctggcggtgaaggcagggctgtgattctatgtatgtttccaaaaaaggggttcatggggatcctggaagtggacagg

SEQ ID NO: 1023081 - DNA, 120 bp, Artificial Sequence
  ENSG00000279927_0 (sequence is synthesized)
gccctgccagccactgttctaagcactttttccctgttcctgccgatttgctcctcacaacaaccataggaagtggagactatgattatccccgttgcacagtaaggaaactgaggcaaa

SEQ ID NO: 1023082 - DNA, 120 bp, Artificial Sequence
  ENSG00000279927_1 (sequence is synthesized)
aggcggttaggtaacttggcgatgtctcccggctagggatagcagaatgggatagaaacgcaggccacgcggtctggagcggtggctcacgcctttaatcccagtacttagggaggccga

SEQ ID NO: 1023083 - DNA, 69 bp, Artificial Sequence
  ENSG00000279927_2 (sequence is synthesized)
ggcagaggtggcagtgagccgagatcaccccactgcacttcagcctgggtggcaggccacccggtggtg

SEQ ID NO: 1023084 - DNA, 120 bp, Artificial Sequence
  ENSG00000279927_3 (sequence is synthesized)
taaaaaaaagaaaggcaggccacccggtggtggtccctgtgctcctccccacccacccccgcactgtgctgggcggtgaggaggcggctggcccaggaggtgggggtgtggagtggggca

SEQ ID NO: 1023085 - DNA, 120 bp, Artificial Sequence
  ENSG00000279927_4 (sequence is synthesized)
catcagagatttcaaattgaccaaggtctgttttgtgtcagtttgtcagttttatgtgtcagcttggctaaactatggtctcctgttatttgatcaaacactaatctattttttctttta

SEQ ID NO: 1023086 - DNA, 74 bp, Artificial Sequence
  ENSG00000279927_5 (sequence is synthesized)
gcctctgacccttgggctcaagtgatctgccaccatgcctagcctcaaacactaatctagatgttgcttgaagg

SEQ ID NO: 1023087 - DNA, 120 bp, Artificial Sequence
  ENSG00000279927_6 (sequence is synthesized)
atgcctagcctcaaacactaatctagatgttgcttgaaggcattttgtagatgtgatttgtctataattagtttacttcaagtaagggagattatcccagataatctgggtgagtctgaa

SEQ ID NO: 1023088 - DNA, 120 bp, Artificial Sequence
  ENSG00000279927_7 (sequence is synthesized)
agactttatgggtagaactgaggtgcccttgaagaggaagaaattctgccagccaatagcaatttcagcttgtgctgaagagttccagccttcctaacaaccagccctacaaatttcgga

SEQ ID NO: 1023089 - DNA, 120 bp, Artificial Sequence
  ENSG00000279927_8 (sequence is synthesized)
cttgcctagccagccctgtgtgtataaaccaattccttgcaataatcacacctacaccctcaccccacccccctccccaaatacatgtatatatggagagagagggagagagaatataaa

SEQ ID NO: 1023090 - DNA, 120 bp, Artificial Sequence
  ENSG00000279927_9 (sequence is synthesized)
atcatacatatatcatatatctcctatttgttctgtgtctttaatttctctagttgacccctgactgatgcaatgacccaagagcaggcagatgcccggggggcgtttatgatacctctc

SEQ ID NO: 1023091 - DNA, 120 bp, Artificial Sequence
  ENSG00000279927_10 (sequence is synthesized)
ctaggacttggctcaatctgagtccctcaacggccatctgcaaccctgaggagggtaggaaaatcccaaattgactgagattacatttccatcatcaacagcaatggagaatcaataaag

SEQ ID NO: 1023092 - DNA, 67 bp, Artificial Sequence
  ENSG00000279927_11 (sequence is synthesized)
ttacatttccatcatcaacagcaatggagaatcaataaagaaatttagttcagatattgaaaaatga

SEQ ID NO: 1023093 - DNA, 120 bp, Artificial Sequence
  ENSG00000279927_12 (sequence is synthesized)
gtttttgcactatcaagtttatgtgctaagattcatacctcattttaacagcctacatctacttctgcgtggaccagaaggacagagccacaataacactgaccaaaccatagtaatagc

SEQ ID NO: 1023094 - DNA, 120 bp, Artificial Sequence
  ENSG00000279927_13 (sequence is synthesized)
acaatcgttgctacaaaacatttgcaaataatcagataatatatctgattagggccttgtatccagaatatataaagagctcttattgcaacaacaagtagaaaacagatcaatttaaaa

SEQ ID NO: 1023095 - DNA, 120 bp, Artificial Sequence
  ENSG00000279927_14 (sequence is synthesized)
gcgacaagagtgagactctgtctcaaaataaaaaataaaataaaataggcaaaggacttgaatatccaaagaagataaacaaatggccaataagcaaacaatactttcaagcacaaaaga

SEQ ID NO: 1023096 - DNA, 120 bp, Artificial Sequence
  ENSG00000279927_15 (sequence is synthesized)
aataagcaaacaatactttcaagcacaaaagatgctcgacataattagtcatcaaggaaaaggcaaatcagaaccacacgggactcacttcacatccaccaggatgactatagtccttac

SEQ ID NO: 1023097 - DNA, 120 bp, Artificial Sequence
  ENSG00000279927_16 (sequence is synthesized)
agtaagagaatagcagatggcaggtattgtgctttacttgtattaagtaacttaatcctcacagtagcctcgtgaaggagggatggctattagctcatttacaaaagaggaactgaggcc

SEQ ID NO: 1023098 - DNA, 120 bp, Artificial Sequence
  ENSG00000279927_17 (sequence is synthesized)
tggaaaggtgaaatgattgccccagtgttccacggctggtcagtgggtgtcagaatttaagacctgggctgtctgcttccaaagctgtgctatccagctttaatgactgtgctatactgg

SEQ ID NO: 1023099 - DNA, 120 bp, Artificial Sequence
  ENSG00000279927_18 (sequence is synthesized)
tctctagcaaaattattgaaaatttccctctcagacccaccatttacctttattgctcccagagaccctcacatgtgctccttagctaccaaaaacagacttcttctttctcctggcatt

SEQ ID NO: 1023100 - DNA, 120 bp, Artificial Sequence
  ENSG00000279927_19 (sequence is synthesized)
tgtcccatgtcctttggtcagtccagaactcactaggaggctcccagacgctgtgtccgtgtttctcctccagaccgacgatgctgcctgtgtcactgcctcagggccatgtcactgctg

SEQ ID NO: 1023101 - DNA, 120 bp, Artificial Sequence
  ENSG00000279927_20 (sequence is synthesized)
ctgccccactggactcccacggtcctagccaccagccactcccctccttcttcctggctagcaaggtttactgactaccatagaggcggaaaatgccagatgctcggtttcccaggttcc

SEQ ID NO: 1023102 - DNA, 120 bp, Artificial Sequence
  ENSG00000279927_21 (sequence is synthesized)
ctttacagttacaggtgaccatgtgaccgtgttctggtcaatgacatataaggagagtcttctgagaaagattttctctcctggccagaatagagagagagggtgaggtagatggaaaga

SEQ ID NO: 1023103 - DNA, 83 bp, Artificial Sequence
  ENSG00000279927_22 (sequence is synthesized)
agctgggtgtggtggtgtgtgaatcacttgaacccaggaggcggagattgcagtgtgctgatcatgccactgcactccagcct

SEQ ID NO: 1023104 - DNA, 120 bp, Artificial Sequence
  ENSG00000248148_0 (sequence is synthesized)
agtgaaatcttgaagcaaggtgcttgtctgagtatctgaggacagagtggaattttccagaccttcttgaactggaccagtggatgcctgtgtggtttcgaatcaaatctgctcatgctt

SEQ ID NO: 1023105 - DNA, 120 bp, Artificial Sequence
  ENSG00000248148_1 (sequence is synthesized)
atgaatcttgctggtatagaagccctgccattcactactgtagggatgatccccatgtggagaaactgacaaaagccttttttctggagtggagctggaagttactcctaactatctcag

SEQ ID NO: 1023106 - DNA, 120 bp, Artificial Sequence
  ENSG00000248148_2 (sequence is synthesized)
tgttaaagcagcaggggatgaggagaaattcttgaaaatgctgtcacatcaaaaccaacttcttatagaatgccacagtgaagagtggacttctcaggacaacccacttactatagatgc

SEQ ID NO: 1023107 - DNA, 85 bp, Artificial Sequence
  ENSG00000248148_3 (sequence is synthesized)
aagtaaaagcacccaactcaggcaggagtgcagtggcattatctcagctcaatgcaacatctgcctcctgggttcaagccattct

SEQ ID NO: 1023108 - DNA, 74 bp, Artificial Sequence
  ENSG00000248148_4 (sequence is synthesized)
ccaaaagcacattttaaaaagtgtattaaatacttagtcaagaaaaggaaaccaaaattgaagaagtgctccct

SEQ ID NO: 1023109 - DNA, 120 bp, Artificial Sequence
  ENSG00000248143_0 (sequence is synthesized)
tgagaatacaacaagaagttagcattctgcatcccagaagaggacactcactagaacccaactgtgctacatcctgatcctgatctcagatttccagttcccagtactcgttgtggacac

SEQ ID NO: 1023110 - DNA, 120 bp, Artificial Sequence
  ENSG00000248143_1 (sequence is synthesized)
tatgagctgcccagctgccccttagaggaaaaatttattgttctagcttctaggaatgttattggcaggtggcatttaaatctcagccccttcagggtttacctgaactgcagagaacga

SEQ ID NO: 1023111 - DNA, 120 bp, Artificial Sequence
  ENSG00000248143_2 (sequence is synthesized)
tgatcccaagggctcgcatagaaaacacgtgcacattaaactcagtatcctaatctgcttgtagacaaatgttacctgcaacatccagtggaagagagtaggaattcgggaagattaaag

SEQ ID NO: 1023112 - DNA, 120 bp, Artificial Sequence
  ENSG00000248143_3 (sequence is synthesized)
ttgccaccattgcagagaaaaatcattattgagccgggtctcaaatttattattattaccattttccacatactggtgtccgaaaataaacctgaaataaatgcttaagaaaaaaaatca

SEQ ID NO: 1023113 - DNA, 120 bp, Artificial Sequence
  ENSG00000248145_0 (sequence is synthesized)
ggaccataaaggtgcttctaagtaatagacagaggacttgaaccctgctgtcagttgcaccataggttgtgactgagtgcaagttaagaatgctgaaccagattacattcatggatgctt

SEQ ID NO: 1023114 - DNA, 120 bp, Artificial Sequence
  ENSG00000248145_1 (sequence is synthesized)
ctacctctcaatttctgtcatctgccagagagagaaatatttgaaagttgttcctgcatgtagaacaaacagtaaacatcctgaaaagatttgatagccagtctaccttctgtccatcac

SEQ ID NO: 1023115 - DNA, 120 bp, Artificial Sequence
  ENSG00000248145_2 (sequence is synthesized)
ctatagacaccctcttccttctcaagtcaaactcagtgggtcagtcatgttcactactatgctgttacggagatggctacgagagagtggaaccacactgtggaagaagcttctgtcttc

SEQ ID NO: 1023116 - DNA, 120 bp, Artificial Sequence
  ENSG00000248145_3 (sequence is synthesized)
tctgacaaggaagaggagcccagcagtcctctgaccacaccatacctgagcacatttactgtggacagcatgtttagcttgaagtctttccttctaccccatcatagctaccactgttgt

SEQ ID NO: 1023117 - DNA, 120 bp, Artificial Sequence
  ENSG00000248145_4 (sequence is synthesized)
gagaactcccatgtccagcactccagggaggtgacatcaggatgaagtattcatttgtgatgagcagtgtgcaaacaataataaagccaaatccacatttttgtgacactcctgacaaac

SEQ ID NO: 1023118 - DNA, 120 bp, Artificial Sequence
  ENSG00000248145_5 (sequence is synthesized)
attacaagtcctctattgctccactgcacagctctcatccctatttttgaggcatttcaatcaaccttgcaattttcaccaagtaattgagaaactgaagaccaacagattatgtatgct

SEQ ID NO: 1023119 - DNA, 120 bp, Artificial Sequence
  ENSG00000248145_6 (sequence is synthesized)
aagatccccacactgataagtggcacagaacatatttgaacctgggacttctcattttagggacacagtgttcctcctctccagaggatgcagcgacaaggtgctatcctggaagcagag

SEQ ID NO: 1023120 - DNA, 120 bp, Artificial Sequence
  ENSG00000248145_7 (sequence is synthesized)
agcagccctcgtgaggcaccaaacacgccagagccttgattttctactttccagcctccacaactgtaaacattaaataatcaatgcaggacaggaagtggaaaagagatggataattga

SEQ ID NO: 1023121 - DNA, 120 bp, Artificial Sequence
  ENSG00000248145_8 (sequence is synthesized)
atttggttttggcctgttcatccctgtgctctccaagagctatctataatttctcctcccttcagttcctgtgttcacagtctcggaagatgtcactgccagaacaactctctcaacaaa

SEQ ID NO: 1023122 - DNA, 120 bp, Artificial Sequence
  ENSG00000248145_9 (sequence is synthesized)
caaaacgaaaccctcagcagggagcctcatggaagggaattagggcttaggatacatctcctcccagaagtcaatttagccctaagatttggagtatgtttccctggcctttacacatag

SEQ ID NO: 1023123 - DNA, 120 bp, Artificial Sequence
  ENSG00000248145_10 (sequence is synthesized)
aaaaggcaaaggcctagaagatctccttctacacatcatgtcagggtcagcttctgggaaagtggaagcagaaatgttttcctggccagtaaagatgctgcaagttgagagaacaaaaaa

SEQ ID NO: 1023124 - DNA, 120 bp, Artificial Sequence
  ENSG00000240777_0 (sequence is synthesized)
aggctgaggtgggaggattccttgagcctcggaggtcaaggctgcagtgagccctgatggtgccactgcactccagcttggccgacagaacgagaccttgactccaaaatagcaatacta

SEQ ID NO: 1023125 - DNA, 120 bp, Artificial Sequence
  ENSG00000240777_1 (sequence is synthesized)
ctgtctgtcagggctatgaagccacatgagacttgacccattaaggacaagagtgaagaaaaatgtatcaaatagaaataattttatctaaacactggcaagaggaaaaagacatggagg

SEQ ID NO: 1023126 - DNA, 120 bp, Artificial Sequence
  ENSG00000240777_2 (sequence is synthesized)
atccatgcaaatgttctagagttgaaaagaaagctctttctacatctgcaaggctgattcatttttctcccttccaagaactctactaaaaaaattatttgttgcttatctgaaatgcaa

SEQ ID NO: 1023127 - DNA, 120 bp, Artificial Sequence
  ENSG00000240777_3 (sequence is synthesized)
atgtaactggatgtcctgtatttgtgaaattccggcaaccctaatccaggaccaaagcagaattaaccaaataaatgaaagtgcatgtctagaaataaatgtacttttctggagcattgt

SEQ ID NO: 1023128 - DNA, 120 bp, Artificial Sequence
  ENSG00000240770_0 (sequence is synthesized)
gctgtgaaattgttctgtctttgaaaaaaaaaatgtttggatggcacaagtcaccacctctagaagcaaaaacttcaacctcctgtgtatctgaggcacctcgccctgactggtaaagca

SEQ ID NO: 1023129 - DNA, 120 bp, Artificial Sequence
  ENSG00000240770_1 (sequence is synthesized)
tcccatatccagtgagtacaacagacttgctgcagttttacatccagttcactgatcaactatcaaactgaaggatagcttgtcactgcatctgcagtgactcacttgccttggggaaaa

SEQ ID NO: 1023130 - DNA, 120 bp, Artificial Sequence
  ENSG00000240770_2 (sequence is synthesized)
atacatgtcacacatttacattttggcttttaagtgaggaaacttcatggttttcagaacagagtaagattcttgaaaactaaaacaataaatccaatgctgattgtgatcaatgatgaa

SEQ ID NO: 1023131 - DNA, 120 bp, Artificial Sequence
  ENSG00000240770_3 (sequence is synthesized)
gcagaaacaagtttacagtcatttggagacagatccacgttgctggcccacctcgtgagactagaggattcttcaggcctttgccagccaccagacttccagctcatctctctccaccct

SEQ ID NO: 1023132 - DNA, 120 bp, Artificial Sequence
  ENSG00000240770_4 (sequence is synthesized)
catctcctgcacggtgttatggatggggtaataggcagctgccagcctgtctaaatccagggacaagagccatctatgacaacacgatgggccctgaggcaagggaggaatgtcatttgt

SEQ ID NO: 1023133 - DNA, 120 bp, Artificial Sequence
  ENSG00000240770_5 (sequence is synthesized)
taactacctttctagctatgtctgcctgattcattacactcactctttcgcaaagaaatatggacaaatagattacaataagcaaaacagcccattaaaaaatatgtatgtgcttggaaa

SEQ ID NO: 1023134 - DNA, 120 bp, Artificial Sequence
  ENSG00000240770_6 (sequence is synthesized)
aagaaactggataggagaaggcctgtgttgagggcatcaatggctaactgtcagcagggacaacagccattatcccatatccagtgagtacaacagcatgaagtcttgctaccttgccag

SEQ ID NO: 1023135 - DNA, 120 bp, Artificial Sequence
  ENSG00000249815_0 (sequence is synthesized)
atggttttataagtgtttggaagttcctccttcattcttctttctcctgctgccttgtaaagaagttgcttgcttccccttcagcttctgccatgattgtaagtttccggagacctctgc

SEQ ID NO: 1023136 - DNA, 120 bp, Artificial Sequence
  ENSG00000249815_1 (sequence is synthesized)
agccatgtggaactgaatcatgtttttcccgggatgtcaaagataaactggagtttcaatcttgctatcttaacaagaacagagggagaacaaagaataaaacaagaaaataaagctgac

SEQ ID NO: 1023137 - DNA, 120 bp, Artificial Sequence
  ENSG00000249815_2 (sequence is synthesized)
tgggtcataaagcagtgaagacaacttgccacatcaacaacacatttggctcaggaactgctaacaaatgtacagtgcagtggtggttcaaattttgcaaaggagacaagagccttgaag

SEQ ID NO: 1023138 - DNA, 120 bp, Artificial Sequence
  ENSG00000249815_3 (sequence is synthesized)
cagaagttgacaaagaccaaatgaaagcaattatcgaagctgattctcttacaactactcaagaagttgccgaagaactcaatgtcgatctttctacagtagtttggcatttgaagcaaa

SEQ ID NO: 1023139 - DNA, 120 bp, Artificial Sequence
  ENSG00000249818_0 (sequence is synthesized)
agtgctagcaatgtctttaaatgggattagcagctggcttgagcactgacccatttgaggggctggttgctgaccccacactcctcaagtcctctgtctgcaggatactaggatgctgac

SEQ ID NO: 1023140 - DNA, 120 bp, Artificial Sequence
  ENSG00000249818_1 (sequence is synthesized)
ctttcatcattccactgacgttatgtggcctaaaatcctcagcctgaagactcaaattatcgaaacttcagaggaaaaatttaaactttcctacaccagaatcagcttgagagaagaacc

SEQ ID NO: 1023141 - DNA, 120 bp, Artificial Sequence
  ENSG00000249818_2 (sequence is synthesized)
cttgtctaatgatgtacttgcttagaagttccaggggctaatcttgaaataaaccaggcatagagatccagttgtggaagtctcccccacctagaaattgcctcaaggtggttaatcttc

SEQ ID NO: 1023142 - DNA, 120 bp, Artificial Sequence
  ENSG00000249818_3 (sequence is synthesized)
aacccaaccattgtcaaaatggccccagttcattctacaggtggacaacaactcaagatagccattggagcaagatatgccgacctccaccctgcaccactcccacatgcttcccatacc

SEQ ID NO: 1023143 - DNA, 120 bp, Artificial Sequence
  ENSG00000249818_4 (sequence is synthesized)
aagtttcccttcccaacccccttcgcttagcctgaaaatttgagatggttctttgagacctaagtccagccattcttctcaatggctagcctttgaataaaactgctttcctccattcca

SEQ ID NO: 1023144 - DNA, 120 bp, Artificial Sequence
  ENSG00000249818_5 (sequence is synthesized)
acattctactgacattctctacctttgacttactgatgagttaaggaaggactgaagacaaaagaaactatgggctgctctctctttccctttctttctatgtcaccattttcacttaag

SEQ ID NO: 1023145 - DNA, 120 bp, Artificial Sequence
  ENSG00000249818_6 (sequence is synthesized)
tggttggtcgatacaaggaattaacactaatgctatgtgcaaatgggataggaagaaatggcagcatgcattatgcacacctctcctctgctcagactcaaattatcgaaacttcagagg

SEQ ID NO: 1023146 - DNA, 120 bp, Artificial Sequence
  ENSG00000272599_0 (sequence is synthesized)
tgtatatcccctaaactcctcacctatatcacaaaaacctgccaaggcagaatacattcccttgggaaaggagctttggcgggcaagcaggcatcgggtcccatctgacaccagcgtgat

SEQ ID NO: 1023147 - DNA, 120 bp, Artificial Sequence
  ENSG00000272599_1 (sequence is synthesized)
cgccacaggagccatctaggaaaggggaatggaaactgagatgctggcactttgggccctgccaatgagctaaagcagtgtataattaaggaattgcacaggcttccttccccaggacaa

SEQ ID NO: 1023148 - DNA, 120 bp, Artificial Sequence
  ENSG00000272599_2 (sequence is synthesized)
cttacagcaataattacctgtggataatagattatattattggaagggcacacacgcttgctgccagccacgttcttcttggtgggctgcccacttctgctgcagaactgatgagcatca

SEQ ID NO: 1023149 - DNA, 120 bp, Artificial Sequence
  ENSG00000272599_3 (sequence is synthesized)
tgccagcggagaagagcttgagcctaggaacacaatgatgggcctggtgtcatttggagagaatgcggggctcatctttaacagcactgggcctagtgtctggaacaactcacagaaaaa

SEQ ID NO: 1023150 - DNA, 120 bp, Artificial Sequence
  ENSG00000272599_4 (sequence is synthesized)
tgccaatctctttacagctcacgtaatttaaatggttactgtttaaatttcaggacaagtaaactaactgaacatattcctctagcatcagaaatctgaataaaagaaagcatattttta

SEQ ID NO: 1023151 - DNA, 120 bp, Artificial Sequence
  ENSG00000272599_5 (sequence is synthesized)
cccagtacagttgaacaccccaaaatgttcttctccctggtaaagttggaattttttgcaactaaaaaaatgtttagaggtttctttttaaattaaatgcacaatcaaaatactttagca

SEQ ID NO: 1023152 - DNA, 120 bp, Artificial Sequence
  ENSG00000272599_6 (sequence is synthesized)
agtgaaatctaaagctgtgagggcaagtcattaaagcaatgtaaagtaatttctcttagggaaaacatgatactgtatatgtcatgctatgtgggtcattaaaaatgtttatgaggctga

SEQ ID NO: 1023153 - DNA, 120 bp, Artificial Sequence
  ENSG00000272597_0 (sequence is synthesized)
cagtgtgtggagtagaagacagaacaacgtataccttcagaatgcacagagccaatgcatttttggattacaaataaatcaatttaagacctattgcttctgacaatgatttgcaaattg

SEQ ID NO: 1023154 - DNA, 120 bp, Artificial Sequence
  ENSG00000272597_1 (sequence is synthesized)
agaaaattctggaaaaatagacatccaacaaattaacagtgattatacctaatgacagggttacaggtggggatttgtttatttgtatgttcttatttgtttcttgtttcttatgtcagc

SEQ ID NO: 1023155 - DNA, 120 bp, Artificial Sequence
  ENSG00000272597_2 (sequence is synthesized)
tttattcacaagagttaaataatgtttatagaaaggaaaagatgcgaatgtttttggacagattaggatttaaacaaaaatgttaaacacagaatacaaaatatgttttttctcctgttg

SEQ ID NO: 1023156 - DNA, 120 bp, Artificial Sequence
  ENSG00000272597_3 (sequence is synthesized)
tctagcttttgtacagtgaacacatgttgcttttatagtaagaaatatacattttaagtttcaaaattactcagattttgtaaacaatctaaaagaaaataaatgtgtttggaaaatcca

SEQ ID NO: 1023157 - DNA, 120 bp, Artificial Sequence
  ENSG00000272593_0 (sequence is synthesized)
gtgaccaaccctcactagttcctgaggtcagggtctccatgttagggaacagagcaagagacttggaacagctccctacagctgcacttctagaaggtcagcctgtccgattcttgtaac

SEQ ID NO: 1023158 - DNA, 120 bp, Artificial Sequence
  ENSG00000272593_1 (sequence is synthesized)
ctggaggtccctccccatctgcagccccctgagctgcaggagcggccccatcagtgcacctgattggaacacactagatttcaggtcctggaaactgggcgctaggatccgtttccctgg

SEQ ID NO: 1023159 - DNA, 120 bp, Artificial Sequence; identical to SEQ ID NO: 539695
  ENSG00000272593_2 (sequence is synthesized)

SEQ ID NO: 1023160 - DNA, 120 bp, Artificial Sequence; identical to SEQ ID NO: 539696
  ENSG00000272593_3 (sequence is synthesized)

SEQ ID NO: 1023161 - DNA, 120 bp, Artificial Sequence
  ENSG00000272592_0 (sequence is synthesized)
actgcaaaaaaagatgtttgacagctggtgaggaatggaagacttagatgggaggttcagttactagacagcagagctgaacttagagctgaaaatgtaaatgaatggagtcaatcaaca

SEQ ID NO: 1023162 - DNA, 120 bp, Artificial Sequence
  ENSG00000272592_1 (sequence is synthesized)
ctgggctttagccaattgtttccatgtgtaaatctgggtctgaagattttcaatggaagtcagaaatatggatttttatgtaaaacatcaagtttttttttcttttccacagccacagac

SEQ ID NO: 1023163 - DNA, 120 bp, Artificial Sequence
  ENSG00000272592_2 (sequence is synthesized)
tgtttctcaaatatctgcccagtggtgctggtgagagcccgatgaaaatgcacaaagagtgacacaacctggccaccactaagaagtaaagagctcagtgatttctcatctattctttca

SEQ ID NO: 1023164 - DNA, 120 bp, Artificial Sequence
  ENSG00000272592_3 (sequence is synthesized)
cagctacacaccaatgaaaacaaacacccgaaaccgtcttctgtggcatttgtcagttgaaaaagaacaccttagacttaacttttaaaatgtctgtaataaaaatataattccattttc

SEQ ID NO: 1023165 - DNA, 120 bp, Artificial Sequence
  ENSG00000257809_0 (sequence is synthesized)
tttctccagcgccacctgggcacagaacccgctcggaggtggcctcctggtggctggaacgtgctttcgcctgcggggcccagtgtccggaccccactggatctgtggaaaaaaaccaaa

SEQ ID NO: 1023166 - DNA, 120 bp, Artificial Sequence
  ENSG00000257809_1 (sequence is synthesized)
gttgcgaagcgctggagcccgtgcagcaaccggacagcagaatgaactccgctgcttttctatgttggctgagagaagggcgggagacttgcctcgtaaggcgcggcgaaggggtgggag

SEQ ID NO: 1023167 - DNA, 120 bp, Artificial Sequence
  ENSG00000257809_2 (sequence is synthesized)
ggcaagaggggcttcagaagcaggcctttggataatacatctgactctaggtatgaggtcgctgatattttccccattttacatcaatgaagtaaggatcaataggtgttgtgaagagac

SEQ ID NO: 1023168 - DNA, 120 bp, Artificial Sequence
  ENSG00000257809_3 (sequence is synthesized)
ggagaggaagaaggaatacatttttaagtggttataagactgggaaagggccacattatagatgcctttgtgtggctttcattacttttgcagacattgatttcaaaatatggctcttgt

SEQ ID NO: 1023169 - DNA, 120 bp, Artificial Sequence
  ENSG00000234327_0 (sequence is synthesized)
cgcggactttggcccaggcgcgtgggcgctgccgagaggctgggagcccgggaaccggttcctggacttgagcggagcgagaaagagcgcgccgcctgcacgactggactggagcggccg

SEQ ID NO: 1023170 - DNA, 120 bp, Artificial Sequence
  ENSG00000234327_1 (sequence is synthesized)
agagcctgaatttcaggttatgattctgtatggtttctttggtgctgcattagacctgagctctgattgaaaattcttccacgctcgctacattccaaaactttatctccaatatgaatt

SEQ ID NO: 1023171 - DNA, 120 bp, Artificial Sequence
  ENSG00000234327_2 (sequence is synthesized)
tccagatgcctcacaaggtctgagctccatctgaaggctttcccatgcttgtcacattcatagggcttttctccactatgaattctatgatgtcgaataaagtgtgagctctgattacaa

SEQ ID NO: 1023172 - DNA, 120 bp, Artificial Sequence
  ENSG00000234327_3 (sequence is synthesized)
attaatgtcattatcttgattttacagatgagaaaactcaagactcagaaacaataaaggttacagagatgaaattgacagagcctgaatttcagtatgtcaaacttcaatgtgccatta

SEQ ID NO: 1023173 - DNA, 120 bp, Artificial Sequence
  ENSG00000234327_4 (sequence is synthesized)
tacttttaaatcctacagaacagattgaatcacaacttctacttttacatgagagaagacaatgggtcctatgacttactgtcagtttccttttcctgatttaattagctgcttctgtat

SEQ ID NO: 1023174 - DNA, 120 bp, Artificial Sequence
  ENSG00000234327_5 (sequence is synthesized)
ctaattttgctaggaatggaggaataaggcaaattccctaaactacatattgacatttatactaatgtgaaaacctcaagtccatttgcagacttttggattagattctgtcccagaaag

SEQ ID NO: 1023175 - DNA, 120 bp, Artificial Sequence
  ENSG00000234327_6 (sequence is synthesized)
acatccaccctagagttcaggatatcatacccattttactgttcccctggcacaattcatagtaaggaaaaacagacaaggggaaagctattagattctcggtgctgctaaacaggacac

SEQ ID NO: 1023176 - DNA, 120 bp, Artificial Sequence
  ENSG00000234327_7 (sequence is synthesized)
acaaggacaccattttgtgatgatgatggtgctttatgcagcttccaccatttacaagattttcctgtggtgtggaacctctcatgataaagcaaaggaactagaagcttattccagtca

SEQ ID NO: 1023177 - DNA, 120 bp, Artificial Sequence
  ENSG00000234327_8 (sequence is synthesized)
agatttctgatttatcttgtggtaagcatttgggaaggacatatctgcacatgacctgagactaagtactatacactgaatcagatgaaaattgctcttaggaagcttacaattttccaa

SEQ ID NO: 1023178 - DNA, 120 bp, Artificial Sequence
  ENSG00000234327_9 (sequence is synthesized)
cacaaagtttctttccactgtgaattctttgatgctgaataagttgtgagctccccttcaaatctttcccacacccaatgcatttataaggcctctctctcaccttgtatggattctctg

SEQ ID NO: 1023179 - DNA, 62 bp, Artificial Sequence
  ENSG00000234327_10 (sequence is synthesized)
catttataaggcctctctctcaccttgtatggattctctgatgttctgtaaggactgagggt

SEQ ID NO: 1023180 - DNA, 120 bp, Artificial Sequence
  ENSG00000234327_11 (sequence is synthesized)
gatcgggccactgcactccagcctggcagcagtgtgagactccgtcccaaaaaataacaaacaaacaaaaaagacaccagagggctttgggtccctctctctctgccatgtgaggaccct

SEQ ID NO: 1023181 - DNA, 120 bp, Artificial Sequence
  ENSG00000234327_12 (sequence is synthesized)
gccatgtgaggaccctgtgagaaggcagccagggagctctcaccagaacctgaccatgttgggccctggtcacagccttgcagcctccaaaactgagaaaataaatttctgttgtctggc

SEQ ID NO: 1023182 - DNA, 120 bp, Artificial Sequence
  ENSG00000234327_13 (sequence is synthesized)
cagcaaaacttctctaccccggcctcgggcaggtgcccgcccggggagggggctgtcgtccaggccaggtacaactccccttcccacccttcactccctacccaagggtctcgagaaaag

SEQ ID NO: 1023183 - DNA, 120 bp, Artificial Sequence
  ENSG00000273972_0 (sequence is synthesized)
cttttcacttcagcaaagttggttttattagctctacttcccccagtttggtagtaatccagctcacaaatccatccttacagcctactaatccatgttacatcctactagttaacgatt

SEQ ID NO: 1023184 - DNA, 120 bp, Artificial Sequence
  ENSG00000273972_1 (sequence is synthesized)
gtcttctaaatgaggaatgccttccaattatttttatgtgcaaatacaatactgcaggtgcttaaacatcaataatggtaaaaacaacatggtaattgctctagactgaatgtttgtatt

SEQ ID NO: 1023185 - DNA, 120 bp, Artificial Sequence
  ENSG00000273972_2 (sequence is synthesized)
acaggagtaattaaggttaaatgagtccacaagggtagggctctgatccaaaagaaatagtgtccttataacgggaggaaccagagagctctctctctctgccatgtaagaatacagtaa

SEQ ID NO: 1023186 - DNA, 120 bp, Artificial Sequence
  ENSG00000273972_3 (sequence is synthesized)
gaaggttgctgtctacaaactaagaagagggccctcaccagaattcaatcatgctggcaccttatcttggactttcaacctccagaattgcaagaaaataaatttctgttctttaagcca

SEQ ID NO: 1023187 - DNA, 120 bp, Artificial Sequence
  ENSG00000273973_0 (sequence is synthesized)
gcatacgatacactgttattgcaagtgttgtgacactgtggtcttaaacccttgctctcttttcaccgattgtacttcagccctgcagggtctaacatcttgtccttaaccttgttatga

SEQ ID NO: 1023188 - DNA, 120 bp, Artificial Sequence
  ENSG00000273973_1 (sequence is synthesized)
ttagacgtgagagtgtgggatgaagcctctaagaactaatgggatacgttggtcttgactgaactacctcaggagtggtctctgcagctttcagaggctgctcaatagacctttgtgcag

SEQ ID NO: 1023189 - DNA, 120 bp, Artificial Sequence
  ENSG00000273973_2 (sequence is synthesized)
ggttgacaggaagtgaaactcaattgtctgcttagtagacctgcctgggacccaacccggggccccggatgtggccccccaccctgaggaggaacagggcaaaaaaggccggggagaaca

SEQ ID NO: 1023190 - DNA, 120 bp, Artificial Sequence
  ENSG00000273973_3 (sequence is synthesized)
ggctgttgttttttcctttccctttgttcattgcggtttctttctttctgatttttatgatgtggttgattaaagaaatgagcacctggaaccgtaggcattaaacgcctccttcttaga

SEQ ID NO: 1023191 - DNA, 76 bp, Artificial Sequence
  ENSG00000273971_0 (sequence is synthesized)
ttatagatggggtaaatcctcctgtctcagccccacaaagtgccaggaatataggcatgggccagtgtgccccgtc

SEQ ID NO: 1023192 - DNA, 120 bp, Artificial Sequence
  ENSG00000273971_1 (sequence is synthesized)
aagatggctaaagatacgtataaactttggtttgcattttattaaattatttgaatgcaaaacttgtataaagaatccattatgttctgtagctttctaattaaaatgttcaacatggaa

SEQ ID NO: 1023193 - DNA, 120 bp, Artificial Sequence
  ENSG00000231791_0 (sequence is synthesized)
ggcactccaacagccctgatcccaagtgtgaagctgtggcctcagctggacatcctgtctggtcttggttagcggaaaggcaacagaatgaatgtccactccagagataatcaaagatgt

SEQ ID NO: 1023194 - DNA, 120 bp, Artificial Sequence
  ENSG00000231791_1 (sequence is synthesized)
acatctattattaactacaatgtataattcacatgaatttctcagataaaacataagacttcaaagaaagtcatgcctgaaatttgcagctacgagctttacctacagtcttctaaaagc

SEQ ID NO: 1023195 - DNA, 120 bp, Artificial Sequence
  ENSG00000272620_0 (sequence is synthesized)
catgattctgaggcctccccagccatgtgcaactgcgtgtttactgctctgggcccagtgcctccctcgctcaatggagtgacggcatccaactcacaagacaggagactcaacagaatg

SEQ ID NO: 1023196 - DNA, 120 bp, Artificial Sequence
  ENSG00000272620_1 (sequence is synthesized)
gcatccaactcacaagacaggagactcaacagaatgaccaagtggagaagacgtctaagttctcagcggtctcagccgaatgactgaagaggaaccagggacagggatgactcacatggg

SEQ ID NO: 1023197 - DNA, 120 bp, Artificial Sequence
  ENSG00000272620_2 (sequence is synthesized)
aagaggaccccactttgttctgtttgattctaagaggacacagactgcttcattcatttcagtttccccagcacctggcttaactctcagacatgttagacggtttgtaagcaccggctc

SEQ ID NO: 1023198 - DNA, 120 bp, Artificial Sequence
  ENSG00000272620_3 (sequence is synthesized)
tactgaactggcatcaaatcatgacctggttcagaagagacacgaggactggatctgttctaaacagattgtgcaaaggggaaagacacagactcagcatttccacagcttttaacattt

SEQ ID NO: 1023199 - DNA, 120 bp, Artificial Sequence
  ENSG00000272620_4 (sequence is synthesized)
cagcgagaggtgagaaagcatgtcaggaacacaggcccggccgatgaaagtgtctgatgctaacacatgaactgtcttctgctgggcacactaaggggccacaagcaagctacgccccag

SEQ ID NO: 1023200 - DNA, 120 bp, Artificial Sequence
  ENSG00000272620_5 (sequence is synthesized)
agccactccacattctctctgggtgcactggccctcggccacgcaaggccgcgccagcctccgaggtgagccagaaggacacacacctgtggactcgatgtccctgacttgggctcgatg

SEQ ID NO: 1023201 - DNA, 120 bp, Artificial Sequence
  ENSG00000272620_6 (sequence is synthesized)
gccagccccagggtgactccgcccgccagcgctttcttcaggctctccttgacctccgtcagctccagctccaggctgacacgctccgcctccttctgccggcactcctcctccagctgc

SEQ ID NO: 1023202 - DNA, 120 bp, Artificial Sequence
  ENSG00000272620_7 (sequence is synthesized)
ttcagcttctcctccaggatcgcctgcggcttcctgcctggaattcccagaaacgccgttactcccgcggcaggcacaggttctccaaacaacagagaaggcacctggtccccaagaaga

SEQ ID NO: 1023203 - DNA, 120 bp, Artificial Sequence
  ENSG00000272620_8 (sequence is synthesized)
acttccacaaaacgtctgaggtcgagctcccctgacttaggtcctcgttgtgaaacttaaattcagcagttctctaagggatcagagtccttctcctaccatttccctttgctgcagccg

SEQ ID NO: 1023204 - DNA, 120 bp, Artificial Sequence
  ENSG00000272620_9 (sequence is synthesized)
ttgaggactcggaccaggaaagaggagatgctgattctgacgaaggccaggagctcctggctctgggcctcaatgttctcattttaaaacgtggaccctaaactccacagttcccaaagc

SEQ ID NO: 1023205 - DNA, 120 bp, Artificial Sequence
  ENSG00000272620_10 (sequence is synthesized)
tgccaccttcttggagtgtgaaccctgtcctcccctaacgctccgccgatccttcagtcatcttatttgcgcccgaggcaatgaacagtagctcagcttgcatctctactggacatggca

SEQ ID NO: 1023206 - DNA, 120 bp, Artificial Sequence
  ENSG00000272620_11 (sequence is synthesized)
cacatttctttaaggcacattcacttattttatttgaggtttgctgcagtgacctaagatgcacccactgggcagatgagaacaccaatcccaagaggtgaacggacttgtgcccagggc

SEQ ID NO: 1023207 - DNA, 120 bp, Artificial Sequence
  ENSG00000272620_12 (sequence is synthesized)
ctgggccggtggtggccggcaggcgaggttctctttttcaaagccaaaagcactcctggccctcctgcatcttcactatcctgcaagctgggaacacgggagaaatgctacttctgtctc

SEQ ID NO: 1023208 - DNA, 120 bp, Artificial Sequence
  ENSG00000272620_13 (sequence is synthesized)
attaaactccatgccccgtcccattctctggcacagcctcctcccgtagggtcagcctcagactgcaggccacatcctgggcctcctatagggtcagcccgacctgccctgccaacacct

SEQ ID NO: 1023209 - DNA, 120 bp, Artificial Sequence
  ENSG00000272620_14 (sequence is synthesized)
gccttccctcctctaaactccaaaagcatttcccttcatcagatcattgaggcacaaagtccagcaaggctggagctgctaaccacctgctgggtgtgcgtcagctcctccccgcgcggc

SEQ ID NO: 1023210 - DNA, 120 bp, Artificial Sequence
  ENSG00000272620_15 (sequence is synthesized)
gagccatgggaaggccacagcctcttctctggaccacccagggctctgaggcatctgaagcccccgtcccagcccaggccagtacaatctcaatctaaggagccagtcttccgtagtcta

SEQ ID NO: 1023211 - DNA, 120 bp, Artificial Sequence
  ENSG00000272620_16 (sequence is synthesized)
agcaccgggctggaagggaggccatgcgtaggtaagcggtgccaccccaggctcaggagctgagcgccagctcccgccagcaggaattgcacgcgcctggcccagggctgccactctggc

SEQ ID NO: 1023212 - DNA, 120 bp, Artificial Sequence
  ENSG00000272620_17 (sequence is synthesized)
tgcaaactcagtttctgtgacttcagtccctctctggtgtctgtattccattagcctggcctcttccctgatgcatcccaagacagatgctgccttgctctcgcctgtcccttctcaaca

SEQ ID NO: 1023213 - DNA, 120 bp, Artificial Sequence
  ENSG00000272620_18 (sequence is synthesized)
aacgaggggctgcttctacccttgtctggacttctgaatattactgacccctgtgggctaccctctgtagagaaatccagctgatccctcctacccggtgaccagaatctactgcgtcct

SEQ ID NO: 1023214 - DNA, 120 bp, Artificial Sequence
  ENSG00000272620_19 (sequence is synthesized)
gcggatacaggggccatcctccagacaatctctgttgtcagcgccagaagccggaacaggtcccccagcacctcccctgcctcggtgagcagcgtgtgggtctggccctggcctctgcct

SEQ ID NO: 1023215 - DNA, 120 bp, Artificial Sequence
  ENSG00000272620_20 (sequence is synthesized)
gcacgccgcatgtttgaccacacaggcacctgcctcggggttaccagcaatgtttccaagccccaagaaacactgtgagataacccactcttactaaataaaatgacagccttggtgagc

SEQ ID NO: 1023216 - DNA, 120 bp, Artificial Sequence
  ENSG00000272620_21 (sequence is synthesized)
aataggtcctttgggcaaagcagaatgaaatctccagtctctaatacaaacatgcaccctgggcagtcacccacacccttcataccggcgttcacttcaatagccgctcgaaggtctttt

SEQ ID NO: 1023217 - DNA, 120 bp, Artificial Sequence
  ENSG00000272620_22 (sequence is synthesized)
ctttccttgcggagctgggccagcctattccgcagggcctctttcctcttcagcagctcctcctctttggtctgtagccgcttggcatctgcttctacccggttcttgccatacttgtac

SEQ ID NO: 1023218 - DNA, 120 bp, Artificial Sequence
  ENSG00000272620_23 (sequence is synthesized)
tgggcagcatcttgagaagaaaaaaaagcagcaattaaaaattaggtttactagcctgggaaatatgggacgatcccttctccacaaaaaatacaaaattagccaggcatggcggcacat

SEQ ID NO: 1023219 - DNA, 120 bp, Artificial Sequence
  ENSG00000272620_24 (sequence is synthesized)
agctactcaggaagctgaggtgggagaatcgcttgagcttgggagcttgaggctgcagtgagctgtgatcctgccactgtgctccagcctggatgacagtgagaccccgtgtcaaaaaaa

SEQ ID NO: 1023220 - DNA, 120 bp, Artificial Sequence
  ENSG00000272620_25 (sequence is synthesized)
gtgtcaaaaaaaaattaggtttattcaagcagataatggggtaactcaaaaagcctgttgaatcagccaactcagtaaacaaacacaaagcattattttgctaattcaacaagaaaagga

SEQ ID NO: 1023221 - DNA, 120 bp, Artificial Sequence
  ENSG00000272620_26 (sequence is synthesized)
cagggctggtatgaaccaagcagaaaagtgactagttcaaattctccaatattctttgaatcaaattcttaaaaacgaaaacagaatattaggaaattcctttaattcacttccctttga

SEQ ID NO: 1023222 - DNA, 120 bp, Artificial Sequence
  ENSG00000272620_27 (sequence is synthesized)
ggcacacggcttataattaatctgcaacaaggtggagaatgaacattctataatcggaaaagacaggagtaatatcaaaaataatgtctgaaatttgcttccttctctacgtcttcaaat

SEQ ID NO: 1023223 - DNA, 120 bp, Artificial Sequence
  ENSG00000272620_28 (sequence is synthesized)
gcactgagattagcacccggcacggagtgtggcacaataaatgcttgtttagtgaataaatgaacaacggatacatgaagaggcaaccaggagcggtatctggagcctgactgtctagga

SEQ ID NO: 1023224 - DNA, 120 bp, Artificial Sequence
  ENSG00000272620_29 (sequence is synthesized)
aggagtcccagcttacacttgtagctgcatgacctggaacagggcacgaatccctctgtgcctcagtttccctcatccgtgaaatggggatagtaagagcaggcaattcactgagtggtt

SEQ ID NO: 1023225 - DNA, 120 bp, Artificial Sequence
  ENSG00000272620_30 (sequence is synthesized)
acgaggattaaatatttataaagcacttagaacaaacacaaatgggcaacacataaatgcttatttcataaaatgaataaatgaagaggaaactagctgtagggaaaatttacagacttg

SEQ ID NO: 1023226 - DNA, 120 bp, Artificial Sequence
  ENSG00000272620_31 (sequence is synthesized)
gcaacttcacatcaccagtgaaaacagctttcaaaacctgaccccatgctctctcctattatgttggcttttcaataacagtaatttaggacaacacctctttgttaagacacatggaag

SEQ ID NO: 1023227 - DNA, 120 bp, Artificial Sequence
  ENSG00000272620_32 (sequence is synthesized)
agatgaaggttctaacaaaactcggatggaggatcaccgatttcaaagcttccgtggtctcccagtcgcttctaacaatcactcacgcctgaaggcaactcccaggccttcctgactgca

SEQ ID NO: 1023228 - DNA, 120 bp, Artificial Sequence
  ENSG00000272620_33 (sequence is synthesized)
caccccaagtgtctgactccctcacaaggctagaaactacttcaggtagaagccacaggggtggcataatgattaagaataaaaacactggactcagagaggtggctagaaacccacact

SEQ ID NO: 1023229 - DNA, 120 bp, Artificial Sequence
  ENSG00000272620_34 (sequence is synthesized)
ccaccctcccttgctccatgactctgcaagcaacctccggagaagctcagcttcaccctctctaaagcagaaacgagaaggaatcctgtgtgtgtgtatgtgtgtgtgcgtgcgtgtgca

SEQ ID NO: 1023230 - DNA, 120 bp, Artificial Sequence
  ENSG00000272620_35 (sequence is synthesized)
tgcgtgttttaaattagaacgttatatctgaaaaaaatctaacaaaatgatacgacgcctgatgtagtggacattcactgacaattcttaccatatcagcgataagtgattcccagagcc

SEQ ID NO: 1023231 - DNA, 120 bp, Artificial Sequence
  ENSG00000272620_36 (sequence is synthesized)
ttgtccactcagggacagcagggagccatttctagcacctgtcctaaatgctggatttgccaattcttgcaacgtaagttatcatgatttcaatgaaatactgcatttatgaaggcataa

SEQ ID NO: 1023232 - DNA, 120 bp, Artificial Sequence
  ENSG00000272620_37 (sequence is synthesized)
aaagtgatcactccccagtcaattttcccctaatcaaaagaaccacatagaatgacagcaaaagcgtcggcagcctgaggagaggcgaagcattcgacaatctgaaacaaaaggatcgct

SEQ ID NO: 1023233 - DNA, 120 bp, Artificial Sequence
  ENSG00000272620_38 (sequence is synthesized)
gtttgcagctaaggttaacaacatatttggcaaacagggccaagtccaaactctactcgcttatttctaaactaagctgtttccccaatgaactcaatgcaatcacctataaatttccac

SEQ ID NO: 1023234 - DNA, 120 bp, Artificial Sequence
  ENSG00000272620_39 (sequence is synthesized)
atcttttggtccccatgtaataaatcccatctaatctataatgcaaccggctggattcaagcaaaaacacggaatgccattatttttctcttttgtcaccattagacgtcaccacagtta

SEQ ID NO: 1023235 - DNA, 120 bp, Artificial Sequence
  ENSG00000272620_40 (sequence is synthesized)
ataaaaactccctacagaacatcccataaaataaaggaataaatcatctaggaaataaagtcagcacaggtactgacagagaaacaccatggcgattgagactccgtgggactccgattt

SEQ ID NO: 1023236 - DNA, 120 bp, Artificial Sequence
  ENSG00000272620_41 (sequence is synthesized)
tgcttgtaacaaagctttccaggtgtgagctgctcctctcccccatctgcccctcctcaaagaaacaacactaaaagaggtgaaagtaaatacacctgatacattcaggaaataagattt

SEQ ID NO: 1023237 - DNA, 120 bp, Artificial Sequence
  ENSG00000272620_42 (sequence is synthesized)
gccagataaggtcaaaggaagttagtacattaaacaaatggtggtaggagggaggatttggcccaactggctccaacctatctggtcaacacgtatgttgggtagaacagaggtggagaa

SEQ ID NO: 1023238 - DNA, 120 bp, Artificial Sequence
  ENSG00000272620_43 (sequence is synthesized)
aagcctagatcagggatgtatacgcttccttggggcagacgcagcctggccctgcggagcgatttcaagcctcgttcacgaacatggccaaggacactgccagcctcttcattcccctgt

SEQ ID NO: 1023239 - DNA, 120 bp, Artificial Sequence
  ENSG00000272620_44 (sequence is synthesized)
gtggatgctccaactccaaaagtggaaccacagggcaaatgaatgtcggcacgtgtcggtatggcagcctcgctcttcgacagctggtgtgggggttaccacctggggctagctggcctc

SEQ ID NO: 1023240 - DNA, 120 bp, Artificial Sequence
  ENSG00000272620_45 (sequence is synthesized)
atcttcgttagcactgagactggtctaccagttgcacagattcagatttgaaaatctcaggtgcaaatcccaagtggcgatggcatgtaaccacatcaaactcaacatctgcacctaact

SEQ ID NO: 1023241 - DNA, 120 bp, Artificial Sequence
  ENSG00000272620_46 (sequence is synthesized)
cccaccttctttctctgggaaatcttcctggacatgcccagatggactcaggagcccatcacctgtaaatccccacactgcagccctgccacttgcttgtctgcatgtgtgggtccgctg

SEQ ID NO: 1023242 - DNA, 120 bp, Artificial Sequence
  ENSG00000272620_47 (sequence is synthesized)
gaccactttggtgtatctttgagccccttgagtgaaaaaatgctgcctggctggctccctgattagacatccaacataatgaggactaacaccaatacaaacacttaagagatgacatat

SEQ ID NO: 1023243 - DNA, 120 bp, Artificial Sequence
  ENSG00000272620_48 (sequence is synthesized)
cgccctagctggatctactacagggaagggaagagggtgctgggtccaggcaggctgagtgtctcatgtcttaatgcttctctgcccaatctatttccggctggatgtggagtctgaagg

SEQ ID NO: 1023244 - DNA, 120 bp, Artificial Sequence
  ENSG00000272620_49 (sequence is synthesized)
cctggcacccactctggctctgtgatttaccagctgtgagccttgggggagctgcttactctcttggtgattcttttctcatttctatgatggggtagaggataatgcctatgcttacaa

SEQ ID NO: 1023245 - DNA, 120 bp, Artificial Sequence
  ENSG00000272620_50 (sequence is synthesized)
agtggctgtgggaagtaaaccggatgggataagaatggcttgctgtggaccacaggcaccgcaggataaccattcctcagaactcctcatactgctctagtgcttggaggtccgtgtatt

SEQ ID NO: 1023246 - DNA, 120 bp, Artificial Sequence
  ENSG00000272620_51 (sequence is synthesized)
acctcagctattccaaccgcaccaaccacgggagccacgtgtctacgtctgacagataaagatgctgagtttagagtctgcaaggcttgacaaccacagatcagggacaggagctgaggt

SEQ ID NO: 1023247 - DNA, 120 bp, Artificial Sequence
  ENSG00000272620_52 (sequence is synthesized)
ctcctgacctggagcccagggccacccggagctgcaagaaacctgcactcacaactgcctcctattttaaaatgctgagtcgatcccacaggtggcaaaccagttctgggcttcaattta

SEQ ID NO: 1023248 - DNA, 120 bp, Artificial Sequence
  ENSG00000272620_53 (sequence is synthesized)
caagcagtcagaaaagctgggttgaaatcgccactgtccttctatgtggctgatgaggaaggatgacggtgcccaccgctccatctctccagctgaccccaagctggcactcacgggtgg

SEQ ID NO: 1023249 - DNA, 120 bp, Artificial Sequence
  ENSG00000272620_54 (sequence is synthesized)
gcaggctcagacaggcccagctccaccaagtgcacttgaagccggaatgcaagacatccgatggtatacttactcgaacccgtccttttcacaacagccgcgggatccgctttctttggc

SEQ ID NO: 1023250 - DNA, 120 bp, Artificial Sequence
  ENSG00000272620_55 (sequence is synthesized)
tgactgctcagagtcttcccttttcctgtgaccccattagacgccacggggggctttttacccttgagctgttgaaataaacatataagaacattaaaaataaacacaaagtcaaacaaa

SEQ ID NO: 1023251 - DNA, 120 bp, Artificial Sequence
  ENSG00000272622_0 (sequence is synthesized)
tgcactgcagagggaaggtgggggtagaagggttgagggtaccaaggaaattaaaattttaagggctaattccccttcattcaagaaatatttactgtgatgaagacatgttccatgcag

SEQ ID NO: 1023252 - DNA, 120 bp, Artificial Sequence
  ENSG00000272622_1 (sequence is synthesized)
aggaaatggccaatgcaaagagcccctgactggagggcatttggcacattctaggagagtgaggaggattctatgggccaggaattcagacagggcacagtgttgatggcttgtctgtgt

SEQ ID NO: 1023253 - DNA, 120 bp, Artificial Sequence
  ENSG00000272622_2 (sequence is synthesized)
cctggctgggatggctcaaatggttgtgggactatttgacttgaaaggctggagcctggaatcatttgaaacattgttcactcatgtgtctggcacctgcgttagaatgactgaaggcta

SEQ ID NO: 1023254 - DNA, 120 bp, Artificial Sequence
  ENSG00000272622_3 (sequence is synthesized)
catcaactagagtacttacatccggtctctccatgtgacttggacttttcacagcgtggaggctggatttcaaaggtcaactgagaatggcagaggactcatcccacctttgccacatgg

SEQ ID NO: 1023255 - DNA, 120 bp, Artificial Sequence
  ENSG00000272622_4 (sequence is synthesized)
tgacttgccccactcccccaggtgaccttgctcgtgcatgtggatatttgctcagattaagaatgtttcccacaaaattgcttactctctttcattctgtccgtggttgcttgtggttta

SEQ ID NO: 1023256 - DNA, 120 bp, Artificial Sequence
  ENSG00000272622_5 (sequence is synthesized)
tttgttgataactgagactatttaaagattgccaaaacaaaagccatttcttttctccccgaatagcctcattttttctattccctttttcccctcctattaacatttctggggactcta

SEQ ID NO: 1023257 - DNA, 120 bp, Artificial Sequence
  ENSG00000272622_6 (sequence is synthesized)
aagcagagctcaagatggttcaggaccacggagagcgcaaggaaggggaactaccaaagcactttagtcatgcaggtggggaaagagatgatcctaaaattgtttttatttttctgtttt

SEQ ID NO: 1023258 - DNA, 62 bp, Artificial Sequence
  ENSG00000272622_7 (sequence is synthesized)
tcaacctccgcgtcccgggtccaagcgattctagcgcctcagcctcctgagtagctgggatt

SEQ ID NO: 1023259 - DNA, 120 bp, Artificial Sequence
  ENSG00000272622_8 (sequence is synthesized)
gcgtgagccaccacgcccagccaatagtggaattgttgccggacaatatttatttaaaagacattattgtaaagagtaacagtgtaattctggctccttgaaatttgaggggaatgattt

SEQ ID NO: 1023260 - DNA, 120 bp, Artificial Sequence
  ENSG00000272622_9 (sequence is synthesized)
aaatttgaggggaatgatttttctggacattcgaccagtgctttctaaatttctccactgaattctatctaatgacagatgagaggacactgaaagtaggagtagccataagtcaccagt

SEQ ID NO: 1023261 - DNA, 120 bp, Artificial Sequence
  ENSG00000272622_10 (sequence is synthesized)
gcaaaatgtcttttgaagtttgcatttattgattgctaccatttatgtaaagttttacagttttgacagtcatagggttcaccaatccaccatagaagagaattaagtcatgcggacaca

SEQ ID NO: 1023262 - DNA, 120 bp, Artificial Sequence
  ENSG00000272622_11 (sequence is synthesized)
gcagggtttagaatggatgagtagaggagtgtgtgcaggctccagtccccaaagtctctaggactgtcctagaacctgcagctcatctgtcaattctgtcaactactcaggatcctctca

SEQ ID NO: 1023263 - DNA, 120 bp, Artificial Sequence
  ENSG00000272622_12 (sequence is synthesized)
agaattatccccccatacccaccttttaaatttcctcaagctagtttcatttgagttttgtcacttgcaactgaatgagccctgctaatgcagatagattcaattgagaaggggaattct

SEQ ID NO: 1023264 - DNA, 120 bp, Artificial Sequence
  ENSG00000272622_13 (sequence is synthesized)
aggctaggagtacaaggttacaggcaaggagacaggaacatagcttgggatttcctggggcagtgagaaaactgactttaaaaaaatggaatggtttctaaaatgtttgtacaacttctc

SEQ ID NO: 1023265 - DNA, 120 bp, Artificial Sequence
  ENSG00000272622_14 (sequence is synthesized)
tataaattctttcagcttcttctgagggcagctgaacaagaagtataaaaattttgaatgctgataacatttgacctagcaattccatctctagaaataaattctacagtagtaatctta

SEQ ID NO: 1023266 - DNA, 120 bp, Artificial Sequence
  ENSG00000272622_15 (sequence is synthesized)
aaaacgtattcactgaaatgttattttctcatagaaaatgtcgaaacaacatatgtgtccatcaatagagaacttgctaaatgatttatactacctttacatattgaaatacgcatagcc

SEQ ID NO: 1023267 - DNA, 120 bp, Artificial Sequence
  ENSG00000272622_16 (sequence is synthesized)
gtggaagataatttagtagatctatatgtcccattatggaacaatccccatggtggggggaaaagtaaggtgcagaactgtatcatagatgttctctctctctctctttttttttggaaa

SEQ ID NO: 1023268 - DNA, 120 bp, Artificial Sequence
  ENSG00000272622_17 (sequence is synthesized)
gcacatgtatgcttttatatacacagaaaaattctagaatggcaaacaagatatctttgcaatagtttttttctgggaggggactcatttaaaaaaattctcccatattgcttgttttgt

SEQ ID NO: 1023269 - DNA, 120 bp, Artificial Sequence
  ENSG00000272622_18 (sequence is synthesized)
tttgttaaagacatccatgtattcctacttgggttaagccatgataactaaatatgattaaagttcagaacaataaaaaccttagagatgtatacataaatatcacttgcttaggaattt

SEQ ID NO: 1023270 - DNA, 120 bp, Artificial Sequence
  ENSG00000272622_19 (sequence is synthesized)
ctaggtaggtactattttaagccctctacatatattatttcattcaatccttggagcaactctaggagggaggtgttatcctctaattgcagatgaggttgatgaagcttaaagagtaat

SEQ ID NO: 1023271 - DNA, 120 bp, Artificial Sequence
  ENSG00000272622_20 (sequence is synthesized)
gatgccttgagtccatcctctggctccaaagcccttgtatttaactgttctcccttttgcatccctgtgctaaagtgactttgctataatatccacaaggaagaatttctgtgtaaaaat

SEQ ID NO: 1023272 - DNA, 120 bp, Artificial Sequence
  ENSG00000272622_21 (sequence is synthesized)
tagacttccttgcaggcagtctatcagtgatatccaataaagactcaataatggctaacaatacaaaccacacacacaagaaaaacttctccttttgtgccaggtacttagattaggtgt

SEQ ID NO: 1023273 - DNA, 120 bp, Artificial Sequence
  ENSG00000272622_22 (sequence is synthesized)
agtggttttcttaaactgattatcaaggtaaacaccacctcatacatttcagcagagagcagtggtttctctctccagcagtgggagccattgaatcaggacaatgccacacagttgggc

SEQ ID NO: 1023274 - DNA, 120 bp, Artificial Sequence
  ENSG00000272622_23 (sequence is synthesized)
tttcatgttagatagatcactcttgtggttttgggggatggcattataagagaggagactggagacaggggggctattgtcatgcagatttgttggatgtccacccagcattcacttttt

SEQ ID NO: 1023275 - DNA, 120 bp, Artificial Sequence
  ENSG00000272622_24 (sequence is synthesized)
ccatcttttgccaggggtacactacacaacatcaccagtcatttcatagaatggcaattagattaggcttaggtctgcactgccttccttcactccgctctgtcacttgccatcattgta

SEQ ID NO: 1023276 - DNA, 120 bp, Artificial Sequence
  ENSG00000272622_25 (sequence is synthesized)
aatgctgacaacttagtgcctttcatgcttcaagtatcaataagataggaatagtaatagtatcacattgaattattgtggagttttgaacagatgatacttgtgttatcagtgctcaat

SEQ ID NO: 1023277 - DNA, 120 bp, Artificial Sequence
  ENSG00000272625_0 (sequence is synthesized)
gcacagacagactcgacagaaaacatgcggaggcggcacagtgcagttgccaccaaaactgagctttagacaaacctaaactacagagtggtgcttggagagtcagaaaacttgggcagc

SEQ ID NO: 1023278 - DNA, 120 bp, Artificial Sequence
  ENSG00000272625_1 (sequence is synthesized)
caccaaggggaagccagggtccctggcgcagaagaggccagagaggccacatcttctgcacacctgaggcccgatggccctgcagaagggaggcaggttgggaagtgctagcgaagggcc

SEQ ID NO: 1023279 - DNA, 120 bp, Artificial Sequence
  ENSG00000272625_2 (sequence is synthesized)
agcactgaccctggctctggggtgatccaaggacgcagctcagaactgcttagaagaggagccggagctgcctgaggaaatggaatggcagccacagaaacgatggaaaagcgtccttcg

SEQ ID NO: 1023280 - DNA, 120 bp, Artificial Sequence
  ENSG00000272625_3 (sequence is synthesized)
tataaattctggggcagatctgcacctgcaggacctccccagttgctatagatatttggaatagatcaagtgaaaaccgaacaagcagaacagatgcctcattttgcttacaaaactgct

SEQ ID NO: 1023281 - DNA, 120 bp, Artificial Sequence
  ENSG00000272625_4 (sequence is synthesized)
ttgagaattgggacgtggctacaccccacgaagtacatccctctgaatttcacccacatcagaacccagagcccaggagatactcacatttggacggtttccaaaggcagcatagaaggg

SEQ ID NO: 1023282 - DNA, 120 bp, Artificial Sequence
  ENSG00000272625_5 (sequence is synthesized)
ctgcttagacggggcaaacagattcttgatatcatttagacactcaattttgaacttctctggtttcttttctatcacttctctaagaaaaaaatacaaatacaatcaccaatctcaaaa

SEQ ID NO: 1023283 - DNA, 120 bp, Artificial Sequence
  ENSG00000272627_0 (sequence is synthesized)
taactaaaaaaaattcctttctcatctgtactttaggagattgcagaatcttgtggcgagggtattaaaactgaccattcaaagtcatagcccatttcttggtacttgcatttctctctg

SEQ ID NO: 1023284 - DNA, 120 bp, Artificial Sequence
  ENSG00000272627_1 (sequence is synthesized)
tgtaaaattggtacttcatagccttctgatcctgtatttctgatacttattgatcaattatgattgaaagccaggttgtttaacgctctgtcagtcttcaaatgaacttttatttattaa

SEQ ID NO: 1023285 - DNA, 120 bp, Artificial Sequence
  ENSG00000272627_2 (sequence is synthesized)
tctgatttaaataaatttcatttcccaaagatgagtaggtatgaaaaataatactcagaagagattgttcttgtggggagaactgcttctacaggatctagctttgattttgtatctttc

SEQ ID NO: 1023286 - DNA, 120 bp, Artificial Sequence
  ENSG00000272627_3 (sequence is synthesized)
aatctttttaaaatcaactttaacgaatttaaacctattttaagtgtacaagtaataagtttgacaattgtatgtgacttctaccacaataaaatatagaacatttttatcattctataa

SEQ ID NO: 1023287 - DNA, 120 bp, Artificial Sequence
  ENSG00000272626_0 (sequence is synthesized)
gaaaggagctgttctcccgcgtccccggtgcccctcccctgacagcacaagggaacccggaggggttgcaggacggttccaggaatggcgccctttcttcagaaccatggtatcatacct

SEQ ID NO: 1023288 - DNA, 120 bp, Artificial Sequence
  ENSG00000272626_1 (sequence is synthesized)
aacagccctattctggtcactccggaagctgacccgtctatgcacggaagaaggttgaggaaacagcaagccctgctctagtcacactgggagctgactagtctgtgcatggctgaagct

SEQ ID NO: 1023289 - DNA, 120 bp, Artificial Sequence
  ENSG00000272626_2 (sequence is synthesized)
tgaagaatcatcatcagatgagcaaatgtggccagaagtcttagtcccagtaatcttctttgtattattcattatattgctataaccaccatgaaataaaatattttatttttcatccac

SEQ ID NO: 1023290 - DNA, 120 bp, Artificial Sequence
  ENSG00000275484_0 (sequence is synthesized)
tcattcttcctccagtgaccagggagaatgtacatgggtgggggatttgtaattcattaatcagcacgaggcaacggaccagtttcaacaccacaggcttcttgggtgactcagcgggaa

SEQ ID NO: 1023291 - DNA, 120 bp, Artificial Sequence
  ENSG00000275484_1 (sequence is synthesized)
tgctccgattcaaggcgatggaccgcccgagcgtccccatttgtgaaatgtttccccatgaagaccctggcattctccttcctttggggtttcgggttgttggtttttccggtggtgagg

SEQ ID NO: 1023292 - DNA, 120 bp, Artificial Sequence
  ENSG00000275484_2 (sequence is synthesized)
cgcaggcctgggttgggatttgctgggcaggatacctgggggtatgcctggaccctcccagagggggtcccctcctccctctccaagggctgccggggagaacacgctcagaggaggcag

SEQ ID NO: 1023293 - DNA, 120 bp, Artificial Sequence
  ENSG00000275484_3 (sequence is synthesized)
ctctaacccagggctggggactgccctgcttcatgattttcctgggggagagtcatgtggtccccaaggcttgggtgccctatagccacaccaccaattaaatcactgggtaataagttg

SEQ ID NO: 1023294 - DNA, 120 bp, Artificial Sequence
  ENSG00000275485_0 (sequence is synthesized)
ctgccacctgcatctttggctttcttatcagaagcagcaaagggagtcagaacagattattccaatgtttgaaagacaggtggttcctgtaagttttatgcaaggtgtttcctgaatgtg

SEQ ID NO: 1023295 - DNA, 120 bp, Artificial Sequence
  ENSG00000275485_1 (sequence is synthesized)
tgcatagccaagctgctcctggaactattctgtgtttacttagattttgtgtttgcctatttgacatatattaagtacagggacaaactaaaggctaaagttgtttacatcatcctttta

SEQ ID NO: 1023296 - DNA, 120 bp, Artificial Sequence
  ENSG00000275485_2 (sequence is synthesized)
caaaactcatatcacagacttcccagtgacaaccatagaatgtctgtttttgctttatgcccaacaggggacatccccacctagatccatcccactgacttagcaataaaggcatagtct

SEQ ID NO: 1023297 - DNA, 120 bp, Artificial Sequence
  ENSG00000275485_3 (sequence is synthesized)
caggtcctctctctgctttgtggtctctgcttgtgacagagtttcacgtggccccctgtggcatgccatgaccctcatttctggggagaattgtaacattaaactttcttttcaatggca

SEQ ID NO: 1023298 - DNA, 120 bp, Artificial Sequence
  ENSG00000275481_0 (sequence is synthesized)
ttttatggatgaatgcatctgaggccagacaggaaaatgacttattgctggttgaattgctgattagtggctggattggaggtagaacccagatcatctgcctcttcattctactcatgt

SEQ ID NO: 1023299 - DNA, 120 bp, Artificial Sequence
  ENSG00000275481_1 (sequence is synthesized)
cctgtcatggaaattagtcaatccaattattattattatagaagtctgttttcaccagaaagtttgtgaactgacaaccgtaaaatctgtggtaaattcacaggcttcatcaatgacact

SEQ ID NO: 1023300 - DNA, 120 bp, Artificial Sequence
  ENSG00000275481_2 (sequence is synthesized)
atgaaatattgaccctcagcttcccagattgcaactccccaagtcttggtctgtttgctgttaggatttgttacaacttcttccttattgccttttgttacacaagcagtgctgaatatg

SEQ ID NO: 1023301 - DNA, 120 bp, Artificial Sequence
  ENSG00000275481_3 (sequence is synthesized)
ggctggatattggaaagagggcaagaaaatgagaacccacagttctgtgacgtgacaacactgattggccagtcactgttatctgcaggatgtgcttttcttaaggatgaacatattttg

SEQ ID NO: 1023302 - DNA, 120 bp, Artificial Sequence
  ENSG00000275481_4 (sequence is synthesized)
gtccacaagtttccaagacaagcacattcctgccaacatgatccttggacaaactgttctggaatttgaacttgctactggaagagggttaagtccaggacacacacacacacacacaca

SEQ ID NO: 1023303 - DNA, 120 bp, Artificial Sequence
  ENSG00000275481_5 (sequence is synthesized)
cacacacacatttcagtggggggcaagccatagttggttatgttagcacctcattatacaacagtttcaagataaagtgattccagatgtgctctcagtaagtacctagtacttatgttt

SEQ ID NO: 1023304 - DNA, 120 bp, Artificial Sequence
  ENSG00000275481_6 (sequence is synthesized)
ttaacccattaggctaaaaatctactttcagaattttggggaagccagagttagttaattaactagtcattcctagttacttcataaagttgattctaagtcgactataatttgcagtat

SEQ ID NO: 1023305 - DNA, 120 bp, Artificial Sequence
  ENSG00000275481_7 (sequence is synthesized)
gtttcatgttagaggatacccattataaccatatgaaacatacatatttatagacacatatatgtattttcacacagacttgcctttgacaatgattagaagttcatctgaagtactggt

SEQ ID NO: 1023306 - DNA, 120 bp, Artificial Sequence
  ENSG00000275481_8 (sequence is synthesized)
ttaatgatcattaggttcctttgtcccggaaatttcatttagaaacattaggaagatatatatctaagaagtagtattctagtttcttcttattaatgaagctgcagtgatagtcattgt

SEQ ID NO: 1023307 - DNA, 120 bp, Artificial Sequence
  ENSG00000275481_9 (sequence is synthesized)
gattctgaagcataaatttcatgagtaagtcctggttaaaaggctccctcccttgtttaaaaaaccaagatttgaaattttttgctttgtaacttaaatttacaaaaaagagttaaagag

SEQ ID NO: 1023308 - DNA, 120 bp, Artificial Sequence
  ENSG00000275481_10 (sequence is synthesized)
aaaagatgatgaatgttttccttgataattcatattattgttaggaatatggaatttttgcatcacttggccctagaaggtggagagctaaaggtgaacatttcattttgctttcaaata

SEQ ID NO: 1023309 - DNA, 120 bp, Artificial Sequence
  ENSG00000275481_11 (sequence is synthesized)
ttttaaatttgtctgcagaaattatgttttctgctgaatacaatggaagccttcttagctggtcttacttgagaatattgcatcttagtatgctcttttgattttattttgctctacagt

SEQ ID NO: 1023310 - DNA, 120 bp, Artificial Sequence
  ENSG00000275481_12 (sequence is synthesized)
aaatttttaaaaatttaggtatgatatctggcatcaaggacaacaccatttatttgccaaaggctgtaacctagggcattatacactaaatgggaatattggcaaacatactgttcagag

SEQ ID NO: 1023311 - DNA, 120 bp, Artificial Sequence
  ENSG00000275481_13 (sequence is synthesized)
gcaaagcagtctgggtatgatggactctggatccagactgtttggtttcatttcgcttctgctttttactagctgtgtgctttaatttcatgaatgtgaaagataaataataactcatga

SEQ ID NO: 1023312 - DNA, 120 bp, Artificial Sequence
  ENSG00000275481_14 (sequence is synthesized)
agatttagttaagtctgaacttgtaaaggaagcacttagaaccatgcctggcatatgttaagtacttctcaagtgttagcttaaacaaacaaacaaatctcaaattttgtctttgtcatg

SEQ ID NO: 1023313 - DNA, 120 bp, Artificial Sequence
  ENSG00000275481_15 (sequence is synthesized)
tcagagaggctaacatcaagtgatggctgaagcagcaaacagctagttaaatttaaaagaaaaatgatctttgggattaatcctatcttgtgaaaagttttctagagcttccatccagct

SEQ ID NO: 1023314 - DNA, 120 bp, Artificial Sequence
  ENSG00000275481_16 (sequence is synthesized)
gtggctaaagctagaggacaagaaggtgaggaaagtgtggcagagtgaatgccattgattaaagaaaggccaggaccttgctgtataacaattgtttctattatttctattttgagagaa

SEQ ID NO: 1023315 - DNA, 120 bp, Artificial Sequence
  ENSG00000275481_17 (sequence is synthesized)
agacccttgatgttacccgtcagcaggagatggatggtagtctttgtgtggattgacaaacattggtagtttaacaatgtgaagggcttcctttgcaggaaatgaaaaagttgtgatttt

SEQ ID NO: 1023316 - DNA, 120 bp, Artificial Sequence
  ENSG00000275481_18 (sequence is synthesized)
ccataagtcatttagagagtcactattgagccagccaggctgggcccgctagtctatacaatggttttgtgacaattagccttgtgctgttgcagcatttcagactcatggagcgttttg

SEQ ID NO: 1023317 - DNA, 120 bp, Artificial Sequence
  ENSG00000275481_19 (sequence is synthesized)
cttagaagacctctcttccttctggctgacacagccccatcccagggtgcagggcctgataagtggagtacaggctggatttcagccctaaccacccgctccccccaggacatggtacag

SEQ ID NO: 1023318 - DNA, 120 bp, Artificial Sequence
  ENSG00000275481_20 (sequence is synthesized)
tacacaaatggcacattgaaggtggtagccatgaagacaggtttttgaattttactttctgttcttcagctcaggaaatatgttgtttatttttgtttttcagtcatagtctacttcaat

SEQ ID NO: 1023319 - DNA, 120 bp, Artificial Sequence
  ENSG00000275481_21 (sequence is synthesized)
agctggaactggggaagagatggttcagtattttttgtcattgaatccaatggttgattgttaattattacttaagataatccacaaacatcctgctgacagtccaagactgttttctat

SEQ ID NO: 1023320 - DNA, 120 bp, Artificial Sequence
  ENSG00000275481_22 (sequence is synthesized)
cagaggttttatgaagccacttaatttagggttaaggtcctgctgaaccttacaggagtctaaaagcaaggagaaaggcatcagaatatcacacccttttagctataaatcatatttctg

SEQ ID NO: 1023321 - DNA, 120 bp, Artificial Sequence
  ENSG00000275481_23 (sequence is synthesized)
taatgctgttgctactttttttctatgtgctcttgcaatttaagatgatgcattttatttccaatggtttgcaatctgtaactgaaagacagaatgctcggaaaagcctctggctaaaaa

SEQ ID NO: 1023322 - DNA, 120 bp, Artificial Sequence
  ENSG00000275481_24 (sequence is synthesized)
ccagtctattgacatagaatcatgtcaggagtggccccaggagatttgtgggttttggcctgtcttgtttctcatccaatatttcttttcagtattatcacagttaaattcctcattgga

SEQ ID NO: 1023323 - DNA, 120 bp, Artificial Sequence
  ENSG00000275481_25 (sequence is synthesized)
tatgcaatagattaaaatcacattaaagtttggacttaaatcaagcatagcaaaaaatgattctttgacattagctcccaagattcttctattatggtttcagtggtcctgaactttgga

SEQ ID NO: 1023324 - DNA, 120 bp, Artificial Sequence
  ENSG00000275481_26 (sequence is synthesized)
agatgctgatcaggtaataactgttctgtgccctacaaggaggatgccacctgtaaaaaggcactgagaagttttattgtctcaaatatatttattctgattcttaagaaaacttgaaat

SEQ ID NO: 1023325 - DNA, 120 bp, Artificial Sequence
  ENSG00000250548_0 (sequence is synthesized)
gacagttagatcttggaactgagtccagcagcactgaggtcagagagatggctaaagctaaaagcaaactggatgctgttcaggaggttctcctttgtcatttttatctccaaatagaag

SEQ ID NO: 1023326 - DNA, 120 bp, Artificial Sequence
  ENSG00000250548_1 (sequence is synthesized)
acctctgttttcccagaagattaaatagtagaaaagaagtagcccaaggacataccatgccttttacagatatttataggacaatttccctcctgagagtgcccaagcatgggggatggt

SEQ ID NO: 1023327 - DNA, 120 bp, Artificial Sequence
  ENSG00000250548_2 (sequence is synthesized)
gaggaagatgactgaaggagaaagcaggaaaagggggtgtctgcatgtatgaggattggaagccctggacaactttcaggaagacagttctggtctgtagcaattaacacatggtcatcc

SEQ ID NO: 1023328 - DNA, 120 bp, Artificial Sequence
  ENSG00000250548_3 (sequence is synthesized)
tcagaaaaaggtcctctcaattatttcccagagatacccataacttaaaatgcaggaaccaagagatttgagcctagacatttggatgaaaagcgatttccacctggagaaagtcactgc

SEQ ID NO: 1023329 - DNA, 120 bp, Artificial Sequence
  ENSG00000250548_4 (sequence is synthesized)
ccttctgtgcagaggtaggtgccctgatacttgcctgacagctggaaagcgtggctcagaagaggtaggtgggagaagaggccacatagtatctccctgggcctcctggtgaaaaacttg

SEQ ID NO: 1023330 - DNA, 120 bp, Artificial Sequence
  ENSG00000250548_5 (sequence is synthesized)
tgtgtgatttttcaggcctgaccacaaacttggggaaagctgacccctaccccagacttggggcacagcccatgcgtggcagtctctggagggagctctcaaggtctcaggtctctctgg

SEQ ID NO: 1023331 - DNA, 120 bp, Artificial Sequence
  ENSG00000250548_6 (sequence is synthesized)
ctggtcgtagtcatcacatatttgcattcctagcccctgagccttcattcctgggtttatcagaagccttggggagaggtgttctttaggcgcctctgctgaggccttctttgggtgggg

SEQ ID NO: 1023332 - DNA, 120 bp, Artificial Sequence
  ENSG00000250548_7 (sequence is synthesized)
cagggaagggagagaaatcttgaagccgcttttccccacaatgactcagaatctagtacttccactcctagccttccccctcccttgctctcggccccagagtccataaaacttccagag

SEQ ID NO: 1023333 - DNA, 120 bp, Artificial Sequence
  ENSG00000250548_8 (sequence is synthesized)
ccttttgttcagggctctgtcagcagtgagaccaccccaacccgacattcctgctgatctacttgaccctgggcccctgtgtgttccatgggggaaatggaacagggagagtccacgctt

SEQ ID NO: 1023334 - DNA, 120 bp, Artificial Sequence
  ENSG00000250548_9 (sequence is synthesized)
tctctggtttcagatacttgcttataccattgcaggacatgactgaaagcttgactcttttgttttgggcttgttgccttaattgactattgtgacacctggcagctcagcgctccctct

SEQ ID NO: 1023335 - DNA, 120 bp, Artificial Sequence
  ENSG00000250548_10 (sequence is synthesized)
cccagttcaactgagctcctgacagagggactccaccttcaacttgccagggacaggcactcaaaggacgggcttcatttctgttgaaggctctggcttctcctaatatgtttctaattc

SEQ ID NO: 1023336 - DNA, 120 bp, Artificial Sequence
  ENSG00000250548_11 (sequence is synthesized)
atttctagattcagatctctctctacctctccatatcacacattcacaaacaataactgcctgaggaccaggagaagcacagggcctgcctcgttattcctcccctgcatgctgactctt

SEQ ID NO: 1023337 - DNA, 120 bp, Artificial Sequence
  ENSG00000250548_12 (sequence is synthesized)
ccactggggctgggcagagtcagcacatgcaggaggggaatcatgagccaggccctggccagatccagatttctagacatgagaactacccaaaccccagagacccagttcttccatcta

SEQ ID NO: 1023338 - DNA, 120 bp, Artificial Sequence
  ENSG00000250548_13 (sequence is synthesized)
ctttactgaggaggaaccagagagtctgaaaagtaagtgacttggccaaggtcacccaactggaacccagggcctaacctttgggttcaaactctgatcatgaccagactgcctccttga

SEQ ID NO: 1023339 - DNA, 120 bp, Artificial Sequence
  ENSG00000250548_14 (sequence is synthesized)
atcttctttctactttcccggtacagtttctgtgcagagctgagtccttgggtgcccaggactacactaagccctctcaagtcagtactttctaggaggctgtagcctaactggagagag

SEQ ID NO: 1023340 - DNA, 120 bp, Artificial Sequence
  ENSG00000250548_15 (sequence is synthesized)
aggtgagaccaggggttctcagacttgagcagatgttagaatcagctggtgggctagttaaaacacagatctgctggccccaccccaggttgctgattcagtaggcctgggatggggtct

SEQ ID NO: 1023341 - DNA, 120 bp, Artificial Sequence
  ENSG00000250548_16 (sequence is synthesized)
gagaatttgtacttctaacaagtttccaagtatggctgataagaaccactggacttaaccataaacaaccaaaagtaacagaggcagtgaatggaaaccgagcaaaggcaggtagagaaa

SEQ ID NO: 1023342 - DNA, 120 bp, Artificial Sequence
  ENSG00000250548_17 (sequence is synthesized)
ggagagaaatgagggtgacattgtttctaagggcaggaaatgaactccaggggctggtccttgggaggtccttctcttccctctaccttcatctaccctgacttcgggtgtatctagaag

SEQ ID NO: 1023343 - DNA, 120 bp, Artificial Sequence
  ENSG00000250548_18 (sequence is synthesized)
tttcacagtagcatataaattccccctctctgctggagggctctggccaacaggtgaagccaaaaccatcacctgtaggaggttacttagagctggctcctgtcccaacaccctcctctc

SEQ ID NO: 1023344 - DNA, 120 bp, Artificial Sequence
  ENSG00000250548_19 (sequence is synthesized)
ggcttccccgttcacatcgctgcagccggcacagctgcctgcctcccatggagcctgggggcacctgtcctaaaggctcaaggatgaagagtcgcggagggtggttgtggccatctcacc

SEQ ID NO: 1023345 - DNA, 120 bp, Artificial Sequence
  ENSG00000250548_20 (sequence is synthesized)
cacctctcccttgattcctccatgtactcacacaagccctggaaggccaaggacactgacactcagaaagctaagggagtgggtacattacaaaaggattgggagagggggagtggtaaa

SEQ ID NO: 1023346 - DNA, 120 bp, Artificial Sequence
  ENSG00000250548_21 (sequence is synthesized)
cagtgagcatggccttgctttcatagtcactaaggctgaatgtgggtcattgagatctaaactggtgtttaaatgtaaccgcacagaggtgagtcagacacacacaaggagaaaaagagc

SEQ ID NO: 1023347 - DNA, 120 bp, Artificial Sequence
  ENSG00000250548_22 (sequence is synthesized)
aaaagagagagagaagaaagaaggagacttagctctctcttaagtgggggtgaaaatccaggagcgaatctgaaatgatccacctctccaaatccgtccactgtttaattggctccatgt

SEQ ID NO: 1023348 - DNA, 120 bp, Artificial Sequence
  ENSG00000250548_23 (sequence is synthesized)
agctatagggaaattgaggcataactgctgtgtccactagcccaaagctgttccagggacagcagcaacctcaggaggaggccagagattggccaatggaaaggcagaaagcagggactc

SEQ ID NO: 1023349 - DNA, 120 bp, Artificial Sequence
  ENSG00000250548_24 (sequence is synthesized)
tccacccaggtggaggcaccacagggcccgtggagggaatggacagctggcattacggtccccctaccttttcccaagactcttccagctgacctactaaggctgccccttgaccttgag

SEQ ID NO: 1023350 - DNA, 120 bp, Artificial Sequence
  ENSG00000250548_25 (sequence is synthesized)
tacaaatggcactcatgcccaaacagccgcttgaccagagccaaccgacaacctcctgtgagtttctcagccccaggctggatctgcaggtaagagacagacattatgttgaggcaaatg

SEQ ID NO: 1023351 - DNA, 120 bp, Artificial Sequence
  ENSG00000250548_26 (sequence is synthesized)
taacccatgccaagcagtgtgtagagatttctacctagctttattgttgtgaactccagacaagagacttagaaaccatgtatgattttctacatcaaaagcctgagtctgaggcttagg

SEQ ID NO: 1023352 - DNA, 120 bp, Artificial Sequence
  ENSG00000250548_27 (sequence is synthesized)
ggtctctcatcccttttccaactccctttgtgtgttgcggggtggggggtggggcggaatggagagtctgccatggagtccccacctctgtcccttccagaagagcctgtatatggctag

SEQ ID NO: 1023353 - DNA, 120 bp, Artificial Sequence
  ENSG00000250548_28 (sequence is synthesized)
tgggcatttccctccctggagaggaggtgggggaggcccttcatgtgcttcctggagccacaaggaaagaggaggctgctgattcaccagcagctgcttcctggaatggcagttccgggc

SEQ ID NO: 1023354 - DNA, 120 bp, Artificial Sequence
  ENSG00000250548_29 (sequence is synthesized)
tggcaggcaaacagtatttttccaaggtgatctagggctgttacaacattcccgctctgcccccatcagaccttcctgtaagtcaaaccagaaagttacccagaccacgcattcctgagc

SEQ ID NO: 1023355 - DNA, 120 bp, Artificial Sequence
  ENSG00000250548_30 (sequence is synthesized)
agtcaagcacaagattccagacacagtgtttccaacatgtctcgctatctctcctgggacctgggatccagtcatccccacagcccctgtgcttcctcagccaaggccatgcatttgtcg

SEQ ID NO: 1023356 - DNA, 120 bp, Artificial Sequence
  ENSG00000250548_31 (sequence is synthesized)
cactggccatggagtcacatggaagccactgtgtggctccaagtcagctgggaggggaaggcctgccctgattcccctaatggtctgctgagaaagagcagagccctgagctagctttgt

SEQ ID NO: 1023357 - DNA, 120 bp, Artificial Sequence
  ENSG00000250548_32 (sequence is synthesized)
ccctgcgtttcacaaagccactttctctggtcctgcccagctttctgagacagaaagctaccatgtcccagactgaatcagtctcactttttttttttttttccccagaaataaggcaca

SEQ ID NO: 1023358 - DNA, 120 bp, Artificial Sequence
  ENSG00000250548_33 (sequence is synthesized)
ggtttggaagtgcctctgtttgaccctggtgtttggttctctccctcacatacagggaacatgaaggagaacccacctctgctgcttttgaagtgcagtggctttcacttggaatggaca

SEQ ID NO: 1023359 - DNA, 120 bp, Artificial Sequence
  ENSG00000250548_34 (sequence is synthesized)
tctttacgggtggcactgggggctgtgcagagaggaccagggagaaattccagacttctcaggttctgcctctgagacagacagtggtgggaaacacaaacaataaaaatccttggttcc

SEQ ID NO: 1023360 - DNA, 120 bp, Artificial Sequence
  ENSG00000250548_35 (sequence is synthesized)
actttcctcatcccttccgggcaaatggaatcaaatgagggtgagggtggctggggaataaagcagggtgagtgaagagatgggggactgctcttagaagcagtgtctgaactccacccc

SEQ ID NO: 1023361 - DNA, 120 bp, Artificial Sequence
  ENSG00000250548_36 (sequence is synthesized)
ctccaggatgaactggaaagtgcttcttctcctccctcccttgactgatggctatgggaactttagatggggaaatacggatatactgatctctcaaccaaatgtaatttgtattaagaa

SEQ ID NO: 1023362 - DNA, 120 bp, Artificial Sequence
  ENSG00000250548_37 (sequence is synthesized)
ttaagagttcacaagttattctctgtctctctctctttttttttttttaaagaaacagccttgccctgtcacccaggctggagtgctgtggtgctatcatagctcactgcagcctcaaaa

SEQ ID NO: 1023363 - DNA, 120 bp, Artificial Sequence
  ENSG00000250548_38 (sequence is synthesized)
ttctcccacctcagcctcctgagcagctagtactacaggcacacactaccataactgaccaatttttctgttttctgaagagatgaggtttcgctctgttgactagactgatgtcaaatt

SEQ ID NO: 1023364 - DNA, 120 bp, Artificial Sequence
  ENSG00000250548_39 (sequence is synthesized)
agactgatgtcaaattcttggcctaacgtgattttctccctgggcctcccaaagtgctgagattaggagtgtgagccaatgcacccagccaacttatccttttttatcttcatcacaatc

SEQ ID NO: 1023365 - DNA, 120 bp, Artificial Sequence
  ENSG00000250548_40 (sequence is synthesized)
ttatgagtaccattgtgtcttgaatccagcttggccataaggaaatggggcgagactttgtcatgtatgtcgctgaagttcagctatgcaaaaatgttcacctatccttgatcaaccagt

SEQ ID NO: 1023366 - DNA, 120 bp, Artificial Sequence
  ENSG00000250548_41 (sequence is synthesized)
ccaggaaccatcaaagaagaaaatgagattcgacttagaagacctgttctttataaacccctgcacagccctaatgatcaacaccacttccagtgctcataaattactgcttcaataatt

SEQ ID NO: 1023367 - DNA, 120 bp, Artificial Sequence
  ENSG00000233334_0 (sequence is synthesized)
agaagggaccaagcacagaggcggccactgcagccaactgcacagctggacccgggtagggctcctccctcgggacctccagatggctcctcacccttgaggtcccttctttttggtcag

SEQ ID NO: 1023368 - DNA, 120 bp, Artificial Sequence
  ENSG00000233334_1 (sequence is synthesized)
aagacaatggtgaatgagaagaggccaggtgacaggaacctgcaagctcatccatccacaaacatccactgagcacctgccacgggctgggccccgtgcattcaacaacaactctccaga

SEQ ID NO: 1023369 - DNA, 120 bp, Artificial Sequence
  ENSG00000233334_2 (sequence is synthesized)
caccctccctctagaccacgagcttctcaagggtgaggagtacagggcctggctccagctcatcctgttccctgaactcctccagcctggtgcccaacacacggaaggcgctctgtgagg

SEQ ID NO: 1023370 - DNA, 120 bp, Artificial Sequence
  ENSG00000233334_3 (sequence is synthesized)
gctgaacacagctatctgatatcactgtggcctgggactctcagcttccagcaagtgggagccccacctggctcatccacttcaaaagaggattgcatgctaatgaattaatacatacaa

SEQ ID NO: 1023371 - DNA, 120 bp, Artificial Sequence
  ENSG00000233334_4 (sequence is synthesized)
gaaagtgttgcaaactctacaatcctatataaatcttaagaagattagaagtttaccaaatgctctgtaatgcattttgaagggctatcccttaaaagaaactggaaatcagcaagacaa

SEQ ID NO: 1023372 - DNA, 120 bp, Artificial Sequence
  ENSG00000233334_5 (sequence is synthesized)
gctccccacaacagacctctcatctggagccaaggggagagaagaggaggaggaagaccacagatggacccaaagcactgcacactgggtggttctgggcccggacaggccagtaacaaa

SEQ ID NO: 1023373 - DNA, 120 bp, Artificial Sequence
  ENSG00000233334_6 (sequence is synthesized)
aagcagcagaaagaaggatactttccaacaaagcaaggagagttcaggaagaaagcacagattctaatctgtgtggccacaagagaacacatggtagaatcccttccagcaaagccgcct

SEQ ID NO: 1023374 - DNA, 120 bp, Artificial Sequence
  ENSG00000233334_7 (sequence is synthesized)
gctctcccctgactgctttccctttctgagatgagttttccttccctggccagggctgggaggccgtgctcctcctggcaggggctcaggccacacctcttggaagagcagctcagctga

SEQ ID NO: 1023375 - DNA, 120 bp, Artificial Sequence
  ENSG00000233334_8 (sequence is synthesized)
tacgtactacttgcacacattagtttcacagttaattttaccgccttaaaaacaggactcagatcaaaacctaaacatgagaactcagccactgacagtgattttcctggtggctcccgg

SEQ ID NO: 1023376 - DNA, 120 bp, Artificial Sequence
  ENSG00000233334_9 (sequence is synthesized)
aagtcattgctctcagagcttccatttccccctcccattaagcaaaggaaataggaggggaagacagcaattccacaaggtctttgtgcactttgaaactttcgtagcttcagttgttgg

SEQ ID NO: 1023377 - DNA, 120 bp, Artificial Sequence
  ENSG00000233334_10 (sequence is synthesized)
tgtgacaaaagcaatctgtgggcagaatccagaagcaagtatatgaacatttggggaagggtgttgcttagtgggtcacgttgtctcctgccaaattctgtgacaaccctaaagtgcgag

SEQ ID NO: 1023378 - DNA, 120 bp, Artificial Sequence
  ENSG00000233334_11 (sequence is synthesized)
aagggttccgaggggagccgaatgctgcagtcaagcttcatatccgccaagacaaagggatttaatctgcttggggacgcttctgcttgctgattttatatactaactaagtcatctgag

SEQ ID NO: 1023379 - DNA, 120 bp, Artificial Sequence
  ENSG00000233336_0 (sequence is synthesized)
gggcatccaagtgaaggatcctgctgagtactcaggggctggtgttgctgtcagggatgttagccaagagcctcagcttcctgtaaaatgaggatgatgatgtccaacagcttatgggac

SEQ ID NO: 1023380 - DNA, 120 bp, Artificial Sequence
  ENSG00000233336_1 (sequence is synthesized)
tttcaatctcacctccttttcctgataatagagaggcaacaagaactcagggcatgcaatggggctcaacttctactctctgccacaatttcatcatgattcccccaaagagcagagccc

SEQ ID NO: 1023381 - DNA, 120 bp, Artificial Sequence; identical to SEQ ID NO: 891147
  ENSG00000233336_2 (sequence is synthesized)

SEQ ID NO: 1023382 - DNA, 120 bp, Artificial Sequence
  ENSG00000233332_0 (sequence is synthesized)
ggaaaggcttcggaacacgcaggacagacgtctccttagcccgctgcagccctctcccgcctctaccaactgcgggcagcacctttggtcggcctgggggtgaggcacagagctccacac

SEQ ID NO: 1023383 - DNA, 120 bp, Artificial Sequence
  ENSG00000233332_1 (sequence is synthesized)
ccaggcaactcaagtgtgtgtgtggtaaggggacactgggagcggctggacgaccccctcctgccgaacagacaagagccccaggacaaactgggatggaggtcctgactgcagcctctg

SEQ ID NO: 1023384 - DNA, 120 bp, Artificial Sequence
  ENSG00000233332_2 (sequence is synthesized)
gccaccacctctctgagaagccctttaaaaggaccagcgcctgcggaggggagaccctgagaacttaagcctcagcgttgcacaagtttaaaaagggaagtgcttgactttggattgaga

SEQ ID NO: 1023385 - DNA, 120 bp, Artificial Sequence
  ENSG00000233332_3 (sequence is synthesized)
gttgactcttcagtgtgcggaagtcctgaattatttcacagggagagttagaaaaagcaaagcttcccaaggctgccattcacttcttgagtctagaggcacattatcttgtctggcccc

SEQ ID NO: 1023386 - DNA, 120 bp, Artificial Sequence
  ENSG00000233332_4 (sequence is synthesized)
gtggacagctatttttttgcggggtggagtggggggtggttcaaacaccacagaagcaaaacagccacaagaaaacaaaggcttgaagagatttctgctcccaccccaccgcctcagtct

SEQ ID NO: 1023387 - DNA, 120 bp, Artificial Sequence
  ENSG00000233332_5 (sequence is synthesized)
ggagatccaaactcacctcggtagcaggaaagctccttttctgcccagctcccaggttcttgcttcagctgcagatctgacatttgcctctgcaggcaccagcttcactgctggcactca

SEQ ID NO: 1023388 - DNA, 120 bp, Artificial Sequence
  ENSG00000233332_6 (sequence is synthesized)
gacacagctgtaagctactggccgatggtgctcattaaaaagctatgacatatacctattgcatcacttgccagcacaatccctgagtgaccactgagtccggaggggcatttatcccat

SEQ ID NO: 1023389 - DNA, 120 bp, Artificial Sequence
  ENSG00000233332_7 (sequence is synthesized)
aggacacacagggctcatgcagccccagaactcccagggccttgtgttcatctcctttacagatgcccagccatcagtgtgggtcccagcctcaaggatcagttgagattcaaggtgggt

SEQ ID NO: 1023390 - DNA, 120 bp, Artificial Sequence
  ENSG00000233332_8 (sequence is synthesized)
tttgttattattgttggttagatctttgcccagaatttcagaaccttcaatgctacctggtttcctgtctcaaagttaaaacttcattgtattatgtcattcaagtccccacaagggtag

SEQ ID NO: 1023391 - DNA, 120 bp, Artificial Sequence
  ENSG00000233332_9 (sequence is synthesized)
ctctgtggagtggtacaggggagagtgaaactcaagcaatagggtttcctagctcagcacctaccagatgtttctggtgacatccacctgcaacccccagctctctggcagaagtggctc

SEQ ID NO: 1023392 - DNA, 120 bp, Artificial Sequence
  ENSG00000233332_10 (sequence is synthesized)
ctaggagttgctcttgttggattcttattaattgccctcttgaacagctgtaatgaatggaatggctctgatctccaaaaggccagggcttctcagggttgcttcctcaccactacagcc

SEQ ID NO: 1023393 - DNA, 120 bp, Artificial Sequence
  ENSG00000233332_11 (sequence is synthesized)
aaggaaaaggtatatagggtccctgcagagccctctagtggtacccctccacattatacgcctcttacaggaaacgttccaagactcctagtgatgacactacaataagccaataagcca

SEQ ID NO: 1023394 - DNA, 120 bp, Artificial Sequence
  ENSG00000233332_12 (sequence is synthesized)
cttccttctttggaataagcttacagcaaaagaattacatgttgtatattaaagaggatctttttactacaaaataatacttctatgtgtttcatcaagttcatcaataaaatttattat

SEQ ID NO: 1023395 - DNA, 120 bp, Artificial Sequence
  ENSG00000233332_13 (sequence is synthesized)
atatagtaactaaaacaaatatcacataataattgcacacgtttttaagcacatgctatgtattatttatgttaactgttttacataaataatttcatttcctactctcaaaagctctgt

SEQ ID NO: 1023396 - DNA, 120 bp, Artificial Sequence
  ENSG00000236129_0 (sequence is synthesized)
tgcagctaggggttgcccacgcggtcgtggcaggctctaacaggctgcagagatgagggaagcaggcaggaagctcagaagaaagccaatcgatgacccttagaaggaggatggctgctt

SEQ ID NO: 1023397 - DNA, 120 bp, Artificial Sequence
  ENSG00000236129_1 (sequence is synthesized)
ttagactcaccacttccaacttacaacccaagatagtatgttcactgaagaagcaaagatactgcatttgaccaactaggcacccaggaagtgaatgaatagtcatgcaagtaaaacatc

SEQ ID NO: 1023398 - DNA, 120 bp, Artificial Sequence
  ENSG00000236129_2 (sequence is synthesized)
cagaggtccaatctttaggatgtaaaaattaagtaaataagaaaattatgtttaaatcttttaaaatattttgtaaattcccattaaagatactgtatctaggggagtatatatcatatc

SEQ ID NO: 1023399 - DNA, 120 bp, Artificial Sequence
  ENSG00000236129_3 (sequence is synthesized)
ttgccatctatgtgaaataatgggatggaaagccatatgtgtttgcttatatatgatggactgtttctggaatgattcagaagaaattggtaactgggtgacaccaggaagaagaactta

SEQ ID NO: 1023400 - DNA, 120 bp, Artificial Sequence
  ENSG00000236129_4 (sequence is synthesized)
gtgtgaatcgggaatcagaggaaactatttcactgggtgctctttggcccttttgaattttgaactacaaatgtattgattagctcttcacagtaaaaataaagaaaattaaaacttcaa

SEQ ID NO: 1023401 - DNA, 65 bp, Artificial Sequence
  ENSG00000233338_0 (sequence is synthesized)
ccaggctggagtacaatggtgcgatctttgctcactgcaacatccacctcaaggcgaataacatg

SEQ ID NO: 1023402 - DNA, 120 bp, Artificial Sequence
  ENSG00000233338_1 (sequence is synthesized)
gtaggcgaataacatgaacattgcttcatctttgttccacaagtttctgagacagcaccgacttcacacattcctgggctgttgccaacagtaggcctgaagaaccactcttggggcctt

SEQ ID NO: 1023403 - DNA, 120 bp, Artificial Sequence
  ENSG00000233338_2 (sequence is synthesized)
ccccagccctggacacagccctttcctctcgagtggatgaccagacaattcataaggcagcaaatggcttccccatactggggctgccgcgaagtaccacatatggaaataacgtgcaac

SEQ ID NO: 1023404 - DNA, 120 bp, Artificial Sequence
  ENSG00000233338_3 (sequence is synthesized)
cctggaaaaagctcaaggtctgggaaaacaccaagtgcctggaatcagttgtttgttgtgaaatcaatgctaaatatatacaaagctaaagtgaaaggacttacgtggaagaaactttta

SEQ ID NO: 1023405 - DNA, 120 bp, Artificial Sequence
  ENSG00000233338_4 (sequence is synthesized)
agtcaacgattcagatgaagaaatgcacaagaggcttcctttacacaaatctcttgtgatcctggttttaagtgggggtgcagagctcctgagaggacagctactgtgcgtccatgttta

SEQ ID NO: 1023406 - DNA, 120 bp, Artificial Sequence
  ENSG00000233338_5 (sequence is synthesized)
tttaagcggctgcccttccctggccagggaagacacgggtgagataggccacaggtgtttcctgaaactgtctcctcctgcctccacttgaccttagctttgcaaatcctgggcgctttg

SEQ ID NO: 1023407 - DNA, 120 bp, Artificial Sequence
  ENSG00000233338_6 (sequence is synthesized)
tggtcacctctgggatgcaacttgttggtgtcacgcccactttgccaggtcctgccggcagatatgggctgcttgttttctttgtccccaagtccccacgtgcctcctgatggtctgtgg

SEQ ID NO: 1023408 - DNA, 120 bp, Artificial Sequence
  ENSG00000233338_7 (sequence is synthesized)
cccagatgggatggagtcctctgcaccaacacctacttaaggcgctacccacccaccactcctgttctctctgcttgttactataatccccattttcagaggaggaaacaggctcataaa

SEQ ID NO: 1023409 - DNA, 120 bp, Artificial Sequence
  ENSG00000233338_8 (sequence is synthesized)
ggctcagtcatttacccaaattcagcagcaaagcttggatctgaacggaaagctctgtcgtacttgccactttctctgctggatgacattttggtggctccgtgttacattcaccagact

SEQ ID NO: 1023410 - DNA, 120 bp, Artificial Sequence
  ENSG00000233338_9 (sequence is synthesized)
gtacaagttttgagcccaagggctgttgtatccatccagcctggtcttacacatggatgttggtgaaaatggatggggacgaatggatggatggatggatggatgttggtgaaaattaaa

SEQ ID NO: 1023411 - DNA, 120 bp, Artificial Sequence
  ENSG00000233338_10 (sequence is synthesized)
gggaaacagaggatgatattgatagaattaagggaagtttcttttgtatataaaatttttctgagtataatgttattacatggtcctaaatatcccaataaaggaatgtagaacacatca

SEQ ID NO: 1023412 - DNA, 120 bp, Artificial Sequence
  ENSG00000233339_0 (sequence is synthesized)
caatgagaactttaatatgactgaccttcaaatcccaagacaggcttgaagcacatccagactccctctgaaaaagactgctttgaagttcaaacgttttctgctgttgctttacttcac

SEQ ID NO: 1023413 - DNA, 120 bp, Artificial Sequence
  ENSG00000233339_1 (sequence is synthesized)
cttggcccttctaaatgcagggcgatgaggaaaccctcagcccccctcagaggagaagttcccacttgctggccgtcactgcccttcctgcctggaaggagtccctccatgttgcaggtt

SEQ ID NO: 1023414 - DNA, 120 bp, Artificial Sequence
  ENSG00000233339_2 (sequence is synthesized)
actttacaacacacacccacaccttttttcccttgaagctcatcaagtgaagttatcagctctttagagaaatcccttcaattcctcacagtatttaaaacaaattatttttacctgcaa

SEQ ID NO: 1023415 - DNA, 120 bp, Artificial Sequence
  ENSG00000235470_0 (sequence is synthesized)
attaaacatcccacactggtcagttacagcctcctacgtcccagctgtgcgtttcctgtgaaaagaataagctcgcctaagaccatggcctgaggggactccagtgacgttcccagtgcc

SEQ ID NO: 1023416 - DNA, 120 bp, Artificial Sequence
  ENSG00000235470_1 (sequence is synthesized)
agcagacagaactgcgcagaccccgcgggacgccatcctccatcaccatcatcgccggctgccctccacccccagcccactccacggccagaggtgcatctccggcctccagacacgcac

SEQ ID NO: 1023417 - DNA, 120 bp, Artificial Sequence
  ENSG00000235470_2 (sequence is synthesized)
cttcggagagactggaactgagacacaaggagagacctagtgatgtgggagagttaggagaagaagcagtgatttcaaacgcatgcccctcacacggaagaagggcagggggaaagccat

SEQ ID NO: 1023418 - DNA, 120 bp, Artificial Sequence
  ENSG00000235470_3 (sequence is synthesized)
gcaggtgtgggcgtggcacttgagcagcctctcccatgggcacccagtggttaatgcacaatgtttagcacgtcgcccagggaggccatccccttccgctacccctttcatggcaaatgc

SEQ ID NO: 1023419 - DNA, 120 bp, Artificial Sequence
  ENSG00000235470_4 (sequence is synthesized)
tgaaacatcgttgaagactcctctcaagggtctcctcttccaggaagccttcggtcaggaataggtgccccttctggctcctcctagcctgaaagccaacatgaaatctccctgggctga

SEQ ID NO: 1023420 - DNA, 120 bp, Artificial Sequence
  ENSG00000235470_5 (sequence is synthesized)
tcccacactggtcagttacagcctcctacgtcccagctgtgcgtttcctgtgaaaagaataatgatcagcagcacaagttctataagggcagaaccatgtctgtctccagagcctggcac

SEQ ID NO: 1023421 - DNA, 120 bp, Artificial Sequence
  ENSG00000235470_6 (sequence is synthesized)
cttgctcttgtctgggctccagagcctggtattcagaaaatgtcatttcagcagagaactaactggatgtggctgcggcagccctgaagagcccatagaagaaaagtttgaattccccag

SEQ ID NO: 1023422 - DNA, 120 bp, Artificial Sequence
  ENSG00000235470_7 (sequence is synthesized)
aatcagcccattcttgcattaatttcaaaacatagttgagtgcctactgtgtgtgccaggcactggtggtggtgatacagcagtaagcaagagagacagtaaaaaatacagacaagcaaa

SEQ ID NO: 1023423 - DNA, 120 bp, Artificial Sequence
  ENSG00000285619_0 (sequence is synthesized)
aacttattgttaaaacaaccatcccagtcccatccagccactgctgcaccctgccaccccaaaagcatctgacctgcagatgcctcccagaggagccttttccatcctgtgctgggaaaa

SEQ ID NO: 1023424 - DNA, 120 bp, Artificial Sequence
  ENSG00000285619_1 (sequence is synthesized)
agaacaatggcctcaggacagcacagatcctcaatccaggtgggagctcagcaccctccagctgggaaggctgtggtgtccaagctctccggaagtcccaagaggctcagacacctccca

SEQ ID NO: 1023425 - DNA, 120 bp, Artificial Sequence
  ENSG00000285619_2 (sequence is synthesized)
gggtgcaaaacttacctccacaccaggaatattgggacatttctgaagttaaagaaacccagcctcagtgtgatgaggaccgccccccaccagcccaggtgggctgtgcataaggatcag

SEQ ID NO: 1023426 - DNA, 120 bp, Artificial Sequence
  ENSG00000285619_3 (sequence is synthesized)
acatactgggggagcagtgatccaacaagaaagacctttcaaaggagagacacttcaaaactccttatcgccgtctccactagccaacgccaagttctacttccattttatatcaccgct

SEQ ID NO: 1023427 - DNA, 120 bp, Artificial Sequence
  ENSG00000285619_4 (sequence is synthesized)
tctcttttgtttttgttgtgtttctaaatctggatcaggatggagactggcagtatcccttgagaaaagaggaccatggctgaaaacacaaaaaagtgttcagaatgcccacttgtgggc

SEQ ID NO: 1023428 - DNA, 120 bp, Artificial Sequence
  ENSG00000235478_0 (sequence is synthesized)
ggtgcggggggactcccatggagcgcggactcctaaggaagtcgctgggaatcccaccggctgtaccgcagggcgttagtacctagatggcttcggtgcccccaagcgatgggctcaagc

SEQ ID NO: 1023429 - DNA, 120 bp, Artificial Sequence
  ENSG00000235478_1 (sequence is synthesized)
tacagggcgggctttgcacctggccttctcagctctgaggcaggcagtgggcagcttcgcctccaccctccgtccagcgcccttcccatggggccatccgcctctccctaaggcactaaa

SEQ ID NO: 1023430 - DNA, 120 bp, Artificial Sequence
  ENSG00000235478_2 (sequence is synthesized)
aaccagtggaggagtcaggccatgttggcaaaaagggctcgggcagcagccccagacctatagtcctaaatatccatgtacccagccctggggtcgcgagccatctcagggacgacccga

SEQ ID NO: 1023431 - DNA, 120 bp, Artificial Sequence
  ENSG00000235478_3 (sequence is synthesized)
ttccagcggatggagaagttccctgaaaacacctgcctgggaggagagacgagggaacgagattgggcaagtggcatccgcccagcgggcttctcaaaggtttttaaagcagaatgggac

SEQ ID NO: 1023432 - DNA, 120 bp, Artificial Sequence
  ENSG00000235478_4 (sequence is synthesized)
gcatttagaggtgtgggcacctggatgaaaacaaaggctccaaagggatgatggtgagggttacagcccaccacagtagacagagacaccaaggaaggaatgcagtcagtggccctgcgt

SEQ ID NO: 1023433 - DNA, 120 bp, Artificial Sequence
  ENSG00000235478_5 (sequence is synthesized)
agacagtctcaggagagagcacaccagctcaccccaggactcatccaaggctggggatggatgtcgatgcagcaactctggaaggcagaagacagtgctttaccatggaactgaaaccat

SEQ ID NO: 1023434 - DNA, 120 bp, Artificial Sequence
  ENSG00000235478_6 (sequence is synthesized)
gaaaagtgaaactgcaaatgggagagactgctgtatagtcactgaaaaattaatggatgagctcaacagcaaattagacacaactgaagtgagtaaatttaacaatatatatgaagacat

SEQ ID NO: 1023435 - DNA, 120 bp, Artificial Sequence
  ENSG00000235478_7 (sequence is synthesized)
tctctagaatgtagtacagagagctagagactgaaaatatctaggagacaagagacatgagagatagattggaatatccaaaatatgtctaacagaagctccagaaggagaatataaaac

SEQ ID NO: 1023436 - DNA, 120 bp, Artificial Sequence
  ENSG00000235478_8 (sequence is synthesized)
aataagggaaggacaatacagaaatttgaactgagaattttccaaaattggtgaaagaacttctccaacccacagatttaggaattgcaatgaatcctaaacaggatgaataaaaataaa

SEQ ID NO: 1023437 - DNA, 120 bp, Artificial Sequence
  ENSG00000235478_9 (sequence is synthesized)
ttggacccatgtgtggaagatgacagcatcaccaactggagggtgcctggatccctgagtcaccacttgaagcaaaaaggtcaagagtagccacctgacccatatcaggctatgaaatga

SEQ ID NO: 1023438 - DNA, 120 bp, Artificial Sequence
  ENSG00000235478_10 (sequence is synthesized)
gcagcatctggttgctacagcaaccccagctctgcagggtgtcccgattaccagcaggctccctgcacctgcctcaggctgagagcaggcggctgccgccaaggggaacaccaaggaaat

SEQ ID NO: 1023439 - DNA, 120 bp, Artificial Sequence
  ENSG00000235478_11 (sequence is synthesized)
gcccatgttctgattccaaggtaatggctcagacccaaggggattttatctgttcaatgtgcaacctgatgaagttttgtcccatgttaataatttcattaaaaatatggccttacatcc

SEQ ID NO: 1023440 - DNA, 120 bp, Artificial Sequence
  ENSG00000235478_12 (sequence is synthesized)
tgacacgaggctttggaaccaagagctggaggaacctggaagcgaaagctgaggctgtcggctgcccagcagttaacaccctgagaccatcttcccacttccaacacccacagaagctgc

SEQ ID NO: 1023441 - DNA, 120 bp, Artificial Sequence
  ENSG00000235478_13 (sequence is synthesized)
cacccaagggcccctgtgtccccgcatggcccacctcagcagtatgatgcagcactggggaagtgacagaatgtgaaaaaaactattatagctgagatattttaaaattccgccctccag

SEQ ID NO: 1023442 - DNA, 120 bp, Artificial Sequence
  ENSG00000235478_14 (sequence is synthesized)
tgcagcgtgataacaccatgcagtgtgagggagctgtatgcagtggagccgcaggggttagtcaggcctcgcccctaaatctgcctcttaaataagagtccgtttcagccaaacctgcct

SEQ ID NO: 1023443 - DNA, 120 bp, Artificial Sequence
  ENSG00000258904_0 (sequence is synthesized)
tccttcttggccctgccgaaaacaaggtgggcagttcctgccacctggagctcgtttccccacctgtcaaatgggcgttaagaattccattgtggtttgatacatggaggttctcactgt

SEQ ID NO: 1023444 - DNA, 80 bp, Artificial Sequence
  ENSG00000258904_1 (sequence is synthesized)
tacatggagggatagctcactacagcctcaagcaatcctcctgccacacctcccgagtagctggaactacaggtgtgtgc

SEQ ID NO: 1023445 - DNA, 120 bp, Artificial Sequence
  ENSG00000258904_2 (sequence is synthesized)
cctggcctcaagtgatcctcctgcctcggtctctcaaattgttgggatgacaggtatgagccactgcacatggcccaagagtttttgtttgttagttttgttttttgagatggattttca

SEQ ID NO: 1023446 - DNA, 120 bp, Artificial Sequence
  ENSG00000258904_3 (sequence is synthesized)
catggcccaagagtttttgtttgttagttttgttttttgagatggattttcactcatctcccaggttgcagtgagctgagatcacgtcatcgcactccagcctgggcaacaagagggaaa

SEQ ID NO: 1023447 - DNA, 120 bp, Artificial Sequence
  ENSG00000258905_0 (sequence is synthesized)
atggcaagaagaatggaaaagtccctgggagctttattcaaattcagctgaagctggccaagaaaaggatgtgatacagagttattcaaatctaaatgtctaggagagagaaatggccgt

SEQ ID NO: 1023448 - DNA, 120 bp, Artificial Sequence
  ENSG00000258905_1 (sequence is synthesized)
tggatagaaaacaggacagaaggctcactgtactgttgaataaaaatgctaaacatgtctccctgcatattacagccacccaaccaggagactcattcctgtacttctgtgcagtgagaa

SEQ ID NO: 1023449 - DNA, 120 bp, Artificial Sequence
  ENSG00000258902_0 (sequence is synthesized)
agagccaatctgaaaattcagagaacacagggaggagaccaaggagaaatccagagtgaaatgaaataacggtttggggagcagatggtgcaatatctcattcttaaaagatttgctgcc

SEQ ID NO: 1023450 - DNA, 120 bp, Artificial Sequence
  ENSG00000258902_1 (sequence is synthesized)
catggtaatggagacaaatacctgcagaagaacataatcaaaactcaaaggaaagttgagcaagcactggaacattcacaaaggcagacagcagacgtgctcatcaaaagcatttttgct

SEQ ID NO: 1023451 - DNA, 120 bp, Artificial Sequence
  ENSG00000258902_2 (sequence is synthesized)
aacaaatggagtcatcatacagccagcatcatatagaagaatgacaaagagagaaaaaataaaactttctgggaaagaaggaataagaagctggattggcagaaagatcaatgtggtttt

SEQ ID NO: 1023452 - DNA, 120 bp, Artificial Sequence
  ENSG00000258902_3 (sequence is synthesized)
ccctagagcttcctgggcagagcacagaaaaggctggttgcctatggagaactacaaattgaagagtttcttaatcagtccactgttcacttgattcccagacacagacaacatgagttt

SEQ ID NO: 1023453 - DNA, 120 bp, Artificial Sequence
  ENSG00000258903_0 (sequence is synthesized)
cagaagggtcccgactgcgctcgcctaagttggggccggcagagtgggttgggaggctggggctgggcgagactcgcgggcccggtttaaatcaacaaataattgccaagtcccctcctc

SEQ ID NO: 1023454 - DNA, 120 bp, Artificial Sequence
  ENSG00000258903_1 (sequence is synthesized)
ctctgggactacctcaagatataacagatgttggaagacacgaaagaaaggtcaaggtaatccaagatcacaggattccttgatggcataactggaattagaaaacaggcatgactgtaa

SEQ ID NO: 1023455 - DNA, 120 bp, Artificial Sequence
  ENSG00000258903_2 (sequence is synthesized)
ggaggaactacggaatgctaactacatgcccggctctatgctaggcacattacatctgtgatttcactgatatcttttaagacacctaatgaggtggaatgccacatccaaagacattac

SEQ ID NO: 1023456 - DNA, 120 bp, Artificial Sequence
  ENSG00000258903_3 (sequence is synthesized)
gggaaggcaagacacccccacctccaacagttatgcagcatcagcaaaaacagagtccaaaacaactgtgcatcacactgggagccagtgaaggagagggaacggagagcaggtgttcgg

SEQ ID NO: 1023457 - DNA, 120 bp, Artificial Sequence
  ENSG00000258903_4 (sequence is synthesized)
ctgcctggtgaatggtccatttaaaaattcaacaatagtcagaggggagtagagagtacaacagccaccaccgtaattggtgaaatcaggatttctcaattcagtgtaaactcacaccct

SEQ ID NO: 1023458 - DNA, 120 bp, Artificial Sequence
  ENSG00000258903_5 (sequence is synthesized)
aaaagaaggcacactataaagcagatttccataaacccagcgcatcatttactcttaacgatattattttaaaagcatgctcttcaggcaaaatcgctgaaagacctactcaagcaacaa

SEQ ID NO: 1023459 - DNA, 120 bp, Artificial Sequence
  ENSG00000258903_6 (sequence is synthesized)
tgttttttttttttgttttttttttaagaccctgacccttcctctgggatactcttcgccttggagtaggaccctgagaagggagaaccggatgagttcgtgggtgtgacccggggtgag

SEQ ID NO: 1023460 - DNA, 120 bp, Artificial Sequence
  ENSG00000258903_7 (sequence is synthesized)
gcgtttggggatgagcagtacgggatcttccgccttctgggactctcctccctagtgtgttcgtgtttgtgtctgcaggtttgagcacttgatagattctgaggagggatatgttaacta

SEQ ID NO: 1023461 - DNA, 120 bp, Artificial Sequence
  ENSG00000258903_8 (sequence is synthesized)
ttctgaggagggatatgttaactaatccataaaaatcagcccagagtctaattccttttggcgttgtctgtggctgcctactggcagggggcctcagatttaaaaaaaaaaaaaaaaaaa

SEQ ID NO: 1023462 - DNA, 120 bp, Artificial Sequence
  ENSG00000258903_9 (sequence is synthesized)
cacgtccttcacacaattagaaagtcctcattttggtccaacagctacttaaaacctcaggccaacatgtaaacttctttaacatgaaaatgcacaaaagcaaaggtatttttcacaaag

SEQ ID NO: 1023463 - DNA, 120 bp, Artificial Sequence
  ENSG00000258903_10 (sequence is synthesized)
gagactagaggtgtgcatgatttagcactttagtacactttagtgtacatgtacacattagtatacatttccccaaatgattgcataatttctcatatctcaagctatgttttcatgttt

SEQ ID NO: 1023464 - DNA, 120 bp, Artificial Sequence
  ENSG00000258903_11 (sequence is synthesized)
tacattgcttttgttgttgttgttaaatagggctgttttcttggggatgggggatgattagaacatcaaagtgggcaatttgggtagccagtaagccaaattaaagaagggaagatgaaa

SEQ ID NO: 1023465 - DNA, 120 bp, Artificial Sequence
  ENSG00000258903_12 (sequence is synthesized)
aatctactagagaaatgttacccaaagctatcttcggagagagaatcgcactgaagaagagacacatcacttccctggttccctgtagagtcatgccagggcctggaaggaagagaacac

SEQ ID NO: 1023466 - DNA, 120 bp, Artificial Sequence
  ENSG00000258903_13 (sequence is synthesized)
gactgggaatcaattagaaagaaaagttgctgtctttggagccagggcagggctgctgtgcagtgttatgttgattcctctggtggctggcactctgtgaggctgaaggggctacaccag

SEQ ID NO: 1023467 - DNA, 120 bp, Artificial Sequence
  ENSG00000258903_14 (sequence is synthesized)
cggccccaccactctcagggccccctgcttgctctctcagcacctactgaaagcctgtggcaaagctaacagtttgttagccctaagatttaaaaagctggtaacctaaaatcgaactgt

SEQ ID NO: 1023468 - DNA, 120 bp, Artificial Sequence
  ENSG00000258903_15 (sequence is synthesized)
ctgaagaagtaataataagccacagtgggttgaagatctgatgataaagtttcagctatcgggtatgacagggggctttgagacgggtacacttcacatccaggagatggtcctagccag

SEQ ID NO: 1023469 - DNA, 120 bp, Artificial Sequence
  ENSG00000258903_16 (sequence is synthesized)
aagtacaccactgctgcttccttcttcgttggaataagggcaagatgcagctgatatctcaatgagccttgtcttcttgtccagctcatctcaaaacactctcctccttgctctttaagg

SEQ ID NO: 1023470 - DNA, 120 bp, Artificial Sequence
  ENSG00000258903_17 (sequence is synthesized)
tccagtcacgctggacttttttcagtttccttgaatagggaagggtctcacttgcctaaggtattttgtacatgctgtttcttctttcttaatgtgcctcccttttacctggcttactcc

SEQ ID NO: 1023471 - DNA, 120 bp, Artificial Sequence
  ENSG00000258903_18 (sequence is synthesized)
cctatttcacaatattcattacaccagattttaagctagttcacctggttaacactgtgtcccaactgtctagcacacagtgcctggtacatcaaaggtaaccaagaacgcctgggaata

SEQ ID NO: 1023472 - DNA, 120 bp, Artificial Sequence
  ENSG00000258903_19 (sequence is synthesized)
gatgaatccaccctgcctggtttgaggtccctgttttcaccttagctacgtagctatcagttcatgaacttacactaaccttgaaggcagccactagttgctgtctttacagttactcaa

SEQ ID NO: 1023473 - DNA, 120 bp, Artificial Sequence
  ENSG00000258903_20 (sequence is synthesized)
gcagaagaagggagctgggggaaagcctgttatacagaaaatagttttcttcccttaatgagacattgtgtttataaagtgacttttttttttccttttcaaaacatcttataaaggtca

SEQ ID NO: 1023474 - DNA, 120 bp, Artificial Sequence
  ENSG00000258903_21 (sequence is synthesized)
ctacctgcattttaatagcattgggaaatactcacctaaagtcatttatatattttcctaattcttgtctttccacaccctctaaagtggttgtgagacctccgagatgaacggtttcat

SEQ ID NO: 1023475 - DNA, 120 bp, Artificial Sequence
  ENSG00000258903_22 (sequence is synthesized)
ttttccttaaaatactcctctacctcaggtaaaagcagcctccataacaacacgctatatcttatggagaaaaaaatgtatttgggagcagctaggtaatttgaccagtatggatggtat

SEQ ID NO: 1023476 - DNA, 120 bp, Artificial Sequence
  ENSG00000258903_23 (sequence is synthesized)
aatgtcaaatctccctatgagatattaatcattagctggaagaaataggcaaaagcagttttttactgcagaaccaactaattatctttcataactcttttgaaaaccaaatgtaaaagc

SEQ ID NO: 1023477 - DNA, 120 bp, Artificial Sequence
  ENSG00000258903_24 (sequence is synthesized)
tcaagtgaaaaacatgttaaatgcatttgtgtctagactttgccaagaaaataagggagtttaagtgcacaaaatcaaaagatcttactaaactagaatttcaaataaaggtaaaaaaaa

SEQ ID NO: 1023478 - DNA, 120 bp, Artificial Sequence
  ENSG00000258908_0 (sequence is synthesized)
ttatttcatctttctctttattctgacaacattatgacattaaataaaatccaagaggtattggattagtccttgtttggtctctggtgatttagataaggcagaactgagcccctcgga

SEQ ID NO: 1023479 - DNA, 120 bp, Artificial Sequence
  ENSG00000258908_1 (sequence is synthesized)
atgtattatctcaaagagctagtagcagctgctatgcaaagttctaaggcccgagtcaaatcctgggcatcagacatggcagggaaacgatctccaaacctaggacacaggttgaattat

SEQ ID NO: 1023480 - DNA, 120 bp, Artificial Sequence
  ENSG00000258908_2 (sequence is synthesized)
gaattttaaaaattctcccacagctcctagagaagtctttaaatcctacccacctaaaaaaaacggagtaacatacatacctttcatcattgggccctctgagagggttctgaccactga

SEQ ID NO: 1023481 - DNA, 120 bp, Artificial Sequence
  ENSG00000258908_3 (sequence is synthesized)
aaccaggtaggttgatatggtcacggatcagcatgatatctccaacctcaaacttggggttcagccctcctgctgcattggtgactaccagggtgtccacacccagaaggtggaaaaccc

SEQ ID NO: 1023482 - DNA, 88 bp, Artificial Sequence
  ENSG00000258909_0 (sequence is synthesized)
acactggaaagaggggcttggagagggagacagggccagacatgttctagcagagagatggtatattactcccttctcacgctgctaa

SEQ ID NO: 1023483 - DNA, 120 bp, Artificial Sequence
  ENSG00000258909_1 (sequence is synthesized)
aattgactcacagttccgcatggctgtggcgggggggcggccacaagaaacttaacaatcatggcagaaggacctcttcacaggacagcaggagagagaacgagtaccagcaggggaaat

SEQ ID NO: 1023484 - DNA, 120 bp, Artificial Sequence
  ENSG00000258909_2 (sequence is synthesized)
atcttgtgagaactcactcaccatcacaagaacagtatgggggaagcagcccccttcattcaattacctcccgccggatccctcccacaacacatggtgattatggggattacaattcaa

SEQ ID NO: 1023485 - DNA, 120 bp, Artificial Sequence
  ENSG00000258909_3 (sequence is synthesized)
ttatggggattacaattcaagatgagatgtgggcggggacacagacaaaccacaggagatgtgtgaagattgcttgtggcttatcagtggtccctttctgccttaagggtgatggaatca

SEQ ID NO: 1023486 - DNA, 120 bp, Artificial Sequence
  ENSG00000258909_4 (sequence is synthesized)
aagggtgatggaatcaaaaagaacttctccatccttggctttgatatttcaggcgcacaaacaaggcctcattcacccttcccagagctgatccactggcgtgatttgctctaatgccaa

SEQ ID NO: 1023487 - DNA, 120 bp, Artificial Sequence
  ENSG00000258909_5 (sequence is synthesized)
catcaccacccctccccagaggccctgccagcctctactctcccaggaagtcagccccactctgctggctagtcctggctctctactgtctttctgggcccatcatggctccctgaccac

SEQ ID NO: 1023488 - DNA, 120 bp, Artificial Sequence
  ENSG00000258909_6 (sequence is synthesized)
ccaactctgaaacaatctcccggtccagggcatcccaggaaccaggtcattgatggagccgctatttggcagttgcaggtggggcaggaatggtatggggaagtagaggcagaatgaaat

SEQ ID NO: 1023489 - DNA, 120 bp, Artificial Sequence
  ENSG00000258909_7 (sequence is synthesized)
ggcctggaagaagttaccctttttggatgagttcaaaacccctagggctgatgcacccaacccctgctctgtcattcgtgacctgctctttctagagcaaaatatcatgggatgggaggg

SEQ ID NO: 1023490 - DNA, 120 bp, Artificial Sequence
  ENSG00000258909_8 (sequence is synthesized)
ccctctgaatcttttcctgtgaagttgactttgatgatatgttggtccttttgtcaagcctgagctgctgtggtctgatgctgagtgtctcacctgtaacatctcagcacataacactcc

SEQ ID NO: 1023491 - DNA, 120 bp, Artificial Sequence
  ENSG00000258909_9 (sequence is synthesized)
tgagagccttccttctgcccctgggagggagagctttacagaagtatttccaagcaaatttccagaaggcctcaaagtaagcagcagaagccgctgctggtgtcagcagcaaatcagcac

SEQ ID NO: 1023492 - DNA, 120 bp, Artificial Sequence
  ENSG00000258909_10 (sequence is synthesized)
tcagcttgaggcctcccagcctgccccgggaggggcacggctcgcagcctttgcactctgggttctttccagggaggatcccatggggcacttccaggaaggagcccctgctgctttctc

SEQ ID NO: 1023493 - DNA, 120 bp, Artificial Sequence
  ENSG00000258909_11 (sequence is synthesized)
caaagagctctgcttcgggtctctaaggattggttttatctgcagagaagctaaaggaaggaatctactggtcccctaaggacctgatgacacatgcacagagatcccatctctcttttc

SEQ ID NO: 1023494 - DNA, 120 bp, Artificial Sequence
  ENSG00000258909_12 (sequence is synthesized)
attccctgaagtaagggaggcaatgaagccatacgtgtaccacaaagagtgtgagaaagaaggaactctccagccggggtctttctctgagtcatttttcagtcgtagggtacaaaaagc

SEQ ID NO: 1023495 - DNA, 120 bp, Artificial Sequence
  ENSG00000258909_13 (sequence is synthesized)
tccaggttatattcaaggttttattttttccagagtatcttcggggaaaaaaagtatatctgaaaatcacagaaattcttttctttcaaggtaaattagaggatttgaaggggcagtgct

SEQ ID NO: 1023496 - DNA, 120 bp, Artificial Sequence
  ENSG00000258909_14 (sequence is synthesized)
ggatgatctctgggttcccctctagtccaacacccagactctgagattgcttccctgtgggagctcggcctggcctccttccatgggcgtttcttccaacgtggaggtttgtcagtggcg

SEQ ID NO: 1023497 - DNA, 120 bp, Artificial Sequence
  ENSG00000258909_15 (sequence is synthesized)
tgcctgatggccagggccagatgctgttcttcacaccagaacgtcataatttaaaatgtctatgctctgaagcaagaaatcagagcttcaaacctaaaacttgtaggatttacaaagcag

SEQ ID NO: 1023498 - DNA, 120 bp, Artificial Sequence
  ENSG00000258909_16 (sequence is synthesized)
tttcattccaccaacatctattgagtactcattatgggccaggtacagagatgagaagtgggtctgagaacagtccctgcccccaagtagttcacaaatctcattgtgaagaggcaggca

SEQ ID NO: 1023499 - DNA, 120 bp, Artificial Sequence
  ENSG00000258909_17 (sequence is synthesized)
cagaaaatctatccatctggtagcggccaacccaagccaggtaggcaatactttccctcatagagttagagggtagtttaaagaaactgccacccagagggaacggcggtgaggttttag

SEQ ID NO: 1023500 - DNA, 120 bp, Artificial Sequence
  ENSG00000258909_18 (sequence is synthesized)
gaattatgattcctttcctaaatttctttgctatttgttatgagctacacaaatgtttatacacaagtcttaaagttttggctgattagaatattttcaataaagagagaatttctactt

SEQ ID NO: 1023501 - DNA, 120 bp, Artificial Sequence
  ENSG00000255092_0 (sequence is synthesized)
ttcattccaattcgggcgatacagtggcaccagaacttcttcagcaaagccagaaaatttccccctgccttccagaaaagatggtggtggactaaggacggggattctcccacgaccttg

SEQ ID NO: 1023502 - DNA, 120 bp, Artificial Sequence
  ENSG00000255092_1 (sequence is synthesized)
agagggcctagtgaggatctgcgagaggaggagtgtaacgtggtcaacactgtacttgagcatctgcttctccatctgtcaacataaaaccctgcagagccattgtgaggacaagacgct

SEQ ID NO: 1023503 - DNA, 120 bp, Artificial Sequence
  ENSG00000255092_2 (sequence is synthesized)
ctcctgagtagctgggaccacaggtgaacaccaccatggctagcatttttaaaaatttgtttgtagaaatggggtctcaccatgttgcccaggctagtctcagagcaatcctcccacctc

SEQ ID NO: 1023504 - DNA, 120 bp, Artificial Sequence
  ENSG00000255092_3 (sequence is synthesized)
ccaggctagtctcagagcaatcctcccacctctgcctccctaagtattgggattacagtcatgagccactgcgccttttctgataaaagggatggccatgtctggcactgcccacttccc

SEQ ID NO: 1023505 - DNA, 120 bp, Artificial Sequence
  ENSG00000274281_0 (sequence is synthesized)
ccctaaaacttaaattaaaaaaaaaaagttcaaaaaaaaacaaacaaactcctgagtacagtttttgtgctgagctctcaaagagattacagaatgaacaaatcaagattcttctataag

SEQ ID NO: 1023506 - DNA, 120 bp, Artificial Sequence
  ENSG00000274281_1 (sequence is synthesized)
aacaaatcaagattcttctataagactgaagtgctggttaccaactttcctggttaacattcagcaaaagcattttctctctaagtcctggaactaggatcaggatattttcttttgtaa

SEQ ID NO: 1023507 - DNA, 120 bp, Artificial Sequence
  ENSG00000274281_2 (sequence is synthesized)
aattcacttgttactttcagaccaaagttgtgttttacataaatcatgcgatcttggcactcctgattgcttggttgaaaaaatatttctgaataaaaaatattttaaatttgccatttt

SEQ ID NO: 1023508 - DNA, 120 bp, Artificial Sequence
  ENSG00000270996_0 (sequence is synthesized)
tacaggtgtgagccaccacgctcagctgacatttggttattttgatttttttgttatattacaaataatgttattaaagcacttgtgatacaagtgtctctttgggtcatgggcacacaa

SEQ ID NO: 1023509 - DNA, 120 bp, Artificial Sequence
  ENSG00000270996_1 (sequence is synthesized)
acttgtgatacaagtgtctctttgggtcatgggcacacaattcagttgggtataaacctaagaatggaatcattaggtcatagggtaagcatatcttcaacttcactggaaaatatcagt

SEQ ID NO: 1023510 - DNA, 120 bp, Artificial Sequence
  ENSG00000270996_2 (sequence is synthesized)
ggctcctcatacttgctaacacttggtattgtcagctgtctttgttttagccatctgggtgtatgtccttattctttgaatacgaatttccttgattactaatgaggataaacccttttt

SEQ ID NO: 1023511 - DNA, 120 bp, Artificial Sequence
  ENSG00000270996_3 (sequence is synthesized)
atacagtatacatactgtatatgtgtatatgaaaacatatatatacataaatatatatgtatatatactgtacatattaggctatctggagttcttcttttctgaattgcctgttcaagt

SEQ ID NO: 1023512 - DNA, 120 bp, Artificial Sequence
  ENSG00000270996_4 (sequence is synthesized)
tctggagttcttcttttctgaattgcctgttcaagtctcttgctcatttttctattgagttgtctgttttttcttaatggtgcatagctctcctgtatgtattttgtatttaactgatag

SEQ ID NO: 1023513 - DNA, 120 bp, Artificial Sequence
  ENSG00000270996_5 (sequence is synthesized)
ctgttttgcaaatatattctcccagttgtggtttgctttttcactctattaatgattgtttttggtaaagagaaattcttaaatgtttaatgctaatataataaaatctatttaaccttt

SEQ ID NO: 1023514 - DNA, 120 bp, Artificial Sequence
  ENSG00000223608_0 (sequence is synthesized)
agttccttcttaggtatggggatctcagcagtttcatttcagtggccacagcttgggaaacagacttctcccaatatcaaagggaatcaagtccccctttttttctccaggcctcggtct

SEQ ID NO: 1023515 - DNA, 120 bp, Artificial Sequence
  ENSG00000223608_1 (sequence is synthesized)
agagtgactggaggaagaaggaaatgaacatagaagaggaaaaaaaagaaatcttgattttccctcatgctatagaagggaatggtgctgttatatttttggcctatccagaaaaccaat

SEQ ID NO: 1023516 - DNA, 120 bp, Artificial Sequence
  ENSG00000223608_2 (sequence is synthesized)
tatgaaaataaacataaatggttttctgcctcatggtttagaagcacctctgtgtgtttgctcactgaattgttgtgatgttttgctctccatgatttggaagccaaaccaataaagcaa

SEQ ID NO: 1023517 - DNA, 120 bp, Artificial Sequence
  ENSG00000274751_0 (sequence is synthesized)
aaaggagccgcgtccccgatgtgagggagcgtctgtaaactccccttcgggctgcccgcgtccacccgaggacacgccggcaagcagcgggggaaaaaggaagccgagatctccaaaggc

SEQ ID NO: 1023518 - DNA, 120 bp, Artificial Sequence
  ENSG00000274751_1 (sequence is synthesized)
tccccggatgcctggcggtcacctctccagccacaggtcccggaggtttccttggggtcaggtcctggggccgggggtcaaagaccactgaggcctaaggatcctctgaagcgtcgcagg

SEQ ID NO: 1023519 - DNA, 120 bp, Artificial Sequence
  ENSG00000274751_2 (sequence is synthesized)
acggtgacgctcccgcgagttcagcgccctgtgaaaccccttgcaattggccagttcggggcggtaggcggggacaccttctcatccgcccaatgagctgaccccgtacaaaaggccgaa

SEQ ID NO: 1023520 - DNA, 120 bp, Artificial Sequence
  ENSG00000274751_3 (sequence is synthesized)
cgaatgcgagcatgaccgacgggaggagaagtgtggatgctccctaaaccgggggctggccctgggccggggcgcgggcgggacgtgggggaccgcgagcggcgggggcggggcgagccc

SEQ ID NO: 1023521 - DNA, 120 bp, Artificial Sequence
  ENSG00000274751_4 (sequence is synthesized)
gggaggggcgcttccggtcccccctcccgcccacgcaacaagcaggaccgggtcgggaggcccccagacccgcgagcgcgcgggacagtccgttcgccaacgcgcgaccgtgctggcccc

SEQ ID NO: 1023522 - DNA, 120 bp, Artificial Sequence
  ENSG00000274751_5 (sequence is synthesized)
cgggctctcccggcccccccgcccgcatttcgccgacggcggggccgcagccaaggtcacggtgtccgggtgcttggggaccgcggggagtgaccacattcattcattccctccctcact

SEQ ID NO: 1023523 - DNA, 120 bp, Artificial Sequence
  ENSG00000274751_6 (sequence is synthesized)
cattcattcattccctcccctactccgtcattccctccctcactcactaattccctccctccctcactaattccctccctccctcattcattcgatccctccatcactcaatcattcctt

SEQ ID NO: 1023524 - DNA, 120 bp, Artificial Sequence
  ENSG00000274751_7 (sequence is synthesized)
ccctctctcacgcattccctccctcacttactcattcattgccaccctcactcactcattccctccctcacttactcattcattcccactcactcattccctccctcactcactcattcc

SEQ ID NO: 1023525 - DNA, 120 bp, Artificial Sequence
  ENSG00000274751_8 (sequence is synthesized)
ctccctcactcattccctccctcactcactcattccctccctcactcattccctccctcactcattcattccctccctcactcactcattctcactctcactcattcccgccctcattca

SEQ ID NO: 1023526 - DNA, 120 bp, Artificial Sequence
  ENSG00000274751_9 (sequence is synthesized)
ttcattcccgccctcattcattcattcccaccctcattcattccttccctccctcactcattccctctctcattcattccctccctccctcactcactcattccctccctcactgattcc

SEQ ID NO: 1023527 - DNA, 120 bp, Artificial Sequence
  ENSG00000274751_10 (sequence is synthesized)
ctccctcactgattcattcattccctccatcactcattcattccttccctcactcattccctccctcactcatttcctctctcattcattcattccctccctccctcactcattcccact

SEQ ID NO: 1023528 - DNA, 120 bp, Artificial Sequence
  ENSG00000274751_11 (sequence is synthesized)
ctcacaaactcattccctccctcacttactcattcctccctcattcattccctccctcattcgttcattccctccctcattcattcattccctccctccctcattccctccctccctcat

SEQ ID NO: 1023529 - DNA, 120 bp, Artificial Sequence
  ENSG00000274751_12 (sequence is synthesized)
tcattcattccctccctcattcattcattccctccctcattcattcccaccctccctcattcattccctgcctccctcactcattccctccctcactcattcattccctccctccctcac

SEQ ID NO: 1023530 - DNA, 120 bp, Artificial Sequence
  ENSG00000274751_13 (sequence is synthesized)
tgattctctcccttattcattccatccctcactcattcccttcctccctcattcacttcctccctcactcattcattcactccctccctcattcattcattccctccctccctcactcat

SEQ ID NO: 1023531 - DNA, 120 bp, Artificial Sequence
  ENSG00000274751_14 (sequence is synthesized)
tccctcccttactcatttattccatccctcactcattgcctccctccctcattccctccctctctccctcattcattcattccctccctcattcattccctccctcactcattccctccc

SEQ ID NO: 1023532 - DNA, 120 bp, Artificial Sequence
  ENSG00000274751_15 (sequence is synthesized)
tcactcattcattccctccctcactcattcccttcctccctcattcattcattccctccctcactcatgcattaattccctccctcactcactcattccctccttcactcattcactccc

SEQ ID NO: 1023533 - DNA, 120 bp, Artificial Sequence
  ENSG00000274751_16 (sequence is synthesized)
ctcccacagggtccccagcgggcatttccctgtcaggcacctgcagcaggaggggcagccacacaccctgggtctgcctgcctgggaggcgcagccgtggggatgtgggtccagggcagc

SEQ ID NO: 1023534 - DNA, 120 bp, Artificial Sequence
  ENSG00000274751_17 (sequence is synthesized)
aggggcagcctcccccagaatccagtccctggaagccatgcacagccctgtcccaccaagaccagcgggggcctggcctggctgcaactcccaggctcagagcctccgtggcctgtctag

SEQ ID NO: 1023535 - DNA, 120 bp, Artificial Sequence
  ENSG00000274751_18 (sequence is synthesized)
tcagagcctccgtggcctgtctagacacctgctgtcctggcccccagccttgaggtcctgggaatctgctttttttttttccttttttttgtgagatggagtctcactgtgttgcccagg

SEQ ID NO: 1023536 - DNA, 66 bp, Artificial Sequence
  ENSG00000274751_19 (sequence is synthesized)
accaccacgcccagctgaaatctgcattcttaaccagccccctgggcaagcctggcagagggatat

SEQ ID NO: 1023537 - DNA, 120 bp, Artificial Sequence
  ENSG00000274751_20 (sequence is synthesized)
ttcttaaccagccccctgggcaagcctggcagagggatatggccctttggcttcctgacatgggctaaggttccaacgccatctttctggcgaagatgccagcacagggctgtgtgggga

SEQ ID NO: 1023538 - DNA, 120 bp, Artificial Sequence
  ENSG00000274751_21 (sequence is synthesized)
ggcgtcagccagtaaaagccgtggctgaagaaaagcaagacagccacgggcctcggtggatcccgctgcagcctcaggcacagagagggcagggctggtgaggtggggggcttgtcatga

SEQ ID NO: 1023539 - DNA, 120 bp, Artificial Sequence
  ENSG00000274751_22 (sequence is synthesized)
gtggggcttggggagactgactggatgtggtgtgtggctggggagggcctgggcctgaacctgtgggccatgggagccatagaaggttgtggaacaggagaagtaagacaaggccctggt

SEQ ID NO: 1023540 - DNA, 120 bp, Artificial Sequence
  ENSG00000274751_23 (sequence is synthesized)
tccctgtgtgtgtgtggtgagggactgaggagacatggctcaggcatctagagaattcctgtcctggtgggaagtagtgccaggaggggctggggtttggggaggctgtggcaggtgagg

SEQ ID NO: 1023541 - DNA, 120 bp, Artificial Sequence
  ENSG00000274751_24 (sequence is synthesized)
gtgagggacatggagcaggtaggggtgagggtcatggagcaggtgggggtgaggggcatggagcaggtgggggagggaagaggctccctcagttgtgcatcctcagcccacaagtgtcct

SEQ ID NO: 1023542 - DNA, 120 bp, Artificial Sequence
  ENSG00000274751_25 (sequence is synthesized)
ttgagcagcctgcacctggcacacgttttcaaggagaggggacttgttgggtccagctccctgggtacaaaggagaaactgaggcttggagagggtggggggtttgaatcagtaactata

SEQ ID NO: 1023543 - DNA, 120 bp, Artificial Sequence
  ENSG00000274751_26 (sequence is synthesized)
agatcctgggcaaggcttgtggctgactgtgccaggcacgcgcccacctttgccctggtccccttgggaggggagcaggaagtgtgatgcagagctgcctgcggtagggcgggacctcca

SEQ ID NO: 1023544 - DNA, 120 bp, Artificial Sequence
  ENSG00000274751_27 (sequence is synthesized)
gtgccctgggtgccccctccggggcctgctggggccaggctctgcacaggggtttgagagcagaggcctcttcactgagggccgattcccccagaggaataagggcctctgcagtagagt

SEQ ID NO: 1023545 - DNA, 120 bp, Artificial Sequence
  ENSG00000274751_28 (sequence is synthesized)
gaaggtggacccttaccccggagcacgcacaaaaaccagctcaaaagtcagcctcgggccaggcgcggtggctcacgctggtaatcccaggactttgggaggctgagtagggcagatcgc

SEQ ID NO: 1023546 - DNA, 65 bp, Artificial Sequence
  ENSG00000274751_29 (sequence is synthesized)
ggtgcacgcctgtaattccagctacttcgaaggctgaggcaggagaatctccttgggcaacagaa

SEQ ID NO: 1023547 - DNA, 120 bp, Artificial Sequence
  ENSG00000236780_0 (sequence is synthesized)
actccaccactgctgctgactggaggagcagcctggaaagcagccgccctcccgcaaacagagctccagctccaaatctgtgagagtgcatttggcagaatctgaacaagcaacacaatg

SEQ ID NO: 1023548 - DNA, 120 bp, Artificial Sequence
  ENSG00000236780_1 (sequence is synthesized)
attagagggtttttgtttttttgtttgtttttaacagttttgttacaatgtttccaccccaaaatgtacctggtaccaaatatactccctggaatcttcactacgatcaagataatgaac

SEQ ID NO: 1023549 - DNA, 120 bp, Artificial Sequence
  ENSG00000236780_2 (sequence is synthesized)
ctattcatcacccccagaagtttcctcgtgcccctttgtattacttttgtttgtaatagcagaatgacgcatcatccataaaaaatgtgaatgtgaggacggtgggaccatcctggcaca

SEQ ID NO: 1023550 - DNA, 120 bp, Artificial Sequence
  ENSG00000236780_3 (sequence is synthesized)
ctgagcagcagggacctccgagccctcagatgtcatccagccaggctgaccagaatggtggtgatatgaagagttggggaattcgacttgaatacaaaacataacactgctttcacttaa

SEQ ID NO: 1023551 - DNA, 120 bp, Artificial Sequence
  ENSG00000236780_4 (sequence is synthesized)
aaaggttggtgaaccatactccaacagaaaggggacataagactggctctgctggagtgaggaagctgactgagggaagaaccagaaggctgccaaaatacaattgtgtgcctttaaagg

SEQ ID NO: 1023552 - DNA, 120 bp, Artificial Sequence
  ENSG00000236780_5 (sequence is synthesized)
atacttggaatatgtcatgtattaatgggtaaagacaccgtggatatgaaggaaatcacctatgggagaatattaagaagagaagaaggggctgctggctgtagtgaaatgtataaaaag

SEQ ID NO: 1023553 - DNA, 120 bp, Artificial Sequence
  ENSG00000236780_6 (sequence is synthesized)
gagagtgtgatcctagtttctgtctctaactatgagttacttgtgattaacttcaaatattctctccataagaagaggcccagaagaagaagatgagcttcagttattctagcacaactg

SEQ ID NO: 1023554 - DNA, 120 bp, Artificial Sequence
  ENSG00000236780_7 (sequence is synthesized)
ctgtgatatttgtaaatattcaaaacctataataaaatgtataaaaggaaactccatttgaaatgatttgaaatctcacatggaaatctattttttttaaatcagagcttagtaagagaa

SEQ ID NO: 1023555 - DNA, 120 bp, Artificial Sequence
  ENSG00000236780_8 (sequence is synthesized)
atcagagcttagtaagagaaaataacagaacattgtaataattgaattacaaaaacaactgaattttggaaaatttattttctctcatgtgatgtgtgtgtatgtgtgtgtgtgtgtgtg

SEQ ID NO: 1023556 - DNA, 120 bp, Artificial Sequence
  ENSG00000236780_9 (sequence is synthesized)
gttattctatcaaatgggattagattcatttttgactcctgctaagcaccctgtccccccaaccccaagattatgaaagcggaagggaagggggagataggaaatatgacttatttaaac

SEQ ID NO: 1023557 - DNA, 120 bp, Artificial Sequence
  ENSG00000236780_10 (sequence is synthesized)
tggggccgttttcggttggcgctgcttctctttgttctgttgtcccccagtgcagtgaacccttacattatgggtttctcttgtagttctaacctctaatactcaaccattacatcttat

SEQ ID NO: 1023558 - DNA, 120 bp, Artificial Sequence
  ENSG00000236780_11 (sequence is synthesized)
ctcgtcttctaaattactctaaaatccaattataaaaccctctctccttcaagagcacacaacttgccacattactgaaatgctgggctgctcttttgtttttctaaattaataataact

SEQ ID NO: 1023559 - DNA, 120 bp, Artificial Sequence
  ENSG00000236780_12 (sequence is synthesized)
ataccattttccgtctgctcttaccatgggactcttttatatcaccacataaaatgcatattatgattctttttgcttcttttctgggctgcaaaaaagcgaaggatgattttccaaata

SEQ ID NO: 1023560 - DNA, 120 bp, Artificial Sequence
  ENSG00000236780_13 (sequence is synthesized)
ttcataaaagatctgtcagttggtttttagtgtaaaaacatttgaaactacaatccttaaagaagaaagcatcttaatatttatcagttaaaatttcactattgctttcttttgtatggg

SEQ ID NO: 1023561 - DNA, 120 bp, Artificial Sequence
  ENSG00000236780_14 (sequence is synthesized)
caaaatagaagtctatcatttttaaggttttaagagatttgaatgaattttatgtgttagttaaaatttttatggattgaaaacgcttagtttcactaagatttcaaaagcacaaacgat

SEQ ID NO: 1023562 - DNA, 120 bp, Artificial Sequence
  ENSG00000236780_15 (sequence is synthesized)
ttgaatttacaggagggcagtgactattcttaaatatagattcaacttctataagttatcaaaatatttcaggaagagagaacatgcccagaacatataagaaaaagctttaacagtatc

SEQ ID NO: 1023563 - DNA, 120 bp, Artificial Sequence
  ENSG00000236780_16 (sequence is synthesized)
cttaaatctaaaaagagcctctcacctgaggccttcacctgagagctggagcctgtgcgatggattatctggacagggaccccaatgaacagggctctgctggagtgaggaagctgactg

SEQ ID NO: 1023564 - DNA, 120 bp, Artificial Sequence
  ENSG00000236780_17 (sequence is synthesized)
gcagatttggtgtctgatgctctccacaccagtccatggctgccgtggtgtcaatgattcaggactgtttttttaatctcttcaattcctcttccagagacatgaagttaaaaccaggaa

SEQ ID NO: 1023565 - DNA, 120 bp, Artificial Sequence
  ENSG00000236780_18 (sequence is synthesized)
aaatcaagacagaacaacacatcctgtggtgtctggacagagctgaccctgtgcaacacagacctcaatggaccctgatatcttcttggttagttccatgacttgactaaatgggggctt

SEQ ID NO: 1023566 - DNA, 120 bp, Artificial Sequence
  ENSG00000236780_19 (sequence is synthesized)
ggctatcttgacagagtctcattccagccctgttcacatgctcggtggttgtggaaatacagactccaagtcattcaacacttttagcaccttcctgagaccatttactctctaaaatgg

SEQ ID NO: 1023567 - DNA, 120 bp, Artificial Sequence
  ENSG00000236780_20 (sequence is synthesized)
agtctacctgcttccacctgagagctaaagaaccttctctttgatcaagctgagttccagagttccaagtttcccaggattcagagatccctggcccagctgtgatatgcagtctcaaaa

SEQ ID NO: 1023568 - DNA, 120 bp, Artificial Sequence
  ENSG00000236780_21 (sequence is synthesized)
cacaaaacatctggagagatgatatgaacagttcatctttccctatttatatttgaaggctaaggcaatgtttatggaataaagaatttgtttaaatgaatgtctgaacattatgaattc

SEQ ID NO: 1023569 - DNA, 120 bp, Artificial Sequence
  ENSG00000236780_22 (sequence is synthesized)
cttgttatactttatctggcttcacaattgatgtagtgaaccaagatctctctatacatatactcacatgcatacacatacacataggcttatagtcataaagctatatagtcatatata

SEQ ID NO: 1023570 - DNA, 120 bp, Artificial Sequence
  ENSG00000236780_23 (sequence is synthesized)
tgaacctattaaggccactatattcatttctctaaagtctaaaagcagactggaaggatggaatatgagtataacacgaaagtaatatttttcacaaagtcatggctattaagaacctta

SEQ ID NO: 1023571 - DNA, 120 bp, Artificial Sequence
  ENSG00000236780_24 (sequence is synthesized)
tagtctttgagtggagtgtataatttgaaattaaagtttcataactgagtatccttctttttagaagaaaaatgttctcataaatctgttacccaaaatgcttttgaaagaaaatttacc

SEQ ID NO: 1023572 - DNA, 120 bp, Artificial Sequence
  ENSG00000236780_25 (sequence is synthesized)
attttcttcaactttaaaatcatacttgcaagggaagctctgtgcagagatgtttggcataaatatgaatgacaatatataaaaactattaccacactactaaaaaatgttgggcagctt

SEQ ID NO: 1023573 - DNA, 120 bp, Artificial Sequence
  ENSG00000236780_26 (sequence is synthesized)
tgacctggttatttgattgaactttctgaatctgatttgtcaactgaagacaagtaaaagtttttttacaaattctatccttagcctctcaattaatctcaaatatttgttcagagaaat

SEQ ID NO: 1023574 - DNA, 120 bp, Artificial Sequence
  ENSG00000236780_27 (sequence is synthesized)
aattgaaaattctgactgtatcctgactgaaatgtggatcactgggggcctcaaagcttcagtgtgtttagttccctatggttttgaggcacatgccctatgtgaaccttttgaaggaca

SEQ ID NO: 1023575 - DNA, 120 bp, Artificial Sequence
  ENSG00000236780_28 (sequence is synthesized)
gaaaaattcataactgactagcaattggttaactttagttaaaaagtgaaacacctactctagtggtgcaaaagatgtctgcaaagggcaaaatcttcagctttgaaaggcattcagcaa

SEQ ID NO: 1023576 - DNA, 120 bp, Artificial Sequence
  ENSG00000236780_29 (sequence is synthesized)
tgtcaatagactagcacttgagagtcacctaaaatttatttgtattacttttcacccaattttaaagaagaatatttctaagataaaagcttaaaactttttaattaaaaaaaaaaaact

SEQ ID NO: 1023577 - DNA, 120 bp, Artificial Sequence
  ENSG00000236780_30 (sequence is synthesized)
aaactcagtactcctaagccttcatagatatatacttcagtatcttgcatgacattgaaagctctaataaccaaattctttcctgactcctaattatgtgtccttgttcttctgtttaaa

SEQ ID NO: 1023578 - DNA, 120 bp, Artificial Sequence
  ENSG00000236780_31 (sequence is synthesized)
gtaacattttgtgtctatttgtgtatatgcatgtgtacacatttgtgtgagttcacaaatgattactctgatgaatgttaatttatatcaatctaaccaaaataaaattagagaaatctt

SEQ ID NO: 1023579 - DNA, 120 bp, Artificial Sequence
  ENSG00000236780_32 (sequence is synthesized)
acatatcaacgtaacttatattcatacagaaatgaagacttgctaaagcaacattcttgaaaagatgtctggggatgttgcactgctaaacctacctgtccctgagtaactatattgtgt

SEQ ID NO: 1023580 - DNA, 120 bp, Artificial Sequence
  ENSG00000236780_33 (sequence is synthesized)
cccagagttccctctgattgaattccactgactcagagtggcaattgttttgataacatacccttgatcggcttccttccttttctcactttccttttgcactggtgtctcctgtgatca

SEQ ID NO: 1023581 - DNA, 120 bp, Artificial Sequence
  ENSG00000274758_0 (sequence is synthesized)
agtgaagtgaccaggactgggaaatggcaaagatcgaagaggggaggcagagactggagaagctaaaccaagcaacagcctgagactaagtgccaagtgtgtaaatacattctggccaaa

SEQ ID NO: 1023582 - DNA, 120 bp, Artificial Sequence
  ENSG00000224958_0 (sequence is synthesized)
taaataggcagagctaagacttaggggactggcagattattgcaaaaagggcacggggcagagggactatgttgtgagcctgcgaaagaagtttgtgtggggactgtgggcagtgaatgc

SEQ ID NO: 1023583 - DNA, 120 bp, Artificial Sequence
  ENSG00000224958_1 (sequence is synthesized)
gttgggaacaatatggaaaactgggagctgccttggaatctacagggccgggctgaagaaaagaagaatggtattcatgcagttcccattttacagatgaaaacaagaggactttttctg

SEQ ID NO: 1023584 - DNA, 120 bp, Artificial Sequence
  ENSG00000224958_2 (sequence is synthesized)
ttacaatggtactttcagcctgtccgaattatgtattgcccctcccctttttattaataacattgaagtgtgatgggacaaccactgaagccgtctgttgaaacctgctgggacttttta

SEQ ID NO: 1023585 - DNA, 120 bp, Artificial Sequence
  ENSG00000224958_3 (sequence is synthesized)
gccattctcttcaacataaagaatgggtgtttttggagggggtgagaggaatggggaaatgttgtcaaagagtacaatgttttagttgagacaggaggaatatattttgttgagatctac

SEQ ID NO: 1023586 - DNA, 120 bp, Artificial Sequence
  ENSG00000224958_4 (sequence is synthesized)
agcacagcatggtgactgtagttaacaatgaagtattgtgtatttcaaaattgctaagacaataaatttcaaatgttctcaccacaaaaaagataggttttgaggtgatgaatctattaa

SEQ ID NO: 1023587 - DNA, 120 bp, Artificial Sequence
  ENSG00000224958_5 (sequence is synthesized)
ccttggaatctacagggccgggtaagagaatgtccgaaagaaaaatgagcaggtgcgggatgtgcgcagagtcggagaagagtccagggcgcccggagtggctccaggaacgacggaaac

SEQ ID NO: 1023588 - DNA, 120 bp, Artificial Sequence
  ENSG00000224958_6 (sequence is synthesized)
ccctcaaggcttttgggggcggacccactcgagccatccacactttccccagcctcctccaaaacagcacactttccggctgaagaaaagaagaatggtattcatgcagttcccatttta

SEQ ID NO: 1023589 - DNA, 120 bp, Artificial Sequence
  ENSG00000224958_7 (sequence is synthesized)
atttgtcaattaacatttttttaaaagaatagtgtggccagtcggggaggtagtttttttttttcctctagtctctactcagtctccaagatcccatttcccataaagttcctgtcaccc

SEQ ID NO: 1023590 - DNA, 85 bp, Artificial Sequence
  ENSG00000224958_8 (sequence is synthesized)
tgcagtggcacaatcatggctcactgcaccctctccctcttgggctcaagcgatcctcctgcctacaggttgtagacatggggtt

SEQ ID NO: 1023591 - DNA, 78 bp, Artificial Sequence
  ENSG00000224958_9 (sequence is synthesized)
ccagctaatttttgtagtttttgtagacagctcaatcaatctgcccactttagcctcccacagtgctgggattacagg

SEQ ID NO: 1023592 - DNA, 120 bp, Artificial Sequence
  ENSG00000224958_10 (sequence is synthesized)
gcacagcctacacacaccagtttctctttagaacatacttaagagtcttggcttagcatccaacagacagaactttaacacttctagggatctgtgcacctgtctatggtgtggggtttt

SEQ ID NO: 1023593 - DNA, 120 bp, Artificial Sequence
  ENSG00000224958_11 (sequence is synthesized)
taagatctctttctaatgacacttttttttgcaaagcaggacagtttcattcccagaagagcaggtatggtaaatcctttgttccagtaacgaagacaatgatccaaaccctaagcctca

SEQ ID NO: 1023594 - DNA, 120 bp, Artificial Sequence
  ENSG00000224958_12 (sequence is synthesized)
gagaagcccagaaaccctccaggcctccatctctctgctcctagcacctgcctctctcttgacatcaacatcattctcccctctcacagcccagctccttccacagacccagggattagg

SEQ ID NO: 1023595 - DNA, 120 bp, Artificial Sequence
  ENSG00000224958_13 (sequence is synthesized)
caccagcacctcagactagattttagagaattaccattcaagaggcaatcctcttcccttggttccaatttcaaggttctcaaagactggaacagggctagtttgaggcaatgtgcccta

SEQ ID NO: 1023596 - DNA, 120 bp, Artificial Sequence
  ENSG00000224958_14 (sequence is synthesized)
ccacatagccagaaagaaccttacagtgacaaggaaaacaagtcttccaaagtaagggggtgctgatccccagagggaggacagatgggcaaccaaacagtaaccgggccaccacgtgct

SEQ ID NO: 1023597 - DNA, 120 bp, Artificial Sequence
  ENSG00000224958_15 (sequence is synthesized)
tcacactcactgatcaaggatttctaaaaccatttgtcttttctctgaatttatataggactttgtatcactcataaaggaatgtcttataggctgataacacctttctattcatgctta

SEQ ID NO: 1023598 - DNA, 120 bp, Artificial Sequence
  ENSG00000224958_16 (sequence is synthesized)
tacctaacatttaggctaggataatttcctaacctcagtgtcctcactataaaatgggaattattataatccctacctcataaattgttgggaggattaaaatacttagtaaagtgcctg

SEQ ID NO: 1023599 - DNA, 120 bp, Artificial Sequence
  ENSG00000224958_17 (sequence is synthesized)
actaatagaaaggcattcaataaatgttagctattcatggtgtcatcatcattatatttaccattattactaatctcctgtattgcaagaattacagtttatatttttgtagaccatcac

SEQ ID NO: 1023600 - DNA, 120 bp, Artificial Sequence
  ENSG00000224958_18 (sequence is synthesized)
tgtagctaaagggtctttgggccataggtgatattccataaaggttggttaaattgttctgtggtttttgactatggaaactcagaactccctcaaaatgtacaaaacagatttacctgc

SEQ ID NO: 1023601 - DNA, 120 bp, Artificial Sequence
  ENSG00000224958_19 (sequence is synthesized)
gttgtgagcctgcgaaagaagtttgtgtggggactgtgggcagtgaatgcgttgggaacaatatggaaaactgggagctgccttggaatctacagggccgggacccactcgagccatcca

SEQ ID NO: 1023602 - DNA, 120 bp, Artificial Sequence
  ENSG00000224959_0 (sequence is synthesized)
tgcgtcctggtgaggacactgcgtttctttcagactttgaagatctgtcgttttagaaaagtggctgcctctgtcaccagccccatggttactgtcctgtagtgtgactgtcaggaggtg

SEQ ID NO: 1023603 - DNA, 120 bp, Artificial Sequence; identical to SEQ ID NO: 1022636
  ENSG00000224959_1 (sequence is synthesized)

SEQ ID NO: 1023604 - DNA, 120 bp, Artificial Sequence; identical to SEQ ID NO: 1022637
  ENSG00000224959_2 (sequence is synthesized)

SEQ ID NO: 1023605 - DNA, 120 bp, Artificial Sequence
  ENSG00000224959_3 (sequence is synthesized)
gtgaaaatgaaacacagacagtgatgacagctggaagttggccaatgtcctgttgtcatattgccctcagcctagggactggcctgtggctcactgaccctgtctcccactctccacctc

SEQ ID NO: 1023606 - DNA, 120 bp, Artificial Sequence
  ENSG00000224959_4 (sequence is synthesized)
tcatcagcacctggacctggtgcacctggtctacctcatgtccagtgttttccgcagtacctgactggtatccccacccttggttgttgtgtggtgagctcgtccctatgttggcaagtt

SEQ ID NO: 1023607 - DNA, 120 bp, Artificial Sequence
  ENSG00000224959_5 (sequence is synthesized)
acttaattcctaggtgtcccgccttcctcactgtaaaatgagaatagtcatagcacgaatgtcatgaatccttgtgaagattttatgattagcacacgagttacaaggagacacgataac

SEQ ID NO: 1023608 - DNA, 120 bp, Artificial Sequence
  ENSG00000224959_6 (sequence is synthesized)
tgttacgtacgtactcattcgttcggaaatacaacagacagcttagtatctccacccgggtccctctgccctgtgggaatccataaagaattgattctcatcccccagaagtgagatccc

SEQ ID NO: 1023609 - DNA, 120 bp, Artificial Sequence
  ENSG00000270661_0 (sequence is synthesized)
gttattactatcaatttttaaaaaggccatggcaccccagaaggtacagatcctctgaatgctaagattgtgtttttacagttgtctagtataggacaggcttctcatgtggaaaagagg

SEQ ID NO: 1023610 - DNA, 120 bp, Artificial Sequence
  ENSG00000270661_1 (sequence is synthesized)
attcagtgtggtatcaaaaaattgattggaaggcttcctctcttactctctcatacatagacattcacaaacaccatctttgtttagtaaactgtggagactcttccaaaagaaaataga

SEQ ID NO: 1023611 - DNA, 120 bp, Artificial Sequence
  ENSG00000270661_2 (sequence is synthesized)
cactaatttttggagaatccattcagctttcacaggcctctaaatagcacaggtgttagaattactaaggataacgattacattaaccaggagcaaaactaaaaatacatcgttctactt

SEQ ID NO: 1023612 - DNA, 120 bp, Artificial Sequence
  ENSG00000270661_3 (sequence is synthesized)
tcatacttggaaatatcggccttttgatattacaaaaaggccaattttgccaggtccttcgaaatttcaaagaaagattcagtaaaaataaataaataacaggactcactggagccatga

SEQ ID NO: 1023613 - DNA, 120 bp, Artificial Sequence
  ENSG00000270661_4 (sequence is synthesized)
tgaaatatttccacctaaaggaaacaatctttaacagctcatccttcagtacactcaaacttctcttgaaccacttaaaaactccattccagggagtcctccaaagttccacaacaccag

SEQ ID NO: 1023614 - DNA, 120 bp, Artificial Sequence
  ENSG00000270661_5 (sequence is synthesized)
acgcaagctacccaggacatgtgctctagcagggcatgcccagggcccccagatagatgactgaaaaatataattctttcaggtggacaaggcccagcaggaacgtagtgtgccaggttt

SEQ ID NO: 1023615 - DNA, 120 bp, Artificial Sequence
  ENSG00000270661_6 (sequence is synthesized)
ccctgccagccctcctcgccctctcggcggggggccaaatgactcaacacagccctgttcgtacctcccttttcttcccatctcccacattataagagatcagagccaagttatccttca

SEQ ID NO: 1023616 - DNA, 120 bp, Artificial Sequence
  ENSG00000270661_7 (sequence is synthesized)
cccaaggtcataatctcagattggggagtggtaagtggataatgacaggctctcacagtgaactctcctcctaaacttggcacatcacaaagatttcatcttgcatgctgtccaacctag

SEQ ID NO: 1023617 - DNA, 120 bp, Artificial Sequence
  ENSG00000270661_8 (sequence is synthesized)
tggactgttgacaaagagttgagatgaaatccacccttaggagagagcagtggatggattatcagtatattctgtgggctcccaatagtatatatgtctccagtttgctgtccttgtcca

SEQ ID NO: 1023618 - DNA, 120 bp, Artificial Sequence
  ENSG00000270661_9 (sequence is synthesized)
aaccacccaaatcaccaagagttcattgagcaattaatatatacaaggcattgtgagagatgcttccaaacctggccaaatatcagagtctttggggagctttttaaaaatgcagatcct

SEQ ID NO: 1023619 - DNA, 120 bp, Artificial Sequence
  ENSG00000270661_10 (sequence is synthesized)
tcacaatttttctgtaaatctaaagttattctaaaacacaaaagttattttttaaaatgcagatcctttggtttcactgaatcagaagctccccagaagactgtaatatggtcatttaga

SEQ ID NO: 1023620 - DNA, 120 bp, Artificial Sequence
  ENSG00000270661_11 (sequence is synthesized)
gagctcagaaaccaccatttaagaggctactaagataactaatattaagaccgtcactactcttacccactactcttataaagaaaaccctgcagtcatgcaaaactgcaacacattcat

SEQ ID NO: 1023621 - DNA, 120 bp, Artificial Sequence
  ENSG00000270661_12 (sequence is synthesized)
gggtcatcagatcaattttatgggtcatgaccaggatatactcttaaatacaatagagaagttttaggtacattattactttgtgaatcttttctctgagacacatatatatggatatct

SEQ ID NO: 1023622 - DNA, 120 bp, Artificial Sequence
  ENSG00000270661_13 (sequence is synthesized)
atatctatctccatatctacaccaatatagatatagataccaatctgtgtactgcatcacaatgaaaacatgtatgttttactttgcggcaaagactaaaaatgtgaaattaaatggtct

SEQ ID NO: 1023623 - DNA, 120 bp, Artificial Sequence
  ENSG00000270661_14 (sequence is synthesized)
aaattaaatgcttcctactgcaatcttagtgtcttccctctcttgttttctagtggaaactaagaagcttaccatcaaccacaactctccattaaaaaattataaattgatcttctctta

SEQ ID NO: 1023624 - DNA, 120 bp, Artificial Sequence
  ENSG00000270661_15 (sequence is synthesized)
gccttatttctctaacttggaaatgtggaatttccttgcctttttttcatagacaaatgttgttattctttattaaacttcctccaaatggggtttattaaattttagttttaaagtgtg

SEQ ID NO: 1023625 - DNA, 120 bp, Artificial Sequence
  ENSG00000224950_0 (sequence is synthesized)
atagctgttcccagcagttagaggaaatggcagccctgggacctggggggatccaagggcagtccacgtctccatgggaagatggcagcagctctgtggctcttcacagtgaagtgacga

SEQ ID NO: 1023626 - DNA, 120 bp, Artificial Sequence
  ENSG00000224950_1 (sequence is synthesized)
cctgttgttaaatgtttaacagaagccaaacttggcttttaggggacagctctcctgccagccagccagcttgccaaaggaatctttcctgtgcacagagagcacactgggcttggagac

SEQ ID NO: 1023627 - DNA, 120 bp, Artificial Sequence
  ENSG00000224950_2 (sequence is synthesized)
attctctgcacagtgggatttggtgagaatcttaagagtttctgttcaaggtcagtttgtctctctcagaccgtggcaccaaggaacctgctgctaccctacttgatggggctgaacagg

SEQ ID NO: 1023628 - DNA, 120 bp, Artificial Sequence
  ENSG00000224950_3 (sequence is synthesized)
agatatattccacgcttcacaattgccacctttcgggagcggcttcaccagttacctccaactcccgccagacccaattcagagctgccatcaggtcagacctttgcctgctcttggcaa

SEQ ID NO: 1023629 - DNA, 120 bp, Artificial Sequence
  ENSG00000224950_4 (sequence is synthesized)
cacgtccccctgtcctgctcctctgcaacctgcccctctttttcttcatgtgctgtgaaggcaccatgtggatgggtgttcaacttctggattggggatgcacagagcctgagggacaca

SEQ ID NO: 1023630 - DNA, 120 bp, Artificial Sequence
  ENSG00000224950_5 (sequence is synthesized)
ctttgcaaacctgcaccttgcacttttgggttctggcctgcaaggtctcctttattcttttggaccaaggctgtccctgggagagggcagccgccggcctgtcagagcaaatcagcctca

SEQ ID NO: 1023631 - DNA, 120 bp, Artificial Sequence
  ENSG00000224950_6 (sequence is synthesized)
ggcggtttctgcggctctggtatttgagctttgttttccctctctcccgggaagaactcattgaaatagtttctctgggaaagacaaagcgtctcgcccagatgctgaaggatcacttgg

SEQ ID NO: 1023632 - DNA, 120 bp, Artificial Sequence
  ENSG00000224950_7 (sequence is synthesized)
taactgcctgtcttggtttcccgttgtgcccatgaaggcgccatcagctctaaagctgacctgtggttccgtctccaaacagctaacccagacgtcacccccttgcagccagccgcacag

SEQ ID NO: 1023633 - DNA, 120 bp, Artificial Sequence
  ENSG00000224950_8 (sequence is synthesized)
cctgagttggagttctggcctctcctagcagtgagtgacagtgttggaggggccttggacaccttgggtaattgctaactaaatatgagcagtaggggaaggtcttctggtccacggcag

SEQ ID NO: 1023634 - DNA, 120 bp, Artificial Sequence
  ENSG00000224950_9 (sequence is synthesized)
ctcttttctagtcagggtagaaagctagaaagaatcctaaaaatcactatccaagtccccattgtgtggggacagaggcctggcctgaagcctaggctggagggttcagtcggaagcaga

SEQ ID NO: 1023635 - DNA, 120 bp, Artificial Sequence
  ENSG00000224950_10 (sequence is synthesized)
agccgggagactgcatgagagggttccttccagcttcaccaagcccgtgctgcgcgggatgaagaaagtcaagcctgtcttccagtggggccctgaggtgggggagctggaggatagggt

SEQ ID NO: 1023636 - DNA, 120 bp, Artificial Sequence
  ENSG00000224950_11 (sequence is synthesized)
ggcagcttttttatcagctgtccccaaaagaggcccttctcccagttgccacggaccaaagctcctcctgggagctccagcctgtctgttcaatgtttgccttgcgccttttcctggtga

SEQ ID NO: 1023637 - DNA, 120 bp, Artificial Sequence
  ENSG00000224950_12 (sequence is synthesized)
ggccacccccggcaccatctcaggcctcagaaggacgacctcactgaaacagcccttaggttgggaaagaagcaagccctccgcgccccgtccaagtctctcaactgggcacgagcacac

SEQ ID NO: 1023638 - DNA, 120 bp, Artificial Sequence
  ENSG00000224950_13 (sequence is synthesized)
acagacgcccaggccctgtccctgcgccagaatggccgctcgcgtttccaggcacgatgcccctttccatgagtgcacagagccctgggctgagctgggggccgagctccacgctctctg

SEQ ID NO: 1023639 - DNA, 120 bp, Artificial Sequence
  ENSG00000224950_14 (sequence is synthesized)
agcagctctgagcggcacgccaaagaaggtctttcagatgggctctgggatgtggaaccatggcgtccagccctagcgtcgactccacactagaggcaccctgactttcgcccccttctt

SEQ ID NO: 1023640 - DNA, 120 bp, Artificial Sequence
  ENSG00000224950_15 (sequence is synthesized)
acctgagtatcagcttacttccatctggggactgaatatggggcagattccagaaaaaggaggttggggcaccaaaaccaacaccaactctgccaacggagccagcacagctatttgtct

SEQ ID NO: 1023641 - DNA, 120 bp, Artificial Sequence
  ENSG00000224950_16 (sequence is synthesized)
ccaaccacaggccgcaagggaagttcacgggctcggcacccccaggtcccggatgtaaggatattgcccgttagacaaaggaaaggccccaagtccacaactcatgtttgtgagcttaac

SEQ ID NO: 1023642 - DNA, 120 bp, Artificial Sequence
  ENSG00000224950_17 (sequence is synthesized)
cttgtcctataaagcactttggaacaggcccaggttctcccaccatgtacagctgccattgacctggacagtcccgcaaggtccttcagtggaaacccagaagggagagtcactgcatgt

SEQ ID NO: 1023643 - DNA, 120 bp, Artificial Sequence
  ENSG00000224950_18 (sequence is synthesized)
gaaccctaagggttctggaggtcaaagttgctgtgggtgacaggcaaccaagactaagggcaaacttgaaacataaatgagttaaaacccacaaaaataagacagttttaaataactaaa

SEQ ID NO: 1023644 - DNA, 120 bp, Artificial Sequence
  ENSG00000224957_0 (sequence is synthesized)
agagaggggccccctcagcgcagcggcgggctgaagggctgctggagcgcggccagagcggacgccgaggccgaggaggcgccgagagcgagtgagagctgctagccagttgtcacctct

SEQ ID NO: 1023645 - DNA, 120 bp, Artificial Sequence
  ENSG00000224957_1 (sequence is synthesized)
cacagagaggtccacatttgctgaaatgtaactcttatctcatgcactgggagtgatgaacttcactaggaaatcatcgttctttctggtgcctattgacttctcacattgttgccacta

SEQ ID NO: 1023646 - DNA, 120 bp, Artificial Sequence
  ENSG00000224957_2 (sequence is synthesized)
taacgcggatacaagctgaaactcacaattgttatgttttgaaacttgctaaggaattagacgatataagctgcagctcagaatcagaggagctttaatatatagttgacacttgaacaa

SEQ ID NO: 1023647 - DNA, 120 bp, Artificial Sequence
  ENSG00000224957_3 (sequence is synthesized)
catggatctgaactacacaagtccacttattggtggattttcttcagcctctgccacccttgagacaacaagaccaatacctcctctttttccttctcctcagcctactcaacttgaaga

SEQ ID NO: 1023648 - DNA, 120 bp, Artificial Sequence
  ENSG00000224957_4 (sequence is synthesized)
tggtgagaatgaagacctttatgatcatccacttctacttgttgaatagtaaatatattttttccttatggttttcttaataacactttcttttctcttgattactttattgccagaata

SEQ ID NO: 1023649 - DNA, 120 bp, Artificial Sequence
  ENSG00000224957_5 (sequence is synthesized)
cagtacatagtacatataataagcaaagtatgtattagtttactgtttaagtgataggtaaggcttccactcaacagcaggcaacagccaggtgttgtgacacatgcctgtaatcctagc

SEQ ID NO: 1023650 - DNA, 83 bp, Artificial Sequence
  ENSG00000224957_6 (sequence is synthesized)
gcccaggagttcaagaccagcctaagtaacatagtgagacccccatctccacaaaaaattaaaatacctaatacctacaatag

SEQ ID NO: 1023651 - DNA, 120 bp, Artificial Sequence
  ENSG00000224957_7 (sequence is synthesized)
tgcaatcccagctactcaggaacctacaataggagccaaaaaggtggaggttacaatgagccattattgcactactgcactgcactcctgcctgggagacagagtgagaccttgtctcaa

SEQ ID NO: 1023652 - DNA, 120 bp, Artificial Sequence
  ENSG00000224957_8 (sequence is synthesized)
aacactacaacaaacaacaacaacagcaacaaaaatcagtaggtattaatagttaggttttttgggagtcagaagttatacacagattttgactgtgcaggggatcagcgctcctaacgc

SEQ ID NO: 1023653 - DNA, 120 bp, Artificial Sequence
  ENSG00000224957_9 (sequence is synthesized)
ctgcattcttcaagggttacctgtattcttgatacaagttctccttcagatttaagtattatagatatttttccagtctatagcttacctattcattttcttaataatgtcttttgattg

SEQ ID NO: 1023654 - DNA, 120 bp, Artificial Sequence
  ENSG00000224957_10 (sequence is synthesized)
atttttaatttttaactttggtgaattccagttgtatactttttttatgattagcatttttgtgtcctatgaaactgttgccttcctcaatgtcactaaattctcttaggttttcttcta

SEQ ID NO: 1023655 - DNA, 120 bp, Artificial Sequence
  ENSG00000224957_11 (sequence is synthesized)
gcaagtttatgtttcaaattttcacccttaggtctataattcgtcccaaatttatttttgtctgtaaagcaatgtcacgattcattttttttctcaatataattacccagttgtttcaaa

SEQ ID NO: 1023656 - DNA, 120 bp, Artificial Sequence
  ENSG00000224957_12 (sequence is synthesized)
actggttattaaagtttttctcttaatcattgaattttcttggcaccaaattattaactcttgacaaaaataattgacccttaagtaagcagacagacaagcagtgcttctattttatag

SEQ ID NO: 1023657 - DNA, 120 bp, Artificial Sequence
  ENSG00000224957_13 (sequence is synthesized)
caatgtaaataatacacaacttacacaaagactttttagaagctaactaacagtggtcctatctaagtacgtacaccagattttttataaccacttttaaaataaaagtatttagatttt

SEQ ID NO: 1023658 - DNA, 120 bp, Artificial Sequence
  ENSG00000224957_14 (sequence is synthesized)
aacacatagattaggacagagaaagcatatggtggaataaactgtatctttttggccagatggtgctatttctaggtcatcttgataaagagaggaggcaaacatgaaaacttaatgaaa

SEQ ID NO: 1023659 - DNA, 120 bp, Artificial Sequence
  ENSG00000224957_15 (sequence is synthesized)
aactatttatgatgctggagagaacatcttggctttgagtcacttttaaatcatagaagaggattattccataaaattatttataatgcctaaaattattctttgcccaaatcataaatt

SEQ ID NO: 1023660 - DNA, 120 bp, Artificial Sequence
  ENSG00000224957_16 (sequence is synthesized)
ttcagcattaccaagaagccatttagtatgtatagggtgtttcagcaagtgcagagatgcccaggtggttgggattcaatacaacgagctgtcacgctgcacattcttggagtacaacct

SEQ ID NO: 1023661 - DNA, 120 bp, Artificial Sequence
  ENSG00000224957_17 (sequence is synthesized)
taatgggcattttcccacctgtgcaattcctctgttttcaccccactccattcatatttcacaaactactctaattatagtatttattattgacctcaggaaaaagaagtttgaaagggt

SEQ ID NO: 1023662 - DNA, 120 bp, Artificial Sequence
  ENSG00000224957_18 (sequence is synthesized)
aaattacatagacttttgccctaacactaatcagctgcctgatctgtaaatatttcagatccttgcctgtatctatttctccttgcagaaaactgtaatttatctagatttttctaataa

SEQ ID NO: 1023663 - DNA, 120 bp, Artificial Sequence
  ENSG00000224957_19 (sequence is synthesized)
ttcactgacattttactgctatccaatgagtaaatcattgttgcttttggtatcttatgattttgttcttttgtgtcaaagtttagctagtttcatctatcaggttggaataaaaaatgc

SEQ ID NO: 1023664 - DNA, 120 bp, Artificial Sequence
  ENSG00000224957_20 (sequence is synthesized)
aaattatgactataccacttatatagttacatgatctactgaccaaagttaatcatcactttaatcttggtaactcattcagagccctaattgtaatagcctttgcctgagttacctaga

SEQ ID NO: 1023665 - DNA, 120 bp, Artificial Sequence
  ENSG00000224957_21 (sequence is synthesized)
gagtggtctcaataatccccttttatttttcatgtagagaaaagggcacacaaaatgatattatctcgatcacccagcacatgtattaaactataacagactttttaaatcatgtgtgat

SEQ ID NO: 1023666 - DNA, 120 bp, Artificial Sequence
  ENSG00000224957_22 (sequence is synthesized)
cttttattttttgactgaaagggactaagtttgctgcccagagaagtctttagggagcaaggaaaggtaagcaaataaacttatctggagtcaaaggtctcaaggaaaatcttgctttct

SEQ ID NO: 1023667 - DNA, 120 bp, Artificial Sequence
  ENSG00000224957_23 (sequence is synthesized)
ataaaaggcagacaacgtcaagactcatagattttcccagggctaaaaatcagagccaattgcctcccatcttgaaaagactcattcatcatgctggttgaagtatcacagatcttgtca

SEQ ID NO: 1023668 - DNA, 120 bp, Artificial Sequence
  ENSG00000224957_24 (sequence is synthesized)
aaatattcatgactcacatacgacccatccaaaagacaaaagccaacaaaatattttaccaaattctaaaatagtgtttgttttattattctttgttattcttcaacaattattgttacc

SEQ ID NO: 1023669 - DNA, 120 bp, Artificial Sequence
  ENSG00000224957_25 (sequence is synthesized)
tttactatatgaaatataatagcaattccttgtcttcatggtctttctgttacagacatgttttacactgattataccactttagtgaaattcatcatacatattcctgatccaaattcc

SEQ ID NO: 1023670 - DNA, 120 bp, Artificial Sequence
  ENSG00000224957_26 (sequence is synthesized)
ttttttattaaccatatatgagagaaagtggatattaaaataattttgatggtaaaataagcgaaaaaataaagcaagcatggttaaaatgattaaattatggaaaagtgacccatgtgt

SEQ ID NO: 1023671 - DNA, 120 bp, Artificial Sequence
  ENSG00000224957_27 (sequence is synthesized)
ttcagataaactgacgcttgagggtttttgttgttattgtggtttaaattttattttattttaattttaagttccaggatacaagtgcaggatgtgcaggtttcttacataggtaaagat

SEQ ID NO: 1023672 - DNA, 120 bp, Artificial Sequence
  ENSG00000224957_28 (sequence is synthesized)
gtgccgaaatggtggtttgctgcacctctcaacctatcacctaggtattaagccctacatgcgttagctccctcccactgcccctgcagcagatcccagtgtttgttgttccctccctgt

SEQ ID NO: 1023673 - DNA, 120 bp, Artificial Sequence
  ENSG00000224957_29 (sequence is synthesized)
atgtgttctcattgtccagctcccacttgtaaataagaacctacggtgtttggttttctgttcctgttttagtttgttgaggataatgacttccatgaagcttgagttttcattctacaa

SEQ ID NO: 1023674 - DNA, 120 bp, Artificial Sequence
  ENSG00000224957_30 (sequence is synthesized)
acaatttactgaatgacatttgagcagctagctgactttttaatgccttgattttaataattcaatgagttattgggtgagataatttagaacagcatacatgatatcgttattattagt

SEQ ID NO: 1023675 - DNA, 120 bp, Artificial Sequence
  ENSG00000224957_31 (sequence is synthesized)
caataaaatgctatttatcttatttattactcataacaaaaatatgtatatgacccttcgctatgtttgaatatgtgatatattgaattgaattcactgtgaggcttcagtaggtaccta

SEQ ID NO: 1023676 - DNA, 120 bp, Artificial Sequence
  ENSG00000224957_32 (sequence is synthesized)
taatattcaaatatgttacctgaaagctgtgaaaaatatatttttaaaaattagatttacatgcagtcaagttttcttttgatgacacactctcttgatatatactaagttttatacttg

SEQ ID NO: 1023677 - DNA, 120 bp, Artificial Sequence
  ENSG00000224957_33 (sequence is synthesized)
gaatctttcacttttatccttactcagaaacgtgaatattaagaatcagtagagccagctcttctacatgttccctgccaattgctatcttgcctacttttaaaacacctctaacttgag

SEQ ID NO: 1023678 - DNA, 120 bp, Artificial Sequence
  ENSG00000224957_34 (sequence is synthesized)
aaaatgaaaacccacaaactaacaattgttccagggaagtccatggcatcacttggaacttttcatcattagtcccagttacactcttttgtgttgtatacaacattggcatatactcta

SEQ ID NO: 1023679 - DNA, 120 bp, Artificial Sequence
  ENSG00000224957_35 (sequence is synthesized)
gtcatctgtatgccaagttaaatgagacttcattcagcaaccagtaatatgtcatgcatcagaagtctctctcatcatattgcttatcaccatcaaatagtttccattttgtctttattc

SEQ ID NO: 1023680 - DNA, 120 bp, Artificial Sequence
  ENSG00000224957_36 (sequence is synthesized)
cttaaaaattgtcatgcttaaaattggtgcaaataatgtagatacttgtgattctattatatctacatatatttttctattttgcaagagaagtgaattttaataaattagttctcttag

SEQ ID NO: 1023681 - DNA, 120 bp, Artificial Sequence
  ENSG00000224957_37 (sequence is synthesized)
taagcaatcctaccacctaaccctcctaagtagctgggactacagcaggtcaagttgcttcttttcagtgatcataatcaattatccaggaaaagggacagaagaaatcaggaaaaagga

SEQ ID NO: 1023682 - DNA, 120 bp, Artificial Sequence
  ENSG00000224957_38 (sequence is synthesized)
agagtatatgactgcacctcatgaggtacactgaactagaactgcccagggttttatttcccaaaacatacttttccttctatttgcaactcttttttgttcttcttcaaaccatgctgt

SEQ ID NO: 1023683 - DNA, 120 bp, Artificial Sequence
  ENSG00000224957_39 (sequence is synthesized)
cctgctttttcacgcctgcttctggataatctcatggatggaaagggtgaataactggatctgtggactttcctctcatctcctggacatctaaggtgcctattgacttctcacattgtt

SEQ ID NO: 1023684 - DNA, 120 bp, Artificial Sequence
  ENSG00000224957_40 (sequence is synthesized)
tggagaatttgactagaagtaggaggatcatttactacatggcaaaaaaacaaatcagtctatcttagaaaggttaaaatttacatggataataaagaaaggaaggtagaagaagagtga

SEQ ID NO: 1023685 - DNA, 120 bp, Artificial Sequence
  ENSG00000224957_41 (sequence is synthesized)
taaattagtgagaaaagaacagtaggtgtaattatagcaatatgcttaaatgaaagagaaaaatatggcagaagcatttattgatttgagattgtaatttttttaaataaaaaagcttag

SEQ ID NO: 1023686 - DNA, 120 bp, Artificial Sequence
  ENSG00000224957_42 (sequence is synthesized)
atggaggacacagaaaggtgagaacttgctaacaggaatcccattaaagaagcttcagaatttgaagatcagcaaagagaaggaagagatgagaatgaaaggctttatgaaggaatgaaa

SEQ ID NO: 1023687 - DNA, 120 bp, Artificial Sequence
  ENSG00000224957_43 (sequence is synthesized)
tgacagtcattgcatttattgatgtatctgtatttaaacataagtatatttatttatatttgaacataacagttttctagcaaaattaataaggattatgctacagacatactcagttac

SEQ ID NO: 1023688 - DNA, 120 bp, Artificial Sequence
  ENSG00000224957_44 (sequence is synthesized)
gatcttagagggattctgagaactctttgataggttatttacttatagtttgtcagtagtttctaaacatttttggatggacatctctataagtaataatatttgagcaagtaaacttca

SEQ ID NO: 1023689 - DNA, 120 bp, Artificial Sequence
  ENSG00000224957_45 (sequence is synthesized)
attctctaatgtttatcatctgtggatacaagtcatccaggtacagcttatatttcaagcaagccttccttgcagctaattagagttatatgactaaatatgggaaatagaatgatagta

SEQ ID NO: 1023690 - DNA, 120 bp, Artificial Sequence
  ENSG00000224957_46 (sequence is synthesized)
aagttattgtgagtgacttacaggttatctccaactcaacacacaacagtggccctggacattgaccatttctcccttcttgactagacatgacaataactggagtgactttagaagcca

SEQ ID NO: 1023691 - DNA, 120 bp, Artificial Sequence
  ENSG00000224957_47 (sequence is synthesized)
taaattaagtgttgacatgtcataccatcctgaaccaatcagaatctcccatgagataaaaataaacttctatctatgtaagtccctgaaattttgttgttgttgttacctcagttaaac

SEQ ID NO: 1023692 - DNA, 120 bp, Artificial Sequence
  ENSG00000224957_48 (sequence is synthesized)
ctttatcctatctaatgatgtctttgaagtttggtgataaaccctaattcatcagaatgcattataacttttctaaatgtactattagattagtttgaataatgctttgttgtagatttt

SEQ ID NO: 1023693 - DNA, 120 bp, Artificial Sequence
  ENSG00000224957_49 (sequence is synthesized)
ttttaaattaatcttgacagctttttctctttatttaatttccaaaaaagaaatgtgtaaaatgcatgttctctaggctgaattatatctgccaaaaaaatgtttaattcttaaccaccg

SEQ ID NO: 1023694 - DNA, 120 bp, Artificial Sequence
  ENSG00000224957_50 (sequence is synthesized)
ggttctataaatgtgacctattttgaaaataaggtctttgcagatgtaatcaagttaatataacgtccctagggtatgtccacatccaatgtgactagtgtccttttaagaggatgagaa

SEQ ID NO: 1023695 - DNA, 120 bp, Artificial Sequence
  ENSG00000224957_51 (sequence is synthesized)
tggactcaaaaacacaccgatgaaaatgctgcatgaagacagatatacaaaggaagacagccatgtgataaccaagaagagattaaatttatgcagctacaagccaaggaatatcgaagg

SEQ ID NO: 1023696 - DNA, 120 bp, Artificial Sequence
  ENSG00000224957_52 (sequence is synthesized)
ttgcaacaaccatcagaagccaagaaagatcattgccttgctgacatcttgattttggacttctagcctccagaactatgagagaatacatttctgttgttttaagccattcagtatgtg

SEQ ID NO: 1023697 - DNA, 120 bp, Artificial Sequence
  ENSG00000224957_53 (sequence is synthesized)
gtagttaattatgtgagccctgggaaactaatacagattttggcactgggaggtaggatactgctgtaacaaatatctaaaaatgtgcaagtggctttggaattgtgtagtaaatagagt

SEQ ID NO: 1023698 - DNA, 120 bp, Artificial Sequence
  ENSG00000224957_54 (sequence is synthesized)
ctggaagtgtttttgaagcatattctagaaaagtttagattgtcttgaagaggctgttggtagaaatctggacattaaaggtgttctggtggggtctcagatggaaatgaagatcatgtt

SEQ ID NO: 1023699 - DNA, 120 bp, Artificial Sequence
  ENSG00000224957_55 (sequence is synthesized)
ttggacaccggagaaaaggcaaccctatttataaaataattgagagtttgatgatttggaaaattctcagctattcatatttcaaagaatgggaaagcatgttctggagagaaaacacca

SEQ ID NO: 1023700 - DNA, 80 bp, Artificial Sequence
  ENSG00000224957_56 (sequence is synthesized)
cccgctagcgccgggcgcgcagcctcggcgggcgggcgcctcgccttccacacctccccgccagcagagggagctggctc

SEQ ID NO: 1023701 - DNA, 120 bp, Artificial Sequence
  ENSG00000224957_57 (sequence is synthesized)
gaacaatgagaacacatggaaacaggaaggggaacatgacacactggggactgtcgggagctgaggggctaggggagggacagcattaggataaatacctgattagatgatgagttgatg

SEQ ID NO: 1023702 - DNA, 120 bp, Artificial Sequence
  ENSG00000224957_58 (sequence is synthesized)
gggacagcattaggataaatacctgattagatgatgagttgatgggtgcagaaaaccaccatggcacctatatgtcttttgtaacaaaactgaacgttctgcacatgtaccccagaactt

SEQ ID NO: 1023703 - DNA, 120 bp, Artificial Sequence
  ENSG00000224957_59 (sequence is synthesized)
atattgacaaatatgaataaattgttattaaaaattgtgcacaagattcttcctaaatatgttttcactgttcttgagaaaatgcctaggtataggatttctaagattttatgaagtcaa

SEQ ID NO: 1023704 - DNA, 120 bp, Artificial Sequence
  ENSG00000224957_60 (sequence is synthesized)
ataaaaactctaggaaatcaccaaactgttttccaaattgtttttaccactttacatttccaccagcagtgttccgcatcttccagttgttccacatcttcactagaacttagtattgta

SEQ ID NO: 1023705 - DNA, 120 bp, Artificial Sequence
  ENSG00000224957_61 (sequence is synthesized)
tatatattgtcaaatgtcagttcaatattttgccaggttttaattggattatttttctcattattgagttttaaaagttatttacatattcctaataggcatcttgtattaagtatgcat

SEQ ID NO: 1023706 - DNA, 120 bp, Artificial Sequence
  ENSG00000224957_62 (sequence is synthesized)
ttttcaaatattttctgggtcatttctttctcaacaatatcttttaaagaatgaatgttttaaattttgataaagatccatttatcaatattttttatgaattttaattttggtgtcata

SEQ ID NO: 1023707 - DNA, 120 bp, Artificial Sequence
  ENSG00000224957_63 (sequence is synthesized)
tttaagaattatttgcctaacataagatcacacaaatatttctgagtattttgtttctcgaagttatttaatgacatggtttggctctgcgtccccacccaaatctcatcttgtggctcg

SEQ ID NO: 1023708 - DNA, 80 bp, Artificial Sequence
  ENSG00000224957_64 (sequence is synthesized)
cctgggggctcgtctttccagtactgttctcctgaccatgaatgagctcaaaagatctgatggttttaaaaacaggagtt

SEQ ID NO: 1023709 - DNA, 120 bp, Artificial Sequence
  ENSG00000224957_65 (sequence is synthesized)
agtttctctgcacaagctctctcttttcttgatgccatccatgtaagatgtgatttgatcctccttgccttctgccatgattgcgatgcctccccaaccatttggaattgtaagtccaat

SEQ ID NO: 1023710 - DNA, 120 bp, Artificial Sequence
  ENSG00000224957_66 (sequence is synthesized)
caataaacttctttcttatgcaaattgcccagtctctgacatgtctatcagcagtgtgaaaatgggctaatacatataattttctgttttatatttagatgtacaatttattctgattta

SEQ ID NO: 1023711 - DNA, 120 bp, Artificial Sequence
  ENSG00000224957_67 (sequence is synthesized)
aatttttgtgtgttatagatcaagtccttttctttttgtctttcattcattactatttttatttttgcatatagatgaacatttctttcaccacaacttattggtgactgttctttagcc

SEQ ID NO: 1023712 - DNA, 120 bp, Artificial Sequence
  ENSG00000224957_68 (sequence is synthesized)
actgatttgcctttgtgtctttttcaaattgatcgtacatgggtgagtgtattcctgatacattcatatttgtgtctgtccttttgctaaaacaatgctgtcttaattattaatattatt

SEQ ID NO: 1023713 - DNA, 120 bp, Artificial Sequence
  ENSG00000224957_69 (sequence is synthesized)
agagcggacgccgaggccgaggaggcgccgagagcgagtgagagctgctagccagttgtcacctctcacagagagtctcaagatgtagctttgagccaaactacaaatgtgttttctttc

SEQ ID NO: 1023714 - DNA, 120 bp, Artificial Sequence
  ENSG00000224957_70 (sequence is synthesized)
atcttgaaatatagcctcggaatgtgctgtgaacctccactctcctctccctttcccactttatgctcccatgccttatgcacatttatttgcctaggtacttgttaagcacacaccatg

SEQ ID NO: 1023715 - DNA, 120 bp, Artificial Sequence
  ENSG00000224957_71 (sequence is synthesized)
ctctcttatctggtcataaatttccttagaagctttaggggccggatcctgatacagagcagacacctccagagttctttccaacgcgtgattacctcaagcctggaatccactcttgac

SEQ ID NO: 1023716 - DNA, 120 bp, Artificial Sequence
  ENSG00000224957_72 (sequence is synthesized)
tagagattgactggaagattgactgcaattgatttgtaacctggttgggcccatcctggcacgggttccttcactagatggaataataattcaaaacaagtcatcggagcaggttgcacc

SEQ ID NO: 1023717 - DNA, 120 bp, Artificial Sequence
  ENSG00000224957_73 (sequence is synthesized)
gcctgacacctcctaagccgtttgtttctcctgcattccaaacctctcgctttaaaaacccctgcattccctccacaaattaaagagtggaaatgtttggaaagaattccgcccagtctt

SEQ ID NO: 1023718 - DNA, 120 bp, Artificial Sequence
  ENSG00000224957_74 (sequence is synthesized)
gcccttgctaccacagataataaagcttgctctctttctatcacacctcgctcttgttattttggcgtctttctccaagcagcaagcagctggacccttttgcctgttacaagtctttaa

SEQ ID NO: 1023719 - DNA, 120 bp, Artificial Sequence
  ENSG00000224957_75 (sequence is synthesized)
atagggtagttttcaaatgtcttcctcagtaaaaaatatgattctatccctccaataacataacctttttttttccttttctgtctgttgggaggagtttaaaaagaaagcgtgggcatt

SEQ ID NO: 1023720 - DNA, 120 bp, Artificial Sequence
  ENSG00000224957_76 (sequence is synthesized)
ccatatgtatatgaaatttcctgttggttcctgaaaaaatgataaatttttcaatgatgtatctagaaaatagtgacttctgtgatttaatttatgatatactagcatatgttttgtggc

SEQ ID NO: 1023721 - DNA, 120 bp, Artificial Sequence
  ENSG00000224957_77 (sequence is synthesized)
agaagaaaacccttaaatttagtatgcagacctcactgttgggggcacaatggaacagactcatactgagacttgcctgcattctggatagggcaattgagtccgtagagctgcacttca

SEQ ID NO: 1023722 - DNA, 120 bp, Artificial Sequence
  ENSG00000224957_78 (sequence is synthesized)
tcatctgctaagtcagcagttaattttctttctagtgcattatttacttcaaaattaacattcatgagaactcaaggaatacaagctagcctaaagagttaggctttgtctacatttgtc

SEQ ID NO: 1023723 - DNA, 120 bp, Artificial Sequence
  ENSG00000224957_79 (sequence is synthesized)
gtctgcatgaagggagcaattttacagcaccccaggtgccctaacacgttgacagcctggcagtattttacacttaaaattcttcagctgaatactggacattttgaacaaggacgttac

SEQ ID NO: 1023724 - DNA, 120 bp, Artificial Sequence
  ENSG00000224957_80 (sequence is synthesized)
gatgtggacatctgttttctgatggaaaaagagcttctgtcctacaaaatattttcttgtaataatggataataatgtttttatttatttttatttgtttgcttttaactggagaccaca

SEQ ID NO: 1023725 - DNA, 120 bp, Artificial Sequence
  ENSG00000224957_81 (sequence is synthesized)
gaattttcttataaaatatttatttgcaatattccaagcattgtagaccgctttgtctagtggcaagtcctgatctctgtagtaacagtgacacctatttagtgtggcagagtggctttg

SEQ ID NO: 1023726 - DNA, 120 bp, Artificial Sequence
  ENSG00000224957_82 (sequence is synthesized)
gtgtcaaaaagacattgctgcaaatctcagtatttataacaggaactactttcaattctctcttggggatttttgttatccacatatctcccttttagtgggagagcaaagccagtcttg

SEQ ID NO: 1023727 - DNA, 120 bp, Artificial Sequence
  ENSG00000224957_83 (sequence is synthesized)
ctgtttttgaactcttacttaaaatctaacctgggactaataaaaagaaagttagagatcctctctggcagccaaagtccctgaagtgaaaaagcagagaatgagaattgtttgttaaaa

SEQ ID NO: 1023728 - DNA, 120 bp, Artificial Sequence
  ENSG00000224957_84 (sequence is synthesized)
gtgaccacagcaaaagctagaaggtgaggaccaaaggagagagctggtaagagatactctgtgacactggttgtccaatcattgaaaacactgagtctttgtgggtctccggcaaacttc

SEQ ID NO: 1023729 - DNA, 120 bp, Artificial Sequence
  ENSG00000224957_85 (sequence is synthesized)
cagtcctctcctgctttcagcggagagtctccacttaataatttaagaactccacttacactagcctttctatttgcatatctttcttgatacttcttctccaccaccctcaaaccccaa

SEQ ID NO: 1023730 - DNA, 120 bp, Artificial Sequence
  ENSG00000224957_86 (sequence is synthesized)
gcactaagattttctcagttgtccttctgaatatctattgcatgcatttgacttctattcatcgctgatctccatggccatttcccactgtctaaaacttttcaaccagtgccattgact

SEQ ID NO: 1023731 - DNA, 120 bp, Artificial Sequence
  ENSG00000224957_87 (sequence is synthesized)
gaggccttcagcaatttctgtaatatattcctgagtagtgcttcatgatctcatctttgtctacctttccagcttaatctgtattgttctcctttcttctatattgcacagaagccatct

SEQ ID NO: 1023732 - DNA, 120 bp, Artificial Sequence
  ENSG00000224957_88 (sequence is synthesized)
gggacttgcaacttccgtttgctgttcacaaaagccatgttcatttcaaggcaggaatatcctccctcacatttctcatctgctgtattcctactcactcttcagttctaactgaaagtt

SEQ ID NO: 1023733 - DNA, 120 bp, Artificial Sequence
  ENSG00000224957_89 (sequence is synthesized)
cacttgcttataaaggcctttcctgacctcttagatttgtgttattccctctgctgtaggctttcacaacaccttgtattttttaatattaacctttttaatatcaacttaaaaaatcac

SEQ ID NO: 1023734 - DNA, 120 bp, Artificial Sequence
  ENSG00000224957_90 (sequence is synthesized)
aatcacttaatgtgtttgttttctaccaacctgtgagttacaagaaattgggtaccattctgtttctgtttatcttgtattgctaggactgggtagagtgcatacacgtagtaatgccta

SEQ ID NO: 1023735 - DNA, 120 bp, Artificial Sequence; identical to SEQ ID NO: 818839
  ENSG00000284500_0 (sequence is synthesized)

SEQ ID NO: 1023736 - DNA, 120 bp, Artificial Sequence
  ENSG00000284500_1 (sequence is synthesized)
ccacattcccttcttgcatttctgagagaatggattcccattcatctgactacagtgctaccctgaaagcagatccagagactaagattcacctgcaggtgattcatttgcaaggtaagc

SEQ ID NO: 1023737 - DNA, 120 bp, Artificial Sequence
  ENSG00000284500_2 (sequence is synthesized)
tgtcatcagttggaggtaagcggaagacagtagagagtacagagccctggactgtgactcagaggatgagcaccagatccagtttgctgtgccacagtgccttctccaaagtcactcaca

SEQ ID NO: 1023738 - DNA, 120 bp, Artificial Sequence
  ENSG00000284500_3 (sequence is synthesized)
gaaggcatcccactcaacctcaccttggggtaaatcaaaatagtcctccttctgaagctaccgggtaaagcggtggtagctgtgcagctgctgctgatcaacaggctccagaaacagcag

SEQ ID NO: 1023739 - DNA, 120 bp, Artificial Sequence
  ENSG00000284500_4 (sequence is synthesized)
attcatctttcatggtaaagcctccagttgcctattatgaaatcagcaataatcatgtgtcccctatctgggtccctgaaaagatggaaagaggcagatcaggctggtgctctgagaatg

SEQ ID NO: 1023740 - DNA, 120 bp, Artificial Sequence
  ENSG00000284500_5 (sequence is synthesized)
acagacatcaaacaagaatgaaaagtgtcaccctccttggacttattcagtaactcatgcccttgagcaaaggaggattttctatcaaaggacatggatttctgtgtctttctcttgaga

SEQ ID NO: 1023741 - DNA, 120 bp, Artificial Sequence
  ENSG00000284500_6 (sequence is synthesized)
taacattgctgggtgaccacagaaagctggctctggaagcacagaagctgcctttccttgagtaataatgtctcttcaaagggagctggagcatgagtagtgtacatgcctcagatttca

SEQ ID NO: 1023742 - DNA, 120 bp, Artificial Sequence
  ENSG00000284500_7 (sequence is synthesized)
gtgaaaagttcagaggaggcctgagaaggtcctgggaatgaatcatctagatgactcaaccttgcaaagccatccacctcattgtggatatcattcaatacatttggtgctccatcatcc

SEQ ID NO: 1023743 - DNA, 120 bp, Artificial Sequence; identical to SEQ ID NO: 906747
  ENSG00000284500_8 (sequence is synthesized)

SEQ ID NO: 1023744 - DNA, 120 bp, Artificial Sequence; identical to SEQ ID NO: 906748
  ENSG00000284500_9 (sequence is synthesized)

SEQ ID NO: 1023745 - DNA, 120 bp, Artificial Sequence
  ENSG00000284500_10 (sequence is synthesized)
gatctacaacttatgaagaatacaaatgatgtatattcttttctactcttcatgtatggactagaggggcttgcacagtagtaagaaaaaaatggctgagacccacaggaacaaagaaac

SEQ ID NO: 1023746 - DNA, 120 bp, Artificial Sequence
  ENSG00000284500_11 (sequence is synthesized)
aggacaggagttagatgcagagaagagatttcaacaaaagtttggaaaagatgctaacggtagcatatgagtcacagacagaacattggcacctttgtttaagaaactgaatgttaatgt

SEQ ID NO: 1023747 - DNA, 120 bp, Artificial Sequence
  ENSG00000284500_12 (sequence is synthesized)
cacatctgcctttggagattacaaatgaaatggctacctttctactggaaccctgaccagaagtctgccagttagtaagctggcttaagagatcaatctaaaatttacataaggcttttg

SEQ ID NO: 1023748 - DNA, 120 bp, Artificial Sequence
  ENSG00000284500_13 (sequence is synthesized)
agtaacactctgggagggctcaaaccacataaccaaatgtgccaagataatcctgagctcactattgtcagtcctgaagattttcctcagataatctttcatctctttgttcctgagact

SEQ ID NO: 1023749 - DNA, 120 bp, Artificial Sequence
  ENSG00000284500_14 (sequence is synthesized)
atatattagaggattacagagtggtgttatcacagaaaagaacaaggcttttctgatccaagatctcggattgttcaaatccatgaggtgggaccacactcaagaaaaagtccagggtaa

SEQ ID NO: 1023750 - DNA, 120 bp, Artificial Sequence
  ENSG00000284500_15 (sequence is synthesized)
ccagtcagtaacactctgggagggctcaggccacatcacgaaatgtgacaggatagccttgaactcatcaattgctgggtaagaaagaattttaatgcaatggcaaacaaccaatcaaac

SEQ ID NO: 1023751 - DNA, 120 bp, Artificial Sequence
  ENSG00000284500_16 (sequence is synthesized)
aagcaaacaaaaacaataaacccttccttgaggaccaagaagacattgattagctaacctaagagctccaggtggagacctaggtcctgattgggtttctgaatttgaccactaggcaga

SEQ ID NO: 1023752 - DNA, 120 bp, Artificial Sequence
  ENSG00000284500_17 (sequence is synthesized)
aaactagcacccaaaaccagttggaataaaattacccacctacagtggagccaaggcccccagatcctttttgtcaggggcacctcaaactcaactccaaaattgatctaatgaactttc

SEQ ID NO: 1023753 - DNA, 120 bp, Artificial Sequence
  ENSG00000234781_0 (sequence is synthesized)
cttgagcatcacaggtttgaagtttatgggtccacttatagatggattttcttccatctctgccacccgtgagatagcaagacccactcctcttcttcctcctcccaagcagcctactca

SEQ ID NO: 1023754 - DNA, 120 bp, Artificial Sequence
  ENSG00000234781_1 (sequence is synthesized)
acgtgaagactacaaagatgaagacctttatgatgatcctcttccacttaatgaatgtttttgagtccacctcgctggattttgtgaaaatagatccttcacacacaacaaagaaggaac

SEQ ID NO: 1023755 - DNA, 120 bp, Artificial Sequence
  ENSG00000234781_2 (sequence is synthesized)
tttctggaaggctgtactctggaactgcagacttctctctcaagtcaagtacatttctgtttttcttaaagctgcaaaactacaacaatgtttatattcatatgaagtatttcagcaatt

SEQ ID NO: 1023756 - DNA, 120 bp, Artificial Sequence
  ENSG00000234781_3 (sequence is synthesized)
catagccaatttatcaatgaccacgcagctgcaggcactgcagtttaaaaaaatataccagctcacttagtgtttacataggctctgaaagccccacgtcctggcagggggacgggagcc

SEQ ID NO: 1023757 - DNA, 120 bp, Artificial Sequence
  ENSG00000234781_4 (sequence is synthesized)
accggagtcattagaaagactttgcaacctgcaaggatacatagatcatgcttgtttgttttgaaaccccagaaaaaaatgataatgggagctcatcaccagtgaattagcctttgaatg

SEQ ID NO: 1023758 - DNA, 120 bp, Artificial Sequence
  ENSG00000234781_5 (sequence is synthesized)
catgctgcctctctgaacaactgtgagaattcaaaagtatatccattggatcaactgacaattttgggggcctcctgtggcaaaatcatcttactagatgacttcaacagaaaagggatg

SEQ ID NO: 1023759 - DNA, 120 bp, Artificial Sequence
  ENSG00000234781_6 (sequence is synthesized)
caattttttcagttaagatccttccagaagaaccacagccgttgttgatgaatctgggtgtgggtagagcttgtccgctggaggtgacgcagacaccatcactacagtgtaaacaccatt

SEQ ID NO: 1023760 - DNA, 120 bp, Artificial Sequence
  ENSG00000234781_7 (sequence is synthesized)
catgcaactgcagccaccaccggggccactggccagaccaccacttcccagagcccagatactgcagcagctataaatagctttgtagaattacattaggtgagacagcccaatatccca

SEQ ID NO: 1023761 - DNA, 120 bp, Artificial Sequence
  ENSG00000234781_8 (sequence is synthesized)
ttgcatgagcaatgtggaattttgaataaaaagtagtttaaatggcattttggtttcagtagtgaattaaaagcaagaaacaaatcacagaagagggacaaacagatgtttctctgatag

SEQ ID NO: 1023762 - DNA, 120 bp, Artificial Sequence
  ENSG00000234781_9 (sequence is synthesized)
ctggattccttagaaaattgactataaattccatgaagataattattagcactggattatacaatcagcatgatttgcctggttatctacaaaatcattaaaaagtataagaagaatcaa

SEQ ID NO: 1023763 - DNA, 120 bp, Artificial Sequence
  ENSG00000234781_10 (sequence is synthesized)
atgtatactgtgtaccaagcaggaactgctgttggtcttcgttgaaatcctgtctgcaaatctttttgtataacttaattagcaaagttaaaattaagatgaggctccagtgtgtttaga

SEQ ID NO: 1023764 - DNA, 120 bp, Artificial Sequence
  ENSG00000234781_11 (sequence is synthesized)
tacaacaatttctatgagaggacacttcattaaaacatttaataacacagcaaactctcagttatcaaagaaatctctttacaaaaactgtttttgccaatgaataaaatgattcaatct

SEQ ID NO: 1023765 - DNA, 120 bp, Artificial Sequence
  ENSG00000250546_0 (sequence is synthesized)
tgtgctagaaatcagcgagactccgtgggcgtaggagcctccgagccaggctgtctagaaaaggacaccaacaatcacccatgaagattgcccttcaacctttgggaggaaatgatcgaa

SEQ ID NO: 1023766 - DNA, 120 bp, Artificial Sequence
  ENSG00000250546_1 (sequence is synthesized)
atgggagctagagaagattgttgttggaatctcagttcttcagagagctactatcaacagattgagttgacaggaaaaagtcataatccaggccaaagtgagcaaactcccaagagcatt

SEQ ID NO: 1023767 - DNA, 120 bp, Artificial Sequence
  ENSG00000250546_2 (sequence is synthesized)
cctggtcagcaccgcagcaaatccgtggcaagtgcagagattataagcaatttctccatggctggaattcagttgatctgggactgaacctatttctaatgggcccagaaagttttccct

SEQ ID NO: 1023768 - DNA, 120 bp, Artificial Sequence
  ENSG00000250546_3 (sequence is synthesized)
aaagtaggaagatgtcagaaactctaaagaaagaaaagatagtatatgaaacatatgatgattacgtgtgagtttcaaaggttatgtttcacaaaatgtgttcaactgatgtaaaagggc

SEQ ID NO: 1023769 - DNA, 120 bp, Artificial Sequence
  ENSG00000250546_4 (sequence is synthesized)
gatctacagagaatggagaataattatcccatttttattgattaccccaactgactaatagagcccaagcatacttcaagcagacacataggtccttactgctttatcatgaatttacat

SEQ ID NO: 1023770 - DNA, 120 bp, Artificial Sequence
  ENSG00000250546_5 (sequence is synthesized)
aatgactggctggtgagggtagatgtaaataagtttagacataaaaggtcataattggatccacttccacatagacattttctttgcttctgactcttcagtcattatttcatgtcatgc

SEQ ID NO: 1023771 - DNA, 120 bp, Artificial Sequence
  ENSG00000250546_6 (sequence is synthesized)
ctttagctttagacactgtggacagtcctctgtactacttaggtcaactctttccttgacacaaaccttgttccccctatttcattgacaaaatatcaactactttgtctaaagctctga

SEQ ID NO: 1023772 - DNA, 120 bp, Artificial Sequence
  ENSG00000250546_7 (sequence is synthesized)
agctctgatttaatttttaaaaacatataagtctaacaaaataagaatgacttagggataaatctaacaagatatgtaaaagatctatatatgaaaaactataaaactctgacataggaa

SEQ ID NO: 1023773 - DNA, 120 bp, Artificial Sequence
  ENSG00000250546_8 (sequence is synthesized)
tttttaaaaattaatataaatgtcatgctcatggattagaagacccattattatttaaatgtcaattcttccccacttgatctgtagagtcaaaaaaactcaataaaaattccagaaagt

SEQ ID NO: 1023774 - DNA, 120 bp, Artificial Sequence
  ENSG00000250546_9 (sequence is synthesized)
gtttgatctcagactgctgtgctagaaatcagcgagactccgtgggcgtaggagcctccgagccagtcatggtctggagtcaagaaatgaagagggcaagcaatgtttttggcatcctga

SEQ ID NO: 1023775 - DNA, 120 bp, Artificial Sequence
  ENSG00000250546_10 (sequence is synthesized)
ctacagttacatgcagtttggggctgctgcaatggcaactcaacggagaggttaggaacaccaactccaggatcaggcaatctttgaatccctgtcactagcagctttgtatattggagc

SEQ ID NO: 1023776 - DNA, 120 bp, Artificial Sequence
  ENSG00000250546_11 (sequence is synthesized)
tctttgaatccctgtcactagcagctttgtatattggagcaagttacttaacatctgtctgctggagtttgctggaggttcactccagaccctatttgcctgggtatcaccagtggaggc

SEQ ID NO: 1023777 - DNA, 120 bp, Artificial Sequence
  ENSG00000250546_12 (sequence is synthesized)
agcttcttcctagagagtcacctgccagatgccagccagagctccccgaaatgaggtattcagtgacatctttctaaattgtttaaaatgagaagcattgcacactgagagtcaggatcc

SEQ ID NO: 1023778 - DNA, 120 bp, Artificial Sequence
  ENSG00000250546_13 (sequence is synthesized)
ctattttactatcttaccagcagtgtataagaagttcctttttgtgtcttttttctccaattgcttttgagattttcctttattttggtttttaataatttaattatgacatctctcaat

SEQ ID NO: 1023779 - DNA, 120 bp, Artificial Sequence
  ENSG00000250546_14 (sequence is synthesized)
gtggtttccttgatatttatcctgattaagatgcattgagttattggatttatacattattactttcatcatacttggaaaatttttcagtcattatttcttcaagtaatgttttgccct

SEQ ID NO: 1023780 - DNA, 120 bp, Artificial Sequence
  ENSG00000250546_15 (sequence is synthesized)
agtctctttttcctttctttctgggacttcatagcttataatagccctaaagatttgtttgcctgtgtttattttcagtgttttctctctattctagttactttttaagtgatgtatcct

SEQ ID NO: 1023781 - DNA, 120 bp, Artificial Sequence
  ENSG00000250546_16 (sequence is synthesized)
aagatttactgatgcttttttcctcctattcaatttaatgttaattccaccccataaaatgttgatggtagatatcttattttttatttgtaacttttcatttaattatttttgaaaact

SEQ ID NO: 1023782 - DNA, 120 bp, Artificial Sequence
  ENSG00000250546_17 (sequence is synthesized)
cacctttttcactggggaaatatgaatataagagaaagtaatttgtgcagaagtaaaatggaggtgtctttagtttgtgaaaatccctggtgcccctagtcattcctctataccatgaaa

SEQ ID NO: 1023783 - DNA, 120 bp, Artificial Sequence
  ENSG00000250546_18 (sequence is synthesized)
ctcccacagttactatgccctaaagaaacattatttggactggctaaacataggactgaaaaagaaaaagaaaaaaaaggcaaacagtgaagggtgaaggaaccatagcctcaagattgc

SEQ ID NO: 1023784 - DNA, 120 bp, Artificial Sequence
  ENSG00000250546_19 (sequence is synthesized)
atttctccatggctggaattcagttgatctgggactgaacctatttctaatggagctgtgacgagagaccacagtaaatccaagcttggaaaatgagctgtgtcagccctcccaaagaca

SEQ ID NO: 1023785 - DNA, 120 bp, Artificial Sequence
  ENSG00000250546_20 (sequence is synthesized)
ttgtcaaagccccagggaccagaaaccatgaagttatttggatgatagatacagagatacgctgctcagatgcccctttcaagaaagaacttgctgcctcttgctcagtttcttcctgga

SEQ ID NO: 1023786 - DNA, 120 bp, Artificial Sequence
  ENSG00000250546_21 (sequence is synthesized)
gctttcaagcatctttgcagggaagtcacatccttcccagggcagcccgactgaccaagggagaagaagtttaacagagatgaggcatcctggaatatccaggtggcaacatggagtaga

SEQ ID NO: 1023787 - DNA, 120 bp, Artificial Sequence
  ENSG00000250546_22 (sequence is synthesized)
gatgatgactacttctaggccatgaaaaaccagcaggatccatgatggctgagaaatgacaatattggtgaattaagtacatctcagggagaagccctattaaattagcctaatacctta

SEQ ID NO: 1023788 - DNA, 120 bp, Artificial Sequence
  ENSG00000250546_23 (sequence is synthesized)
ctcctaatctcaagcagtagctgggactgtaagtatgcaccaacactcccggtttgggtatctccattgattggcaaccagcaccacagtagatgctgatgaaaagaaagttatgaatgt

SEQ ID NO: 1023789 - DNA, 120 bp, Artificial Sequence
  ENSG00000250546_24 (sequence is synthesized)
catgtaaaatgacagtagtattagcaaatgtgcttttaattataagaaaattacaatatgtaaaaaaatttcaattttcccatattatctcttaataataactgccatttgttgagccca

SEQ ID NO: 1023790 - DNA, 120 bp, Artificial Sequence
  ENSG00000250546_25 (sequence is synthesized)
ttgggtatgttacatatattaacacaacaggatggacattatctatcttatatatattatgtgtatatatacggaaaacaggacacaaattgtctgaggccatggacaattagcttgcag

SEQ ID NO: 1023791 - DNA, 120 bp, Artificial Sequence
  ENSG00000250546_26 (sequence is synthesized)
taaagtaggattctaaattaggtttctctagctccaagacccatgccattttgtttggtcatttgcttctgatgaatcaaatattaattcagccaaagacagctattcaaagctggttga

SEQ ID NO: 1023792 - DNA, 120 bp, Artificial Sequence
  ENSG00000250546_27 (sequence is synthesized)
tttcttccgaacttttgtacaaaaccttgattattttaataaggcattctatacataaagtttcaaataaaccataagtacctcaagaaaatgtcatataatttagaattgaatcatagc

SEQ ID NO: 1023793 - DNA, 120 bp, Artificial Sequence
  ENSG00000250546_28 (sequence is synthesized)
atatttttaatctggaagcaacatatctaaataagccatttttatattataaatacaaacaggtacaaagaagtatagttcactttacaagctgttgtacatgcataataccatattatg

SEQ ID NO: 1023794 - DNA, 120 bp, Artificial Sequence
  ENSG00000250546_29 (sequence is synthesized)
ctaccaaagaaactattaagttatacatattttttacagctttaactatttttgttgtcaatttcctctaataagattttttctggataaacaaaaatttatctactcaaatgattgttt

SEQ ID NO: 1023795 - DNA, 120 bp, Artificial Sequence
  ENSG00000250546_30 (sequence is synthesized)
ttcttcaacatcataatgttgcaggcctattgatgtatatttttgtgtactaaatagtttgtggagctcttcttgaagaattatcttcagagctgattaaccagacacaccctccagaca

SEQ ID NO: 1023796 - DNA, 120 bp, Artificial Sequence
  ENSG00000250546_31 (sequence is synthesized)
tcatagtcacagctgctttgagacagcaacaacctcatccccgcaaatagtatggattcctgtcttattcaataggtctgaattttaaatactcttagcttatttcaagaactaaatcta

SEQ ID NO: 1023797 - DNA, 120 bp, Artificial Sequence
  ENSG00000250546_32 (sequence is synthesized)
tcctccacaaataaaaatgtgctgccgctcagaatatttaggagaatatgtgatagccaagatacttttggcttatttcaaaaattcatctatctccacaaaggaaaatgtttcaccatt

SEQ ID NO: 1023798 - DNA, 120 bp, Artificial Sequence
  ENSG00000250546_33 (sequence is synthesized)
cagaatattcaagagaattttcttagaaaagaaatccaagattgtattcattggaataacagacctttcttcaaggtgacttctttcaaaagaacaatatttaggggtatatagaacatc

SEQ ID NO: 1023799 - DNA, 120 bp, Artificial Sequence
  ENSG00000250546_34 (sequence is synthesized)
atttttaaaataatttattttgctatatttaccacatttcatgacaccctaaaagattttggctaatgaaatttatacagttcaaatgtgtattcctgaagagacaagactgagggaaaa

SEQ ID NO: 1023800 - DNA, 120 bp, Artificial Sequence
  ENSG00000250546_35 (sequence is synthesized)
aaaattatctcaaagtcattctcaaattagacatgaaatgaattattaatttctacatattttaccatcatgcttgtagttttaataaacaaaaatcaaatgcatataggcttcacacac

SEQ ID NO: 1023801 - DNA, 120 bp, Artificial Sequence
  ENSG00000250546_36 (sequence is synthesized)
tttgtgtaattgcttgtttaacatccccaaattccataaatgcaaaaactagatctgtctggctttccattaagtccccagcacctagcaaggtgcttaacaaatagcagatggatgttg

SEQ ID NO: 1023802 - DNA, 120 bp, Artificial Sequence
  ENSG00000250546_37 (sequence is synthesized)
gaaggaataaaggaacaaagaaaagaatagaagaagttagtgacttgattctatacagagtggaccttgacacatactgcaagtgaatgttaaactaaaagtataatttctttatcagtg

SEQ ID NO: 1023803 - DNA, 120 bp, Artificial Sequence
  ENSG00000250546_38 (sequence is synthesized)
aatatatttccatgaattttaagtattttgctgatgatttattaaatatgtatttcactactttcttttcttttaatcagtcctattccatccccttcaaataataaaaaagtttcaatg

SEQ ID NO: 1023804 - DNA, 88 bp, Artificial Sequence
  ENSG00000234787_0 (sequence is synthesized)
gaaatttggtgccatgactcggatcggggtacctcccttgggagatcaatccccatacctaggacctcaggtcctcagactgaccagc

SEQ ID NO: 1023805 - DNA, 120 bp, Artificial Sequence
  ENSG00000234787_1 (sequence is synthesized)
gcagctgaagactgacactgcccaatcgccttggaagccccctagaccatcacggatgccgagcttcgagtaactctcacagtggagggaacgcgcatgaaaaaaccaaacaaacaaaaa

SEQ ID NO: 1023806 - DNA, 120 bp, Artificial Sequence
  ENSG00000234787_2 (sequence is synthesized)
tctcaaaggatggacatctcacaaccttcctacagcaagtactgtgagaactcaaagggggagagaaaaagacgaaaaatatcttcaaagaggagaacaaatctgatctttctctacgtc

SEQ ID NO: 1023807 - DNA, 120 bp, Artificial Sequence
  ENSG00000234787_3 (sequence is synthesized)
tgcttagttggcgtaactttaggatgtccataagttgtagctttcctgggaaaatttgattttacactggttatcccaacataatattaatggtatcctcttagactctcaatagtgtcc

SEQ ID NO: 1023808 - DNA, 120 bp, Artificial Sequence
  ENSG00000234787_4 (sequence is synthesized)
ggtttggatgacaaattctgtggtctttttagccaactgctactgaagtggtcagatttattgcacaaaatatatttttaaaaataagtagcacaagatgaaatatggcctcaaatttct

SEQ ID NO: 1023809 - DNA, 120 bp, Artificial Sequence
  ENSG00000234787_5 (sequence is synthesized)
tggttagtttccactagaaagttttaaacattaaaaagtacaaaattcattacatttattgaatgataaagtataacattgtatgaagttgatgactattaaaactatttgagtgtttaa

SEQ ID NO: 1023810 - DNA, 120 bp, Artificial Sequence
  ENSG00000234787_6 (sequence is synthesized)
ctgaactatatttaaatctcaaaggatggacatctcacaaccttcctacagcaagtactgtgagaaaagatactagcgccagtctggcaggggccttttctagtctcaagcacgctgagc

SEQ ID NO: 1023811 - DNA, 120 bp, Artificial Sequence
  ENSG00000234787_7 (sequence is synthesized)
tgccttagtgaggacatcacctgcaactcccagatggatagacgaggccatggagagaggagaacaccaacccatgagtgacaagtgcctgtcattgtcaatgatgctgcaagcaccacg

SEQ ID NO: 1023812 - DNA, 120 bp, Artificial Sequence
  ENSG00000234787_8 (sequence is synthesized)
atgccccttcttagcagggacccagtgggccttaccagcttcattattttctaggcatgatcgcatcctgtctcccatttttgctaaaattctatctagagaaagagctcatttttagct

SEQ ID NO: 1023813 - DNA, 120 bp, Artificial Sequence
  ENSG00000234787_9 (sequence is synthesized)
tctaaaataataagtgtagtatagtaaatgtataaaccagtaacataatggtttattatcattatcaagtattacatactgtacaaaattatatgtgctacaattttatgtgactggcag

SEQ ID NO: 1023814 - DNA, 120 bp, Artificial Sequence
  ENSG00000234787_10 (sequence is synthesized)
tctcaaaggatggacatctcacaaccttcctacagcaagtactgtgagagctgcatcttgtcccactggatggtcttcagagacaataatacataatggagctgtcatctcctatgataa

SEQ ID NO: 1023815 - DNA, 120 bp, Artificial Sequence
  ENSG00000234787_11 (sequence is synthesized)
gaactatatttaaatctcaaaggatggacatctcacaaccttcctacagcaagtactgtgaggtaataattgatatattaattattaaaattattgaagctggaactcagatttccattt

SEQ ID NO: 1023816 - DNA, 120 bp, Artificial Sequence
  ENSG00000234787_12 (sequence is synthesized)
tatatttacatatataattattctattaatggattctagcttaaataaagagaagcaacatgagtcattggggcaaggggtgagatcgatgacctctggagattgatcccagtgttctga

SEQ ID NO: 1023817 - DNA, 120 bp, Artificial Sequence
  ENSG00000234787_13 (sequence is synthesized)
cagagttagcttctgttatcaggtgctatagtttttcatagtgatgctgatagagcctactcaaggattggactcattcttttgttccatgaatgccaattctgcagaagccactgtggt

SEQ ID NO: 1023818 - DNA, 120 bp, Artificial Sequence
  ENSG00000234787_14 (sequence is synthesized)
agaaattcaaatgtaatgaaaaacaaacattcactcatttattatcactatttgcctgccacaaagacagattttgaggaagataaacaaataaaaacgtgtttgccatttgaagggaaa

SEQ ID NO: 1023819 - DNA, 120 bp, Artificial Sequence
  ENSG00000234787_15 (sequence is synthesized)
attctgacaaccatgacatcactaggccagggaattttttaggtccattatcatcataggcgaccacagttgtatatgtgatgtggtctgtcattgactaaaatctcattatgactgtac

SEQ ID NO: 1023820 - DNA, 120 bp, Artificial Sequence
  ENSG00000234787_16 (sequence is synthesized)
gcagagttcagttagtttgttataaaatcttgctattcaagatgaaggggataaaataatttgttattactccctgcttcttcctcctgagatatcgaagttaaagggagaagagaagca

SEQ ID NO: 1023821 - DNA, 120 bp, Artificial Sequence
  ENSG00000234787_17 (sequence is synthesized)
gctgtaggaaaagcaacagcaatctctcttttagacaaatcaaacatcccacgtataaggacaccattagccacatgttccataaaactaccactaatccacctgttccaaagcagctga

SEQ ID NO: 1023822 - DNA, 120 bp, Artificial Sequence
  ENSG00000234787_18 (sequence is synthesized)
acttgcaatttcaggcctgcaaagctaaaagacattaacaaacggtgagcagaaaaagaaaaaataaagcactctatctaaaataaaagagcttccccaaaagcacaaataaagaagcgg

SEQ ID NO: 1023823 - DNA, 120 bp, Artificial Sequence
  ENSG00000234787_19 (sequence is synthesized)
tgggagacacagaaaacaacattgctgatttgagatcagaagctcagagtttgccatgaatgaactaagtcagcatttctctgaaggctcttggaccccactgaaaatcggactgttcaa

SEQ ID NO: 1023824 - DNA, 120 bp, Artificial Sequence
  ENSG00000234789_0 (sequence is synthesized)
atgggcgcccacccagcgtcgggccgcgtttaagccacctgcccacccccggggctctcgctgaccttcaaagttgagattggccccatgccgcaagagaacgtcggccgcccgcgtcag

SEQ ID NO: 1023825 - DNA, 120 bp, Artificial Sequence
  ENSG00000234789_1 (sequence is synthesized)
tggcgacataactgggcctgggacaggagagaggctgaggaaagcccttccatcctcaaacccgcaggaccccagccccggcaacacctgcagccaggacagcaacacagcctcctccct

SEQ ID NO: 1023826 - DNA, 120 bp, Artificial Sequence
  ENSG00000234789_2 (sequence is synthesized)
cccctcacattgagaccttcagctgatattgatgaagaaagcctacgtttccaccagagtccctggatggcgagactcatcattaccacgtgttggaaataccaactgacaaccccctca

SEQ ID NO: 1023827 - DNA, 120 bp, Artificial Sequence
  ENSG00000236871_0 (sequence is synthesized)
cagaagcagaggtgttttaacgggaagacttcaggcttcatcggacggccgggaaggaatcagagcaggggtttcttccgagatggccagtggtcacctgagatggagcagagagcacct

SEQ ID NO: 1023828 - DNA, 120 bp, Artificial Sequence
  ENSG00000236871_1 (sequence is synthesized)
gtggcgggcatcttctctagaagccgcctgtgagccctacggaggccctgggcttcgtgccgtaagacagacggtgtcctgcaggcctcccatggagacaccatgtgtgattgtaaaaaa

SEQ ID NO: 1023829 - DNA, 120 bp, Artificial Sequence
  ENSG00000236871_2 (sequence is synthesized)
ggagggaacaacacagttgctatgcctgactagggcatgacctgggaggcctttggggccacacagcctccttgggaaaggaggatcaggtgggcctcacacccaggaattggaagtggg

SEQ ID NO: 1023830 - DNA, 120 bp, Artificial Sequence
  ENSG00000236874_0 (sequence is synthesized)
gccccccatcaacctctcgctctctggacttgggttgtaaatcgcctcaaggggacagaaaccacccagaaagctgggaggggccccacgagcttacgactgaggtgggataatccgcgg

SEQ ID NO: 1023831 - DNA, 120 bp, Artificial Sequence
  ENSG00000236874_1 (sequence is synthesized)
ccctggagacgtcacctcagagggagggggctttgcccgcttccttcaccgctggggccgggacctggatcttgagcacagagtagatctcggtgagatgacatcatcgccattaaagtc

SEQ ID NO: 1023832 - DNA, 120 bp, Artificial Sequence
  ENSG00000236874_2 (sequence is synthesized)
aaaagaagtctgtcttttcataaagatacaaatgtctggaggagataattgatttggctaagtgataacatgtgccccatttattaaacaaaatttttcaataaaaaggattttttatga

SEQ ID NO: 1023833 - DNA, 120 bp, Artificial Sequence
  ENSG00000235782_0 (sequence is synthesized)
gcttttgcttcctcctcatcttctcttgctaccaccatgtaagaagtgcctttcagctcccaccataattctgacatctcctcagccatgtggaactatgaagtcttgctctgtcgccca

SEQ ID NO: 1023834 - DNA, 120 bp, Artificial Sequence
  ENSG00000235782_1 (sequence is synthesized)
ggggtttcaccatgttgaccaggctggcctaaaacccctgatctcaagtaatctgcctgcctcggcctccaaagtgctggaattacaggcgtaagccactgtgccaggcccatttcatgc

SEQ ID NO: 1023835 - DNA, 120 bp, Artificial Sequence
  ENSG00000235782_2 (sequence is synthesized)
aattacaggcgtaagccactgtgccaggcccatttcatgctattctttaaatttgcttcctttgtaaatgaagacactattaatcagtttaattttaatgtgtccaatagaaactaaatg

SEQ ID NO: 1023836 - DNA, 120 bp, Artificial Sequence
  ENSG00000235782_3 (sequence is synthesized)
ttacctttgtcttaactctactgttccttacctaactttttataactactttctgcatttttgcatcttcattttccacccatttttgaataataaaagaaaataacaataaagcattaa

SEQ ID NO: 1023837 - DNA, 120 bp, Artificial Sequence
  ENSG00000235782_4 (sequence is synthesized)
aattatttttaacaccattgttcaagaaaacttagagatactgtataacctatagaaagaaatcataagaaacaaacacttgtttgctgattacaaacctctaaatttggtgtaggaaag

SEQ ID NO: 1023838 - DNA, 120 bp, Artificial Sequence
  ENSG00000235782_5 (sequence is synthesized)
gtcatgtaagagtttcagtgcataattcacaaaaacacagatgtattaaaagagcaatgtatcaaagtcaggagcaatttcttctgttccctgtatttcaatatctttgccttttacttt

SEQ ID NO: 1023839 - DNA, 120 bp, Artificial Sequence
  ENSG00000235781_0 (sequence is synthesized)
agaacgaccgagtttctctcagccgagaactgtggctgcccctccggtgaaaacagaggaagtgggagcggcaggaagcgctttgggaccagggcgacccctgaagcgtagaggaaccag

SEQ ID NO: 1023840 - DNA, 120 bp, Artificial Sequence
  ENSG00000235781_1 (sequence is synthesized)
gtcacaagcatacgtgaatgctcacattccatagttatcaaatgtattcaggtttaaattttacttttctagaaaaaatgtaaataatccgttgagaatatttaatgaaaaatgttggtc

SEQ ID NO: 1023841 - DNA, 120 bp, Artificial Sequence
  ENSG00000235781_2 (sequence is synthesized)
gtatctttatctggtctgcggctctgtccctgtttcctggataggagactacgtctgtatcttgtatcacaggaggcaccttcttcctgtttcctggcacagactttaaatcttagtgct

SEQ ID NO: 1023842 - DNA, 120 bp, Artificial Sequence
  ENSG00000235781_3 (sequence is synthesized)
tcactgtgaaggtctgcagcttcactccttaagccagcgagaccacaaacccactgggagggataaacaactccagacgggaggaacaaacaacttcgggtgcaccacctttatgaactg

SEQ ID NO: 1023843 - DNA, 75 bp, Artificial Sequence
  ENSG00000235781_4 (sequence is synthesized)
acccactgggagggataaacaactccagacgggaggaacaaacaacttcgggtgcaccacctttatgaactgtag

SEQ ID NO: 1023844 - DNA, 120 bp, Artificial Sequence
  ENSG00000235781_5 (sequence is synthesized)
ccaccagaaggaacgaacaactccagatatgccacctttaagggctataacactcaccgcggaagtctgcagcttcactcctgaagtcagtgagaccatgaacccaccagaaggaagaaa

SEQ ID NO: 1023845 - DNA, 73 bp, Artificial Sequence
  ENSG00000235781_6 (sequence is synthesized)
acacggcttcattcttgaagtcagcgagactaagaacccaacaattccggacacagcatgatcttggttcact

SEQ ID NO: 1023846 - DNA, 120 bp, Artificial Sequence
  ENSG00000235786_0 (sequence is synthesized)
atatgtgatcatgagcttgtgggtgatgtcctcagtctatcctgagtcattcagagaaggttcagctggaagaaactcatggtctatgtgtactacatagaatcaaatcctcttcttccc

SEQ ID NO: 1023847 - DNA, 120 bp, Artificial Sequence
  ENSG00000235786_1 (sequence is synthesized)
ctgaacacagagagtgattgtggtgagtgaaaagtgagtccacgtggactggaggagttgggcaggttttacagagtgggggttgtgtaagacagacaaggatgagaagacagctcaggg

SEQ ID NO: 1023848 - DNA, 120 bp, Artificial Sequence
  ENSG00000235786_2 (sequence is synthesized)
agggagagcccacttgaaaatgattctttatggagattggatgtggagagaggaaggggaaggggtagtgagagaagaggaggaagatttgggtttctagatttgtatgatggtgattcc

SEQ ID NO: 1023849 - DNA, 120 bp, Artificial Sequence
  ENSG00000235786_3 (sequence is synthesized)
cttaacctgagacaagtaatgtaggtttgggagaaacttggtgactttgactttgatcaggactagagccctgactctgactttgaactggagccctttgaactctagccctgaaaaggg

SEQ ID NO: 1023850 - DNA, 120 bp, Artificial Sequence
  ENSG00000235786_4 (sequence is synthesized)
tcagggctagagatgaaggttgagaagtcattagataggggagtgtgtattcaaaccaggagtccagaatgagcttgtccagaaaagagtatagactaggaagagagaaggggtacagca

SEQ ID NO: 1023851 - DNA, 120 bp, Artificial Sequence
  ENSG00000250829_0 (sequence is synthesized)
ttgttctttagctctttgcaataaatcttgctactgcccactctttgggtttacactgcatttatgagctgtaacactcatggtgaagatttacaggttcagtcctgaagccagcgagac

SEQ ID NO: 1023852 - DNA, 120 bp, Artificial Sequence
  ENSG00000250829_1 (sequence is synthesized)
agcgagacaaagaacccactgggaagaacaaacaactccagacgccccaacttaagagctgttaacacccgaagatctgcagcttcacttttgagccagcgagaccacgaacccaccaga

SEQ ID NO: 1023853 - DNA, 120 bp, Artificial Sequence
  ENSG00000250829_2 (sequence is synthesized)
taagaactgtaacactcactgtgagggtctgcggcttcattcttgaaggctgtgagaccaagaacccaccaatttcggacacactgggaccaccctcgctgactggagcacttgaggcaa

SEQ ID NO: 1023854 - DNA, 120 bp, Artificial Sequence
  ENSG00000250829_3 (sequence is synthesized)
tgggaccaccctcgctgactggagcacttgaggcaatcattcccagatagtggaacctcgaatggcagacactgtggttctcctgcggggctgagaactgtgaggagcagagcagacttc

SEQ ID NO: 1023855 - DNA, 120 bp, Artificial Sequence
  ENSG00000234432_0 (sequence is synthesized)
attcccgctttccccattgctgagccaaagctcgcaccaaggagggctccaagccgggaccccggttggagaaaatcctggggcatccagcggcacggagggtgggaaccagatgagcct

SEQ ID NO: 1023856 - DNA, 88 bp, Artificial Sequence
  ENSG00000234432_1 (sequence is synthesized)
gggcatccagcggcacggagggtgggaaccagatgagcctccgcctccgcgcacggtgcccacagtcacaccccccgttggtccacct

SEQ ID NO: 1023857 - DNA, 120 bp, Artificial Sequence
  ENSG00000234432_2 (sequence is synthesized)
gatgaaggcagggtccgcggagaggtggcaagctgaattctgagaagccgctctgaccctgaccctggggtcacccctccgtggtgcaggtggcaccggagttgggctcgagcggagagc

SEQ ID NO: 1023858 - DNA, 120 bp, Artificial Sequence
  ENSG00000234432_3 (sequence is synthesized)
cgcatgcccatcccagtctcaccgagccttcctaggaggaaatgccaggcccgggcgcccctaccccaaggcggtgatcctgtgaagctcgggccacctcagggtccagcgccctcagag

SEQ ID NO: 1023859 - DNA, 120 bp, Artificial Sequence
  ENSG00000234432_4 (sequence is synthesized)
atggatggtgttgacaccgaggaacgaggccgttccctctctttggtgaacggagaagctcctggcgtggttccctgcgcagtctccgggtccccaggccgtgatggggtgagcagggtg

SEQ ID NO: 1023860 - DNA, 120 bp, Artificial Sequence
  ENSG00000234432_5 (sequence is synthesized)
cgcggcgtggcccgggacacgagaccggcccggagcaccccggcgtgagcagcgggaaggagggcccgcccggagatttatggccgcagccggccccctgtgcactgagcgcgtctcggt

SEQ ID NO: 1023861 - DNA, 120 bp, Artificial Sequence
  ENSG00000234432_6 (sequence is synthesized)
cctttcccagccaaacagtggagtggaggacccgaccccggctggaggaagaggccagggccggaggcggggccgagaggagctggaatccatcggggctgggcctggcgcatcagtccg

SEQ ID NO: 1023862 - DNA, 120 bp, Artificial Sequence
  ENSG00000234432_7 (sequence is synthesized)
aattctgcccgccttgcgccctggtctcggtggggtgtggggcgctggcgccgcgtccctggtctttcaggcaggtccgggcagctcctggctgggttggcccgacctagacttggcgct

SEQ ID NO: 1023863 - DNA, 120 bp, Artificial Sequence
  ENSG00000234432_8 (sequence is synthesized)
gtatcgcggctgggcctgtcgcagcgaggggacggcgaacgtggctttcccgggcacagcctctccgggttttagccgcgcccgccagacacgggacctgcggaaaccggcgcttaagac

SEQ ID NO: 1023864 - DNA, 120 bp, Artificial Sequence
  ENSG00000234432_9 (sequence is synthesized)
gcccagccacacggcctctcagctggcagcagaagctggcaatccctcgggggggtgcccttcaatgagatgccagcggagagtgggggctttggtccccacctggaaaggcggttggcg

SEQ ID NO: 1023865 - DNA, 120 bp, Artificial Sequence
  ENSG00000234432_10 (sequence is synthesized)
cgacgggtggagtggctcgggtggccgcgccaaggaaaggatcctggctttttctttccccgctgggggagggataaggggagaacgtgtccaagcggccagcaataccagaatttggga

SEQ ID NO: 1023866 - DNA, 120 bp, Artificial Sequence
  ENSG00000234432_11 (sequence is synthesized)
caacgccgaattgagagagaccgtctgatcgcgggagctgcaccagcccggtgtagggggccgagcctgcgccaacaaaagcgcgacaggggtgacggccgggctcaaggttggcctgtc

SEQ ID NO: 1023867 - DNA, 120 bp, Artificial Sequence
  ENSG00000234432_12 (sequence is synthesized)
ctttggttttaaaacaaagacggagaattttgtcagtcgggaggcgtccagggagcggaggccggagccagcggcctaggaacacagggaaggcctcggctccggtggcccaggctggcc

SEQ ID NO: 1023868 - DNA, 120 bp, Artificial Sequence
  ENSG00000234432_13 (sequence is synthesized)
gcggagaagcacgctgggccgggcctcggctagccagggcagcttctcccgcagctgcggcttagggctacaaggaagacccccccagcccccagccgattttctacccagtcaaacaca

SEQ ID NO: 1023869 - DNA, 120 bp, Artificial Sequence
  ENSG00000234432_14 (sequence is synthesized)
cacacacacacacacacacacacacgcactttcactcaattgcgtccacagtttttggccacctatcccgctgggtaaacaaaagtatgagggggtggggagggggaggggatggaatgg

SEQ ID NO: 1023870 - DNA, 120 bp, Artificial Sequence
  ENSG00000234432_15 (sequence is synthesized)
gagggggtggggagggggaggggatggaatgggggtggggcgcggaagatggcggctggacctggtggcctatggcctgtgccctatggccacagcgcccaggcctggtttttacatttc

SEQ ID NO: 1023871 - DNA, 120 bp, Artificial Sequence
  ENSG00000234432_16 (sequence is synthesized)
aatgtggcccgccatactggggagggcgtttccctggaccctgaagcctagttagggatgtcctagaggctcccctttacgaatgggggcacccgggctgcagccactactacttcgctt

SEQ ID NO: 1023872 - DNA, 120 bp, Artificial Sequence
  ENSG00000234432_17 (sequence is synthesized)
gggatcggtcctccgccccaagatggctcccagtcgctgtttactcagcgactgcagggacaccagggcgcggggccggggagcgggcgaagatcacggagcgtacagattggcccgggc

SEQ ID NO: 1023873 - DNA, 120 bp, Artificial Sequence
  ENSG00000234432_18 (sequence is synthesized)
aggtggcctctccgcgtggcccgcccgcgcccccaagcacgcggcagccctggaaaaccgcgtgggcaggatgcgtcctggccgccccgcctggtggccaggaactgggagccaccacca

SEQ ID NO: 1023874 - DNA, 120 bp, Artificial Sequence
  ENSG00000234432_19 (sequence is synthesized)
ccaccgcgtccccaggccctgctccccggccggactccggtggctgcagggccgcgcaaatatggagtgggtgccgggggcaggtatggaagggccggtgcaagggggctgggcgcacaa

SEQ ID NO: 1023875 - DNA, 120 bp, Artificial Sequence
  ENSG00000234432_20 (sequence is synthesized)
agcccaggcggggaggggacctcctctgccccgaaccgcggccctaatgaaataccggctgggttcgtcacaccgccgaggcgcacacttgaaaaatgcaaacgccattggcaaatccag

SEQ ID NO: 1023876 - DNA, 120 bp, Artificial Sequence
  ENSG00000234432_21 (sequence is synthesized)
ggcaaacaggcagaatttttattagcaactaaatgatttatggcacacgtaccccgccgtcacaattacggcgtctcggagcatccagggggtgaaaacattaaacatttataaaaataa

SEQ ID NO: 1023877 - DNA, 120 bp, Artificial Sequence
  ENSG00000250822_0 (sequence is synthesized)
gcagaagggctgggaggtccccaccccaggccccctcatttccagtgaggcctgcagaagacccagaaaatttctcataggccctgaggaggaaaagaacagaaaattagtctgtgtgcc

SEQ ID NO: 1023878 - DNA, 120 bp, Artificial Sequence
  ENSG00000250822_1 (sequence is synthesized)
aggaatctgggtgccacttaggcgggcctgctggctcagggtctctcacaggctgaaatcaaggtgtcacctgaggctaccatcatctcaaggcttaactggcaaaggatgtacattcag

SEQ ID NO: 1023879 - DNA, 120 bp, Artificial Sequence
  ENSG00000250822_2 (sequence is synthesized)
ccaccctagatggttgttggcaggacgcaaactcctcgtgggctattgaattgaggacctctgtttattgttcttgtcagcccaaggctgccctgagttccttgccataaggacctctcc

SEQ ID NO: 1023880 - DNA, 120 bp, Artificial Sequence
  ENSG00000250822_3 (sequence is synthesized)
ataaggcagcttgcaacatgggaggtgcttcatcagagccagctggtgacagagtacaagcaagatgaaagtgacagtcttctataacctgatcttggaagtgacagcctatcatttttg

SEQ ID NO: 1023881 - DNA, 120 bp, Artificial Sequence
  ENSG00000250822_4 (sequence is synthesized)
ccatattcttctcattagaagcaagtcaatagtcccacactctaagtaaggagattgcagaagggcataaataggaggagatggggattgctgaaggccaattcagaagctgcctgccta

SEQ ID NO: 1023882 - DNA, 120 bp, Artificial Sequence
  ENSG00000250822_5 (sequence is synthesized)
gaaccaaggagtatacgaagcatgcacaagatggttcatcctggcagaggaggaacagttcttccctcataaccgagctggagaggcacacgtggcagaaggtagaggtgcgaattcaca

SEQ ID NO: 1023883 - DNA, 120 bp, Artificial Sequence
  ENSG00000250822_6 (sequence is synthesized)
gaaatcaaggatgtaagatgaaggtatgtcttccaacatacggcaacatccagttgattcactgaactgagaaatgggtgtatacctgtaaaagaaaggaagagctagcttcagtatgca

SEQ ID NO: 1023884 - DNA, 120 bp, Artificial Sequence
  ENSG00000250822_7 (sequence is synthesized)
gcctagtgaaactggaatcagaacagaatgaatacgatgaactggaaatgtcatgttattgagctacagtctctagaacagagacagtggcatcagttggagtccttaatatttgaggtt

SEQ ID NO: 1023885 - DNA, 120 bp, Artificial Sequence
  ENSG00000250822_8 (sequence is synthesized)
tcttggctaaactaacttcccccagagagggctaagacggagggctaagacgggtaataccatgtctgcctgtgactctccttttagtcaagcttctgagtgggctccacctccattcag

SEQ ID NO: 1023886 - DNA, 120 bp, Artificial Sequence
  ENSG00000250822_9 (sequence is synthesized)
gttttcactgggttagaaagtcctaacggccattttttttctttcttgagagttctgtgtaattttttctttttgaagagttctgtgttttttcagagttctgatctcatatgaaatgat

SEQ ID NO: 1023887 - DNA, 120 bp, Artificial Sequence
  ENSG00000250822_10 (sequence is synthesized)
ttcaaagtttagctctcagtgggaaataatttgtccacattccagggaaacaggagaaagccccttagttctaagagtagtactgacagtcatcacctacagtcaaatgatattttgggc

SEQ ID NO: 1023888 - DNA, 120 bp, Artificial Sequence
  ENSG00000250822_11 (sequence is synthesized)
aagtctgcattcttttatgagccacaaaaccatatagcaggaactaagatgcagagaccctgtaataaatacattccttccaccagctcttagacatcgttcataaattgttccatttga

SEQ ID NO: 1023889 - DNA, 120 bp, Artificial Sequence
  ENSG00000250822_12 (sequence is synthesized)
cagtgaacagggaaaatggatgagaaacgtggcctcaagcatataatgtatatgtggtcaaagagtcatgacccatgtggccacattaccagattatatcttattctcactttctctaca

SEQ ID NO: 1023890 - DNA, 120 bp, Artificial Sequence
  ENSG00000250822_13 (sequence is synthesized)
ataggataagcaccaacaggatagaaatacactcttctctccaatttaattatacctttattattacttttcttatatgcacacaagcagcaacagctaatgtaaagtggaaattgtaat

SEQ ID NO: 1023891 - DNA, 120 bp, Artificial Sequence
  ENSG00000250822_14 (sequence is synthesized)
acaatttccatactgtgtctttgttgactacaaaattatataaaaaatgtgtctcaccctttagttgggaccatttagaagcctgagggcaattacacagagtgtattggagttagccgc

SEQ ID NO: 1023892 - DNA, 120 bp, Artificial Sequence
  ENSG00000250822_15 (sequence is synthesized)
acaatctcctaatggcagcttggcccaaagccaagctttaagccaaacctcagggaattcaaatttaaaagtcagctacattagtggtagtgattcagtttggagaagatatcgcttttc

SEQ ID NO: 1023893 - DNA, 120 bp, Artificial Sequence
  ENSG00000250822_16 (sequence is synthesized)
gtgatttattacagccagtgctttcagtacatttaaaagatggtctagcttagttgcattttcaaaggagcgctactgcataaaatgaggaacatctgaactgaaagctatcagaatgga

SEQ ID NO: 1023894 - DNA, 120 bp, Artificial Sequence
  ENSG00000250822_17 (sequence is synthesized)
aaagcttgactagggcttgaattatgtggaaagcgtaattcttagaaataggtcctcaaacacacaagaatctgcaaaaatgagctatactttcaaccccccaatatctaaccctcgtga

SEQ ID NO: 1023895 - DNA, 120 bp, Artificial Sequence
  ENSG00000250822_18 (sequence is synthesized)
tcatttggtagagaagggtctgttactgtcaagtatttttaaatgactgcaaagacattaattccctaggtgcagaataatcattcagtatcaagaataaacatataatttaaaatatta

SEQ ID NO: 1023896 - DNA, 120 bp, Artificial Sequence
  ENSG00000250820_0 (sequence is synthesized)
tttctcaccttccctgatgaagggtcttttcagttgcaaaccaacttgccacctcagcggcagaagttgagtgttgttcgtgtcaccagggacctgggtggcaccttacagagtccttca

SEQ ID NO: 1023897 - DNA, 120 bp, Artificial Sequence
  ENSG00000250820_1 (sequence is synthesized)
cagtcacctcttggatccacttcatgtaagttctgtgagaagctcttctaggaggcaacttgaagaggaaaattactgggatgaactccaacccctacctctgaagttttggggtctcag

SEQ ID NO: 1023898 - DNA, 120 bp, Artificial Sequence
  ENSG00000250820_2 (sequence is synthesized)
acctgagggaactgagaccctggtcaccatgctattttcaggccagggttgctacacttgtcaacttaacatcaaaattgggcaagggagtaccaagaagcacccaagggcatcgcctgg

SEQ ID NO: 1023899 - DNA, 120 bp, Artificial Sequence
  ENSG00000250820_3 (sequence is synthesized)
atgtcaaacatattcctcccagaccccatatgcaaccgcttctggatgccaggatgcgactcctcttcttaccgctggccccttgatgcaaggacaagaaacccagagtgccaaggaggc

SEQ ID NO: 1023900 - DNA, 120 bp, Artificial Sequence
  ENSG00000234435_0 (sequence is synthesized)
gattgctttgaatggagagagtaaggcgcatcaggcagatacaaagcattttgctgagattactggcactatataaaccctgcactcccagggagcagtagaaatcttgagaatggatcc

SEQ ID NO: 1023901 - DNA, 120 bp, Artificial Sequence
  ENSG00000234435_1 (sequence is synthesized)
attagagtgtaaggcagacgttaaagatggagaaaccaacttctaatgacagcttggagcatctggatctagtcccagactttttagttataataactgcaagaaaaaatctacatcctg

SEQ ID NO: 1023902 - DNA, 120 bp, Artificial Sequence
  ENSG00000234435_2 (sequence is synthesized)
tgggcactgcttagcactaggaaggcgaatggctttaaattatgattcctgtcctcaagagataagtcacattgttgaaaacctgacatcaacgtacaaagattcataatcataaaaggt

SEQ ID NO: 1023903 - DNA, 120 bp, Artificial Sequence
  ENSG00000234435_3 (sequence is synthesized)
aactcttgtggccatgggtgcagtgtctgccatgcagaggagaagccgctggttgtagcagcaacactccagcttacctggagcaaagtgcataaaggaaaggccatgtgaggacacagc

SEQ ID NO: 1023904 - DNA, 120 bp, Artificial Sequence
  ENSG00000234435_4 (sequence is synthesized)
aagaaggcggccctctgcaacctgaccagcaagatctcaccagaaaccacccctgcttgcactgtgatcttggaattctagcctctagaactgtgaaacaataaactgttgtttaagcca

SEQ ID NO: 1023905 - DNA, 120 bp, Artificial Sequence
  ENSG00000257517_0 (sequence is synthesized)
ttgccaagtttttcaggaagtgctagtggccattttgatgatgtgaactagattttaaaacagaaagaggaaaaatgaatgtggtggacaagggctgctgacaatattagatagaatcag

SEQ ID NO: 1023906 - DNA, 120 bp, Artificial Sequence
  ENSG00000257517_1 (sequence is synthesized)
tgggattacaggcatgagctaccgtgcttgccttctcctccttctccttctccttcttctcctcctcctcctccttctccttcttcttcattgttaattttaggtgcagcaattccatcc

SEQ ID NO: 1023907 - DNA, 120 bp, Artificial Sequence
  ENSG00000257517_2 (sequence is synthesized)
tcttcattgttaattttaggtgcagcaattccatccaggggataaaagatttatttattttattttatcattttttaaaatttattttttcgagatggagtctcgctctgtctcccaggc

SEQ ID NO: 1023908 - DNA, 85 bp, Artificial Sequence
  ENSG00000224374_0 (sequence is synthesized)
gactcaatcatggctcactgcagccttaacttccggacctcaggtgattctcccacctcagcctgtcaagtagctgggactacag

SEQ ID NO: 1023909 - DNA, 120 bp, Artificial Sequence
  ENSG00000224375_0 (sequence is synthesized)
ctattgcttctacgctaaagacttgtgcagcatgttactgtactgaatacggcaggcaattgtaatacaatggctacagcttgcatcagaccagcaatgagcttgtgtgctgaaacaaca

SEQ ID NO: 1023910 - DNA, 120 bp, Artificial Sequence
  ENSG00000224375_1 (sequence is synthesized)
attatgactgccatcaccttgcagttaaccaatagtaatggaattcctttctggatcacgaggtcaagagttcaagactagcctgaccaacatgagtttcacacttgtcgcccagactgg

SEQ ID NO: 1023911 - DNA, 120 bp, Artificial Sequence
  ENSG00000224376_0 (sequence is synthesized)
aggaagtgcaagactctgacccaacgcccatgcctgccatccccaaacatgggctcaaaacccccttcccagggacggctgtgtccacccctcagcaggaggaggagaccccacagcacc

SEQ ID NO: 1023912 - DNA, 120 bp, Artificial Sequence
  ENSG00000224376_1 (sequence is synthesized)
tccgtttcaattctgtgggccttttggaggtcctgctggatgctaagcaccgaaacctcaacccggaacaagaccagaacaacctgagcaacaacaggaccagcgatggctctccctgct

SEQ ID NO: 1023913 - DNA, 120 bp, Artificial Sequence
  ENSG00000224376_2 (sequence is synthesized)
ggaggattctggaagtcacctggctggaccaagccctctccgtgttctctgtcagcccactccccagagccgctaggcctgatgtgcacaagcagactaataaaggcttgaggacaaaaa

SEQ ID NO: 1023914 - DNA, 120 bp, Artificial Sequence
  ENSG00000224376_3 (sequence is synthesized)
tgaagccagggaggcagctctcagcagggcacctgtgtggagccagggaagccagggccacacttgcagggtgaagtggggaactcggaaggctgggcagtggagcaaaatgcttggtgc

SEQ ID NO: 1023915 - DNA, 120 bp, Artificial Sequence
  ENSG00000224376_4 (sequence is synthesized)
cctgcgggaaccggtggccaaggctacactgggatgaagggagccgtggagctgcagaatctgcgggtggccctcagtggcaggcagccaggccaacaggggctttgggctgcaggtcag

SEQ ID NO: 1023916 - DNA, 120 bp, Artificial Sequence
  ENSG00000224376_5 (sequence is synthesized)
cccctcccctgctctggaacttttggagggccattacaaaggacatcagccccaagatactcctctgaaattctgcctgaaaggcccttcacattccctaattggcacttacaacattcc

SEQ ID NO: 1023917 - DNA, 120 bp, Artificial Sequence
  ENSG00000224376_6 (sequence is synthesized)
aggactcctagcctccctgtgtgctgggcaggaaagtagctccatgtcactgctgtccctgggaaaggaaaaaaggttgaggaagggctcagagccagccttcagaccaggcaggaaggg

SEQ ID NO: 1023918 - DNA, 120 bp, Artificial Sequence
  ENSG00000224376_7 (sequence is synthesized)
ttcagagccagccttcaggccatgcaggcctcctggatgtgcttactaactctgggctcgctgttctctgagctggctgggagttcccctctgcacccccgtttcctcccctgtaaggtg

SEQ ID NO: 1023919 - DNA, 120 bp, Artificial Sequence
  ENSG00000224376_8 (sequence is synthesized)
ggaataatagcgtatgtctctaggattaagtgagccagtcatgcatgggccgagaaccaggtttggcatattgtagctgctcagtggacgttagctgttatgattggaccacaacgtgct

SEQ ID NO: 1023920 - DNA, 120 bp, Artificial Sequence
  ENSG00000224376_9 (sequence is synthesized)
gtggaggagggacagacagaggaggctcgtgcaggggaacgccagccaaggagggagcgcctgctccaagggagggggcatttgaggcacagatcaaatgattccatgatgacaaactgc

SEQ ID NO: 1023921 - DNA, 120 bp, Artificial Sequence
  ENSG00000224376_10 (sequence is synthesized)
ctgtctcaactgaccagattccactggcaaacactccgctgaccttgggcagctccctctgctcccacctcctctggcccttgtgcttctggggctttgtggagtagctggacatcaatg

SEQ ID NO: 1023922 - DNA, 120 bp, Artificial Sequence
  ENSG00000224376_11 (sequence is synthesized)
ataacactaacagtagccggcctgccaccaagttctttacataggggatgcctatgtctgtgcttcattggcgtcatctcacaaggccctgagctggcaggaaattgaggtctcaagggg

SEQ ID NO: 1023923 - DNA, 120 bp, Artificial Sequence
  ENSG00000224371_0 (sequence is synthesized)
gtttccacttcaggtgcgacagaagggtgaactccacctcacctcctggctacagagtgcggtggcgccagcacagagctctgctcaacgtccctctgtgctttcacgatgctgatggat

SEQ ID NO: 1023924 - DNA, 120 bp, Artificial Sequence
  ENSG00000224371_1 (sequence is synthesized)
gactttcagtcgcctctaggagctccaccccacagaaacacagacagcagccagtggaaatgttcagctgagtgtgaggtgcctgcactgtgggcccaagccaggagccctgcctggtga

SEQ ID NO: 1023925 - DNA, 120 bp, Artificial Sequence
  ENSG00000224371_2 (sequence is synthesized)
agagtagcagatgaggaagcggatgcatagcaagtttaaatagcttgcagaaggacacacagtttgcaagtgaaggagctcaaattcaaagactggcagtctgcatccagagttgatcat

SEQ ID NO: 1023926 - DNA, 120 bp, Artificial Sequence
  ENSG00000224371_3 (sequence is synthesized)
taaataccatgctgaaccggttgctctcaaagtctaaacagtattttttacaataagatatccttttgtaggtcaacgaatagtttctaattctttttaaaataaaatacaatgaactga

SEQ ID NO: 1023927 - DNA, 120 bp, Artificial Sequence
  ENSG00000224371_4 (sequence is synthesized)
tgtcctcttggggctattcagagatgttcatggtgatgaaacgagctggcctggaatggcagttcccaggtagcagagcctgggcttgaggaaggtggaacgtgggtgtggcaaggagct

SEQ ID NO: 1023928 - DNA, 120 bp, Artificial Sequence
  ENSG00000261504_0 (sequence is synthesized)
ctcttgtgagctccgcggcctgcggctccggaaggcgaagctcttccaggaagcagcggcggccccactggccctctcaggctgcggagaaagggcgggaggccgcggggctctccagga

SEQ ID NO: 1023929 - DNA, 120 bp, Artificial Sequence
  ENSG00000261504_1 (sequence is synthesized)
ctcagtggtttcggagaaactcgacttcccaggctcggagggccagtttgggattgttatagaacaaaacgtgggcggcataaagtgctccgaagtggagatcaccttgaagactgggcc

SEQ ID NO: 1023930 - DNA, 120 bp, Artificial Sequence
  ENSG00000261504_2 (sequence is synthesized)
cttggctctgtgacccagcagacccgaaattccaatctggcaaactttcagcctgacccttgggaaaggatcgctcccagagtgtgggggtggaggtgatgggacaaagatcttaaaatc

SEQ ID NO: 1023931 - DNA, 120 bp, Artificial Sequence
  ENSG00000261504_3 (sequence is synthesized)
ctgaaaaacaaccgttattctcaactgaatttctgctaagtgcatccattcataaacagtacgtgcctggcgctctttacgtgtattaactggtttaattcccacaaccttaagtagggg

SEQ ID NO: 1023932 - DNA, 120 bp, Artificial Sequence
  ENSG00000261504_4 (sequence is synthesized)
ctgttaatctcacaattgtagagccaccattcaaagccaggcagtctggccccagcctctgtgggcttaaccactacccgccgccaagcagctcctaggagcctggcagggaaaggcatg

SEQ ID NO: 1023933 - DNA, 120 bp, Artificial Sequence
  ENSG00000261504_5 (sequence is synthesized)
tcatgaacaagtttcaaattggtaaaataattgtcagtggagattcatcccataaaggaattgagtaaaaggaagaactactttcagtaagatggtttgggttggagtttctgttcataa

SEQ ID NO: 1023934 - DNA, 120 bp, Artificial Sequence
  ENSG00000261504_6 (sequence is synthesized)
gggcagaaatggactctctctgacttaaagagaaaaaactttgttaagagtttggggtaacccacagaattatcaggatgtctcagaatacagacaagaacaaagggaggctccgcagcc

SEQ ID NO: 1023935 - DNA, 120 bp, Artificial Sequence
  ENSG00000261504_7 (sequence is synthesized)
aaaagtccctcctctaaaccactttgatgaggaccaaacaggtgctactgctgaaagctagacaccacatcctactccacaaccaacgctggaactccccagacaccccgctggctctgc

SEQ ID NO: 1023936 - DNA, 120 bp, Artificial Sequence
  ENSG00000261504_8 (sequence is synthesized)
cgcccctaaaccggatgcggcagccaccgcggaccccacagcggattctccaccaccccatttctttgcattgcatcaccacctccagagtgtgcctaattggcaccccgctgcttctga

SEQ ID NO: 1023937 - DNA, 120 bp, Artificial Sequence
  ENSG00000261504_9 (sequence is synthesized)
tgcaaaactccaagctgtactgggcaaacgcgcagcctctggcaccattcccagtgctgctgagcatacagacctgagcacagcggagggggagggcttggtggggagggggacttacaa

SEQ ID NO: 1023938 - DNA, 120 bp, Artificial Sequence
  ENSG00000261504_10 (sequence is synthesized)
ttcatccacgctgttgaaatcccatcaaacacacacgacccagtttggctggtgcagccttttctctcccctcctgatagcatttcagcctctcttccaataaaaaatagtagctactaa

SEQ ID NO: 1023939 - DNA, 120 bp, Artificial Sequence
  ENSG00000261505_0 (sequence is synthesized)
gccaccacccctggcaaattttttaattttttgtagagatagggtctcgctatgttgcccagtctagtcatgaactcctgagttcaagcaatcagcccaccttggcctcccaaagtgttg

SEQ ID NO: 1023940 - DNA, 75 bp, Artificial Sequence
  ENSG00000261505_1 (sequence is synthesized)
gcctcccaaagtgttgagattacaggtgttgggccaccacacttggcctagaaatcattttgaggcgggtggatc

SEQ ID NO: 1023941 - DNA, 120 bp, Artificial Sequence
  ENSG00000261505_2 (sequence is synthesized)
cctgtattcctaataggatctgtgccagagacaaaaacacaagacgggtgtgagcagtttgaaagggagacaccgtgagactcggcctcagccacagagaatgaccacagacccacgtgt

SEQ ID NO: 1023942 - DNA, 120 bp, Artificial Sequence
  ENSG00000261505_3 (sequence is synthesized)
ccggaggggagactaaggcagccctgccggtgccagaggcggaggccccgtacctgtttgattgtgatggctggcctccagtccttgtcctcctctaagatggacaggcacactgtcccc

SEQ ID NO: 1023943 - DNA, 120 bp, Artificial Sequence
  ENSG00000261505_4 (sequence is synthesized)
gaagggtacacattcgggtgaaataatggtggttcgaatttacctggaggaagaggaagaaaggaagcactttttggaggcaggcactgtcccagagtcacgtccttccccacatcaccc

SEQ ID NO: 1023944 - DNA, 120 bp, Artificial Sequence
  ENSG00000261505_5 (sequence is synthesized)
tcctcccaacactggggccccgggttggtagccaggttatttggccaaaaacttttcaaaaaaattaaattgtggccatgaggagactaaaggaagacatatccacctttgcacacaggg

SEQ ID NO: 1023945 - DNA, 120 bp, Artificial Sequence
  ENSG00000261505_6 (sequence is synthesized)
aacagagccttggggacacggccgcagccgagacgaagctgtgtctctcccaggacagaactcccagcacagccaggcagtctgggaacacaggccccagggtggccacttaacctgtgg

SEQ ID NO: 1023946 - DNA, 120 bp, Artificial Sequence
  ENSG00000261505_7 (sequence is synthesized)
cccccacatcctttccagctgggccagactcaggggagatgggaggagctgcaggagacgtccagggacatagccaacgcccttccagagtcggctgttccgacgcagaccctctgcttc

SEQ ID NO: 1023947 - DNA, 120 bp, Artificial Sequence
  ENSG00000261505_8 (sequence is synthesized)
caggatatacgggcttttaggaccctgtgttatttctttacaaaaaagcagaaaagtttgccaccattagccccaccagggaccatcacagttgatattctaggctatttcccatctttt

SEQ ID NO: 1023948 - DNA, 120 bp, Artificial Sequence
  ENSG00000261505_9 (sequence is synthesized)
acctgggcatcctccctcttctctctcaatgctacggaaggacacacagtgcggcatgtctagtgcagccggaggaattaccagaaagccaacgcgccacgaacacctacagcttccccg

SEQ ID NO: 1023949 - DNA, 120 bp, Artificial Sequence
  ENSG00000261505_10 (sequence is synthesized)
aacactcgctcctaccgaccactgcatctgccccgtaatcccaactgcaacatccgcaggcagcttcctggacttcaggtaccatggagatgcacagggcacactccctggggaacgcga

SEQ ID NO: 1023950 - DNA, 120 bp, Artificial Sequence
  ENSG00000261505_11 (sequence is synthesized)
ggagcacacgggcgacaccagcagctgcgtggctgtcctgagtgcgaacacgcgtgagcgcgctgctgtggaatgtggggtgacggtgttggccctcaagccgtgctgcttccaggctgc

SEQ ID NO: 1023951 - DNA, 120 bp, Artificial Sequence
  ENSG00000261505_12 (sequence is synthesized)
tcacgcaggctgcgtcgctggcggattccagccaccgggtgaggtgcacggcagccactccgtggtgctacgctgcgcctgctggtgaccgctgagcgcccctttcggcccaggctgctt

SEQ ID NO: 1023952 - DNA, 120 bp, Artificial Sequence
  ENSG00000261505_13 (sequence is synthesized)
cctggcgactgcttcgcagaagttcctcaagcgatacgtcttacagggctcttctgcttggggcttgactttttgcttttttaattttttgagatggagtttcactgtggtgcccaggct

SEQ ID NO: 1023953 - DNA, 120 bp, Artificial Sequence
  ENSG00000261505_14 (sequence is synthesized)
ggatctcggctcactgcagccttcacctcccgggctcaagtgattctcccgcctcaccttggcctccagagtagctgaggttacaggcacccgccatcaagcttggccaatttttctatt

SEQ ID NO: 1023954 - DNA, 79 bp, Artificial Sequence
  ENSG00000261505_15 (sequence is synthesized)
ttacaggcacccgccatcaagcttggccaatttttctattttattagaaccggggttcctccatcacttgccttggcct

SEQ ID NO: 1023955 - DNA, 120 bp, Artificial Sequence
  ENSG00000261505_16 (sequence is synthesized)
gcccgaccttttcctcttctaagggaatcttttggcaaaaacaaaaattgcctaatttcaatttaatctgattctcaatctcgtttcttctgccgatcacaacttacccgcagaaaggca

SEQ ID NO: 1023956 - DNA, 120 bp, Artificial Sequence
  ENSG00000261505_17 (sequence is synthesized)
cagatgctggatgccagcactgccaggtccacctgtccctcccaaggtagaggctgcctcctacttcctcatggcctccggcttggccgctcccgcgcttcaaagaaggaacacaaaggg

SEQ ID NO: 1023957 - DNA, 120 bp, Artificial Sequence
  ENSG00000261505_18 (sequence is synthesized)
ggtgccctcctgtctggactgtccgccaggcatcatgtggcctcttcactcttccctacctgtcatcctaggacgtctgggctggggcaagtgggggtgacaccggcacccatctgtgcc

SEQ ID NO: 1023958 - DNA, 120 bp, Artificial Sequence
  ENSG00000261505_19 (sequence is synthesized)
tctggtggacacatgtatgtgcttctgtgaatctcgactgactcaagtgaacagccaggtcctacagcatgagctcagcttccactggtgtggcaggcagcgtccaggggaaacgttcag

SEQ ID NO: 1023959 - DNA, 120 bp, Artificial Sequence
  ENSG00000261505_20 (sequence is synthesized)
aacatccgctctctccagcggtggctgaggctcccgctgccctgcgccgcggctccgtctgctcccctgtgcgctacggcagatcccactggggaggctttcactctttggcaaagccag

SEQ ID NO: 1023960 - DNA, 120 bp, Artificial Sequence
  ENSG00000261505_21 (sequence is synthesized)
gcatccctgccgcatttgctggctgggtggaggcctttcctgtgagggacacgctggacgtcatggcagccttcttactgattcccaggagctcttggtagattcagggtgagggctgag

SEQ ID NO: 1023961 - DNA, 120 bp, Artificial Sequence
  ENSG00000261505_22 (sequence is synthesized)
gtacgtacatacactgtagtgtgccctcctgcccggcgccaactgcagtctttatgataaagagagattcttaatttcaacttagtcaactcgtcaatctccctccggccagcacttcac

SEQ ID NO: 1023962 - DNA, 69 bp, Artificial Sequence
  ENSG00000261505_23 (sequence is synthesized)
gtggggtggctgctgtgatacttgctccctgcctggggcctctgtgccaccctcggccaccagggaggg

SEQ ID NO: 1023963 - DNA, 120 bp, Artificial Sequence
  ENSG00000261505_24 (sequence is synthesized)
tgcctggggcctctgtgccaccctcggccaccagggagggcaccttgcagacacctgggctgggcccgcatccagggagaaacacatctctccaaaaccacgtgctttttttttttttga

SEQ ID NO: 1023964 - DNA, 79 bp, Artificial Sequence
  ENSG00000261505_25 (sequence is synthesized)
aacacatctctccaaaaccacgtgctttttttttttttgagacagcattcctccgtcgccaggctggagagcagtggca

SEQ ID NO: 1023965 - DNA, 120 bp, Artificial Sequence
  ENSG00000261505_26 (sequence is synthesized)
caagcgtgagccactgcgcccggccgaaaccaggtgcttttcctcacgacctgtgcaggccgggcctaaggcaaccgggacccctcagcctcccccctcctgaccaggagatgcaccctg

SEQ ID NO: 1023966 - DNA, 120 bp, Artificial Sequence
  ENSG00000261505_27 (sequence is synthesized)
agatgcaccctggagggagagggcctctgatgcccacagtggcagggatgtgtggggtggctgcaggtgagccttctgggtccctggccattgggggccctgagaccccctcagaggtgt

SEQ ID NO: 1023967 - DNA, 120 bp, Artificial Sequence
  ENSG00000261505_28 (sequence is synthesized)
ggggacccgtggtgagatggggctgggtttctcaacgctgcaggcggagcagtggggggtcggaggccccaacccaccttcttatggacctgcccagaacagctgcagagggaacaggac

SEQ ID NO: 1023968 - DNA, 120 bp, Artificial Sequence
  ENSG00000261505_29 (sequence is synthesized)
aggcgggcgcatggcctctgctcagggcagggtcctccctgctttccccagcactgtttggctgtcgtctgcatcctaactcacaccaggccctcctcggtgcagacaggaccccaggcc

SEQ ID NO: 1023969 - DNA, 120 bp, Artificial Sequence
  ENSG00000261505_30 (sequence is synthesized)
cacggggacccttctagccacagcagcacctcacagggacagggtggaagcccagggtccgtgtgacagcatcacgtcactgagccctgctgggctgggcccccccacagaaggaaccaa

SEQ ID NO: 1023970 - DNA, 120 bp, Artificial Sequence
  ENSG00000261505_31 (sequence is synthesized)
cgcccagggtccttcccctcctagctggccacaactcactggggcagtggcccaagacagcccgtcacctggcctgctccctccccgggacacggctccggcgccatccatgcccaccgc

SEQ ID NO: 1023971 - DNA, 120 bp, Artificial Sequence
  ENSG00000261505_32 (sequence is synthesized)
agacggtgtgcaacggtgcctgctgcccacagggtttatgccccccgaccttccccacagaggcgtggaccctggctgtccgtagggtgagcctgtgtcctccactcccgtcctgccagg

SEQ ID NO: 1023972 - DNA, 120 bp, Artificial Sequence
  ENSG00000264754_0 (sequence is synthesized)
aattttaaaaatatattttagttaacccagtatacaaaaatatcatttcaatcaacataaaaattattaatgaactattttgcttttttttgtagtaagtcttccaaatctagtgtgcat

SEQ ID NO: 1023973 - DNA, 120 bp, Artificial Sequence
  ENSG00000264754_1 (sequence is synthesized)
gtgtgcattttagacttaaacagcactcccaagtcagacgctaaattttcattggcagtacttgatctttatttagatttcataaaattcccagttgaaaaagtagattcacatacccaa

SEQ ID NO: 1023974 - DNA, 120 bp, Artificial Sequence
  ENSG00000264754_2 (sequence is synthesized)
atatatgaaggttttctaataactgaatcaagcaccagtcttaaatttaaatgaattaaaatgaaagaaaatttaaaattcaatccctctattccatgggccacacttcaaaggctcagt

SEQ ID NO: 1023975 - DNA, 120 bp, Artificial Sequence
  ENSG00000264754_3 (sequence is synthesized)
ggccacacatagcaaatagctttggtcctgggcagaacagatctagatgaacagctgagggtggcccagactggacccagccgtggaatagaacaacggtctgcaaacttatttctataa

SEQ ID NO: 1023976 - DNA, 120 bp, Artificial Sequence
  ENSG00000264754_4 (sequence is synthesized)
agggccagataataaatattttcagccttgggggttacacagtctctcaaagtattcaactctgccattgtaaatgaaagcagccatagaatgaatgagcatcgctgtgttccaataaaa

SEQ ID NO: 1023977 - DNA, 120 bp, Artificial Sequence; identical to SEQ ID NO: 966156
  ENSG00000261507_0 (sequence is synthesized)

SEQ ID NO: 1023978 - DNA, 120 bp, Artificial Sequence; identical to SEQ ID NO: 966157
  ENSG00000261507_1 (sequence is synthesized)

SEQ ID NO: 1023979 - DNA, 120 bp, Artificial Sequence; identical to SEQ ID NO: 966158
  ENSG00000261507_2 (sequence is synthesized)

SEQ ID NO: 1023980 - DNA, 120 bp, Artificial Sequence
  ENSG00000261501_0 (sequence is synthesized)
agaggcggagaggaacaaaagaggcgaggtccgggagacccatacagggcggtttccacagagaccccagacgcagtcttggctccaccctcaccgcggcccagggctaatactggactt

SEQ ID NO: 1023981 - DNA, 120 bp, Artificial Sequence
  ENSG00000261501_1 (sequence is synthesized)
ctttccttatcgctgtagaaaaaactagataagcctgctagattctgaccgatttcactctgacattggaaagggtcctacaaagaattaggttccaccgttataggtgctagcttacag

SEQ ID NO: 1023982 - DNA, 120 bp, Artificial Sequence
  ENSG00000261501_2 (sequence is synthesized)
cagcggttcttagacttttggccttaggacttatttacaagactcttaaaaaccgttgaggagcacaaagaccatttgctttttgtgggttttctctcatttttaatgttttttttattt

SEQ ID NO: 1023983 - DNA, 120 bp, Artificial Sequence
  ENSG00000261501_3 (sequence is synthesized)
caatagttttgggtgtacaggcgggttttggttacatggatgagctcttgagtggcgaattccgagattttagtgtacccgtcacccaccagtgtacactgtacccaatatgtagtattt

SEQ ID NO: 1023984 - DNA, 120 bp, Artificial Sequence
  ENSG00000261501_4 (sequence is synthesized)
tatccctcaccccgctcccaatctcctccctacctggagttcccagaatccattatatcgctctgtatgtctttgcatcctcataactgaacatgcagtatttggttttctattcctaag

SEQ ID NO: 1023985 - DNA, 120 bp, Artificial Sequence
  ENSG00000261501_5 (sequence is synthesized)
gcctccagttccatccaagttgctgccaaaagatattatttcgttcctttttatggctgagtagtattcaatggtgtatatatactacattttctttatccactcgttagtcaatgggca

SEQ ID NO: 1023986 - DNA, 120 bp, Artificial Sequence
  ENSG00000261501_6 (sequence is synthesized)
tctttatccactcgttagtcaatgggcacttaggttggccccatatctttgcaattgcgacttatgctgctataaacatgcgtgtatatgtgtctttttcctttgggtagatacccagta

SEQ ID NO: 1023987 - DNA, 120 bp, Artificial Sequence
  ENSG00000261501_7 (sequence is synthesized)
gctggattgaatggtagctccacctttatttatttatttaaggaaactttatactgttttccatagtggtggtattaatttacatcccccaagcagtgcaaaagtgttcccttttcacca

SEQ ID NO: 1023988 - DNA, 66 bp, Artificial Sequence
  ENSG00000261501_8 (sequence is synthesized)
tacatcccccaagcagtgcaaaagtgttcccttttcaccatatcgacaccaacgtatattttctaa

SEQ ID NO: 1023989 - DNA, 74 bp, Artificial Sequence
  ENSG00000261501_9 (sequence is synthesized)
cctgacctcgtgatccgcctgcctcatggccattattgcatgatttagtgatgttgagcatcttttcatgtttg

SEQ ID NO: 1023990 - DNA, 120 bp, Artificial Sequence
  ENSG00000261501_10 (sequence is synthesized)
tgtggttttaatttgcatttccctggtgatttagtgatgttgagcatcttttcatgtttgttggctatttgtatatcttcttttgaaaaatgtcctttgcccactttttgatgggattgt

SEQ ID NO: 1023991 - DNA, 120 bp, Artificial Sequence
  ENSG00000261501_11 (sequence is synthesized)
agctgatttgtttgagttccttgtagattctaggtacaagtcctttatcagatgcacagtttgaaaatattttcttttactctatgggctgtttactgattatttcttttgctgtgcaga

SEQ ID NO: 1023992 - DNA, 79 bp, Artificial Sequence
  ENSG00000261501_12 (sequence is synthesized)
agtttactaatgtccaaaagagtttttccaatgttatcttctaaaatttttgtggtttcaggtcttagatttaagtctt

SEQ ID NO: 1023993 - DNA, 120 bp, Artificial Sequence
  ENSG00000261501_13 (sequence is synthesized)
agttgatttttgtataaggtgagagatgggaatccagtttcattcttctacctgtggctaaactagttttcccagcaccatttattgaatagggcgcccttttcccaatttatgtttttg

SEQ ID NO: 1023994 - DNA, 70 bp, Artificial Sequence
  ENSG00000261501_14 (sequence is synthesized)
attatttatttatttatttattttacctgtaccatgctgttttggtaacttgccttgcagtataatttga

SEQ ID NO: 1023995 - DNA, 120 bp, Artificial Sequence
  ENSG00000261501_15 (sequence is synthesized)
tctatgtgtctttatttatttatttatttattttacctgtaccatgctgttttggtaacttgccttgcagtataatttgaagtgtggtaacgtgatgcctccagatttgttctttttgct

SEQ ID NO: 1023996 - DNA, 120 bp, Artificial Sequence
  ENSG00000261501_16 (sequence is synthesized)
atgaattttagaattttttttttagttctgtgaaaagtagtaatgatattttgatgggaattgcactgaatctgtagattgctttggaaagtataaagaccatttgtttatatgagttac

SEQ ID NO: 1023997 - DNA, 120 bp, Artificial Sequence
  ENSG00000261501_17 (sequence is synthesized)
agaccatttgtttatatgagttacctattgatttttaccatattagacattagaactgaaaacaattagtgttttttaaaaacctatgacaaatatcttaatgaaaaaaatattttccaa

SEQ ID NO: 1023998 - DNA, 120 bp, Artificial Sequence
  ENSG00000261502_0 (sequence is synthesized)
caagctgagggagccggctccggcctctgccagcccaggaacgggctcccacagtgcagcagcaggctgaagggctcttcaagcgtggccagagtgggcgccgaggccgaggaggcgccg

SEQ ID NO: 1023999 - DNA, 120 bp, Artificial Sequence
  ENSG00000261502_1 (sequence is synthesized)
gtggccagagtgggcgccgaggccgaggaggcgccgagagcaagcgaggctgccagcacgctgtcacctctcgctgcctcagactctggagtagctgggattacagtcacgcgccaccac

SEQ ID NO: 1024000 - DNA, 83 bp, Artificial Sequence
  ENSG00000261502_2 (sequence is synthesized)
tctggagtagctgggattacagtatagagacgcggtttcgccatgttggccaggcttgtctcaatctcctgacctcgtgatct

SEQ ID NO: 1024001 - DNA, 120 bp, Artificial Sequence
  ENSG00000261502_3 (sequence is synthesized)
cgtgagccaccgcgcctggccgatctgatggttttataaggggcttttcgccgcttcacttagcactcctctgtcctgccgccatgtaaaggacgtgtttgcttccacttctgctttgat

SEQ ID NO: 1024002 - DNA, 120 bp, Artificial Sequence
  ENSG00000261502_4 (sequence is synthesized)
tgtaactttctgtaaaaaattacagcagtgcagaaggtctactggattatggcctccagttccatccatgttgctgcagaagctataattttattcttttgaatgttctttctggctgta

SEQ ID NO: 1024003 - DNA, 120 bp, Artificial Sequence
  ENSG00000261502_5 (sequence is synthesized)
agtctctgatgttggcaagtgacagacccctatggccaatgaatcacaacttaaatgagtaccaagttcccagctgatatgtgaaaaggagctcagtgagaggaatcaatgattttatat

SEQ ID NO: 1024004 - DNA, 120 bp, Artificial Sequence
  ENSG00000261502_6 (sequence is synthesized)
caatcatatggaaagaggtaaaagtgcatgcttcatgttatgttactttcttttgcttgagaatgctaaatttgtaaaactatataatatgacatacttgtgactgaattgtaagagatt

SEQ ID NO: 1024005 - DNA, 120 bp, Artificial Sequence
  ENSG00000261502_7 (sequence is synthesized)
ttatctaatattgctttagaatacagaagtaattgtttcaaaggataaaggatggaagattctgataaagcttgcttactttttgggggaaggcgtggggggaaatgtctcagtgcccaa

SEQ ID NO: 1024006 - DNA, 120 bp, Artificial Sequence
  ENSG00000261502_8 (sequence is synthesized)
ggtcagtggccttcctgactgaagactttcccagagtagaggataagagtgggaacaggaagagcagtttaaagtcatcttcacaacattctggtgagtgactgattgcttcagcagcaa

SEQ ID NO: 1024007 - DNA, 120 bp, Artificial Sequence
  ENSG00000261502_9 (sequence is synthesized)
acaggcacatggtaaaaatattggtaatgtgaatttagtgttgttactgtcatttttttctttattaactatgattttgcttacagatagcagtcagagtagtagtatattgataataat

SEQ ID NO: 1024008 - DNA, 120 bp, Artificial Sequence
  ENSG00000261502_10 (sequence is synthesized)
ccatattaaacttttaaagatatcttgtgtgaaaattcatttcaaattacatagaattaagatactatgttatttaggatagacaaattaagtgtgtttgtcatgattctataaattgat

SEQ ID NO: 1024009 - DNA, 120 bp, Artificial Sequence
  ENSG00000261502_11 (sequence is synthesized)
tttgctatcaaatattttaattcatgaatgtagtgtgataaaatttgttaaaaataataggcacacatattttcattgtatttaaattgcaatctggcctattcaaaattaacatagatt

SEQ ID NO: 1024010 - DNA, 120 bp, Artificial Sequence
  ENSG00000261502_12 (sequence is synthesized)
gattttgaccaaagaggtctagaaagcaagaccttttgtaagagaagtggaaaacagagtcatttcttagtttcattccactaaccaagatgaagctgggtcacagattgctgtagacat

SEQ ID NO: 1024011 - DNA, 120 bp, Artificial Sequence
  ENSG00000261502_13 (sequence is synthesized)
ttttaagtaactccgtggatccctctccttccacccacttttctctgctatattcacagataattctctacatatttatcgtttgggagggaaaatgactctccaagagttaacttcaat

SEQ ID NO: 1024012 - DNA, 120 bp, Artificial Sequence
  ENSG00000261502_14 (sequence is synthesized)
tacacattggtgggcagtaactgtgctgagtgccagtcagaactgtatgtcaaaaatgccaccttctctcttattaatgctgacttagcaaaaacagagggaatttagggcaagtcagaa

SEQ ID NO: 1024013 - DNA, 120 bp, Artificial Sequence
  ENSG00000261502_15 (sequence is synthesized)
ttcttgtttcattgtcctattttcagtaagagaaggaatttaggacaacttagaattttttctcctgccctattttattgcacgtatgtttattcatattcagcaaaaagaatcccaatt

SEQ ID NO: 1024014 - DNA, 120 bp, Artificial Sequence
  ENSG00000261502_16 (sequence is synthesized)
ttagcctttgttgtcttcatgtccaaaaagtattttcccaattaatttaatttttttattttaaaattaatatatctggctaaagacattagaaaaattatatcaactgaacaaaatttt

SEQ ID NO: 1024015 - DNA, 120 bp, Artificial Sequence
  ENSG00000261502_17 (sequence is synthesized)
taaatgactcatagttccaccggcaaaggaataaactcggctttgagtaaactcttgaaatgttcctttgaaatatgcttaacctttaatgttcgtttgattgattgtgattctaataca

SEQ ID NO: 1024016 - DNA, 120 bp, Artificial Sequence
  ENSG00000261502_18 (sequence is synthesized)
tatataagtttgcttctttattattcatttttatatcacaaactcttttcattattataaattttatggtaataatatgttagataatttccaacctatggtaggaatgtccctagttta

SEQ ID NO: 1024017 - DNA, 120 bp, Artificial Sequence
  ENSG00000261502_19 (sequence is synthesized)
tttgacctttatgtggtaaacattcattgtcttttaaagtcttgtgtattacaatgatacgttatttctaatttttatctcccctccatttgtattaatttagcagaaaataaacttcca

SEQ ID NO: 1024018 - DNA, 120 bp, Artificial Sequence
  ENSG00000261502_20 (sequence is synthesized)
gaaataaaatcaatttgtcaaattttaggaatatttataggctgaaatgtagagcatattgggatgcatatattggttggaatttagagagaagtaaaaataaaataaaaatgattctga

SEQ ID NO: 1024019 - DNA, 120 bp, Artificial Sequence
  ENSG00000261502_21 (sequence is synthesized)
taggaacaacacagaccatttgctctgattcaacgatttttatgagcaccattaagtgaaaatgggcaagtaactctgtggctcagggcaaagcccccacagcgatgtgatgaaaaatct

SEQ ID NO: 1024020 - DNA, 120 bp, Artificial Sequence
  ENSG00000261502_22 (sequence is synthesized)
tggcaagaacccatgaaagagaacccttcaaatcaaatcaaacaaatgcggatctactaggaggaagggccttgtttttcatttaaaataatcttttaaagagtagacaataatccaaac

SEQ ID NO: 1024021 - DNA, 120 bp, Artificial Sequence
  ENSG00000261502_23 (sequence is synthesized)
acctctgggttactatatcttctaggagaatactgattttgataaaaatatttaaatcaaaaattttaggtaattttaccttcaaatagcttaggcaccttagaccaaagtttgcacatt

SEQ ID NO: 1024022 - DNA, 120 bp, Artificial Sequence
  ENSG00000261502_24 (sequence is synthesized)
ctacaaatattgacacaataacaccattttaaatctttacccaccatttgttgggttatgtcaaatgtaactcaggataaaaagttgttcagataagtgattggtacaattggaatttat

SEQ ID NO: 1024023 - DNA, 120 bp, Artificial Sequence
  ENSG00000261502_25 (sequence is synthesized)
agattaaaaatttgttacaaggaattaaaagtttttcttacctaacctctcaataattttccaaagaaaatgtgtgatgtgtcccttgctctgcccttcactctagtgttttattttgca

SEQ ID NO: 1024024 - DNA, 120 bp, Artificial Sequence
  ENSG00000261502_26 (sequence is synthesized)
tcatggatgcatttcttttaattttcttcatataactcttcacatgtactcttgagattgcatattgcttcaacaatccttgcccagccactaacttctttcttaaaataattttcctgc

SEQ ID NO: 1024025 - DNA, 120 bp, Artificial Sequence
  ENSG00000261502_27 (sequence is synthesized)
cccccttccttcaacagtaatcaatgtctaccaccgcctctattaattctgccactgattttgtgataactcttcacaaatactgaatgatgtaacttgaaggcagtttttgttgtctga

SEQ ID NO: 1024026 - DNA, 120 bp, Artificial Sequence
  ENSG00000261502_28 (sequence is synthesized)
atctgcttgatgccagcttatggttggctataatgctcagaaatagaagcaatgattagacaatacaaagagatactagtttaatgtaaggaagaatattttcatccttatcacttactg

SEQ ID NO: 1024027 - DNA, 120 bp, Artificial Sequence
  ENSG00000261502_29 (sequence is synthesized)
tatttactttatattccacattacaaggagccacttcaacatgaacaccaagccatcttaagtttattaagatcctaataatgtttaagcattggttatgtgaatatagaatgatgatcc

SEQ ID NO: 1024028 - DNA, 120 bp, Artificial Sequence
  ENSG00000261502_30 (sequence is synthesized)
cactttggattttacattcaagtataagaaatatctattaatcaacttctttcaggagtgttacagatggtagagtctgtttcaactttgggtgcagggcttaacacattctttaacaca

SEQ ID NO: 1024029 - DNA, 120 bp, Artificial Sequence
  ENSG00000261502_31 (sequence is synthesized)
ttctgtttttttttttcctcttaaataaagctttaagcgttccaaatcattgaattactgagaagattaaatgagggtaaaacaatccttgatacataccaaccatccaataagatttgg

SEQ ID NO: 1024030 - DNA, 120 bp, Artificial Sequence
  ENSG00000261502_32 (sequence is synthesized)
ctgcaatcactacttgtcatcatcagtgactgtaacagaagcatgaagaccatagcaaagagtctggatacagtgaaacaagaaatcgagagccttgttatttcctgcctaagttctttc

SEQ ID NO: 1024031 - DNA, 120 bp, Artificial Sequence
  ENSG00000261502_33 (sequence is synthesized)
tggctgtaagtctctgatgttggcaagtgacagacccctatggccaatgaatcacaacttaaatgagtaccaagttcccagctgatatgtgaaaaggagctcagtgagaggtacttatgt

SEQ ID NO: 1024032 - DNA, 120 bp, Artificial Sequence
  ENSG00000261502_34 (sequence is synthesized)
cctttgtgtacttaaaatattgcccttaatgaataagtccgtgtgttcatttttattacaaaagtagcagacctatcttactttcaatattacaaggacaatgcttgcaaagatgaacaa

SEQ ID NO: 1024033 - DNA, 120 bp, Artificial Sequence
  ENSG00000261502_35 (sequence is synthesized)
aggacgtttaaagatacagggtctgaaagcttccgaaagccacatagtgagagatattaaaacaagttgagagaatttgatgtcaaaggcaagatcatatctgaagcatttctcaacact

SEQ ID NO: 1024034 - DNA, 120 bp, Artificial Sequence
  ENSG00000267219_0 (sequence is synthesized)
gtgcgcatgtccccgcgcagggtcgggcgctggggtgtggagactgaaccttgcagacacccgggtccgcacgtctgggatggacgtgagacagtctcgctatattacccaggctggagt

SEQ ID NO: 1024035 - DNA, 77 bp, Artificial Sequence
  ENSG00000267219_1 (sequence is synthesized)
tggacgtgagacagtctcgctatattacccaggctggagtgcagtgtcaagatctcgaagtgctgggattacaggcg

SEQ ID NO: 1024036 - DNA, 120 bp, Artificial Sequence
  ENSG00000267219_2 (sequence is synthesized)
atgaacaagactcgctccttgctctcatggggccttcattccagtgagacacaaatgcaaacacaaaattccagaagagtgctgagtgctatcatgagaaacgaagacaggctggaagat

SEQ ID NO: 1024037 - DNA, 120 bp, Artificial Sequence
  ENSG00000267219_3 (sequence is synthesized)
gggctctgaccccagaaaaccgatggagaggcccaagcagccttgggagcaacaggctataatgacagcgttccataaatcacgtgggcttcgcagccacactcagttcagtataaaggc

SEQ ID NO: 1024038 - DNA, 120 bp, Artificial Sequence
  ENSG00000267214_0 (sequence is synthesized)
gcagactacagcattttcagggcgtctccccaagatctccaataaggacaactagcatcgactaggctaatcccgtgacggcctgttctgcggggacatcatcaccctggtgctgccctc

SEQ ID NO: 1024039 - DNA, 120 bp, Artificial Sequence
  ENSG00000267214_1 (sequence is synthesized)
gactggatccatctctggggtgaggctgccctggcactgcagggtgctgagcagagtccctggcctccacccactccctgccaggagcaccccttagttacactgagctatgatcgcacc

SEQ ID NO: 1024040 - DNA, 120 bp, Artificial Sequence
  ENSG00000267214_2 (sequence is synthesized)
actgcactcgcacctgggcaacagagtgagactctgactctaaaataataataataacaagaatataagaataataattcagatccatgtccgataaaaataataaataagtaaagctga

SEQ ID NO: 1024041 - DNA, 120 bp, Artificial Sequence
  ENSG00000267215_0 (sequence is synthesized)
aggcaggcagaagggcagccaggaccatcagctcggatgagcggcatcggaagaaagctttagctgcatgtgtttgggtgaccacgagagggcagcacgtaagagaccagtgtcggcccc

SEQ ID NO: 1024042 - DNA, 120 bp, Artificial Sequence
  ENSG00000267215_1 (sequence is synthesized)
gctgccttcttgaacacaccggaagcctcctaggaaaactgcagattttgtcagactgtgaagtagaagagtcaaagagccttcattgcttccttttaaatgaccagcctactaaggaat

SEQ ID NO: 1024043 - DNA, 120 bp, Artificial Sequence
  ENSG00000267215_2 (sequence is synthesized)
ttagaatgcccaagtaaggactgctggtcagactggacttcaaaattcctggatccttaagacccaatgcatcagacaaatgtcctgctggatcctcccaccgtcagctaagggacagtg

SEQ ID NO: 1024044 - DNA, 120 bp, Artificial Sequence
  ENSG00000267215_3 (sequence is synthesized)
ctagctctctggtgagggagatccgtgtggaggtctctggcattcctgggtcagtggatggctgggagaactgctcagctccaggttccagggcctctgatcaaagccaaccctgggggc

SEQ ID NO: 1024045 - DNA, 120 bp, Artificial Sequence
  ENSG00000267215_4 (sequence is synthesized)
cagccagagatatcgcaaacctaaggactaacgtggaatctacacctgccttgggagtaaagaacaagcagggtgctttccgggatggctttgggatgagatgcccaagacttagtgccc

SEQ ID NO: 1024046 - DNA, 120 bp, Artificial Sequence
  ENSG00000267215_5 (sequence is synthesized)
ctggcattgctcagctctcaagctgacttccacagcacccccatggaagcttcattggtgcatctttgggtcttgaatgcagtgctacaatattgacgaggaaagtctccttggaaccac

SEQ ID NO: 1024047 - DNA, 120 bp, Artificial Sequence
  ENSG00000267215_6 (sequence is synthesized)
ggacagggtccagggtgcagccaagggagggtgatctaagccagccattctcctagtgtggctcctggactatgcgcaacagcatcacctgggagcttgttagaaacactggttctcagt

SEQ ID NO: 1024048 - DNA, 120 bp, Artificial Sequence
  ENSG00000267215_7 (sequence is synthesized)
tcccatgcagacgtcttgcatcagaaaatctggggctggggcccagcaatcagtgtctccaaaggccctgagatcattctattcaagtttgggaaccagcaacacagcatttaagtggaa

SEQ ID NO: 1024049 - DNA, 120 bp, Artificial Sequence
  ENSG00000267215_8 (sequence is synthesized)
atgtttatagttgcaaagccaggtgaagcttgaaatgcatcatagaggaaatgaggacaagaatgtagaaaaagagtaaaaacagagaggaaaaaaatttacaagccatcatagagtgaa

SEQ ID NO: 1024050 - DNA, 120 bp, Artificial Sequence
  ENSG00000267215_9 (sequence is synthesized)
agagcttcccctgctgcctgggggtgtgggaaatgagagttgcacctgctcacaagtatgaccagcaatttaatatctatctagagctttcaaccctgccatgtcaaatttatttagcta

SEQ ID NO: 1024051 - DNA, 120 bp, Artificial Sequence
  ENSG00000267215_10 (sequence is synthesized)
aaaacaactcttgtggtggtgaccttttattcagctaatattactcccctcaatgcctccaaagcacacagagaaattggagggctgatgaaaatctttaaagtctactaaatactaaag

SEQ ID NO: 1024052 - DNA, 120 bp, Artificial Sequence
  ENSG00000267215_11 (sequence is synthesized)
ccttcccaaacactgtgtacttttcagagagagtttctttttattggaatttcagattattgaaaggttatctgtctcctgttcctagagggattaaaataaaacaaaagcaagaagaac

SEQ ID NO: 1024053 - DNA, 120 bp, Artificial Sequence
  ENSG00000267215_12 (sequence is synthesized)
gagaagcaagagagcaggcaggcagaagggcagccaggaccatcagctcggtgccagccatagcaatagtttcagacccgtggagtcagctgtgctgttgccaacctccatcacctgtcc

SEQ ID NO: 1024054 - DNA, 68 bp, Artificial Sequence
  ENSG00000267215_13 (sequence is synthesized)
ctttccaaatttcctcttaacaaagtctaaagaataatcactgtttcttgcctctatgattttttttg

SEQ ID NO: 1024055 - DNA, 120 bp, Artificial Sequence
  ENSG00000267215_14 (sequence is synthesized)
ggcagaagggcagccaggaccatcagctcgggtgcgtgaaatgagcacggggaaagaaaggggtttcttttctgttttgttttaagtagaatcgtaattgggatgggaagggactttaga

SEQ ID NO: 1024056 - DNA, 120 bp, Artificial Sequence
  ENSG00000267215_15 (sequence is synthesized)
gataatctattcaaggacatcattttgtagtgaggcaactgtgttgtctcctgcccgagttcacccacctgctcttcctaccagaccacgtgggcagtgcactggaacaaaatctctcta

SEQ ID NO: 1024057 - DNA, 120 bp, Artificial Sequence
  ENSG00000267215_16 (sequence is synthesized)
aaacaagcttgcctagcatcacacagcagcatatgttcagctggggccaccgccccttttggctcagcacaggtgcaacgcaaaggagctttgcttttcctgggctcagggaaagttgaa

SEQ ID NO: 1024058 - DNA, 120 bp, Artificial Sequence
  ENSG00000267215_17 (sequence is synthesized)
ggcaacctgagaataggtgcttcctggggaacggtgttgaacctaacccccttcctccactctttaaaatcagacaggctctgtgctgaagaccgacactgacagctttcggccaggaac

SEQ ID NO: 1024059 - DNA, 120 bp, Artificial Sequence
  ENSG00000267215_18 (sequence is synthesized)
gttttcacttaatcctttaagaaatacatctaatatttctaatctaatctatcattttcaatggaaaacagtattttttttttcagtgattctcactgctttctttctgaggaacttgaa

SEQ ID NO: 1024060 - DNA, 120 bp, Artificial Sequence
  ENSG00000267215_19 (sequence is synthesized)
agaaaacagggaaagagaagcaagagagcaggcaggcagaagggcagccaggaccatcagctcggccatagcaatagtttcagacccgtggagtcagctgtgctgttgccaacctccatc

SEQ ID NO: 1024061 - DNA, 120 bp, Artificial Sequence
  ENSG00000267215_20 (sequence is synthesized)
agaccttatggattccctggaagtctttcaggaactcctggagggtacccagatcacactttgagaatcgccgctctaagccaatatgcagattaatggaatgaataaccgtggtgtatt

SEQ ID NO: 1024062 - DNA, 120 bp, Artificial Sequence
  ENSG00000267212_0 (sequence is synthesized)
tgtcccactgtggcctgtctgtgcctctctgcactgggtgtgactgtctggccagaccatgtctgtgaatgtgtcagtctgcccagatctacccaatctgttgccaggtcccacatgtgt

SEQ ID NO: 1024063 - DNA, 120 bp, Artificial Sequence
  ENSG00000267212_1 (sequence is synthesized)
taaggcttcggcttggtgtccctgggagcatctctgatgtgtgtgcaacagtggtgggccagggtgccagggactctctgccatactgtgaacacatcatctctgtccctaggtttgtct

SEQ ID NO: 1024064 - DNA, 120 bp, Artificial Sequence
  ENSG00000267212_2 (sequence is synthesized)
ctcttgtcttgtctctatcttctgagttggagatctggggtgtgtgtgtcctattgtgtttgtctccatgtgtgtcacacgccattgtgtctgccttgctgtgtgcctctcacctgaatg

SEQ ID NO: 1024065 - DNA, 120 bp, Artificial Sequence
  ENSG00000267211_0 (sequence is synthesized)
cagttcagggtggaggaggagctttgacatgctccagaagctatggagccctgactcaacacgcccaccctcgaggagcaagcctggaaggctgcagaggtggccactggcctggctgac

SEQ ID NO: 1024066 - DNA, 120 bp, Artificial Sequence
  ENSG00000267211_1 (sequence is synthesized)
ggcattccctgacctatccaggtggggtggggggtgagggctgcagatctctatatcattatgtaaaacaatctcaaagacagagttaaattaaacagcaggtgctgagagcgtgctgga

SEQ ID NO: 1024067 - DNA, 120 bp, Artificial Sequence
  ENSG00000263904_0 (sequence is synthesized)
aagtgatctaggtgctatgatcaaagcataagcaaaatgttgagagggcactaacagaaagtaccagaaaggggatatttttcagaagaggaagatattatacaggtgggaaaggaggag

SEQ ID NO: 1024068 - DNA, 74 bp, Artificial Sequence
  ENSG00000263904_1 (sequence is synthesized)
aaactatttgtaaagagggtatagttaccaaaacagcatggtactggccggcacagtgactcacacctgtaatt

SEQ ID NO: 1024069 - DNA, 120 bp, Artificial Sequence
  ENSG00000258419_0 (sequence is synthesized)
aatagaacaagaattgagaggtcattgactgggggagtttcctagacccagagaagggacaatggcacagactgagtcaaattcagttcctaggacttggataaaatttatattgaagcc

SEQ ID NO: 1024070 - DNA, 120 bp, Artificial Sequence
  ENSG00000258419_1 (sequence is synthesized)
actgctttgaatcagcgagcagtactgatgtcaagtttgcctattaggtagaaattcaagaatgaaatgatgatgacccttttgggaacaactctgtgcatcctttgtatcctgagagca

SEQ ID NO: 1024071 - DNA, 120 bp, Artificial Sequence
  ENSG00000258419_2 (sequence is synthesized)
caaagtggtgaaaatatagcatttgtctcttattgccaatgcgtggcacataccaactcaattcatatttgcatgaatttatgaaagcaaggatgaaaaaatatgtactaagatataaaa

SEQ ID NO: 1024072 - DNA, 120 bp, Artificial Sequence
  ENSG00000258419_3 (sequence is synthesized)
ttagcaatattatttttaaaaggttgttaaaagtcaaggccttttgggccaggctgttgggctgtttcttaaggatatgatattttatttattttaacatattcagaaacacctagtggt

SEQ ID NO: 1024073 - DNA, 120 bp, Artificial Sequence
  ENSG00000258419_4 (sequence is synthesized)
attaaaacctctgagattggcagcatttggccttttagagaatgttgactctactttctttctctagaatttattctatcattttttatgacagtcttaataaagatgattgaaagactc

SEQ ID NO: 1024074 - DNA, 120 bp, Artificial Sequence
  ENSG00000275902_0 (sequence is synthesized)
ggcaaacaccgtaataaacacaggcaacattagcaaaaaatgctagaccttgaggagtcccagggtatttggaaggcctcccccaagagacatctgtaaagggcaaaacagtcacttcac

SEQ ID NO: 1024075 - DNA, 120 bp, Artificial Sequence
  ENSG00000275902_1 (sequence is synthesized)
agtgaaaacccctggcagaccccgtctcagccgaacggccagcaatgggactgacgggatgcacgtcacctcggctgccactctgagaaaagcacagccttatggtcaccgcgtggagac

SEQ ID NO: 1024076 - DNA, 120 bp, Artificial Sequence
  ENSG00000275902_2 (sequence is synthesized)
ggaacactctagattaaaggcggggggggggggggcaaatgccacgcagcagggggcgtgctgtttacaggacaccactgggacagtccatgagggctgagcctgctacagacgaggatc

SEQ ID NO: 1024077 - DNA, 120 bp, Artificial Sequence
  ENSG00000275902_3 (sequence is synthesized)
ggcagcccagcacctgctggtttcaggaaatgctcgctgtcgcattcaggggagagggcagtacctgccacgcacggactgaaacacggctccagcaggaaagcctgtgtgagtgcgttt

SEQ ID NO: 1024078 - DNA, 120 bp, Artificial Sequence
  ENSG00000275902_4 (sequence is synthesized)
gcatggaaacaggaaaaagcagggacaacattcacatcggggcaactgggaaaacccttcgcaccattcttactgcttttctgtaaattcggctaaaataaagacgagggataaaaggca

SEQ ID NO: 1024079 - DNA, 120 bp, Artificial Sequence
  ENSG00000258414_0 (sequence is synthesized)
atagcacatcagtgaagacaaaaagagttgttactcagttctttaccctagaataaatcaaatcaacaaatatttattgaatgtctactatgtgcaaatagccctggactgttcagcttt

SEQ ID NO: 1024080 - DNA, 120 bp, Artificial Sequence
  ENSG00000258414_1 (sequence is synthesized)
taaaagccatccaacttttcacattaacaaatcaaagcattattatttcaagcattgcagaagctgcttccatgtccttaaggtgacaaagcatatgaggactttgcaagtacttggagt

SEQ ID NO: 1024081 - DNA, 120 bp, Artificial Sequence
  ENSG00000258414_2 (sequence is synthesized)
aaaggaagagaagagaattcacagagtgaaaagaggagaaagagtgctctaaaatatcaccaatggactgcaacattgaagttagagacaaggtcatcagccaagactggggagaaaggg

SEQ ID NO: 1024082 - DNA, 120 bp, Artificial Sequence
  ENSG00000258414_3 (sequence is synthesized)
aaagtttaactcatctaagaggctgttaagtgaatcaacaaaagatgccattttctattaagtcatctattttattaaagagttaaatgcaactgttgctgtatatcatgaatttatgaa

SEQ ID NO: 1024083 - DNA, 120 bp, Artificial Sequence
  ENSG00000258414_4 (sequence is synthesized)
agatttaggagtgggagttctttttttctcaaaaaaaatgagacaggttaccatctttttatataggagtggtacaaacctcttatttgaaatacccatcctagggtaaatattcattga

SEQ ID NO: 1024084 - DNA, 120 bp, Artificial Sequence
  ENSG00000258414_5 (sequence is synthesized)
tacaaataattggtaacctttgttttggcttttggactgtgtctctcaaaggaaaaaaaaaatcttgctgttttcaaaagttaaatagaacatcaaccagggaccatggccatccagaag

SEQ ID NO: 1024085 - DNA, 120 bp, Artificial Sequence
  ENSG00000255081_0 (sequence is synthesized)
tgatcctcttttcccatagtgtttgccatgatatatgtgaagtgctttctaggaaacttaattgtgtgcctattgaattaaactctagttcgtggtttcctctctaacattgtccttggc

SEQ ID NO: 1024086 - DNA, 120 bp, Artificial Sequence
  ENSG00000255081_1 (sequence is synthesized)
acagtctaaattctttaatgccacttaactctataaaattctgcatgctgtttagagtcatgtttagaaccctggtctcctgattctgttttttttgagacagagtttcgctctgtcacc

SEQ ID NO: 1024087 - DNA, 89 bp, Artificial Sequence
  ENSG00000255081_2 (sequence is synthesized)
gagacagagtttcgctctgtcacccaggttggagtgcagcggcccgaccttggctcacttctgccttcatcttagtttgaacctgggag

SEQ ID NO: 1024088 - DNA, 120 bp, Artificial Sequence
  ENSG00000225778_0 (sequence is synthesized)
agtcgcatgcaggacagcaccgcgtgcggcagctgctctggtggcctcctgcttacccggccctccactttaccgttagcacggagtgcggcaccctgcttgggcctttcggctctgcct

SEQ ID NO: 1024089 - DNA, 120 bp, Artificial Sequence
  ENSG00000225778_1 (sequence is synthesized)
cccctgcccgtcacggcgggtcacgacatcggccaggacgcagcagaagggacaagacacgcaaagaagatggcgcacccacctcggcaccgaaggccagtgcgacctcccgggagcagg

SEQ ID NO: 1024090 - DNA, 120 bp, Artificial Sequence
  ENSG00000225778_2 (sequence is synthesized)
cgggccagcacgggccttcccggaggagacagctaagccgagacctgggactgcagaggagaaacaaggaggaggcaggcggggcccggtgccctcctcgtctgccgtgccgggtggacg

SEQ ID NO: 1024091 - DNA, 120 bp, Artificial Sequence
  ENSG00000225778_3 (sequence is synthesized)
gtctgctcgcctgtctgcgtgacgaaactgaggcacaaagacgcgctatgccagcggcgggtatagcaagggctccctccgcgccacgtgttgccatccaccacacaggaatgaccgtct

SEQ ID NO: 1024092 - DNA, 120 bp, Artificial Sequence
  ENSG00000225778_4 (sequence is synthesized)
ccgtgtcatagatgggaaaccaggacgtgtaggcatcagggtttctccattttggccagactggtctggaacttctgagttcaagcggtcctcccgtctcagccttccaaagtgctggga

SEQ ID NO: 1024093 - DNA, 120 bp, Artificial Sequence
  ENSG00000225778_5 (sequence is synthesized)
tgacaggtgtgagcagctgcgccctgcaggtgcaggccctggaagacaagggaggagcctgtgagccaccggcccacgtgaaagtaaatgcatgaagttccctctcgctgaactgaaaag

SEQ ID NO: 1024094 - DNA, 120 bp, Artificial Sequence
  ENSG00000225778_6 (sequence is synthesized)
agcctcaacctggacctgacaccaacttcgccggtgctgcctggctggttgctctagcgccctgaaggagaggaatgcagtcatatttcactgtgattttcagtgtcatttccacgaaga

SEQ ID NO: 1024095 - DNA, 120 bp, Artificial Sequence
  ENSG00000225778_7 (sequence is synthesized)
ctaatgatgttgagcttttttttctccataatacaggaaagagacccaaacccatgaagaatgagatacatgtacagttttgattataaaaccaaagaataatggcttcacaagatgacg

SEQ ID NO: 1024096 - DNA, 120 bp, Artificial Sequence
  ENSG00000225778_8 (sequence is synthesized)
gctgggctcctgggctgccttcagtgtctttaaacagagatagagtcttgctatgttgtccaggctgacactgaactcttgggctccaacgatcctcctgccccggcctcctgagtacct

SEQ ID NO: 1024097 - DNA, 120 bp, Artificial Sequence
  ENSG00000225778_9 (sequence is synthesized)
gggattataggcacaagtcaccatgcccagccggaataatctgaaggaaagacgggtatattcaagatgactttgctgctggaaatatgacagaataatgtggtatcttcttctgcactt

SEQ ID NO: 1024098 - DNA, 120 bp, Artificial Sequence
  ENSG00000225778_10 (sequence is synthesized)
ccaagctctttcacactcaggctcttcctggcttttctgcctcagccaccataaactgtggttgcttctccagctctgttacagttcagacttgaggggaggtgacaagagctaacatgt

SEQ ID NO: 1024099 - DNA, 120 bp, Artificial Sequence
  ENSG00000225778_11 (sequence is synthesized)
taccatggggagcctggctgacatctccgaaactgaagactctatggaagcctcatgctattgcaatgtgtacatcaaaagtaaagtaccccaggttaaaactatgaggaagttgccatc

SEQ ID NO: 1024100 - DNA, 120 bp, Artificial Sequence
  ENSG00000225778_12 (sequence is synthesized)
tttacttccaggagcaaagacactgaaactgtcccctgtaagccccttaatttcatacagtcctctgactgcccccccaaccctggctacttttttttgaaataaggtctcactctgtca

SEQ ID NO: 1024101 - DNA, 81 bp, Artificial Sequence
  ENSG00000225778_13 (sequence is synthesized)
ttgcactaccacacccagcttattttttgtagagacagagtttcgtcatgttgcccaggctggtctcaggagtcactcctg

SEQ ID NO: 1024102 - DNA, 72 bp, Artificial Sequence
  ENSG00000225778_14 (sequence is synthesized)
tgcactaccacacccagcttattttttgtagagacagagtttcgtcatgttgcccaggctggtctcaggagt

SEQ ID NO: 1024103 - DNA, 120 bp, Artificial Sequence
  ENSG00000225778_15 (sequence is synthesized)
ttttagcaggaaatccagcccagcccctgaacggcatgttagacagttcaacaaagccttctagaagaccaaagaagactcataggaataagcctcttgctgattaatggaaacatgacc

SEQ ID NO: 1024104 - DNA, 120 bp, Artificial Sequence
  ENSG00000225778_16 (sequence is synthesized)
atttgtggagaaagtgcaatctgcattgaacacctttaggggaacctgtcatttaagacttcaagcattaccatgaaaacttcctctgaaacaccttacagacatctctgtaaaacagat

SEQ ID NO: 1024105 - DNA, 120 bp, Artificial Sequence
  ENSG00000225778_17 (sequence is synthesized)
ttaaaaagaaacacatttctgcttaatcggtacacatcaaatggcgatttaagagcaaggctaggaaaccagaagatgatatgcatatacataaagttgccactattccaaatagtaaaa

SEQ ID NO: 1024106 - DNA, 120 bp, Artificial Sequence
  ENSG00000225778_18 (sequence is synthesized)
taaagacaaagtcaatggtcctaggagagctggtgggttgtggagccaggagagaaaggcagctcccttcaccttccctgtacattccaggaggccctagaatgacctagatggtgttac

SEQ ID NO: 1024107 - DNA, 120 bp, Artificial Sequence
  ENSG00000225778_19 (sequence is synthesized)
gcacaaagccctccttttcccatcccgccatcatctcaggagcaaatggccacactcgggtatacggagcagctcaagcaaccaggtcttcctgccattcccctgaaagggctggttttg

SEQ ID NO: 1024108 - DNA, 120 bp, Artificial Sequence
  ENSG00000225778_20 (sequence is synthesized)
ccaaacgccagagccacattgtgttaatcagcgcccatccctagacacaggggcttgcagccttgtcacacaaatgagccatggagatgtttccgactcctcccctccctgccactcaca

SEQ ID NO: 1024109 - DNA, 120 bp, Artificial Sequence
  ENSG00000225778_21 (sequence is synthesized)
agcagccagctgccgagccctgcagactcttcctttacgacgtcagttgtatccacttcccttctggtcccacacccaagttcaggaccattttagcacgtgcctacattattgccacag

SEQ ID NO: 1024110 - DNA, 120 bp, Artificial Sequence
  ENSG00000225778_22 (sequence is synthesized)
ccattgtcttcatctgttttgtgctgctgtacaaggaacaaacttatttggcttgtggtttgggaggttgggaaatccaagatccagggccacatctgctgaaggccttcctgctgtacc

SEQ ID NO: 1024111 - DNA, 120 bp, Artificial Sequence
  ENSG00000225778_23 (sequence is synthesized)
gtaacataacgggaggcatcactggtgagagagagagagcacaagaaagggccaaactcgcttttatagtgaacccactcctgcaataacaacgttcaaatgctaaccacctcttcccgt

SEQ ID NO: 1024112 - DNA, 120 bp, Artificial Sequence
  ENSG00000225778_24 (sequence is synthesized)
ccctgcccctcaacatggccatgctggggattaagtgtccaacacatgagctttgggatacatgttccaactacagccgccacctgctgtcctccttgccttctccctcttctctacact

SEQ ID NO: 1024113 - DNA, 120 bp, Artificial Sequence
  ENSG00000225778_25 (sequence is synthesized)
tctgccggattctctagttggattaatcttgaaacatcacttaattgttaccactctcccaaaagcagtcaattttaacccattcccaacaggcttgagaataaaagtttcagccaatca

SEQ ID NO: 1024114 - DNA, 120 bp, Artificial Sequence
  ENSG00000225778_26 (sequence is synthesized)
gcagattagaaaaggagatggaacttgttccccctacttaaaagcaggggagagaaaagccttgtgaagagaagacacaaaacctgtttggtgacttgtcctttcaatgaaaacacaaac

SEQ ID NO: 1024115 - DNA, 120 bp, Artificial Sequence
  ENSG00000229609_0 (sequence is synthesized)
cccagaacatgtctttctcggtaggaagaagtttagcagaggattatggagatggtctcagcaacaagactgcctggatttccatcctagttcctgccccaggtggcttaacctctctgc

SEQ ID NO: 1024116 - DNA, 120 bp, Artificial Sequence
  ENSG00000229609_1 (sequence is synthesized)
agttccgtttcttcacctgtaaaatagggataagaattctgttggaagaattaaataagctaagaagtatggagtacttggaacaaggtaccaggtggatacttgagtgctaagctggtt

SEQ ID NO: 1024117 - DNA, 120 bp, Artificial Sequence
  ENSG00000229609_2 (sequence is synthesized)
tggggctcattgaataaggcttacaaagatgatgagctcctgcctgggtttgcactgcctgctgtgcggacgagccgcatctgtggactcctccttagtcagaccaagctgccatcttta

SEQ ID NO: 1024118 - DNA, 120 bp, Artificial Sequence
  ENSG00000229609_3 (sequence is synthesized)
ccttggctccaaaggtgacctatgagctgccacacctactctaggaatgcccagcaaagtcctgacttggcaacagggaccagggatagagactttgacacatctccggtgactcttctg

SEQ ID NO: 1024119 - DNA, 120 bp, Artificial Sequence
  ENSG00000229603_0 (sequence is synthesized)
agccactatttttaatgaaaaaaattgaatcaatcattgggaagaagagatttttttaattccacaaatgaagaggcccactagtagccttcaattttctgaaaagattaatttcagaag

SEQ ID NO: 1024120 - DNA, 120 bp, Artificial Sequence
  ENSG00000229603_1 (sequence is synthesized)
acataggaagttgattgagacagagacaactcagaaagttttgatatatctttcaacttggagtgaaactgctgataaagtagattttaaagagttgaacatttagaaaagaaagggcag

SEQ ID NO: 1024121 - DNA, 120 bp, Artificial Sequence
  ENSG00000229603_2 (sequence is synthesized)
gaagagaagagacacagaagcaaaggcacacaggaagatgtgatgatggaggtagagattggaatgatgtgtctagaggtcaaggaatgccaaagattgccagcaaacaccagaagctgg

SEQ ID NO: 1024122 - DNA, 120 bp, Artificial Sequence
  ENSG00000229603_3 (sequence is synthesized)
gagaatcaaggaaggattctccactgcaggtttcagagggagcatggccctgccaacatcttgaagtcagactcctaggctccagaactgtgagacaataaatttccattgttttaagcc

SEQ ID NO: 1024123 - DNA, 120 bp, Artificial Sequence
  ENSG00000229600_0 (sequence is synthesized)
aacacattttctttgccttctttggtggcctaagatggcaacagtagaaagactctgctagttttttgttttgggtcacgtttggtatgaagaacagctccatatcatctaaatatgatg

SEQ ID NO: 1024124 - DNA, 120 bp, Artificial Sequence
  ENSG00000229600_1 (sequence is synthesized)
tcaacagtattcttacttctcaaaatttactcatgagatggacactacaattcatttgctggtcctgagtgggtctggacaaacattagaaagagcaagaccggaaaagtactattgtaa

SEQ ID NO: 1024125 - DNA, 120 bp, Artificial Sequence
  ENSG00000229600_2 (sequence is synthesized)
tttgatttaaaaaagaggaattggagtaagcactagaagtagaaatggagaaatacgaattccagggctattaggacacagcaataaattttgacaggcctatttaatatagaagccata

SEQ ID NO: 1024126 - DNA, 120 bp, Artificial Sequence
  ENSG00000229600_3 (sequence is synthesized)
ggaaagggaggaatccagaaagactcccaagtttcaggctcaaggtgactatcttttgaatgggaaaaaaatgatgaagaatgcaaaataaaaagtttgttgatttatttatgcatccaa

SEQ ID NO: 1024127 - DNA, 120 bp, Artificial Sequence
  ENSG00000229607_0 (sequence is synthesized)
aggatggaggaccctgtccagggtcacacatgtggcagagcaggaaggagaacgtaggcatgtctgactccgaagttgccttgaagagggtaccaccgtgttatttgggaaactcatttg

SEQ ID NO: 1024128 - DNA, 120 bp, Artificial Sequence
  ENSG00000229607_1 (sequence is synthesized)
tcttggtggcattggcaacggagcctccccagtggcttccagcaagtcactggggccttgcccatgggggaactgacaaggaggaaggtcgcacctgccattggaaaccagagagacagc

SEQ ID NO: 1024129 - DNA, 120 bp, Artificial Sequence
  ENSG00000229607_2 (sequence is synthesized)
ttctgtgcacccaagagactccttggaggctccaagggagaaatactaccatgggatggttactgtagactgacatggtttgagaatagagagaaaaaaatgtattattaaaaacccaaa

SEQ ID NO: 1024130 - DNA, 120 bp, Artificial Sequence
  ENSG00000229606_0 (sequence is synthesized)
tggcccccaagctgagaaccgggagccggaggaaatcatagcgaaatctcaacctgatgtagccccatcagcatcacacacacactcagagcaaaatggcctgctcttcaatgtagctta

SEQ ID NO: 1024131 - DNA, 120 bp, Artificial Sequence
  ENSG00000229606_1 (sequence is synthesized)
tgaccctcctgccgctgaggggtggtatttgaaagaacagcttctttcctctcttctccttgggacagcaacagcacagagagtgggccgccatctcttactgcccactcaaccgttgct

SEQ ID NO: 1024132 - DNA, 120 bp, Artificial Sequence
  ENSG00000229606_2 (sequence is synthesized)
ggggactgattctttcagctctacatagaattcaagaactatatttggatctgcttcagagcagtaatccccacagccttaaaacatgcaaaataaaaataaattaatcatccatcagca

SEQ ID NO: 1024133 - DNA, 120 bp, Artificial Sequence
  ENSG00000229606_3 (sequence is synthesized)
cctgaccctcctgccgctgaggggtggtatttgaaagaacagctgcttgcacatgtaacagcttccaggataaccaatgagctggaaccagtaagatgtggctggggaagggggcttctc

SEQ ID NO: 1024134 - DNA, 120 bp, Artificial Sequence
  ENSG00000229606_4 (sequence is synthesized)
ccagttccagaagagcacccaaacggccctgggattttcaactctgaagcataaggcaagttaatgaagcacccaattcacaccagcttttatctgtcagagaaacaccagcaagcaagg

SEQ ID NO: 1024135 - DNA, 120 bp, Artificial Sequence
  ENSG00000229606_5 (sequence is synthesized)
tagagacaacaagccaaaccctgatgtgcaagtatgaacttcatgttaattaggaatcggaagaatgtgtgggtttctctaatgcactcatcatacgaagccagctgattcaaatgctct

SEQ ID NO: 1024136 - DNA, 120 bp, Artificial Sequence
  ENSG00000229606_6 (sequence is synthesized)
caacctgagcttcgggtcatttgtgttagctgtaaggccatctgaggcagatgcattgaacctgaccttgagagtatccttgaccactggaccaagaggccagagactctacaagtgtgc

SEQ ID NO: 1024137 - DNA, 120 bp, Artificial Sequence
  ENSG00000229606_7 (sequence is synthesized)
tcaggccagatggctaactcaactagtgcctggcaggaagactcaagatgccagcttctcccctaaaccatgtgaacattcaaccattttaaactataaaaacagcaatttcaaccaaaa

SEQ ID NO: 1024138 - DNA, 120 bp, Artificial Sequence
  ENSG00000286525_0 (sequence is synthesized)
agagtggcacatggctctgtaccccattgggtacctccagcaggccgggcactgcagccccttggcctccggcactctgcgagggaacatgctggcatgagtttgctggtcccgatgggg

SEQ ID NO: 1024139 - DNA, 120 bp, Artificial Sequence
  ENSG00000286525_1 (sequence is synthesized)
aagagtcagggatccctgagagagcctgtcaggaggagagaagggacgccggggtgaaagggaggaaggaggtggcagaagaggcctcgaggatgacgtggggctgtagatgcaggaggc

SEQ ID NO: 1024140 - DNA, 120 bp, Artificial Sequence
  ENSG00000286525_2 (sequence is synthesized)
agctggagcctgtggcactggggcatggcgggcctcaaggatttcactgccacccttgccgaggagggtaccctgagacaccagattggagccttcattgtggcctcctccaaatcccca

SEQ ID NO: 1024141 - DNA, 120 bp, Artificial Sequence
  ENSG00000286525_3 (sequence is synthesized)
cgggcacctgggaggagggaagaggcacagattcaccctgcagagaaccaagagagctgggaggcagagatgccagcatgggaaacccacccaggcaggacctcatgaagcagaggacag

SEQ ID NO: 1024142 - DNA, 120 bp, Artificial Sequence
  ENSG00000286525_4 (sequence is synthesized)
catgcaggtagcgctggcctggccgggccctcaggaagcgacctggctctcctagccccaccggtctgtgtcccttggaaatcaagtctctgaattgaaaatgttgagaaggaatgaaaa

SEQ ID NO: 1024143 - DNA, 120 bp, Artificial Sequence
  ENSG00000286525_5 (sequence is synthesized)
acactcccgagtgacttcttttttcttcaatggaaagaccctgcacagggacccggctctgagctggtgacaggacagcccacccacctgtcacctgcagagatgcccccctcctccctc

SEQ ID NO: 1024144 - DNA, 120 bp, Artificial Sequence
  ENSG00000286525_6 (sequence is synthesized)
ctacaccctcacttcctcccatcttccctaatccagcccgagccggcatctcccagaaactgctcagaagaactagagaggggtgctgttgggaattagatagtgaccgcaaagtatatc

SEQ ID NO: 1024145 - DNA, 120 bp, Artificial Sequence
  ENSG00000286525_7 (sequence is synthesized)
ttcatccagaacctcataatgaccttagaccccaaggtctttcttggaaatcggttctttacagatataattagttaaggatcttgagatgagatcatcttcgggcaggtgggccctaaa

SEQ ID NO: 1024146 - DNA, 120 bp, Artificial Sequence
  ENSG00000286525_8 (sequence is synthesized)
cctcataagaagaggagagcacacagagacacacaggaagagcgccctgtgaagagggaggcggagatggacgtgatgcagccacaagccaaggaatgactggagccgccagaagctgga

SEQ ID NO: 1024147 - DNA, 120 bp, Artificial Sequence
  ENSG00000286525_9 (sequence is synthesized)
agaggcagaagaaccctccgcagagcctcaggagggagcatgaatttcgcatgtcaccttcagaactgtgagagaagaaacgtctgtgttttaagcccccatcctctgtttgtgatcatt

SEQ ID NO: 1024148 - DNA, 120 bp, Artificial Sequence
  ENSG00000286525_10 (sequence is synthesized)
gttatggcagccaggacccttatgcaattggggtccaggagtgaggcggccgggcattgctgcttaaatgtgggtgcacccagcagagtgctcacagctgtggggtgaagaggctggcat

SEQ ID NO: 1024149 - DNA, 120 bp, Artificial Sequence
  ENSG00000286525_11 (sequence is synthesized)
tgcagagcagaaaggctcacaggggggctctgatggggacacaaactggacttggaaataaacgcacaagagaggagtgaaagacaacattgaggctaaaaaggaggatcaaggatgtgg

SEQ ID NO: 1024150 - DNA, 120 bp, Artificial Sequence
  ENSG00000286525_12 (sequence is synthesized)
aaaatccacggtggaggtactccaaaagcgtaatccaaggtgaaagtggaggaggaggtgtcggctgggggcagagaatgaggggagtgtggagctcaaccatgctcttcagcgcacagc

SEQ ID NO: 1024151 - DNA, 120 bp, Artificial Sequence
  ENSG00000286525_13 (sequence is synthesized)
agtgtagcatcctacctgagggtaggattggtggattcctgcctgggttccattgctcaatgctgtgtgacttcaaacaaatcacccaacctctctgtgcctcatgtgtatcatctgtga

SEQ ID NO: 1024152 - DNA, 120 bp, Artificial Sequence
  ENSG00000286525_14 (sequence is synthesized)
aaagggacaatagctgttttttatgcttcttgtgaggagtaaataaaaggacagctggtaaggagcttagaacagttcctggcagatggaaagtatccaaatagatttcatctgttaata

SEQ ID NO: 1024153 - DNA, 120 bp, Artificial Sequence
  ENSG00000286525_15 (sequence is synthesized)
ttaagagaacagaaacaaaagtcaaagacataatcaaagaaaactccccaggctgcagaaaggcagtgcaggcagagttggtcagtgcaccactgggggaaaaaaacaccccagcatgta

SEQ ID NO: 1024154 - DNA, 120 bp, Artificial Sequence
  ENSG00000286525_16 (sequence is synthesized)
tggaatgacaaagcgtaaaaacaaatgtgtgtatgtgtgccctgcacaacaccacagagctactataagccaagctctatgcattactgacttggagtgaccatgtaatgtgctgttaat

SEQ ID NO: 1024155 - DNA, 120 bp, Artificial Sequence
  ENSG00000286527_0 (sequence is synthesized)
agagcatgccgggagtctggcagtccgtgcggcagcagtggagcgcagaggacagggccggcctggagcgcttggcgtctccccgaagtctctctgagagctggggaggcggttggcccg

SEQ ID NO: 1024156 - DNA, 120 bp, Artificial Sequence
  ENSG00000286527_1 (sequence is synthesized)
ctaggtcactaggtcgggcaggggtcttcccccaaacatggaagttttcaccgatatttcgccggtgacattggggccttgtgccaacagactttgctgaagtgaacccaaagttcaacc

SEQ ID NO: 1024157 - DNA, 120 bp, Artificial Sequence
  ENSG00000286527_2 (sequence is synthesized)
ctccgggagagtccttgcaacgattcggccactcagttctggagccgtcggcactacattctaagttgcggtggactccactggcatctgcgtgactatctccggccggtgtgcataggc

SEQ ID NO: 1024158 - DNA, 120 bp, Artificial Sequence
  ENSG00000286527_3 (sequence is synthesized)
gcccgtcgggtcgggggctgaggaccttggacagggcggccacacccctctcgtacagcagcgcctctgtccattctgcgcaggcgcctctggggtcagggacggaggaacccgggcgag

SEQ ID NO: 1024159 - DNA, 120 bp, Artificial Sequence
  ENSG00000286527_4 (sequence is synthesized)
tagccacgccccttcacaggtgtcttccctcgaccgctactttcgcccctggcagccaaacacaggaacgctgaaaaacaggctgagaggtggatttgaggaattacatcgttcacttag

SEQ ID NO: 1024160 - DNA, 120 bp, Artificial Sequence
  ENSG00000286527_5 (sequence is synthesized)
actgttagtgttaaatattctgatttttaactacagcaaaaatcgtactgttcaagtcatatccctgagcgttgtgagatgagggccaaagatcaaagcctctggtatttatttggttac

SEQ ID NO: 1024161 - DNA, 120 bp, Artificial Sequence
  ENSG00000286527_6 (sequence is synthesized)
agtatttcatatattgaagaaagtaaagggcaaatgtttgcctgtgttgcgttaaaacggcacgttgaatgaggaatatggcacatttaccaataactggagttttgctttttctccttc

SEQ ID NO: 1024162 - DNA, 120 bp, Artificial Sequence
  ENSG00000286527_7 (sequence is synthesized)
ctgtggtcgttttaccccttcctgtaacaatattttgaagtaagaacctactaaaaatcagtaattgagaaaaattttaattggtatccaattttctgatgtaccaaaagaaaatagtgt

SEQ ID NO: 1024163 - DNA, 120 bp, Artificial Sequence
  ENSG00000286527_8 (sequence is synthesized)
gaaatcatatacgagtttctggtattgctgagccaaaaacagaaagaggaacagaaagttaagcccacaggaattattgctaaccctatgtttttctgtgtttgaggttataattctttt

SEQ ID NO: 1024164 - DNA, 120 bp, Artificial Sequence
  ENSG00000286527_9 (sequence is synthesized)
ctttcacagcttttgaaaagtaatagaaacactgttctttccccctcaaaaaaattaggcaaaaacgacattcctgttgagttaaattttccaattacaaataaaatgtgctttgatata

SEQ ID NO: 1024165 - DNA, 120 bp, Artificial Sequence
  ENSG00000286526_0 (sequence is synthesized)
agagtggggcacagggtgaaatgacatggaatgtgtactaccctgagaaggggccatgaccctggatgaggcagctgtcttcaggtgaggcagtccccaagagggtccagtggaggctgt

SEQ ID NO: 1024166 - DNA, 120 bp, Artificial Sequence
  ENSG00000286526_1 (sequence is synthesized)
gttctggcggaactcccagcagctgcagaatgatttctcctgtgctaaatggggatccaggtggcacaccacagcatcacctcttaattacatcctcagtcatatgctgcctcttgcgtt

SEQ ID NO: 1024167 - DNA, 120 bp, Artificial Sequence
  ENSG00000286526_2 (sequence is synthesized)
catacaaagtgctgtgagacagtatcttccagggacagaccttccttattgggacctaaacagatgcccttcgaggtggagtggagaagagccaaggaagccccaggcctttggcttgaa

SEQ ID NO: 1024168 - DNA, 120 bp, Artificial Sequence
  ENSG00000286526_3 (sequence is synthesized)
tttctggtgtcttcatttcttcgtggcacaaaaatcccctggaacagaatatcttttcacaaggaattttaatcaaagtcggtggaataagaaaaaagaacacaggaattattcactaca

SEQ ID NO: 1024169 - DNA, 120 bp, Artificial Sequence
  ENSG00000286526_4 (sequence is synthesized)
agcagccacaccagcaaatcagccctgactggcactgtctctttctacagcactgggcctgtagggacctgtggggataggattgataactcagtttagtgcaggcccagcaattagaca

SEQ ID NO: 1024170 - DNA, 120 bp, Artificial Sequence
  ENSG00000286526_5 (sequence is synthesized)
ggatccttcacaggccatgaagtggttttgtgttttgtatggagaatatactctgagagttccagctatgacatgaccctatacttaatctggctgatggccaaggtcagactgtggtgt

SEQ ID NO: 1024171 - DNA, 120 bp, Artificial Sequence
  ENSG00000286526_6 (sequence is synthesized)
gagcagaataaccctcttgatctatggaaatcagcagtatcttcccatgagcaggcagactagggggtctatcactagggcctcctgagtgaccaagggcctcctggactaccaagggcc

SEQ ID NO: 1024172 - DNA, 120 bp, Artificial Sequence
  ENSG00000286526_7 (sequence is synthesized)
ctgatgagctgtcctggagactgttgggcaatggcggtctaaacttggccatcaagagtgaaagaagagaaactgttgtcctctgaacaataaacaacaagatgctgactctgagctttt

SEQ ID NO: 1024173 - DNA, 120 bp, Artificial Sequence
  ENSG00000286526_8 (sequence is synthesized)
gcctttagggagaatgccttcgcacttctagccacttgtctaaaagtcccacgctcaagcctcaatcaagtttttcctcctccatggacccaattcagccaataaatatttaatgggtgc

SEQ ID NO: 1024174 - DNA, 120 bp, Artificial Sequence
  ENSG00000286521_0 (sequence is synthesized)
ggaggcctggttctagcccaagcacagtctccagcttaaggaatgaccttaagcaagcacttcttccctcagggcaacatttaaaaaaataagaagattggattgatcaacattttactg

SEQ ID NO: 1024175 - DNA, 120 bp, Artificial Sequence
  ENSG00000286521_1 (sequence is synthesized)
cctgtatttcacaggacattctccttttaatatatttgcttgaaccttcttgaaaacaggactccatggacaaataaggtctaacaccagcaatatttacacaccgaaggcacgagtatg

SEQ ID NO: 1024176 - DNA, 120 bp, Artificial Sequence
  ENSG00000286521_2 (sequence is synthesized)
gccatttggggggctgtgatattgttattgaggagttttccagagataactagacaagagctagaaaacaatggaaggaactttagaagctcacagtgaggaacaagataagaacttcta

SEQ ID NO: 1024177 - DNA, 120 bp, Artificial Sequence
  ENSG00000286521_3 (sequence is synthesized)
ggagagaaggatgcatgaggccagacagaaaattttgctgttgagaggcaccagctttcccagtgactactctggtggaccctgacaagaatcaagtcaacaggttgtgaggaagcctag

SEQ ID NO: 1024178 - DNA, 120 bp, Artificial Sequence
  ENSG00000286521_4 (sequence is synthesized)
gaaataaggagagtcctatgtagagcagaactgaggcttcttgacaacagccaacaccaacgtgccagctacatgagtgagcagtctttaagtggaaactccagtcttaatcagaccttc

SEQ ID NO: 1024179 - DNA, 120 bp, Artificial Sequence
  ENSG00000286521_5 (sequence is synthesized)
agataatgcattcctcgctgacctctgcaatctcaggagagaccacaagccagaaccacttagccatgccattcccaaatgcagaagctgtgagaaataataaatgattattactgtttt

SEQ ID NO: 1024180 - DNA, 120 bp, Artificial Sequence
  ENSG00000286520_0 (sequence is synthesized)
tgggcttggggaggaggacattttctttccagcaggtgctcgagaggactcaaagaggtgatgaatggagcaaacagagcctggactccatccaggtagacagggcttatacccaaatct

SEQ ID NO: 1024181 - DNA, 120 bp, Artificial Sequence
  ENSG00000286520_1 (sequence is synthesized)
gtcacttactagttgtatgatcttggttaagccttagtttcctcctctataaaatgactctaaatagtaacacctacctcagagttgttatgaagattaacagacataaggtgtgtaaac

SEQ ID NO: 1024182 - DNA, 120 bp, Artificial Sequence
  ENSG00000286520_2 (sequence is synthesized)
caattacactgtgtctagtacacatgactgccctgttcatactaactatggtgatttgatgtttgggagccacgctttttagtctttaaggtctgtgtaatctcgctgtcttgttttatt

SEQ ID NO: 1024183 - DNA, 120 bp, Artificial Sequence
  ENSG00000286520_3 (sequence is synthesized)
ttatatttccccatttattctctattctcgctcctgtttcctcccatttccctctcctgtcttccttcctgggatttcttatatgtccttagattatctccaaaaaacacagaacttggt

SEQ ID NO: 1024184 - DNA, 120 bp, Artificial Sequence
  ENSG00000286520_4 (sequence is synthesized)
tttgtgtgtatattaaagtttaatatccttaagtagtaacgtgctataaatcgtttaccaccttttgcactcaacactaagatttttagaggtatccatattatggtttgccagtggttc

SEQ ID NO: 1024185 - DNA, 120 bp, Artificial Sequence
  ENSG00000286520_5 (sequence is synthesized)
tcaacttcactatgaaacagaatcacttgggagcttttgaaaaatttcaatacctggacctccattccagttattctgatttaatttgtctagggtgcgggccaagcctcaggtcattct

SEQ ID NO: 1024186 - DNA, 120 bp, Artificial Sequence
  ENSG00000286520_6 (sequence is synthesized)
aaagtgcagccaggattgagaagcactgctcaatccactgctgtatataaatctagctcacaggttgggacttctcaggcagggaaaagcccggggttcacctttttctgcctcaccaag

SEQ ID NO: 1024187 - DNA, 120 bp, Artificial Sequence
  ENSG00000286520_7 (sequence is synthesized)
tctctgcagtaaaatcaggtgatgacgaccctaaggacagcgttaaaaggaaaaagaagagaggagaaggcaacttgcagcctaaggcatatgtaagaaagagcagaaatcagaactcct

SEQ ID NO: 1024188 - DNA, 120 bp, Artificial Sequence
  ENSG00000286520_8 (sequence is synthesized)
actctgccctatttgtcagagtcatgttattgattcatctgttcgtccatttaatcacccaggatttactgagctcctcagacattctgctaggtgcagggaatacagcagtgaacaggg

SEQ ID NO: 1024189 - DNA, 120 bp, Artificial Sequence
  ENSG00000286520_9 (sequence is synthesized)
tagacagtctcaacactcagtggctttcatacctgttaaaataaagcttctcaggcctcatgtcgagagcttctgacccagtaggtacagggcttggctcaggagtctacatcttgaaaa

SEQ ID NO: 1024190 - DNA, 120 bp, Artificial Sequence
  ENSG00000286520_10 (sequence is synthesized)
agtgcagcaggtgataccaatgcctatgatcctgggaatcttttgtagaaaattggtctagccaatttatgagtcaggttgtttttaagcatgcttgataaatttagcccatttctccct

SEQ ID NO: 1024191 - DNA, 120 bp, Artificial Sequence
  ENSG00000286520_11 (sequence is synthesized)
tttagaattttttttgaaacagcagaacccctatttactatgtgtcttcagcagcaactacagccttagaactctcttcctctgactagacattcctatacatgataccaccaacaatta

SEQ ID NO: 1024192 - DNA, 120 bp, Artificial Sequence
  ENSG00000286520_12 (sequence is synthesized)
attcattgttgctggtgcacccacattatacagttgctatagagtcatggtcacatttaagccctaccaaaactctgcgaggtaggtctcatccttcatatgagaaaactgaggctcatg

SEQ ID NO: 1024193 - DNA, 120 bp, Artificial Sequence
  ENSG00000286520_13 (sequence is synthesized)
ttggttaagtgattttcccaagattatacctccaggaattaaccacatgtccctctgcttcaagacctgggcttctcgccaccatattgcatgaggctccctagaaggccaggacagtct

SEQ ID NO: 1024194 - DNA, 120 bp, Artificial Sequence
  ENSG00000286520_14 (sequence is synthesized)
tcactcatcctgttatctcttggaatacccaactacactaacagatggctattccaatcacaatcactgaaccagttattagctggatgctacattctttccatacacaaagtatacaga

SEQ ID NO: 1024195 - DNA, 120 bp, Artificial Sequence
  ENSG00000286520_15 (sequence is synthesized)
ggaatccctctcatctggagttaactggcactagtagctggttggctcattggaaaaacgtagctcaatctgggaatcattaaaaggtgatgtatgtatacagtaagtattttattttaa

SEQ ID NO: 1024196 - DNA, 120 bp, Artificial Sequence
  ENSG00000286520_16 (sequence is synthesized)
cctgaaatatataaatgtatattcatgagccagacctctaatgtggagccaaagggttttttaatttttttccactttaagttctctgattggagtttcagtactctttctaacataacc

SEQ ID NO: 1024197 - DNA, 120 bp, Artificial Sequence
  ENSG00000286520_17 (sequence is synthesized)
cttctaaataagctaagtacaaaatcctattaaaatacataattcaggaatatattaaaattttaaatatacagataagttgataaaatggcaaaataaacaccaaatacccactgccta

SEQ ID NO: 1024198 - DNA, 120 bp, Artificial Sequence
  ENSG00000286520_18 (sequence is synthesized)
aattaaacaactgttaacattttgtcgtatttaccttatttctcatgctatttttagagctgcatctacatccattcatctatcatccatctatacattgtttttttgctaaatatttga

SEQ ID NO: 1024199 - DNA, 120 bp, Artificial Sequence
  ENSG00000286520_19 (sequence is synthesized)
aaataagttgcagatatcatgacacttcacccataaatatgtcagcaggtacctcctgagtataagaacacgcctctatatcattttcacaccctgaaaaataatggtaactttaaaata

SEQ ID NO: 1024200 - DNA, 120 bp, Artificial Sequence
  ENSG00000286520_20 (sequence is synthesized)
acatctgatattgagcattcaaatttccccaaccgtcacaagactgtcttttagaggtgatttttttctcaatcaagattcagtcttggttcatgcattgcatttgatgttatatttttt

SEQ ID NO: 1024201 - DNA, 120 bp, Artificial Sequence
  ENSG00000286520_21 (sequence is synthesized)
tggcccgccatttttttttttgacagtgacttttggaagagttcagaccattttgtaatattctggattgaactgttttctcatggtacatgtttctctttaccctgtgatatagtttgg

SEQ ID NO: 1024202 - DNA, 120 bp, Artificial Sequence
  ENSG00000286520_22 (sequence is synthesized)
atatctgtcccttcaaaatctcatgtcaacatttgatccccaacactggaggtggaacctagtaagaggtgtttgtgtcatggaggtggatcccttatgtataacttggtgctgtcattg

SEQ ID NO: 1024203 - DNA, 120 bp, Artificial Sequence
  ENSG00000286520_23 (sequence is synthesized)
cagtaatgagtgagttctcactatattagttctcatgagatctgattgttaaaaagagtctgtcacctcttccctcttctaatcttggcagaagattcctgaagccctcaccagaatcag

SEQ ID NO: 1024204 - DNA, 120 bp, Artificial Sequence
  ENSG00000286520_24 (sequence is synthesized)
agccaaataaacctcttttctttataaactacccagcctcgggtattcctttatagcaacacaatggtctaagacaccctgaattcactgtaaactggattaaggttataagcttcagta

SEQ ID NO: 1024205 - DNA, 120 bp, Artificial Sequence
  ENSG00000286520_25 (sequence is synthesized)
gaattcactgtaaactggattaaggttataagcttcagtagattcagcttgaatatttaggacagaattcttcactgggaatgctgtgtacttcatatggcattacatcttctgcaggta

SEQ ID NO: 1024206 - DNA, 120 bp, Artificial Sequence
  ENSG00000286520_26 (sequence is synthesized)
tttctggcaaataaatataagcatttatcttaagtacgtacttggaaatgaaatttctgagtcatagcatatacaaatgtagttttttcaagtggtcatatcagttttcacccttcaaat

SEQ ID NO: 1024207 - DNA, 120 bp, Artificial Sequence
  ENSG00000286520_27 (sequence is synthesized)
tcatcctacaaacagagttccagtggctccacatcttcaccaacatttgaaattgtcagtctaataagtttgtaatggtattggattatgatttcaatttgtctttccctgatgacctcg

SEQ ID NO: 1024208 - DNA, 120 bp, Artificial Sequence
  ENSG00000286520_28 (sequence is synthesized)
agcttattgtgtgcttatggtttaattagatgtaaagtgcttaattattttgctcagttttaaactggcatgtctatctttttaaataagtgatttgtaagattaaacatgagtctgatt

SEQ ID NO: 1024209 - DNA, 120 bp, Artificial Sequence
  ENSG00000286520_29 (sequence is synthesized)
gttggttatatatacttaaaacatctccaactaggtggtttgcattttcacacgccaaatagtgccctttaatgaacataattcctaattttaatatacccaaatttatgaatgaattcc

SEQ ID NO: 1024210 - DNA, 120 bp, Artificial Sequence
  ENSG00000286520_30 (sequence is synthesized)
attttgtttagtggtttcatatcctgtttcagaaatctttgcccaccccagttatcatgaagatatgttatcttataaaaactatttttttcttacacattgagattcaaaatccatcta

SEQ ID NO: 1024211 - DNA, 120 bp, Artificial Sequence
  ENSG00000286520_31 (sequence is synthesized)
gaattagtttttttgaatatgatgtagacaggagtcaatattattttttccatgtgaccaaaacattttattaaggagagtacccactttccagggctttactatattccctttgtcata

SEQ ID NO: 1024212 - DNA, 120 bp, Artificial Sequence
  ENSG00000286520_32 (sequence is synthesized)
aatcatgtgttcatatatgtgtgagtctctatctgtattttattttgctccattggtttgtctatttttatgtcaagaatgtcatgctgttttaattactgtagctataaaactcttaac

SEQ ID NO: 1024213 - DNA, 120 bp, Artificial Sequence
  ENSG00000286520_33 (sequence is synthesized)
atccagcagtatatgaggtctaaacttgttcttcctcctcaagattgccttggttgttgggggaggagtttgcatttccgtataaattttctaaagcaacttgataatttccaataaaag

SEQ ID NO: 1024214 - DNA, 120 bp, Artificial Sequence
  ENSG00000286520_34 (sequence is synthesized)
ctactggatttttattaagattgcattgaaactagctcattttgaggagaagccatagtttctctctgtatttatttaggtcttgtttaatttctctttataatgttttgtagttttgct

SEQ ID NO: 1024215 - DNA, 120 bp, Artificial Sequence
  ENSG00000286522_0 (sequence is synthesized)
acagacgtctctgcaggcaagcttttctgtggttttgccatggctcgtactaaacagacagctcggaaatccaccggcggtaaagcgccacgcaagcagctggctaccaaggctgctcgc

SEQ ID NO: 1024216 - DNA, 120 bp, Artificial Sequence
  ENSG00000286522_1 (sequence is synthesized)
aagagcgcgccggctaccggcggcgtgaaaaagcctcaccgttaccgcccgggcactgtggctctgcgcgagatccgccgctaccaaaagtcgaccgagttgctgattcggaagctgccg

SEQ ID NO: 1024217 - DNA, 120 bp, Artificial Sequence
  ENSG00000286522_2 (sequence is synthesized)
ccaagacttcaagaccgatcttcgcttccagagctctgcggtgatggcgctgcaggaggcttgtgaggcctacttggtagggctctttgaggacacaaacctttgcgccatccatgctaa

SEQ ID NO: 1024218 - DNA, 120 bp, Artificial Sequence
  ENSG00000286522_3 (sequence is synthesized)
gcgagtgactattatgcccaaagacatccagctcgctcgccgcattcgcggagaaagagcgtaaatgtaaagtcactttttcatcagtcttaaaacccaaaggctcttttcagagccacc

SEQ ID NO: 1024219 - DNA, 120 bp, Artificial Sequence
  ENSG00000215256_0 (sequence is synthesized)
gggccaaacgccgggcgatggcgaagccgatcctgtgagcagaaagagacaaagactgctaaggcctgtgcaggggaagaggtcgacagcatgggctctgaagttaagactgcccgggtt

SEQ ID NO: 1024220 - DNA, 120 bp, Artificial Sequence
  ENSG00000215256_1 (sequence is synthesized)
tgaattctggctctttctctatataactcctacgtgtgcctactatgtgtaaaacaggcttaatggcatggccatttttagcactgctttacttatttttattatgacctggatcacagc

SEQ ID NO: 1024221 - DNA, 120 bp, Artificial Sequence
  ENSG00000215256_2 (sequence is synthesized)
cttagttcccaagaactgacatcactttctacagttcccaccacgggtgacaggcttcatctcctgttgggactgagaggtgagaaatgagctgggtgtgcagcagcagccacttccgtg

SEQ ID NO: 1024222 - DNA, 120 bp, Artificial Sequence
  ENSG00000215256_3 (sequence is synthesized)
atttgaaggtctcactcagaacagtcctgccgccaggtttctttcttactagtctacatcattctcaaaattctttccataattattttttggggtgcatgtgaaaagatggtctctggt

SEQ ID NO: 1024223 - DNA, 120 bp, Artificial Sequence
  ENSG00000215256_4 (sequence is synthesized)
caaaaacgtaaatattgccttgggaagaagagttacacattctgcagttgtcagccattagcattttatctacatttgtattttagttttgtgaagagctggcatctagcaaagtcctgt

SEQ ID NO: 1024224 - DNA, 120 bp, Artificial Sequence
  ENSG00000215256_5 (sequence is synthesized)
agaaatgagaaccaggactgacaagagaggtgggtgagaaacaggctgggcaaggtaggcccagatgtaccgacctaaaaaaaagtctcgacacatggctctggtgtcccatctaggtaa

SEQ ID NO: 1024225 - DNA, 120 bp, Artificial Sequence
  ENSG00000215256_6 (sequence is synthesized)
gggggaggggttccgggacactttctggagcccaaatagaatggtacattttcaaaaagctggaggccttgttataagattttgaatccagattcccttgcatttccagtttctggtctt

SEQ ID NO: 1024226 - DNA, 120 bp, Artificial Sequence
  ENSG00000215256_7 (sequence is synthesized)
cccagaggctaggtaaggctggttgactggggcagcccagaacactggggggactagatcgatggggctgcacagaggtggcacagttgtgccagaggcagcagggacagaagggctggc

SEQ ID NO: 1024227 - DNA, 120 bp, Artificial Sequence
  ENSG00000215256_8 (sequence is synthesized)
aagggagggccagggtattcggaggggcttcaggcggaccacgtggctactttttttccatggccagactttggcggtatgtgaggtctgaggacaggggcactggaggcaaaggacgag

SEQ ID NO: 1024228 - DNA, 120 bp, Artificial Sequence
  ENSG00000215256_9 (sequence is synthesized)
acaccagtgcatgtttccaggcagccagggcctcagaaactccggcaccaacactcacccgtcggtggaggccgttaccagggccaccttatttgtgagcgggtcccggcgggtcatcct

SEQ ID NO: 1024229 - DNA, 120 bp, Artificial Sequence
  ENSG00000215256_10 (sequence is synthesized)
ggagctggccatccgcaccgacttccgtgcccaggcacagaggcctagcagcctggccatctgcatggatcagaccagcaagtctgggttccactccttccagcggaggtgacagagtag

SEQ ID NO: 1024230 - DNA, 120 bp, Artificial Sequence
  ENSG00000215256_11 (sequence is synthesized)
gtagggcgaaggggcaggacgaagggcgggccgcttccctgcctgcccccttcccgccctcggccagctgggagtcgtctgtggcggttggcgcctcccgccgcccgccagtcgccccgc

SEQ ID NO: 1024231 - DNA, 120 bp, Artificial Sequence
  ENSG00000215256_12 (sequence is synthesized)
cagccagctaccttccgcctgactggggcttgccttcccgggctggtgccacttcggataaaccctttggactcctaactccaatcaggtgtctgctttgttgaggactcacagacacag

SEQ ID NO: 1024232 - DNA, 120 bp, Artificial Sequence
  ENSG00000215256_13 (sequence is synthesized)
tctcctttcttcaagatctttacaatgcaagacctcactaacacacagggatggtctcccagagggtctgtgctgttccttcactcagaacatcaagatgcactgaagtaaggatcctct

SEQ ID NO: 1024233 - DNA, 120 bp, Artificial Sequence
  ENSG00000215256_14 (sequence is synthesized)
attctacagttcctgctagctgagctattccatgggggcttcagcaggaaattccaaggttggctttgacaagctaaggccggctggtggagcacatcgagttctggaggttcatgtgtg

SEQ ID NO: 1024234 - DNA, 120 bp, Artificial Sequence
  ENSG00000215256_15 (sequence is synthesized)
ttttcatgaagatctgtctgcccgtagcagataaagagttgttgccccactcctcctggggtcttctattttcctgggaggaatttctggattaactgaacacacacacacacacacaca

SEQ ID NO: 1024235 - DNA, 69 bp, Artificial Sequence
  ENSG00000215256_16 (sequence is synthesized)
gaagcatcaacagtaattctgagttcttagggacaatgcagattaaatccacaataagaaagacaacta

SEQ ID NO: 1024236 - DNA, 73 bp, Artificial Sequence
  ENSG00000215256_17 (sequence is synthesized)
gtactattgatccagaggtgaccagactagcctcactggagataataggtgacattattatgcaaagtggttt

SEQ ID NO: 1024237 - DNA, 120 bp, Artificial Sequence
  ENSG00000215256_18 (sequence is synthesized)
cactggagataataggtgacattattatgcaaagtggtttcagttcccttgtcttgtttttggaatagtataagaggcctacaatacgaataaataaggcccatcacaagcctcaccaaa

SEQ ID NO: 1024238 - DNA, 120 bp, Artificial Sequence
  ENSG00000215256_19 (sequence is synthesized)
ggacaaaactaatccacttctgaagaaggctctttgttgggccagatcaaatccttggacagaactgtactcttaatctctgtagtgaaagtggggggtagtttaagaatttattaacct

SEQ ID NO: 1024239 - DNA, 120 bp, Artificial Sequence
  ENSG00000215256_20 (sequence is synthesized)
tctaccttgagcaatccctcagaagtaagaggtgtcaggcctctgagccgaagctcagccattgtaacccctgtgacctgcacatatatgtccagatggcctgcaggagccaagaagtct

SEQ ID NO: 1024240 - DNA, 120 bp, Artificial Sequence
  ENSG00000215256_21 (sequence is synthesized)
ggggcagctgaaaaaccacacaagaagtaaaacagccagttcctgccttaactgattaaccaacattacaacattccaccattgtgacctgtccctgtcctaccttaactgatcaatcga

SEQ ID NO: 1024241 - DNA, 120 bp, Artificial Sequence
  ENSG00000215256_22 (sequence is synthesized)
ccttgtgacagtcttcttctggacaatgggtcttatcatctccccaccatgtaccttgtgaccccctcctctgctaacaatagataaccactttttactgtaattttccattacctaccc

SEQ ID NO: 1024242 - DNA, 120 bp, Artificial Sequence
  ENSG00000215256_23 (sequence is synthesized)
taattttccattacctacccaactcctataaagcaaccccttccccatctcccttcactgactctgttttcagactcagcccacttgcactcaagtgaataaacagccttgttgctcaca

SEQ ID NO: 1024243 - DNA, 120 bp, Artificial Sequence
  ENSG00000215256_24 (sequence is synthesized)
ttcacacagatgtgcttgacaaaagggaagggtggatttgtccttctggttacatatgttctgctcactcattttgaatttaattaaacaaggattgcccttaccttttcatactttgta

SEQ ID NO: 1024244 - DNA, 120 bp, Artificial Sequence
  ENSG00000215256_25 (sequence is synthesized)
agaaaccataaatacttatgcaccatgatttttttaaagaaacactttttattttgaagtaattatagtctcataggaagttgcaaaagtagtacatagagtccctgagtactcttcccc

SEQ ID NO: 1024245 - DNA, 120 bp, Artificial Sequence
  ENSG00000215256_26 (sequence is synthesized)
cagtggtgacaactgtagtataatatcaattctgggaaattgacattggtacaataccaaatatactatgcctttttctctaaggcatgatgttgcagtagcatccttgtacatgtagct

SEQ ID NO: 1024246 - DNA, 120 bp, Artificial Sequence
  ENSG00000215256_27 (sequence is synthesized)
aggagaacttgtactaagcccagataaatagttgaagtacaagggcaaggagtgtgtctttgatattttaatagaaatcacctattgccctctagaaaagctgtacccttttccagtggc

SEQ ID NO: 1024247 - DNA, 120 bp, Artificial Sequence
  ENSG00000215256_28 (sequence is synthesized)
agagaaccttcctgaaaggcagtcctgtgtaatggtgtccatttcatcacacccttaaaacactcagctttaacaaacatgcagatttttgctgatgtgggagaaaatattaattattaa

SEQ ID NO: 1024248 - DNA, 120 bp, Artificial Sequence
  ENSG00000215256_29 (sequence is synthesized)
tgatattaaggtgattatcttttcgtatgtttatagatatttgtatttctttttaaatgaactgctcatgacctttgtctacttttatttgggtttacttctttctcatttattcctata

SEQ ID NO: 1024249 - DNA, 120 bp, Artificial Sequence
  ENSG00000215256_30 (sequence is synthesized)
aactctttataaaaggaaattaaccatttgattgtcatatgttgtgaatatttttaccattttgacttttgaatttatgtctttttaatgaattgtagaagtttaaaatctttatggaat

SEQ ID NO: 1024250 - DNA, 120 bp, Artificial Sequence
  ENSG00000215256_31 (sequence is synthesized)
gctggttgactggggcagcccagaacactggggagactagatcgatagggctgcacagaggtggcacagttgtgccagagggccagactttggcagcgtgtaaggtctgaggacaggggc

SEQ ID NO: 1024251 - DNA, 120 bp, Artificial Sequence
  ENSG00000215256_32 (sequence is synthesized)
accggaggccgaggatgagaggccagtgcctgtttccaggcagccagggcctcagaaactccggccggagcactcacccgtcggtggaggccgttaccagggccaccttatttgcgagcg

SEQ ID NO: 1024252 - DNA, 120 bp, Artificial Sequence
  ENSG00000215256_33 (sequence is synthesized)
ggtcccggcgggtcatcccggagctggccatccgcaccgaattccaagcccgggcacagaggcctagcagccccgccttgtgcatggatcagaccagcaagtgccacttcggataaaccc

SEQ ID NO: 1024253 - DNA, 120 bp, Artificial Sequence
  ENSG00000215256_34 (sequence is synthesized)
gactggggcagcccagaacactggggagactagatcgatagggctgcacagaggtggcacagttgtgccagaggtagcagggacaggagggctggcaagggagggtccagggctagggga

SEQ ID NO: 1024254 - DNA, 120 bp, Artificial Sequence
  ENSG00000215256_35 (sequence is synthesized)
tttcttactccaaaagtataagatattcaattataagatttcctgtagttattcaatgtgtgtgtatgtatgtttaaatcttttggccatctgatatttgtgcttgtgtgggaagtgaga

SEQ ID NO: 1024255 - DNA, 120 bp, Artificial Sequence
  ENSG00000215256_36 (sequence is synthesized)
tagaaatccgggttagtttttttcccaaatggttaaccagttgtctcagcactgtctgagtaactcttccatgccttggtttctttatcattaccatatgtatttgagcctatttctgga

SEQ ID NO: 1024256 - DNA, 120 bp, Artificial Sequence
  ENSG00000215256_37 (sequence is synthesized)
ctctagttcattttattgatttgtctgtctgttcccaagtcaggattttaatagatattgcaaagaggaaaaagaaagtgctaaaattgccataaaataacttcaaatagaagagtatgg

SEQ ID NO: 1024257 - DNA, 120 bp, Artificial Sequence
  ENSG00000215256_38 (sequence is synthesized)
cagttcagaggtgggagagagtatttttagttggggtctgaaaaagcttcatgaaagagggacatttaaggtgaagcttgaatgacgagcactacgttgggcaaagggaataaagaacaa

SEQ ID NO: 1024258 - DNA, 120 bp, Artificial Sequence
  ENSG00000215256_39 (sequence is synthesized)
ggttgactggggcagcccagaacactggggagactagatcgatagggctgcacagaggtggcacagttgtgccagaggtgccacttcggataaaccctttggactcctaactccaatcag

SEQ ID NO: 1024259 - DNA, 120 bp, Artificial Sequence
  ENSG00000215256_40 (sequence is synthesized)
cgggccgattccctgcccgccctgctccccgccccggtaccgctgtgagcggtctgtggccctgggcacctccatccgccgcggcgcccctccaccatctaccttccgcctgactggggc

SEQ ID NO: 1024260 - DNA, 120 bp, Artificial Sequence
  ENSG00000215256_41 (sequence is synthesized)
gactggacgcttcgccgagggtgggctaggaacgccgagagtcagccccagggagcgccagggaactgcacctgtcaccgaagggcgggacgggcggctccgggacaggaaggtcccgac

SEQ ID NO: 1024261 - DNA, 120 bp, Artificial Sequence
  ENSG00000215256_42 (sequence is synthesized)
cgggtgaggcgaggcaggcagcggaggatgctccggggacagcgatgcccggactggaatgcaggggctgccttggagccaggatgcatggggtgccacttcggataaaccctttggact

SEQ ID NO: 1024262 - DNA, 120 bp, Artificial Sequence
  ENSG00000215256_43 (sequence is synthesized)
tgtagggctcgcccctcccctggcccttgcaggaacccgcaggctttggctgctgcctttctgcatctgcttgcccaccttttcttctctgggaagtgggggttttgagttggttgcttt

SEQ ID NO: 1024263 - DNA, 120 bp, Artificial Sequence
  ENSG00000215256_44 (sequence is synthesized)
tgcttcttcagaattccttctccaagaaagtctgggtctatgtgtgtgacagcccacaggagggcaaatgttttgagactgcccatggaggtgaggcctgtggtcgccatggagtccacc

SEQ ID NO: 1024264 - DNA, 120 bp, Artificial Sequence
  ENSG00000215256_45 (sequence is synthesized)
aggtgaggctggaagagcctgggagagagacgtgatagggagtagctgcgccaggcctggcactgcccttcactctgcccaaggtctcttccatcttcacgggccctggagggcagacta

SEQ ID NO: 1024265 - DNA, 120 bp, Artificial Sequence
  ENSG00000215256_46 (sequence is synthesized)
tggtcattggccaaacagcattctcatgtccgttgacaaagggacttcctcctttacaggggctaagtggtagcgaggaggctggacagtccctcaagcagtggtggaaatgcaaagaac

SEQ ID NO: 1024266 - DNA, 120 bp, Artificial Sequence
  ENSG00000215256_47 (sequence is synthesized)
tcggggcactcaagttctccctaaccactctgtccccaggtcttagccgccatcttagttcaataaatatttgttgaatgcaaaatctctttatgaactgtaagctactaagcacatagt

SEQ ID NO: 1024267 - DNA, 120 bp, Artificial Sequence
  ENSG00000215256_48 (sequence is synthesized)
agttactgccaccatgtagtgattattattggtgccctgggccagactcttcatctgtaaattactgagggtatggatgatgaataaagtccttgccagctataaattctgtgtccaaga

SEQ ID NO: 1024268 - DNA, 120 bp, Artificial Sequence
  ENSG00000215256_49 (sequence is synthesized)
agaatgaagaaatctggatggcttatggtacagtgtagaaaggccccaacagacccaaatgcaagcatctgaattggtttaacccactggcctccaaagccagactgagaagcagtgctg

SEQ ID NO: 1024269 - DNA, 120 bp, Artificial Sequence
  ENSG00000215256_50 (sequence is synthesized)
gataacagcacatctgtttatagcatggttaactgaatattttaagctcaccgttgatagctactgctcagaaaaagattcctttcaaactgttactgctcattgacaatgcacctggtc

SEQ ID NO: 1024270 - DNA, 80 bp, Artificial Sequence
  ENSG00000215256_51 (sequence is synthesized)
gggggtaattctgacttgcaagacttgttatttaagaaatacattttgtaaggctgtagctgccatagataatgattcct

SEQ ID NO: 1024271 - DNA, 120 bp, Artificial Sequence
  ENSG00000215256_52 (sequence is synthesized)
acattttgtaaggctgtagctgccatagataatgattcctctgatttatctgggcaaagtcaactgaaaaccttctaaaaaggatccaccattctagatgccattaagaatatttgtgat

SEQ ID NO: 1024272 - DNA, 88 bp, Artificial Sequence
  ENSG00000215256_53 (sequence is synthesized)
gtggaagggttcaacactgcatcagaggaaggaactgcagatgtggtggaaatagcaagagaactagaagtggagctggaagatggga

SEQ ID NO: 1024273 - DNA, 120 bp, Artificial Sequence
  ENSG00000215256_54 (sequence is synthesized)
gaaatagcaagagaactagaagtggagctggaagatgggactgaattgctgcaatctcacgacaaaatgtagatggctgaggagctggttcttacggataagcaaataaagtggtttctt

SEQ ID NO: 1024274 - DNA, 120 bp, Artificial Sequence
  ENSG00000215256_55 (sequence is synthesized)
gggatggaatctatttccggtgaagatgccatgaacattgttgaaatcacaacacgggattcagaatatgatatgtacttagttgagtaagcagtggtagagtttgtaggattgactcca

SEQ ID NO: 1024275 - DNA, 120 bp, Artificial Sequence
  ENSG00000215256_56 (sequence is synthesized)
aatgctatcaaacaggcttgcatgctacagagaaatcttttgtgaaaggaagagtcaactgatgtggcaaacttcactgctgtcttatttgaagaaattgccacagccaccccagccttc

SEQ ID NO: 1024276 - DNA, 74 bp, Artificial Sequence
  ENSG00000215256_57 (sequence is synthesized)
cagccttcagcaacaccaccctaagtcagccaccatcaatgttgaggcaagaccctctaaccgaggcgggtgaa

SEQ ID NO: 1024277 - DNA, 86 bp, Artificial Sequence
  ENSG00000215256_58 (sequence is synthesized)
tacacgaccctccaccagcaaaaagattacaacttctaaaggctcagatcattgttagcactttttagcaataaagtattttaaaa

SEQ ID NO: 1024278 - DNA, 120 bp, Artificial Sequence
  ENSG00000215256_59 (sequence is synthesized)
gatcattgttagcactttttagcaataaagtattttaaaattaagatatgtatatatttttaaagacataatgctattgctcatttaatagacaaccattagatgaccattatagtgtaa

SEQ ID NO: 1024279 - DNA, 120 bp, Artificial Sequence
  ENSG00000215256_60 (sequence is synthesized)
tttatatgcactgggaaaccaaaaaattcgtgtgtctcactttattataatattcactttattgtgcggtggcctggaaccagacccacaatatctccgaggtgtgcctgtacttagttt

SEQ ID NO: 1024280 - DNA, 120 bp, Artificial Sequence
  ENSG00000215256_61 (sequence is synthesized)
tgcctgtacttagtttaaaactgactttcatagggtctctattcagactgttcatgaaagatgttcctccattgtaaagactatcagaatctgtctgggtgcagtggctcacgcctataa

SEQ ID NO: 1024281 - DNA, 64 bp, Artificial Sequence
  ENSG00000215256_62 (sequence is synthesized)
ctttgagaggccgaggtgggtggatcaggaaaatatcaaaaattagccgggcatggtggcacat

SEQ ID NO: 1024282 - DNA, 120 bp, Artificial Sequence
  ENSG00000215256_63 (sequence is synthesized)
gctgacgaccacatgggccccgtcctgggccaaacgccgggcgatggcgaagccgatcctgtgagcagaaagagacaaagactgctaaggcctgtgcaggggaagaggtcgacagtatga

SEQ ID NO: 1024283 - DNA, 120 bp, Artificial Sequence
  ENSG00000215256_64 (sequence is synthesized)
gctctgaagttaagactgcccgggtttgaattctggctctttctctatataacccctacgtgtgcctactatgtgtaaaacaggcttaatggcatggccatttttggcattcctttactt

SEQ ID NO: 1024284 - DNA, 120 bp, Artificial Sequence
  ENSG00000215256_65 (sequence is synthesized)
gtttttattatgacctggaccacagcctcagttcccaagaactgacatcactttctacagttcccaccatgggtgacaggcttcatcccctcttgggactgagaggtgccacttcggata

SEQ ID NO: 1024285 - DNA, 120 bp, Artificial Sequence
  ENSG00000251055_0 (sequence is synthesized)
ccaaccaccagagtcacatcctgcaggttactcagtgacatcaaagctcctgggaaatgttgatgtgatcctgttggtgattggtttcctcatcataatgtggtatgagaatatattata

SEQ ID NO: 1024286 - DNA, 120 bp, Artificial Sequence
  ENSG00000251055_1 (sequence is synthesized)
gttttatattctacattcctgactccacccccatgaagagccatgtttcaagaccacaggatggtcaatattggattaattgctactggacttaacattgctaagtgaaaggggcaagtt

SEQ ID NO: 1024287 - DNA, 120 bp, Artificial Sequence
  ENSG00000251055_2 (sequence is synthesized)
aatagaataaacaataaaataaatttagacggctatctatttaggggagaaggggaaatagctagaggagacagggcaaaaagctagacttttttgaaaataactgacaataaaaatgtg

SEQ ID NO: 1024288 - DNA, 120 bp, Artificial Sequence
  ENSG00000251055_3 (sequence is synthesized)
actgtgaaacagtgtaaatatgttaattttgaaagtataatcaaatacaaaggcaaaacctaaatgtcaaaataaaaataaacaaatgaagaaaaatatgcacctagtaagtgacacact

SEQ ID NO: 1024289 - DNA, 120 bp, Artificial Sequence
  ENSG00000251055_4 (sequence is synthesized)
atgcagaaagggaatattccaagggattcctgaatttaggcatttagttgtactgtcaaattgagtagtgcactgtggtcaataaataaacaaaataaaaatgtaaaataagatcctaaa

SEQ ID NO: 1024290 - DNA, 120 bp, Artificial Sequence
  ENSG00000251054_0 (sequence is synthesized)
gacacagcaagaaggcatcatttatgaggcagagagcgagacaccaaatctaccagcaccttggtcttagactttaaagcctccagaactgatgtacacaggcaacaaagaaaggaaaat

SEQ ID NO: 1024291 - DNA, 120 bp, Artificial Sequence
  ENSG00000251054_1 (sequence is synthesized)
agaccattctaccttgtaagtggatgataacaaggatctgaggaatgtggccaaagtctcaaatttatccccatatgttcctcggtaatatcccaagcaagaacagctctgcctcgccca

SEQ ID NO: 1024292 - DNA, 120 bp, Artificial Sequence
  ENSG00000251054_2 (sequence is synthesized)
tacagtttctgtaatagaactgttaccttaaaattaacctagcctgtaattttagggaagaaaatcagtaacctaattctattcaggataaaataagttaataaaacaattagaactcaa

SEQ ID NO: 1024293 - DNA, 120 bp, Artificial Sequence
  ENSG00000259268_0 (sequence is synthesized)
ggcctgattcatcctggcatcatggtacctgagtacttagaatgttggaaggtgtgctcagtgaagatgaataatttgcctaagaacacttgactggtgaatcccattctcatttttgca

SEQ ID NO: 1024294 - DNA, 120 bp, Artificial Sequence
  ENSG00000259268_1 (sequence is synthesized)
gtatccaagagctggatgcctacatgatgcagtccacagtggctgagcaccttctgtccctgggatctcagactctgcctgccacagagcagatgactggaaaaccctccccacttgctg

SEQ ID NO: 1024295 - DNA, 120 bp, Artificial Sequence
  ENSG00000259268_2 (sequence is synthesized)
tcaggtgtgccagcaattttcagactgaatatctacaccagaaaagcacataactaccatgagcataagacgtgggagtgccatggagtgaccatagaagtatagacagtaagatcacag

SEQ ID NO: 1024296 - DNA, 120 bp, Artificial Sequence
  ENSG00000259268_3 (sequence is synthesized)
ccagatacaacttcttgttttatagatgagagacctgaggcccagaaagaggaaggcacttgcccatggtcacacagtgagttagtgagactggagcccagctctccagggttctgtgct

SEQ ID NO: 1024297 - DNA, 120 bp, Artificial Sequence
  ENSG00000259268_4 (sequence is synthesized)
gtgctagtcacaggctgttaggcaattggctttcctgggttctggtcaaattcattttttgcctactctgctgcatctacacagtcagatgtgatttgggttaaagttcattgaatcatg

SEQ ID NO: 1024298 - DNA, 120 bp, Artificial Sequence
  ENSG00000259269_0 (sequence is synthesized)
tacaatgggaagatgggggaggcagcacactggggtcaggagtggagatacttaggctccccagagaaattagtcacaagtcttatcccttcatctccatttacagccatttatttggga

SEQ ID NO: 1024299 - DNA, 120 bp, Artificial Sequence
  ENSG00000259269_1 (sequence is synthesized)
gcaacatactttaaatgagtgataaacaaaatgtctccccacagcccccaccccagcatgtgttctgaagttcacaggaaggcttctcctcatttgctttggggcccgcaggctgcctgc

SEQ ID NO: 1024300 - DNA, 120 bp, Artificial Sequence
  ENSG00000259269_2 (sequence is synthesized)
taacagctgggtcttcccatgaacaaattagacagttaatgttccaggatgaagagggcttcggggaacagaatctgccgtttatttgacttgcttcattagacacagtgccatcatacc

SEQ ID NO: 1024301 - DNA, 120 bp, Artificial Sequence
  ENSG00000259269_3 (sequence is synthesized)
cttggctgtgctgaggatctgtaaggcaccagatgtgaaagtaaggaagaaagatggatgtggaagaaagtcactgcccagagaataaggagacctggattctaatctcagctctgccat

SEQ ID NO: 1024302 - DNA, 120 bp, Artificial Sequence
  ENSG00000259269_4 (sequence is synthesized)
taactagctgtgagactcaagaataactaatcattttgataactcgtttttttactttttaaaatgaggagccaagtttagacaatgagctcggctcttcaccagtgataaagtgtctgg

SEQ ID NO: 1024303 - DNA, 120 bp, Artificial Sequence
  ENSG00000259269_5 (sequence is synthesized)
gacatgcttccattcaagcaatgctcttccttcttgtctatactttatccaagaaagaataaatcatttccaaatattttcaaagatgaaactatggctcaaaagggaataagagatcaa

SEQ ID NO: 1024304 - DNA, 120 bp, Artificial Sequence
  ENSG00000259269_6 (sequence is synthesized)
ggcaagcatggacatcttgtacgtggaagtgcagaccagaacttgtatcacagccagtcatatctggtgctttccatgctacttttacatacatgtatccttaaatttgatcctcttcta

SEQ ID NO: 1024305 - DNA, 120 bp, Artificial Sequence
  ENSG00000259269_7 (sequence is synthesized)
gtgttggaaaaatcacagatgtcatctgggaatgctcagagccttgggctttcacgctgagacagactcgcttccaccggaacctcagccttttaaggctaaatcaaggccgtgacttcc

SEQ ID NO: 1024306 - DNA, 120 bp, Artificial Sequence
  ENSG00000259269_8 (sequence is synthesized)
tcagctgaatcaacctgacactgttccctgagctcactgggatcctattggcagagcgtcagccccgtcatggaaagaatgcctccaccagggaggactgggttagtccccatcctgaac

SEQ ID NO: 1024307 - DNA, 120 bp, Artificial Sequence
  ENSG00000259269_9 (sequence is synthesized)
atcccctttaatcaatggcccttagctcagagaccatttctgcaccaggctggagggaagaagcccttctctcaggttcttgccgaggcctgctatttaaaacagatggcacacacgggc

SEQ ID NO: 1024308 - DNA, 120 bp, Artificial Sequence
  ENSG00000259269_10 (sequence is synthesized)
agtccattcccacaccccttccactctctaagcactttgaatatattaaaaccttttcttacctctcagttccaatttggtactcaagcccatgtgaacactaaagccattaacccaaaa

SEQ ID NO: 1024309 - DNA, 120 bp, Artificial Sequence
  ENSG00000259269_11 (sequence is synthesized)
cggaaatcagctacacaagaagaacctctcagttctgagaattcacattaaccagtgattaagaaatattaaaaagggctgatagtccactacgttatcaagttcaaagcctaagaaata

SEQ ID NO: 1024310 - DNA, 120 bp, Artificial Sequence
  ENSG00000259269_12 (sequence is synthesized)
agcccttcttccactactccttcctcaaaaggccttctaagtcgtcactctcctagcactggttacaagaaatgtcggtgggagtggttgttttacgataaaccactctgataaaaaaaa

SEQ ID NO: 1024311 - DNA, 120 bp, Artificial Sequence
  ENSG00000259269_13 (sequence is synthesized)
tgctccaatgattatttttgagatgtcagagctgaaaatgtacagatttcactggacgaagaacctgccaagtggtgattgcacaaccaaagcactgcaaggaaccaaggaggccaaatg

SEQ ID NO: 1024312 - DNA, 120 bp, Artificial Sequence
  ENSG00000259269_14 (sequence is synthesized)
tgtcctcgaagtctcaatctctttggagcctaccagctccgagagaagtttgaggatgctgcaaaaccctcccctgcaaatccatctactcctcccacttctatcctaatgggtatagtt

SEQ ID NO: 1024313 - DNA, 120 bp, Artificial Sequence
  ENSG00000259269_15 (sequence is synthesized)
gtaatgatgtttctggtgatctggctcagaaggctgagctgatgagtgatcactcagaaatactgaatcaggcaatggaaattctgaatcggtgggctctggagaaggaactgagggcga

SEQ ID NO: 1024314 - DNA, 120 bp, Artificial Sequence
  ENSG00000259269_16 (sequence is synthesized)
ggtgactcggggccggagggctattatggactatggacaagctgaaggcatgggaagcctgaccagtagatagaggaatatgaacttggtggacagggaaaagcagggacgtcatgaacg

SEQ ID NO: 1024315 - DNA, 120 bp, Artificial Sequence
  ENSG00000259269_17 (sequence is synthesized)
aaagaccacagaccctctgttctagtccatggggccaggctgtgctccactgcctactcttggattccccaaagaatgctttatgtccttataataaatccacctttccatggacaaaaa

SEQ ID NO: 1024316 - DNA, 120 bp, Artificial Sequence
  ENSG00000259269_18 (sequence is synthesized)
actctctacagattatggaaaatatttgtctgagctcttatttcaactgctccattctcagctagtgaggagagtaagatgtagtgaggcatgtgttcagaactttctcccagagggctg

SEQ ID NO: 1024317 - DNA, 120 bp, Artificial Sequence
  ENSG00000259269_19 (sequence is synthesized)
acagattatggaaaatatttgtctgagctcttatttcaactgctccattctcagctagtgaggagagtaagatgtagtgaggcatgtgttcagaactttctcccagaggtaaattactga

SEQ ID NO: 1024318 - DNA, 120 bp, Artificial Sequence
  ENSG00000259269_20 (sequence is synthesized)
ggactagagggcaggcctgtacaccaagacggacctctgagaatgagtaggctgatagtccactacgttatcaagttcaaagcctaagaaatattgaacatttccacacatgaatgtggg

SEQ ID NO: 1024319 - DNA, 120 bp, Artificial Sequence
  ENSG00000259269_21 (sequence is synthesized)
ttgtacgtggaagtgcagaccagaacttgtatcacagccagtcatatctggttttcttttgcttgggctctctcccaaccaaaagccatggaacatactcgccccaaggcaccatcaatg

SEQ ID NO: 1024320 - DNA, 120 bp, Artificial Sequence
  ENSG00000259269_22 (sequence is synthesized)
tgtcctaaacactactactcccccagctgggctggagatagctccatccagcagaccctgccctggcagaggtgcagccagggaactctcacctaattaaaggacaatccggcagctcct

SEQ ID NO: 1024321 - DNA, 120 bp, Artificial Sequence
  ENSG00000259269_23 (sequence is synthesized)
acaacgtcacttgagtctggatggagagaagacaggaaacacaggattccaaaattacagcctgaggcttttattccagagtccctttcaaaggcatggatgtctatttgggtacatgtg

SEQ ID NO: 1024322 - DNA, 120 bp, Artificial Sequence
  ENSG00000259269_24 (sequence is synthesized)
gtggtcatcagagaagagtcagaaggctcagacccctcgggaatgggcaaagcaaagaaagacacaataagcctggcaagacctcgtatctcagcttagaatgttttttttcactcagtc

SEQ ID NO: 1024323 - DNA, 120 bp, Artificial Sequence
  ENSG00000259269_25 (sequence is synthesized)
tcatgaacagatttagaaataccatctgcagctctcctccaaggtttctcaaaggtccttggagttatctggggacaaaaatgccaattttgtaaataaagaaactgaagccaataagaa

SEQ ID NO: 1024324 - DNA, 120 bp, Artificial Sequence
  ENSG00000251059_0 (sequence is synthesized)
atgcttagtggattcatcaccatgtgtgggggcagaaactacttccactcttaccttccatactgcataactgccagtggcaagaatgaaataagttaatctagatagacaacttctgcc

SEQ ID NO: 1024325 - DNA, 120 bp, Artificial Sequence
  ENSG00000251059_1 (sequence is synthesized)
tcacacttaaggccccaaaggaacaagaataaaagcaatacttagattatcaggaactacaatgccaatgaaggaatgacaaccatcattgttgtcaacaacatgtcaacaacatcaaca

SEQ ID NO: 1024326 - DNA, 120 bp, Artificial Sequence
  ENSG00000251059_2 (sequence is synthesized)
ctaatttttcatgggatttgaaactaagtaggtgaatctgaagtctgcgctgcttccattccatcccattgtctcttctgagggagaaagcttctaagggagaaagcctttggggcttgg

SEQ ID NO: 1024327 - DNA, 120 bp, Artificial Sequence
  ENSG00000251059_3 (sequence is synthesized)
aacaaaagaagccagagtctttagagtacacactccgtacttccattaaataaatttcaacaacaggtcaaagcatgtatcttgcaaccttctttgaataaggctcagtgcaaagctggg

SEQ ID NO: 1024328 - DNA, 120 bp, Artificial Sequence
  ENSG00000251059_4 (sequence is synthesized)
gccagtgaccttgaccttccttcatccctatctatcaaggattttttgtgagcataagaggcagcaactttacttgtatttcatttcatagcttaattatatctacatgcaattagaaaa

SEQ ID NO: 1024329 - DNA, 120 bp, Artificial Sequence
  ENSG00000251059_5 (sequence is synthesized)
agctggaatgccaggatttgattccaacttctgccacttactaactgcggaaccttaggcaagtcactgaacccctaagtttcctcagctgtaaaacaataataaacagagtctacaggt

SEQ ID NO: 1024330 - DNA, 120 bp, Artificial Sequence
  ENSG00000251058_0 (sequence is synthesized)
gcagcagcagatgatgcaagaatccttggctactgagtgttctgggcaaagtagagcttgcctaccctccagacccatgtggggctgctggacaatgacaggaggctgttgtctcattgg

SEQ ID NO: 1024331 - DNA, 120 bp, Artificial Sequence
  ENSG00000251058_1 (sequence is synthesized)
gatgctggctcctggattatgatgggaatacctcacagggcactgcacaggctactgaactgcgtcccaaacctccaccttcctgcgtgaaggtcccaaagaaaaacctgtccttggcac

SEQ ID NO: 1024332 - DNA, 120 bp, Artificial Sequence
  ENSG00000251058_2 (sequence is synthesized)
acttctacatagacttgctatataaatagggaaagccaggcacctctcagtttctgcatccagaaaatatattaacatttattataaagatcaattgaaacagagaatgtggcgttcttg

SEQ ID NO: 1024333 - DNA, 120 bp, Artificial Sequence
  ENSG00000251058_3 (sequence is synthesized)
tagcagtgtgtaatgaggaataaaactggaagtaataataataacaacatcaaataaattactggaacactgatttatgcatgtgatgctactaagtaatttcatactttatttcatgtt

SEQ ID NO: 1024334 - DNA, 120 bp, Artificial Sequence
  ENSG00000262362_0 (sequence is synthesized)
aaataacctagcaagaggcctgctggagggcagcaggggaaaatggaagacccgaatctttagacaagtctattttcagactcgctcctttctctaccaaacctgagctgcttccgattc

SEQ ID NO: 1024335 - DNA, 120 bp, Artificial Sequence
  ENSG00000262362_1 (sequence is synthesized)
tccttctctcttccccaaactgggctctaacccccgtcctctgaatccatgcccggggaaggtggctacgggcactggccctgtcgggggctgcctactcacccgccgcgggaggggcca

SEQ ID NO: 1024336 - DNA, 120 bp, Artificial Sequence
  ENSG00000262362_2 (sequence is synthesized)
ttttggggactgagcccctcactctggcgcccaggctacattgcagtggcgcggtcttggctcagtgaagcctcgacctgccggactaaagcagttctcccgcctcagcctccccaagta

SEQ ID NO: 1024337 - DNA, 120 bp, Artificial Sequence
  ENSG00000262362_3 (sequence is synthesized)
ggtgcacgccaccacacccggctaattattatggtctttaaatttaaaaaaaaaattttttttagacggagtctcgctctatcccccaggctggagtgcattggcgcagtctcagctgca

SEQ ID NO: 1024338 - DNA, 120 bp, Artificial Sequence
  ENSG00000262362_4 (sequence is synthesized)
ggctggagtgcattggcgcagtctcagctgcaacctccgcctcctggttcaaacgagtctcctgcctcagcctcctgagcagatgggattacgggcgcccgccaccatgcccggctaatt

SEQ ID NO: 1024339 - DNA, 120 bp, Artificial Sequence
  ENSG00000263015_0 (sequence is synthesized)
gcagagaatggcttccggcttccgcacaccgagacccgcctgagcagcagagaatggcttccggcttccgcacaccgagacccgccggtgcgggcttcctgggacttccattcttgattt

SEQ ID NO: 1024340 - DNA, 120 bp, Artificial Sequence
  ENSG00000263015_1 (sequence is synthesized)
gttggggtgacagtgccaagcctgacctcccctctaaggtcagaaaaacaatgagcaacgtgcgtcaatgagggcagcagcttccaaacagacacctggggaaacctggaaatcttcagt

SEQ ID NO: 1024341 - DNA, 120 bp, Artificial Sequence
  ENSG00000263015_2 (sequence is synthesized)
agtgagaacctctacaaagccctccagtggctgctccagttggtccactgcagtgcttgattttgtgaagaaccctgtggaatgtggtctctggcagctgagaagtgccttccttttcca

SEQ ID NO: 1024342 - DNA, 120 bp, Artificial Sequence
  ENSG00000263015_3 (sequence is synthesized)
tcagcgcaaggcaaacacatgaagggagctggggtttcttgccaccatttcacctgagacccctgaaagctgcagcccacactgcaaatacttttcttggccctggaagtagagggaagt

SEQ ID NO: 1024343 - DNA, 74 bp, Artificial Sequence
  ENSG00000263011_0 (sequence is synthesized)
tctgtgaacctagccgctgggctgtgcggacaggttcgcgtggggctcctgggcctcccgcagccgcgtgatcc

SEQ ID NO: 1024344 - DNA, 120 bp, Artificial Sequence
  ENSG00000263011_1 (sequence is synthesized)
ccgtctctcctggacctgcctagatccaaaagccagccctggaaggaacacctctcattctcaagaagaagttaatgtctgccttacagtagatgtccaataaatcttctttgaacaatt

SEQ ID NO: 1024345 - DNA, 120 bp, Artificial Sequence
  ENSG00000260296_0 (sequence is synthesized)
gtgaaactccatctaaaaaaaaaacaaacaaacaaaaagataattaatagatgcactttttattttaaaattttgtgggtacattgtaggtgtatacatttatggggtacatgagatatt

SEQ ID NO: 1024346 - DNA, 120 bp, Artificial Sequence
  ENSG00000260296_1 (sequence is synthesized)
acattgtaggtgtatacatttatggggtacatgagatatttttgatacatgcatgcaatgcatattaatcacatcggggtaaatgggatatccgtcccctcaagcatttatcctttgtgt

SEQ ID NO: 1024347 - DNA, 120 bp, Artificial Sequence
  ENSG00000260296_2 (sequence is synthesized)
tgattgttgactgtagtcacccttttatgctattaaatactagatcttattcattctaactacacttttacattttgaaacatagtgaaaatgtcatacttgatattagagtgaattatt

SEQ ID NO: 1024348 - DNA, 120 bp, Artificial Sequence
  ENSG00000260296_3 (sequence is synthesized)
cagtgtacacattatatgtattttaatatgtttctctttaggctgccttctagtaccaaatgttataatcagataattgacctggtgtttgtggtgatctgatattatcaggaaaagcat

SEQ ID NO: 1024349 - DNA, 120 bp, Artificial Sequence
  ENSG00000260296_4 (sequence is synthesized)
tataatgggagttccagagtgaaatacaagagaaaagccagatttaatagaagtaaatttcctgagctgaataaagccttatatttgcaggttgaaagtgttcactaaattctaggcagg

SEQ ID NO: 1024350 - DNA, 120 bp, Artificial Sequence
  ENSG00000260296_5 (sequence is synthesized)
attgatgagaaaaggcatacacctaaacatactctgacagaattcctgaatctcaaagttaaagagaaaaatatataagattccagacagaaagaagttatttgcaatgggaaaagaatt

SEQ ID NO: 1024351 - DNA, 120 bp, Artificial Sequence
  ENSG00000260296_6 (sequence is synthesized)
ggactggtatcagacagtggaatcatatctatacctgttaagagaaaaggaaagtaaccaagaagtctctttccagccaagcatcattcacctgccagagtgaaagggatgcagaaagga

SEQ ID NO: 1024352 - DNA, 120 bp, Artificial Sequence
  ENSG00000260296_7 (sequence is synthesized)
ttccaagaatctatcatctgcatatccccatctgaagaaactgaaaagaggactgtaactaaataacaaattaatgagaatagagacttcaagaaatgagaaggtaaagtagaaagggaa

SEQ ID NO: 1024353 - DNA, 120 bp, Artificial Sequence
  ENSG00000260296_8 (sequence is synthesized)
gatgatgagtgaacaataagccttgtaatatacatgggtatgtatcttaatgtacttggatgatgatgaaatgactgaaaatgtgtactatacgtgttaaataaagactcttaagataaa

SEQ ID NO: 1024354 - DNA, 120 bp, Artificial Sequence
  ENSG00000260293_0 (sequence is synthesized)
acatggaggacttattggggagtgcttgctctacttagaagcctgtctttccctgtgaagagggcgggagccacgctgttcatctttgcttccccacagcctggccagggccggaccaga

SEQ ID NO: 1024355 - DNA, 120 bp, Artificial Sequence
  ENSG00000260293_1 (sequence is synthesized)
ggttttctctacatgatggttgaagtggatcaaggtccttttgtcggagtgatagatgtcaactattgcagtggctttccactgggttgagggtgaccttccgagatgcagaagtaatct

SEQ ID NO: 1024356 - DNA, 120 bp, Artificial Sequence
  ENSG00000260293_2 (sequence is synthesized)
aggcaaggttttcataacaacaataaatttggccacccagggtctgtgaagtcacctgtagggtagccttactagctctcgctgaccacacctgccaggagtgtccagcaggctcgagtg

SEQ ID NO: 1024357 - DNA, 120 bp, Artificial Sequence
  ENSG00000260293_3 (sequence is synthesized)
accttgggcatgcagtgttgctcttaattatctacagattgagccaagctcagaaaacatattaaatgtttgcctttagatggtttctggtttaaagtacataaggacaatgaagcaggt

SEQ ID NO: 1024358 - DNA, 120 bp, Artificial Sequence
  ENSG00000260293_4 (sequence is synthesized)
tacaaaaaaagcacttaacatttaccctgttcaatgttttacctgtctgagcataccttttctgttatgacaactctgtaaatggaagaaagaagtccttttcaactcaaagcagcaatt

SEQ ID NO: 1024359 - DNA, 120 bp, Artificial Sequence
  ENSG00000260293_5 (sequence is synthesized)
tcagtggctgtttcaaacattgcctttcaattggagataaaatcaaagaaacaaaacctcaggctttttactgaggaccaacttgaattcattattcaatgattttctgtatcctttcaa

SEQ ID NO: 1024360 - DNA, 90 bp, Artificial Sequence
  ENSG00000260293_6 (sequence is synthesized)
atcccaaatgagcccaggagttcaagaccaccttgggcaacatagggaggtctcgtctctataaaaaattagccaagtatggtggcatgt

SEQ ID NO: 1024361 - DNA, 70 bp, Artificial Sequence
  ENSG00000260293_7 (sequence is synthesized)
agcccaggagttcaagaccaccttgggcaacatagggaggtctcgtctctataaaaaattagccaagtga

SEQ ID NO: 1024362 - DNA, 120 bp, Artificial Sequence
  ENSG00000260293_8 (sequence is synthesized)
cagggcaacagagtgagaccctgtctctgaaaaacaaaacaataaaaatgcatttattgaattcacacttcataggaggcaccatgccgtgtgttctgtggatttggtgttaagacttgg

SEQ ID NO: 1024363 - DNA, 120 bp, Artificial Sequence
  ENSG00000260293_9 (sequence is synthesized)
gatttggtgttaagacttggtctctgcccttgagcttatagtgcagtgaggagacaggagaataaacacatggtagaagctcccacagaggtggacagagccttctgtgggcgcaaaggc

SEQ ID NO: 1024364 - DNA, 120 bp, Artificial Sequence
  ENSG00000260293_10 (sequence is synthesized)
gtggcatccagctggattgtggtgggggtggggctctgagatggacttgagcttcattttgaaggatgatcaggaccggcaagaacaagtgagggaaagtgccttcccccgaagggacag

SEQ ID NO: 1024365 - DNA, 120 bp, Artificial Sequence
  ENSG00000260293_11 (sequence is synthesized)
tggatataaagtgacaggcgtggttcctgcccaccagctcttgggagaagggcagtggtggccccagggtagatggggtgaagtgagtgagctaggctgacagcagactgggaaaagcct

SEQ ID NO: 1024366 - DNA, 120 bp, Artificial Sequence
  ENSG00000260293_12 (sequence is synthesized)
tgagttccacctgggagtttgaattcaccctgagtggcatgaagcctctgaagatcttgggtttgtgagtgacttgatcagaggtggccagggaggtgaagaggccaaggccggttgagg

SEQ ID NO: 1024367 - DNA, 120 bp, Artificial Sequence
  ENSG00000260293_13 (sequence is synthesized)
gactgtcatggcacacccagagagacatcagcacagaaaagagcaagactcagccaggcccgggggctcacacctgcaagcccagcattttgggaggccaaagcgggaggaacacttgag

SEQ ID NO: 1024368 - DNA, 120 bp, Artificial Sequence
  ENSG00000260293_14 (sequence is synthesized)
cccaggagttgcaggctgcagtgagctatgattgttccactgcactccaccctggtcaactctgtttcagaagaaaaaagagagcaagactctgagacaagtggttgcaggatgggaaga

SEQ ID NO: 1024369 - DNA, 120 bp, Artificial Sequence
  ENSG00000260293_15 (sequence is synthesized)
gccagggaggaaggaggggatgttccagtattgagcagcgggcagtgccacaccccatgcagagtgtggagggagggggcgggctggcaccgtgtggagatggcgatgaggttactgcga

SEQ ID NO: 1024370 - DNA, 120 bp, Artificial Sequence
  ENSG00000260293_16 (sequence is synthesized)
gactgggcagtaagcatatgtgttttggcctggagccaaggagagtgtactagacgagagcattttggggatgctgtgtgccatccaagctggggactgggttgggtcttcccaggagaa

SEQ ID NO: 1024371 - DNA, 120 bp, Artificial Sequence
  ENSG00000260293_17 (sequence is synthesized)
tgtgcagagtgagaaaaacgagacggaatcctgaaccctgtggactcctaatacagtcttaaagtcagtaaggtaacagaaggccagtcagtaacccgttgccttttgggggaatggggc

SEQ ID NO: 1024372 - DNA, 120 bp, Artificial Sequence
  ENSG00000260293_18 (sequence is synthesized)
agggtagtgggcttttttctttttttttttgttgagacagggtctcgctctttctcctagtctggagtgcagtgtcaggatcagtggctcactgtagcctcgaccttctggactcaagcg

SEQ ID NO: 1024373 - DNA, 120 bp, Artificial Sequence
  ENSG00000260293_19 (sequence is synthesized)
atccccttgcctcagcttcccaaatagctgggacgatagacttttttctttttttttttttttcgagacagggtctcattcccactgccgaggctagagtacaatggagggatcatgaga

SEQ ID NO: 1024374 - DNA, 120 bp, Artificial Sequence
  ENSG00000260293_20 (sequence is synthesized)
cccactgccgaggctagagtacaatggagggatcatgagatcatggctcactgcagcctcgacctctcggactcaagcagtcttcccaccttagtctcctgagtagctgggactataggc

SEQ ID NO: 1024375 - DNA, 120 bp, Artificial Sequence
  ENSG00000260293_21 (sequence is synthesized)
aggctggtctcaaattcctggactcaagcagttctcccactttggcctcccaaaggctgggattacaggcatgagctacggtgcctggcctggccttttaatttgtctcttggagtgaag

SEQ ID NO: 1024376 - DNA, 120 bp, Artificial Sequence
  ENSG00000260293_22 (sequence is synthesized)
tttaatttgtctcttggagtgaaggatggagtatgggacgggggggatgccagtgtccttgcagtggccttcctgtctcacgtgtctatttgccttttggggaacctccagcttcagtgt

SEQ ID NO: 1024377 - DNA, 120 bp, Artificial Sequence
  ENSG00000260293_23 (sequence is synthesized)
agagacccaaggctgcagagccctcaggggcacctcactctccttccaggaccctgtttctgtgtggtccatcagcattggcagcaggtacaactttggaaaaagtctgctgagaacaga

SEQ ID NO: 1024378 - DNA, 120 bp, Artificial Sequence
  ENSG00000260293_24 (sequence is synthesized)
ggccacgtgtgtgatgcgtcccccaccccctgagtcctccacctgaggggtggaatggatgaggccggggaaaggctgtgctgcagaagcagcccctatctgcccgtggccagcacgtgg

SEQ ID NO: 1024379 - DNA, 120 bp, Artificial Sequence
  ENSG00000260293_25 (sequence is synthesized)
tcccccagggctggctgagcctctggataaggcttgagctgttatctacaccctccaacagaacctgctcacaggggcgcaggcttcatggcctccgaggactgtgcatatgcagccatg

SEQ ID NO: 1024380 - DNA, 120 bp, Artificial Sequence
  ENSG00000260293_26 (sequence is synthesized)
tggcctccgaggactgtgcatatgcagccatggcttcctgcaaccctccccagtgtgttcccttctttttttcttttctctttttgttaattgttttttttttcttttgagatggagttt

SEQ ID NO: 1024381 - DNA, 89 bp, Artificial Sequence
  ENSG00000260293_27 (sequence is synthesized)
ttacaggtgtgagccaccgtgcctggtcgttaattgtttttttttaagagactgatggtgcagtcacggctcactgcagcctcaacctc

SEQ ID NO: 1024382 - DNA, 120 bp, Artificial Sequence
  ENSG00000260293_28 (sequence is synthesized)
aagccatcctcccacctcggccttctgagtggctgggactacaggttcttgccaccacaccttcctgattttttatttttttgtagagacagtatcttactatgttgcccaggctggtct

SEQ ID NO: 1024383 - DNA, 120 bp, Artificial Sequence
  ENSG00000260293_29 (sequence is synthesized)
tgctgggattacaggcatgaaccactacaccggcctgttccctttttcttgcaggtcattgagaacacaccacaggggacctgggaatctactgaggatacagatttcccacaatccgag

SEQ ID NO: 1024384 - DNA, 120 bp, Artificial Sequence
  ENSG00000260293_30 (sequence is synthesized)
cagatttcccacaatccgagactgtgtgtctgcctgattgttacataattttaattgggtgccacacaccgagagaggttgtttactggtgggccattcggtttccagtaaaagcccttc

SEQ ID NO: 1024385 - DNA, 120 bp, Artificial Sequence
  ENSG00000260293_31 (sequence is synthesized)
cactcactgtggcatggtaaatggagctcatcacatggtcccttcagcctttccttgaatcatttccaccccttccctaattaccctctgtgatccctttcccggcaagggtccttctag

SEQ ID NO: 1024386 - DNA, 120 bp, Artificial Sequence
  ENSG00000260293_32 (sequence is synthesized)
ccttgctaccttggtaaacctgtggccttaggatcgaggtgtggacattaacttttctgctctggcggcttcctgggctgtcctctccatgttcccagcactcaggggcactgtcctttc

SEQ ID NO: 1024387 - DNA, 120 bp, Artificial Sequence
  ENSG00000260293_33 (sequence is synthesized)
ctggcagcctagtaaatcccaggcctctgttttgggccctttggcttcttggtgcctgttatgctgaagcgtagaagtgtcttagtcagagccccaaaggacactcaccggcccacgttc

SEQ ID NO: 1024388 - DNA, 120 bp, Artificial Sequence
  ENSG00000260293_34 (sequence is synthesized)
tcatggagctgggtagctctgaccagacttgccctctggggccctgtcctttgaccacgctgtctctatcccttctgaggctaaggcttcctcacactgcaagatccagccgaggcaggc

SEQ ID NO: 1024389 - DNA, 120 bp, Artificial Sequence
  ENSG00000260293_35 (sequence is synthesized)
cttggcgctgggaaagcaccgtgtcacagcacctgcaccttgaattggcatcgtcagtacacctgacccgggctggggtggggccatgcctctgtactcctctgcactcaggtacctggc

SEQ ID NO: 1024390 - DNA, 90 bp, Artificial Sequence
  ENSG00000260293_36 (sequence is synthesized)
gggccatgcctctgtactcctctgcactcaggtacctggcacactggcattcgggaagcatgtcttgaatgcctattaaaatgattagga

SEQ ID NO: 1024391 - DNA, 120 bp, Artificial Sequence
  ENSG00000260293_37 (sequence is synthesized)
gagaccagcctgggcagcatagtgagactttgtctctaccagacataaaaagtaaataaaaataaaatgattaaacatgcacaactccacctcgagctggatctctccttaggtctaaag

SEQ ID NO: 1024392 - DNA, 120 bp, Artificial Sequence
  ENSG00000260293_38 (sequence is synthesized)
gtctaaagacacttgctgagaacctgatgtgtgcctggccttccaaggcacacctgtcactggcttggaactcagaccaatcaaaatgcctgtgctgctgacagctgagctctcttcctc

SEQ ID NO: 1024393 - DNA, 120 bp, Artificial Sequence
  ENSG00000260293_39 (sequence is synthesized)
tggttctcctcctgtgtcctgggggtgtttttccagacctgctgtggggagaacctttgggctcagatgataaagatcctgaattagcagagtcctgtgccagctccagcccctgccttt

SEQ ID NO: 1024394 - DNA, 120 bp, Artificial Sequence
  ENSG00000260293_40 (sequence is synthesized)
gggtggaccggactaggctggggaaagaaagatgtctggctatgaaagggtggctggccaaggttgaggctcagcctgcccctgctcaggctccgagcagcaggctcagcagccacagtt

SEQ ID NO: 1024395 - DNA, 120 bp, Artificial Sequence
  ENSG00000260293_41 (sequence is synthesized)
aggcacgtttgcacttccaaccatcacaggcaggcgggccaaccggcccatggtgtggtgactaacacctcattaatggtcataccccttctgtacctggcatgtgccctccattgtgtg

SEQ ID NO: 1024396 - DNA, 120 bp, Artificial Sequence
  ENSG00000260293_42 (sequence is synthesized)
cctccggcaaagagcccactatcaagttccccagtcagcagctacttggtagtcactgtggcatgtcggtcaccattaatatttgaaagatgcctgtgctctgcttcaggctgaggcagg

SEQ ID NO: 1024397 - DNA, 120 bp, Artificial Sequence
  ENSG00000260293_43 (sequence is synthesized)
caccccttaccttcctgttatgtgaagatgcctgcaggaaaggtcacacctagggtgggtggactagtaatgctccctgttgttatttggccttcaaaattaaatttgtcttgggcccaa

SEQ ID NO: 1024398 - DNA, 120 bp, Artificial Sequence
  ENSG00000259198_0 (sequence is synthesized)
cagacagacactggcaacatcgcggacaaccttcaggaagcaagaaggaagtttcctctgtgatgtcaagcacttcagggttgtagatgctgccattgtcagatgcctgctggatgacca

SEQ ID NO: 1024399 - DNA, 120 bp, Artificial Sequence
  ENSG00000259198_1 (sequence is synthesized)
gcgcaaaggaggagggagaaatgctcggcgtgttcagcagcgtggctttgttggctcccactttgtctccagtcttgatcagctgcacatcactcaggatttcaatggtgcccctggaga

SEQ ID NO: 1024400 - DNA, 120 bp, Artificial Sequence
  ENSG00000259198_2 (sequence is synthesized)
ttttagtggtgattcctaaagcctggaaaaaggaggttttctctggccccagaccagtgttctgggctggcacagtgacttcacatggggcaatgggaccagcacaggtggcagctggca

SEQ ID NO: 1024401 - DNA, 120 bp, Artificial Sequence
  ENSG00000259198_3 (sequence is synthesized)
ccttactagccagcaacatgtccttgatttcagtgaggtcctccttggtgaatgcaaagcccacattcccccagatatgaggcagcagtttctccagagctgggttgttttccaggtgcc

SEQ ID NO: 1024402 - DNA, 120 bp, Artificial Sequence
  ENSG00000259198_4 (sequence is synthesized)
ctcagatggccgtgagcatcatggtgttcttgtccatcagcaccacggccttctctcagagggacatgcagatctgctgcgtctgcttggagcccacattgctgctcccacgatgaaaca

SEQ ID NO: 1024403 - DNA, 120 bp, Artificial Sequence
  ENSG00000259198_5 (sequence is synthesized)
ttttggataatcatccaaaagctggatgatcttgaagtagttggacttccaggtcatcctgtcttccctgggcatcacggcagtgcatcagggattgccacgcagggtttaaagacaatg

SEQ ID NO: 1024404 - DNA, 88 bp, Artificial Sequence
  ENSG00000259198_6 (sequence is synthesized)
cagtgcatcagggattgccacgcagggtttaaagacaatgtcactttcacgaggatgccaagagaggatgtaatctcaccctgttgcc

SEQ ID NO: 1024405 - DNA, 120 bp, Artificial Sequence
  ENSG00000259198_7 (sequence is synthesized)
cctcaccctctccagtagctgggattatgggcatgtaccaccaaacttggcatctgatccacctttttatcaggacctgggcaaagccacagagaacaagcccctcaactttgcgaatag

SEQ ID NO: 1024406 - DNA, 120 bp, Artificial Sequence
  ENSG00000259198_8 (sequence is synthesized)
caaggagccagcgaagacaggaatatgttggaagacagactcaggatccaaaaacattctaacctattggagcactggcctaaacctcccaaggtgaaatgaacagggcttaactgagag

SEQ ID NO: 1024407 - DNA, 120 bp, Artificial Sequence
  ENSG00000259198_9 (sequence is synthesized)
atctgggcttggtgccaagacaccgactgtacaaggacagggtggggaagtggcagcttagcagaagcatgtgtgaataaaactgagggttttcgctgacagccagctccatctgagtca

SEQ ID NO: 1024408 - DNA, 120 bp, Artificial Sequence
  ENSG00000259198_10 (sequence is synthesized)
aatgacagagctgccaataaaaacgggcagactcaggctgccgaactgaagtcgggtactgagccctgtggttctccatcttgatatcacaccagaaccacctgcaaagctctggtaaca

SEQ ID NO: 1024409 - DNA, 120 bp, Artificial Sequence
  ENSG00000259198_11 (sequence is synthesized)
ctgcatattccttgctgtaccaagaccctctgaatcgtgatctgggatgagatgagagagggaaaggaaggtgaggagtttgcatttcttttatttttttttagagacaggtttcactct

SEQ ID NO: 1024410 - DNA, 83 bp, Artificial Sequence
  ENSG00000259198_12 (sequence is synthesized)
tgcatttcttttatttttttttagagacaggtttcactctgctacccaggctggtctcaagctcatgggctcaagcaatcctc

SEQ ID NO: 1024411 - DNA, 120 bp, Artificial Sequence
  ENSG00000259198_13 (sequence is synthesized)
tatcccccctcattccaagatgcatccagggcttttgaaccaaggaacaatcagtcccattctcattctcagcacaacagaccacacccaaaatacttgaggaattcagtttaggttgct

SEQ ID NO: 1024412 - DNA, 120 bp, Artificial Sequence
  ENSG00000259198_14 (sequence is synthesized)
ttgttgcagggaaggtcataagttgaaggatatttggtggaaagcagccaggatgcaggcaacactctgaagagaaccactttatagaagacacaggtggccaggaggcccaacttcaca

SEQ ID NO: 1024413 - DNA, 80 bp, Artificial Sequence
  ENSG00000259198_15 (sequence is synthesized)
tttatagaagacacaggtggccaggaggcccaacttcacatggatgagtcttgttctctgaggtcccaaaagttagaatc

SEQ ID NO: 1024414 - DNA, 120 bp, Artificial Sequence
  ENSG00000259198_16 (sequence is synthesized)
acagagcgagactctctctcaaaaaaaatttaagtacatatttttttaaagttagaatcttaggagactgtcttaggtcaggtttctcaggaaacatgccgagatagagattttcttgta

SEQ ID NO: 1024415 - DNA, 120 bp, Artificial Sequence
  ENSG00000259198_17 (sequence is synthesized)
tgtaggaagtttattgggggtgctttcagagataacatctgtgaactagtgaaagaatcagaatcaagccagaggaagaaattggtgaacaatgcagtcacaatacagaatgcttccaca

SEQ ID NO: 1024416 - DNA, 120 bp, Artificial Sequence
  ENSG00000259198_18 (sequence is synthesized)
ggaagccctggggttgagctggccccgtagagttagccccaacttggataagagggctgtacctttgaattccacattgacttggcagatgacccctagggaagggttgtgaagtccagc

SEQ ID NO: 1024417 - DNA, 120 bp, Artificial Sequence
  ENSG00000259198_19 (sequence is synthesized)
aagacagctccctttagcagctgaaggaaatgccaagggagagactcatgtgtgagccattggcagccaacacttctggcaacttcagggataagctccttggtcctaaaagcagtatct

SEQ ID NO: 1024418 - DNA, 120 bp, Artificial Sequence
  ENSG00000259198_20 (sequence is synthesized)
gggtggtgcaccacagcaaccgagacagtacccccaggcatagcccagacctacttgatttatgtggtaagttcactctacctgggaatagctcctcctggattctgggaaacttacaag

SEQ ID NO: 1024419 - DNA, 120 bp, Artificial Sequence
  ENSG00000259198_21 (sequence is synthesized)
aattaaatggagaaactatagcccccactactgcaactagtcttggtgacacaattgatgttcatcattccccttctctgtcactcattctagattctttttaccttcaacttgcacctc

SEQ ID NO: 1024420 - DNA, 120 bp, Artificial Sequence
  ENSG00000259198_22 (sequence is synthesized)
tgctggtgtaggtggcttgcctgtcggggtaaccaatcaccaatcaccatggccttcagaccatgctgctgatgtgtccaccttccaccaaaattgggcataccaacagacaccccagtg

SEQ ID NO: 1024421 - DNA, 120 bp, Artificial Sequence
  ENSG00000259198_23 (sequence is synthesized)
gatcacctgggtgccaaacatattctttcctgacccccttatgtaacagcagccctatctctcccaaaggatgggggtcagttgccccttccaggaagtgactcctcttctttcctgctg

SEQ ID NO: 1024422 - DNA, 120 bp, Artificial Sequence
  ENSG00000259198_24 (sequence is synthesized)
gtttcttggcacaaagagtctgacgaacagaaagcagccatacttaagtttatggggttcttgttctgtccctggtggaagtgctccccctctgggaaccagattctctgaacctggaga

SEQ ID NO: 1024423 - DNA, 120 bp, Artificial Sequence
  ENSG00000259198_25 (sequence is synthesized)
gcttggaactgcaggaatgggaaccacaaattcctccagaaaggtcactgggagtgatggtaagtggagtcattcctacttctacccctagtttcctaaacctctattctacacgttgac

SEQ ID NO: 1024424 - DNA, 120 bp, Artificial Sequence
  ENSG00000259198_26 (sequence is synthesized)
acatagcaccatatataacagttattgattaggatgcatacctcatcctggagcacggtgtcccatcatctctaacatggtatttcagctgtgcttctaaaggctgttctatcattccac

SEQ ID NO: 1024425 - DNA, 120 bp, Artificial Sequence
  ENSG00000259198_27 (sequence is synthesized)
cagctctattcagcttctggatggtgaagtatgtaataggcctaaaagatcccatgatcatgtgcccattctatccttaaagtgggactcttggtcttctgcaatggtatgtgagatccc

SEQ ID NO: 1024426 - DNA, 120 bp, Artificial Sequence
  ENSG00000259198_28 (sequence is synthesized)
acgtcagtgaatcaaacactcttttagcccccagagagtggcctttgagcagaaaagacaaatccatatccagaatatatggcaattcaggtcaagatgagtccctcacccttctggagt

SEQ ID NO: 1024427 - DNA, 120 bp, Artificial Sequence
  ENSG00000259198_29 (sequence is synthesized)
ggaacaggtccaaggtagccagcttggtactgcgtggctggtatcagttgctggcaggttggacttttagcagtgacaataggtaattggccttggtgagtgggagcccattctgttgag

SEQ ID NO: 1024428 - DNA, 120 bp, Artificial Sequence
  ENSG00000259198_30 (sequence is synthesized)
ccacccctgccaccacacacatgcgacacgtgtcacctccatctatgccaccatggccactttattcatgtgcccattgtgctggcatggggtggtcaatgacagaggcaagctaacatc

SEQ ID NO: 1024429 - DNA, 120 bp, Artificial Sequence
  ENSG00000259198_31 (sequence is synthesized)
aattccacatcattctatctacttgattatgcagtctcccctgtggcaggtgctctctgatgagtattaacatgcaatataaagatcttcaatagtgagacctatctctacaaaaaaaaa

SEQ ID NO: 1024430 - DNA, 120 bp, Artificial Sequence
  ENSG00000259199_0 (sequence is synthesized)
tgctgtgttctgtgcgaggcttattaccaccgaggctctctctctgctcgctggaacggcagctagaaaactgggaggagagcttcctggcagcattagcaaactagcagcccctgaagg

SEQ ID NO: 1024431 - DNA, 120 bp, Artificial Sequence
  ENSG00000259199_1 (sequence is synthesized)
gcgacgagaaagatatgtagatgtgatgtctggaactcatgcagctatcttgcaacgaccaggatgaggctaagagaataggagagatccttgctcaaacaggctgaactcgagtatttt

SEQ ID NO: 1024432 - DNA, 120 bp, Artificial Sequence
  ENSG00000259199_2 (sequence is synthesized)
gggccctaagaaggaaggacaaagatccctggagaactctcctgtggtgtccttgttttgagtagcaatggaggtgtaaactgtgatcctcttccttgagtgagatggaaaaaaattaat

SEQ ID NO: 1024433 - DNA, 120 bp, Artificial Sequence
  ENSG00000259199_3 (sequence is synthesized)
gagtaggaattgattaaaaacaacaacaacaacaaacacatcaactagccaggagcagtggtacctgcctataatcccagcactttaggaagctgaggcaggaggatcgcttgaggctag

SEQ ID NO: 1024434 - DNA, 120 bp, Artificial Sequence
  ENSG00000259199_4 (sequence is synthesized)
gagtttgagactagcctatcatggcaacatagcaagatcccatgtctacaaacaaacaaacaaaaatagccagaggtggtagcatgcacctgtagtcccagctcctgggaagcctgaagc

SEQ ID NO: 1024435 - DNA, 120 bp, Artificial Sequence
  ENSG00000259199_5 (sequence is synthesized)
aggaggatctcttgagcctgggaattcaaggttacagtaaggtatgattgcaccaccgcactccaacctgggtgacaaagcaagaccctatctctctctctcaaaaaaaaaaaaaaaaaa

SEQ ID NO: 1024436 - DNA, 120 bp, Artificial Sequence
  ENSG00000259194_0 (sequence is synthesized)
agagggctggccagggcttgtgggtggacttcaaaccaacacttgagtgccctcaccaagtcttggcccctgtgtgaattcctgcctttcccagaaatgagtccagggtgtctgacctca

SEQ ID NO: 1024437 - DNA, 120 bp, Artificial Sequence
  ENSG00000259196_0 (sequence is synthesized)
tgccagctcattggtagcagctgaggctgcagcaattgataagaaacaatccctgctcttatgctcacattctagtagggaaagacagataggtatacaaattattgtaatacaggataa

SEQ ID NO: 1024438 - DNA, 69 bp, Artificial Sequence
  ENSG00000259196_1 (sequence is synthesized)
taagggacctgatttgggattgtgccactgcagtccaacttgggcgacagagtgagactctgtctagga

SEQ ID NO: 1024439 - DNA, 120 bp, Artificial Sequence
  ENSG00000245711_0 (sequence is synthesized)
gattgaatattggggggcagggaggagtacattaaagggtacctaaatactaggaagctaccttggaggctgactaccacatgccctctatcccattttgaatattaagctttcaaatgt

SEQ ID NO: 1024440 - DNA, 120 bp, Artificial Sequence
  ENSG00000245711_1 (sequence is synthesized)
tgtaattatttaccaggctcggtagagtggctatagaatacagaagagatggatagaaattacacatttgatttagatgagtccatgtgagtgggccatcttgaaagtggatcctccagc

SEQ ID NO: 1024441 - DNA, 120 bp, Artificial Sequence
  ENSG00000245711_2 (sequence is synthesized)
ccaagtcaagccttcagatgcctacagaccaagctgacatctacttatcctcaggagagatctcaagccaaaaccacccagccaaactgctcctgaactccgacatgcacaacccgactg

SEQ ID NO: 1024442 - DNA, 120 bp, Artificial Sequence
  ENSG00000245711_3 (sequence is synthesized)
agacaccactatatttaagataaagaaatcagacaacttgaagcatacacaaaaccagaaggcaatttaacatatctgcctggaggcaagaagagaaaccaaagaacttctaacacctgt

SEQ ID NO: 1024443 - DNA, 120 bp, Artificial Sequence
  ENSG00000245711_4 (sequence is synthesized)
tcttctagctagaaaatagagaagagatgacaatattaacaattgcttgccagcttcaaattcccacaaatttatgaatatgaagccagtttccaaaagaaaatatagttcaataaactg

SEQ ID NO: 1024444 - DNA, 120 bp, Artificial Sequence
  ENSG00000245711_5 (sequence is synthesized)
tgtaacatatgatcactaaagtgatcttttaccttaatgatataaaaataagccattaagaagttctaaaacccaaatgcatcaacactgatggcaattaaaaattaattactgaaccaa

SEQ ID NO: 1024445 - DNA, 120 bp, Artificial Sequence
  ENSG00000266993_0 (sequence is synthesized)
ggataaagcaaagaaaataacatttaatactgagtgaatacatcctcttcccttcttaagaattctgttttcttatctataaaataagggataaatggagggattagctcttctctaaag

SEQ ID NO: 1024446 - DNA, 120 bp, Artificial Sequence
  ENSG00000266993_1 (sequence is synthesized)
tgatttctactggaggaaattcatggtactaaggactctgtatcaaaagcccttgcctggtacttcaacggtgctcggaaaaacaggcagcctatttcttctcttccctttgtggactga

SEQ ID NO: 1024447 - DNA, 120 bp, Artificial Sequence
  ENSG00000266993_2 (sequence is synthesized)
gacttaagattcttttggtggccaagacagaaactaaggctggttctggggttgcagaatgaagatagagagaaaggggaggatagcagccacaatttcaagagtggccatttatatatt

SEQ ID NO: 1024448 - DNA, 120 bp, Artificial Sequence
  ENSG00000266993_3 (sequence is synthesized)
tgactgaggaaaaggccttagtcagggatgagttctcactgtgttgcctggactggtctcgaaatcctgaccttaagtaatgcttctgccttggcctcccaaaatgctgaaattacaggc

SEQ ID NO: 1024449 - DNA, 120 bp, Artificial Sequence
  ENSG00000266993_4 (sequence is synthesized)
gtgagccatcattcccagcccagcagtcttcatcttaagaagaaagctgcccagcatcagaggggtcaggttcccttctaaacagaatatgataatgctggcctgccaaaactacagctt

SEQ ID NO: 1024450 - DNA, 120 bp, Artificial Sequence
  ENSG00000266993_5 (sequence is synthesized)
cccctttaggaaagaactatggcaattccagagttcacaactgcattcagacctggcctacagagcatctcacactcactgtgcttgtgacattcccttgtaccaggccctccacaaaga

SEQ ID NO: 1024451 - DNA, 120 bp, Artificial Sequence
  ENSG00000266993_6 (sequence is synthesized)
gctgggatttgaattctttgacgaagctcagcagagactcaagggaaaggccgtccatcaaagcctggtacttgtcaatcatagaccaacgggcatattccaagattaaaagccgtacat

SEQ ID NO: 1024452 - DNA, 120 bp, Artificial Sequence
  ENSG00000266993_7 (sequence is synthesized)
aaacagaggtgataaatccttcctctcaggccctccacaaagagctgggatttgaattctttgacgaagctcagcagagactcaagggaaaggccgtccatcaaagcctggtacttgtca

SEQ ID NO: 1024453 - DNA, 120 bp, Artificial Sequence
  ENSG00000266993_8 (sequence is synthesized)
gtatcagattaaccaaaaaagtactgaaaaccacatacacaaactttaaacaaatttacttagcagtacaaaaatgcacttacctgtctcagttgcagggtaaaatatttcacataaaag

SEQ ID NO: 1024454 - DNA, 120 bp, Artificial Sequence
  ENSG00000266993_9 (sequence is synthesized)
taaagctgccagatgagtcaagtttacttagttgtacactgatttaaaattattactattttggtttgaaatctcactaatatttcattaattactagaagccatcatttgggatatcta

SEQ ID NO: 1024455 - DNA, 120 bp, Artificial Sequence
  ENSG00000266993_10 (sequence is synthesized)
ttactgcagtgacaatataatacaggtaacggctctggtccagaatcagattaacttcatcccccatttccacaaccccaccccaaataagctgtttgaatttgacaaatctactaacat

SEQ ID NO: 1024456 - DNA, 120 bp, Artificial Sequence
  ENSG00000266993_11 (sequence is synthesized)
ctatgattcaatttcttcatttgtaaaacaggggaagtattcgtgagaggtaaccgttttggatagaattgaattaatgaatttatataacagttcttagatctagcacaaaaatcttca

SEQ ID NO: 1024457 - DNA, 120 bp, Artificial Sequence
  ENSG00000266993_12 (sequence is synthesized)
gttcttagatctagcacaaaaatcttcaacaaacaggtttattattattcttttataaagtaaatttcaggagttgaattttaataaaatagaaggttgtgtttaataatgtatttttat

SEQ ID NO: 1024458 - DNA, 120 bp, Artificial Sequence
  ENSG00000266990_0 (sequence is synthesized)
cagagcccaggctccagcttggaacgcctccagcctcaggtccctccctgattcctttacagtcctgacctcacctggcacccacctgcctgggaacccctctagggccaagagctgtgg

SEQ ID NO: 1024459 - DNA, 78 bp, Artificial Sequence
  ENSG00000266990_1 (sequence is synthesized)
cccacctgcctgggaacccctctagggccaagagctgtggctcataaagagatggggtcttgtcctcccaccttgggc

SEQ ID NO: 1024460 - DNA, 120 bp, Artificial Sequence
  ENSG00000266990_2 (sequence is synthesized)
tttaacttagtatattaaaggccacagatggaacggaggtgccaggaaaagactgcgctttaaaattggccccgacttgccgggcgcggtggttcacacctgtcatcccagcactttggg

SEQ ID NO: 1024461 - DNA, 120 bp, Artificial Sequence
  ENSG00000272293_0 (sequence is synthesized)
taagaatgcagagggtagagcttaggtcttgcagaagatctttgattaagcgaggattgtggtggtcatcaagaactggaataaataaaaataaaactatggattgatacagttaagcaa

SEQ ID NO: 1024462 - DNA, 120 bp, Artificial Sequence
  ENSG00000272293_1 (sequence is synthesized)
cactttaaaaaaagatctagtttcataacccaaatgtccactgatagacgaacagacaaacaacgtgtgatctatacatgcaatagaatattattcagccctaaaaaggagggaaattct

SEQ ID NO: 1024463 - DNA, 120 bp, Artificial Sequence
  ENSG00000272293_2 (sequence is synthesized)
gacattatgcaaagtgaaataagctagctacaaaaggacaaatatatatctccacttacatgaggcacccacttacataaggcacttacatgagtagtcaaactcgtagagacagaaagt

SEQ ID NO: 1024464 - DNA, 120 bp, Artificial Sequence
  ENSG00000272293_3 (sequence is synthesized)
agaatgataattaccaggggctggtggggaggaggaatggggactcagtgtttaaggtggtatgagtttcagtttgggacaatgaagaggttctggagatgactggtggtgatgggtgca

SEQ ID NO: 1024465 - DNA, 120 bp, Artificial Sequence
  ENSG00000272293_4 (sequence is synthesized)
cagtaatatacacacacttaatgccgctgaactgtatgcttaaaaactgctaaaatggtaaattttatgtaatgtgtattttaccacaataaaaagatgtaatttcactgcaacccaaaa

SEQ ID NO: 1024466 - DNA, 120 bp, Artificial Sequence
  ENSG00000283001_0 (sequence is synthesized)
ggtcagactgcctcctcaagtgggtccatgacccccatgtatcctgattgggagacacctcccaggaggggctgacagacacctcataccggagagctctggctagtatctggcaggtgc

SEQ ID NO: 1024467 - DNA, 69 bp, Artificial Sequence
  ENSG00000283001_1 (sequence is synthesized)
aaacagaaaggaatagcacttgagacttcggtttcgcatacataaagaagatggtaccgtaaaatatga

SEQ ID NO: 1024468 - DNA, 120 bp, Artificial Sequence
  ENSG00000283001_2 (sequence is synthesized)
ggtttcgcatacataaagaagatggtaccgtaaaatatgatcaccacagtcaggtgagctgagcacgtggaaaatgccttgcgtcttcctgtggctgaattcatttgcaagatggtgtag

SEQ ID NO: 1024469 - DNA, 120 bp, Artificial Sequence
  ENSG00000283001_3 (sequence is synthesized)
aggatgaacatataggagaaaaaaatgaccatcagtggaagaaccaggaaggccatatttgatatcaccatggtgataatattgagggatatatcagcacaggccagcttgaggacagct

SEQ ID NO: 1024470 - DNA, 120 bp, Artificial Sequence
  ENSG00000283001_4 (sequence is synthesized)
aatatttcacatgcgaaatgattgataatattattcccacagaaaggcagtctcatggcaagtaatgtttgcacagctgaatttattccaccggacagccaggacacagaagccatcaat

SEQ ID NO: 1024471 - DNA, 120 bp, Artificial Sequence
  ENSG00000283001_5 (sequence is synthesized)
ttgcagatggccacataacgatcaaatgccatcatgccaagaagcagacattctgttgaccccattgcaaacccaaagaacatctgcactgcacatccagagaaggaaatgtttcttttc

SEQ ID NO: 1024472 - DNA, 120 bp, Artificial Sequence
  ENSG00000283001_6 (sequence is synthesized)
tttgagattaagctcaccaatgttgagggaacagaggaggatgtatagcagatatccaggaaagagaggttgcccaggaagaagtacattggtgtgtgaaaatgagaatcaaagatgctg

SEQ ID NO: 1024473 - DNA, 120 bp, Artificial Sequence
  ENSG00000283001_7 (sequence is synthesized)
gctatgattagaacaccattgccaattagaatcactaggtacataactagaatgagagcaaagtaaacaatctcaatctttgggtatccagaaagacccagaagaagaaattctgacaca

SEQ ID NO: 1024474 - DNA, 120 bp, Artificial Sequence
  ENSG00000283001_8 (sequence is synthesized)
agtgtctggttaatctcacccatgtcatctgctttcaggaaatcaaaagaagatctaacatgaaatgtatttactgccaagaaacaaacagtacaaattaactgaacaatcattcttttg

SEQ ID NO: 1024475 - DNA, 120 bp, Artificial Sequence
  ENSG00000283001_9 (sequence is synthesized)
acacatattagaaggagtgcttgcttgaagttctgacatccagttatcttcagtaatgtgtgtgactagaatacaatgaaattgggaatgatggaagcacctataccgcatcgccaatat

SEQ ID NO: 1024476 - DNA, 120 bp, Artificial Sequence
  ENSG00000283001_10 (sequence is synthesized)
gtgaagatctacccacgatcagacacacatgcagacggaacctttcctgctgttgaggacatgttcctgagttgaggacactctcccgagctgaggtttctaaaacccctggccaatcaa

SEQ ID NO: 1024477 - DNA, 120 bp, Artificial Sequence
  ENSG00000283001_11 (sequence is synthesized)
caactctaagcttaacatcttcatttcatcaaccccagcaaacaagcagtaaagggggcaaaagactactcaacaaagactggaattttaattcagcaatttataaagtgtttaaaattt

SEQ ID NO: 1024478 - DNA, 87 bp, Artificial Sequence
  ENSG00000283001_12 (sequence is synthesized)
gacacagaaggcaggtcatttctgcatttacaactgaggtcttgagacttcggtttcgcatacataaagaagatggtaccgtaaaat

SEQ ID NO: 1024479 - DNA, 120 bp, Artificial Sequence
  ENSG00000283001_13 (sequence is synthesized)
gggaagctgtaagggactgagcctgaggaacggtgcactccagcccagacactgggcttttcccacagtctttgcaaaccacagaccaggagattccctccaatacctgtgccaccaggg

SEQ ID NO: 1024480 - DNA, 90 bp, Artificial Sequence
  ENSG00000283001_14 (sequence is synthesized)
aggccattcaggcagacaccaaactagctgcaggagtttttttttttctttctagacccctgtggcacctggaatgccagcgagacagaa

SEQ ID NO: 1024481 - DNA, 64 bp, Artificial Sequence
  ENSG00000283001_15 (sequence is synthesized)
acctgaccaagtggtctggcctggcaggtcccactcccatggagcccagcaaactaagatccac

SEQ ID NO: 1024482 - DNA, 79 bp, Artificial Sequence
  ENSG00000283001_16 (sequence is synthesized)
ccagtttggggtttgaccctcatagtgtaaagaaagctgctgggaagttcgaactgggcagagcccaccacagctcagc

SEQ ID NO: 1024483 - DNA, 86 bp, Artificial Sequence
  ENSG00000283001_17 (sequence is synthesized)
accctcatagtgtaaagaaagctgctgggaagttcggctatggcccgactgtctctctagttttctcctctctgggcagggcatct

SEQ ID NO: 1024484 - DNA, 120 bp, Artificial Sequence
  ENSG00000283000_0 (sequence is synthesized)
gcctggacaggtcccttgtttctaaggtgatcaagtatggattaaagactggaatgtagcttctttgtgcccatggtggataggaccccagattgtcatcctgaccactctcaccgctgt

SEQ ID NO: 1024485 - DNA, 120 bp, Artificial Sequence
  ENSG00000283000_1 (sequence is synthesized)
aaggaatcccagcctggatccaccacagccatgtaaaacctgcagcgcctgaaacctgggaggcaagaccaagcccggacaacccttgcagagtgaccttgaagatgatgacaagccctg

SEQ ID NO: 1024486 - DNA, 85 bp, Artificial Sequence
  ENSG00000283000_2 (sequence is synthesized)
cctgctccagtcacacccagaagctgactagtccatgcacggccgaagcatgaggaagctcatcgtggaactcatttttcttaaa

SEQ ID NO: 1024487 - DNA, 120 bp, Artificial Sequence
  ENSG00000283000_3 (sequence is synthesized)
ttcaactgaccttcctcagactgaggtagggcaaaaagttaaaacagtctttctgtttaaaagggacttgtgtgtataatgccacccagtacaaggtatgcagctcaggaagtgaccaga

SEQ ID NO: 1024488 - DNA, 120 bp, Artificial Sequence
  ENSG00000283000_4 (sequence is synthesized)
ccagactcaagtgtgctacaacccagtagaactacttaatccccattggaaaacaagagagtatgtaactctaggagtcaatggaattggactggcaggaagacctaggtaatgtaggtg

SEQ ID NO: 1024489 - DNA, 120 bp, Artificial Sequence
  ENSG00000283000_5 (sequence is synthesized)
gaagtgagaactcccactagtgagtgaggttctcaaaggggagaatgaggagggaagccatttctcttactgtctcctgtctctgaagaacaggaggaagtaaaagttgaaaaacaacag

SEQ ID NO: 1024490 - DNA, 120 bp, Artificial Sequence
  ENSG00000283000_6 (sequence is synthesized)
gaaggaagtcagtggcaagaccagccagtgccactgatgacctggcctgaggttaaaaggttaaccacccccctctcctctaaccacatgtgctctcaatccatcacgaccctttcatgt

SEQ ID NO: 1024491 - DNA, 78 bp, Artificial Sequence
  ENSG00000283000_7 (sequence is synthesized)
gggtcttcggggagctcggctcttaagatgcgagtctgccaacgctcccagccaaataaaaacctcttccttcttcaa

SEQ ID NO: 1024492 - DNA, 85 bp, Artificial Sequence
  ENSG00000283000_8 (sequence is synthesized)
gagattccacagagatgccaaagtgtggagatcttattcctagatttggactgcccttacggatcggctcagataacgggccggc

SEQ ID NO: 1024493 - DNA, 83 bp, Artificial Sequence
  ENSG00000283000_9 (sequence is synthesized)
tggcacaaggtgatcaagtatggattaaagactggaatgtagcttctttgtgcccatggtggataggaccccagattgtcatc

SEQ ID NO: 1024494 - DNA, 120 bp, Artificial Sequence
  ENSG00000283003_0 (sequence is synthesized)
acagtataggctaggctttttttctatgtattttatatgtgtctattcatttaatgcccttgataatccactgaaagaggtgtcattattatcatcccattttacagaagaagaaactga

SEQ ID NO: 1024495 - DNA, 120 bp, Artificial Sequence
  ENSG00000283003_1 (sequence is synthesized)
aacaagaagatgagcatctcagcatctcagaggtgaagaaactggcctagccaccacgtggtggcacttgcagcctgagtcagcagatccccaggcaaatgaagactctgagatgaagac

SEQ ID NO: 1024496 - DNA, 120 bp, Artificial Sequence
  ENSG00000283003_2 (sequence is synthesized)
agctgagcgcatgatggggtaggtcagcctccctcatggaaattctgtgtgcctgaggcccacccttccagtgcagatggagggatgggatggaaatgaatctaggggaacgcatcccag

SEQ ID NO: 1024497 - DNA, 120 bp, Artificial Sequence
  ENSG00000283003_3 (sequence is synthesized)
agcctgagaatgaatccagcgctaaaatcagtctagcaaaaggaggagaaacacctgggtctccatgatgtcactgagcaagtgaattgaccagctgtgagacgtttcatcttggaaagt

SEQ ID NO: 1024498 - DNA, 120 bp, Artificial Sequence
  ENSG00000283003_4 (sequence is synthesized)
gctacacagacgagatgataatgtctctgagtcctcgggctgacagtgagaaatggaagaaaaatgaccactgatcccccgagagctggtagagatgaggatgcaatgacaggccttccc

SEQ ID NO: 1024499 - DNA, 120 bp, Artificial Sequence
  ENSG00000283003_5 (sequence is synthesized)
tggaaatctgtcttcagaggagtatgttgtaagtgacaacgaggaagaaatctttctgcaacaagaagtatctagaaaacatccccatgtctagccaaaatctctccttccctctttggt

SEQ ID NO: 1024500 - DNA, 120 bp, Artificial Sequence
  ENSG00000283003_6 (sequence is synthesized)
aaagactaccttaaaagtgtagttttctgtttactcctaattcttgcttccagatacaactcttttgggggggataaagcaatgacccatttattaaacgttaacaatttataaacagaa

SEQ ID NO: 1024501 - DNA, 120 bp, Artificial Sequence
  ENSG00000283003_7 (sequence is synthesized)
ataatgaaaggaagagacactgagttctgtctcccagccttgtgaggacacgttgagatgactgcaagctgggaagagagccttcaccaggagctgaatttgctggtagtttgatcttga

SEQ ID NO: 1024502 - DNA, 120 bp, Artificial Sequence
  ENSG00000283003_8 (sequence is synthesized)
accacattgagatgactgcaagctgggaagagagccttcaccaggagctgaatttgctggtactttgatcttgaacctccagcctccagaattgtgacaaaataaatttctgttgttgaa

SEQ ID NO: 1024503 - DNA, 120 bp, Artificial Sequence
  ENSG00000227199_0 (sequence is synthesized)
tacactcccaagagtgccttcgggaacccctctccccactacccaaccagagagacagccccacgcccggcaagacgcaactccgggccacggagggcgccgcccggacagcccggccgg

SEQ ID NO: 1024504 - DNA, 120 bp, Artificial Sequence
  ENSG00000227199_1 (sequence is synthesized)
gccgagcaccctccggcagccgccctcgggcctccgcggccgggcgggagggcgcctccccgaccacacttcggccgcttggcacccacagccgggagggcgtgaggaaggactcggtct

SEQ ID NO: 1024505 - DNA, 120 bp, Artificial Sequence
  ENSG00000227199_2 (sequence is synthesized)
aggaaggactcggtctaactccggggaaccctcggagttccggcgcagacacccgagggggtgtcctgggaactccttcgcccgcgacacccgttcttctccgtctcccgaccaccagcg

SEQ ID NO: 1024506 - DNA, 120 bp, Artificial Sequence
  ENSG00000227199_3 (sequence is synthesized)
gttcttctccgtctcccgaccaccagcgacgcagcagggcggctgccggcccggcccggcccgccttgcgggctgtgcgcggcgcagctcttcctccgcggggccgtgaaggccaccggc

SEQ ID NO: 1024507 - DNA, 80 bp, Artificial Sequence
  ENSG00000227199_4 (sequence is synthesized)
cctccggtgcgcgggccccggcgcgtccccgagcgcgcgcctggccgcggccccgcgcgagttgcactaactttccgggg

SEQ ID NO: 1024508 - DNA, 120 bp, Artificial Sequence
  ENSG00000227199_5 (sequence is synthesized)
cgggggaggggtgggcgccgcgggcccggctcccaggccttacctgtgctcaagttgtcgttgattttcaaaggcacccgcaggatgtagaccaggaatagcacgatgaagaaccacacg

SEQ ID NO: 1024509 - DNA, 120 bp, Artificial Sequence
  ENSG00000227199_6 (sequence is synthesized)
gtccacagatacgtccaagaccaaactatgcaggacttgagctgctccagaaagcccgtggccgcttcagccatgtttcagcgctcctctctgctgccgcggctcttggtgtctgccggg

SEQ ID NO: 1024510 - DNA, 120 bp, Artificial Sequence
  ENSG00000227199_7 (sequence is synthesized)
gctcggcgggaaatcgcgcgggccgcgggcgcgccggcttttccttctccagccttattgctaactctctaaaggtccctacaagtggctttcgtggagcgatcacgtggcccctgcccc

SEQ ID NO: 1024511 - DNA, 120 bp, Artificial Sequence
  ENSG00000227199_8 (sequence is synthesized)
ctcgcgttctgggtccatttatatttattatgctaatatttagaaagagaaggccaagtggcgcgccgaaggaaacgcctcaggcagttacaacccgcataagttgagcgtttaccacac

SEQ ID NO: 1024512 - DNA, 120 bp, Artificial Sequence
  ENSG00000227199_9 (sequence is synthesized)
gccaggcgctgctccacgatccgtacaatctcatttaacccctgcaacaattccccactacgatcctctttctataggtagggaaactgaggctcacagcagctgcgtagtttaccttaa

SEQ ID NO: 1024513 - DNA, 120 bp, Artificial Sequence
  ENSG00000227199_10 (sequence is synthesized)
ggtggaaccaaaattcaattgcagtggtgtattctggggtccgaggtcttaaaccctactctgctcccttatcaggattcaggctcagggaatgaataaacccgggacagctaggagaag

SEQ ID NO: 1024514 - DNA, 120 bp, Artificial Sequence
  ENSG00000227199_11 (sequence is synthesized)
ggaggaggtgcgctcctgtcgccggctagtaggcctgaagataaatcactctattcagcaagatttgggtggcagatgctatttacctttgttctgtctctttgaagcagcgcagggatt

SEQ ID NO: 1024515 - DNA, 120 bp, Artificial Sequence
  ENSG00000227199_12 (sequence is synthesized)
ttccagagaaatcttgacagatgaatgtttatcctccaggttttttggtgatcagaggtcaaactattctcagcctgtttttaatataaacaattctctgggataattttgactgtgaaa

SEQ ID NO: 1024516 - DNA, 120 bp, Artificial Sequence
  ENSG00000227199_13 (sequence is synthesized)
cggccacctctaacagaaagtccattttaaacattgttttgttgtttttgttttgttttgactgtgctgaataaaatgtttcttttattctaaaatgttttctcagctgaaattttcaag

SEQ ID NO: 1024517 - DNA, 120 bp, Artificial Sequence
  ENSG00000227199_14 (sequence is synthesized)
tctgtttctgtccgtaagtgatttgactttctatgtattagatggtaatgaggaaattgcaggttttccagtctacatctatttttaaaattctgagcataaagaatattttattataaa

SEQ ID NO: 1024518 - DNA, 120 bp, Artificial Sequence
  ENSG00000227198_0 (sequence is synthesized)
taactctcactttgtagtggtatatttaggatttgatgtgacacagttatttattgctgagtgagcaaacccctagcccccaagtggggactacaggcttcagtgcttcccccacactgc

SEQ ID NO: 1024519 - DNA, 120 bp, Artificial Sequence
  ENSG00000227198_1 (sequence is synthesized)
ctgagctaccagcccttctgcactggccctcctgccaatactgcctgcactgtccccactccctctggctcccatgatcaccagatccgccctgcaggctccctgtcacctgtggggccc

SEQ ID NO: 1024520 - DNA, 120 bp, Artificial Sequence
  ENSG00000227198_2 (sequence is synthesized)
aacaccctgggtttcccaaccactctcttactgcagaggtcctaggtgctcctggatcgtgtagtctttaactgctgccccaagggacctcaaggaataggaattctctttgttaggagg

SEQ ID NO: 1024521 - DNA, 120 bp, Artificial Sequence
  ENSG00000227198_3 (sequence is synthesized)
tggaatgaaagtgtccagcaaactccagccagcagcgttcgtcccttgatttagagggctatgatttctacaaagtggcccgactggcccgcgaacacgcagcagagacgcggcctccac

SEQ ID NO: 1024522 - DNA, 120 bp, Artificial Sequence
  ENSG00000227198_4 (sequence is synthesized)
aaggtcagaactaagatgtcctcagagatccccagttacgaagcaaagcgcgggcctacttcgggacctacgcgtccgggcgctgtgcgcggggaccgctcccgggcccagcgtcggggc

SEQ ID NO: 1024523 - DNA, 120 bp, Artificial Sequence
  ENSG00000250012_0 (sequence is synthesized)
gacgacttggcgctccgggacagcagcagacgcccaagctccggcagcgcagagccccgccgggggcccggggggctgggagccggggatcgcggggacggaagtgggggaccgagtctc

SEQ ID NO: 1024524 - DNA, 120 bp, Artificial Sequence
  ENSG00000250012_1 (sequence is synthesized)
tattatggagctgtcaaggtagaaagagtttgactcttccacaataatttggcacccagcgtggggcctcagagaagactcaggaccccaaaggagttgcctgaactcggagcgaagata

SEQ ID NO: 1024525 - DNA, 83 bp, Artificial Sequence
  ENSG00000250012_2 (sequence is synthesized)
ggcaagtggcgtccattgtgggggctcaaatccaggttgaagggttgccagagtgacggttggagaacgtggagaactaatgg

SEQ ID NO: 1024526 - DNA, 85 bp, Artificial Sequence
  ENSG00000250012_3 (sequence is synthesized)
tccaggaggatcccaaggaccccctgttgcagccgtgttgaggctgatgctcaggaggaccccaactgtcacaagcaacacctgt

SEQ ID NO: 1024527 - DNA, 120 bp, Artificial Sequence
  ENSG00000250012_4 (sequence is synthesized)
tggtttttctcctaggaagttgttgtttaaggattctaattctagttcagagacacattctaaagggttttctttattgctttttctcccaaaattaatcttgattcggcttgtctgcgc

SEQ ID NO: 1024528 - DNA, 120 bp, Artificial Sequence
  ENSG00000250012_5 (sequence is synthesized)
atttgtgtgaggaattgaactgttgttttcataggtaaatgagagactgagttttctcaactccaaagagaaaggcatttgctcctcccagccaaaacgtgctcctgggtgactgggggc

SEQ ID NO: 1024529 - DNA, 120 bp, Artificial Sequence
  ENSG00000250012_6 (sequence is synthesized)
cttgtgggagtgtctgggggggggttgacatcctgtgacatgcagcagccctatggggaaatccccaacaaaaattaattttaaaaatggcttgtccaggaatgcatataaggactgatc

SEQ ID NO: 1024530 - DNA, 120 bp, Artificial Sequence
  ENSG00000250012_7 (sequence is synthesized)
tgacacatggtggggtcctgcccacaagcagcacacattgatccaccacacaaaaaccctaggccacagctcagttcctacttctaagaaaaaaaaaggtgggaaacaaatgatctaaga

SEQ ID NO: 1024531 - DNA, 120 bp, Artificial Sequence
  ENSG00000250012_8 (sequence is synthesized)
atgaggagaaaacaaggagaatgacctcatttcgggcactctgttggttttatggtgcgtctacttgccagagcttatgtaaaatggaaatataatgatccttgtgcacatttacattaa

SEQ ID NO: 1024532 - DNA, 120 bp, Artificial Sequence
  ENSG00000250012_9 (sequence is synthesized)
ggaaaagagccctaaggtcaacctgtacactatagagttcctaagttctcttcttctctatattttctgcctgctttaaatctgcttttacttttgtactgaaattaaaaaccactgttt

SEQ ID NO: 1024533 - DNA, 120 bp, Artificial Sequence
  ENSG00000257042_0 (sequence is synthesized)
agaatcctgcaatatgtccttggaaggtctctgctgaaaatttcaatgcctcctgcaaaaagaaggaagagaaagaaaaggagaaaacagaggcagaggatctttccctagaagagattc

SEQ ID NO: 1024534 - DNA, 120 bp, Artificial Sequence
  ENSG00000257042_1 (sequence is synthesized)
tgtgaaacgctccctcttatggaaacacacataaagtctctctcttgcctgtctcccgttgaagatcaaccagttctcctgccaggtttgaggacccgggctcaggccccggcaggtatc

SEQ ID NO: 1024535 - DNA, 120 bp, Artificial Sequence
  ENSG00000257042_2 (sequence is synthesized)
cgggatggtccctctccctaacccgggcaaggagcatcggtgaccgctgcaagccctcggcagcatcccagcttggcagcccctccccctggcctccccaacccggcgccctggggagga

SEQ ID NO: 1024536 - DNA, 120 bp, Artificial Sequence
  ENSG00000257042_3 (sequence is synthesized)
aacaccgcgacgctccactgctgaaccagtctccgctgcatcgtctccgctcgcgctcgggacctgcaacagaagggaatgggacccgagtgtcagtctggactctccatctccccgcac

SEQ ID NO: 1024537 - DNA, 120 bp, Artificial Sequence
  ENSG00000257042_4 (sequence is synthesized)
tactccgctccccctttttagcccgctctcaaaaagcctcttcaacatcaagggcatctcccaagttgaaaagaaaaaaaatttctctggagcctctcagcacttacttatttagcaacc

SEQ ID NO: 1024538 - DNA, 120 bp, Artificial Sequence
  ENSG00000257042_5 (sequence is synthesized)
ggctactccaactgtgctttctccaaaccacacagccagaaagagcaaaaagggaaaaaagaaacaaatcagaggcgcttcctctgaaataatagcgaaaataaaatggttttatatatg

SEQ ID NO: 1024539 - DNA, 120 bp, Artificial Sequence
  ENSG00000227192_0 (sequence is synthesized)
gagaaaggaaagaatagaaaaggtactgaactccaggtccaagtcaatcatctttgcttctctcacattgtcatcgacatttaccccagcattatcctcatcgcttcatcactactgcca

SEQ ID NO: 1024540 - DNA, 120 bp, Artificial Sequence
  ENSG00000227192_1 (sequence is synthesized)
ccccaaccaatctgcctcctctgtataaggctggaagacagagatccaccaggctctcaattgaaagccctggagggctacaccctaagaacagaagtgaatcggaggtacacttagcaa

SEQ ID NO: 1024541 - DNA, 120 bp, Artificial Sequence
  ENSG00000227192_2 (sequence is synthesized)
aacagaagaaaaagggaacactttcggtggaaggcaatatcatctggaccctttatggttttattatacataatgtctaacattttttaaattactagatgtggaagatcaagttcattt

SEQ ID NO: 1024542 - DNA, 120 bp, Artificial Sequence
  ENSG00000227192_3 (sequence is synthesized)
gcccaataatcaagagaaaaaaacacacacaatagaaacacaattatagatgatcaagatattgtaatcagcaaatgagaatttacaaataatttttatgaatatgtttaagaaaataaa

SEQ ID NO: 1024543 - DNA, 120 bp, Artificial Sequence
  ENSG00000227195_0 (sequence is synthesized)
gaggggctaccgttctgcctccgaccggtcgtgtgtgggtttactcggaggtgctttgcctctgaagaaaagagaaatactaggctttagaatttcaccatatgaattttgggagagagg

SEQ ID NO: 1024544 - DNA, 120 bp, Artificial Sequence
  ENSG00000227195_1 (sequence is synthesized)
agcacagttcagcccataactaacacacgacggaatgaagttgataatagtgagaccttgttggtacaagactatgtaacataacctgcgcttctcaacaaagaattgcttttctgactt

SEQ ID NO: 1024545 - DNA, 120 bp, Artificial Sequence
  ENSG00000227195_2 (sequence is synthesized)
ctgcactcaactactcaacatgaaggcaataagaatgaagacctctatgtataataattgacttccacttaataaataagcaacacgctgtcctggatagctaacgtgtttatgaatgca

SEQ ID NO: 1024546 - DNA, 120 bp, Artificial Sequence
  ENSG00000227195_3 (sequence is synthesized)
aggaaattttcaaaaagggagtttgaaatttaactccacaaactactatctggattggaatgctacattaaatgtattataattttgtatggacatataaggatggggaatgaaaagcat

SEQ ID NO: 1024547 - DNA, 120 bp, Artificial Sequence
  ENSG00000227195_4 (sequence is synthesized)
ccaaggccatatgttgataatcttttgatatgttaagaaataatctagtgttattttctatttcttctcaaatgtttttagaggttacttggtacactggtcgacaaaaccttgaaatgt

SEQ ID NO: 1024548 - DNA, 120 bp, Artificial Sequence
  ENSG00000227195_5 (sequence is synthesized)
agatagcgtctccacattttcttccaggatcatcacctttgttctaaatagctcccacatagtgtgaacagaagtcatatgttttagattttctgccttggcacccaggaaaccagtatg

SEQ ID NO: 1024549 - DNA, 120 bp, Artificial Sequence
  ENSG00000227195_6 (sequence is synthesized)
attgagtaaacatattaaacttcctctgcatttccagcctgaacagatgttgagtacaagctgatccacctacgttcaacctgagagagtccacatccacagactgtttcatttcccttt

SEQ ID NO: 1024550 - DNA, 120 bp, Artificial Sequence
  ENSG00000227195_7 (sequence is synthesized)
ttcaatttacatagaagcatagattcttgctggcatatacaaatgcgccatttaaggcaatcaaaaatggttccacatctcatctgatttccacaattgttgctgtaacgatggactact

SEQ ID NO: 1024551 - DNA, 120 bp, Artificial Sequence
  ENSG00000227195_8 (sequence is synthesized)
gaggagagagacaatttctctggcacatcttcccacattttagcaacatgttcatggagagccaatattcagtaattacagcccaattcctcacaatttcacaattcgctaacaatatgc

SEQ ID NO: 1024552 - DNA, 120 bp, Artificial Sequence
  ENSG00000227195_9 (sequence is synthesized)
attttcacaatgtaaagctgattttcctttaaccaaatcaaacatgaaaagatagctgcatgcaatgggcaatctagatcattagaagattgatgtaaaattagaggacactgagactgg

SEQ ID NO: 1024553 - DNA, 120 bp, Artificial Sequence
  ENSG00000227195_10 (sequence is synthesized)
aatagattgcaaacttcagggagctcagaaaacttgtaaactctacattttgaggaaatatgttgtcgatgcttttgcaactctatgcagtaacttaacaaataaagccttaaagtaact

SEQ ID NO: 1024554 - DNA, 120 bp, Artificial Sequence
  ENSG00000227195_11 (sequence is synthesized)
gtgtctgtggcggtgggatcccgcggccgtgttttcctggtggcccggccatgcctgaggtttctccctcagccgcccctctgcgggctcccagaaatactaggctttagaatttcacca

SEQ ID NO: 1024555 - DNA, 120 bp, Artificial Sequence
  ENSG00000227195_12 (sequence is synthesized)
ggccctgtgagcgatcgcggtgggcttgggctggtgacgcgtgcgccggccggccgccgaggggctaccgttctgcctccgaccggtcgtgtgtgggtttactcggagacagggtctcac

SEQ ID NO: 1024556 - DNA, 120 bp, Artificial Sequence
  ENSG00000227195_13 (sequence is synthesized)
gagtgcagtggtgcaattatggctcactgtagtcttgatctcctgggctcaagcagtcctcccaactcagctcccaagtagctagaactacagaaatactaggctttagaatttcaccat

SEQ ID NO: 1024557 - DNA, 120 bp, Artificial Sequence
  ENSG00000227195_14 (sequence is synthesized)
acagtacgtttggttatttgattcatctgtgggggaaggaaagataattttccaaaggacattcctcctaaattctgtcttaaagttgtttacggaatgaagttgataatagtgagacct

SEQ ID NO: 1024558 - DNA, 120 bp, Artificial Sequence
  ENSG00000227195_15 (sequence is synthesized)
gccgcccgccgatcctctctcctccccgagcggctcaccggctttacgtcggttggtggccgcgtctgggaccgaaccgggcaccgccttgtggaaaaaaaagaatagaatataccctgt

SEQ ID NO: 1024559 - DNA, 120 bp, Artificial Sequence
  ENSG00000227195_16 (sequence is synthesized)
taaatcagacatgatacttgcttttgtggagcttatgctttagtgcagaaacagaaagtcaagcaaaaactcaaactatgtaactttaaattggatatgtgctaatgaaggaaaatgtgg

SEQ ID NO: 1024560 - DNA, 120 bp, Artificial Sequence
  ENSG00000227195_17 (sequence is synthesized)
cactgtaagaaaaaataatagggagttaaaggataaataggagtttgctggatgaaatttatgaagagctgaagatttcaaacaaaagaaactgatgcaggagggtgcagctttggagtc

SEQ ID NO: 1024561 - DNA, 120 bp, Artificial Sequence
  ENSG00000227195_18 (sequence is synthesized)
aagaatgaagttctaggagatagagagcaaagaaatggtgggagaggaggtcaaagtagacggaatgaagttgataatagtgagaccttgttggtacaagactatgtaacataacctgcg

SEQ ID NO: 1024562 - DNA, 120 bp, Artificial Sequence
  ENSG00000227195_19 (sequence is synthesized)
gggctggtgacgcgtgcgccggccggccgccgaggggctaccgttctgcctccgaccggtcgtgtgtgggtttactcggagaaatactaggctttagaatttcaccatatgaattttggg

SEQ ID NO: 1024563 - DNA, 120 bp, Artificial Sequence
  ENSG00000227195_20 (sequence is synthesized)
caaatctctcctctgccttctccttatcagactactcaacatgaaggcaataagaatgaagacctctatgtataataattgacttccacttaataaatatccccacttttgttcctagag

SEQ ID NO: 1024564 - DNA, 120 bp, Artificial Sequence
  ENSG00000227195_21 (sequence is synthesized)
gtcccacggtgggggcgcgccggtctcccggagcgggaccgggtcggaggatggacgagaatcacgagcgatgtggccctggcgttgagtttgtggctgtggtcgcttcggggccccggt

SEQ ID NO: 1024565 - DNA, 120 bp, Artificial Sequence
  ENSG00000227195_22 (sequence is synthesized)
aaggcctcatcttataactggcacataggtcacttccaccatattctttttgctaacgaaagtcacaaagtcagtccatgttcaagtagaggggaaactgactccaccacttgatgtgaa

SEQ ID NO: 1024566 - DNA, 120 bp, Artificial Sequence
  ENSG00000227195_23 (sequence is synthesized)
gagttggaatatcatagttattgtttcttgtgacttgccatagcgtattttctcacactaacaactctgtatttcttcccaaattctgaaaaattcttttgttggctcttcctgtacttg

SEQ ID NO: 1024567 - DNA, 120 bp, Artificial Sequence
  ENSG00000227195_24 (sequence is synthesized)
attcattacattaagttttccatttaaatgttatttccttggaaagactttatcatttgtcaagtaggtgtattctcttcatcagttactctattttctcattacaatatgaactttgta

SEQ ID NO: 1024568 - DNA, 120 bp, Artificial Sequence
  ENSG00000227195_25 (sequence is synthesized)
aaaatgggaactttactttgtttatgccagtagtttatatacattttctgttacgtgaaaagtacaaaatgtttttttcatggttaaagaaataaaagaataaatatgtaatcactgcaa

SEQ ID NO: 1024569 - DNA, 120 bp, Artificial Sequence
  ENSG00000227195_26 (sequence is synthesized)
tggctgaggacgattccctgagccttgacaaagcaggagccctccgtggcggtgcgtcggtgtcgaggctccagtctgactaatccagggggtcgacaaaacagattcgggacactatgc

SEQ ID NO: 1024570 - DNA, 120 bp, Artificial Sequence
  ENSG00000227195_27 (sequence is synthesized)
tacacggagggcctaccaggatgcagaaacagcagacggagtccagggaaagcagtgcggcatcccagcctcaggcctgcccgtacggtgttcggacggaatgaagttgataatagtgag

SEQ ID NO: 1024571 - DNA, 120 bp, Artificial Sequence
  ENSG00000227195_28 (sequence is synthesized)
aaacaatcttcaagaagaagctgaaaaccggatatgacacggatgtccccagaacacagcaggcatcctgaagctccgcctcctgaagctccccctccctcggtggaagtcggctcaggg

SEQ ID NO: 1024572 - DNA, 120 bp, Artificial Sequence
  ENSG00000227195_29 (sequence is synthesized)
aggtcctgaggacaggactcctgggggtttggctgcagaatgaattcattaggactttatataatttttcaaatcatgaaattgcgcaagcttttgaatatggaattgggagggctttca

SEQ ID NO: 1024573 - DNA, 120 bp, Artificial Sequence
  ENSG00000227195_30 (sequence is synthesized)
cttgtgaagtagcagatgcaatgattaccaatgtactttataaaatgactttcagagtttgagatgaaattggcttttctgaaatatgtaagtctctggaaaaactcaacatttctaatc

SEQ ID NO: 1024574 - DNA, 120 bp, Artificial Sequence
  ENSG00000227195_31 (sequence is synthesized)
ttgctttggaaagcctttaagtatgtaaaaatcaatttcttatatcttctctgaaataaacatggaatatcctaaggttttgttcatgtttcatgaatttcacagcattcatcatatttt

SEQ ID NO: 1024575 - DNA, 120 bp, Artificial Sequence
  ENSG00000227195_32 (sequence is synthesized)
aaagttatttttgatactttgcattgtattaaaatctgtcttggaatgagaggcctgaaaaacaatcataatatactgttgttgtctaacaatatatcaagtttttaatgactcttacga

SEQ ID NO: 1024576 - DNA, 120 bp, Artificial Sequence
  ENSG00000227195_33 (sequence is synthesized)
acgatgcaatatttttatcattcttgtagtttatccacgtgtatttaatattactagcagaaatttagattttagtaaattaattctgatctttgtaaaataaaatactttagttttcaa

SEQ ID NO: 1024577 - DNA, 120 bp, Artificial Sequence
  ENSG00000227195_34 (sequence is synthesized)
taagcggggagcttgttaaaaatgcagaatttggggaactattcacagagatttttactaagttacgtggaaaaaagcctgggactagctacgatctcccctctggtgatttggatgtga

SEQ ID NO: 1024578 - DNA, 120 bp, Artificial Sequence
  ENSG00000227195_35 (sequence is synthesized)
tagtctcttaaacatattttgaaatatactcgcccaaagaatggagaaagacccagccggccctcctcatgtggctgctgagggagatatatgtataattaaaaaactgccaaaaacaaa

SEQ ID NO: 1024579 - DNA, 120 bp, Artificial Sequence
  ENSG00000227195_36 (sequence is synthesized)
ctactcaacatgaaggcaataagaatgaagacctctatgtataataattgacttccacttaataaatagctagcttggacttgttctgatggaaatagcaggagtcccaactacaagagt

SEQ ID NO: 1024580 - DNA, 120 bp, Artificial Sequence
  ENSG00000227195_37 (sequence is synthesized)
ggcggttgagtgagacgagacgcgcccctcccacgcggggaagggcgcccgcctggtccggcgagcgcacgtccggtgctcccctctggcggaaatactaggctttagaatttcaccata

SEQ ID NO: 1024581 - DNA, 120 bp, Artificial Sequence
  ENSG00000227195_38 (sequence is synthesized)
gtctgtggcggtgggatcccgcggccgtgttttcctggtggcccggccatgcctgaggtttctccctcagccgcccctctgcgggctcccagatagcaagacaaatctctcctctgcctt

SEQ ID NO: 1024582 - DNA, 120 bp, Artificial Sequence
  ENSG00000227195_39 (sequence is synthesized)
ggcgggtgcgcacgggccctgtgagcgatcgcggtgggcttgggctggtgacgcgtgcgccggccggccgccgaggggctaccgttctgcctccgaccgaaatactaggctttagaattt

SEQ ID NO: 1024583 - DNA, 120 bp, Artificial Sequence
  ENSG00000227195_40 (sequence is synthesized)
gcgacgggcgaggggcggacattcgtggcgaatgggacccttcttctcgtcccgcccgcgggggccccttgtctctcctcttcctcgcctgcgggtgtctttcatctgagtgacattaga

SEQ ID NO: 1024584 - DNA, 120 bp, Artificial Sequence
  ENSG00000227195_41 (sequence is synthesized)
ggtgggcttgggctggtgacgcgtgcgccggccggccgccgaggggctaccgttctgcctccgaccggtcgtgtaaatactaggctttagaatttcaccatatgaattttgggagagagg

SEQ ID NO: 1024585 - DNA, 120 bp, Artificial Sequence
  ENSG00000227195_42 (sequence is synthesized)
ggagcacagttcagcccataactaacacacgatagcaagacaaatctctcctctgccttctccttatcagactactcaacatgaaggcaataagaatgaagacctctatgtataataatt

SEQ ID NO: 1024586 - DNA, 120 bp, Artificial Sequence
  ENSG00000227195_43 (sequence is synthesized)
ggaacccctctttgccccagttttggccaagtatcttctacaccaccttcaggtctaagtgcaacagaaaatacacctttctcaggaaagacatttattgttcactcataactctatctt

SEQ ID NO: 1024587 - DNA, 120 bp, Artificial Sequence
  ENSG00000227195_44 (sequence is synthesized)
taatagacatatccaatagaatatacagtttgcaagattaaaaacaaggtttatattgcttcataaggagcaagcacatttttgaagcacaggtgatgaagaagacatgccaacagaggg

SEQ ID NO: 1024588 - DNA, 120 bp, Artificial Sequence
  ENSG00000227195_45 (sequence is synthesized)
ctctttatctacctccttaaacctgaatcaacaaatctttgttagaatgatgcttaagtcacgatgttcatttccagctgctgtggaagacaaaactctacctttattttttaggttact

SEQ ID NO: 1024589 - DNA, 120 bp, Artificial Sequence
  ENSG00000227195_46 (sequence is synthesized)
gggaccgccctcgtgtctgtggcggtgggatcccgcggccgtgttttcctggtggcccggccatgcctgaggtttctccctcagccgcccctctgcgggctcccagacggaatgaagttg

SEQ ID NO: 1024590 - DNA, 120 bp, Artificial Sequence
  ENSG00000227195_47 (sequence is synthesized)
gaggccgagcggtggtgtgtcgttcccacccccagcgccccctcctccggtcggcgcctcggtgtccgcgcgtgggtcctgagggagctcgtcggtgtggggttcgaggcggttgagtga

SEQ ID NO: 1024591 - DNA, 120 bp, Artificial Sequence
  ENSG00000227195_48 (sequence is synthesized)
ggggcttgtggagttgcgctcacgctcgcacctgccggtccccgccctgaccgcgaacgctcaaggttgccgcacgcaggtttttcctgaaatactaggctttagaatttcaccatatga

SEQ ID NO: 1024592 - DNA, 120 bp, Artificial Sequence
  ENSG00000227195_49 (sequence is synthesized)
gggggggggtgggaggcgggggcttgtggagttgcgctcacgctcgcacctgccggtccccgccctgaccgcgaacgctcaaggttgccgcacgcaggtttttcctgacggaatgaagtt

SEQ ID NO: 1024593 - DNA, 120 bp, Artificial Sequence
  ENSG00000227195_50 (sequence is synthesized)
ataaataataaaaaagataataataacaagaaaaatgtttagtatcttaataaagaagcaaataaaaatgacaatgataataacaaggaagatgcttagtaccttaaagatacctgacag

SEQ ID NO: 1024594 - DNA, 120 bp, Artificial Sequence
  ENSG00000227195_51 (sequence is synthesized)
ttatttgttaagtggacaagtggataaatgaataacaaactttttaaggaaattctgttggaaaaatgcagaaattcaataggcacagctcttctgtattatgagcaccttaaagaccca

SEQ ID NO: 1024595 - DNA, 120 bp, Artificial Sequence
  ENSG00000227195_52 (sequence is synthesized)
atgagcaccttaaagacccaaactgtgtattccatctttgtctcctgcaacttgccaaacctaacttatagaggtcctttgttaaatatataataaagatgtgctcatacagttcatatt

SEQ ID NO: 1024596 - DNA, 120 bp, Artificial Sequence
  ENSG00000227195_53 (sequence is synthesized)
ttttttgagtttagagttaagctatctgaatatttataatgataatattttggctattagaaacagagtatcttgctgtaacaaaattactattaacacactaattatccagtagataga

SEQ ID NO: 1024597 - DNA, 120 bp, Artificial Sequence
  ENSG00000227195_54 (sequence is synthesized)
tgacttctgcactcagtaggttctttcctccagctcactttattgtaagaaccttggtgtctgtaatcggctcggaacccttgctgctctttcactgaatatcgctgtctggaggttact

SEQ ID NO: 1024598 - DNA, 120 bp, Artificial Sequence
  ENSG00000227195_55 (sequence is synthesized)
ggggggggtgggaggcgggggcttgtggagttgcgctcacgctcgcacctgccggtccccgccctgaccgcgaacgctcaagaaatactaggctttagaatttcaccatatgaattttgg

SEQ ID NO: 1024599 - DNA, 120 bp, Artificial Sequence
  ENSG00000227195_56 (sequence is synthesized)
gaccgcgaacgctcaaggttgccgcacgcaggtttttcctggtaccacaggccccctcccttccccaggcctccctgagcgcctctgcgggcccctcgggccccacgaggggcggctggc

SEQ ID NO: 1024600 - DNA, 120 bp, Artificial Sequence
  ENSG00000227195_57 (sequence is synthesized)
ctatacagttgctaagaattctgaaagatcatcttatacctattatacagaagcagagcgagacaaatgaaccaaaacttacataacactgtgacatgtgtttcaagtttaaacatctta

SEQ ID NO: 1024601 - DNA, 120 bp, Artificial Sequence
  ENSG00000227195_58 (sequence is synthesized)
aaaaatacatttcataaaactaaagataaaacttgatacttgtttctactacatttggttttatgtacttaggcatattatttttgagtctgatattaaataagccaacgtatgtttgca

SEQ ID NO: 1024602 - DNA, 120 bp, Artificial Sequence
  ENSG00000257045_0 (sequence is synthesized)
cagatgaagaaactgaaataaaagaggatcttaacctaggacacccagcagccagtgaaggaaccatgatctgaacgcaagtctttcaggctcaaaaacatgggctcaggacactgcact

SEQ ID NO: 1024603 - DNA, 120 bp, Artificial Sequence
  ENSG00000257045_1 (sequence is synthesized)
acacactgcctccaaaatctccaatttatgccagctactaataaagtatagatggggtctggaaaataatctccctgcatcaatgtcaagctgcttgtgtgcactaaattgctgactcca

SEQ ID NO: 1024604 - DNA, 120 bp, Artificial Sequence
  ENSG00000257045_2 (sequence is synthesized)
actaaaaggctgagtcaatgcgatctcgctccacttctggcagattgaggaaattctgcatggccctcaggtttactagaagagactgagaggctgtccgagggtcttcttccttacgca

SEQ ID NO: 1024605 - DNA, 120 bp, Artificial Sequence
  ENSG00000257045_3 (sequence is synthesized)
ttaaccagctcgctgtgatgtcaagaacctcacactaattccttagggttctccgatatgaagtcaatgtgcttgccttccgggggatatgcattattttaggactgttctattctgaca

SEQ ID NO: 1024606 - DNA, 120 bp, Artificial Sequence
  ENSG00000257045_4 (sequence is synthesized)
ctttatcatcactgtaataatcatcagtgtacagacatgccagctagcaaggtaggcacttgggaagaattgtgaaactgcaattaccaccaggtgcctcctacaagtatttcaggaact

SEQ ID NO: 1024607 - DNA, 120 bp, Artificial Sequence
  ENSG00000257045_5 (sequence is synthesized)
gttagaactctctctgcttgaaactgggaacacttggcagtcctgcttagctttacaaatctgccaagtttggtaaatttagtttcgacatttaaacagcatggtagatttacatcaatt

SEQ ID NO: 1024608 - DNA, 120 bp, Artificial Sequence
  ENSG00000227197_0 (sequence is synthesized)
aaatgaaatcctcctccagcagcacatttgcaaattccagaggggacatgatatactatggaagttgacatagaactccgcacttaggtgggcgattgttagcagtacagcatggtggtt

SEQ ID NO: 1024609 - DNA, 120 bp, Artificial Sequence
  ENSG00000227197_1 (sequence is synthesized)
aagaacatggactttggagccagatggccaaatcatggccctacccttgtgaaactgaggtaaagaagaaggaagaaagaatttggaatgggtgtttactgagcaaatttattgtacctg

SEQ ID NO: 1024610 - DNA, 120 bp, Artificial Sequence
  ENSG00000227197_2 (sequence is synthesized)
ccacagagagctgaggtgacagcacaaaatcaagtacaaaacaaagtggttgattttagatgatgactgtatcagtgggactatgtaagttcagtacttggcatagggcctggtttctcc

SEQ ID NO: 1024611 - DNA, 120 bp, Artificial Sequence
  ENSG00000227197_3 (sequence is synthesized)
gatttccattcatttacctatgcaactctgcatgaacctgaagaacaatcatcaagcggatggattcaaactgcatctccatgtatctaacattcagcattgctatttgttttatgtaag

SEQ ID NO: 1024612 - DNA, 120 bp, Artificial Sequence
  ENSG00000227197_4 (sequence is synthesized)
cactgaactcaaaaacctagttatttatcctaagtatccctaaatttctgctaataatcatttgtgtatatggatgagtgaatcataatttgtctcagccctatttctttttcaaatcca

SEQ ID NO: 1024613 - DNA, 120 bp, Artificial Sequence
  ENSG00000227197_5 (sequence is synthesized)
tatcaccagtcatcaataataaataaccaagttagcagtttctaatgaatcaaaaatcctattacattccatagttaagccaaattaagattccttatggaaacaagactctcactggtt

SEQ ID NO: 1024614 - DNA, 120 bp, Artificial Sequence
  ENSG00000250015_0 (sequence is synthesized)
gatcctgatatgcaaacagaactacagcactccagaagtaacctcatttgactggcctattagttaatggctctctacgtttatcactgaaaaataagacagatctgctaagacgactga

SEQ ID NO: 1024615 - DNA, 120 bp, Artificial Sequence
  ENSG00000171889_0 (sequence is synthesized)
acggcgctggcggccccggcggcggcggcaggtgtggatggggcgaaggtgcgggaacgtccactcccgcgcgcccctctcggggaccagggcggcctcccaggaggagcttggtttctg

SEQ ID NO: 1024616 - DNA, 120 bp, Artificial Sequence
  ENSG00000171889_1 (sequence is synthesized)
cggggaccagggcggcctcccaggaggagcttggtttctggtcctcataccgtgtggttgagtgaaatcaaaacttccacgatagcaatgctgattggacaaagaatgtgttgtggacac

SEQ ID NO: 1024617 - DNA, 120 bp, Artificial Sequence
  ENSG00000171889_2 (sequence is synthesized)
aaaaccaaactctggaggacagaggattcattccaagggtctgcttgtattcaatgactggtctacgtgggggtgtgaagtccccttactccacctgtgaagagtcttcccagtttcaga

SEQ ID NO: 1024618 - DNA, 120 bp, Artificial Sequence
  ENSG00000171889_3 (sequence is synthesized)
ccaccctcccagcctcctgttattggctaaggccattttgtgactacactgcaggtagagatggattcctggaaatacctcctcaaggccagtgtagagccctcaatcacccactgcccc

SEQ ID NO: 1024619 - DNA, 120 bp, Artificial Sequence
  ENSG00000171889_4 (sequence is synthesized)
cagcttctccttctcccatctcctgcaccaagcaggtctccaggtgttccagctgctgatgacgtaaagtgtggagttggtccaggaaggtcatgttccatgcagcagaggagcgctttg

SEQ ID NO: 1024620 - DNA, 120 bp, Artificial Sequence
  ENSG00000171889_5 (sequence is synthesized)
tgtgagaagttgaagacctgctgtaacacatcatagaggaaagacatagcctgggccttctgcaactggctgacttccaccttctcctgggggaatctgaagtcacttctgtcctttaga

SEQ ID NO: 1024621 - DNA, 120 bp, Artificial Sequence
  ENSG00000171889_6 (sequence is synthesized)
cacaagaagggagagattctcctcatttggcccaaaagcaccaaggtgttcctgcctagcaggccatggttctgaggcaggttatatcctagagatccagaagagccacagctgcacacc

SEQ ID NO: 1024622 - DNA, 120 bp, Artificial Sequence
  ENSG00000171889_7 (sequence is synthesized)
tctagggctgccagtagagggaagaggagggccattgagaaatcaggatgcttttggcctggttgagctgaggtcttcatagaaccttggatcctaggttctatgaagacattctatcta

SEQ ID NO: 1024623 - DNA, 120 bp, Artificial Sequence
  ENSG00000171889_8 (sequence is synthesized)
tgcatggctttaatggagcacaaatagttttcatttttctgagcatttctctaaatttttaattccatttattgttttcatttacatgtcttctatatcagcatccacaaccttttggcc

SEQ ID NO: 1024624 - DNA, 120 bp, Artificial Sequence
  ENSG00000171889_9 (sequence is synthesized)
accagtttggtggaagataatttttccacgaaaaatggggtcagggagggaatgctttcagaggcattagattctcattaggagaccacaacctagatccttcgcatctgcacttcacaa

SEQ ID NO: 1024625 - DNA, 120 bp, Artificial Sequence
  ENSG00000171889_10 (sequence is synthesized)
tgatctgacaggaggcagagctcaggcgttaatgcttgttggttggcctgcttgcctcctgctgtgcggccctgttcctaccaggccaggaccagtaccccggtccatggatgggggttg

SEQ ID NO: 1024626 - DNA, 120 bp, Artificial Sequence
  ENSG00000171889_11 (sequence is synthesized)
aaaaaccttgttctatatgacctaaaaggaggtcatcactctacactcttgatttttgcaatggatgttcaatattcccagtaaacttaagatatatcaatccaaatgaatattgatcaa

SEQ ID NO: 1024627 - DNA, 120 bp, Artificial Sequence
  ENSG00000171889_12 (sequence is synthesized)
tcagatgagaaacatctttgtgctactgttagaagtatatacttttagcccagatcctagcctccagttttaccctccattttgcataggaaatcaggatccctgggccctatgggtttc

SEQ ID NO: 1024628 - DNA, 120 bp, Artificial Sequence
  ENSG00000171889_13 (sequence is synthesized)
tgtattcagttaggaaattacctatctctggaaattaaactttttaggactatctttgtttgatatttgattcacagaagacgttgatggttattagtgaaagaacttctctggtgcttc

SEQ ID NO: 1024629 - DNA, 120 bp, Artificial Sequence
  ENSG00000171889_14 (sequence is synthesized)
cctccttctagaatatattcattcaggttcatgtggttatgcttccctgggggctcaagcttagatcaatgaacattgccttttttgcattattttcttactggagaaatatagcactcc

SEQ ID NO: 1024630 - DNA, 120 bp, Artificial Sequence
  ENSG00000171889_15 (sequence is synthesized)
tcaggctgcgccaatacccctaaaagaaattctgttggtttgtttttttttcttttttaagatgcatatgggtgtggaaattttaatcttaaaataatgttatttcctcagcagtgatga

SEQ ID NO: 1024631 - DNA, 120 bp, Artificial Sequence
  ENSG00000171889_16 (sequence is synthesized)
ttcacaaggtatttatcacatcaagtcactccctaaatgcaggctcaccacatcctgatgactttagaactccttttccagggaggttcttgcttctttgttgccaaaacaataaatcct

SEQ ID NO: 1024632 - DNA, 120 bp, Artificial Sequence
  ENSG00000171889_17 (sequence is synthesized)
ttgtgacctttgtccttgctcctagaatatttgggtgaaggagtatatgctgtcagtggtgacctcctcttcttctgacccatgccctaggtatcaaagtctcaacagccctagaacgct

SEQ ID NO: 1024633 - DNA, 120 bp, Artificial Sequence
  ENSG00000171889_18 (sequence is synthesized)
gataacaaaggtttgttttgtctaagtaggtaaaggaattatccaattgtaatcattttatcttcagtagttaaataatttttatttcaccaagtacagcttttattctttctttaactc

SEQ ID NO: 1024634 - DNA, 120 bp, Artificial Sequence
  ENSG00000171889_19 (sequence is synthesized)
ttttgctatctttaattcttttaaactattaacagtttttatgcttaaaatttatgagctatgcacaggagagtcaaagatgctgctgcctctctttagaggctcatattacagaaactg

SEQ ID NO: 1024635 - DNA, 120 bp, Artificial Sequence
  ENSG00000171889_20 (sequence is synthesized)
gcgaccctcagttgttcactagttcagtgtgatctgttgaagtttcttacatctctgtctacatgaaactttgacggtgcagggcagtgagccccatgctatcacattaaatagtcatag

SEQ ID NO: 1024636 - DNA, 120 bp, Artificial Sequence
  ENSG00000171889_21 (sequence is synthesized)
ggatggggcgaaggtgcgggaacgtccactcccgcgcgcccctctcggggaccagggcggcctcccaggaggagcttggtgagcagctgcgacctgtgcataacttggggcgccgccagg

SEQ ID NO: 1024637 - DNA, 120 bp, Artificial Sequence
  ENSG00000171889_22 (sequence is synthesized)
ggctcgcaggttccacgtccggcgcctggagaaggaagacgcgcgtccccggccgcggcgccgaagccggctgggggaccgcctggtcccgggccagagctgggaggcggtgttccgtga

SEQ ID NO: 1024638 - DNA, 120 bp, Artificial Sequence
  ENSG00000171889_23 (sequence is synthesized)
gccgcctggtctggggtgcggggggcgggaagcggccccttcgtgtgcgcttgggcgaggccgggcggcgcttctgtcctcctactcggacccgcaggtttctggtcctcataccgtgtg

SEQ ID NO: 1024639 - DNA, 120 bp, Artificial Sequence
  ENSG00000171889_24 (sequence is synthesized)
aatgttcaagctgagagtcaaatcaagaatgtaatccatgtagccacacaaaaataaaacacctaggaatatatttaataaatgaggtgaaatatatttgcaaggagaactacaaaacac

SEQ ID NO: 1024640 - DNA, 65 bp, Artificial Sequence
  ENSG00000171889_25 (sequence is synthesized)
caggcaatctacagatttgatgctattcctatcaaacaaccaatgtcattttcacaaaactagaa

SEQ ID NO: 1024641 - DNA, 120 bp, Artificial Sequence
  ENSG00000171889_26 (sequence is synthesized)
ttcctatcaaacaaccaatgtcattttcacaaaactagaaatatactattctaaaattcatatgtaaccaaaaaagagtccaaataactaaagcaattctaaacaaaaagaacaaagcca

SEQ ID NO: 1024642 - DNA, 120 bp, Artificial Sequence
  ENSG00000171889_27 (sequence is synthesized)
gaggcatcacattactggacttcaaactatactataagatgacagcaaccaaaaacagacacatagaccaatgaaacaaaatagataactcataaatagagccacacacctacagccatt

SEQ ID NO: 1024643 - DNA, 120 bp, Artificial Sequence
  ENSG00000171889_28 (sequence is synthesized)
tgatcttctacaaagtcgacaaaaataagcaatggggaaaagactccctattcaataaatggttctgggatagctgagtagccatatgcagaagaataaaactggacccctacctttcac

SEQ ID NO: 1024644 - DNA, 120 bp, Artificial Sequence
  ENSG00000171889_29 (sequence is synthesized)
cacatacaaaaattaaatcaagatggattaaagatttaaacgcaagtaaatctttagtgttctcagcgtgcatacaaaaacaaaacaactatgtcaggtgatgaatgtgttaattagctg

SEQ ID NO: 1024645 - DNA, 120 bp, Artificial Sequence
  ENSG00000171889_30 (sequence is synthesized)
gctgtggattatgtaatgtgtagaaatcattacacaaggtatatttatacctaatccctatgttttacactttaaataatatatttttaatcatatctcaataaagaaatatttaaaggt

SEQ ID NO: 1024646 - DNA, 120 bp, Artificial Sequence
  ENSG00000171889_31 (sequence is synthesized)
ctcaaattcagctattctttgaaaatgatgctcagaaaacatttgaaaaatatgcgtggcaatgttaacccacaccctcctccaggtatcaccctatttcctaacaccgcaaacaagctt

SEQ ID NO: 1024647 - DNA, 120 bp, Artificial Sequence
  ENSG00000171889_32 (sequence is synthesized)
cccaagatgatcttctatacatagtgcacctaataccacttcttgtgtttcttcttcaaactactcccatctggtctctgtcccattcattctgcaaaaccagatcatcctaaaatcaat

SEQ ID NO: 1024648 - DNA, 120 bp, Artificial Sequence
  ENSG00000171889_33 (sequence is synthesized)
ggtggagtgtgtttcaggtccactaggacaggtcagtccccatcttccctgaacgcattactgttcccttcattagtctctccctcattcttccttatttcttcatctaagtgcactggc

SEQ ID NO: 1024649 - DNA, 120 bp, Artificial Sequence
  ENSG00000171889_34 (sequence is synthesized)
cactctatcccggtgtcttttgcagactctccttctctgctgtacctttaaatattgacagtctgtagaacatagattagtgctcatctaattttctccccttatttatatgtgatcaca

SEQ ID NO: 1024650 - DNA, 120 bp, Artificial Sequence
  ENSG00000171889_35 (sequence is synthesized)
tccattcccatgccctgattaccagaaatgcaataaagaatcttaaattaatacctatgcccatggtatttgttcattctaggccagcattcccagctgccaataagacctctgcacttt

SEQ ID NO: 1024651 - DNA, 120 bp, Artificial Sequence
  ENSG00000171889_36 (sequence is synthesized)
catgtctcctgggcgctttgggaagacatccatttttttttcccttcccagcatcatttacacctaaagattctggtgtgagaacataattttcctttacttctctctgaagcacttaat

SEQ ID NO: 1024652 - DNA, 120 bp, Artificial Sequence
  ENSG00000171889_37 (sequence is synthesized)
ataattgaaataatataaacattagtatggtttttatgtctccttccctcttagactgagaattccaacacagcagaaactgtgtttgctctagtcacctgtattacttgaaggaatttc

SEQ ID NO: 1024653 - DNA, 120 bp, Artificial Sequence
  ENSG00000171889_38 (sequence is synthesized)
tacagtctgccacttacttagttcataaatataatgtgaatggaatgtatgaataattaaattttgcaatcctttcttcaatttggcttaggttttagaataaacaaaatgaaaattttc

SEQ ID NO: 1024654 - DNA, 120 bp, Artificial Sequence
  ENSG00000171889_39 (sequence is synthesized)
ggcttaggttttagaataaacaaaatgaaaattttctttgataaatatttaacaaatcaaaactgctaatttaataacattcaatggtgaatatattttgtaaatgttaatacaatgtga

SEQ ID NO: 1024655 - DNA, 120 bp, Artificial Sequence
  ENSG00000171889_40 (sequence is synthesized)
taaatacaatagatgcaaaatagtggaaataaataaataacatcaggggagtcatctcttagagtcccatgccgctggagctaaatgttttgaacacatacttgcttaatatactgatga

SEQ ID NO: 1024656 - DNA, 120 bp, Artificial Sequence
  ENSG00000171889_41 (sequence is synthesized)
agtatttgctgaatttaactcaaccaattcagtaactaaagcaaaacatccaagatcatatgtgaaagtgtgacatggcagattagtcaatgagaattattttaagatgactccatgtct

SEQ ID NO: 1024657 - DNA, 120 bp, Artificial Sequence
  ENSG00000171889_42 (sequence is synthesized)
ccattcttacttctcaatctttcctgtgagtttgttgatatagagaaggatctcatgatttccactctgacaacttcccaggcacagtcactgtttcttctctttcaggtagagacagat

SEQ ID NO: 1024658 - DNA, 120 bp, Artificial Sequence
  ENSG00000171889_43 (sequence is synthesized)
tctctggaagtaccttctcaaggccagtgtagagctcccaatcacccagcagattctccctctcccactgcccgcaccaagcaggtctccaggtgttccagctgctgatgaagtccagtg

SEQ ID NO: 1024659 - DNA, 120 bp, Artificial Sequence
  ENSG00000171889_44 (sequence is synthesized)
tggagttggtccaggagggtcgtgttccaggcagcagaggagcgctctgtgtggaagaggctgaagatctgctgcagcatctcatggaggacagacagggcctgggcctgctgcaactgg

SEQ ID NO: 1024660 - DNA, 120 bp, Artificial Sequence
  ENSG00000171889_45 (sequence is synthesized)
ctgtcatacacatctccaggggaaacctgaagtctcttctgtccttgagacacaagaaaggggagatccatttcatttggcccagaagcaccaacgtcttccttcctgtcagaccatggt

SEQ ID NO: 1024661 - DNA, 120 bp, Artificial Sequence
  ENSG00000171889_46 (sequence is synthesized)
tctgagtcaggtcacatcccagagatcaaaaagagccacagctgcacacaactaggaccaccactagagagtgaaggcaggccactgggaaatgagggagctgctggcctggtggagctg

SEQ ID NO: 1024662 - DNA, 120 bp, Artificial Sequence
  ENSG00000171889_47 (sequence is synthesized)
gggtctgagtgtaatttggaacctaggttctctcaagacattcactatgcatggcttttaacaggaaacaaatagttttcattttctgcattcctctacacttatttccctttttattat

SEQ ID NO: 1024663 - DNA, 120 bp, Artificial Sequence
  ENSG00000171889_48 (sequence is synthesized)
ttttttattcttcatatgacctaagaagaaacatcactccatactattaattttgcaatagaagtctaattttcctagtaaactttagaggtgtcaatcaaaatggatatttatcaattg

SEQ ID NO: 1024664 - DNA, 120 bp, Artificial Sequence
  ENSG00000171889_49 (sequence is synthesized)
catgagaaacatctttgtcctaaaggcctaagcgtatatatgtatgtaaatcacacacacacatgcacgcatgcacacactattttttaatatataaacattgctttttctgttcttgga

SEQ ID NO: 1024665 - DNA, 120 bp, Artificial Sequence
  ENSG00000171889_50 (sequence is synthesized)
aaagattttgagccctgatcctaggctctatttttaccctccatactttacataggaaatcagactccctcacctctatgggtgtatgaagttagggatataccagaccatctatggcat

SEQ ID NO: 1024666 - DNA, 120 bp, Artificial Sequence
  ENSG00000171889_51 (sequence is synthesized)
agattgatgggtattggtgaatgaacttctgtgaaatttctcttccttctaaaatgcatttattgaggtccatgaggccgtggttcatgggggtcacaaagtcaggattaatgcagacca

SEQ ID NO: 1024667 - DNA, 120 bp, Artificial Sequence
  ENSG00000171889_52 (sequence is synthesized)
ttgctgtttttttcaccatttcttactggtggactaagtgctcctcaggctgtgtcaattccctcaggaagaatcctggctgtttttcaggtgcatataggtgtagagattctaattcca

SEQ ID NO: 1024668 - DNA, 120 bp, Artificial Sequence
  ENSG00000171889_53 (sequence is synthesized)
agataatgttttccaacatcacctcactcacaaggtagttatcacatccactaacactctctcctatagagtcacaaagtagcctgaatccaaaatcttccagacagatttattccctga

SEQ ID NO: 1024669 - DNA, 120 bp, Artificial Sequence
  ENSG00000171889_54 (sequence is synthesized)
aaacaggctcaccacatcctgatgacttcagaattcaacccctgaggaatgtcttgtttctttgctgccaaaataatctatcttctaaggcccttgcctttgtccctagagtgtttgtgt

SEQ ID NO: 1024670 - DNA, 120 bp, Artificial Sequence
  ENSG00000171889_55 (sequence is synthesized)
gagggaccctagccctcagtgatggcctcttcctctcctgagccatgttcctaggtatcaaaagtctcaacagtcctccaatgctgatagcaaaggcttgttttgtctaaggaggtagag

SEQ ID NO: 1024671 - DNA, 120 bp, Artificial Sequence
  ENSG00000171889_56 (sequence is synthesized)
gacttatgcaactgcaatcattttaccttccttagtcaagtaattcttattttgcgaagtacagtttttattgatgaagacctttacttaaaccactgaaaacttgttatgcttgaagtt

SEQ ID NO: 1024672 - DNA, 120 bp, Artificial Sequence
  ENSG00000171889_57 (sequence is synthesized)
tctgaggtggacacaggggattcagtaacaatattttcttttattacaacctaatttacagaaactagtgacctaaagttattttatacagtcagcatgattctaatggagtctttttct

SEQ ID NO: 1024673 - DNA, 120 bp, Artificial Sequence
  ENSG00000171889_58 (sequence is synthesized)
gtgtctgtctcactctgacaatgcagggcagtgaggctcaggttattcagtaagaaagaaatagccttatttccttacttgtttgtgatttttcatgttgaatttttgtaacttcttctt

SEQ ID NO: 1024674 - DNA, 120 bp, Artificial Sequence
  ENSG00000171889_59 (sequence is synthesized)
cggcctcccaaagtgctgagattataggtttgagccaccatgactggccgaatttttgtaacttcttttcacatagtggtttactgggtaaggtgtatcttgcttctcctacatgatatt

SEQ ID NO: 1024675 - DNA, 120 bp, Artificial Sequence
  ENSG00000171889_60 (sequence is synthesized)
atgatattcttatttatgatgaattaaaacaaataaagaaaagtaaaagaaaggcaaaggaaccatattgttcttctccataattttcaagatttcagattttttgtctctcatttcaac

SEQ ID NO: 1024676 - DNA, 120 bp, Artificial Sequence
  ENSG00000171889_61 (sequence is synthesized)
tttcctagaaagcaaacctcaacaattgcttatatattaaaaacaaaacaaatataagcctgaatatcaggaagtaagagaagtgactttctgctgacaaaatagcaaaacatatgttag

SEQ ID NO: 1024677 - DNA, 120 bp, Artificial Sequence
  ENSG00000171889_62 (sequence is synthesized)
caaaattcagtgcagcaaaattagagactagggactctgtcccaggggaaggatgaatgtcattgttgaggtacacaaaagcaagggaaacggctgcttctgccagagcctcacagaaga

SEQ ID NO: 1024678 - DNA, 120 bp, Artificial Sequence
  ENSG00000171889_63 (sequence is synthesized)
gcaactcctgggtcaatggattgtcctcagctttgcaagaccagccacctgctcttctttcattgaatgcagatgttatcacctctgagttgagctgtaagtgccaaaaaaaaatatttt

SEQ ID NO: 1024679 - DNA, 120 bp, Artificial Sequence
  ENSG00000171889_64 (sequence is synthesized)
gtatgagcaagatggaaaaacattatgcacttcccacaccacagcagtgaatgctttcaaaaggctacttaccaaaggaaaccatgaagccagaaccacaacagaacagaaagcagctct

SEQ ID NO: 1024680 - DNA, 120 bp, Artificial Sequence
  ENSG00000171889_65 (sequence is synthesized)
gtgtgaatgggcagaaggataaagggagtgaatgatcaaggaaaccctggtgatatgagactgcatcctggaatgctgagagccagggaaggaatgtaccaggtgccagaatcagtcaat

SEQ ID NO: 1024681 - DNA, 120 bp, Artificial Sequence
  ENSG00000171889_66 (sequence is synthesized)
aaacatcatgtgtcttctgcagttcaaactagatgcttcttctcctatctcaggaaaaggagcagccaccattccctgactgcatataaataggacacatctttgaaatgaggattgaca

SEQ ID NO: 1024682 - DNA, 120 bp, Artificial Sequence
  ENSG00000171889_67 (sequence is synthesized)
atttttcagcctctctagaattctcattttcttaatctccttccattggaggtccgttactaaaatataggacatagttcctaagaattttataaaaagacaaataatattaccatctac

SEQ ID NO: 1024683 - DNA, 120 bp, Artificial Sequence
  ENSG00000171889_68 (sequence is synthesized)
agctgtatgaagaaaaataggaaaatacctaccatagtttaactccttattcgataaaagatattatcgtaggtgctttaaaatgcatgtgttcctttaatactcacaactatataaata

SEQ ID NO: 1024684 - DNA, 120 bp, Artificial Sequence
  ENSG00000171889_69 (sequence is synthesized)
ttttgaaaccattttatttatgagaaaactaaggctctatgagaaaactaaggctcaaagagattaagcagaatgatcaacaatacacctacctcccagcagaatgaaatttcagtatca

SEQ ID NO: 1024685 - DNA, 120 bp, Artificial Sequence
  ENSG00000171889_70 (sequence is synthesized)
aattctttaatgtaattgatgggtgattttgtcagttttgtattccagatttctgtcataattgctaaatctccttttattcatgaattatacataactcttccttgctctctgaatatg

SEQ ID NO: 1024686 - DNA, 120 bp, Artificial Sequence
  ENSG00000171889_71 (sequence is synthesized)
cgtggttcatgtattttcacttgatgttgaccagtttttttctttaccttacgtattgagaaagaaagtctctgattgtttcccacttttattttgtgaaggatgtttgtcagtctttat

SEQ ID NO: 1024687 - DNA, 120 bp, Artificial Sequence
  ENSG00000171889_72 (sequence is synthesized)
gtccatagtaattcggttctttctggattgatctaagactacaatattcatgaaatcaggaagaattaccaaagtgtaacataaaagaattcttatatctagcactacaagaaattaaga

SEQ ID NO: 1024688 - DNA, 120 bp, Artificial Sequence
  ENSG00000171889_73 (sequence is synthesized)
tggattgtaaaggtgcagaagaactgtagtaaaccagtgtgacaatgatgcaagttaacaacaaataaggccaatacttccaggtgtcattatattatcatcattaattatttcggtgaa

SEQ ID NO: 1024689 - DNA, 120 bp, Artificial Sequence
  ENSG00000171889_74 (sequence is synthesized)
ggatcgaattagttatctcttactccctaacagatgaacagaaactaggtagcttactgatagccaaagtagtattaattaaaacaataataaattataattgtaaataatatatcatga

SEQ ID NO: 1024690 - DNA, 80 bp, Artificial Sequence
  ENSG00000171889_75 (sequence is synthesized)
tacatcagttacatgaaatctatccagaaaaatattaataaaggaaatactatgcacagaaaaagtaactcacattcttt

SEQ ID NO: 1024691 - DNA, 120 bp, Artificial Sequence
  ENSG00000255750_0 (sequence is synthesized)
gagccaaatgcagtgcttgcttcctatctgtggtccattgcatagcagtgtgcttgggtgctgcgtaagacaattccccccaacgcctccaaaaaataggacatggtccactgcaggagt

SEQ ID NO: 1024692 - DNA, 120 bp, Artificial Sequence
  ENSG00000255750_1 (sequence is synthesized)
tcataatctaggagtccagagagtccaggctcatcatcccttcagctactccatgtgctactttctctcgcaactttgagcaagaatgttagatcttttgctgggggccttcggaagccg

SEQ ID NO: 1024693 - DNA, 120 bp, Artificial Sequence
  ENSG00000255750_2 (sequence is synthesized)
tgagggagcatatcctgacacccacatagaagacctggtacctatgtttccacatcacaaagcaggccaacaagcacacaaggccgcagaccaaattaagaatcatctggatgagtaaga

SEQ ID NO: 1024694 - DNA, 120 bp, Artificial Sequence
  ENSG00000255750_3 (sequence is synthesized)
acagtttgaaagtgccagtgacgctggtacagtccgtcacatcccggtaaacaaaggtcctgctgagcggctccgaggagggcagtttgcactggcaagagtcgagtgtggtctcacagg

SEQ ID NO: 1024695 - DNA, 120 bp, Artificial Sequence
  ENSG00000255750_4 (sequence is synthesized)
taaactgtgtgagctgcgaatagtggtgggcggcaaaggccacggccagcacacagaccgtcaggcccagggcactcagcagaaagtataacagctgcaagaaagcagaagaaaaccttt

SEQ ID NO: 1024696 - DNA, 120 bp, Artificial Sequence
  ENSG00000255750_5 (sequence is synthesized)
tcttagaaacacaacacccaagacatggaaatagctccatgtttatttattagtgggtagttcttaaaccctgatcacattttcacttgccatccagatgttgggcccttttcaagagtt

SEQ ID NO: 1024697 - DNA, 120 bp, Artificial Sequence
  ENSG00000255750_6 (sequence is synthesized)
gtgacaaccatattagctggactgtggaatgtttttgtctagatattgccagcagtttagatgaatcccaaacaagctagccatccctggatgacatgttgtgcttattttgaactcaag

SEQ ID NO: 1024698 - DNA, 120 bp, Artificial Sequence
  ENSG00000255750_7 (sequence is synthesized)
aacttctgatattaagactgaaacaagactaggaagtaaagaacaggtttttgtaatgcaaacactgtgtgggccaaaattagcaatgatgggtcaactaatagcataagttaatttttt

SEQ ID NO: 1024699 - DNA, 120 bp, Artificial Sequence
  ENSG00000255750_8 (sequence is synthesized)
taaaagactacattcaatgtagtgattgccaaactgtatccataaacatgagaatccccagtaggaggttgctgggagaaaataaattatggctccagaagtcaagtgactcaacgtcag

SEQ ID NO: 1024700 - DNA, 120 bp, Artificial Sequence
  ENSG00000255750_9 (sequence is synthesized)
cttcatcgcctgtgaaacttaccccaagcccaacaacgaccatgtgattcctgagcctgaaaaaactctaaatggttcctcagtcaccaaggttttgaacactgttggcctccagattag

SEQ ID NO: 1024701 - DNA, 120 bp, Artificial Sequence
  ENSG00000255750_10 (sequence is synthesized)
ctttgggattgaaaaagtctggttaaagttctcgctctgctgctacagggctgtgggaactctgaacaatttagggatttagcttacacctaaaatattctgagcaaaacttgtgggtgt

SEQ ID NO: 1024702 - DNA, 120 bp, Artificial Sequence
  ENSG00000255750_11 (sequence is synthesized)
atctaggagtccagagagtccaggctcatcatcccttcagaagaaagaatcttcaggcctctgctcttgtgagagtaatttctcttaacaccgacagtgcagcctactccatgtgctact

SEQ ID NO: 1024703 - DNA, 120 bp, Artificial Sequence
  ENSG00000255750_12 (sequence is synthesized)
cttaatggtccacctgctgagactctaggtaaggctcagagtccccagcttttgagactagtacacatagttcttagtgcaagaattacattaccacagtcaaaagttgctctctacaga

SEQ ID NO: 1024704 - DNA, 120 bp, Artificial Sequence
  ENSG00000255750_13 (sequence is synthesized)
gaacaattctggtaaatggacacttcacaaagtaatattagttccagtcatttccaggttcagaggaaagtagctctgagaagatgatgcccttcccccaccttcccttatatataattc

SEQ ID NO: 1024705 - DNA, 120 bp, Artificial Sequence
  ENSG00000255750_14 (sequence is synthesized)
ttgagaggcaatcatctaaagcatttggcaagtgatccacttacggagccaagctaagggagctgaagagaagaggccgccgccccaacccaggtgttgttagttatctagccttttgca

SEQ ID NO: 1024706 - DNA, 120 bp, Artificial Sequence
  ENSG00000255750_15 (sequence is synthesized)
aagcctcttccgtttctactctgctctttaagctatttcatgccttgaagatgtctctaccagggaaaataaagagattcagctcttcccccacctcctgcctgtctccaagacagagtg

SEQ ID NO: 1024707 - DNA, 120 bp, Artificial Sequence
  ENSG00000255750_16 (sequence is synthesized)
gggctgatgactggaggtgggaaggactagaggaagatgccacaaaatttagcaactgggcctgaaattcaccattcacaccatcaaactggactaacaggaaagaagattatgtaagga

SEQ ID NO: 1024708 - DNA, 120 bp, Artificial Sequence
  ENSG00000255750_17 (sequence is synthesized)
ccagactcagcctcctcagacaaaaaatcccactctgttcccaggccggagagcctcctgggctggaattgctcaagcctcagctcacagatgagtcactgtattcatttgctccacaga

SEQ ID NO: 1024709 - DNA, 120 bp, Artificial Sequence
  ENSG00000264449_0 (sequence is synthesized)
cgcggggtgcctcctcggcctcggctctccccgccccggggcgccccgagaccgccgcctgcctccgcgggcagctttgttcttctttcctccaactacctgtctgagccgcgggcccca

SEQ ID NO: 1024710 - DNA, 120 bp, Artificial Sequence
  ENSG00000264449_1 (sequence is synthesized)
gaggccccaaagagaggcccggagggtctccccagcagcatccgaggggcgctctcggggagctaggggccagagtccgcggtccctccgtgcctgcctccctcccctcgtgcctcggtc

SEQ ID NO: 1024711 - DNA, 120 bp, Artificial Sequence
  ENSG00000264449_2 (sequence is synthesized)
ttttgttgcctctactcctcggcacggcgcagcctgggctctcttccccctcccgcttgggagtttgcagtgtggacgctcggcaagcacaataacagcactatgggaaggaggaagaat

SEQ ID NO: 1024712 - DNA, 120 bp, Artificial Sequence
  ENSG00000264449_3 (sequence is synthesized)
ttaatgaaagcttgtacctgctggctgaaactaagcagcctatttataaactgctctgaaatgccagggagcaggtaactcccaaatgaaaaagcaagcaggtctctcccaccatcagtg

SEQ ID NO: 1024713 - DNA, 120 bp, Artificial Sequence
  ENSG00000264449_4 (sequence is synthesized)
ggatggctgagctgtctgtggtgcctttgcatcttgctgcttcgctgaccctgaaggtctgccccagcctcaggcgaccaagcctacagcgacctcaaggagcagctgcctcatcagtgc

SEQ ID NO: 1024714 - DNA, 120 bp, Artificial Sequence
  ENSG00000264449_5 (sequence is synthesized)
ttgtaggaggctcaggacggagaggggtctgatgcccccattttgttcccttcttttgtcttcttttgacttccctagggaagggaaaatgtgctatgaagttaaaagaggaatgaagga

SEQ ID NO: 1024715 - DNA, 120 bp, Artificial Sequence
  ENSG00000264449_6 (sequence is synthesized)
aaaagagagaatggagggtcttctaaaatgtgtttatttctcaaaagccacatagtgcttcacaaattcacattaatctaacacttttgcactgtcccctccctcactccagccccaacc

SEQ ID NO: 1024716 - DNA, 120 bp, Artificial Sequence
  ENSG00000264449_7 (sequence is synthesized)
atggggcgaagcccagcagtgtgggaatgtactcgcaaaccccacacagacccgtggccacgtgtggatgcactcaacaggagccagctatatttcagttcttgctacttgtatctgtct

SEQ ID NO: 1024717 - DNA, 120 bp, Artificial Sequence
  ENSG00000264449_8 (sequence is synthesized)
ttagcatcctcctacaacgagcaacacagataaataaatccccaaacctcaccttggcactggttccagctcctcccctctccacctttagcagccattatcataaatcacattctttga

SEQ ID NO: 1024718 - DNA, 120 bp, Artificial Sequence
  ENSG00000264449_9 (sequence is synthesized)
tatatctttctcaatgtctccctcgctcagattgccttttagtaaaagttcataaaacaaaacagaatttactaaaaataggttagtggaaaggtgagcaatacaacttctgaaaaaaaa

SEQ ID NO: 1024719 - DNA, 120 bp, Artificial Sequence
  ENSG00000264449_10 (sequence is synthesized)
attaaaccagtgtatgatttggggatttagtgaagtgaactgataaactgggacattcaaatctattatgccaatattttctctggcaagagattgcttgctgtctttgcatgtagtttc

SEQ ID NO: 1024720 - DNA, 120 bp, Artificial Sequence
  ENSG00000264449_11 (sequence is synthesized)
ttttacttagatccagagacgaagctctgctaatgcatattacaatatataattaagcataaatacattaaaatattaaaacactgtaagttattagaaataatgaaatttcttgcataa

SEQ ID NO: 1024721 - DNA, 120 bp, Artificial Sequence
  ENSG00000264449_12 (sequence is synthesized)
agtcattgcatgaattacttaggtgcttgtcagatccctaatcagaaagagctgccagagatggcagagacttcacttgccaagacaacgtagtccatcagcaaatcagtggacttggga

SEQ ID NO: 1024722 - DNA, 120 bp, Artificial Sequence
  ENSG00000264449_13 (sequence is synthesized)
aggaggtggttttccatttaagctgcagcatcacagaaagttaccctctaaagtcattcttagatgaatacttctatgtcatacacagctaaattccaacagtcaaaacaattattctaa

SEQ ID NO: 1024723 - DNA, 120 bp, Artificial Sequence
  ENSG00000264449_14 (sequence is synthesized)
gctaattaaaatacaaataaaattttaggctatgggataacagatcatgagataaaaacaattctacgattgttggaggggccctgtatgatatattcagatcttgctcatctcttccaa

SEQ ID NO: 1024724 - DNA, 120 bp, Artificial Sequence
  ENSG00000264449_15 (sequence is synthesized)
atctttgtttttttaaatagaaaatgtaaattatatttagcttaagtctatgtttgaatttaaatcactaaaaaaatctactttctataaagcatttggagcaatcttgcatataatact

SEQ ID NO: 1024725 - DNA, 120 bp, Artificial Sequence
  ENSG00000264449_16 (sequence is synthesized)
catttgcttagctaactctttttttctgtagataagtaaggtaaatgttaggccactagacaaaattatcatacatcttcaatcatcaatgtccagagtaatgagtcaatatatgtatgt

SEQ ID NO: 1024726 - DNA, 120 bp, Artificial Sequence
  ENSG00000264449_17 (sequence is synthesized)
acgtatgtatatgcatttaaaaaaatcactcttttgacacatttcacttttctttgtaagtaatataggtgggctagatcaggggttgtcaagtcagattagaatcatctgaggagatgt

SEQ ID NO: 1024727 - DNA, 120 bp, Artificial Sequence
  ENSG00000264449_18 (sequence is synthesized)
gggcatctggcgatgcccataccaattaaaagagtttctaggggtgtggatggaaagtgggaactggtagttttacaaggtccctgtcaccagggttgagacaccatagcttagagtcct

SEQ ID NO: 1024728 - DNA, 120 bp, Artificial Sequence
  ENSG00000264449_19 (sequence is synthesized)
gtaacttgtccttaccaccagttcattctcttctctccttctgtgaggagcgcttctatactaagaccctgaaggtaactagaaagagacaaactccaccaagtcatccagtggtgcacc

SEQ ID NO: 1024729 - DNA, 120 bp, Artificial Sequence
  ENSG00000264449_20 (sequence is synthesized)
tttgaggacttccactactcgcctaggttctatgaggccagtatggagacagagaggtgggggcctgtggggaactggaggctacaggccccacttctaggagatctcccagctccagcc

SEQ ID NO: 1024730 - DNA, 120 bp, Artificial Sequence
  ENSG00000264449_21 (sequence is synthesized)
cactgtgccatcaggaatgtgggcccatggctgcctggctttcaagagaagctagaaatctgctttctatgtgaaaacctcttgatttttaaatgcttgcaatgaattaaaaatttatca

SEQ ID NO: 1024731 - DNA, 120 bp, Artificial Sequence
  ENSG00000264449_22 (sequence is synthesized)
aaactgtgttgtccaaacaatcatgtatgtgaccaaacatggcctacaaaatgctaatttactacctctgaactagcacaatatcctgaaaaaaggcataaataaaaaaatattggcaga

SEQ ID NO: 1024732 - DNA, 120 bp, Artificial Sequence
  ENSG00000264449_23 (sequence is synthesized)
tttctctgcaaaacagcggtaagaatgatcctacttcaatagagttgctgtgaggattcactgagatcatgtgtaccaagctcctacaatagtactgaacccacagccatggatcaagac

SEQ ID NO: 1024733 - DNA, 120 bp, Artificial Sequence
  ENSG00000264449_24 (sequence is synthesized)
aatcagtgatagccaagaggatgggaagagaatattaagcctggtgctctgcaaattaatacttgcaggttgggaagccagatatccacattatctcacatcacatcactgagctctgtg

SEQ ID NO: 1024734 - DNA, 120 bp, Artificial Sequence
  ENSG00000264449_25 (sequence is synthesized)
gcccagttctgactacatgttagaagcagaagtctgcaggggatggcttctgagaaaacttgtatttattatttaaatttaaccttctagcctgggaataaattccagcttgcttagaac

SEQ ID NO: 1024735 - DNA, 120 bp, Artificial Sequence
  ENSG00000264449_26 (sequence is synthesized)
aatacgctggacatgcgacaatggtgctgagtactttgggggaagatcacaacagtcctggtagcagtgtcacagcaaaatatttcagaggtaccagatgagctagctccaaggcaaatg

SEQ ID NO: 1024736 - DNA, 120 bp, Artificial Sequence
  ENSG00000264449_27 (sequence is synthesized)
aggcaatattatgtttaactgtttgttcggaaacttcttttattaaaaaagattttaaatattaatgctattttcaatacaggtgtgataacactcaataaagcatggtgtacttgatat

SEQ ID NO: 1024737 - DNA, 120 bp, Artificial Sequence
  ENSG00000264449_28 (sequence is synthesized)
gaaatgcccatttcaactcagcatctgccgacaggtctacctaatcttccaaactctgtgtaaatcctggatccaccatttaccagctgtgtaaccctggacaacaattccatctttctg

SEQ ID NO: 1024738 - DNA, 120 bp, Artificial Sequence
  ENSG00000184991_0 (sequence is synthesized)
tggccgagaaggagacctccgtgggggtgcgatagcggtggtctctcgcctgtcttctctgtaggacccacgggatagtcccatgatcctaagagaaggcagacatgagccagcctgaag

SEQ ID NO: 1024739 - DNA, 120 bp, Artificial Sequence
  ENSG00000184991_1 (sequence is synthesized)
aaacctcaaggagagccccaagagtaaatcacgaaatccctaagaatccaaaaggatctgcaggacgcctcaggcctgcctacacgttgtaggggtgaagttgctggaacccattctcca

SEQ ID NO: 1024740 - DNA, 120 bp, Artificial Sequence
  ENSG00000184991_2 (sequence is synthesized)
ttcagcagattgtatcctcaccccatgtgaccttattgctgctcagactctatgttccaggataaaatcccaagaagatggagaagtgcatccctcatgatgtgaagcatgtgcgcagct

SEQ ID NO: 1024741 - DNA, 120 bp, Artificial Sequence
  ENSG00000184991_3 (sequence is synthesized)
gggaaccaaattcgagagctcacagtttgaatagaagaatccaaagctacaacagcagcagcagctatagctgtgaccgctatgaggcccgtgatgacagctattaagggagactcacca

SEQ ID NO: 1024742 - DNA, 120 bp, Artificial Sequence
  ENSG00000184991_4 (sequence is synthesized)
ccaaggggattaccaccatcgtagctaccattagattactggtggtcagcagcttgtgctgagaccgcaggttctcttcttcagtgcgagctagtctcttcatccgcccccaggtcggtg

SEQ ID NO: 1024743 - DNA, 120 bp, Artificial Sequence
  ENSG00000184991_5 (sequence is synthesized)
gagttgcttggtaaagttgaggaacccaatccatccctcaccaggttgtatcctcaccattatctgaccttattgctgctcacactctatgtcccaggatgaaataccaggatgatggag

SEQ ID NO: 1024744 - DNA, 120 bp, Artificial Sequence
  ENSG00000184991_6 (sequence is synthesized)
tgccccctcatgacttgaagcacctgcttggctgggaactgaatttgagaatgaaatcccaagacaatggaggagtgtcccctaatgacattaagcacgtgcttggctgggaaccgaatt

SEQ ID NO: 1024745 - DNA, 120 bp, Artificial Sequence
  ENSG00000184991_7 (sequence is synthesized)
ggaggggaggtagtttggcctccggcgggtctcaaccagactctcaattcactgcagattcacgatccacagaagaataaagaacacagagacccacagtccaagcagagccacagacac

SEQ ID NO: 1024746 - DNA, 120 bp, Artificial Sequence
  ENSG00000184991_8 (sequence is synthesized)
taccgaaaaaaaagaagagctgcaatgtgttagccactctactataagcagactccgcttacagacatgcatacccacacatacacctgcaaatacacaaagccacacagtcaggcagac

SEQ ID NO: 1024747 - DNA, 120 bp, Artificial Sequence
  ENSG00000184991_9 (sequence is synthesized)
atccaacacttgcaacactccaacagaaacacagcccagcagctcctgaggctgaatggctcttcaggaagccccacatgggagagagcaaccccagggaacacaggcgggctgtatcta

SEQ ID NO: 1024748 - DNA, 120 bp, Artificial Sequence
  ENSG00000184991_10 (sequence is synthesized)
gtaatcaccgtgggataagtttcaaaaatactcacccttacaatgtctaattaggcctgaggcatcctgtagatccttatggatccttagggattttgaagttcattcctgcggctctgc

SEQ ID NO: 1024749 - DNA, 120 bp, Artificial Sequence
  ENSG00000184991_11 (sequence is synthesized)
ttgatgtttcttcaggctgactcacatctacccactcctagattcatgggactgtcctgtggatctctgagacaagacaggcaatattccatcgccaacacacctccagggagttctcct

SEQ ID NO: 1024750 - DNA, 120 bp, Artificial Sequence
  ENSG00000184991_12 (sequence is synthesized)
tctctgtcaagccacagggacttgtcactaggcaatggtggcattcactgtgaagctagcaatagctccctgctcaggactggtgctttgaggctatcacaggcgcattcatgaggcagg

SEQ ID NO: 1024751 - DNA, 120 bp, Artificial Sequence
  ENSG00000184991_13 (sequence is synthesized)
cttgggtgcctggctgtcaaaactgtcagcctgcctaagcagacaaaagtggtacaggcagagctagactggtattgagaaaaaggctgtctgcaataacctactgtgggaccctaaaag

SEQ ID NO: 1024752 - DNA, 120 bp, Artificial Sequence
  ENSG00000184991_14 (sequence is synthesized)
tcttgaccttattgaccctctgggtcatctcgctggtcaggtcccggtggaggaggaggtatttcgagactgtgaggtggtcgctggagatggctcttctgtctccactcctgaaagagt

SEQ ID NO: 1024753 - DNA, 120 bp, Artificial Sequence
  ENSG00000184991_15 (sequence is synthesized)
ctgtgtgcaagaatcaggtccgacggggattggaatagagtctggtgagtagttgagggttctttatgtgatggaatcatacctaagacctcagagaataaaaatggctcatcactttac

SEQ ID NO: 1024754 - DNA, 120 bp, Artificial Sequence
  ENSG00000184991_16 (sequence is synthesized)
ttcatgatccacagaaaaataaaaaaacatggagccccagagcccaagcagagccaaacagacaagcaaccaaaataaaagttgaagttgtgggatctcatccaattcccaccagattgt

SEQ ID NO: 1024755 - DNA, 120 bp, Artificial Sequence
  ENSG00000184991_17 (sequence is synthesized)
atcctcacccctgtctgaccttattgttgctcacactctatgtcccaaaatgaaaacccaagacgatggagtattgcccccttatgatgtgaaccaactgcttggctgggacctgaattt

SEQ ID NO: 1024756 - DNA, 120 bp, Artificial Sequence
  ENSG00000286325_0 (sequence is synthesized)
tggggaaatggaagaggactccagccaacagcccacaaagaacaaattcctgctgagaaccatgtgtgaacttggaagccattacctcccagttgagctttctgatgagagcatagccct

SEQ ID NO: 1024757 - DNA, 120 bp, Artificial Sequence
  ENSG00000286325_1 (sequence is synthesized)
ggccaacagctccactgcggcctgaggagggccctggagccagaggcacccacacagctgtgtccagatccccacccgcagaggcagcaagtcccaaatgaggcctggagacaaatactt

SEQ ID NO: 1024758 - DNA, 120 bp, Artificial Sequence
  ENSG00000286325_2 (sequence is synthesized)
acagaaaacatgacaccgagaagaggaacttttaaaaaacgtatcaaggactcaaatcaatgtgcgcaaaaaacaaaacttggagaaaaagcaacattcctgatatcttttgcacgtgag

SEQ ID NO: 1024759 - DNA, 120 bp, Artificial Sequence
  ENSG00000286325_3 (sequence is synthesized)
tgtgactcttttgtaaggaataatccctgcttcaatggggggaagtcactccccactgtactgttggattctgaatgtccttggttcatgcatgaacacattgtcattgttcgagttcct

SEQ ID NO: 1024760 - DNA, 120 bp, Artificial Sequence
  ENSG00000286325_4 (sequence is synthesized)
aggcatggggctcctgggttggggatttacatttattcggcttatagatgtggctgaaaggttttcccagtggccatgccagtgatgccacactgccagtccccgctgttccacattcat

SEQ ID NO: 1024761 - DNA, 120 bp, Artificial Sequence
  ENSG00000286325_5 (sequence is synthesized)
cttgccagctggggtttgctgctggacatttcacggggccacatcgatgggtgggtggtggttctggggccatatcagtggatgggtggtcaccgctgagtttcattttgttttgttctg

SEQ ID NO: 1024762 - DNA, 76 bp, Artificial Sequence
  ENSG00000276250_0 (sequence is synthesized)
actctcatgagatctaatggtattttaaggggaaacccctttcgcttggctctcatccatgattgtgaggcctccc

SEQ ID NO: 1024763 - DNA, 120 bp, Artificial Sequence
  ENSG00000276250_1 (sequence is synthesized)
gtctttatcagcagtgtgaaaatggacgaatgcactaatacaacaggctccctggtcccccaccttctcggactaagtcctctgcagtgttgactccgtgttctatgagcttctggcagt

SEQ ID NO: 1024764 - DNA, 120 bp, Artificial Sequence
  ENSG00000276250_2 (sequence is synthesized)
catctagtggtttaatggtctcctgttcaatggtgtccacctcttgcaaaagggtcaccaatcgctcatccaggagctttccaagggttccctttaaatcattaaaatgctgtttgagaa

SEQ ID NO: 1024765 - DNA, 120 bp, Artificial Sequence
  ENSG00000242154_0 (sequence is synthesized)
agattgcctatccaggttattcaccaaactcggcacttaatgacttttagctggttccaaaaattgattctaacatcaaaggataaagatttatgaccaatgaacatattcaaatcctaa

SEQ ID NO: 1024766 - DNA, 120 bp, Artificial Sequence
  ENSG00000242154_1 (sequence is synthesized)
agaagaccttggggtacaatggcagcattgttggggaagagaaaagacacaccataatcttttcagtgcactgggcttctaagaaacttaatcagaacctgacggatcatctctgaatac

SEQ ID NO: 1024767 - DNA, 120 bp, Artificial Sequence
  ENSG00000242154_2 (sequence is synthesized)
agaaccaagatgtttaagtagaaattttgaaacctaagagaccacatcactgtcatcttcttggtcaatacttgaaccaggcaaaaaaaaaaccaacacttcctttgaaatctcatgaag

SEQ ID NO: 1024768 - DNA, 120 bp, Artificial Sequence
  ENSG00000242154_3 (sequence is synthesized)
gaaagcagtgaggagtcttctacccttgaagcagcaggatgtactccacctgaacaaagaaaaaacagtcatgaagaaaaaacatgttggctaactgctatcctctcgttggcaagatgc

SEQ ID NO: 1024769 - DNA, 120 bp, Artificial Sequence
  ENSG00000276251_0 (sequence is synthesized)
tccagcatgaactccatgtcctccaggaagccctggtggacttgggcagacctggggacacgtccagcctcctggcaagatgggggtaacaggagtgtgtataaaggggaaggcaagaat

SEQ ID NO: 1024770 - DNA, 120 bp, Artificial Sequence
  ENSG00000276251_1 (sequence is synthesized)
gtgcccttggtggagcagtgaaaagaagccctcatgtgacaagtgttttgctcctaacccacctcctctggtgacatcttctgggttaactgctcttgctgatctctgcacataaaccaa

SEQ ID NO: 1024771 - DNA, 120 bp, Artificial Sequence
  ENSG00000276251_2 (sequence is synthesized)
gctaactgtgagaggcctttcatttctagtttaaagcaaggagaccacagttccttctgaacactcacccccaaggagataaggagggcgtcccatgagcaacactgtgtgttaaagatg

SEQ ID NO: 1024772 - DNA, 120 bp, Artificial Sequence
  ENSG00000276251_3 (sequence is synthesized)
tcggtcacatcctaacctcaaccccctctctcctcccacataaaaggaggctgaaattcatagtaacttcagatggttctttaggacactggcccaccaccttctcggttgctggctctc

SEQ ID NO: 1024773 - DNA, 120 bp, Artificial Sequence
  ENSG00000276251_4 (sequence is synthesized)
caaaacaaagccccctcccttgacccaattccttgtttcttgacgtactggctgttgtgcagtgcatggtaccggcttgaactcggttatgttggcatggcctctggcggtgctcagttt

SEQ ID NO: 1024774 - DNA, 120 bp, Artificial Sequence
  ENSG00000276251_5 (sequence is synthesized)
gtgtggatgagtattttacagctactgtcctatttccagtccccttcctctggacggctatgggatgtgctgtggatgccctctcttaggctggaataaaccaccctaccttctcctctg

SEQ ID NO: 1024775 - DNA, 120 bp, Artificial Sequence
  ENSG00000256315_0 (sequence is synthesized)
ttttttttttttgaagtttgccccagtgtgaaagtctctctgtaagtcaaaaccttagcattattttaatgtactgtgctgtatttaataatcttatgcttcagacattagtctgttacc

SEQ ID NO: 1024776 - DNA, 120 bp, Artificial Sequence
  ENSG00000256315_1 (sequence is synthesized)
atgggaatgacagcagcataaatacaggattatggctatcaagcaggagaaaagaaattatgaataagcctcgttatgttcaataattagcagctacatggaaaaaaacaaaaccatgaa

SEQ ID NO: 1024777 - DNA, 120 bp, Artificial Sequence
  ENSG00000256315_2 (sequence is synthesized)
ctataatttaaaaattcatcctgtccatctcttttttctcctatttatattcttccccagcagaagattggtaactaatgggtaatacacaacattccaagatagattctggtatcttga

SEQ ID NO: 1024778 - DNA, 120 bp, Artificial Sequence
  ENSG00000256315_3 (sequence is synthesized)
gccaacatatcaggagaatggtacagaaaaactgaacattaccagcccctctaccttagctaactgcaaaatgaacaacttccaaggacttgctgctactctcccacaaaatgaaaagtc

SEQ ID NO: 1024779 - DNA, 120 bp, Artificial Sequence
  ENSG00000256315_4 (sequence is synthesized)
tatgtatcaagatgtagaatagtacagctaagcacaaggctcctccccagtcaaagaggagcagagagtgaagatcactatcagtcttctttctttgagtttcagtctcatcatctttga

SEQ ID NO: 1024780 - DNA, 120 bp, Artificial Sequence
  ENSG00000256315_5 (sequence is synthesized)
gaagaggctataattcaaacaaatctctgccataatagctatgggaatactaaacattactggccaagtaaattgctttctgtataagcgttctcttttttttttttgaagtttgcccca

SEQ ID NO: 1024781 - DNA, 120 bp, Artificial Sequence
  ENSG00000256315_6 (sequence is synthesized)
tggcctagagttccatcactaaactgatatgtaacccaaggcaggtcttctttctttgagtttcagtctcatcatctttgaagtgagaataacagagcataaaagtcaaacttgaaccaa

SEQ ID NO: 1024782 - DNA, 120 bp, Artificial Sequence
  ENSG00000256315_7 (sequence is synthesized)
caagtaaattgctttctgtataagcgttctcttttttttttttgaagtttgccccagtgtgaaagtctctctcagaagattggtaactaatgggtaatacacaacattccaagatagatt

SEQ ID NO: 1024783 - DNA, 120 bp, Artificial Sequence
  ENSG00000256314_0 (sequence is synthesized)
atgagttcttgatagtcagtaaatcacagcatacatgcaaggaacaaaggagaaaatgaaatcatttacttggagatgagagaagtcaactttatcagtgaattcattctattttatttt

SEQ ID NO: 1024784 - DNA, 120 bp, Artificial Sequence
  ENSG00000256314_1 (sequence is synthesized)
gtcaactttatcagtgaattcattctattttattttattttacattgtattttattttatttattttattttgacagagtctcgttccgtcaacccaggctggagtgcagtggcatgatc

SEQ ID NO: 1024785 - DNA, 120 bp, Artificial Sequence
  ENSG00000256314_2 (sequence is synthesized)
ctgtctcaaaaaaataaaaataaaaattagtcagattatgggcaagattactgtgccaaagtagaaatgactcttctcagtgctaccaaattaattctagtcagaatcagagtggggaga

SEQ ID NO: 1024786 - DNA, 120 bp, Artificial Sequence
  ENSG00000256312_0 (sequence is synthesized)
cggccgctcctcctctccgccaagggccggttcaggcacaggccccgccgaggctgcccctgacttgagggctcacgcaccgggctgcttgcggctctggactattgtgaataaggccgg

SEQ ID NO: 1024787 - DNA, 120 bp, Artificial Sequence
  ENSG00000256312_1 (sequence is synthesized)
tcggggaagtttctgggcctatttgggcaataggagaaggtcatgggctgtctttccaaaattcacgtccacccagaacccccgaatgagacctatttaaagagaaggccttagctgatg

SEQ ID NO: 1024788 - DNA, 120 bp, Artificial Sequence
  ENSG00000256312_2 (sequence is synthesized)
gaacattaagatgaggccaccctggagcagggtgggccctgaatccgaggctgctgtccctgcaaggtgacgagagggtgcaggcgtggaggagacacatgggggtggggtgaggaacag

SEQ ID NO: 1024789 - DNA, 120 bp, Artificial Sequence
  ENSG00000276256_0 (sequence is synthesized)
taaatttatgtaatttgacaattaatctacctcatgtgcttgcagatatgtattcatttcctaccaccgtagtggaagagatactatccctatctttacaactgatagcatttccaacag

SEQ ID NO: 1024790 - DNA, 120 bp, Artificial Sequence
  ENSG00000276256_1 (sequence is synthesized)
acagtaagctgtgagattctgcttgaaatcacctctcaaacaaataaaaaacagacctgggagacatgctacgctcattctgctgaagaaataggcatcatagctgggaaacggattcac

SEQ ID NO: 1024791 - DNA, 120 bp, Artificial Sequence; identical to SEQ ID NO: 947870
  ENSG00000276256_2 (sequence is synthesized)

SEQ ID NO: 1024792 - DNA, 120 bp, Artificial Sequence; identical to SEQ ID NO: 947871
  ENSG00000276256_3 (sequence is synthesized)

SEQ ID NO: 1024793 - DNA, 120 bp, Artificial Sequence
  ENSG00000276256_4 (sequence is synthesized)
gaccttcatcaccttttgtttcatctcaagacaattctgagggactgttttggagcgtgtctggaaggtgaaccttgaagaagagtgtgggttttgatgtgactcagttgagatctttca

SEQ ID NO: 1024794 - DNA, 120 bp, Artificial Sequence; identical to SEQ ID NO: 947873
  ENSG00000276256_5 (sequence is synthesized)

SEQ ID NO: 1024795 - DNA, 120 bp, Artificial Sequence; identical to SEQ ID NO: 947874
  ENSG00000276256_6 (sequence is synthesized)

SEQ ID NO: 1024796 - DNA, 120 bp, Artificial Sequence
  ENSG00000276256_7 (sequence is synthesized)
tccatttgcagctctagccaagtagatacttggtaggtatagagccgggtttgcgtttatattagcaaaacctatgtcagagttgaagaagtagtcaggaaaaagcgtcttggtcgcagg

SEQ ID NO: 1024797 - DNA, 120 bp, Artificial Sequence; identical to SEQ ID NO: 913223
  ENSG00000276256_8 (sequence is synthesized)

SEQ ID NO: 1024798 - DNA, 120 bp, Artificial Sequence; identical to SEQ ID NO: 913224
  ENSG00000276256_9 (sequence is synthesized)

SEQ ID NO: 1024799 - DNA, 120 bp, Artificial Sequence; identical to SEQ ID NO: 913225
  ENSG00000276256_10 (sequence is synthesized)

SEQ ID NO: 1024800 - DNA, 120 bp, Artificial Sequence
  ENSG00000276256_11 (sequence is synthesized)
tattggttttttacatttaaattatggagcacttcatcatataaaaaacttcaattatatttaaacagtaagtctttggatttttttgccttttaatttccatattacataataatgaga

SEQ ID NO: 1024801 - DNA, 120 bp, Artificial Sequence
  ENSG00000276256_12 (sequence is synthesized)
taaacattaatgttttcagggtactttaaattttagataattactcattgtattcatgtgaaatttgtttttactgcatgtgtgggttggaggacggttttcacttctgattcatcttta

SEQ ID NO: 1024802 - DNA, 120 bp, Artificial Sequence; identical to SEQ ID NO: 913228
  ENSG00000276256_13 (sequence is synthesized)

SEQ ID NO: 1024803 - DNA, 120 bp, Artificial Sequence; identical to SEQ ID NO: 913229
  ENSG00000276256_14 (sequence is synthesized)

SEQ ID NO: 1024804 - DNA, 120 bp, Artificial Sequence
  ENSG00000276256_15 (sequence is synthesized)
caataatctctgagcagacaaaattagttaggtctcataagtgatctcaacctcgcttgatttgcaaatacaaacaaaacttacattatttcttgtagctgcatattgaaaaaagagaaa

SEQ ID NO: 1024805 - DNA, 120 bp, Artificial Sequence; identical to SEQ ID NO: 913231
  ENSG00000276256_16 (sequence is synthesized)

SEQ ID NO: 1024806 - DNA, 120 bp, Artificial Sequence; identical to SEQ ID NO: 913232
  ENSG00000276256_17 (sequence is synthesized)

SEQ ID NO: 1024807 - DNA, 120 bp, Artificial Sequence
  ENSG00000246430_0 (sequence is synthesized)
acatgggaggaatcagttctggtggtttattgcaaaacatggtgactatagttaatgtactatgtatttcaaaacatctaaaagaaaagattttaagtgttctcactacaaagcaatgat

SEQ ID NO: 1024808 - DNA, 120 bp, Artificial Sequence
  ENSG00000246430_1 (sequence is synthesized)
aaatatttgagatgctgaactttttaatacttacattcttaagtttttcaaggcttttctaataagtctggcattcctgcccttggcagtgtgagatggaagatgatgtcgcaagggtgg

SEQ ID NO: 1024809 - DNA, 120 bp, Artificial Sequence
  ENSG00000246430_2 (sequence is synthesized)
gggtaacttcaggccctggaggtccatgcttctgcccaagctgtgtctcatctctgcaggtggagcccagttgacaggaaatgtttctccagaagctgaaaagctgcctggtaaaggcct

SEQ ID NO: 1024810 - DNA, 120 bp, Artificial Sequence
  ENSG00000246430_3 (sequence is synthesized)
ttcataaaatggtctgcgtttgggaccaggaagacagaagactcctcaagaagagaactggaaccttaacccacttcagacttcttcatgtctgaagcttatttccaccatcccattgag

SEQ ID NO: 1024811 - DNA, 120 bp, Artificial Sequence
  ENSG00000246430_4 (sequence is synthesized)
agagggcaaaatagtggccctctgtttgaagcagaagccgtttcacattagatgttgcctatgttccagtggcacataaaatcccacattaaacaagacatcattttgttgtacatcttt

SEQ ID NO: 1024812 - DNA, 120 bp, Artificial Sequence
  ENSG00000246430_5 (sequence is synthesized)
catcattacagttgggtaaggaggttggggagattttgtctctcaccacctctcaggaagttggatgtcaacatatgaacccctcccctctgttaccaagggtgagagatattgtggctt

SEQ ID NO: 1024813 - DNA, 120 bp, Artificial Sequence
  ENSG00000246430_6 (sequence is synthesized)
gccagccaagtatggaactcaatccaaaacaacggacttcttttgtttcgtgtcagttcagcttcctacaaacaaaattaaagcagcattggtttagtaattggaaatgcatatcaaaga

SEQ ID NO: 1024814 - DNA, 120 bp, Artificial Sequence
  ENSG00000246430_7 (sequence is synthesized)
aaagaagcttaactcaaaacagattttcctaaccatcttcaatgtacatgtgtaggagaaatgcattctttatttgtagcagtgcaaatgtcagtgattacaaacatgtgtgtgactgtt

SEQ ID NO: 1024815 - DNA, 120 bp, Artificial Sequence
  ENSG00000246430_8 (sequence is synthesized)
gagaagcagctgggctgagctgctaaaagcacagagaccggggccagactcctcagcctgaaatcctgcttccactaagtaccagctgggtaacttcaggtggagcccagttgacaggaa

SEQ ID NO: 1024816 - DNA, 120 bp, Artificial Sequence
  ENSG00000246430_9 (sequence is synthesized)
cttcccagctaatgacacttccagcctttcgtgtttcaaagtatcacggactttgcaaaagattccaggtttctatggagcagatagtacttttaacaatcaacatgtgcattattattt

SEQ ID NO: 1024817 - DNA, 120 bp, Artificial Sequence
  ENSG00000246430_10 (sequence is synthesized)
cctcctaaggcatacttagacatcaatgcatgctacagcaaggcaacttatctcaccctcaccaagatattctgcactttcagtggcaaaattttaaagaaaaggagacaaaatggaaca

SEQ ID NO: 1024818 - DNA, 120 bp, Artificial Sequence
  ENSG00000246430_11 (sequence is synthesized)
caaattcaatatgactattgtcatccttccctcccaggaagtgtaggaatcatccaaagtggtaaaagagcagcgcttctaaactctgacttcacatggaaaataacgcgactactaaaa

SEQ ID NO: 1024819 - DNA, 120 bp, Artificial Sequence
  ENSG00000246430_12 (sequence is synthesized)
ctgataacaatagcagtccatgccatttgacaggggtgtgtaggagaggtggtgagcaagctgaaatcccttcaggtatttgcagaacttctgagcaaaagctaaagctaaaattaacat

SEQ ID NO: 1024820 - DNA, 120 bp, Artificial Sequence
  ENSG00000246430_13 (sequence is synthesized)
taaatatgcaaagtatttttaacccaacataaattaacaatgttcctatttcaattctattgctcttgggatgactatgtcctttggaaaatgtttaaataacttaagatttccgtcatg

SEQ ID NO: 1024821 - DNA, 120 bp, Artificial Sequence
  ENSG00000246430_14 (sequence is synthesized)
gttgaagttctcccactttatattgtaaatgattacatagtttattagtaattgtgtcccctgtccacccactggtccatttggatgggaaaattttcaaaataacttcataagaaaatg

SEQ ID NO: 1024822 - DNA, 120 bp, Artificial Sequence
  ENSG00000246430_15 (sequence is synthesized)
ataagaaaaatgtggtcaccggtatcatgaggaacttccagacagctcagcacagaaaagttggttttaaagtcctcgaaaacgttactggtaatgagcttccactcctttagtcgttgt

SEQ ID NO: 1024823 - DNA, 120 bp, Artificial Sequence
  ENSG00000246430_16 (sequence is synthesized)
gcatagatacaccacagagtaaggttataaaaataaaagttgtttcaggaaatttcccattgctttattacatgatcaatgagagtaaagagaaatggaagttgacgggataggaatgag

SEQ ID NO: 1024824 - DNA, 120 bp, Artificial Sequence
  ENSG00000246430_17 (sequence is synthesized)
ggacctgctggaagagtgatcacaatatccaaaggaaatttaaaatgcctgttgaaagtgacacactgactcagcattgtcactaacacagaatcaccacaataaaactgccctgccctg

SEQ ID NO: 1024825 - DNA, 120 bp, Artificial Sequence
  ENSG00000246430_18 (sequence is synthesized)
tggctcctggcacctcatgtctctttaggttaagcagagagaggtctgtgttgctttggaacaaggtgcagcctccccctaagctacagagaggctctgagcaaggaccagcccccaggg

SEQ ID NO: 1024826 - DNA, 120 bp, Artificial Sequence
  ENSG00000246430_19 (sequence is synthesized)
tgcagccttgcccaccctccacaggctccagagcagatggggtggctctagagagcaaatggtcaaaacttctagcgctaaatagagctttaacatgtctcagatactagcaaaatagag

SEQ ID NO: 1024827 - DNA, 120 bp, Artificial Sequence
  ENSG00000246430_20 (sequence is synthesized)
aagcctcagatggctttaggtctggaagtgtgttgctaaaaatgctaaaaatttaacaaacttttataaatccttaagagatctttttcagttttctgaagtaccgttaattgcccatgt

SEQ ID NO: 1024828 - DNA, 120 bp, Artificial Sequence
  ENSG00000246430_21 (sequence is synthesized)
gtttcaacttgcagacaggcaagaatttggctttgtatgtttaaaaatatgtacatcttggttcataatgatgatttatttccaaaatggtgactcatactaggattacatataaaacat

SEQ ID NO: 1024829 - DNA, 120 bp, Artificial Sequence
  ENSG00000246430_22 (sequence is synthesized)
catatgtgggccttatatgtaataatgtgtaagtatagtatattaattactctgacataacatgggcagagatttgtattaatttatttctatttcatctaatcaatattttacttaagt

SEQ ID NO: 1024830 - DNA, 120 bp, Artificial Sequence
  ENSG00000246430_23 (sequence is synthesized)
ctaaaaccttatatatatattgacatgtatcatcgtatatataaacattgtatctattgaactgagcaatctgtagtttattttaaattctgatacattaaagatgtggagaactacatg

SEQ ID NO: 1024831 - DNA, 120 bp, Artificial Sequence
  ENSG00000246430_24 (sequence is synthesized)
tatctcaccctcaccaaggtatgaacttcagaatttgaacttgttcctttggggtaagttgtatcaccagcactcactaacagactgtattttccagtgaggtttcattctgtttcagat

SEQ ID NO: 1024832 - DNA, 120 bp, Artificial Sequence
  ENSG00000246430_25 (sequence is synthesized)
agcctgaaatcctgcttccactaagtaccagctgggtaacttcagcctactcaacataagatgatgaggatgaagacctttatggtgatccacttctacttaatgaatagtggagcccag

SEQ ID NO: 1024833 - DNA, 120 bp, Artificial Sequence
  ENSG00000246430_26 (sequence is synthesized)
agcctgaaatcctgcttccactaagtaccagctgggtaacttcaggcatcagtcctgccatggttcacaccagcagtgcagcccgtgctcatggaggtgaagtgagagactggcctgcaa

SEQ ID NO: 1024834 - DNA, 120 bp, Artificial Sequence
  ENSG00000246430_27 (sequence is synthesized)
acagcaaggcaacttatctcaccctcaccaaggtggcttcttcttggatatctgaatggtggtgagatcaacctctgggccagccaagtatggaactcaatccaaaacaacggacttctt

SEQ ID NO: 1024835 - DNA, 120 bp, Artificial Sequence
  ENSG00000233409_0 (sequence is synthesized)
aggtacataatgagagatctccatcagtgagcttggcaccagccacaggtggcccactgccaccagagctgggcacaggcccacttccagctgctactcatgatggagcaaaaaccctca

SEQ ID NO: 1024836 - DNA, 120 bp, Artificial Sequence
  ENSG00000233409_1 (sequence is synthesized)
ctcagtgaacacacacacgtgtcagcaatggaccagctgctgccaaatcacacaactacgcaacacgttgctcagaaatgccaatggtgactagcagagtgcaaacattactatgacaat

SEQ ID NO: 1024837 - DNA, 120 bp, Artificial Sequence
  ENSG00000233409_2 (sequence is synthesized)
ggagcagaggcccggggcggcaccgagccttggtaagagccgacagaaatggcaggtcacaggccgtcactgaggagaactgcaatgcggcaacacttatatgacacttaatttgggtca

SEQ ID NO: 1024838 - DNA, 120 bp, Artificial Sequence
  ENSG00000254802_0 (sequence is synthesized)
agaaagcaaaagggatgccggtggtggcagatgcttcctcctggccaaatcccaaatcccaccctcagcacccacaccctgagcagtgggcaggagaggcctgaaaacgtctgtacaaat

SEQ ID NO: 1024839 - DNA, 120 bp, Artificial Sequence
  ENSG00000254802_1 (sequence is synthesized)
ggcttccgagaagccctggagataaaggagccagaggcagccacacatggttcccagaagctgaatgctgcgcagacgacaggaatgacttcacccatcctgcttccacccgccatagca

SEQ ID NO: 1024840 - DNA, 120 bp, Artificial Sequence
  ENSG00000254802_2 (sequence is synthesized)
gtgaccaaagcagcactgggaccacagctgagcacctcagaagataagtcctggggtgattcttgtcatctccgtgaaaaggagaagacaaaaaggcagaggctgctgcttgaggatccc

SEQ ID NO: 1024841 - DNA, 120 bp, Artificial Sequence
  ENSG00000254802_3 (sequence is synthesized)
tcacccatgctgaccaacttccccatttcaagcttcagactcacagccgcgctagttagggtaccacttgttcagacagctgttttcattcacatctccaaaggtcctctaccttagaag

SEQ ID NO: 1024842 - DNA, 86 bp, Artificial Sequence
  ENSG00000254802_4 (sequence is synthesized)
tgttttcattcacatctccaaaggtcctctaccttagaagaagaaagaaagagggaaagagaaataaaagagattaattaagaaca

SEQ ID NO: 1024843 - DNA, 120 bp, Artificial Sequence
  ENSG00000254804_0 (sequence is synthesized)
cgcaatattcgcgtgggagtgacccgattttccagcgttcttcatctccacctttctcagcatgtagataagaagactgaacatgggagcaatgatggcacagaagagaacaaacacttt

SEQ ID NO: 1024844 - DNA, 120 bp, Artificial Sequence
  ENSG00000233407_0 (sequence is synthesized)
gaacgtcctcacctgaaattgaaaggtagaacaaaggcagtcaagggtgcaaggatattagaagctgtgttctgtgagctttcatgaaggctgtggaaggatccaggcaggatggcctca

SEQ ID NO: 1024845 - DNA, 120 bp, Artificial Sequence
  ENSG00000233407_1 (sequence is synthesized)
ttaatgactctttggtttagaaaacacactcttgctgttaacgctatcttatcaggtatcatttttgaattcacagatgaaagttaaaaaattcataattatacaaatacttgccttgta

SEQ ID NO: 1024846 - DNA, 120 bp, Artificial Sequence
  ENSG00000242512_0 (sequence is synthesized)
agttgtaaccgatagactgggctggggcaacgctgatgaaaggcaaattcctgagagaaaaatcacccagatttttcagtgccttctctagctttctagaagttgttatgagtggacctg

SEQ ID NO: 1024847 - DNA, 120 bp, Artificial Sequence
  ENSG00000242512_1 (sequence is synthesized)
actacctagagagagtaatacagaagctccgtgccgatcacagctacctcattaccatgttcctccaagatggccgcccctgaggagaatcatcaactgggctttacggaagagagaaat

SEQ ID NO: 1024848 - DNA, 120 bp, Artificial Sequence
  ENSG00000242512_2 (sequence is synthesized)
ccaaacgaccatcagcaacaaatgaaagactgaagttgaaagtttcaagattgtcaagaatgacgagttggacttggtctagttacttccacagcagcaggaggaacatgtgtgtgactc

SEQ ID NO: 1024849 - DNA, 120 bp, Artificial Sequence
  ENSG00000242512_3 (sequence is synthesized)
aggataactggggaagccttggctaggctttcctcatgtcaacctaccactcaaagggagaaaacctcctgatcagaggtgcccagaacccaggaaatccataatttttgaatgctggcc

SEQ ID NO: 1024850 - DNA, 120 bp, Artificial Sequence
  ENSG00000242512_4 (sequence is synthesized)
gaggtctgtgacctctgactgaatggtttccaagctccgaattcctaggtgatgttttcatttgttcacacttgctgaagaagggaaaggctctctgatttacgtgtaagcaaaacaatc

SEQ ID NO: 1024851 - DNA, 120 bp, Artificial Sequence
  ENSG00000242512_5 (sequence is synthesized)
taaacagtaggataaaatcatgttggaatggagttctgtgtggatgctcctttgaaccaaatcagttccacaactgaccctgtcagggacatataaatttagcattttggtgtggataca

SEQ ID NO: 1024852 - DNA, 120 bp, Artificial Sequence
  ENSG00000242512_6 (sequence is synthesized)
ccaacaagaggagaaaacccaagcattggcaaatgcctcattatccaaagaacactgaggtgtggagcaaaactgtgttgaatgaactgtagatggaaattctctccttcccaccgagga

SEQ ID NO: 1024853 - DNA, 120 bp, Artificial Sequence
  ENSG00000242512_7 (sequence is synthesized)
gccgctgcaggttgcagactcccagaatgccacactgagaagaggagggctaaaattctagagcagaatccctggggcagcccctgctgaagaagggtgcatctgttgagaatctcatca

SEQ ID NO: 1024854 - DNA, 120 bp, Artificial Sequence
  ENSG00000242512_8 (sequence is synthesized)
ccgcccccaccccgcccagccttcaatttagaggaatttctagttcacgcagaatgaagacaagatcacataagtgaggacgacgccccatttacaagggcctcagagtatgtcagctgg

SEQ ID NO: 1024855 - DNA, 120 bp, Artificial Sequence
  ENSG00000242512_9 (sequence is synthesized)
ggtcagacgggaacaggagtctggctcaacacacatttattgcactcctgtttcatgccaagaaatgtaccaaaatctgggactgtgtaacacagcaaaggaaaagactcatctccagga

SEQ ID NO: 1024856 - DNA, 120 bp, Artificial Sequence
  ENSG00000242512_10 (sequence is synthesized)
agcccccttgtctaggaagagaaattgaatatcagcataaggtggtgaaaagctgtgaaggagatgagtgccaggagtccatggaggaaggattctagcctggacagagtctccatgaat

SEQ ID NO: 1024857 - DNA, 120 bp, Artificial Sequence
  ENSG00000242512_11 (sequence is synthesized)
tgcaagggaaaacaagtggtacactggtatttctatttgataacctgttctctttggaattccggttagaaatcaaaggcttacttgagttttaatgctttcgggacttcaaatgctttt

SEQ ID NO: 1024858 - DNA, 120 bp, Artificial Sequence
  ENSG00000242512_12 (sequence is synthesized)
ctatcttcctaataatatattaacattttctgaagacaacatatatgtggaaaacaacattatttactcaaataattttttttgaaaaatggaccaaaaaaaaagaaaaaccaacaaaaa

SEQ ID NO: 1024859 - DNA, 120 bp, Artificial Sequence
  ENSG00000242512_13 (sequence is synthesized)
ctttctggaagaagcagatgccccagctgaactttaaaatgcccatgtgaaatgaactgtctgtatcttcaatcagcaaatggagtaggtggccactgtttaattctggaatggggaagt

SEQ ID NO: 1024860 - DNA, 120 bp, Artificial Sequence
  ENSG00000242512_14 (sequence is synthesized)
gtaaaggtgtggtgtgtgtgtttacccctacttagggattcaaaacagacagtaaagaacaaaagtctagccctttgagcattctccatgggacatttgaggtctagctggccccagaga

SEQ ID NO: 1024861 - DNA, 120 bp, Artificial Sequence
  ENSG00000242512_15 (sequence is synthesized)
aagagagacagaagcaaggtcatatccatttgagaaaatcaaagtgtctgctccaattgagtctggtgtccttattcctggaatagccatccctactgctctggtgctgatttacctccg

SEQ ID NO: 1024862 - DNA, 120 bp, Artificial Sequence
  ENSG00000242512_16 (sequence is synthesized)
gcagttcagtgcttcctggaaggtaggctgggctttttaacaaagtgactccttacttgacatgttttacccaaacacagaggccactgcactatgtgcaagaaacaacaaaaaattaaa

SEQ ID NO: 1024863 - DNA, 120 bp, Artificial Sequence
  ENSG00000242512_17 (sequence is synthesized)
aacgatgaaggcttcttattctcatgtaggtctcacagcctcttgtctccctgagttttaaacacattgcattacctttccagaggaggtgtggagcaaaactgtgttgaatgaactgta

SEQ ID NO: 1024864 - DNA, 120 bp, Artificial Sequence
  ENSG00000242512_18 (sequence is synthesized)
aggcgtgagccaccgcgcccggcctagtgcttgaattttgaatcgtataaattcattacctattcaaacttttaaaatagaaatattgcatcctgatctctaatataaccatggaattta

SEQ ID NO: 1024865 - DNA, 120 bp, Artificial Sequence
  ENSG00000242512_19 (sequence is synthesized)
aaatattgcatcctgatctctaatataaccatggaatttaatgtgaaaagtgtgttttgaaatactgatgaatgcaattaatcatataccaccctactcctgttccttttgatatccaac

SEQ ID NO: 1024866 - DNA, 120 bp, Artificial Sequence
  ENSG00000242512_20 (sequence is synthesized)
aatatttgaataaatttgatgccccaggaagacactatgggcttatcctatagctccttacatcctggtgtttagatcaagtactgctgaacatgcacttatcacagtgtgagatggttt

SEQ ID NO: 1024867 - DNA, 120 bp, Artificial Sequence
  ENSG00000242512_21 (sequence is synthesized)
tagtggcatgagtaaggctttggaggaggcagagctgagcataaatcctgtttatattatcattggctacattaacttgattgagttgcctaatctctctataccttgatttcttgatcc

SEQ ID NO: 1024868 - DNA, 120 bp, Artificial Sequence
  ENSG00000242512_22 (sequence is synthesized)
gtaaaatgtaaataataactattcagtgctttatcatgaagttgaccttcagtcccctcatatgccatgggatttcaagttgatttaaggatgaaactcattaacaaacagctttctgca

SEQ ID NO: 1024869 - DNA, 120 bp, Artificial Sequence
  ENSG00000242512_23 (sequence is synthesized)
ttagtgtcccagctttgcctctgttagagccatggtaaagctgaccaaacttacctcttgccccttgtttcactaagtcccttgtaaatgactccaacccactgttttctggttcctgcc

SEQ ID NO: 1024870 - DNA, 120 bp, Artificial Sequence
  ENSG00000242512_24 (sequence is synthesized)
gcctctttgaagttggtctccatttcttcctggtcagccaattctctttctaaggtacactcaacttagcactaagaatgtgcttcttaccctctttcctatccaaagcctctggaggcg

SEQ ID NO: 1024871 - DNA, 120 bp, Artificial Sequence
  ENSG00000242512_25 (sequence is synthesized)
tcttagatagttgttttgtcacggttgagagaaagggaattcctttcacaatgggatttgggggccaatctattgtgtctggatccccagggacatggtggcaatcatacttatcttgga

SEQ ID NO: 1024872 - DNA, 120 bp, Artificial Sequence
  ENSG00000242512_26 (sequence is synthesized)
aggatttgtgccaggggtgcaggggtaggttagactcttctgtcttcccttcctctaactgcagctcctacttacctgtggcaactttcagacgtctatgctaactgttcatcagagttt

SEQ ID NO: 1024873 - DNA, 120 bp, Artificial Sequence
  ENSG00000242512_27 (sequence is synthesized)
ggcttggtgtaatttacaatcagatgtacataaaatgtgtttgtgtcttgcaaactgtttacttaagcaactactaggacctgttactacatgacatcaaaagctctgaggtagttgttt

SEQ ID NO: 1024874 - DNA, 120 bp, Artificial Sequence
  ENSG00000242512_28 (sequence is synthesized)
tatggtcagtccaaaaaatgatcgaaggtttgggtttgtatgtgttcatgtactttaatgggagagaaattcgcatatggttaatagattggttgctatgatgagatagaatgctttttg

SEQ ID NO: 1024875 - DNA, 120 bp, Artificial Sequence
  ENSG00000242512_29 (sequence is synthesized)
aaaaagtttccctttaaagtcaaacattaatcactttccaggtggagggaaagcagaagtgagaaaaacccagactgtcataggctagatttcccccagatattattgctgcttctgtct

SEQ ID NO: 1024876 - DNA, 120 bp, Artificial Sequence
  ENSG00000242512_30 (sequence is synthesized)
ctacagccgaacataacagctggtgaataggcagaaactggagaaagatcttttcttgcctttaatccagtatgctgttttcttgtgcccgttttactgtaattctcggcggccatggga

SEQ ID NO: 1024877 - DNA, 120 bp, Artificial Sequence
  ENSG00000242512_31 (sequence is synthesized)
ttgactgatacatgcaattacctcctctaatattgctctcaactgtcgggcctgactgacaaaagtggatgaggtttagttaaggtctgggaaaacactcttaataaaagacattcccat

SEQ ID NO: 1024878 - DNA, 120 bp, Artificial Sequence
  ENSG00000242512_32 (sequence is synthesized)
ctgtatgatcacaccctccctcagaccttttcatctgttttctagaaagataaggtctggtgatggaaagttaaaacgtggtgctgaacttggatgttagcaacaccaccatttacctca

SEQ ID NO: 1024879 - DNA, 120 bp, Artificial Sequence
  ENSG00000242512_33 (sequence is synthesized)
aaaaaattctccacagtgtggtgtgtgtgtgtgtgtgtgtgcacagtttgcatttgcaatgatggaaatcagtttggatcattgggcagagtttccccagaaagaataagaggctctttt

SEQ ID NO: 1024880 - DNA, 120 bp, Artificial Sequence
  ENSG00000242512_34 (sequence is synthesized)
agaacgttaaaccagatccttattggtttcagccctcaactgattattttgtaggtaaaagaaagcctgaggaggctttcccctctgagtttttccgtggattgctggactctgaggccc

SEQ ID NO: 1024881 - DNA, 120 bp, Artificial Sequence
  ENSG00000242512_35 (sequence is synthesized)
cagtgcttcctggaaggtgattgtggtgaatagtcatgagaatctgggaactggctcctgctctgtctatcttggagatgcatcttttgtgagaagccagggcaagaatagggaggctta

SEQ ID NO: 1024882 - DNA, 120 bp, Artificial Sequence
  ENSG00000242512_36 (sequence is synthesized)
ggcaatgggaagtttctgagtagataaagcagatggcagagcaaagggacagagcctggcgagaggctactccctgtagcaacctgcctaagagtgagaggaaagcaaggcatggctatg

SEQ ID NO: 1024883 - DNA, 79 bp, Artificial Sequence
  ENSG00000242512_37 (sequence is synthesized)
aacctgcctaagagtgagaggaaagcaaggcatggctatgagcacgtgtagtctcagctacttgggaagctgaggctgg

SEQ ID NO: 1024884 - DNA, 120 bp, Artificial Sequence
  ENSG00000242512_38 (sequence is synthesized)
cttggcagttgagattcagaccttgacagttgtaaccgatagactgggctggggcaacgctgatgaaaggcaaattcctgagagaaaaatcacccagactttctagaagttgttatgagt

SEQ ID NO: 1024885 - DNA, 120 bp, Artificial Sequence
  ENSG00000242512_39 (sequence is synthesized)
ggggcagccaacaagaggagaaaacccaagcattggcaaatgcctcattatccaaagaacacttaaactctactttagaaatggcttaaagaccccattcaggtgtcattgaagaaaaac

SEQ ID NO: 1024886 - DNA, 120 bp, Artificial Sequence
  ENSG00000242512_40 (sequence is synthesized)
aggtagcttttcctatcagttttcccttgtgttggcactcaattttcataatacgatatgtaatgtgataaggcctacccattattaatagtagcaatagcatggcaaggttattcctat

SEQ ID NO: 1024887 - DNA, 120 bp, Artificial Sequence
  ENSG00000242512_41 (sequence is synthesized)
gcagttttcttaaagaacaaagggccaagctactgatgaagcgaaattacctatgattttagaaccaggacaaaacaaattattctctttcaaatatctgcagactctacttaaaaaagg

SEQ ID NO: 1024888 - DNA, 65 bp, Artificial Sequence
  ENSG00000242512_42 (sequence is synthesized)
tgtggtgtttctaatggcaggcacttgaacccaattgaaccctgagagctctctgagagggctgt

SEQ ID NO: 1024889 - DNA, 72 bp, Artificial Sequence
  ENSG00000242512_43 (sequence is synthesized)
ggtttgctagcaaaccaaactctaacaaagaacactgtttattttttcttttcttttcttgagatagatatt

SEQ ID NO: 1024890 - DNA, 120 bp, Artificial Sequence
  ENSG00000242512_44 (sequence is synthesized)
acccatcatctaggttttaagccctgttttgatttgaatattattcaatacaaatgaagattgaaatgtggacatttatgctaagaacagcttctggaattatagatttgccttgtattc

SEQ ID NO: 1024891 - DNA, 120 bp, Artificial Sequence
  ENSG00000242512_45 (sequence is synthesized)
gatttgccttgtattcttaccaattgtaagacggataaacaagcagaaattcaaaatgacataattatatttctttgcatctggattttattctgttcctggttcaagtttcaagattgt

SEQ ID NO: 1024892 - DNA, 120 bp, Artificial Sequence
  ENSG00000242512_46 (sequence is synthesized)
agtcaatttttatgtcacttaatatggagcgtgttcctttccatcacttaatcttcccagccttctttttaagttttgaagaaataagaagatgcttatatttgaagaaagggaaggcag

SEQ ID NO: 1024893 - DNA, 120 bp, Artificial Sequence
  ENSG00000242512_47 (sequence is synthesized)
cactaccattagacttactatgctgttaaattttctcaaaactctccatttcaagtttttttctggctacattatgctttcagaaaacatttgctgaatattctgtggtattttctttcc

SEQ ID NO: 1024894 - DNA, 120 bp, Artificial Sequence
  ENSG00000242512_48 (sequence is synthesized)
aatgaaaatatattttgatatttattggctaatttcaaaagtcagatttttttctactgttttagtttaaaaaaggaaataacttattttggatagtatctgtttaagcagtagttaact

SEQ ID NO: 1024895 - DNA, 120 bp, Artificial Sequence
  ENSG00000242512_49 (sequence is synthesized)
agaacactgtaagtctgtcttggccatgatgctcttttcacatcataataatgaacaattatatagcacttatgatgtgccaggcagttccaaatctttgcatataatgagtcatacatg

SEQ ID NO: 1024896 - DNA, 120 bp, Artificial Sequence
  ENSG00000242512_50 (sequence is synthesized)
aatgcatagaaaatagatgcacagatagataagtgaacttaagttaatttgccaaggattatttccattttttttttttttgtagtaaactctactttagaaatggcttaaagaccccat

SEQ ID NO: 1024897 - DNA, 120 bp, Artificial Sequence
  ENSG00000242512_51 (sequence is synthesized)
ttggttcaaatccatcgactactgaaactgctcagaaatcactaaattattgctatatcagaaagtacattaatatcttgcaatgtcataggctcaccaacatgaataataatgatcaca

SEQ ID NO: 1024898 - DNA, 120 bp, Artificial Sequence
  ENSG00000242512_52 (sequence is synthesized)
agtctgtgccaataaaataaatggtcatttaatacttttagacatttgataccagaaaatggtttattatagagcttgcaacctacacataaacttctagtatctggttatgccaggtgt

SEQ ID NO: 1024899 - DNA, 120 bp, Artificial Sequence
  ENSG00000242512_53 (sequence is synthesized)
gtgtgtatgtttctgtatatgtatttgtgtgttttggcatgtatgctcacacatataccaacaagttcatatgtacctgtagttaatgactttatcaaagatataaagatgagaaaattg

SEQ ID NO: 1024900 - DNA, 120 bp, Artificial Sequence
  ENSG00000242512_54 (sequence is synthesized)
ctgtatggtcttataatctttcaaaagttgctgttggcttatagagagaacattaagaagagatctgtcttggaattttttgtaattgagagatcccaggaatagaaggcagcaaccaag

SEQ ID NO: 1024901 - DNA, 120 bp, Artificial Sequence
  ENSG00000242512_55 (sequence is synthesized)
tgcatgtagggatcaaaaggtcataagtgggatgaaaggagaaatacagagacctaaaaccaagccatgtgtgacactttgggtgcaatagtgagtgccaggagagagtagcaggagttg

SEQ ID NO: 1024902 - DNA, 120 bp, Artificial Sequence
  ENSG00000242512_56 (sequence is synthesized)
gcaaggggtctgaaagtggaagggtaacgtcgggtaaggagagaaatggaagtggtagatgggcctgaccttctcatgagtcagctttgctttgtgtttctgactcattcaattcctggt

SEQ ID NO: 1024903 - DNA, 120 bp, Artificial Sequence
  ENSG00000242512_57 (sequence is synthesized)
catgtcagggcttgattaggtagataatggcccaggtaattttaagaattctcatgtgcacattttgaaatcaagcattactaggcagaacctcaatcattttataaagtagacattcat

SEQ ID NO: 1024904 - DNA, 120 bp, Artificial Sequence
  ENSG00000242512_58 (sequence is synthesized)
tacacattgatttggattttgggattctattttgatgtgctgggaacacctccttttccctttttctctgctcttacttacgagctgcctttattattttatttactttttaatgaagtt

SEQ ID NO: 1024905 - DNA, 120 bp, Artificial Sequence
  ENSG00000242512_59 (sequence is synthesized)
gtaatcatacatatttgtggggtacaatttgacattttaatacatgtatttgttgtataatgatgaaattaggatagttagtttatgcatcacctcatgcatttattattgttttgagat

SEQ ID NO: 1024906 - DNA, 120 bp, Artificial Sequence
  ENSG00000242512_60 (sequence is synthesized)
gaatacattcaaaagcctctcttctagccattttgtagtacaatatcttactgctaaccatagtcaccctactatgcaataaaacaccagaactagcctgggcgacagagtgactccgtc

SEQ ID NO: 1024907 - DNA, 120 bp, Artificial Sequence
  ENSG00000242512_61 (sequence is synthesized)
tcaaaaaaaaaaaaaccaccagaactaattcttcctacccaatcgtaactttttacccattggccaacctctccccattttccccaccatcccctccctagtctctggtaaccactgttc

SEQ ID NO: 1024908 - DNA, 120 bp, Artificial Sequence
  ENSG00000242512_62 (sequence is synthesized)
tatcctctacttgcatgatatcaacttctttttggattacacatatgagtgatatcatgtaatatttgtctttctgagtctgggttatatttaacataatgccctctgggcttatatatg

SEQ ID NO: 1024909 - DNA, 63 bp, Artificial Sequence
  ENSG00000242512_63 (sequence is synthesized)
tgggttatatttaacataatgccctctgggcttatatatgttgtcaaaaatgacaggattttc

SEQ ID NO: 1024910 - DNA, 120 bp, Artificial Sequence
  ENSG00000242512_64 (sequence is synthesized)
acaggtggattccatatcttggctattgtgaatactgctgcaataaatatggaattgcaaatatcttttgacatactgatttcatgtcctctggatatatacccagtagtgggattgctg

SEQ ID NO: 1024911 - DNA, 120 bp, Artificial Sequence
  ENSG00000242512_65 (sequence is synthesized)
tttaattttttgaggaacatctatatagttttccaaaatggctgtactaatttacattccagataacaatgtgtaagtgttctcatttctccacatcctcattaacccttattttctttt

SEQ ID NO: 1024912 - DNA, 120 bp, Artificial Sequence
  ENSG00000242512_66 (sequence is synthesized)
gcctttctgataatagtcattttaactggagtgagatggcctcttattgtggttttgattgcatttccccggtgattagttatgctgagcactttttcatatatctgttggccacttgtg

SEQ ID NO: 1024913 - DNA, 120 bp, Artificial Sequence
  ENSG00000242512_67 (sequence is synthesized)
tgttttcttttgagaaatgtttattaaggtcttttgtccattttaaatcagcttatttgtttttgctcttaagttccttatatattctggttattaaccccttgtcagatgtatagtttg

SEQ ID NO: 1024914 - DNA, 120 bp, Artificial Sequence
  ENSG00000242512_68 (sequence is synthesized)
taaatatcttctctcattctgcaggttgtttcttccctctgttaattgtttcctttactgtgcaaaagctttttgatataatcccttttgtctatttttagctttggttgcctgtgcttt

SEQ ID NO: 1024915 - DNA, 120 bp, Artificial Sequence
  ENSG00000242512_69 (sequence is synthesized)
tgaggtcttgtttttaaatcccttgcccaatttaatgttgtgaagcatttcacttattttcttctagtagtttcatagtttcaggttttacatttaagtctaatacattttgagttgacc

SEQ ID NO: 1024916 - DNA, 120 bp, Artificial Sequence
  ENSG00000242512_70 (sequence is synthesized)
tttgtatatgatgaaaagaaggcatctagtttctttcttctgcatgtagacattcaatttttccagcatcatttattaaagagactgtcttttctccaatgtgtgttcttagcacttttg

SEQ ID NO: 1024917 - DNA, 120 bp, Artificial Sequence
  ENSG00000242512_71 (sequence is synthesized)
ctgtcttttctccaatgtgtgttcttagcacttttgttgaaaatcagttggctgcagatatggactacctttaaaaaaaaaaagctttaggccagtgcagtggctcatgcctgtaatcct

SEQ ID NO: 1024918 - DNA, 120 bp, Artificial Sequence
  ENSG00000242512_72 (sequence is synthesized)
caaacgaccatcagcaacaaatgaaagactgaagttgaaaggcaagtcttcagatttgaagtaagagcttgagaagaaaaatgaaaaaagaatcctggagatgaccagcatttagtgggg

SEQ ID NO: 1024919 - DNA, 120 bp, Artificial Sequence
  ENSG00000242512_73 (sequence is synthesized)
cagggtactggaaacataaaaggaaaaaggaggccctaagaagaatcccgaagaagagaagctggaggctgagggttcattactttgttgagggtgtttcttatgacaccaaataagacc

SEQ ID NO: 1024920 - DNA, 120 bp, Artificial Sequence
  ENSG00000242512_74 (sequence is synthesized)
cccgacggagctctgaggtcctagtgagcctcacattattaggctctgagtgctggggggatttttcagaaacaaaagaaaagcttctaaattttaaagagtgactaatccatgtgaaag

SEQ ID NO: 1024921 - DNA, 120 bp, Artificial Sequence
  ENSG00000242512_75 (sequence is synthesized)
gatgggacataatgaccaacaatacagggcagtggcatttttaaatagtgccaacaataagagcacttgtaattcagagggagaaggggtttctgggaagatggttagaaggggcttaaa

SEQ ID NO: 1024922 - DNA, 120 bp, Artificial Sequence
  ENSG00000242512_76 (sequence is synthesized)
taagaatgagattggataaaggacacaaatgaagtccagaccaagtacaaaaacatgagctccttctcctggctgctcaactaatgcagacttagcctgaggatgagataactatctcaa

SEQ ID NO: 1024923 - DNA, 120 bp, Artificial Sequence
  ENSG00000242512_77 (sequence is synthesized)
cagccattccattgctcagacttcaaattatagtaattatgacaatttgtgccaatagccacgaggtgggatttttgatgtggttaaaaataacatctgtaaaacccaataaaaattaca

SEQ ID NO: 1024924 - DNA, 120 bp, Artificial Sequence
  ENSG00000242512_78 (sequence is synthesized)
tttttttttttttttaacttttttcttgaaaactttattaaaataaggattaaacctgaaaaaagaacaatcagaatgccagccctttgtataaaatcatcaagaaaaaggaaagaaaga

SEQ ID NO: 1024925 - DNA, 120 bp, Artificial Sequence
  ENSG00000242512_79 (sequence is synthesized)
gagaaagaaagaagagaaaagaagagaaaagaaaagaaaagaaaagaagtcaggcaccctttttaatttcttctcatctctctctcaccgacgctctcgacaggggagtgctccaccccc

SEQ ID NO: 1024926 - DNA, 120 bp, Artificial Sequence
  ENSG00000242512_80 (sequence is synthesized)
acagtctcttctttttctctgtccattcacttccattcatgcactgcaagagggctctccgccctcccattgtagacccatggttcttcattccccacacttcacagtcacactgcttcc

SEQ ID NO: 1024927 - DNA, 120 bp, Artificial Sequence
  ENSG00000242512_81 (sequence is synthesized)
cctggagccccagtcacctacttactcaatttcagttttcagtcttggttttgtgagacttctggaccactatattctccttaaagtattttttgaattggtaattccttcatagttcaa

SEQ ID NO: 1024928 - DNA, 120 bp, Artificial Sequence
  ENSG00000242512_82 (sequence is synthesized)
accgggaaagcacaaaacagagtgaacagtctctttttatccttgtccctcagttttccataggcagccactgctgttagtttcttatatatcctcccagaggttcttcatagatatatt

SEQ ID NO: 1024929 - DNA, 120 bp, Artificial Sequence
  ENSG00000242512_83 (sequence is synthesized)
agaaaaaatgcaaatttatttgtatttaaaacaaataagaatataggttcttattttttcccttcctaacagaaaaagtagatattgctcacatcgtttggctttgcatttttttaattc

SEQ ID NO: 1024930 - DNA, 120 bp, Artificial Sequence
  ENSG00000242512_84 (sequence is synthesized)
aacaaatgaaaaaaatatacatgtgtagacactgggcttctcatgggcatctgacactcactttgctctgaactgaactacttcccaaagctgcttttcctcttatattctttgattcag

SEQ ID NO: 1024931 - DNA, 120 bp, Artificial Sequence
  ENSG00000242512_85 (sequence is synthesized)
tggtcctggtgagtaggggttatgtccatttatctaatctcttaagtcagaaacctggtaggcatccttgaccactcccctaacaccatctaaaatatcagcaagctccaccttttcccc

SEQ ID NO: 1024932 - DNA, 120 bp, Artificial Sequence
  ENSG00000242512_86 (sequence is synthesized)
ttcttcattcctaccatcattgactgaatctaaggcttttatccttcaggaatcctttgctgaaagacttctcccaactcatctagttgttcaacgctgcagcattttatatatatacct

SEQ ID NO: 1024933 - DNA, 120 bp, Artificial Sequence
  ENSG00000242512_87 (sequence is synthesized)
atatcattgaagttgccgtcacgactgatttattagtttgtgcctttcaccaggctgggcagagatgtaccaaattcatttttactgataagaacataatgaatgctgaatgaatgaata

SEQ ID NO: 1024934 - DNA, 120 bp, Artificial Sequence
  ENSG00000242512_88 (sequence is synthesized)
aatgtgatggtgtgattctatagcaacaggaatagagcactgcagggccaccgaaggaaaaggtgatgacctggcttggattcagtgataaaaaggggcttacctcctttctctgtttct

SEQ ID NO: 1024935 - DNA, 120 bp, Artificial Sequence
  ENSG00000242512_89 (sequence is synthesized)
gctaaaagccagtgattaccccctgcttttcccatgttgggcatagctgtaagtactttagacatagcggcacatttaatcatcatgcaacaataagaggaagctgaggcagacagaagt

SEQ ID NO: 1024936 - DNA, 120 bp, Artificial Sequence
  ENSG00000242512_90 (sequence is synthesized)
gcccaaagtcacatacttgaagccaggacttgaacctgggctatctggctcctgaatccatggctttcactaataatgacttaccctccaatgaggaacaagctccattctggcctttct

SEQ ID NO: 1024937 - DNA, 120 bp, Artificial Sequence
  ENSG00000242512_91 (sequence is synthesized)
ttagcgaaggcaactgcctgagctcatggtctgatctggcttctgggaaagagaaagcaggggaaacgtctagagatggcatactgggagaagaaatttcttgctgtggaatcctgcccc

SEQ ID NO: 1024938 - DNA, 120 bp, Artificial Sequence
  ENSG00000242512_92 (sequence is synthesized)
catctccctccccaccatacacaatcccacgtgcatttacacctacacgccgtgtacacacgaacattttttctgctactcccatgggccccaactctgccttttcatcaaaatcaccca

SEQ ID NO: 1024939 - DNA, 120 bp, Artificial Sequence
  ENSG00000242512_93 (sequence is synthesized)
gagttttaaataaaatgcagatgttgaggcttgttcctaaattataatcttgggcatctaaattttttgattaaaaaaaattgacatgcatgcttaaagtaaaaatttagacaatacagc

SEQ ID NO: 1024940 - DNA, 120 bp, Artificial Sequence
  ENSG00000242512_94 (sequence is synthesized)
aaagaatgtgtttgtacccctcccacctagcccttagttcttccgaaaggcaaatacttaaccgttccttgttatccttccagaaaacaatatatgcatatattcatcttttttttcttc

SEQ ID NO: 1024941 - DNA, 120 bp, Artificial Sequence
  ENSG00000242512_95 (sequence is synthesized)
ggcagttgagattcagaccttgacagttgtaaccgatagactgggctggggcaacgctgatgaaaggcaaattcctgagagaaaaatcacccagagtaaggagtttggcactgtagacta

SEQ ID NO: 1024942 - DNA, 79 bp, Artificial Sequence
  ENSG00000242512_96 (sequence is synthesized)
gaaaaatcacccagagtaaggagtttggcactgtagactagattcagctgcaggaattgtgcactagaaaaatgcagtg

SEQ ID NO: 1024943 - DNA, 65 bp, Artificial Sequence
  ENSG00000242512_97 (sequence is synthesized)
caccatcttggctcactgcaacctctctctcccgggttcaatgcccggctaatttttagtagaga

SEQ ID NO: 1024944 - DNA, 120 bp, Artificial Sequence
  ENSG00000242512_98 (sequence is synthesized)
attcagaccttgacagttgtaaccgatagactgggctggggcaacgctgatgaaaggcaaattcctgagagaaaaatcacccagattagcattttggtgtggatacagaagacgagatta

SEQ ID NO: 1024945 - DNA, 120 bp, Artificial Sequence
  ENSG00000242512_99 (sequence is synthesized)
tcagtgaggaaatgttttcctgaggagacttgagaagtctcaaaaatgaaaagaaagagtatttggtgtagaaagaatggcatgagatgtgaaagctcattcatccatttattccaggta

SEQ ID NO: 1024946 - DNA, 120 bp, Artificial Sequence
  ENSG00000242512_100 (sequence is synthesized)
tatctttttcttcagtactttgggaggcaataggtgtaatagcaagaacattcaggttagtgggttagtgtgagtctgccatatgtatgagggttgaatacacattaggtgtggtgactg

SEQ ID NO: 1024947 - DNA, 120 bp, Artificial Sequence
  ENSG00000242512_101 (sequence is synthesized)
tcatatgggaggcactgcaaggtgaaggagacatgtcctcacatttggtctttgggaagcgaagcaggcagaaacccaagtgcaaagtggccatttgttttcctaatgctagataagtac

SEQ ID NO: 1024948 - DNA, 120 bp, Artificial Sequence
  ENSG00000242512_102 (sequence is synthesized)
ctgatgtgttggaagggtggagtagaactagaaactcctggaagttcttttaagaacgaatgcaggacctcatcagcccgagtctttaaataagtcacacatttttggtcaccacattct

SEQ ID NO: 1024949 - DNA, 120 bp, Artificial Sequence
  ENSG00000242512_103 (sequence is synthesized)
ggaagggggacaaaaagatctgtcacagacaaaatttggagatatttaaggctttgttgactttggcaaatgcttgattatagttctgtggtctgtttgttttctagagtctccatgaat

SEQ ID NO: 1024950 - DNA, 120 bp, Artificial Sequence
  ENSG00000242512_104 (sequence is synthesized)
tttttttttttttttcttaaatgaaaagtataagggattttaacctcataaagaataaggaaaatcaattatggtgaagaaacatttcatttcttaccgtttaaatatttccttcctaaa

SEQ ID NO: 1024951 - DNA, 120 bp, Artificial Sequence
  ENSG00000242512_105 (sequence is synthesized)
ttgatggttgatgtaatgtaggctgtaaaaagagaggaggcagttcctgaaataccttgggctctaaaacccattttgtgaaatagcaatgtaatttgaatattttaggaactgacctca

SEQ ID NO: 1024952 - DNA, 120 bp, Artificial Sequence
  ENSG00000242512_106 (sequence is synthesized)
atgcttagagcttcctttgtatgttcttaaacgatgccttaacatcgcatttacttatatgttaacatgaaagttataagttgtcttattgtaacgttgacttgtcccttcagagaatca

SEQ ID NO: 1024953 - DNA, 120 bp, Artificial Sequence
  ENSG00000242512_107 (sequence is synthesized)
ttgtaacgttgacttgtcccttcagagaatcagccttccattatgctcaagtattcatcaaccttcagggctgggatggtataaaataatggcatgagatatacctaatgctagatgacg

SEQ ID NO: 1024954 - DNA, 120 bp, Artificial Sequence
  ENSG00000242512_108 (sequence is synthesized)
atggcatgaccgggccaggcatataaggatttccctcctctcctcatttttatttttattattttgggtacacagtaggtatatatatatatgaggtacatgagatgttttgatacagac

SEQ ID NO: 1024955 - DNA, 120 bp, Artificial Sequence
  ENSG00000242512_109 (sequence is synthesized)
tggcagttgagattcagaccttgacagttgtaaccgatagactgggctggggcaacgctgatgaaaggcaaattcctgagagaaaaatcacccagatgccttctctagctttctagaagt

SEQ ID NO: 1024956 - DNA, 120 bp, Artificial Sequence
  ENSG00000242512_110 (sequence is synthesized)
ggcagttgagattcagaccttgacagttgtaaccgatagactgggctggggcaacgctgatgaaaggcaaattcctgagagaaaaatcacccagaatggccgcccctgaggagaatcatc

SEQ ID NO: 1024957 - DNA, 120 bp, Artificial Sequence
  ENSG00000242512_111 (sequence is synthesized)
ccttatactcctgagaatttgtggcagtcctgggttaaacgatgaaggcttcttattctcatgcagcttcctgtgtccctgtcctttggaaaatgctgcctcctggtctgcttgtgtgga

SEQ ID NO: 1024958 - DNA, 90 bp, Artificial Sequence
  ENSG00000242512_112 (sequence is synthesized)
ttgctgagaaagtgatatttagtcaagtgctaagaagagtgctataaaacattgtttaacctgcagaagcagtataagtctgttgtttgc

SEQ ID NO: 1024959 - DNA, 120 bp, Artificial Sequence
  ENSG00000242512_113 (sequence is synthesized)
ttagagaaaagcaggttcttcatgcacatctcttcaggcaaatagatgcccaggagcatggccggcttactggttcctcaacagccaaatttcaacatagaccatgtcttatgtgacttt

SEQ ID NO: 1024960 - DNA, 120 bp, Artificial Sequence
  ENSG00000242512_114 (sequence is synthesized)
gacagtcttagtgactatttttatgcattgaagcagtgagagggaccaaggtatctcaaaggatccaaggtttttggattggctgcaatgagcagagatcagtgctataggaaggagaaa

SEQ ID NO: 1024961 - DNA, 120 bp, Artificial Sequence
  ENSG00000242512_115 (sequence is synthesized)
ggctttctttcacttttagacatggcaatatgaggttttcatgggacatacagtcagtggttgtacatacgatttgagagcttaaaataatctagagaagtaagttcagagagttatcaa

SEQ ID NO: 1024962 - DNA, 120 bp, Artificial Sequence
  ENSG00000242512_116 (sequence is synthesized)
tgttccaaaatttttttgctgaatggttgtttctgtaattgaaaggcccatgatttttttttcacagcaccattttgctttttaaaatttctactgtgtgccaggtatggttttggcatt

SEQ ID NO: 1024963 - DNA, 120 bp, Artificial Sequence
  ENSG00000242512_117 (sequence is synthesized)
gcatccttgcaggagcactgcaagggaatgattgcgctattatcttcattttacagacaaggaaagtgaaagcaacaaaaagtttcatatcttacctaaggtcttcttgttctgataagt

SEQ ID NO: 1024964 - DNA, 120 bp, Artificial Sequence
  ENSG00000242512_118 (sequence is synthesized)
gatcaagctggtatttgaacttgggtgcctcaacatgaaggtcaagcatctcattttacagatgagccaactgaagtcccaagatcactcacctcattggttacagatcttggagcccag

SEQ ID NO: 1024965 - DNA, 120 bp, Artificial Sequence
  ENSG00000242512_119 (sequence is synthesized)
ggactctcaattcaggaccagtatgctttgcatgacatgcaggatgtatctgagacacaaactgtggtttgttctcttttcttcccaatgcatcctgcgtacagtatgctttgcatgaca

SEQ ID NO: 1024966 - DNA, 120 bp, Artificial Sequence
  ENSG00000242512_120 (sequence is synthesized)
tgcaggatgtatctgagacacaaactgtggtttgttctcttttcttcccaatgcatcctgcgtacagtctccctacccccttcccccatgaatccatgtttgttgtttcccaggagatac

SEQ ID NO: 1024967 - DNA, 120 bp, Artificial Sequence
  ENSG00000242512_121 (sequence is synthesized)
agatgatggtcccagactctgtccattctgatctttggcatggacccctaaatccagccaaatgcagcacccacagtcccttgcctgaacaagatatgggcttttctatctctgtcatta

SEQ ID NO: 1024968 - DNA, 120 bp, Artificial Sequence
  ENSG00000242512_122 (sequence is synthesized)
ttcaccatttactgtggttggcatgccttcttcctgccagctccacagttcgaggtgccactattctttcagatgcatcacacatgctacttcttttatgaaacttgcagagtctcagag

SEQ ID NO: 1024969 - DNA, 120 bp, Artificial Sequence
  ENSG00000242512_123 (sequence is synthesized)
ttgcatgagatttgtcactcttgttgagagaaagaggacagagtggagaagaaaagggaagggagaaaatgggtggaatttatggccctagatatgaagcttggagatgactgaagtgat

SEQ ID NO: 1024970 - DNA, 120 bp, Artificial Sequence
  ENSG00000242512_124 (sequence is synthesized)
agatgactccaaggataatcaatagccatgagagttatggcttattgaaagcttactatttcttgggagagtgcaatgttatcatctccttaaattctactgcaagtcgtcaggtttctg

SEQ ID NO: 1024971 - DNA, 120 bp, Artificial Sequence
  ENSG00000242512_125 (sequence is synthesized)
cagctgggatttaagcccaattctgcctgaagccaaaacttgtgttctctttcactgttgtctcctaagacaattggttgtgaggtagaaaaagaactggataatcctcaaaatggaaaa

SEQ ID NO: 1024972 - DNA, 120 bp, Artificial Sequence
  ENSG00000242512_126 (sequence is synthesized)
ttaaaaagatgaaactaaattggggtcatgggttgagacaatacagtgagagacactggaattggaagaaatgaggcatgaggccagagtggagctcccttaggacaatgcttttggctt

SEQ ID NO: 1024973 - DNA, 120 bp, Artificial Sequence
  ENSG00000242512_127 (sequence is synthesized)
ctggagcctttattacaatgaggcagctcaggacttacagtgttcatctgagtgccgggaatcgtactgtcatggtgcttctcatggctttttcatcttgctttgtgttatagggctttg

SEQ ID NO: 1024974 - DNA, 120 bp, Artificial Sequence
  ENSG00000242512_128 (sequence is synthesized)
ggttcacaagctctctgaaggagctgactgtgaaggcaaggactgtgtctatgccttttttaaggagacgcacagtttgtcttaaccaagtggacacatgagaggcacagagaggggtgc

SEQ ID NO: 1024975 - DNA, 120 bp, Artificial Sequence
  ENSG00000242512_129 (sequence is synthesized)
acctcagtctacccaaggatatggagtgggggctttatggagacctgaggggcccaggcacagaaaagagacaaagtgagggaacacttgaggcagatggcagggcacatgcttagggag

SEQ ID NO: 1024976 - DNA, 120 bp, Artificial Sequence
  ENSG00000242512_130 (sequence is synthesized)
cagggcatatatgtgaaagtcactcgcaccccctcttatcatatgactccaggcagtcctccaacccgtcctccaacccacccactcgagcttcctgccttctgacaggtttccttattt

SEQ ID NO: 1024977 - DNA, 120 bp, Artificial Sequence
  ENSG00000242512_131 (sequence is synthesized)
ctgagcctctcgtaacaggcccagtatatccttccttgctcatgtaaagaattccactcatctttcaagacattttaaacagaagtcctgtgaggcctgccttgagacactcacactcaa

SEQ ID NO: 1024978 - DNA, 120 bp, Artificial Sequence
  ENSG00000242512_132 (sequence is synthesized)
tttactttcttcagaagtgtcttttctacttctctgttctagcacagccacaatgtttcatctgtttcccctactattgtgagggcttcttccacaagaagaattttgtcttctctttgc

SEQ ID NO: 1024979 - DNA, 120 bp, Artificial Sequence
  ENSG00000242512_133 (sequence is synthesized)
acccccattaccagcacatagtaagcgctcagcacatttgataatggaatggctctgattttacattcctgtatttttccggcagatagtgagtagtcagcggggactcatgcatgactc

SEQ ID NO: 1024980 - DNA, 120 bp, Artificial Sequence
  ENSG00000242512_134 (sequence is synthesized)
tgggaaaagtagagggtaatttttttatttgcttttcgagggctgatcagggctccttatttttatggcggccagcatcctgctcaccctgactccctccagcttctggtacctgcatat

SEQ ID NO: 1024981 - DNA, 120 bp, Artificial Sequence
  ENSG00000242512_135 (sequence is synthesized)
ccaggctatgttaatttccctgcatttttcctctttgtcactttttcttttttttcttcaaagagcgtcgcaatctctcaggagtttgattatattgcaagatgaataggatatttgaat

SEQ ID NO: 1024982 - DNA, 120 bp, Artificial Sequence
  ENSG00000242512_136 (sequence is synthesized)
tatgctatttaaatgagtcatctcaaccctagtgtaattgttcaccccctgtcacactaaacgtgacctacatttttaaaagagtgcttttggcctgaatagaggattgctgaaattgtt

SEQ ID NO: 1024983 - DNA, 120 bp, Artificial Sequence
  ENSG00000242512_137 (sequence is synthesized)
gggttccagttctcagcaatttatcatttgttatcaccgagtgtgtcttttgtttcacatctgggcagatgtgaacttttaaaactgtctctcactagacctatcaaaagaagctgcttt

SEQ ID NO: 1024984 - DNA, 120 bp, Artificial Sequence
  ENSG00000242512_138 (sequence is synthesized)
tatttgcaaaaagaaggtgaactgatttcctgggtgtttatgtgtgtgtggtatgtggaggggcacagaggagcagcagagttcattaaacagaagatgtctggtcttggctaagcagtt

SEQ ID NO: 1024985 - DNA, 120 bp, Artificial Sequence
  ENSG00000242512_139 (sequence is synthesized)
taaaaacatataggagtacttatgctgaattgattcacattttggttctgtggcctgaaacttgcttgtttcacccttcttttttgagagttttggttgctctaaaactaagcctgtatt

SEQ ID NO: 1024986 - DNA, 120 bp, Artificial Sequence
  ENSG00000242512_140 (sequence is synthesized)
aatgctcttgagatggatcaactggggagccctgtcatgccttaccattttttcatcttggagtcaagctgcaggacaggattcttatactgcccaaatgattggaggcacatttccctc

SEQ ID NO: 1024987 - DNA, 120 bp, Artificial Sequence
  ENSG00000242512_141 (sequence is synthesized)
cattgtccatttctttgacaggctgtgaaacataactaactccaaagccacctatcaaagttcatgaaggttttagttaggaactggtggttttgttgttacagatacttcagttattca

SEQ ID NO: 1024988 - DNA, 120 bp, Artificial Sequence
  ENSG00000242512_142 (sequence is synthesized)
gactgtgaatttgagtcacagcctactaggcaaggcccatactgagatacaaaggaactgaactttctaaattagaggtgagcagcatttctgaagtgatagataaggtccttgtactac

SEQ ID NO: 1024989 - DNA, 120 bp, Artificial Sequence
  ENSG00000242512_143 (sequence is synthesized)
attcattcagcagatattgattgtgtgcccatgaatcaggcatatgtgtagggcgttaatacaaaagaaactggcccctaccctcaagaagttcacagtctagtgaggttgacaggcatg

SEQ ID NO: 1024990 - DNA, 120 bp, Artificial Sequence
  ENSG00000242512_144 (sequence is synthesized)
cagatgataacataatggaggcatgcaagaaatgctgtggaaaattaagacagcacagtctgcctgaggagagtggtcaacgtttaatagaggaggatgtgcttgtgttggaacttgtag

SEQ ID NO: 1024991 - DNA, 120 bp, Artificial Sequence
  ENSG00000242512_145 (sequence is synthesized)
gatgagtaatggtgaaggcaaaggctactgtggctagagtctagtgcacgatgatggagatgaggtggtcagaacacgagggttcttgtatgtcaaagtatgctagttttacaccataca

SEQ ID NO: 1024992 - DNA, 120 bp, Artificial Sequence
  ENSG00000242512_146 (sequence is synthesized)
tttattattatgaattcagctgcgaggaacagaaatctgcaattcaactggcttaaacactgaggaaaatttattagcacatgtaatatgttcaaaggcagttccaggatgactgaattc

SEQ ID NO: 1024993 - DNA, 120 bp, Artificial Sequence
  ENSG00000242512_147 (sequence is synthesized)
agtggctcgactctgtcattaaggacttaggttctttccattttttttgctctgccatccttggtatgatggtttgctctcagacttgctcttctcctgatcgcaaggtgaccaaagagg

SEQ ID NO: 1024994 - DNA, 120 bp, Artificial Sequence
  ENSG00000242512_148 (sequence is synthesized)
aagagagatttgtttctttgtttttgaggtttgttggtgtttgttttgtcttgatttgtgtcttttcaatcagtaaggaaaatctttcctaaggagctctcctgccactcccatcagact

SEQ ID NO: 1024995 - DNA, 120 bp, Artificial Sequence
  ENSG00000242512_149 (sequence is synthesized)
catcctcatgcctcagtggccaaaagtgcatcacgtgcccaatcctaaaccattcactggcaaggggaatgcaaccaccattactggctcagaccaatcttgattcactccctggaagaa

SEQ ID NO: 1024996 - DNA, 120 bp, Artificial Sequence
  ENSG00000242512_150 (sequence is synthesized)
ctgtcccacttcttctggattatatggcccaggtagaggatactggaacaaaattgggtttccgatagagagtaggagaaagggagacaattgattgctgagttggcaaccaacagcatt

SEQ ID NO: 1024997 - DNA, 120 bp, Artificial Sequence
  ENSG00000242512_151 (sequence is synthesized)
tgctatggtagatgatgagaaaccagtatagataattgagcaggagtggcatgatcagttatgtttaaaaaaagtcctatcagaaatgtagagttgagcttaatagacagaaaaattgag

SEQ ID NO: 1024998 - DNA, 120 bp, Artificial Sequence
  ENSG00000242512_152 (sequence is synthesized)
aacacatggaatagtcttgtgagcagccaaggaactgatcaacacacatgtggaactggagctgaaacttttctggagtcattcttctgtagtggtaggagggggtatttaggggtagaa

SEQ ID NO: 1024999 - DNA, 120 bp, Artificial Sequence
  ENSG00000242512_153 (sequence is synthesized)
aggcaactaatgcagaacagagatttaccaagaagttccttatggtactgtggcaaacatgcaagtttttaaaaaaaggttcagatgataatgtggtccactcagaggagccactgtggc

SEQ ID NO: 1025000 - DNA, 120 bp, Artificial Sequence
  ENSG00000242512_154 (sequence is synthesized)
gacagaatgctagcattttggaactggtagtgatcttgatgtcatctagttcaagatctttattttacaagttacagaactgggacccaggcaagcaaagtgatttgttaagttcctatg

SEQ ID NO: 1025001 - DNA, 120 bp, Artificial Sequence
  ENSG00000242512_155 (sequence is synthesized)
tgtggtccatggctgaactagaaccatgcccatagattttctgactttcagcccagggcactttgtaatggattctcagggccctctcatggggtttaatgtgtccattcgggagtgctg

SEQ ID NO: 1025002 - DNA, 120 bp, Artificial Sequence
  ENSG00000242512_156 (sequence is synthesized)
tagaagctccacaggccctcttcctatgtttctcttatccttgacaacaattctattgttggaattttgttgttgttgttgttgaaatatggttttggtttctataaaaatgcaaataat

SEQ ID NO: 1025003 - DNA, 120 bp, Artificial Sequence
  ENSG00000242512_157 (sequence is synthesized)
cctgagatactaatgagaggcaattgccgtcctagtgtgaggtggggcctctggcccacttttcttgacaatctaaacatccattcacaatgacccaactacacttcttcactctttcct

SEQ ID NO: 1025004 - DNA, 120 bp, Artificial Sequence
  ENSG00000242512_158 (sequence is synthesized)
ttggtcttcaatgtgcctatgcctatcctccccagaacatatatagttttggctaaaattgctatgcagaaatttttggaaattcaccctggtagacagagcatgacagcaggcattaaa

SEQ ID NO: 1025005 - DNA, 120 bp, Artificial Sequence
  ENSG00000242512_159 (sequence is synthesized)
aaaaaaaaaagttcagttaaaaacaagaaaatggtttgagaatcaagctcttactgagaaggaatcttagcattttggagctggaagtgaccctgaagtcatctggttcaagacctttat

SEQ ID NO: 1025006 - DNA, 120 bp, Artificial Sequence
  ENSG00000242512_160 (sequence is synthesized)
tttacaaatgagaaaactgggacccagacaagcaaagtgagttgttaagttcctcctgtgtgtggtccatggctgaactagaaccatacccatagattttcttcccttcagcccaggact

SEQ ID NO: 1025007 - DNA, 120 bp, Artificial Sequence
  ENSG00000242512_161 (sequence is synthesized)
cttcgcaatgggttctcaccaagcttaagtaaagattgatctgtaaaatcaatttatttcaactttacttttgaaaatagtccaaagtattaatatattagtttatttttttggtggtat

SEQ ID NO: 1025008 - DNA, 120 bp, Artificial Sequence
  ENSG00000242512_162 (sequence is synthesized)
gccaaacattataaaactgctagttttagatgtagacagtgagtaaagattgagctaaatctttatagattgtggccttttggggcatttggtaaaagataatcctatttctgtaaaaca

SEQ ID NO: 1025009 - DNA, 120 bp, Artificial Sequence
  ENSG00000242512_163 (sequence is synthesized)
aatactgaaaagagaaaaaaaaaagcacatatgtatgtgtatgtccatctaagattgtttaagcctggaaaaacatggaaggatatatatgaagttgttatcatgggtttgcctgacagt

SEQ ID NO: 1025010 - DNA, 120 bp, Artificial Sequence
  ENSG00000242512_164 (sequence is synthesized)
gctgatgcgggtggaagaggagggatgggagaagctgtgcaaatgtatgagaaagggactaaaaagggatgtctattatgatatttatataaatttatttctaggtgtggctgtatattg

SEQ ID NO: 1025011 - DNA, 120 bp, Artificial Sequence
  ENSG00000242512_165 (sequence is synthesized)
aaaaaatgagtaaaatactttaaaaagtgatctggaaaatgagaaaagaaaaatgagtgtaattctcatgtgcgtttaaaattataatgtgtcaaatgtttgtctaaattggatgatcac

SEQ ID NO: 1025012 - DNA, 120 bp, Artificial Sequence
  ENSG00000242512_166 (sequence is synthesized)
taagaataaaattaaattggaaattttaattaaaggtgctaaattaaaggtgccaatatgtagctggacatactcttctattttcaattacattttgttttactttcacccacttgctat

SEQ ID NO: 1025013 - DNA, 120 bp, Artificial Sequence
  ENSG00000242512_167 (sequence is synthesized)
gtagtttttcatctcatgcatttttttgatactttatgtcagtagtggctgaattgtatttgaaaaatatgtatcatatataattacatacacacaattaaagctaagtttatttcaaaa

SEQ ID NO: 1025014 - DNA, 120 bp, Artificial Sequence
  ENSG00000242512_168 (sequence is synthesized)
ggtggggcagctgaataaaagcaacagatttaaaattacagatcgcactcccaccctgcctacttgggtggtattggacaggtgactttgacctctggagcctcagagtctcttccaaaa

SEQ ID NO: 1025015 - DNA, 120 bp, Artificial Sequence
  ENSG00000242512_169 (sequence is synthesized)
taagggtggcagcattacctcatagggttgtcatagcagaaaactatgtgcatgaagaatattgtccttatcatcattactattaagctacaaggacatcaaactgccagctgatacaat

SEQ ID NO: 1025016 - DNA, 120 bp, Artificial Sequence
  ENSG00000242512_170 (sequence is synthesized)
gtcttttttttttattttaagcatgtttcaaagccatttactttggtctccttttaaggaaaatgacttccccagcagcaggaattgctgagaaagtgatatttagtcaagtgctaagaa

SEQ ID NO: 1025017 - DNA, 120 bp, Artificial Sequence
  ENSG00000224394_0 (sequence is synthesized)
gcacacattaatgcaaagctgtttagttgggaatgaaccacttaagaggctcttcgagcaaaaacatcagtctatgtagcagacgtaggtccatgaagactgtcatcttgactccctaga

SEQ ID NO: 1025018 - DNA, 120 bp, Artificial Sequence
  ENSG00000224394_1 (sequence is synthesized)
ggattataacctctgaatggattctttcatgagtatttatcatccttaaaaccctgatcagaaatatcaaatgatcatagttgcaacgtgcctgcttttgcaccattgacagccagtatt

SEQ ID NO: 1025019 - DNA, 120 bp, Artificial Sequence
  ENSG00000224394_2 (sequence is synthesized)
cctccatttctttcccatttatcagcacccagcactctctctcaactctccctctgcttacatcaattacaggacaatgggcttgtcccacgatgcgggaaggatgggtataccatggga

SEQ ID NO: 1025020 - DNA, 120 bp, Artificial Sequence
  ENSG00000224394_3 (sequence is synthesized)
agaggaaagaacagggcttgatactcctccagctaattaatgaccaggggaaaaggaatgccagtcacggcccacctagggtgcatttaagcacataacatagacaacaaaaactgaagg

SEQ ID NO: 1025021 - DNA, 120 bp, Artificial Sequence
  ENSG00000273599_0 (sequence is synthesized)
tttttaaagttcacaaaccccttgaactttatccatgagattttctgatgacccaatgacttaatcctgctactgacttaatcaaaacccagtccctacagaagagacctgctcccccgt

SEQ ID NO: 1025022 - DNA, 120 bp, Artificial Sequence
  ENSG00000273599_1 (sequence is synthesized)
cacagcgccccccccggccccccatgccgcttattttaaaagcgcagctcccacaggctgcctttccttcagtttctgtccatgcccccagccccaggctgccctctcttggcggcaccg

SEQ ID NO: 1025023 - DNA, 120 bp, Artificial Sequence
  ENSG00000273599_2 (sequence is synthesized)
tcccaccccgcctgctgcactgagcccgctgggcctgggggactcttgctcagtagaacccgaggccagcaaaagctcttagcccaggatggctgcagcagcgacagtcctgaaggctac

SEQ ID NO: 1025024 - DNA, 120 bp, Artificial Sequence
  ENSG00000273599_3 (sequence is synthesized)
agagacacctggaaagggaacaaggagagcacgacagtccctgtgctgaggatccagggtggtggcggcaggggttagtgtacagtctcgagaaaacagggcggcggcagggggctgcac

SEQ ID NO: 1025025 - DNA, 120 bp, Artificial Sequence
  ENSG00000273599_4 (sequence is synthesized)
tgacctctatacaccgagagggtttttaaagttgaatgacaagggcacagctacaggaacgaccccaggaagaagtcccgtgacggctggagtcagaagcccctgaaacaagcacctccc

SEQ ID NO: 1025026 - DNA, 120 bp, Artificial Sequence
  ENSG00000273599_5 (sequence is synthesized)
cagtgaggccccaccgtgtacccagggtgctcatgaccacccccaggctctgcagcctggccagagaccaccgaggccccaggaggggcttcagagatggagatgaagctgcatctccga

SEQ ID NO: 1025027 - DNA, 120 bp, Artificial Sequence
  ENSG00000273599_6 (sequence is synthesized)
gccatgaggcccagtggggcccggacagagggagcctggtgttcacacaccacatctgttttccaacaaagtcaaaacacggtgggtcctttcagaagatccccagcacccgacacttca

SEQ ID NO: 1025028 - DNA, 120 bp, Artificial Sequence
  ENSG00000273599_7 (sequence is synthesized)
actcagactccaggcgtcgggcgaggccagacccaggagatcacagcctgtagcggggacagaaaggtgtgcactcctggaagcgtccagcaacttctctcttgttcaagtggcacccca

SEQ ID NO: 1025029 - DNA, 120 bp, Artificial Sequence
  ENSG00000273599_8 (sequence is synthesized)
ggtccagagcggggcttgtggggagaggagcacgggggcttcgtcctcggaggcgcggagctccaagcaagggctgagcagcagctgggagtctcccggaggccagaacattactggccc

SEQ ID NO: 1025030 - DNA, 78 bp, Artificial Sequence
  ENSG00000273599_9 (sequence is synthesized)
gcagctgggagtctcccggaggccagaacattactggccccgtgtgcacatgcgccttcttggagtcccaaagggaaa

SEQ ID NO: 1025031 - DNA, 120 bp, Artificial Sequence
  ENSG00000273599_10 (sequence is synthesized)
gctggtaagcggtggggttgagattcagtggcaatgggccgaggtctcctgggtgtggtgtggaccctgatggtgagcagggtggggacctcctcgagcccccatggaatcaggctgctt

SEQ ID NO: 1025032 - DNA, 120 bp, Artificial Sequence
  ENSG00000273599_11 (sequence is synthesized)
accatcaccttctccgtggcaccggcccctaccaccctgctgaagaccctcctgggcctctcctcacgtctccttttcctgcccctctctcaggagagctttccaagctgatggcctgac

SEQ ID NO: 1025033 - DNA, 120 bp, Artificial Sequence
  ENSG00000273599_12 (sequence is synthesized)
tgtgccaccccaacctggcatttgaaggccttcaggagtgaggccatgtccataacccgcgtctccactgaaccctacgccagcccctacacgagccccaagcctggctgctgctttacg

SEQ ID NO: 1025034 - DNA, 120 bp, Artificial Sequence
  ENSG00000273599_13 (sequence is synthesized)
acacacctccatacagcccctgcccttcacccctgcccagggaaatttactgggcacagcgccttgcccgctgccccacagcaaagaatgctgtcctgccagacactacagacagcagtg

SEQ ID NO: 1025035 - DNA, 120 bp, Artificial Sequence
  ENSG00000273599_14 (sequence is synthesized)
gacacgcattcttccagaaccagcccagatcctgcctctagggtgagttgcctgatgggtcttgactccgatctcctaccccgtgcaacacggggagggtgctggccctgcctgccctgg

SEQ ID NO: 1025036 - DNA, 120 bp, Artificial Sequence
  ENSG00000273599_15 (sequence is synthesized)
ctcctcaagagcaggctggggttgcctttcccgaggggtccccactacaccagccccagtgtcggaggggttgggggtcagcgcagagggtggcacgtaccaaagccaatgaggcccagc

SEQ ID NO: 1025037 - DNA, 120 bp, Artificial Sequence
  ENSG00000273599_16 (sequence is synthesized)
gtctccccacggatgcgggccgctcccgaggccacctcgcggatctgctccacgctctgaacccgcgtgccttcccgcagtgcctggtacagccacgtgttcctccggtacaggttgagg

SEQ ID NO: 1025038 - DNA, 120 bp, Artificial Sequence
  ENSG00000273599_17 (sequence is synthesized)
atgtggcagatggtagagtccgctgtctcttccacggctgcagacgggatgttgcacacggcaattcctgaaagggatgaggccaaggccggagatgagaaaacctcaagatcagtgggg

SEQ ID NO: 1025039 - DNA, 120 bp, Artificial Sequence
  ENSG00000273599_18 (sequence is synthesized)
aagccccagggctcccagcccgccctcctgagactcggttgttggcaccgggggaggcccaccttatcgtctagcagacgcggggctgggcacgtgggcggtaggccctctggctctgat

SEQ ID NO: 1025040 - DNA, 120 bp, Artificial Sequence
  ENSG00000273599_19 (sequence is synthesized)
gcatgggaagctctagccccaacatctacccctccctcccaaggaggacttttgctccaggacgtggctcatgaccaacccaactcctatggctgattttgggcctgactggcttcctcc

SEQ ID NO: 1025041 - DNA, 120 bp, Artificial Sequence
  ENSG00000273599_20 (sequence is synthesized)
tgggcttgcactgagtcccaagaaaggacccggagtggcaggaagccagtgggcctcagaccagactcctccaagtggaccccactcagcctcaaacccctcagggtctccctcatggag

SEQ ID NO: 1025042 - DNA, 120 bp, Artificial Sequence
  ENSG00000273599_21 (sequence is synthesized)
ctggcagggtgacaaagaatggcttttggttttaagctatgctaacagtttgatgcaaaaaacatacgttttaaacatactggttttaaaaaaacacctccacccccacacggatgcaag

SEQ ID NO: 1025043 - DNA, 120 bp, Artificial Sequence
  ENSG00000273599_22 (sequence is synthesized)
cgaagcgtgtgcacaatcgccctgtggtcatgtgctcagcaccctgctctgctgggaagaactcagagcagacaggatgccctccctgccccgtggagcagccttcaggtcagggccgag

SEQ ID NO: 1025044 - DNA, 120 bp, Artificial Sequence
  ENSG00000273599_23 (sequence is synthesized)
ggtggcttggggtgagccctctggccccacacgagctgcagagaccagggtcaagtatctcccagcacaaagcagctgtggcatggagagttaacccaagtcataggcagaaagggccct

SEQ ID NO: 1025045 - DNA, 120 bp, Artificial Sequence
  ENSG00000273599_24 (sequence is synthesized)
gccatttaccctcctcagccagagggtgtctggggaagaatgaatgactgccagatacaacaggggtgcaagtaggcagagggccaggctgggaacggcccctccctacacccgacaggt

SEQ ID NO: 1025046 - DNA, 120 bp, Artificial Sequence
  ENSG00000273599_25 (sequence is synthesized)
ggagatccagaggcctgcttgcagcagagaccagaggggccgagccaggggcggggccccagagggtgggctcagcagccagcctgtggctcccagttgagctctctgaggaggggtgtg

SEQ ID NO: 1025047 - DNA, 120 bp, Artificial Sequence
  ENSG00000273599_26 (sequence is synthesized)
gctatctgggcatcacgtcagcccaagtgaaatggttccctcctaatcccagctttgggacccttaggagagtgtctctcccagcaaggggtgcccaaggcactgggacagggccacctt

SEQ ID NO: 1025048 - DNA, 120 bp, Artificial Sequence
  ENSG00000273599_27 (sequence is synthesized)
taaggcagcccaggattcctctatcttaagtcctgaagattggggtggggacagattggggtggggacggcaatcaccaaggcagcttcttcggctctactggacaggaaacaagaccag

SEQ ID NO: 1025049 - DNA, 120 bp, Artificial Sequence
  ENSG00000273599_28 (sequence is synthesized)
tgggtgccacaaacccactttctagatggctgcgtggctgtctccccacaagggccacccctaggtctagggccttgagagtgacccgcttagcaagacacacagctcagagaaggtgaa

SEQ ID NO: 1025050 - DNA, 120 bp, Artificial Sequence
  ENSG00000273599_29 (sequence is synthesized)
gccactgtgagcaggtcacccacccacccaacgtggccactgagggctcctctgggccaccgacccctgccaagggaccagtgtggttgacggtgactgaggccgaccaactttcccacg

SEQ ID NO: 1025051 - DNA, 120 bp, Artificial Sequence
  ENSG00000273599_30 (sequence is synthesized)
agctggatgccaggaatcttgcaggaaactggcctcattcatttgaaatagctcagcagagaagctggggcttgatcacatgccatgttattattaagtcagacagactgaggctgatgc

SEQ ID NO: 1025052 - DNA, 120 bp, Artificial Sequence
  ENSG00000273599_31 (sequence is synthesized)
cagaggttcaagaaaatctttggcggctgggacaattttcattcctcgggcaggctaaagcccagcagggaggccccgcagcagaatcaccctcaaggacgctggctccgtgctgctgcc

SEQ ID NO: 1025053 - DNA, 120 bp, Artificial Sequence
  ENSG00000273599_32 (sequence is synthesized)
ggggctggctcggcagtgctgcctggcgtcaacagcagcacctcctcctaggagatgagctgatgctggctgggagaccccacaaggccacgtgtgtaaaggcacccgggtgggtgggtg

SEQ ID NO: 1025054 - DNA, 120 bp, Artificial Sequence
  ENSG00000273599_33 (sequence is synthesized)
gcacaaaaaggcaggttgaggcaggacatctggtcagtcttctcaccgaacttggacattcagctccgtggttccactgctcaccggagtgcagagtcccaggacggggagatggtgcag

SEQ ID NO: 1025055 - DNA, 120 bp, Artificial Sequence
  ENSG00000273599_34 (sequence is synthesized)
gaggaagagctgcagccactgcctgggatggcagaaccttcccacccagaccgcggcggcgccactgccaggaacctccataaccctcaccgctctctcggagggagcatcttcttagct

SEQ ID NO: 1025056 - DNA, 120 bp, Artificial Sequence
  ENSG00000273599_35 (sequence is synthesized)
gtcctctatcgctctgtggatgcagcctcccttctggatgagtcaagctgatccttcaagtgccacacgatgggtggctctgatactcgcaggctgggcctcccagcatccacggagcct

SEQ ID NO: 1025057 - DNA, 120 bp, Artificial Sequence
  ENSG00000273599_36 (sequence is synthesized)
ggaaaacggccccaaagaggcaagctgcttttctctcacggtcagtgccatcgtgctttaatcccttcatgactgccgctggcaaggaaaccacataaaccagcttgctagaggcggcgg

SEQ ID NO: 1025058 - DNA, 120 bp, Artificial Sequence
  ENSG00000273599_37 (sequence is synthesized)
gggtggggaggggtgtagggccctctcgaggtcttcccggctcgtggggagaagtgcaggtgagcagcttcctcaagccttgccctgctcttgccgtgaagcgctgactctcgcctgtca

SEQ ID NO: 1025059 - DNA, 120 bp, Artificial Sequence
  ENSG00000273599_38 (sequence is synthesized)
ttccagggctgacagctcagagccttgcgatcccagaaggtgtcaccagaggcctagtgtgctgcctcgtgcaacatggagggccttgttttctgggcctgcgagggaccctctttcatc

SEQ ID NO: 1025060 - DNA, 120 bp, Artificial Sequence
  ENSG00000273599_39 (sequence is synthesized)
aggagagggcctgcctgcagccacctgccgctcccagccctcagcacaaaaggcccgttgaccgcatgatgtggggaatatgcattcggagacaaaggacgtctggacagaggctcattt

SEQ ID NO: 1025061 - DNA, 120 bp, Artificial Sequence
  ENSG00000273599_40 (sequence is synthesized)
tccgcctccagagtctacattcgaaaagtgccctttaaaagggccccgcagatgtcttccaagcgcccttatcagatgggaccaggatcaatgaaaatccaccactcacagcccttctac

SEQ ID NO: 1025062 - DNA, 120 bp, Artificial Sequence
  ENSG00000273599_41 (sequence is synthesized)
attttccaaaaccgcagtccctggtcctggtcgtcttctgtgggtctcagaactcagggaacacaacctcccatctcggccctcccaggccccctgtcattgaggccttggtgcctttct

SEQ ID NO: 1025063 - DNA, 120 bp, Artificial Sequence
  ENSG00000273599_42 (sequence is synthesized)
ggccccactgcctgtgcggggcacttctagaaatggagaaataggaagttccacaggcaaggacctcccctctctccctggaaagcagcgtctggtccagccgaggaagggcagggtcag

SEQ ID NO: 1025064 - DNA, 120 bp, Artificial Sequence
  ENSG00000273599_43 (sequence is synthesized)
cacccgtatgggcctgggagctgtgtggtgaggggccgacgtgctggagaagcaagaggtgcgggggacaaggatttgagagcccctggcacatgaagctgtattctcctctgctgttga

SEQ ID NO: 1025065 - DNA, 120 bp, Artificial Sequence
  ENSG00000273599_44 (sequence is synthesized)
aacttgggatttcagctctacccagagcacaaaggacatttgttttcaaacaaaaatatccttgtttgtgccagggaaagatggaaaattttagtttatattaaacacgcctttgaagac

SEQ ID NO: 1025066 - DNA, 87 bp, Artificial Sequence
  ENSG00000224267_0 (sequence is synthesized)
cttctgggcactgaatcagctgatggccgaggagaggcactccctgcagtgcaaatctggagattttctcaagcctctttatgaaaa

SEQ ID NO: 1025067 - DNA, 120 bp, Artificial Sequence
  ENSG00000224267_1 (sequence is synthesized)
gtatacaaacctctactaacttcttgggcttctgaataaaggaaaggactacctaatgacagtaatagcttgactgctgaagaattatgtcagttaataaaaattgcttcataggaaaaa

SEQ ID NO: 1025068 - DNA, 120 bp, Artificial Sequence
  ENSG00000273335_0 (sequence is synthesized)
tgctgtgagcatgtgagcctaagtgggtgagcccactcattcattgatttattatttggagccaatatgtgtggatattgaatgtatttgttggctgccacttgagcatttattccttcc

SEQ ID NO: 1025069 - DNA, 120 bp, Artificial Sequence
  ENSG00000273335_1 (sequence is synthesized)
atttaagccaggcaacataaccattccctctagcagcagagatggtcacaagcccagtcagaaacaatgaacccacaaagactggggctgaggcttccagtaaactgtagcttccttgct

SEQ ID NO: 1025070 - DNA, 120 bp, Artificial Sequence
  ENSG00000273335_2 (sequence is synthesized)
gagcctggggttgaagtcagtactgtcaaatgaatgcgggaaagatggagaagaaccttgtgtttggtggcatgatttgagctgcagtatcaaacctcacctgtttgattctatggacta

SEQ ID NO: 1025071 - DNA, 120 bp, Artificial Sequence
  ENSG00000273335_3 (sequence is synthesized)
tcctatagactattcgggattgtgagcaaggccatcttacagactatccagaattgtgaaccacaaatttcctgtactgtttaagccagttcatattaaaattctaaaagtcctaactaa

SEQ ID NO: 1025072 - DNA, 120 bp, Artificial Sequence
  ENSG00000286232_0 (sequence is synthesized)
agcgacacctcgttttcatctttccattgcaaaaaggcaaaaccaggaccatggcgttgtgacagaaccatctcgtgaggggcaccttctctcacttgcccaggggtccaagtgtgtcag

SEQ ID NO: 1025073 - DNA, 120 bp, Artificial Sequence
  ENSG00000286232_1 (sequence is synthesized)
ggcggctagatcgaccgcaataaagatgtgcctcagaaagtttcccagactatgaatccagaggatggtaaacgtttaacccaaaaacaccccagaggaagacaggaagacatcctcacc

SEQ ID NO: 1025074 - DNA, 120 bp, Artificial Sequence
  ENSG00000286232_2 (sequence is synthesized)
actccagagctgcctcgacctccccgcaaaggtgccatcactcaaccatgacaaaaaaacacttgaagctcacactacccccaccccactaccatttacgaaggatacgagacttcaaaa

SEQ ID NO: 1025075 - DNA, 120 bp, Artificial Sequence
  ENSG00000286232_3 (sequence is synthesized)
tggatttcaaaggcccctgtaattttggcagcatgacattttatgtcttataagctatttttattagccaggattgaagaaaattgacgtttaccagccattaacctttcaagcacataa

SEQ ID NO: 1025076 - DNA, 120 bp, Artificial Sequence
  ENSG00000286232_4 (sequence is synthesized)
ctctattttttttgctccacatggaagagtatcttacacgtctgtgcgggtcagtccttaagtgtccagcacctttaaggaaaaagtcattgtgaatcctctctcttctcaagaaaacat

SEQ ID NO: 1025077 - DNA, 120 bp, Artificial Sequence
  ENSG00000286232_5 (sequence is synthesized)
aagttctataattttacggactcttgatcacaattttatagccttcggcccagcactggtattccatttttatcttaaaatataagaactagataaaacaagttatataatcccttcttt

SEQ ID NO: 1025078 - DNA, 120 bp, Artificial Sequence
  ENSG00000286232_6 (sequence is synthesized)
gtatctgagggaagatggaaaagaataagataacctgagaagaagctgcaggctgcagaaggcctatcctcagaacaacttacttctaaaccccatcagttcatcgctgcccaagcatta

SEQ ID NO: 1025079 - DNA, 120 bp, Artificial Sequence
  ENSG00000286232_7 (sequence is synthesized)
aataggatacggcgtaatccaatcataccaacacctgattaataaataacgatagccggtaacttacgttcactgccgcctctctcccccatcagcctaacagagctttaaataagccat

SEQ ID NO: 1025080 - DNA, 120 bp, Artificial Sequence
  ENSG00000286232_8 (sequence is synthesized)
tctccataatttatttattcaatttttaaagcctgccttttgccaaaagatcttgggccacacataagaaatgtaaagaccattaggggagaaagtatctaaacaaaaccataaaaccca

SEQ ID NO: 1025081 - DNA, 120 bp, Artificial Sequence
  ENSG00000286232_9 (sequence is synthesized)
tcaaatcaagccaccttctgatggaaaaatgactgccgcaaaggtcggccggccctctccacatctgggggccagattctggaggagattggtcaggggagcttaaggtcatcgtcaaca

SEQ ID NO: 1025082 - DNA, 120 bp, Artificial Sequence
  ENSG00000286232_10 (sequence is synthesized)
gccggggccatgtggaaatgagtaccactggctctggaggtccggtcatgcgtcgggaacatggagttgctatctgacagtctccccgccgggagcctctggagcctggggttgggagag

SEQ ID NO: 1025083 - DNA, 120 bp, Artificial Sequence
  ENSG00000286232_11 (sequence is synthesized)
caactcacctttcccaaatatcagcagccaggcaggtcacttcacagggaccagaagaggaggaggagagcaggagggcagctctggcaggactggggtctgcttggcggagcagggcct

SEQ ID NO: 1025084 - DNA, 120 bp, Artificial Sequence
  ENSG00000286232_12 (sequence is synthesized)
gatgtgtttacattaataaataagtataattaattaaataaataattataactaataaataattaataaataagagcaagccagcaagccttggtgtttccagagcctggtgcctccata

SEQ ID NO: 1025085 - DNA, 120 bp, Artificial Sequence
  ENSG00000286232_13 (sequence is synthesized)
cacagggacacggatcaccctgctgggtcttccaggccctcatgagatggacctggcatctccctcctatggaggtaggaaaggtcacacaggccacaaaatggtccagtgtcacagagc

SEQ ID NO: 1025086 - DNA, 120 bp, Artificial Sequence
  ENSG00000286232_14 (sequence is synthesized)
gatggggtggagggttgggctctgaaggctgccccccatcaatcctggctcctccagggccactaaggtagtggcagtgccaaactgtcctatgtcagcaccccaactctgtgaaaggag

SEQ ID NO: 1025087 - DNA, 120 bp, Artificial Sequence
  ENSG00000286232_15 (sequence is synthesized)
ggttagtaacatgcctcctgcctagggtggtcatgcagatgaacccagctggtacggtgcagcacccggcatggggagggctccatcagtggaccagaacaacagacagtggtgctgtta

SEQ ID NO: 1025088 - DNA, 120 bp, Artificial Sequence
  ENSG00000286232_16 (sequence is synthesized)
acccctcaagtggggccgagccccaggaccaccacagggctttccatggggttctgatgctcacccaaggtgtctgcgcaacactcctcatcacatttgcaggatgcaggagtcaaacac

SEQ ID NO: 1025089 - DNA, 120 bp, Artificial Sequence
  ENSG00000286232_17 (sequence is synthesized)
cagcggctgtccccacccacaaatcgtccagagccttggtaatatcccattgtcttaatccattggtgttgctataaaggaacacctgaggctgagtaagtgacacagaaaagaggttta

SEQ ID NO: 1025090 - DNA, 120 bp, Artificial Sequence
  ENSG00000286232_18 (sequence is synthesized)
tttggcgcatggttctgcaggctgtacaggaagtatggcactggcatctgcttctggggaggcctcaggaagcttccactcatggcagaaggcaaagggcagcccatgtgttgagatcac

SEQ ID NO: 1025091 - DNA, 120 bp, Artificial Sequence
  ENSG00000286232_19 (sequence is synthesized)
atggcaagaatggaagcaagagcaatgagagggaggtgccaggctctttctataaggatgagctctcccaggaactaacagagtgggaactcactcattaccacaagggcagcaccaaac

SEQ ID NO: 1025092 - DNA, 120 bp, Artificial Sequence
  ENSG00000286232_20 (sequence is synthesized)
cactcatgaacactcaccaggcccacctccaacagctgggatcacatttcaacaagagatttggaagggacaaatactcaaaccatagcaccccctgaagaaaacaagaagacaggagaa

SEQ ID NO: 1025093 - DNA, 120 bp, Artificial Sequence
  ENSG00000286232_21 (sequence is synthesized)
aaggtatcttcctctttcaagttctcgctgatgcaagccaacccggcatcaggaaaaagcaattcagcccactgacctgttggcctgggcctccccgtgtgcaggtcccactcggctccc

SEQ ID NO: 1025094 - DNA, 120 bp, Artificial Sequence
  ENSG00000286232_22 (sequence is synthesized)
actgcctggctttgcctcctggttctggctgagatgctccgagacatgagcaggacaaggtcaagcgcagccagaggtgccttctcctctcctcggcctggagcccctcctcgggatcca

SEQ ID NO: 1025095 - DNA, 120 bp, Artificial Sequence
  ENSG00000286232_23 (sequence is synthesized)
tgctggagaggtgggtggacccgagatgctctggcatccagctacatgccaccccctgggccagccaggcccgctcccattccaggcactggctctccagctgcccaacacagaaagaga

SEQ ID NO: 1025096 - DNA, 120 bp, Artificial Sequence
  ENSG00000286232_24 (sequence is synthesized)
gatgggagggcaggctgtgtgtcccacagccacacatgtcggaagaagacccttaggggtacaaagagcattcccctgtcaagtacaggcccagacccacgtctgcaatcagcccgctgc

SEQ ID NO: 1025097 - DNA, 120 bp, Artificial Sequence
  ENSG00000286232_25 (sequence is synthesized)
aacacaggctgcaagagggacacggatctgccctgaagccagactcagcagccgctttcctgagctgtgtgcgaaccctcagccaggctgcagacacacagctgctggaaacacaggaca

SEQ ID NO: 1025098 - DNA, 120 bp, Artificial Sequence
  ENSG00000286232_26 (sequence is synthesized)
ggagactcctgcagccagaaataaaatatttttgcatttccacagtaaagcggttttgggcagagaagaggcatgttctaaaaacgccagagagtgcccagctcctctctgcatccctcc

SEQ ID NO: 1025099 - DNA, 120 bp, Artificial Sequence
  ENSG00000286232_27 (sequence is synthesized)
acatctcatcagcagagggagtgtgcctctcctctctgtctctgttgaacgatccattccccaacgcagacctttagattaacaaaatatttacagtatatctatgtgatattatctgag

SEQ ID NO: 1025100 - DNA, 120 bp, Artificial Sequence
  ENSG00000286232_28 (sequence is synthesized)
ctataatccttgttaagattccatttgatagaggaagataatgggtggagaacaaatgttccatatacattttaattccaatgaaattgttccatgtcatgctttacaatataaaatacc

SEQ ID NO: 1025101 - DNA, 120 bp, Artificial Sequence
  ENSG00000237259_0 (sequence is synthesized)
ggagggcagaaaggatcgaggtagagctctggctctggatctgctgcagagagaaaagttagctctggtggcctttacctcaggctttgatgacagacagaggaaccaacaatctaacct

SEQ ID NO: 1025102 - DNA, 120 bp, Artificial Sequence
  ENSG00000237259_1 (sequence is synthesized)
cgccagtgctgaggagctcctgcagagaaagcctgctcttccagcccttgtattcaggacaggtgccgggtggtccctcaagaccctttttcagcagtaaatcctacctgctttcactga

SEQ ID NO: 1025103 - DNA, 120 bp, Artificial Sequence
  ENSG00000235120_0 (sequence is synthesized)
tgaagagtaatacgtgggagaaggaggcatagagaataaaaagaaaccatgattcctatcctgaagaagcttagagtctagctgaagaaacaagatactacagaatgaaaaatcttgaga

SEQ ID NO: 1025104 - DNA, 120 bp, Artificial Sequence
  ENSG00000177340_0 (sequence is synthesized)
acaggctcccgggccacgagaaaccggccgagcagtccgggccaagctccccggaaccctcggccgtcgcaacccccgacgccagggctgaagcgccgggcactgccgcctccctcggtc

SEQ ID NO: 1025105 - DNA, 120 bp, Artificial Sequence
  ENSG00000177340_1 (sequence is synthesized)
gcccgcccgcacgcccggagcggggaagcacgccgcctccctacgcaccagcatggcacctcgcacaagtagcgccgccaaagtttccccacgagggggctgagggacaaaagcccctcc

SEQ ID NO: 1025106 - DNA, 120 bp, Artificial Sequence
  ENSG00000177340_2 (sequence is synthesized)
cgaaactcgcccgaacttcgagggcctccgacctgcacggccctacgcccaggcggcggccccgagcgccgggggcccgcacgggcacatgcagccctttgttttctgtccagccgggcg

SEQ ID NO: 1025107 - DNA, 120 bp, Artificial Sequence
  ENSG00000177340_3 (sequence is synthesized)
ctgcctacgtgcagcatcagggatgtcggagcgtttcgcaggggccggacactggacgatcaccctgggtaggggtccggaccccgcgccccgaagagtccggagcctggccccccgacc

SEQ ID NO: 1025108 - DNA, 120 bp, Artificial Sequence
  ENSG00000177340_4 (sequence is synthesized)
ctcccctcgggagcaggcccatttaatcaaagttttgcagtgtccttgatgagaaacgcccggagtatccgccccgcacgggcggagagttggcgactttcactctgctttttaaactgg

SEQ ID NO: 1025109 - DNA, 120 bp, Artificial Sequence
  ENSG00000177340_5 (sequence is synthesized)
caagacgccatcatcagcaaaccacattgtcctgccggccggacctgcccgacggcggccgcatcccacggctcacgcggggctggacattcggacaaggaccagggtcgcagcccgaag

SEQ ID NO: 1025110 - DNA, 120 bp, Artificial Sequence
  ENSG00000177340_6 (sequence is synthesized)
cgccgcctccatctccagccaagttggcttccctggccatcttacagcgcggacggccgcccataaacgggaagccctcgcggtgtcgcccacacctacgctacaggtgaacgcaccggg

SEQ ID NO: 1025111 - DNA, 120 bp, Artificial Sequence
  ENSG00000177340_7 (sequence is synthesized)
agcaaaacttcgggctccgaaagcaccccggacaccagaggctcttgggcgcggtccgaagagggcaggcgagtggaagacgggctgtttttaagcgaccgcgtgttgctctcattgtcg

SEQ ID NO: 1025112 - DNA, 120 bp, Artificial Sequence
  ENSG00000177340_8 (sequence is synthesized)
catccgcatccctccggagttgagcaaacaacgccacgccgcgtgcgctccggcagagcccagcactgacccccaaaggccgatttaaagaccctcggccgccagctcggaagcggatgg

SEQ ID NO: 1025113 - DNA, 120 bp, Artificial Sequence
  ENSG00000177340_9 (sequence is synthesized)
caacttagtttccgagcgaatggcgtttattgtccaccctagtccgagggctgcagtcaactaaaccacgaggtttcacaacggcgcccgaccctgcccgcgcctcgcgcccacgcggac

SEQ ID NO: 1025114 - DNA, 120 bp, Artificial Sequence
  ENSG00000177340_10 (sequence is synthesized)
gcaccgaccccggccgctgcgcggtggccaacgagtcgctttcctctcgggcctttcggccgccgggctcctttccgcgagagaacactgcggcggagaaaagtcattgtcaccttcaac

SEQ ID NO: 1025115 - DNA, 120 bp, Artificial Sequence
  ENSG00000177340_11 (sequence is synthesized)
gtggatccctcaactccggcgactcctcaattatgcccaggctccactcacttccccgccccgagactttcggtttgcctcaaataccctccccaattaataaatacacactaaacacga

SEQ ID NO: 1025116 - DNA, 120 bp, Artificial Sequence
  ENSG00000237250_0 (sequence is synthesized)
cgctgaatccaagagtacaaatgaagtcactgggttcctgggaaagacatgaggctggagagccaggctggtaaacagacagcagccaaagcaggcctgaggatgaagaagcaggtcaca

SEQ ID NO: 1025117 - DNA, 120 bp, Artificial Sequence
  ENSG00000237250_1 (sequence is synthesized)
gagcaaagtcactccataggaaccagctagtgaggctgcctgctctccactgggaactggacctctgatgatgaactttctccttgtgccatctactctttcatcaagcaaagcttcctg

SEQ ID NO: 1025118 - DNA, 120 bp, Artificial Sequence
  ENSG00000237250_2 (sequence is synthesized)
aagcatctgctgtatcaggagctctgctaagagacacagaagagactgtgactaccatttctatcagccaagtaggatactaacaaggctccaaggattaaggtcccagaaaggcctgcc

SEQ ID NO: 1025119 - DNA, 120 bp, Artificial Sequence
  ENSG00000237250_3 (sequence is synthesized)
acccacagaactttcgagtctacaggaacacctggaggatggatggaaaggagggaccattccaatagcctgccttcctgggaaggagagacttttgcccaggattgaggagacctaagt

SEQ ID NO: 1025120 - DNA, 120 bp, Artificial Sequence
  ENSG00000237250_4 (sequence is synthesized)
cctatttccaactttgatgaagacagtggactcctccatgaacaatttactcatccttggacttcccactccaggactgagattacatttgtcctgttgcttccactgaaagaagagcca

SEQ ID NO: 1025121 - DNA, 120 bp, Artificial Sequence
  ENSG00000237250_5 (sequence is synthesized)
gaaatatgccttagaattttggaagagaactgcccatcttcaaggatggatattggtctccccggagtcgctgacagggttcctggggaagaataagagctcctagcatcgttgatgtag

SEQ ID NO: 1025122 - DNA, 120 bp, Artificial Sequence
  ENSG00000237250_6 (sequence is synthesized)
cttcttttagatgggtggaaactcagatcctgctgatggagtacgtacaggcatgccttcaacaggaatagagacttcaggaggcagtgagcagattctagctctggcattgctggggtg

SEQ ID NO: 1025123 - DNA, 120 bp, Artificial Sequence
  ENSG00000237250_7 (sequence is synthesized)
aggatatgtctgccctcccaaccctcttctacttttggacttctaaaaagtacctggacaattcagagggaggtagatgactgaagtgtgattttccaaaggcagaaggaggctcgtcac

SEQ ID NO: 1025124 - DNA, 120 bp, Artificial Sequence
  ENSG00000237250_8 (sequence is synthesized)
agcctactttatccaaatgggcccttaacctgcagtcctaccagcctctcaaacagcgaaactttgcagctggcagagatgtgtatgacacacctgtgctgccaatcactgaagaaacca

SEQ ID NO: 1025125 - DNA, 120 bp, Artificial Sequence
  ENSG00000237250_9 (sequence is synthesized)
tgtcttgaggaacctaaggagaaaaactcagtggcaattgcttgtcagtgaaaacagtcgcggcacacagggagagatccactgaccctgtggggctggtccctacatctggcgatctga

SEQ ID NO: 1025126 - DNA, 120 bp, Artificial Sequence
  ENSG00000237250_10 (sequence is synthesized)
cgtggggctctccctcgctgtgtgaagttgcaccctgagtgtgggatcagcagaggagttcaacgagatattcctgaggattgcggtcaataaacttggtgaccttgaggatgttgcagg

SEQ ID NO: 1025127 - DNA, 120 bp, Artificial Sequence
  ENSG00000237250_11 (sequence is synthesized)
aagaagagagagggcctcgtttgggagctgttcacctctgtcctaatacagggcaccaggtcctgttccaatggcagacagcatgggaagccattaatgtgcctgagttctgcagtcaga

SEQ ID NO: 1025128 - DNA, 120 bp, Artificial Sequence
  ENSG00000237250_12 (sequence is synthesized)
cagctggtgttggatcctctaaccaactctgtgactggacaggagttatagcctctttccaagtgaattatgaagagcaagagcaagtgtggataatatggaagctcattccaggatgtt

SEQ ID NO: 1025129 - DNA, 120 bp, Artificial Sequence
  ENSG00000237250_13 (sequence is synthesized)
agtcgcccccgccagcctgttcaccgtgttatcctgctgctctgctgccccactcctccaccagtcacgatggaagaagagatcgccacgcttgccattgacaatggctccagcatgtgc

SEQ ID NO: 1025130 - DNA, 120 bp, Artificial Sequence
  ENSG00000237250_14 (sequence is synthesized)
aaagctggctttgctggggacgatgccccccaagctgtgtttccctccatcattgggcacccccggcacaagagcatgatggtgggcatgggccagaaggactcctacgtgggcgacaag

SEQ ID NO: 1025131 - DNA, 120 bp, Artificial Sequence
  ENSG00000237250_15 (sequence is synthesized)
gcccagagcaagccggcatcctgaccctgaagtaccccattgagcatggcatcgtcaccaactgggacgacatggagaagatctgggaccacaccttctacaatgagctgtgcgtggccc

SEQ ID NO: 1025132 - DNA, 120 bp, Artificial Sequence
  ENSG00000237250_16 (sequence is synthesized)
tggaggagcacccagtgctgctgatcgaggcctgcccgaaccccaaggccaacagagagaagatgactcagatcatgtttgagaccttcaactccccggccatgtatgtggccatccagc

SEQ ID NO: 1025133 - DNA, 120 bp, Artificial Sequence
  ENSG00000237250_17 (sequence is synthesized)
ccgtgctatccctctacgcctctgggcgcaccagtggcattgtcagggactctggagatggggtcagggtcactcacacggtgcccatctacgtgggctatgccctcccacatgccgtcc

SEQ ID NO: 1025134 - DNA, 120 bp, Artificial Sequence
  ENSG00000237250_18 (sequence is synthesized)
tgcatctggacctggctggcagggacctgacaggctacctcatgaagatcctcaccgagcgtggctacagcttcaccacctcggcccagcgggagatcatgccccacatcagggagaagc

SEQ ID NO: 1025135 - DNA, 120 bp, Artificial Sequence
  ENSG00000237250_19 (sequence is synthesized)
tgtgctacatcaccctggacttcgagaaggagatggccacggccgcatcttcctcctccctggagaagagctagagctgcccaatggccaggtcatcaccatcggcaataagccatcccg

SEQ ID NO: 1025136 - DNA, 120 bp, Artificial Sequence
  ENSG00000237250_20 (sequence is synthesized)
gtgccactaatgtggcaaagccaaaattttaaccaaatctgatttcagtgctctgacccagaaagttcttatgctcacatcagctattcagatgttaacatttggtattttaaattacag

SEQ ID NO: 1025137 - DNA, 120 bp, Artificial Sequence
  ENSG00000237250_21 (sequence is synthesized)
aatgatacatatctgagatagacctcttcaagtcttccttataaattagaaactaaagatttttcaaacagaaatactttcaacttttcaagaagctttaattttgtctcataagatgtg

SEQ ID NO: 1025138 - DNA, 120 bp, Artificial Sequence
  ENSG00000237250_22 (sequence is synthesized)
aatcgactggatctgttatttagaatgattagcacactgggagtactggcagcaaagcctttgaaattgataaaaatatgtgctgtaatcggacagagatcatccatttgttacgccatt

SEQ ID NO: 1025139 - DNA, 120 bp, Artificial Sequence
  ENSG00000237250_23 (sequence is synthesized)
ccaaagttccctgttattgcctgtgacatttcccaaatcatctagagattcaagctgttagaacagtttcttttatcagtcatctccagaggctcatcaaactgagaattgtataatttt

SEQ ID NO: 1025140 - DNA, 120 bp, Artificial Sequence
  ENSG00000237250_24 (sequence is synthesized)
gtatttttaaatccatgtggcacttgccacagacagaacctttggaagatgatattgttggtgtctagcctttggttaagatcaacacttgatgggtgatttttaatattaataaaaaca

SEQ ID NO: 1025141 - DNA, 120 bp, Artificial Sequence
  ENSG00000237250_25 (sequence is synthesized)
gctagcttaatgttaagtctttgttcttttaaaagactgaagagaagagaaatagagtaactacacttgtgatatcacctagtatatattaatacattaaatatgaaaattcagtgaaaa

SEQ ID NO: 1025142 - DNA, 120 bp, Artificial Sequence
  ENSG00000235126_0 (sequence is synthesized)
atttcagcctccacccagctgctgaacagacaggcacacactgaacagcctcacccgccacagccttgctctcaagcgttctgctttcctgcatcagcagaaataaggggaccaatttat

SEQ ID NO: 1025143 - DNA, 120 bp, Artificial Sequence
  ENSG00000235126_1 (sequence is synthesized)
catacctgctgggtgccagatgacgtaactacggctttgggatgttacgcaacgagtaaggccttgtgagtcttcacagaaagggactggcctggaggctccgagcggtcagctagttcc

SEQ ID NO: 1025144 - DNA, 120 bp, Artificial Sequence
  ENSG00000235126_2 (sequence is synthesized)
gacatgtctgcgtcaaagcttttctccaagttcgtcttcagttgctatttctgaagccacatcacaccctgagaaactcctcccttttcctctaccctgcttctccccccgtctgtctcc

SEQ ID NO: 1025145 - DNA, 120 bp, Artificial Sequence
  ENSG00000235126_3 (sequence is synthesized)
ttcttgtcacttttagttggttttgcacgggaactctgaggccatcccagctgcccttgtctgcccgtgagaatccccttccacagcgcctcaagagcaggatggaagttccaagagtat

SEQ ID NO: 1025146 - DNA, 120 bp, Artificial Sequence
  ENSG00000240175_0 (sequence is synthesized)
cacagctgaaatgcttgtctctgcttcctgatgtctgaatcttacactgggaagactgcaggcaactcaatggcccagggctagaatcatctgaaacctcaggtttagcttcatgatcaa

SEQ ID NO: 1025147 - DNA, 120 bp, Artificial Sequence
  ENSG00000240175_1 (sequence is synthesized)
aatcacctcagggcatactacaatcaaccaaacatcagccttcaagagatgcaccatatgactacatccacagagcatttgatgaatttctgtccataaaaaccctctgagagaagtcat

SEQ ID NO: 1025148 - DNA, 120 bp, Artificial Sequence
  ENSG00000240175_2 (sequence is synthesized)
agtcctgtagagctcaccatgggatacactgctccatgacgactgtgtctctgcctcgtctacttccattgctcatccaggaattgagaagactttatcatttaagccatgagatggctg

SEQ ID NO: 1025149 - DNA, 120 bp, Artificial Sequence
  ENSG00000240175_3 (sequence is synthesized)
aggaagaaaaaaccagatgcctgtttaagtcacctttagatttccacttcttcttccactgaattgtccttgaaatttcctttggaaataaattccaaggtaataaaaggcctcagtgca

SEQ ID NO: 1025150 - DNA, 120 bp, Artificial Sequence
  ENSG00000247381_0 (sequence is synthesized)
attaaagtgtggacagtgaaaaagtcgtttattagctggacgtcctgatagtcctcgctgatactggaggtccttgccggccctcttccccctttcccttcacagagacgcggtttacac

SEQ ID NO: 1025151 - DNA, 120 bp, Artificial Sequence
  ENSG00000247381_1 (sequence is synthesized)
ccgggagaacacaggttaccttgttcttgctggaccttccacaagtgtttgcacatgacctggaagacagtcagaggcagaagtccctgcaaatgctcctggctacttcctgcaggcagc

SEQ ID NO: 1025152 - DNA, 120 bp, Artificial Sequence
  ENSG00000247381_2 (sequence is synthesized)
tcatgctgctgcagcagaagactttcctatgtctagctgccagtattctgggtgctgggggcatcctgttcctaggatcacagccatggtggtatgttctagaactcagaaatttaccaa

SEQ ID NO: 1025153 - DNA, 120 bp, Artificial Sequence
  ENSG00000247381_3 (sequence is synthesized)
atcactggatggaccagaggagtgagctccaggttgggtttccagaagggactcccagaactcttccaccatacaggcctctcagggagctgctccctctgccatggtcagtgagagggg

SEQ ID NO: 1025154 - DNA, 120 bp, Artificial Sequence
  ENSG00000247381_4 (sequence is synthesized)
gaagcaggagccgccattggggttgttgagttcgtggctgcaacccagggatgaggaagctgctgctacacacccatgaagctgatgcctggacataaatccctactgataagtgtttac

SEQ ID NO: 1025155 - DNA, 120 bp, Artificial Sequence
  ENSG00000247381_5 (sequence is synthesized)
gacatttccagcgtggtgccgacactgcatggaaatgctgcatggaaagtccttatacatctatctttgtgcatttattgtgagcacctactatgagtaaaacctgggctggtggctgga

SEQ ID NO: 1025156 - DNA, 120 bp, Artificial Sequence
  ENSG00000247381_6 (sequence is synthesized)
gaaacatgaagatgagtaagagccaattcctgttcttggggatttaataatatattcaagggaaaagacacaaaataaccatttccagaaaaaaaaaaaaaaactatatctctgaaaaag

SEQ ID NO: 1025157 - DNA, 120 bp, Artificial Sequence
  ENSG00000247381_7 (sequence is synthesized)
tgcaaagaaattctgtttccccgccagggccaagggctgagtttgtgagttgcttgtttttctctgtctattttcaagtatttgggaggagaagtgtgtgcagggcgaaggcggccacgc

SEQ ID NO: 1025158 - DNA, 120 bp, Artificial Sequence
  ENSG00000247381_8 (sequence is synthesized)
gagcccggagcagctttcattgagaagccacgtgtccgtctccaaaggaccctccaacttaaccagcgtcattgtccatttaacccacatcggcagcgtcctcccccataaaaggatttg

SEQ ID NO: 1025159 - DNA, 120 bp, Artificial Sequence
  ENSG00000247381_9 (sequence is synthesized)
caatttcaagatattctagcgtaaatgtttctgacagttcccccgctctctgggcatgagcggggttatttatttcagctgtgccaaatgggtcaccttggagagatgtctgtgcgcaaa

SEQ ID NO: 1025160 - DNA, 120 bp, Artificial Sequence
  ENSG00000247381_10 (sequence is synthesized)
tctaaagaaacttacaaagggtctttttcaggattcaagtattttgtttcgtgcgcatttccaacccatcaaatcagctgcaggcaccgcaccgtctaacagacccaggtgttcctgctg

SEQ ID NO: 1025161 - DNA, 120 bp, Artificial Sequence
  ENSG00000247381_11 (sequence is synthesized)
gaagaaactgtctttaagtttcccagaattgaaggggcttttctcgcttgctcacgcccactcttttgaaaccctaatggctgaagagcatcatcaagagaaggggaagatgaagctgac

SEQ ID NO: 1025162 - DNA, 120 bp, Artificial Sequence
  ENSG00000247381_12 (sequence is synthesized)
tccctgcacctgcttcctccccattctgttggctcgggtcggtgtgggcttttagcctctctgaatgtggaggttcccagggatacggggaaccacaaaggtccatattctcaaatgcag

SEQ ID NO: 1025163 - DNA, 120 bp, Artificial Sequence
  ENSG00000247381_13 (sequence is synthesized)
cacttcttaaccaaggcatggctttttctaggtggtcggaggccaaatactctgctgctggccatcccaaccagtaggcacagggaaatgccagaaaagaagcagctggggcttctcttg

SEQ ID NO: 1025164 - DNA, 120 bp, Artificial Sequence
  ENSG00000247381_14 (sequence is synthesized)
ctgaggaagagggtgaaatgaaccttgcttgccgcagccagtttctgaccctgctgcagagatgacggatgagattccagctgtgatggagatgtggtcctgggaggccattctaggcac

SEQ ID NO: 1025165 - DNA, 120 bp, Artificial Sequence
  ENSG00000247381_15 (sequence is synthesized)
tgctcttcaaagaggttgtctccatcctgggatagaagttcataaggggaaatgtacaaacacagttttcctgccacctccaagctgcttggggccggactggatgccctgccggcccct

SEQ ID NO: 1025166 - DNA, 120 bp, Artificial Sequence
  ENSG00000247381_16 (sequence is synthesized)
cactcttcttacctttgaacatcgaccctggccaggcatttgtttaggcaggttttctaatttaacttttacaacaacctgtgaaatggctacgattaacccgctttcatggctgagcac

SEQ ID NO: 1025167 - DNA, 120 bp, Artificial Sequence
  ENSG00000247381_17 (sequence is synthesized)
ctggctgggagatgtaaggtacttgcccaaggaaaccaatcaattatcaacctgaatttgcctgacttcccactcatgctttggttgcagttccagagtctgctacaggatctcccatac

SEQ ID NO: 1025168 - DNA, 120 bp, Artificial Sequence
  ENSG00000247381_18 (sequence is synthesized)
agagtggcctgaaggcactggtttcccttgggaaacagcgaactcatgtccctggacttctcccctgtggcctccctccctgcttccctgggactgttagtaccttctcctatgtttcat

SEQ ID NO: 1025169 - DNA, 120 bp, Artificial Sequence
  ENSG00000247381_19 (sequence is synthesized)
gttgaccatacagctttgcctttttccagtctaggtttatgccagacattgtgtctgttattttccctttttaaagtgatatctgggctgagtgcaatggctcatgcctgtaatcccagt

SEQ ID NO: 1025170 - DNA, 120 bp, Artificial Sequence
  ENSG00000281332_0 (sequence is synthesized)
cttggcaagtcgtcttataaaccaccaataatagcctcttaaaaattcaaaaattactcctcttggctaacaaaataaatgcaaattaatttaataattgttgaagaaattaaatttttt

SEQ ID NO: 1025171 - DNA, 120 bp, Artificial Sequence
  ENSG00000281332_1 (sequence is synthesized)
aaaattaaaaaattgcaatgttgaaattctcaaccatgcttatccagaccttttcctatactactaactgccctgggcttatcttaaatacttctcagaagatttacttgttttacacca

SEQ ID NO: 1025172 - DNA, 120 bp, Artificial Sequence
  ENSG00000281332_2 (sequence is synthesized)
ggataggcaaagtatggcccacagtgtatttttggactgtctgcaagcacagttgctataatttttaaaaggctgaaaactttaaatttttgtaaatatgctcattaactgtttattagg

SEQ ID NO: 1025173 - DNA, 120 bp, Artificial Sequence
  ENSG00000281332_3 (sequence is synthesized)
cttcattaattttaaaatatacagagactatcctattcaactatatttgtatcctatttctaattctcctaacaattatatacactggcaaaaactcttcagatgatatataaggaaaag

SEQ ID NO: 1025174 - DNA, 120 bp, Artificial Sequence
  ENSG00000281332_4 (sequence is synthesized)
gtcaaatatactaccgaattcatccagctttccaaagatgctcaaaatctttctgtgtctctcactccctcccttaacccacataccacatctgaaaaaaaatgatatggtgtaacgatg

SEQ ID NO: 1025175 - DNA, 120 bp, Artificial Sequence
  ENSG00000281332_5 (sequence is synthesized)
ccagtattctaaatgcttgaagggcttatcacatgccctttccaagctgtgacagaagcatgtcccttggaccccggcatcctgtcaatctcacctctgaaggtgacccagtctcatact

SEQ ID NO: 1025176 - DNA, 120 bp, Artificial Sequence
  ENSG00000281332_6 (sequence is synthesized)
tcactgaaacaaagaccattagacgccagcactcccgacttcttttatctccactttaacatttctccatatagtaatcctcacttttctactccctgtcatctcagaaaaggaattctc

SEQ ID NO: 1025177 - DNA, 120 bp, Artificial Sequence
  ENSG00000281332_7 (sequence is synthesized)
tctcctcttttccacagttagcttctcaaatttgtgcctttaattctacccctcccaaatattccaagacttgctccactaattatttcctctcttggaatcttaatctcatcctcttcc

SEQ ID NO: 1025178 - DNA, 120 bp, Artificial Sequence
  ENSG00000281332_8 (sequence is synthesized)
cttgatccctcccctcagcctttaaaactcctagaccttaaaacactctctgtgatctgacagcccttcaaaccaatatactccccatctctctcccctggttcaatggcaagatctttg

SEQ ID NO: 1025179 - DNA, 120 bp, Artificial Sequence
  ENSG00000281332_9 (sequence is synthesized)
gccaactgctttctactcggaccttgctattatttgctactaggcacccacaaaccgttgcttgttaaactgatctccttcaagacttaagaaaagcgccatgcggctccctcccagggc

SEQ ID NO: 1025180 - DNA, 120 bp, Artificial Sequence
  ENSG00000281332_10 (sequence is synthesized)
tctcctgccctctcctcaccgatgccaagagtggtcctgctggagaactgccgcgcctgcagttcgtgcaccttttcccgaagctgcgccaggaaattatggacgaactggaaggggccg

SEQ ID NO: 1025181 - DNA, 120 bp, Artificial Sequence
  ENSG00000281332_11 (sequence is synthesized)
agggtcttggcccccaactgtagctccaagcctttttgtgctttcagatttcggatcctccgcgtggagcaccttggggcgccccttggcaggttcccgccgcatagggccgacttttcc

SEQ ID NO: 1025182 - DNA, 120 bp, Artificial Sequence
  ENSG00000281332_12 (sequence is synthesized)
acctctggctccagggcgggaagattgtagcggctttgagcttactacttgttttcttataatccctggcggagctgggtcaatttcaggcacagcccagctcagtcaggcgaggtccag

SEQ ID NO: 1025183 - DNA, 120 bp, Artificial Sequence
  ENSG00000281332_13 (sequence is synthesized)
aaaggcctgacttgcctggcagcctcaacggacttgtccccgcagcccttgcggacctcctggtcgtcatggcgactgtgaaatgtggggtggggagcatgcgttcgaagccatttgcgc

SEQ ID NO: 1025184 - DNA, 120 bp, Artificial Sequence
  ENSG00000281332_14 (sequence is synthesized)
gggcagtccctgcgtgtccccccacgtgctccccagcactcgcaggacccccgcctccgagcttccctgagcgtgcagcttccagtgagggcagccccacgcacagccccccacaccctc

SEQ ID NO: 1025185 - DNA, 120 bp, Artificial Sequence
  ENSG00000281332_15 (sequence is synthesized)
cccaacgccttcagcccccggtgcgcgtagtccccaagcccacacgtgcactctccaccttgcggcagctgcacgtacagccccccacacgctcccagccccactggcgcagaacccatc

SEQ ID NO: 1025186 - DNA, 120 bp, Artificial Sequence
  ENSG00000281332_16 (sequence is synthesized)
accgctcgcccttcacgcgcttcactgggagtgcagcccccaccccgagcgcgcagctccacgcagcctctccacactctccccagcgcctgcagcacccccagtgcgcacagctctgcc

SEQ ID NO: 1025187 - DNA, 120 bp, Artificial Sequence
  ENSG00000281332_17 (sequence is synthesized)
agtcgcttccccgcgtgccgcccctgcaccacttcgggccataaccttgctggcgactaagtctgaagaacttcccgtgatttaattcttttcttcgagtttagtcttagctttgacatt

SEQ ID NO: 1025188 - DNA, 120 bp, Artificial Sequence
  ENSG00000281332_18 (sequence is synthesized)
ttaaccaaaaggttacacgttaatttatggtatgaggtcaccacttctcctattgtccttctcagtttctccccaacctctcctattccctattttataagacaggagaaaagggagaaa

SEQ ID NO: 1025189 - DNA, 120 bp, Artificial Sequence
  ENSG00000281332_19 (sequence is synthesized)
gcaaaaagttagaaagaaacagaagtaagataaatagctggaggaccttggcaccaccacctggccctggtggctaaaataataataatattattaacccctgaccaaaactattggtgt

SEQ ID NO: 1025190 - DNA, 72 bp, Artificial Sequence
  ENSG00000281332_20 (sequence is synthesized)
aataataatattattaacccctgaccaaaactattggtgttatgtgtaaattccagacactgtatgagaaag

SEQ ID NO: 1025191 - DNA, 90 bp, Artificial Sequence
  ENSG00000281332_21 (sequence is synthesized)
gtacctaggaatttctttttcggggagctccgctcttaagacacgagtctgccgacgctcccggccgaataaaaaacctcttccttcttt

SEQ ID NO: 1025192 - DNA, 120 bp, Artificial Sequence
  ENSG00000244879_0 (sequence is synthesized)
tgtttatttgagtgaacattcagctaattgttacagaatcgttgcccccattaatcttaggctgtagaatgtagacaagtaaataggcatcatcagtatgatgagagtgaagctacttaa

SEQ ID NO: 1025193 - DNA, 120 bp, Artificial Sequence
  ENSG00000244879_1 (sequence is synthesized)
tactgtggaatcaaataaaggaggaaccccttactaaaccaagagggaggaataaaatggaatgggactagagaagcaattagctttaataagggtattatggaagactttctagatgag

SEQ ID NO: 1025194 - DNA, 120 bp, Artificial Sequence
  ENSG00000244879_2 (sequence is synthesized)
aaacactagagagattgttgggtaaagaagacaatgctggaggtctacttgtgaaggccttgaatgctatgtgcagaagtcagcttctgagaaccaggaagaagatattgaaagatttta

SEQ ID NO: 1025195 - DNA, 120 bp, Artificial Sequence
  ENSG00000244879_3 (sequence is synthesized)
ttctgagaaccaggaagaagatattgaaagattttaagtagaagaatcataggattgaattcattttagacagatcactgttacacaaaaatttgaggcaggagaattgcttgaacccgg

SEQ ID NO: 1025196 - DNA, 120 bp, Artificial Sequence
  ENSG00000244879_4 (sequence is synthesized)
ggtgggtaggagtttggaaactaatgttcctgtgctaaccttcgtgtctctgtgacatgactgttgaaagacggagagtgcggaatctttggagttttaagcttgccaactgtgcggcct

SEQ ID NO: 1025197 - DNA, 120 bp, Artificial Sequence
  ENSG00000244879_5 (sequence is synthesized)
agcagaatcctgggagacggaaggacagccaagaggctaggatttacctttaagtgtccctagattcaactaggcagactgggacgggagacgctgtgaaggtaccagggaaggaacgag

SEQ ID NO: 1025198 - DNA, 120 bp, Artificial Sequence
  ENSG00000244879_6 (sequence is synthesized)
gagacagcgccaagaatttaatccaggagaattgacaagcttaaatgaaatccatattgcccactgattttgtgcagcttcagataagtaatctttctccacttagccttttgtaacaat

SEQ ID NO: 1025199 - DNA, 120 bp, Artificial Sequence
  ENSG00000244879_7 (sequence is synthesized)
tgatgtaataaaggtttgtagtctttgtgtaatttattaaagcattgtgcctaaaatagaaaaaaagcataggaaccataggctgtgttttcttttgatttaatattttcatttcttcag

SEQ ID NO: 1025200 - DNA, 120 bp, Artificial Sequence
  ENSG00000244879_8 (sequence is synthesized)
ggaaaagcttcgggagcggcgacgggaaggcagcaggaggtggtgcggggacccgaggcgcctcgtacccggccgggctgacgcggccccgctacacacaaagcgcttcagctgcacagg

SEQ ID NO: 1025201 - DNA, 120 bp, Artificial Sequence
  ENSG00000244879_9 (sequence is synthesized)
gcgctattttccgaaaatgccgcgtctggtcggcgcccaaaatccccaccgaaaagtcccccgtgctgcgcgcggagggacacatggtgtgcgagtgagtcaagctcccagcatccctcc

SEQ ID NO: 1025202 - DNA, 120 bp, Artificial Sequence
  ENSG00000244879_10 (sequence is synthesized)
cggacccggccctcttcagctcatcgcccgaggattttccgcctctgccctcgtcggcagatcctgctcctacccactccctagctgtgttcccgcggggagagaggggaaagagggtct

SEQ ID NO: 1025203 - DNA, 120 bp, Artificial Sequence
  ENSG00000244879_11 (sequence is synthesized)
gattttttaacgaagggaaagaaaatatgccatttctagcgcttcagccacacaaagaaagcggcggaatgatccgctctcggcgaccgcaagtcccggctcgcccggcgcctgcgcggc

SEQ ID NO: 1025204 - DNA, 120 bp, Artificial Sequence
  ENSG00000244879_12 (sequence is synthesized)
actgagttggtagcaggtaggtgtgaagaaaataaagtggttattgggagatttggttaactgaaaatgactgagggagatagatgtcaggtgactcccaagtgagttggtggagcagct

SEQ ID NO: 1025205 - DNA, 120 bp, Artificial Sequence
  ENSG00000244879_13 (sequence is synthesized)
aggaggatagtaatgtcttcactgagattagaaacaaaataagagaatatatgttagggaaggaagaagtctttgttttgaccatgtaaaatttgaagtgcatgtgagccaaccagtcat

SEQ ID NO: 1025206 - DNA, 120 bp, Artificial Sequence
  ENSG00000244879_14 (sequence is synthesized)
atatgtgtagtgtgcaattagatattcattcaacactgttggaagagcacctactctgtgcctggtactgttctacacactgaaataggtaaagcagcagcaaaacaaatggttcctact

SEQ ID NO: 1025207 - DNA, 120 bp, Artificial Sequence
  ENSG00000244879_15 (sequence is synthesized)
cctgttttttagagggaaacagcatataaacaagttttaaaaataagaggagagagaatatcccataaattcgtgaagaaggctgggtgcagtggctcatgccagtaatcccagcagttt

SEQ ID NO: 1025208 - DNA, 79 bp, Artificial Sequence
  ENSG00000244879_16 (sequence is synthesized)
ttagctgggcatggtggcacgctcctgtaattccagctactccggaggctgaggcaggagagtagcttgaacccaggac

SEQ ID NO: 1025209 - DNA, 120 bp, Artificial Sequence
  ENSG00000244879_17 (sequence is synthesized)
aaaaaagagtttgtgaggaaaattaaaagctgattggataaagtgttactctggggaaaagagagcaaacttttggtggttggttgatcagagatggcctcactgagaaggtattagaaa

SEQ ID NO: 1025210 - DNA, 120 bp, Artificial Sequence
  ENSG00000244879_18 (sequence is synthesized)
ggacaagaacagtgtgagaccaaagggaatagctgggcaaaggccctaaggtgaaaaatttgttgtgtttagggaatagcaaggtcagtgtatccgaaatctagtgaccaaaagaaggaa

SEQ ID NO: 1025211 - DNA, 120 bp, Artificial Sequence
  ENSG00000244879_19 (sequence is synthesized)
tgaccaaaagaaggaatgataggaggtgaagtcttcagcctcaataagaaggtgaagtgcactggaagccattgaaggatttaagaaatggagtatctggccgggcgcggtggctcacgc

SEQ ID NO: 1025212 - DNA, 84 bp, Artificial Sequence
  ENSG00000244879_20 (sequence is synthesized)
gcgcggcagcgggggtgggagctgcggacggccatgtgcgcggcggagaggccgggtggccaccgaaccttcccgcctgttctg

SEQ ID NO: 1025213 - DNA, 120 bp, Artificial Sequence
  ENSG00000244879_21 (sequence is synthesized)
agaaagaaagaacttctattttttaaatgttttttcctttcattgaactccatttatagcctttccattcagagcataaagattaaattttaaaacaaggcttggcaccctggcttatgc

SEQ ID NO: 1025214 - DNA, 85 bp, Artificial Sequence
  ENSG00000244879_22 (sequence is synthesized)
gagtaagagtacacagtcctagagcagtggtgtgcgcctgtagtcctagctacctgggaggctgaaccaggagaattgcttgagc

SEQ ID NO: 1025215 - DNA, 61 bp, Artificial Sequence
  ENSG00000244879_23 (sequence is synthesized)
agagtacacagtcctagagcagtggtgtgcgcctgtagtcctagctacctgggaggctgaa

SEQ ID NO: 1025216 - DNA, 120 bp, Artificial Sequence
  ENSG00000244879_24 (sequence is synthesized)
caaaaaaatgttttttttaaacaagaatctctcaggcatactgaaatgttgaagaggaaattatattaatatctgggacttgtttccaaatttggaattggggcagggtgtaaattgttg

SEQ ID NO: 1025217 - DNA, 120 bp, Artificial Sequence
  ENSG00000244879_25 (sequence is synthesized)
gcaatatcaaagaaacgaggagttggaatgataattgtagaagctgcatgatagatacacattctttatacttctgtatatgttgaaattttttatcaaattataattgtgtataatgac

SEQ ID NO: 1025218 - DNA, 120 bp, Artificial Sequence
  ENSG00000244879_26 (sequence is synthesized)
taattatgctttcattgtctattctgtgtggttatgttacttgctgaaattaatacataaagagtcttcaacttaaatgacttatcaagcataaatattaaaatactggatgttactaca

SEQ ID NO: 1025219 - DNA, 120 bp, Artificial Sequence
  ENSG00000244879_27 (sequence is synthesized)
agcgggggtgggagctgcggacggccatgtgcgcggcggagaggccgggtggccaccgaaccttcccgcctgttctgcggggcgtctgggcatggctttcccaacctagtaactgcaact

SEQ ID NO: 1025220 - DNA, 120 bp, Artificial Sequence
  ENSG00000244879_28 (sequence is synthesized)
aaaaaaaaaaaaaaaaaagaaatggagtatcatggactaggatagtagcagtagagatgagggaagtggatggatccaaaaagctgacctatcttgcttaccaattaaatgaggaaaggg

SEQ ID NO: 1025221 - DNA, 120 bp, Artificial Sequence
  ENSG00000244879_29 (sequence is synthesized)
ggaaagggaggaatcaatagtgatgcctaggtttggggcatgttgtctaggtggaattaattttaattacacttttaacccctagcatatccaaatattatttcacatgtgatcaacata

SEQ ID NO: 1025222 - DNA, 120 bp, Artificial Sequence
  ENSG00000244879_30 (sequence is synthesized)
aaaaattactaaatattaaaaatattttacattatctttctcataactaagcatttgaaatctggtgtgtattttatacttatagcatatctcagtacttgatttcataaaatttccagc

SEQ ID NO: 1025223 - DNA, 120 bp, Artificial Sequence
  ENSG00000244879_31 (sequence is synthesized)
tgaaaaaatagattcacgtacccaagtcgttccaagcatacttaaaagttttacggtaatcgaatcgtgtatatttttaaattttattttaaattaaagttaggattatgaattcagttc

SEQ ID NO: 1025224 - DNA, 120 bp, Artificial Sequence
  ENSG00000244879_32 (sequence is synthesized)
ctaaattagcctcatttcacttctgcatttcaagtgggacaagttattaccatattggacaatgcagtctagtgaagtagaggatagtggaaagtcagacttaaaaagttgtttagaacc

SEQ ID NO: 1025225 - DNA, 120 bp, Artificial Sequence
  ENSG00000244879_33 (sequence is synthesized)
agctctggaaggccttggatgtcagattaaaggactgagattttacccttgagtcaggcagaataatggatggtttttgaactaaggagtgacacaaggttgtgcttatgactagaagga

SEQ ID NO: 1025226 - DNA, 120 bp, Artificial Sequence
  ENSG00000244879_34 (sequence is synthesized)
ggccactaggtggccagctggtgagtcaggacacccttcagttgctttgacttcagccctgtggattcaaagtctgatttttgtcagcgctctagagcagtctcaccaaaagtgtggtcc

SEQ ID NO: 1025227 - DNA, 120 bp, Artificial Sequence
  ENSG00000244879_35 (sequence is synthesized)
acaaggcagtgccagtctgtaagccctttgttacacatccatgtcaaggcatttacagaaagtaagaatttagaaacttatagcagtttaacagactaattttatttctgtgggtctaat

SEQ ID NO: 1025228 - DNA, 120 bp, Artificial Sequence
  ENSG00000244879_36 (sequence is synthesized)
tgtgggtctaataaaaatttgagggattgtactttgcatattctttatttccctttttttgtttgttttttgtgttcgagatgggagtctttttctgtcgccaggctggagtgcagtggt

SEQ ID NO: 1025229 - DNA, 120 bp, Artificial Sequence
  ENSG00000244879_37 (sequence is synthesized)
ttacaggtgtgagccactgcacccggccgtttttttctttttctaataatttttatcatattacataaaagtacctatggtctcacagatgaagggagtcagaagaaccaaactcccaga

SEQ ID NO: 1025230 - DNA, 120 bp, Artificial Sequence
  ENSG00000244879_38 (sequence is synthesized)
atgaagggagtcagaagaaccaaactcccagaagacatataaatctaaatgccttttttactttagagtgaaaactgtaatagctaaattataatggacatctgctcattttctccctcc

SEQ ID NO: 1025231 - DNA, 120 bp, Artificial Sequence
  ENSG00000244879_39 (sequence is synthesized)
atgtagacatggaaagctacacggaaataaccgagtttatagtagctaccatatattaaacgtttcctgtatgccagccactgtgcaaagcatattatatatattgtctcatttaatcct

SEQ ID NO: 1025232 - DNA, 120 bp, Artificial Sequence
  ENSG00000244879_40 (sequence is synthesized)
cacaactctgtaaaataagtattgtttgccccatttttccaatgaagaaaccgaggctaaaataggttgaataacttacctaaattcaccatcctcaaaggtgttaaagacaggattcca

SEQ ID NO: 1025233 - DNA, 120 bp, Artificial Sequence
  ENSG00000244879_41 (sequence is synthesized)
gtacaggtctctcatttccttcatgattaggaatactactttgaaatgagagacctgtactgtatctgttaattccaaattccctggcataaagactcagtacattgtttaaagagaatg

SEQ ID NO: 1025234 - DNA, 120 bp, Artificial Sequence
  ENSG00000244879_42 (sequence is synthesized)
catgaagttaactgcattaccttttggagggttcatttgtgaatttggggccaaagtaaggggagttactggtattctaatagcatcaaacaaatgaattcatttcatcttttggggagg

SEQ ID NO: 1025235 - DNA, 120 bp, Artificial Sequence
  ENSG00000244879_43 (sequence is synthesized)
tcatcttttggggaggtggagggaataaggtctcaccttgtcgcccatgcaggctggaaggccgtgatgtgatctcagctcactgcagcctcaacctgggctcaagcgatcctcccacct

SEQ ID NO: 1025236 - DNA, 79 bp, Artificial Sequence
  ENSG00000244879_44 (sequence is synthesized)
actacaggtgcacaccaccacgcccagctcatttttgtatgttttgtagagactgtgttttgccacgttgcccaggcta

SEQ ID NO: 1025237 - DNA, 120 bp, Artificial Sequence
  ENSG00000244879_45 (sequence is synthesized)
tcccaaagtgctgggattacagatgtaatccaccacacccagccaaatgcattcatgtctacaatagaaatacatctctttgctgctatcttgaatttgtagactcccacaaatcaataa

SEQ ID NO: 1025238 - DNA, 120 bp, Artificial Sequence
  ENSG00000244879_46 (sequence is synthesized)
agactcccacaaatcaataaaaaagaagacatccaataaaaaaatgggtagaggccaggcagtggctaacacctgtaatccaagcactttaggaggcccaggcaggcagatcacttgagg

SEQ ID NO: 1025239 - DNA, 120 bp, Artificial Sequence
  ENSG00000244879_47 (sequence is synthesized)
cacaaaaaagggtatctaaatattagtttcttaaaaaatataaaaggggcgtgtagatggccgataaacatgtaaaagatactcaactaatttaatcattagagaaatgcaaattaaaac

SEQ ID NO: 1025240 - DNA, 120 bp, Artificial Sequence
  ENSG00000244879_48 (sequence is synthesized)
ctaaatgatattttaatctcacatccaacagaatggctaaaatggaaaacccagaaaatgccagatgttggtcaagagttggagtaactgaaactacacagctgctggaaatgtatattg

SEQ ID NO: 1025241 - DNA, 120 bp, Artificial Sequence
  ENSG00000244879_49 (sequence is synthesized)
gtataaccactttggaaaatgggaagttcaacaaacaggcaaaccaatctagatttagggatatatgtttaggtagtaaaagtataaagaaaagaaatagttagctttgcagggagtagt

SEQ ID NO: 1025242 - DNA, 120 bp, Artificial Sequence
  ENSG00000244879_50 (sequence is synthesized)
gcttgggaggtaataggtgcttctggagtgctgttgatgttctgttcctaagtagggtgctatggcttgagtttggtttgtctgaccctaccaagtctcatgttaaaatttcatccccag

SEQ ID NO: 1025243 - DNA, 120 bp, Artificial Sequence
  ENSG00000244879_51 (sequence is synthesized)
tgttggaggtgaggcctggtgggaagggttgtgggagtggatttctcatgagtggcttcgtattctgtaaggagtgagttcattaagagactggcacctcctctctcctttctctcgcca

SEQ ID NO: 1025244 - DNA, 120 bp, Artificial Sequence
  ENSG00000244879_52 (sequence is synthesized)
tgtgatctctgcatatgtcatctcctgtctgccttccaccgtgagcagcctgaagccctcactggaagcagatactgctaccatgcttcttgtacagcctgcaaaaccgtgagccaaata

SEQ ID NO: 1025245 - DNA, 120 bp, Artificial Sequence
  ENSG00000244879_53 (sequence is synthesized)
agccgaacattctaagacactgggattacatgagtgttagcactctatgacttaatgagaagtaggttttttggagaaaaatgtactttcagtatgtatattatatatttcatggttatt

SEQ ID NO: 1025246 - DNA, 120 bp, Artificial Sequence
  ENSG00000244879_54 (sequence is synthesized)
tttaaaactcgtgagcaatgctggatacacactaccaactattacttccctgactgagccaatttttctgtaaatgcatcacaaatgtgaaagataaggtaggcctgaattctggggaat

SEQ ID NO: 1025247 - DNA, 120 bp, Artificial Sequence
  ENSG00000244879_55 (sequence is synthesized)
gacaatggtgaaggaaaggcgagacaggtgcaaaagacactgcagaactcaggctcaaaatctcatccttaactccttccctcatcccaccatgttgaatcagatgtcaatagcaatttt

SEQ ID NO: 1025248 - DNA, 120 bp, Artificial Sequence
  ENSG00000244879_56 (sequence is synthesized)
atatggcattttttaagcttgcaaaaagttataaacagaaaatgttcattttatcactccatcacagacgaaaaacatgaaattaagctaggaaacatgttcaggtgattagagtagata

SEQ ID NO: 1025249 - DNA, 120 bp, Artificial Sequence
  ENSG00000244879_57 (sequence is synthesized)
gaacatagactaaaaaccagtgaacttataaaaaaaaatcccatgatgtggacaaaaaaaaagaacttgtggctcctcactccaactcctgtgactctctcaccttacccccactgcctt

SEQ ID NO: 1025250 - DNA, 120 bp, Artificial Sequence
  ENSG00000244879_58 (sequence is synthesized)
caagttttttgtagaaagagaaattttgtatggattgagtttaagatgatgccagaatatcaaggtagaattattaaacacacaaaagctaaggtttggtactctgaaaaaaggtcagaa

SEQ ID NO: 1025251 - DNA, 120 bp, Artificial Sequence
  ENSG00000244879_59 (sequence is synthesized)
ttggtgatagaaaattagaagttacccatccatagaagggtaataaagccatgagagtgaaggaaaccagtgagagagaatattgagaaaagtactgaaggacagagaaggagaagcgaa

SEQ ID NO: 1025252 - DNA, 120 bp, Artificial Sequence
  ENSG00000244879_60 (sequence is synthesized)
ggaggaaagcaaatcagcatttattgagcatctgttaaactgtatggcagctgctctacatttactatctcatttattcctttccatttccaaggtagccaattttagcctcacttgata

SEQ ID NO: 1025253 - DNA, 120 bp, Artificial Sequence
  ENSG00000244879_61 (sequence is synthesized)
gactggctttgtagactcaaaaagcagtaaaaagaaccagcattcaaaaccagcttgactccagtttattctgtgtactacaccattcctggagaggctaagtgtgtgttacagaagacc

SEQ ID NO: 1025254 - DNA, 120 bp, Artificial Sequence
  ENSG00000244879_62 (sequence is synthesized)
atggggagaatttagctcaagtaaagataagccctgggaaaagaccattggatttttgtgttttttgactaaggggttcccataacatagcagcacctgcactcctgtcttaacgcgtct

SEQ ID NO: 1025255 - DNA, 120 bp, Artificial Sequence
  ENSG00000244879_63 (sequence is synthesized)
gtgaatgtgggtaatccagacaaatgtaaacgcctgtcaataaggggggaaaaagtcaagatagtaaatgtaaaaattagtataatgaaaacaaaccagttattaaattctatctagata

SEQ ID NO: 1025256 - DNA, 120 bp, Artificial Sequence
  ENSG00000244879_64 (sequence is synthesized)
ctcttgccaaccaagcacttcgaatctcaaggcttgaatgaagaatagctttttttttctctgagacacggtcttactctgttgcccaagctggcgtgcagtggcaagatctcagctcac

SEQ ID NO: 1025257 - DNA, 90 bp, Artificial Sequence
  ENSG00000244879_65 (sequence is synthesized)
ttcccattagcagctagaactacaagcgcagccaccatgcctggctaattctgtgtatttctggtagagatggggttttgccatgttgcc

SEQ ID NO: 1025258 - DNA, 86 bp, Artificial Sequence
  ENSG00000244879_66 (sequence is synthesized)
gcgagacaacattagccaccacgcctggcctgtaaacaggaataactttcttgctgtgtgattcaatgttatttactgctttgttc

SEQ ID NO: 1025259 - DNA, 120 bp, Artificial Sequence
  ENSG00000244879_67 (sequence is synthesized)
tttcttgctgtgtgattcaatgttatttactgctttgttcatgtactgcctatgttgattatcaccagtggtatggatcctgcacattgggaaacactgcagtgttatttaattttgttc

SEQ ID NO: 1025260 - DNA, 120 bp, Artificial Sequence
  ENSG00000244879_68 (sequence is synthesized)
actgtgtttacagtgcagttttagtcacctgaaattctaagagaaaagatcaatatggttttgccaatcaaaggtcattaatacttggaatgaaagataacttatcctggtgatgaacac

SEQ ID NO: 1025261 - DNA, 120 bp, Artificial Sequence
  ENSG00000244879_69 (sequence is synthesized)
atgccttttgaaaagcatcagtatctccttaaaatgtataaactactgtaatcaatgaggaagactttttcttatcagatttattaaactcatttaccatacaaatagcattataacatt

SEQ ID NO: 1025262 - DNA, 120 bp, Artificial Sequence
  ENSG00000244879_70 (sequence is synthesized)
cactgctgaaaatttttcactttgttgggtgagcatctcaccctatctccatttgtctccctgctcgtgagttctagagaagaccaccagtaagcaagtgaaattctttggccaagtcac

SEQ ID NO: 1025263 - DNA, 120 bp, Artificial Sequence
  ENSG00000244879_71 (sequence is synthesized)
tgatatcagaattccccagaggcaccaagaactttgatttccagaaattgtttaggcacagccactcattcaaccttatattttgtatctcagagttaaggttgcatttgggctacctag

SEQ ID NO: 1025264 - DNA, 120 bp, Artificial Sequence
  ENSG00000244879_72 (sequence is synthesized)
cctgtagactctattttaagacaagcaggcatttaatagttgttggttggttgattagagcttctagccaatttttaaaaattatttgaatagataaggcattcactggttcaaaaaaaa

SEQ ID NO: 1025265 - DNA, 120 bp, Artificial Sequence
  ENSG00000244879_73 (sequence is synthesized)
aggcattcactggttcaaaaaaaattttttaatcatcacttccacccatccagttatcactactgaagtaacctctactttttgtttcttgcatattctttctttctttttttttttttt

SEQ ID NO: 1025266 - DNA, 90 bp, Artificial Sequence
  ENSG00000244879_74 (sequence is synthesized)
ttttttttttttttttttttttgagacatagtctcgatctgtcgcccaggctggggtgcagtggcgtgatattgggtcactgcaacctcc

SEQ ID NO: 1025267 - DNA, 68 bp, Artificial Sequence
  ENSG00000244879_75 (sequence is synthesized)
ttgcctcggcctcccaaagtggagttacaggcatgaatcacagtgcccagcctcttgtatatttttcc

SEQ ID NO: 1025268 - DNA, 120 bp, Artificial Sequence
  ENSG00000244879_76 (sequence is synthesized)
aggcatgaatcacagtgcccagcctcttgtatatttttccacatacacattttttcatacatacatatgtgagaataaatgttcttattccccctcccccatttttatgtaggagaaaat

SEQ ID NO: 1025269 - DNA, 120 bp, Artificial Sequence
  ENSG00000244879_77 (sequence is synthesized)
accgtacaaacccttctgcacattggacttgagatggcttttccatctcagtgcaaaaaggcgacattttttcttaaccactgcacattatttggttatcacccagtttagggacattga

SEQ ID NO: 1025270 - DNA, 120 bp, Artificial Sequence
  ENSG00000244879_78 (sequence is synthesized)
gtttcttttgtactctagtgcttgaatgattatccttggatgtacatctttccttgtatatttaaatatgtctcatctcagtttccacaggtggaattgctctgcaaaaaggcatatatg

SEQ ID NO: 1025271 - DNA, 120 bp, Artificial Sequence
  ENSG00000244879_79 (sequence is synthesized)
tatttttaatttgccctctatgtactaaatgttttcaccccagcattgctgatggattagagtgctgccaagtttttggatttttacctaccagcttttgaagggcagattatttcaagt

SEQ ID NO: 1025272 - DNA, 120 bp, Artificial Sequence
  ENSG00000244879_80 (sequence is synthesized)
cttaattaatattttcaggaacagtaacaatatcatttggttaaattgagagaaatggggttcagttgacagaatttgttcaggatatagaatttttctgctgctgctcctgcagctaca

SEQ ID NO: 1025273 - DNA, 120 bp, Artificial Sequence
  ENSG00000244879_81 (sequence is synthesized)
cacctacaactagtaaaaacatggttgcttaggttgtcaaatgaccagcaaacctggagaggaacctggaatgactataaacagctccacccacactttttttgggcaaatgtgcaagct

SEQ ID NO: 1025274 - DNA, 120 bp, Artificial Sequence
  ENSG00000244879_82 (sequence is synthesized)
tagtagaatctaaaaggatacttcagcctttgtttgagttgcagaaaattaacatggtaaggaggaaaaaatcactaatttttttaaaaagttccctgatacaggaactgaaaatgattt

SEQ ID NO: 1025275 - DNA, 87 bp, Artificial Sequence
  ENSG00000244879_83 (sequence is synthesized)
atgcctgtagtgacggctactcatcctgaggtgggaagattgcttgaggccaggaggttgaggctgcagtgagccaggatcacacca

SEQ ID NO: 1025276 - DNA, 120 bp, Artificial Sequence
  ENSG00000244879_84 (sequence is synthesized)
ggccaggaggttgaggctgcagtgagccaggatcacaccactgcaccagcctgggctacagagtaagactcaagaaaaaaaaaagatgtttaattaatcttgcttcagtgctgaggtggt

SEQ ID NO: 1025277 - DNA, 120 bp, Artificial Sequence
  ENSG00000244879_85 (sequence is synthesized)
acagggagggagaaagggatattgggctatgaattccatctaaactggggatttttatcagggtgtgaagaaagattttcaggaataattatctgagttacttggagtaaaagtagcagg

SEQ ID NO: 1025278 - DNA, 120 bp, Artificial Sequence
  ENSG00000244879_86 (sequence is synthesized)
aggaggaaaagagatatggcctgtgggtctctgacttgccaaacttcttattcattttacaaatcatgatttctagagcatcttaatctttgaggcccagctgcttggaagttgcataat

SEQ ID NO: 1025279 - DNA, 120 bp, Artificial Sequence
  ENSG00000244879_87 (sequence is synthesized)
ctctatacttcagttcccccctataaaatggggaatatgatagaatctaccttgtatttgagaggactaaataaatataaagtgcttagaaaagtaaggactcaactactagtaataatt

SEQ ID NO: 1025280 - DNA, 120 bp, Artificial Sequence
  ENSG00000244879_88 (sequence is synthesized)
attttgacatgtttaagtaatcagtactatctggaaaactgtgctaatagtgcctgatctacacaaatttaagtgactataccccttttttgagtcagagtctcactacgttacccaggc

SEQ ID NO: 1025281 - DNA, 90 bp, Artificial Sequence
  ENSG00000244879_89 (sequence is synthesized)
accccttttttgagtcagagtctcactacgttacccaggctggagtacagtggtacgatctctgctcagtgcagagcctcagcctcccaa

SEQ ID NO: 1025282 - DNA, 120 bp, Artificial Sequence
  ENSG00000244879_90 (sequence is synthesized)
catgttggccaggctggcctcaaactctggacttcaagtgatcacctgcctcagccttctaaggtgctaggattataggcttgagccactgcagccaccactctgtatatctcttttgaa

SEQ ID NO: 1025283 - DNA, 120 bp, Artificial Sequence
  ENSG00000244879_91 (sequence is synthesized)
ctgcagccaccactctgtatatctcttttgaaagtcataagcaatatctttggaaaaaacacttaaggttatttatttagaggtagtgtctctctgtaccccagctggagtacagtggca

SEQ ID NO: 1025284 - DNA, 120 bp, Artificial Sequence
  ENSG00000244879_92 (sequence is synthesized)
ccagctggagtacagtggcacagtatcacagcttgctgcagcatcaaattcctaggctcaagccatccttccaccggacatgttggcgtgcacctcctgagtagctgggactacagttgt

SEQ ID NO: 1025285 - DNA, 120 bp, Artificial Sequence
  ENSG00000244879_93 (sequence is synthesized)
ttagtagagacagggttttgccatgttagacaggctggtctggaacacctgacctccggtgatctgcccacctcagtctcccaaagggctgggattaaaggcatgagccaccgcactcag

SEQ ID NO: 1025286 - DNA, 120 bp, Artificial Sequence
  ENSG00000244879_94 (sequence is synthesized)
caccgcactcagccacttaaggcttttaaaaaatcaattaatttctaaatggttttggacttttgactccttataagtgttaagatattttggtatcacttttttccttccaaaaaaaaa

SEQ ID NO: 1025287 - DNA, 120 bp, Artificial Sequence
  ENSG00000244879_95 (sequence is synthesized)
tccaaaaaaaaaaaaaaaaccaactaggtgatatctattcctcagtcaaagttaattaaaactattttggatcccagcactttgggaagccaaaggcaggcagatcacctgaggtcagga

SEQ ID NO: 1025288 - DNA, 120 bp, Artificial Sequence
  ENSG00000244879_96 (sequence is synthesized)
tgtcatgatacctgttgagataactgctgaatagatgggtaatacacagtctagggcatggtatcaaaagaacttgtcactgtacatatcggaaatggtaaaaatatgttttgccgtttt

SEQ ID NO: 1025289 - DNA, 120 bp, Artificial Sequence
  ENSG00000244879_97 (sequence is synthesized)
cacgaattcattcatttttcatgtttcatgaattcattctttttaaaaaaaaaaaatcctgctaattctctgtttctcttgcttttctcctttatgactaagttttcctcattatgggtt

SEQ ID NO: 1025290 - DNA, 120 bp, Artificial Sequence
  ENSG00000244879_98 (sequence is synthesized)
accccacattactgcttacgaagacatctctttagtcagaaaacagtagcttggttcagttctagcttcattgttaagctcataggtaaatctggcaaatggctagaaacagtcacatgt

SEQ ID NO: 1025291 - DNA, 120 bp, Artificial Sequence
  ENSG00000244879_99 (sequence is synthesized)
ttgcttgtccttaatgctctcaccttttcccagctatttggatgtatatacttttgcttactttgtagtgtaccaacttaatatatgttatagactaaatgtttatgtcctcccaaactt

SEQ ID NO: 1025292 - DNA, 120 bp, Artificial Sequence
  ENSG00000244879_100 (sequence is synthesized)
catattttggaagccagacatggtaactcacacctgtaaacctaacactttgggaggcctaggtgggaggattgcttgagtccgggagttcagaaccagcctggacaacatagtgagacc

SEQ ID NO: 1025293 - DNA, 71 bp, Artificial Sequence
  ENSG00000244879_101 (sequence is synthesized)
tgcctgagcccagaagtttgagactgcagtgagccatgatattgccagcctgggtgacagagcaagacctt

SEQ ID NO: 1025294 - DNA, 86 bp, Artificial Sequence
  ENSG00000244879_102 (sequence is synthesized)
gcccagaagtttgagactgcagtgagccatgatattggaaaaaaaaaaaaaattgccaattgcgatggctcacgcctgtaatccca
